United States Patent Application Publication US 2025/0333448 A1 - sequence listing, part 12

SEQ ID NO: 245930 - protein, 15 aa, Artificial Sequence
  Description of Artificial Sequence: Synthetic peptide
  Seed: LRMKWMMAMKYPITA
LRMKYMMEMGYPPTA

SEQ ID NO: 245931 - protein, 15 aa, Artificial Sequence
  Description of Artificial Sequence: Synthetic peptide
  Seed: LRMKWMMAMKYPITA
LRMKYMMEMGYPQTA

SEQ ID NO: 245932 - protein, 15 aa, Artificial Sequence
  Description of Artificial Sequence: Synthetic peptide
  Seed: LRMKWMMAMKYPITA
LRMKYMMEMGYPRTA

SEQ ID NO: 245933 - protein, 15 aa, Artificial Sequence
  Description of Artificial Sequence: Synthetic peptide
  Seed: LRMKWMMAMKYPITA
LRMKYMMEMGYPSTA

SEQ ID NO: 245934 - protein, 15 aa, Artificial Sequence
  Description of Artificial Sequence: Synthetic peptide
  Seed: LRMKWMMAMKYPITA
LRMKYMMEMGYPTTA

SEQ ID NO: 245935 - protein, 15 aa, Artificial Sequence
  Description of Artificial Sequence: Synthetic peptide
  Seed: LRMKWMMAMKYPITA
LRMKYMMEMGYPVTA

SEQ ID NO: 245936 - protein, 15 aa, Artificial Sequence
  Description of Artificial Sequence: Synthetic peptide
  Seed: LRMKWMMAMKYPITA
LRMKYMMEMGYPWTA

SEQ ID NO: 245937 - protein, 15 aa, Artificial Sequence
  Description of Artificial Sequence: Synthetic peptide
  Seed: LRMKWMMAMKYPITA
LRMKYMMEMGYPYTA

SEQ ID NO: 245938 - protein, 15 aa, Artificial Sequence
  Description of Artificial Sequence: Synthetic peptide
  Seed: LRMKWMMAMKYPITA
LRMKYMMEMHYPATA

SEQ ID NO: 245939 - protein, 15 aa, Artificial Sequence
  Description of Artificial Sequence: Synthetic peptide
  Seed: LRMKWMMAMKYPITA
LRMKYMMEMHYPITA

SEQ ID NO: 245940 - protein, 15 aa, Artificial Sequence
  Description of Artificial Sequence: Synthetic peptide
  Seed: LRMKWMMAMKYPITA
LRMKYMMEMHYPLTA

SEQ ID NO: 245941 - protein, 15 aa, Artificial Sequence
  Description of Artificial Sequence: Synthetic peptide
  Seed: LRMKWMMAMKYPITA
LRMKYMMEMHYPMTA

SEQ ID NO: 245942 - protein, 15 aa, Artificial Sequence
  Description of Artificial Sequence: Synthetic peptide
  Seed: LRMKWMMAMKYPITA
LRMKYMMEMHYPVTA

SEQ ID NO: 245943 - protein, 15 aa, Artificial Sequence
  Description of Artificial Sequence: Synthetic peptide
  Seed: LRMKWMMAMKYPITA
LRMKYMMEMIYPATA

SEQ ID NO: 245944 - protein, 15 aa, Artificial Sequence
  Description of Artificial Sequence: Synthetic peptide
  Seed: LRMKWMMAMKYPITA
LRMKYMMEMIYPCTA

SEQ ID NO: 245945 - protein, 15 aa, Artificial Sequence
  Description of Artificial Sequence: Synthetic peptide
  Seed: LRMKWMMAMKYPITA
LRMKYMMEMIYPDTA

SEQ ID NO: 245946 - protein, 15 aa, Artificial Sequence
  Description of Artificial Sequence: Synthetic peptide
  Seed: LRMKWMMAMKYPITA
LRMKYMMEMIYPETA

SEQ ID NO: 245947 - protein, 15 aa, Artificial Sequence
  Description of Artificial Sequence: Synthetic peptide
  Seed: LRMKWMMAMKYPITA
LRMKYMMEMIYPFTA

SEQ ID NO: 245948 - protein, 15 aa, Artificial Sequence
  Description of Artificial Sequence: Synthetic peptide
  Seed: LRMKWMMAMKYPITA
LRMKYMMEMIYPGTA

SEQ ID NO: 245949 - protein, 15 aa, Artificial Sequence
  Description of Artificial Sequence: Synthetic peptide
  Seed: LRMKWMMAMKYPITA
LRMKYMMEMIYPHTA

SEQ ID NO: 245950 - protein, 15 aa, Artificial Sequence
  Description of Artificial Sequence: Synthetic peptide
  Seed: LRMKWMMAMKYPITA
LRMKYMMEMIYPITA

SEQ ID NO: 245951 - protein, 15 aa, Artificial Sequence
  Description of Artificial Sequence: Synthetic peptide
  Seed: LRMKWMMAMKYPITA
LRMKYMMEMIYPLTA

SEQ ID NO: 245952 - protein, 15 aa, Artificial Sequence
  Description of Artificial Sequence: Synthetic peptide
  Seed: LRMKWMMAMKYPITA
LRMKYMMEMIYPMTA

SEQ ID NO: 245953 - protein, 15 aa, Artificial Sequence
  Description of Artificial Sequence: Synthetic peptide
  Seed: LRMKWMMAMKYPITA
LRMKYMMEMIYPNTA

SEQ ID NO: 245954 - protein, 15 aa, Artificial Sequence
  Description of Artificial Sequence: Synthetic peptide
  Seed: LRMKWMMAMKYPITA
LRMKYMMEMIYPPTA

SEQ ID NO: 245955 - protein, 15 aa, Artificial Sequence
  Description of Artificial Sequence: Synthetic peptide
  Seed: LRMKWMMAMKYPITA
LRMKYMMEMIYPQTA

SEQ ID NO: 245956 - protein, 15 aa, Artificial Sequence
  Description of Artificial Sequence: Synthetic peptide
  Seed: LRMKWMMAMKYPITA
LRMKYMMEMIYPSTA

SEQ ID NO: 245957 - protein, 15 aa, Artificial Sequence
  Description of Artificial Sequence: Synthetic peptide
  Seed: LRMKWMMAMKYPITA
LRMKYMMEMIYPTTA

SEQ ID NO: 245958 - protein, 15 aa, Artificial Sequence
  Description of Artificial Sequence: Synthetic peptide
  Seed: LRMKWMMAMKYPITA
LRMKYMMEMIYPVTA

SEQ ID NO: 245959 - protein, 15 aa, Artificial Sequence
  Description of Artificial Sequence: Synthetic peptide
  Seed: LRMKWMMAMKYPITA
LRMKYMMEMKYPATA

SEQ ID NO: 245960 - protein, 15 aa, Artificial Sequence
  Description of Artificial Sequence: Synthetic peptide
  Seed: LRMKWMMAMKYPITA
LRMKYMMEMKYPSTA

SEQ ID NO: 245961 - protein, 15 aa, Artificial Sequence
  Description of Artificial Sequence: Synthetic peptide
  Seed: LRMKWMMAMKYPITA
LRMKYMMEMLYPATA

SEQ ID NO: 245962 - protein, 15 aa, Artificial Sequence
  Description of Artificial Sequence: Synthetic peptide
  Seed: LRMKWMMAMKYPITA
LRMKYMMEMLYPGTA

SEQ ID NO: 245963 - protein, 15 aa, Artificial Sequence
  Description of Artificial Sequence: Synthetic peptide
  Seed: LRMKWMMAMKYPITA
LRMKYMMEMLYPITA

SEQ ID NO: 245964 - protein, 15 aa, Artificial Sequence
  Description of Artificial Sequence: Synthetic peptide
  Seed: LRMKWMMAMKYPITA
LRMKYMMEMLYPLTA

SEQ ID NO: 245965 - protein, 15 aa, Artificial Sequence
  Description of Artificial Sequence: Synthetic peptide
  Seed: LRMKWMMAMKYPITA
LRMKYMMEMLYPMTA

SEQ ID NO: 245966 - protein, 15 aa, Artificial Sequence
  Description of Artificial Sequence: Synthetic peptide
  Seed: LRMKWMMAMKYPITA
LRMKYMMEMLYPNTA

SEQ ID NO: 245967 - protein, 15 aa, Artificial Sequence
  Description of Artificial Sequence: Synthetic peptide
  Seed: LRMKWMMAMKYPITA
LRMKYMMEMLYPSTA

SEQ ID NO: 245968 - protein, 15 aa, Artificial Sequence
  Description of Artificial Sequence: Synthetic peptide
  Seed: LRMKWMMAMKYPITA
LRMKYMMEMLYPTTA

SEQ ID NO: 245969 - protein, 15 aa, Artificial Sequence
  Description of Artificial Sequence: Synthetic peptide
  Seed: LRMKWMMAMKYPITA
LRMKYMMEMLYPVTA

SEQ ID NO: 245970 - protein, 15 aa, Artificial Sequence
  Description of Artificial Sequence: Synthetic peptide
  Seed: LRMKWMMAMKYPITA
LRMKYMMEMMYPATA

SEQ ID NO: 245971 - protein, 15 aa, Artificial Sequence
  Description of Artificial Sequence: Synthetic peptide
  Seed: LRMKWMMAMKYPITA
LRMKYMMEMMYPCTA

SEQ ID NO: 245972 - protein, 15 aa, Artificial Sequence
  Description of Artificial Sequence: Synthetic peptide
  Seed: LRMKWMMAMKYPITA
LRMKYMMEMMYPGTA

SEQ ID NO: 245973 - protein, 15 aa, Artificial Sequence
  Description of Artificial Sequence: Synthetic peptide
  Seed: LRMKWMMAMKYPITA
LRMKYMMEMMYPITA

SEQ ID NO: 245974 - protein, 15 aa, Artificial Sequence
  Description of Artificial Sequence: Synthetic peptide
  Seed: LRMKWMMAMKYPITA
LRMKYMMEMMYPLTA

SEQ ID NO: 245975 - protein, 15 aa, Artificial Sequence
  Description of Artificial Sequence: Synthetic peptide
  Seed: LRMKWMMAMKYPITA
LRMKYMMEMMYPMTA

SEQ ID NO: 245976 - protein, 15 aa, Artificial Sequence
  Description of Artificial Sequence: Synthetic peptide
  Seed: LRMKWMMAMKYPITA
LRMKYMMEMMYPNTA

SEQ ID NO: 245977 - protein, 15 aa, Artificial Sequence
  Description of Artificial Sequence: Synthetic peptide
  Seed: LRMKWMMAMKYPITA
LRMKYMMEMMYPSTA

SEQ ID NO: 245978 - protein, 15 aa, Artificial Sequence
  Description of Artificial Sequence: Synthetic peptide
  Seed: LRMKWMMAMKYPITA
LRMKYMMEMMYPTTA

SEQ ID NO: 245979 - protein, 15 aa, Artificial Sequence
  Description of Artificial Sequence: Synthetic peptide
  Seed: LRMKWMMAMKYPITA
LRMKYMMEMMYPVTA

SEQ ID NO: 245980 - protein, 15 aa, Artificial Sequence
  Description of Artificial Sequence: Synthetic peptide
  Seed: LRMKWMMAMKYPITA
LRMKYMMEMNYPATA

SEQ ID NO: 245981 - protein, 15 aa, Artificial Sequence
  Description of Artificial Sequence: Synthetic peptide
  Seed: LRMKWMMAMKYPITA
LRMKYMMEMNYPCTA

SEQ ID NO: 245982 - protein, 15 aa, Artificial Sequence
  Description of Artificial Sequence: Synthetic peptide
  Seed: LRMKWMMAMKYPITA
LRMKYMMEMNYPDTA

SEQ ID NO: 245983 - protein, 15 aa, Artificial Sequence
  Description of Artificial Sequence: Synthetic peptide
  Seed: LRMKWMMAMKYPITA
LRMKYMMEMNYPETA

SEQ ID NO: 245984 - protein, 15 aa, Artificial Sequence
  Description of Artificial Sequence: Synthetic peptide
  Seed: LRMKWMMAMKYPITA
LRMKYMMEMNYPFTA

SEQ ID NO: 245985 - protein, 15 aa, Artificial Sequence
  Description of Artificial Sequence: Synthetic peptide
  Seed: LRMKWMMAMKYPITA
LRMKYMMEMNYPGTA

SEQ ID NO: 245986 - protein, 15 aa, Artificial Sequence
  Description of Artificial Sequence: Synthetic peptide
  Seed: LRMKWMMAMKYPITA
LRMKYMMEMNYPHTA

SEQ ID NO: 245987 - protein, 15 aa, Artificial Sequence
  Description of Artificial Sequence: Synthetic peptide
  Seed: LRMKWMMAMKYPITA
LRMKYMMEMNYPITA

SEQ ID NO: 245988 - protein, 15 aa, Artificial Sequence
  Description of Artificial Sequence: Synthetic peptide
  Seed: LRMKWMMAMKYPITA
LRMKYMMEMNYPLTA

SEQ ID NO: 245989 - protein, 15 aa, Artificial Sequence
  Description of Artificial Sequence: Synthetic peptide
  Seed: LRMKWMMAMKYPITA
LRMKYMMEMNYPMTA

SEQ ID NO: 245990 - protein, 15 aa, Artificial Sequence
  Description of Artificial Sequence: Synthetic peptide
  Seed: LRMKWMMAMKYPITA
LRMKYMMEMNYPNTA

SEQ ID NO: 245991 - protein, 15 aa, Artificial Sequence
  Description of Artificial Sequence: Synthetic peptide
  Seed: LRMKWMMAMKYPITA
LRMKYMMEMNYPSTA

SEQ ID NO: 245992 - protein, 15 aa, Artificial Sequence
  Description of Artificial Sequence: Synthetic peptide
  Seed: LRMKWMMAMKYPITA
LRMKYMMEMNYPTTA

SEQ ID NO: 245993 - protein, 15 aa, Artificial Sequence
  Description of Artificial Sequence: Synthetic peptide
  Seed: LRMKWMMAMKYPITA
LRMKYMMEMNYPVTA

SEQ ID NO: 245994 - protein, 15 aa, Artificial Sequence
  Description of Artificial Sequence: Synthetic peptide
  Seed: LRMKWMMAMKYPITA
LRMKYMMEMPYPATA

SEQ ID NO: 245995 - protein, 15 aa, Artificial Sequence
  Description of Artificial Sequence: Synthetic peptide
  Seed: LRMKWMMAMKYPITA
LRMKYMMEMPYPCTA

SEQ ID NO: 245996 - protein, 15 aa, Artificial Sequence
  Description of Artificial Sequence: Synthetic peptide
  Seed: LRMKWMMAMKYPITA
LRMKYMMEMPYPDTA

SEQ ID NO: 245997 - protein, 15 aa, Artificial Sequence
  Description of Artificial Sequence: Synthetic peptide
  Seed: LRMKWMMAMKYPITA
LRMKYMMEMPYPETA

SEQ ID NO: 245998 - protein, 15 aa, Artificial Sequence
  Description of Artificial Sequence: Synthetic peptide
  Seed: LRMKWMMAMKYPITA
LRMKYMMEMPYPFTA

SEQ ID NO: 245999 - protein, 15 aa, Artificial Sequence
  Description of Artificial Sequence: Synthetic peptide
  Seed: LRMKWMMAMKYPITA
LRMKYMMEMPYPGTA

SEQ ID NO: 246000 - protein, 15 aa, Artificial Sequence
  Description of Artificial Sequence: Synthetic peptide
  Seed: LRMKWMMAMKYPITA
LRMKYMMEMPYPHTA

SEQ ID NO: 246001 - protein, 15 aa, Artificial Sequence
  Description of Artificial Sequence: Synthetic peptide
  Seed: LRMKWMMAMKYPITA
LRMKYMMEMPYPITA

SEQ ID NO: 246002 - protein, 15 aa, Artificial Sequence
  Description of Artificial Sequence: Synthetic peptide
  Seed: LRMKWMMAMKYPITA
LRMKYMMEMPYPLTA

SEQ ID NO: 246003 - protein, 15 aa, Artificial Sequence
  Description of Artificial Sequence: Synthetic peptide
  Seed: LRMKWMMAMKYPITA
LRMKYMMEMPYPMTA

SEQ ID NO: 246004 - protein, 15 aa, Artificial Sequence
  Description of Artificial Sequence: Synthetic peptide
  Seed: LRMKWMMAMKYPITA
LRMKYMMEMPYPNTA

SEQ ID NO: 246005 - protein, 15 aa, Artificial Sequence
  Description of Artificial Sequence: Synthetic peptide
  Seed: LRMKWMMAMKYPITA
LRMKYMMEMPYPPTA

SEQ ID NO: 246006 - protein, 15 aa, Artificial Sequence
  Description of Artificial Sequence: Synthetic peptide
  Seed: LRMKWMMAMKYPITA
LRMKYMMEMPYPQTA

SEQ ID NO: 246007 - protein, 15 aa, Artificial Sequence
  Description of Artificial Sequence: Synthetic peptide
  Seed: LRMKWMMAMKYPITA
LRMKYMMEMPYPSTA

SEQ ID NO: 246008 - protein, 15 aa, Artificial Sequence
  Description of Artificial Sequence: Synthetic peptide
  Seed: LRMKWMMAMKYPITA
LRMKYMMEMPYPTTA

SEQ ID NO: 246009 - protein, 15 aa, Artificial Sequence
  Description of Artificial Sequence: Synthetic peptide
  Seed: LRMKWMMAMKYPITA
LRMKYMMEMPYPVTA

SEQ ID NO: 246010 - protein, 15 aa, Artificial Sequence
  Description of Artificial Sequence: Synthetic peptide
  Seed: LRMKWMMAMKYPITA
LRMKYMMEMPYPWTA

SEQ ID NO: 246011 - protein, 15 aa, Artificial Sequence
  Description of Artificial Sequence: Synthetic peptide
  Seed: LRMKWMMAMKYPITA
LRMKYMMEMPYPYTA

SEQ ID NO: 246012 - protein, 15 aa, Artificial Sequence
  Description of Artificial Sequence: Synthetic peptide
  Seed: LRMKWMMAMKYPITA
LRMKYMMEMQYPATA

SEQ ID NO: 246013 - protein, 15 aa, Artificial Sequence
  Description of Artificial Sequence: Synthetic peptide
  Seed: LRMKWMMAMKYPITA
LRMKYMMEMQYPITA

SEQ ID NO: 246014 - protein, 15 aa, Artificial Sequence
  Description of Artificial Sequence: Synthetic peptide
  Seed: LRMKWMMAMKYPITA
LRMKYMMEMQYPLTA

SEQ ID NO: 246015 - protein, 15 aa, Artificial Sequence
  Description of Artificial Sequence: Synthetic peptide
  Seed: LRMKWMMAMKYPITA
LRMKYMMEMQYPMTA

SEQ ID NO: 246016 - protein, 15 aa, Artificial Sequence
  Description of Artificial Sequence: Synthetic peptide
  Seed: LRMKWMMAMKYPITA
LRMKYMMEMQYPVTA

SEQ ID NO: 246017 - protein, 15 aa, Artificial Sequence
  Description of Artificial Sequence: Synthetic peptide
  Seed: LRMKWMMAMKYPITA
LRMKYMMEMRYPATA

SEQ ID NO: 246018 - protein, 15 aa, Artificial Sequence
  Description of Artificial Sequence: Synthetic peptide
  Seed: LRMKWMMAMKYPITA
LRMKYMMEMRYPGTA

SEQ ID NO: 246019 - protein, 15 aa, Artificial Sequence
  Description of Artificial Sequence: Synthetic peptide
  Seed: LRMKWMMAMKYPITA
LRMKYMMEMRYPSTA

SEQ ID NO: 246020 - protein, 15 aa, Artificial Sequence
  Description of Artificial Sequence: Synthetic peptide
  Seed: LRMKWMMAMKYPITA
LRMKYMMEMSYPATA

SEQ ID NO: 246021 - protein, 15 aa, Artificial Sequence
  Description of Artificial Sequence: Synthetic peptide
  Seed: LRMKWMMAMKYPITA
LRMKYMMEMSYPCTA

SEQ ID NO: 246022 - protein, 15 aa, Artificial Sequence
  Description of Artificial Sequence: Synthetic peptide
  Seed: LRMKWMMAMKYPITA
LRMKYMMEMSYPDTA

SEQ ID NO: 246023 - protein, 15 aa, Artificial Sequence
  Description of Artificial Sequence: Synthetic peptide
  Seed: LRMKWMMAMKYPITA
LRMKYMMEMSYPETA

SEQ ID NO: 246024 - protein, 15 aa, Artificial Sequence
  Description of Artificial Sequence: Synthetic peptide
  Seed: LRMKWMMAMKYPITA
LRMKYMMEMSYPFTA

SEQ ID NO: 246025 - protein, 15 aa, Artificial Sequence
  Description of Artificial Sequence: Synthetic peptide
  Seed: LRMKWMMAMKYPITA
LRMKYMMEMSYPGTA

SEQ ID NO: 246026 - protein, 15 aa, Artificial Sequence
  Description of Artificial Sequence: Synthetic peptide
  Seed: LRMKWMMAMKYPITA
LRMKYMMEMSYPHTA

SEQ ID NO: 246027 - protein, 15 aa, Artificial Sequence
  Description of Artificial Sequence: Synthetic peptide
  Seed: LRMKWMMAMKYPITA
LRMKYMMEMSYPITA

SEQ ID NO: 246028 - protein, 15 aa, Artificial Sequence
  Description of Artificial Sequence: Synthetic peptide
  Seed: LRMKWMMAMKYPITA
LRMKYMMEMSYPKTA

SEQ ID NO: 246029 - protein, 15 aa, Artificial Sequence
  Description of Artificial Sequence: Synthetic peptide
  Seed: LRMKWMMAMKYPITA
LRMKYMMEMSYPLTA

SEQ ID NO: 246030 - protein, 15 aa, Artificial Sequence
  Description of Artificial Sequence: Synthetic peptide
  Seed: LRMKWMMAMKYPITA
LRMKYMMEMSYPMTA

SEQ ID NO: 246031 - protein, 15 aa, Artificial Sequence
  Description of Artificial Sequence: Synthetic peptide
  Seed: LRMKWMMAMKYPITA
LRMKYMMEMSYPNTA

SEQ ID NO: 246032 - protein, 15 aa, Artificial Sequence
  Description of Artificial Sequence: Synthetic peptide
  Seed: LRMKWMMAMKYPITA
LRMKYMMEMSYPPTA

SEQ ID NO: 246033 - protein, 15 aa, Artificial Sequence
  Description of Artificial Sequence: Synthetic peptide
  Seed: LRMKWMMAMKYPITA
LRMKYMMEMSYPQTA

SEQ ID NO: 246034 - protein, 15 aa, Artificial Sequence
  Description of Artificial Sequence: Synthetic peptide
  Seed: LRMKWMMAMKYPITA
LRMKYMMEMSYPRTA

SEQ ID NO: 246035 - protein, 15 aa, Artificial Sequence
  Description of Artificial Sequence: Synthetic peptide
  Seed: LRMKWMMAMKYPITA
LRMKYMMEMSYPSTA

SEQ ID NO: 246036 - protein, 15 aa, Artificial Sequence
  Description of Artificial Sequence: Synthetic peptide
  Seed: LRMKWMMAMKYPITA
LRMKYMMEMSYPTTA

SEQ ID NO: 246037 - protein, 15 aa, Artificial Sequence
  Description of Artificial Sequence: Synthetic peptide
  Seed: LRMKWMMAMKYPITA
LRMKYMMEMSYPVTA

SEQ ID NO: 246038 - protein, 15 aa, Artificial Sequence
  Description of Artificial Sequence: Synthetic peptide
  Seed: LRMKWMMAMKYPITA
LRMKYMMEMSYPWTA

SEQ ID NO: 246039 - protein, 15 aa, Artificial Sequence
  Description of Artificial Sequence: Synthetic peptide
  Seed: LRMKWMMAMKYPITA
LRMKYMMEMSYPYTA

SEQ ID NO: 246040 - protein, 15 aa, Artificial Sequence
  Description of Artificial Sequence: Synthetic peptide
  Seed: LRMKWMMAMKYPITA
LRMKYMMEMTYPATA

SEQ ID NO: 246041 - protein, 15 aa, Artificial Sequence
  Description of Artificial Sequence: Synthetic peptide
  Seed: LRMKWMMAMKYPITA
LRMKYMMEMTYPCTA

SEQ ID NO: 246042 - protein, 15 aa, Artificial Sequence
  Description of Artificial Sequence: Synthetic peptide
  Seed: LRMKWMMAMKYPITA
LRMKYMMEMTYPDTA

SEQ ID NO: 246043 - protein, 15 aa, Artificial Sequence
  Description of Artificial Sequence: Synthetic peptide
  Seed: LRMKWMMAMKYPITA
LRMKYMMEMTYPETA

SEQ ID NO: 246044 - protein, 15 aa, Artificial Sequence
  Description of Artificial Sequence: Synthetic peptide
  Seed: LRMKWMMAMKYPITA
LRMKYMMEMTYPFTA

SEQ ID NO: 246045 - protein, 15 aa, Artificial Sequence
  Description of Artificial Sequence: Synthetic peptide
  Seed: LRMKWMMAMKYPITA
LRMKYMMEMTYPGTA

SEQ ID NO: 246046 - protein, 15 aa, Artificial Sequence
  Description of Artificial Sequence: Synthetic peptide
  Seed: LRMKWMMAMKYPITA
LRMKYMMEMTYPHTA

SEQ ID NO: 246047 - protein, 15 aa, Artificial Sequence
  Description of Artificial Sequence: Synthetic peptide
  Seed: LRMKWMMAMKYPITA
LRMKYMMEMTYPITA

SEQ ID NO: 246048 - protein, 15 aa, Artificial Sequence
  Description of Artificial Sequence: Synthetic peptide
  Seed: LRMKWMMAMKYPITA
LRMKYMMEMTYPLTA

SEQ ID NO: 246049 - protein, 15 aa, Artificial Sequence
  Description of Artificial Sequence: Synthetic peptide
  Seed: LRMKWMMAMKYPITA
LRMKYMMEMTYPMTA

SEQ ID NO: 246050 - protein, 15 aa, Artificial Sequence
  Description of Artificial Sequence: Synthetic peptide
  Seed: LRMKWMMAMKYPITA
LRMKYMMEMTYPNTA

SEQ ID NO: 246051 - protein, 15 aa, Artificial Sequence
  Description of Artificial Sequence: Synthetic peptide
  Seed: LRMKWMMAMKYPITA
LRMKYMMEMTYPPTA

SEQ ID NO: 246052 - protein, 15 aa, Artificial Sequence
  Description of Artificial Sequence: Synthetic peptide
  Seed: LRMKWMMAMKYPITA
LRMKYMMEMTYPQTA

SEQ ID NO: 246053 - protein, 15 aa, Artificial Sequence
  Description of Artificial Sequence: Synthetic peptide
  Seed: LRMKWMMAMKYPITA
LRMKYMMEMTYPSTA

SEQ ID NO: 246054 - protein, 15 aa, Artificial Sequence
  Description of Artificial Sequence: Synthetic peptide
  Seed: LRMKWMMAMKYPITA
LRMKYMMEMTYPTTA

SEQ ID NO: 246055 - protein, 15 aa, Artificial Sequence
  Description of Artificial Sequence: Synthetic peptide
  Seed: LRMKWMMAMKYPITA
LRMKYMMEMTYPVTA

SEQ ID NO: 246056 - protein, 15 aa, Artificial Sequence
  Description of Artificial Sequence: Synthetic peptide
  Seed: LRMKWMMAMKYPITA
LRMKYMMEMTYPYTA

SEQ ID NO: 246057 - protein, 15 aa, Artificial Sequence
  Description of Artificial Sequence: Synthetic peptide
  Seed: LRMKWMMAMKYPITA
LRMKYMMEMVYPATA

SEQ ID NO: 246058 - protein, 15 aa, Artificial Sequence
  Description of Artificial Sequence: Synthetic peptide
  Seed: LRMKWMMAMKYPITA
LRMKYMMEMVYPCTA

SEQ ID NO: 246059 - protein, 15 aa, Artificial Sequence
  Description of Artificial Sequence: Synthetic peptide
  Seed: LRMKWMMAMKYPITA
LRMKYMMEMVYPDTA

SEQ ID NO: 246060 - protein, 15 aa, Artificial Sequence
  Description of Artificial Sequence: Synthetic peptide
  Seed: LRMKWMMAMKYPITA
LRMKYMMEMVYPETA

SEQ ID NO: 246061 - protein, 15 aa, Artificial Sequence
  Description of Artificial Sequence: Synthetic peptide
  Seed: LRMKWMMAMKYPITA
LRMKYMMEMVYPFTA

SEQ ID NO: 246062 - protein, 15 aa, Artificial Sequence
  Description of Artificial Sequence: Synthetic peptide
  Seed: LRMKWMMAMKYPITA
LRMKYMMEMVYPGTA

SEQ ID NO: 246063 - protein, 15 aa, Artificial Sequence
  Description of Artificial Sequence: Synthetic peptide
  Seed: LRMKWMMAMKYPITA
LRMKYMMEMVYPHTA

SEQ ID NO: 246064 - protein, 15 aa, Artificial Sequence
  Description of Artificial Sequence: Synthetic peptide
  Seed: LRMKWMMAMKYPITA
LRMKYMMEMVYPITA

SEQ ID NO: 246065 - protein, 15 aa, Artificial Sequence
  Description of Artificial Sequence: Synthetic peptide
  Seed: LRMKWMMAMKYPITA
LRMKYMMEMVYPLTA

SEQ ID NO: 246066 - protein, 15 aa, Artificial Sequence
  Description of Artificial Sequence: Synthetic peptide
  Seed: LRMKWMMAMKYPITA
LRMKYMMEMVYPMTA

SEQ ID NO: 246067 - protein, 15 aa, Artificial Sequence
  Description of Artificial Sequence: Synthetic peptide
  Seed: LRMKWMMAMKYPITA
LRMKYMMEMVYPNTA

SEQ ID NO: 246068 - protein, 15 aa, Artificial Sequence
  Description of Artificial Sequence: Synthetic peptide
  Seed: LRMKWMMAMKYPITA
LRMKYMMEMVYPPTA

SEQ ID NO: 246069 - protein, 15 aa, Artificial Sequence
  Description of Artificial Sequence: Synthetic peptide
  Seed: LRMKWMMAMKYPITA
LRMKYMMEMVYPQTA

SEQ ID NO: 246070 - protein, 15 aa, Artificial Sequence
  Description of Artificial Sequence: Synthetic peptide
  Seed: LRMKWMMAMKYPITA
LRMKYMMEMVYPSTA

SEQ ID NO: 246071 - protein, 15 aa, Artificial Sequence
  Description of Artificial Sequence: Synthetic peptide
  Seed: LRMKWMMAMKYPITA
LRMKYMMEMVYPTTA

SEQ ID NO: 246072 - protein, 15 aa, Artificial Sequence
  Description of Artificial Sequence: Synthetic peptide
  Seed: LRMKWMMAMKYPITA
LRMKYMMEMVYPVTA

SEQ ID NO: 246073 - protein, 15 aa, Artificial Sequence
  Description of Artificial Sequence: Synthetic peptide
  Seed: LRMKWMMAMKYPITA
LRMKYMMEMVYPYTA

SEQ ID NO: 246074 - protein, 15 aa, Artificial Sequence
  Description of Artificial Sequence: Synthetic peptide
  Seed: LRMKWMMAMKYPITA
LRMKYMMEMWYPITA

SEQ ID NO: 246075 - protein, 15 aa, Artificial Sequence
  Description of Artificial Sequence: Synthetic peptide
  Seed: LRMKWMMAMKYPITA
LRMKYMMEMWYPLTA

SEQ ID NO: 246076 - protein, 15 aa, Artificial Sequence
  Description of Artificial Sequence: Synthetic peptide
  Seed: LRMKWMMAMKYPITA
LRMKYMMEMWYPVTA

SEQ ID NO: 246077 - protein, 15 aa, Artificial Sequence
  Description of Artificial Sequence: Synthetic peptide
  Seed: LRMKWMMAMKYPITA
LRMKYMMEMYYPITA

SEQ ID NO: 246078 - protein, 15 aa, Artificial Sequence
  Description of Artificial Sequence: Synthetic peptide
  Seed: LRMKWMMAMKYPITA
LRMKYMMEMYYPLTA

SEQ ID NO: 246079 - protein, 15 aa, Artificial Sequence
  Description of Artificial Sequence: Synthetic peptide
  Seed: LRMKWMMAMKYPITA
LRMKYMMEMYYPVTA

SEQ ID NO: 246080 - protein, 15 aa, Artificial Sequence
  Description of Artificial Sequence: Synthetic peptide
  Seed: LRMKWMMAMKYPITA
LRMKYMMFMAYPATA

SEQ ID NO: 246081 - protein, 15 aa, Artificial Sequence
  Description of Artificial Sequence: Synthetic peptide
  Seed: LRMKWMMAMKYPITA
LRMKYMMFMAYPCTA

SEQ ID NO: 246082 - protein, 15 aa, Artificial Sequence
  Description of Artificial Sequence: Synthetic peptide
  Seed: LRMKWMMAMKYPITA
LRMKYMMFMAYPDTA

SEQ ID NO: 246083 - protein, 15 aa, Artificial Sequence
  Description of Artificial Sequence: Synthetic peptide
  Seed: LRMKWMMAMKYPITA
LRMKYMMFMAYPETA

SEQ ID NO: 246084 - protein, 15 aa, Artificial Sequence
  Description of Artificial Sequence: Synthetic peptide
  Seed: LRMKWMMAMKYPITA
LRMKYMMFMAYPFTA

SEQ ID NO: 246085 - protein, 15 aa, Artificial Sequence
  Description of Artificial Sequence: Synthetic peptide
  Seed: LRMKWMMAMKYPITA
LRMKYMMFMAYPGTA

SEQ ID NO: 246086 - protein, 15 aa, Artificial Sequence
  Description of Artificial Sequence: Synthetic peptide
  Seed: LRMKWMMAMKYPITA
LRMKYMMFMAYPHTA

SEQ ID NO: 246087 - protein, 15 aa, Artificial Sequence
  Description of Artificial Sequence: Synthetic peptide
  Seed: LRMKWMMAMKYPITA
LRMKYMMFMAYPITA

SEQ ID NO: 246088 - protein, 15 aa, Artificial Sequence
  Description of Artificial Sequence: Synthetic peptide
  Seed: LRMKWMMAMKYPITA
LRMKYMMFMAYPKTA

SEQ ID NO: 246089 - protein, 15 aa, Artificial Sequence
  Description of Artificial Sequence: Synthetic peptide
  Seed: LRMKWMMAMKYPITA
LRMKYMMFMAYPLTA

SEQ ID NO: 246090 - protein, 15 aa, Artificial Sequence
  Description of Artificial Sequence: Synthetic peptide
  Seed: LRMKWMMAMKYPITA
LRMKYMMFMAYPMTA

SEQ ID NO: 246091 - protein, 15 aa, Artificial Sequence
  Description of Artificial Sequence: Synthetic peptide
  Seed: LRMKWMMAMKYPITA
LRMKYMMFMAYPNTA

SEQ ID NO: 246092 - protein, 15 aa, Artificial Sequence
  Description of Artificial Sequence: Synthetic peptide
  Seed: LRMKWMMAMKYPITA
LRMKYMMFMAYPPTA

SEQ ID NO: 246093 - protein, 15 aa, Artificial Sequence
  Description of Artificial Sequence: Synthetic peptide
  Seed: LRMKWMMAMKYPITA
LRMKYMMFMAYPQTA

SEQ ID NO: 246094 - protein, 15 aa, Artificial Sequence
  Description of Artificial Sequence: Synthetic peptide
  Seed: LRMKWMMAMKYPITA
LRMKYMMFMAYPRTA

SEQ ID NO: 246095 - protein, 15 aa, Artificial Sequence
  Description of Artificial Sequence: Synthetic peptide
  Seed: LRMKWMMAMKYPITA
LRMKYMMFMAYPSTA

SEQ ID NO: 246096 - protein, 15 aa, Artificial Sequence
  Description of Artificial Sequence: Synthetic peptide
  Seed: LRMKWMMAMKYPITA
LRMKYMMFMAYPTTA

SEQ ID NO: 246097 - protein, 15 aa, Artificial Sequence
  Description of Artificial Sequence: Synthetic peptide
  Seed: LRMKWMMAMKYPITA
LRMKYMMFMAYPVTA

SEQ ID NO: 246098 - protein, 15 aa, Artificial Sequence
  Description of Artificial Sequence: Synthetic peptide
  Seed: LRMKWMMAMKYPITA
LRMKYMMFMAYPWTA

SEQ ID NO: 246099 - protein, 15 aa, Artificial Sequence
  Description of Artificial Sequence: Synthetic peptide
  Seed: LRMKWMMAMKYPITA
LRMKYMMFMAYPYTA

SEQ ID NO: 246100 - protein, 15 aa, Artificial Sequence
  Description of Artificial Sequence: Synthetic peptide
  Seed: LRMKWMMAMKYPITA
LRMKYMMFMCYPATA

SEQ ID NO: 246101 - protein, 15 aa, Artificial Sequence
  Description of Artificial Sequence: Synthetic peptide
  Seed: LRMKWMMAMKYPITA
LRMKYMMFMDYPATA

SEQ ID NO: 246102 - protein, 15 aa, Artificial Sequence
  Description of Artificial Sequence: Synthetic peptide
  Seed: LRMKWMMAMKYPITA
LRMKYMMFMDYPITA

SEQ ID NO: 246103 - protein, 15 aa, Artificial Sequence
  Description of Artificial Sequence: Synthetic peptide
  Seed: LRMKWMMAMKYPITA
LRMKYMMFMDYPLTA

SEQ ID NO: 246104 - protein, 15 aa, Artificial Sequence
  Description of Artificial Sequence: Synthetic peptide
  Seed: LRMKWMMAMKYPITA
LRMKYMMFMDYPVTA

SEQ ID NO: 246105 - protein, 15 aa, Artificial Sequence
  Description of Artificial Sequence: Synthetic peptide
  Seed: LRMKWMMAMKYPITA
LRMKYMMFMEYPATA

SEQ ID NO: 246106 - protein, 15 aa, Artificial Sequence
  Description of Artificial Sequence: Synthetic peptide
  Seed: LRMKWMMAMKYPITA
LRMKYMMFMEYPITA

SEQ ID NO: 246107 - protein, 15 aa, Artificial Sequence
  Description of Artificial Sequence: Synthetic peptide
  Seed: LRMKWMMAMKYPITA
LRMKYMMFMEYPLTA

SEQ ID NO: 246108 - protein, 15 aa, Artificial Sequence
  Description of Artificial Sequence: Synthetic peptide
  Seed: LRMKWMMAMKYPITA
LRMKYMMFMEYPMTA

SEQ ID NO: 246109 - protein, 15 aa, Artificial Sequence
  Description of Artificial Sequence: Synthetic peptide
  Seed: LRMKWMMAMKYPITA
LRMKYMMFMEYPVTA

SEQ ID NO: 246110 - protein, 15 aa, Artificial Sequence
  Description of Artificial Sequence: Synthetic peptide
  Seed: LRMKWMMAMKYPITA
LRMKYMMFMGYPATA

SEQ ID NO: 246111 - protein, 15 aa, Artificial Sequence
  Description of Artificial Sequence: Synthetic peptide
  Seed: LRMKWMMAMKYPITA
LRMKYMMFMGYPCTA

SEQ ID NO: 246112 - protein, 15 aa, Artificial Sequence
  Description of Artificial Sequence: Synthetic peptide
  Seed: LRMKWMMAMKYPITA
LRMKYMMFMGYPDTA

SEQ ID NO: 246113 - protein, 15 aa, Artificial Sequence
  Description of Artificial Sequence: Synthetic peptide
  Seed: LRMKWMMAMKYPITA
LRMKYMMFMGYPETA

SEQ ID NO: 246114 - protein, 15 aa, Artificial Sequence
  Description of Artificial Sequence: Synthetic peptide
  Seed: LRMKWMMAMKYPITA
LRMKYMMFMGYPFTA

SEQ ID NO: 246115 - protein, 15 aa, Artificial Sequence
  Description of Artificial Sequence: Synthetic peptide
  Seed: LRMKWMMAMKYPITA
LRMKYMMFMGYPGTA

SEQ ID NO: 246116 - protein, 15 aa, Artificial Sequence
  Description of Artificial Sequence: Synthetic peptide
  Seed: LRMKWMMAMKYPITA
LRMKYMMFMGYPHTA

SEQ ID NO: 246117 - protein, 15 aa, Artificial Sequence
  Description of Artificial Sequence: Synthetic peptide
  Seed: LRMKWMMAMKYPITA
LRMKYMMFMGYPITA

SEQ ID NO: 246118 - protein, 15 aa, Artificial Sequence
  Description of Artificial Sequence: Synthetic peptide
  Seed: LRMKWMMAMKYPITA
LRMKYMMFMGYPKTA

SEQ ID NO: 246119 - protein, 15 aa, Artificial Sequence
  Description of Artificial Sequence: Synthetic peptide
  Seed: LRMKWMMAMKYPITA
LRMKYMMFMGYPLTA

SEQ ID NO: 246120 - protein, 15 aa, Artificial Sequence
  Description of Artificial Sequence: Synthetic peptide
  Seed: LRMKWMMAMKYPITA
LRMKYMMFMGYPMTA

SEQ ID NO: 246121 - protein, 15 aa, Artificial Sequence
  Description of Artificial Sequence: Synthetic peptide
  Seed: LRMKWMMAMKYPITA
LRMKYMMFMGYPNTA

SEQ ID NO: 246122 - protein, 15 aa, Artificial Sequence
  Description of Artificial Sequence: Synthetic peptide
  Seed: LRMKWMMAMKYPITA
LRMKYMMFMGYPPTA

SEQ ID NO: 246123 - protein, 15 aa, Artificial Sequence
  Description of Artificial Sequence: Synthetic peptide
  Seed: LRMKWMMAMKYPITA
LRMKYMMFMGYPQTA

SEQ ID NO: 246124 - protein, 15 aa, Artificial Sequence
  Description of Artificial Sequence: Synthetic peptide
  Seed: LRMKWMMAMKYPITA
LRMKYMMFMGYPRTA

SEQ ID NO: 246125 - protein, 15 aa, Artificial Sequence
  Description of Artificial Sequence: Synthetic peptide
  Seed: LRMKWMMAMKYPITA
LRMKYMMFMGYPSTA

SEQ ID NO: 246126 - protein, 15 aa, Artificial Sequence
  Description of Artificial Sequence: Synthetic peptide
  Seed: LRMKWMMAMKYPITA
LRMKYMMFMGYPTTA

SEQ ID NO: 246127 - protein, 15 aa, Artificial Sequence
  Description of Artificial Sequence: Synthetic peptide
  Seed: LRMKWMMAMKYPITA
LRMKYMMFMGYPVTA

SEQ ID NO: 246128 - protein, 15 aa, Artificial Sequence
  Description of Artificial Sequence: Synthetic peptide
  Seed: LRMKWMMAMKYPITA
LRMKYMMFMGYPYTA

SEQ ID NO: 246129 - protein, 15 aa, Artificial Sequence
  Description of Artificial Sequence: Synthetic peptide
  Seed: LRMKWMMAMKYPITA
LRMKYMMFMHYPATA

SEQ ID NO: 246130 - protein, 15 aa, Artificial Sequence
  Description of Artificial Sequence: Synthetic peptide
  Seed: LRMKWMMAMKYPITA
LRMKYMMFMHYPITA

SEQ ID NO: 246131 - protein, 15 aa, Artificial Sequence
  Description of Artificial Sequence: Synthetic peptide
  Seed: LRMKWMMAMKYPITA
LRMKYMMFMHYPLTA

SEQ ID NO: 246132 - protein, 15 aa, Artificial Sequence
  Description of Artificial Sequence: Synthetic peptide
  Seed: LRMKWMMAMKYPITA
LRMKYMMFMHYPMTA

SEQ ID NO: 246133 - protein, 15 aa, Artificial Sequence
  Description of Artificial Sequence: Synthetic peptide
  Seed: LRMKWMMAMKYPITA
LRMKYMMFMHYPSTA

SEQ ID NO: 246134 - protein, 15 aa, Artificial Sequence
  Description of Artificial Sequence: Synthetic peptide
  Seed: LRMKWMMAMKYPITA
LRMKYMMFMHYPVTA

SEQ ID NO: 246135 - protein, 15 aa, Artificial Sequence
  Description of Artificial Sequence: Synthetic peptide
  Seed: LRMKWMMAMKYPITA
LRMKYMMFMIYPATA

SEQ ID NO: 246136 - protein, 15 aa, Artificial Sequence
  Description of Artificial Sequence: Synthetic peptide
  Seed: LRMKWMMAMKYPITA
LRMKYMMFMIYPDTA

SEQ ID NO: 246137 - protein, 15 aa, Artificial Sequence
  Description of Artificial Sequence: Synthetic peptide
  Seed: LRMKWMMAMKYPITA
LRMKYMMFMIYPETA

SEQ ID NO: 246138 - protein, 15 aa, Artificial Sequence
  Description of Artificial Sequence: Synthetic peptide
  Seed: LRMKWMMAMKYPITA
LRMKYMMFMIYPGTA

SEQ ID NO: 246139 - protein, 15 aa, Artificial Sequence
  Description of Artificial Sequence: Synthetic peptide
  Seed: LRMKWMMAMKYPITA
LRMKYMMFMIYPHTA

SEQ ID NO: 246140 - protein, 15 aa, Artificial Sequence
  Description of Artificial Sequence: Synthetic peptide
  Seed: LRMKWMMAMKYPITA
LRMKYMMFMIYPITA

SEQ ID NO: 246141 - protein, 15 aa, Artificial Sequence
  Description of Artificial Sequence: Synthetic peptide
  Seed: LRMKWMMAMKYPITA
LRMKYMMFMIYPLTA

SEQ ID NO: 246142 - protein, 15 aa, Artificial Sequence
  Description of Artificial Sequence: Synthetic peptide
  Seed: LRMKWMMAMKYPITA
LRMKYMMFMIYPMTA

SEQ ID NO: 246143 - protein, 15 aa, Artificial Sequence
  Description of Artificial Sequence: Synthetic peptide
  Seed: LRMKWMMAMKYPITA
LRMKYMMFMIYPNTA

SEQ ID NO: 246144 - protein, 15 aa, Artificial Sequence
  Description of Artificial Sequence: Synthetic peptide
  Seed: LRMKWMMAMKYPITA
LRMKYMMFMIYPQTA

SEQ ID NO: 246145 - protein, 15 aa, Artificial Sequence
  Description of Artificial Sequence: Synthetic peptide
  Seed: LRMKWMMAMKYPITA
LRMKYMMFMIYPSTA

SEQ ID NO: 246146 - protein, 15 aa, Artificial Sequence
  Description of Artificial Sequence: Synthetic peptide
  Seed: LRMKWMMAMKYPITA
LRMKYMMFMIYPTTA

SEQ ID NO: 246147 - protein, 15 aa, Artificial Sequence
  Description of Artificial Sequence: Synthetic peptide
  Seed: LRMKWMMAMKYPITA
LRMKYMMFMIYPVTA

SEQ ID NO: 246148 - protein, 15 aa, Artificial Sequence
  Description of Artificial Sequence: Synthetic peptide
  Seed: LRMKWMMAMKYPITA
LRMKYMMFMKYPATA

SEQ ID NO: 246149 - protein, 15 aa, Artificial Sequence
  Description of Artificial Sequence: Synthetic peptide
  Seed: LRMKWMMAMKYPITA
LRMKYMMFMKYPGTA

SEQ ID NO: 246150 - protein, 15 aa, Artificial Sequence
  Description of Artificial Sequence: Synthetic peptide
  Seed: LRMKWMMAMKYPITA
LRMKYMMFMKYPHTA

SEQ ID NO: 246151 - protein, 15 aa, Artificial Sequence
  Description of Artificial Sequence: Synthetic peptide
  Seed: LRMKWMMAMKYPITA
LRMKYMMFMKYPKTA

SEQ ID NO: 246152 - protein, 15 aa, Artificial Sequence
  Description of Artificial Sequence: Synthetic peptide
  Seed: LRMKWMMAMKYPITA
LRMKYMMFMKYPLTA

SEQ ID NO: 246153 - protein, 15 aa, Artificial Sequence
  Description of Artificial Sequence: Synthetic peptide
  Seed: LRMKWMMAMKYPITA
LRMKYMMFMKYPMTA

SEQ ID NO: 246154 - protein, 15 aa, Artificial Sequence
  Description of Artificial Sequence: Synthetic peptide
  Seed: LRMKWMMAMKYPITA
LRMKYMMFMKYPQTA

SEQ ID NO: 246155 - protein, 15 aa, Artificial Sequence
  Description of Artificial Sequence: Synthetic peptide
  Seed: LRMKWMMAMKYPITA
LRMKYMMFMKYPRTA

SEQ ID NO: 246156 - protein, 15 aa, Artificial Sequence
  Description of Artificial Sequence: Synthetic peptide
  Seed: LRMKWMMAMKYPITA
LRMKYMMFMKYPSTA

SEQ ID NO: 246157 - protein, 15 aa, Artificial Sequence
  Description of Artificial Sequence: Synthetic peptide
  Seed: LRMKWMMAMKYPITA
LRMKYMMFMKYPTTA

SEQ ID NO: 246158 - protein, 15 aa, Artificial Sequence
  Description of Artificial Sequence: Synthetic peptide
  Seed: LRMKWMMAMKYPITA
LRMKYMMFMKYPVTA

SEQ ID NO: 246159 - protein, 15 aa, Artificial Sequence
  Description of Artificial Sequence: Synthetic peptide
  Seed: LRMKWMMAMKYPITA
LRMKYMMFMKYPYTA

SEQ ID NO: 246160 - protein, 15 aa, Artificial Sequence
  Description of Artificial Sequence: Synthetic peptide
  Seed: LRMKWMMAMKYPITA
LRMKYMMFMLYPGTA

SEQ ID NO: 246161 - protein, 15 aa, Artificial Sequence
  Description of Artificial Sequence: Synthetic peptide
  Seed: LRMKWMMAMKYPITA
LRMKYMMFMMYPGTA

SEQ ID NO: 246162 - protein, 15 aa, Artificial Sequence
  Description of Artificial Sequence: Synthetic peptide
  Seed: LRMKWMMAMKYPITA
LRMKYMMFMMYPLTA

SEQ ID NO: 246163 - protein, 15 aa, Artificial Sequence
  Description of Artificial Sequence: Synthetic peptide
  Seed: LRMKWMMAMKYPITA
LRMKYMMFMNYPATA

SEQ ID NO: 246164 - protein, 15 aa, Artificial Sequence
  Description of Artificial Sequence: Synthetic peptide
  Seed: LRMKWMMAMKYPITA
LRMKYMMFMNYPDTA

SEQ ID NO: 246165 - protein, 15 aa, Artificial Sequence
  Description of Artificial Sequence: Synthetic peptide
  Seed: LRMKWMMAMKYPITA
LRMKYMMFMNYPETA

SEQ ID NO: 246166 - protein, 15 aa, Artificial Sequence
  Description of Artificial Sequence: Synthetic peptide
  Seed: LRMKWMMAMKYPITA
LRMKYMMFMNYPFTA

SEQ ID NO: 246167 - protein, 15 aa, Artificial Sequence
  Description of Artificial Sequence: Synthetic peptide
  Seed: LRMKWMMAMKYPITA
LRMKYMMFMNYPGTA

SEQ ID NO: 246168 - protein, 15 aa, Artificial Sequence
  Description of Artificial Sequence: Synthetic peptide
  Seed: LRMKWMMAMKYPITA
LRMKYMMFMNYPHTA

SEQ ID NO: 246169 - protein, 15 aa, Artificial Sequence
  Description of Artificial Sequence: Synthetic peptide
  Seed: LRMKWMMAMKYPITA
LRMKYMMFMNYPITA

SEQ ID NO: 246170 - protein, 15 aa, Artificial Sequence
  Description of Artificial Sequence: Synthetic peptide
  Seed: LRMKWMMAMKYPITA
LRMKYMMFMNYPKTA

SEQ ID NO: 246171 - protein, 15 aa, Artificial Sequence
  Description of Artificial Sequence: Synthetic peptide
  Seed: LRMKWMMAMKYPITA
LRMKYMMFMNYPLTA

SEQ ID NO: 246172 - protein, 15 aa, Artificial Sequence
  Description of Artificial Sequence: Synthetic peptide
  Seed: LRMKWMMAMKYPITA
LRMKYMMFMNYPMTA

SEQ ID NO: 246173 - protein, 15 aa, Artificial Sequence
  Description of Artificial Sequence: Synthetic peptide
  Seed: LRMKWMMAMKYPITA
LRMKYMMFMNYPNTA

SEQ ID NO: 246174 - protein, 15 aa, Artificial Sequence
  Description of Artificial Sequence: Synthetic peptide
  Seed: LRMKWMMAMKYPITA
LRMKYMMFMNYPQTA

SEQ ID NO: 246175 - protein, 15 aa, Artificial Sequence
  Description of Artificial Sequence: Synthetic peptide
  Seed: LRMKWMMAMKYPITA
LRMKYMMFMNYPRTA

SEQ ID NO: 246176 - protein, 15 aa, Artificial Sequence
  Description of Artificial Sequence: Synthetic peptide
  Seed: LRMKWMMAMKYPITA
LRMKYMMFMNYPSTA

SEQ ID NO: 246177 - protein, 15 aa, Artificial Sequence
  Description of Artificial Sequence: Synthetic peptide
  Seed: LRMKWMMAMKYPITA
LRMKYMMFMNYPTTA

SEQ ID NO: 246178 - protein, 15 aa, Artificial Sequence
  Description of Artificial Sequence: Synthetic peptide
  Seed: LRMKWMMAMKYPITA
LRMKYMMFMNYPVTA

SEQ ID NO: 246179 - protein, 15 aa, Artificial Sequence
  Description of Artificial Sequence: Synthetic peptide
  Seed: LRMKWMMAMKYPITA
LRMKYMMFMNYPYTA

SEQ ID NO: 246180 - protein, 15 aa, Artificial Sequence
  Description of Artificial Sequence: Synthetic peptide
  Seed: LRMKWMMAMKYPITA
LRMKYMMFMPYPATA

SEQ ID NO: 246181 - protein, 15 aa, Artificial Sequence
  Description of Artificial Sequence: Synthetic peptide
  Seed: LRMKWMMAMKYPITA
LRMKYMMFMPYPCTA

SEQ ID NO: 246182 - protein, 15 aa, Artificial Sequence
  Description of Artificial Sequence: Synthetic peptide
  Seed: LRMKWMMAMKYPITA
LRMKYMMFMPYPDTA

SEQ ID NO: 246183 - protein, 15 aa, Artificial Sequence
  Description of Artificial Sequence: Synthetic peptide
  Seed: LRMKWMMAMKYPITA
LRMKYMMFMPYPETA

SEQ ID NO: 246184 - protein, 15 aa, Artificial Sequence
  Description of Artificial Sequence: Synthetic peptide
  Seed: LRMKWMMAMKYPITA
LRMKYMMFMPYPFTA

SEQ ID NO: 246185 - protein, 15 aa, Artificial Sequence
  Description of Artificial Sequence: Synthetic peptide
  Seed: LRMKWMMAMKYPITA
LRMKYMMFMPYPGTA

SEQ ID NO: 246186 - protein, 15 aa, Artificial Sequence
  Description of Artificial Sequence: Synthetic peptide
  Seed: LRMKWMMAMKYPITA
LRMKYMMFMPYPHTA

SEQ ID NO: 246187 - protein, 15 aa, Artificial Sequence
  Description of Artificial Sequence: Synthetic peptide
  Seed: LRMKWMMAMKYPITA
LRMKYMMFMPYPITA

SEQ ID NO: 246188 - protein, 15 aa, Artificial Sequence
  Description of Artificial Sequence: Synthetic peptide
  Seed: LRMKWMMAMKYPITA
LRMKYMMFMPYPKTA

SEQ ID NO: 246189 - protein, 15 aa, Artificial Sequence
  Description of Artificial Sequence: Synthetic peptide
  Seed: LRMKWMMAMKYPITA
LRMKYMMFMPYPLTA

SEQ ID NO: 246190 - protein, 15 aa, Artificial Sequence
  Description of Artificial Sequence: Synthetic peptide
  Seed: LRMKWMMAMKYPITA
LRMKYMMFMPYPMTA

SEQ ID NO: 246191 - protein, 15 aa, Artificial Sequence
  Description of Artificial Sequence: Synthetic peptide
  Seed: LRMKWMMAMKYPITA
LRMKYMMFMPYPNTA

SEQ ID NO: 246192 - protein, 15 aa, Artificial Sequence
  Description of Artificial Sequence: Synthetic peptide
  Seed: LRMKWMMAMKYPITA
LRMKYMMFMPYPPTA

SEQ ID NO: 246193 - protein, 15 aa, Artificial Sequence
  Description of Artificial Sequence: Synthetic peptide
  Seed: LRMKWMMAMKYPITA
LRMKYMMFMPYPQTA

SEQ ID NO: 246194 - protein, 15 aa, Artificial Sequence
  Description of Artificial Sequence: Synthetic peptide
  Seed: LRMKWMMAMKYPITA
LRMKYMMFMPYPRTA

SEQ ID NO: 246195 - protein, 15 aa, Artificial Sequence
  Description of Artificial Sequence: Synthetic peptide
  Seed: LRMKWMMAMKYPITA
LRMKYMMFMPYPSTA

SEQ ID NO: 246196 - protein, 15 aa, Artificial Sequence
  Description of Artificial Sequence: Synthetic peptide
  Seed: LRMKWMMAMKYPITA
LRMKYMMFMPYPTTA

SEQ ID NO: 246197 - protein, 15 aa, Artificial Sequence
  Description of Artificial Sequence: Synthetic peptide
  Seed: LRMKWMMAMKYPITA
LRMKYMMFMPYPVTA

SEQ ID NO: 246198 - protein, 15 aa, Artificial Sequence
  Description of Artificial Sequence: Synthetic peptide
  Seed: LRMKWMMAMKYPITA
LRMKYMMFMPYPWTA

SEQ ID NO: 246199 - protein, 15 aa, Artificial Sequence
  Description of Artificial Sequence: Synthetic peptide
  Seed: LRMKWMMAMKYPITA
LRMKYMMFMPYPYTA

SEQ ID NO: 246200 - protein, 15 aa, Artificial Sequence
  Description of Artificial Sequence: Synthetic peptide
  Seed: LRMKWMMAMKYPITA
LRMKYMMFMQYPATA

SEQ ID NO: 246201 - protein, 15 aa, Artificial Sequence
  Description of Artificial Sequence: Synthetic peptide
  Seed: LRMKWMMAMKYPITA
LRMKYMMFMQYPITA

SEQ ID NO: 246202 - protein, 15 aa, Artificial Sequence
  Description of Artificial Sequence: Synthetic peptide
  Seed: LRMKWMMAMKYPITA
LRMKYMMFMQYPLTA

SEQ ID NO: 246203 - protein, 15 aa, Artificial Sequence
  Description of Artificial Sequence: Synthetic peptide
  Seed: LRMKWMMAMKYPITA
LRMKYMMFMQYPMTA

SEQ ID NO: 246204 - protein, 15 aa, Artificial Sequence
  Description of Artificial Sequence: Synthetic peptide
  Seed: LRMKWMMAMKYPITA
LRMKYMMFMQYPNTA

SEQ ID NO: 246205 - protein, 15 aa, Artificial Sequence
  Description of Artificial Sequence: Synthetic peptide
  Seed: LRMKWMMAMKYPITA
LRMKYMMFMQYPQTA

SEQ ID NO: 246206 - protein, 15 aa, Artificial Sequence
  Description of Artificial Sequence: Synthetic peptide
  Seed: LRMKWMMAMKYPITA
LRMKYMMFMQYPSTA

SEQ ID NO: 246207 - protein, 15 aa, Artificial Sequence
  Description of Artificial Sequence: Synthetic peptide
  Seed: LRMKWMMAMKYPITA
LRMKYMMFMQYPTTA

SEQ ID NO: 246208 - protein, 15 aa, Artificial Sequence
  Description of Artificial Sequence: Synthetic peptide
  Seed: LRMKWMMAMKYPITA
LRMKYMMFMQYPVTA

SEQ ID NO: 246209 - protein, 15 aa, Artificial Sequence
  Description of Artificial Sequence: Synthetic peptide
  Seed: LRMKWMMAMKYPITA
LRMKYMMFMRYPATA

SEQ ID NO: 246210 - protein, 15 aa, Artificial Sequence
  Description of Artificial Sequence: Synthetic peptide
  Seed: LRMKWMMAMKYPITA
LRMKYMMFMRYPGTA

SEQ ID NO: 246211 - protein, 15 aa, Artificial Sequence
  Description of Artificial Sequence: Synthetic peptide
  Seed: LRMKWMMAMKYPITA
LRMKYMMFMRYPHTA

SEQ ID NO: 246212 - protein, 15 aa, Artificial Sequence
  Description of Artificial Sequence: Synthetic peptide
  Seed: LRMKWMMAMKYPITA
LRMKYMMFMRYPITA

SEQ ID NO: 246213 - protein, 15 aa, Artificial Sequence
  Description of Artificial Sequence: Synthetic peptide
  Seed: LRMKWMMAMKYPITA
LRMKYMMFMRYPKTA

SEQ ID NO: 246214 - protein, 15 aa, Artificial Sequence
  Description of Artificial Sequence: Synthetic peptide
  Seed: LRMKWMMAMKYPITA
LRMKYMMFMRYPLTA

SEQ ID NO: 246215 - protein, 15 aa, Artificial Sequence
  Description of Artificial Sequence: Synthetic peptide
  Seed: LRMKWMMAMKYPITA
LRMKYMMFMRYPMTA

SEQ ID NO: 246216 - protein, 15 aa, Artificial Sequence
  Description of Artificial Sequence: Synthetic peptide
  Seed: LRMKWMMAMKYPITA
LRMKYMMFMRYPNTA

SEQ ID NO: 246217 - protein, 15 aa, Artificial Sequence
  Description of Artificial Sequence: Synthetic peptide
  Seed: LRMKWMMAMKYPITA
LRMKYMMFMRYPPTA

SEQ ID NO: 246218 - protein, 15 aa, Artificial Sequence
  Description of Artificial Sequence: Synthetic peptide
  Seed: LRMKWMMAMKYPITA
LRMKYMMFMRYPQTA

SEQ ID NO: 246219 - protein, 15 aa, Artificial Sequence
  Description of Artificial Sequence: Synthetic peptide
  Seed: LRMKWMMAMKYPITA
LRMKYMMFMRYPRTA

SEQ ID NO: 246220 - protein, 15 aa, Artificial Sequence
  Description of Artificial Sequence: Synthetic peptide
  Seed: LRMKWMMAMKYPITA
LRMKYMMFMRYPSTA

SEQ ID NO: 246221 - protein, 15 aa, Artificial Sequence
  Description of Artificial Sequence: Synthetic peptide
  Seed: LRMKWMMAMKYPITA
LRMKYMMFMRYPTTA

SEQ ID NO: 246222 - protein, 15 aa, Artificial Sequence
  Description of Artificial Sequence: Synthetic peptide
  Seed: LRMKWMMAMKYPITA
LRMKYMMFMRYPVTA

SEQ ID NO: 246223 - protein, 15 aa, Artificial Sequence
  Description of Artificial Sequence: Synthetic peptide
  Seed: LRMKWMMAMKYPITA
LRMKYMMFMRYPYTA

SEQ ID NO: 246224 - protein, 15 aa, Artificial Sequence
  Description of Artificial Sequence: Synthetic peptide
  Seed: LRMKWMMAMKYPITA
LRMKYMMFMSYPATA

SEQ ID NO: 246225 - protein, 15 aa, Artificial Sequence
  Description of Artificial Sequence: Synthetic peptide
  Seed: LRMKWMMAMKYPITA
LRMKYMMFMSYPCTA

SEQ ID NO: 246226 - protein, 15 aa, Artificial Sequence
  Description of Artificial Sequence: Synthetic peptide
  Seed: LRMKWMMAMKYPITA
LRMKYMMFMSYPDTA

SEQ ID NO: 246227 - protein, 15 aa, Artificial Sequence
  Description of Artificial Sequence: Synthetic peptide
  Seed: LRMKWMMAMKYPITA
LRMKYMMFMSYPETA

SEQ ID NO: 246228 - protein, 15 aa, Artificial Sequence
  Description of Artificial Sequence: Synthetic peptide
  Seed: LRMKWMMAMKYPITA
LRMKYMMFMSYPFTA

SEQ ID NO: 246229 - protein, 15 aa, Artificial Sequence
  Description of Artificial Sequence: Synthetic peptide
  Seed: LRMKWMMAMKYPITA
LRMKYMMFMSYPGTA

SEQ ID NO: 246230 - protein, 15 aa, Artificial Sequence
  Description of Artificial Sequence: Synthetic peptide
  Seed: LRMKWMMAMKYPITA
LRMKYMMFMSYPHTA

SEQ ID NO: 246231 - protein, 15 aa, Artificial Sequence
  Description of Artificial Sequence: Synthetic peptide
  Seed: LRMKWMMAMKYPITA
LRMKYMMFMSYPITA

SEQ ID NO: 246232 - protein, 15 aa, Artificial Sequence
  Description of Artificial Sequence: Synthetic peptide
  Seed: LRMKWMMAMKYPITA
LRMKYMMFMSYPKTA

SEQ ID NO: 246233 - protein, 15 aa, Artificial Sequence
  Description of Artificial Sequence: Synthetic peptide
  Seed: LRMKWMMAMKYPITA
LRMKYMMFMSYPLTA

SEQ ID NO: 246234 - protein, 15 aa, Artificial Sequence
  Description of Artificial Sequence: Synthetic peptide
  Seed: LRMKWMMAMKYPITA
LRMKYMMFMSYPMTA

SEQ ID NO: 246235 - protein, 15 aa, Artificial Sequence
  Description of Artificial Sequence: Synthetic peptide
  Seed: LRMKWMMAMKYPITA
LRMKYMMFMSYPNTA

SEQ ID NO: 246236 - protein, 15 aa, Artificial Sequence
  Description of Artificial Sequence: Synthetic peptide
  Seed: LRMKWMMAMKYPITA
LRMKYMMFMSYPPTA

SEQ ID NO: 246237 - protein, 15 aa, Artificial Sequence
  Description of Artificial Sequence: Synthetic peptide
  Seed: LRMKWMMAMKYPITA
LRMKYMMFMSYPQTA

SEQ ID NO: 246238 - protein, 15 aa, Artificial Sequence
  Description of Artificial Sequence: Synthetic peptide
  Seed: LRMKWMMAMKYPITA
LRMKYMMFMSYPRTA

SEQ ID NO: 246239 - protein, 15 aa, Artificial Sequence
  Description of Artificial Sequence: Synthetic peptide
  Seed: LRMKWMMAMKYPITA
LRMKYMMFMSYPSTA

SEQ ID NO: 246240 - protein, 15 aa, Artificial Sequence
  Description of Artificial Sequence: Synthetic peptide
  Seed: LRMKWMMAMKYPITA
LRMKYMMFMSYPTTA

SEQ ID NO: 246241 - protein, 15 aa, Artificial Sequence
  Description of Artificial Sequence: Synthetic peptide
  Seed: LRMKWMMAMKYPITA
LRMKYMMFMSYPVTA

SEQ ID NO: 246242 - protein, 15 aa, Artificial Sequence
  Description of Artificial Sequence: Synthetic peptide
  Seed: LRMKWMMAMKYPITA
LRMKYMMFMSYPYTA

SEQ ID NO: 246243 - protein, 15 aa, Artificial Sequence
  Description of Artificial Sequence: Synthetic peptide
  Seed: LRMKWMMAMKYPITA
LRMKYMMFMTYPATA

SEQ ID NO: 246244 - protein, 15 aa, Artificial Sequence
  Description of Artificial Sequence: Synthetic peptide
  Seed: LRMKWMMAMKYPITA
LRMKYMMFMTYPCTA

SEQ ID NO: 246245 - protein, 15 aa, Artificial Sequence
  Description of Artificial Sequence: Synthetic peptide
  Seed: LRMKWMMAMKYPITA
LRMKYMMFMTYPDTA

SEQ ID NO: 246246 - protein, 15 aa, Artificial Sequence
  Description of Artificial Sequence: Synthetic peptide
  Seed: LRMKWMMAMKYPITA
LRMKYMMFMTYPETA

SEQ ID NO: 246247 - protein, 15 aa, Artificial Sequence
  Description of Artificial Sequence: Synthetic peptide
  Seed: LRMKWMMAMKYPITA
LRMKYMMFMTYPFTA

SEQ ID NO: 246248 - protein, 15 aa, Artificial Sequence
  Description of Artificial Sequence: Synthetic peptide
  Seed: LRMKWMMAMKYPITA
LRMKYMMFMTYPGTA

SEQ ID NO: 246249 - protein, 15 aa, Artificial Sequence
  Description of Artificial Sequence: Synthetic peptide
  Seed: LRMKWMMAMKYPITA
LRMKYMMFMTYPHTA

SEQ ID NO: 246250 - protein, 15 aa, Artificial Sequence
  Description of Artificial Sequence: Synthetic peptide
  Seed: LRMKWMMAMKYPITA
LRMKYMMFMTYPITA

SEQ ID NO: 246251 - protein, 15 aa, Artificial Sequence
  Description of Artificial Sequence: Synthetic peptide
  Seed: LRMKWMMAMKYPITA
LRMKYMMFMTYPKTA

SEQ ID NO: 246252 - protein, 15 aa, Artificial Sequence
  Description of Artificial Sequence: Synthetic peptide
  Seed: LRMKWMMAMKYPITA
LRMKYMMFMTYPLTA

SEQ ID NO: 246253 - protein, 15 aa, Artificial Sequence
  Description of Artificial Sequence: Synthetic peptide
  Seed: LRMKWMMAMKYPITA
LRMKYMMFMTYPMTA

SEQ ID NO: 246254 - protein, 15 aa, Artificial Sequence
  Description of Artificial Sequence: Synthetic peptide
  Seed: LRMKWMMAMKYPITA
LRMKYMMFMTYPNTA

SEQ ID NO: 246255 - protein, 15 aa, Artificial Sequence
  Description of Artificial Sequence: Synthetic peptide
  Seed: LRMKWMMAMKYPITA
LRMKYMMFMTYPPTA

SEQ ID NO: 246256 - protein, 15 aa, Artificial Sequence
  Description of Artificial Sequence: Synthetic peptide
  Seed: LRMKWMMAMKYPITA
LRMKYMMFMTYPQTA

SEQ ID NO: 246257 - protein, 15 aa, Artificial Sequence
  Description of Artificial Sequence: Synthetic peptide
  Seed: LRMKWMMAMKYPITA
LRMKYMMFMTYPRTA

SEQ ID NO: 246258 - protein, 15 aa, Artificial Sequence
  Description of Artificial Sequence: Synthetic peptide
  Seed: LRMKWMMAMKYPITA
LRMKYMMFMTYPSTA

SEQ ID NO: 246259 - protein, 15 aa, Artificial Sequence
  Description of Artificial Sequence: Synthetic peptide
  Seed: LRMKWMMAMKYPITA
LRMKYMMFMTYPTTA

SEQ ID NO: 246260 - protein, 15 aa, Artificial Sequence
  Description of Artificial Sequence: Synthetic peptide
  Seed: LRMKWMMAMKYPITA
LRMKYMMFMTYPVTA

SEQ ID NO: 246261 - protein, 15 aa, Artificial Sequence
  Description of Artificial Sequence: Synthetic peptide
  Seed: LRMKWMMAMKYPITA
LRMKYMMFMTYPYTA

SEQ ID NO: 246262 - protein, 15 aa, Artificial Sequence
  Description of Artificial Sequence: Synthetic peptide
  Seed: LRMKWMMAMKYPITA
LRMKYMMFMVYPATA

SEQ ID NO: 246263 - protein, 15 aa, Artificial Sequence
  Description of Artificial Sequence: Synthetic peptide
  Seed: LRMKWMMAMKYPITA
LRMKYMMFMVYPDTA

SEQ ID NO: 246264 - protein, 15 aa, Artificial Sequence
  Description of Artificial Sequence: Synthetic peptide
  Seed: LRMKWMMAMKYPITA
LRMKYMMFMVYPETA

SEQ ID NO: 246265 - protein, 15 aa, Artificial Sequence
  Description of Artificial Sequence: Synthetic peptide
  Seed: LRMKWMMAMKYPITA
LRMKYMMFMVYPGTA

SEQ ID NO: 246266 - protein, 15 aa, Artificial Sequence
  Description of Artificial Sequence: Synthetic peptide
  Seed: LRMKWMMAMKYPITA
LRMKYMMFMVYPHTA

SEQ ID NO: 246267 - protein, 15 aa, Artificial Sequence
  Description of Artificial Sequence: Synthetic peptide
  Seed: LRMKWMMAMKYPITA
LRMKYMMFMVYPITA

SEQ ID NO: 246268 - protein, 15 aa, Artificial Sequence
  Description of Artificial Sequence: Synthetic peptide
  Seed: LRMKWMMAMKYPITA
LRMKYMMFMVYPKTA

SEQ ID NO: 246269 - protein, 15 aa, Artificial Sequence
  Description of Artificial Sequence: Synthetic peptide
  Seed: LRMKWMMAMKYPITA
LRMKYMMFMVYPLTA

SEQ ID NO: 246270 - protein, 15 aa, Artificial Sequence
  Description of Artificial Sequence: Synthetic peptide
  Seed: LRMKWMMAMKYPITA
LRMKYMMFMVYPMTA

SEQ ID NO: 246271 - protein, 15 aa, Artificial Sequence
  Description of Artificial Sequence: Synthetic peptide
  Seed: LRMKWMMAMKYPITA
LRMKYMMFMVYPNTA

SEQ ID NO: 246272 - protein, 15 aa, Artificial Sequence
  Description of Artificial Sequence: Synthetic peptide
  Seed: LRMKWMMAMKYPITA
LRMKYMMFMVYPPTA

SEQ ID NO: 246273 - protein, 15 aa, Artificial Sequence
  Description of Artificial Sequence: Synthetic peptide
  Seed: LRMKWMMAMKYPITA
LRMKYMMFMVYPQTA

SEQ ID NO: 246274 - protein, 15 aa, Artificial Sequence
  Description of Artificial Sequence: Synthetic peptide
  Seed: LRMKWMMAMKYPITA
LRMKYMMFMVYPRTA

SEQ ID NO: 246275 - protein, 15 aa, Artificial Sequence
  Description of Artificial Sequence: Synthetic peptide
  Seed: LRMKWMMAMKYPITA
LRMKYMMFMVYPSTA

SEQ ID NO: 246276 - protein, 15 aa, Artificial Sequence
  Description of Artificial Sequence: Synthetic peptide
  Seed: LRMKWMMAMKYPITA
LRMKYMMFMVYPTTA

SEQ ID NO: 246277 - protein, 15 aa, Artificial Sequence
  Description of Artificial Sequence: Synthetic peptide
  Seed: LRMKWMMAMKYPITA
LRMKYMMFMVYPVTA

SEQ ID NO: 246278 - protein, 15 aa, Artificial Sequence
  Description of Artificial Sequence: Synthetic peptide
  Seed: LRMKWMMAMKYPITA
LRMKYMMFMVYPYTA

SEQ ID NO: 246279 - protein, 15 aa, Artificial Sequence
  Description of Artificial Sequence: Synthetic peptide
  Seed: LRMKWMMAMKYPITA
LRMKYMMGMAYPATA

SEQ ID NO: 246280 - protein, 15 aa, Artificial Sequence
  Description of Artificial Sequence: Synthetic peptide
  Seed: LRMKWMMAMKYPITA
LRMKYMMGMAYPCTA

SEQ ID NO: 246281 - protein, 15 aa, Artificial Sequence
  Description of Artificial Sequence: Synthetic peptide
  Seed: LRMKWMMAMKYPITA
LRMKYMMGMAYPDTA

SEQ ID NO: 246282 - protein, 15 aa, Artificial Sequence
  Description of Artificial Sequence: Synthetic peptide
  Seed: LRMKWMMAMKYPITA
LRMKYMMGMAYPETA

SEQ ID NO: 246283 - protein, 15 aa, Artificial Sequence
  Description of Artificial Sequence: Synthetic peptide
  Seed: LRMKWMMAMKYPITA
LRMKYMMGMAYPFTA

SEQ ID NO: 246284 - protein, 15 aa, Artificial Sequence
  Description of Artificial Sequence: Synthetic peptide
  Seed: LRMKWMMAMKYPITA
LRMKYMMGMAYPGTA

SEQ ID NO: 246285 - protein, 15 aa, Artificial Sequence
  Description of Artificial Sequence: Synthetic peptide
  Seed: LRMKWMMAMKYPITA
LRMKYMMGMAYPHTA

SEQ ID NO: 246286 - protein, 15 aa, Artificial Sequence
  Description of Artificial Sequence: Synthetic peptide
  Seed: LRMKWMMAMKYPITA
LRMKYMMGMAYPITA

SEQ ID NO: 246287 - protein, 15 aa, Artificial Sequence
  Description of Artificial Sequence: Synthetic peptide
  Seed: LRMKWMMAMKYPITA
LRMKYMMGMAYPKTA

SEQ ID NO: 246288 - protein, 15 aa, Artificial Sequence
  Description of Artificial Sequence: Synthetic peptide
  Seed: LRMKWMMAMKYPITA
LRMKYMMGMAYPLTA

SEQ ID NO: 246289 - protein, 15 aa, Artificial Sequence
  Description of Artificial Sequence: Synthetic peptide
  Seed: LRMKWMMAMKYPITA
LRMKYMMGMAYPMTA

SEQ ID NO: 246290 - protein, 15 aa, Artificial Sequence
  Description of Artificial Sequence: Synthetic peptide
  Seed: LRMKWMMAMKYPITA
LRMKYMMGMAYPNTA

SEQ ID NO: 246291 - protein, 15 aa, Artificial Sequence
  Description of Artificial Sequence: Synthetic peptide
  Seed: LRMKWMMAMKYPITA
LRMKYMMGMAYPPTA

SEQ ID NO: 246292 - protein, 15 aa, Artificial Sequence
  Description of Artificial Sequence: Synthetic peptide
  Seed: LRMKWMMAMKYPITA
LRMKYMMGMAYPQTA

SEQ ID NO: 246293 - protein, 15 aa, Artificial Sequence
  Description of Artificial Sequence: Synthetic peptide
  Seed: LRMKWMMAMKYPITA
LRMKYMMGMAYPRTA

SEQ ID NO: 246294 - protein, 15 aa, Artificial Sequence
  Description of Artificial Sequence: Synthetic peptide
  Seed: LRMKWMMAMKYPITA
LRMKYMMGMAYPSTA

SEQ ID NO: 246295 - protein, 15 aa, Artificial Sequence
  Description of Artificial Sequence: Synthetic peptide
  Seed: LRMKWMMAMKYPITA
LRMKYMMGMAYPTTA

SEQ ID NO: 246296 - protein, 15 aa, Artificial Sequence
  Description of Artificial Sequence: Synthetic peptide
  Seed: LRMKWMMAMKYPITA
LRMKYMMGMAYPVTA

SEQ ID NO: 246297 - protein, 15 aa, Artificial Sequence
  Description of Artificial Sequence: Synthetic peptide
  Seed: LRMKWMMAMKYPITA
LRMKYMMGMAYPWTA

SEQ ID NO: 246298 - protein, 15 aa, Artificial Sequence
  Description of Artificial Sequence: Synthetic peptide
  Seed: LRMKWMMAMKYPITA
LRMKYMMGMAYPYTA

SEQ ID NO: 246299 - protein, 15 aa, Artificial Sequence
  Description of Artificial Sequence: Synthetic peptide
  Seed: LRMKWMMAMKYPITA
LRMKYMMGMCYPATA

SEQ ID NO: 246300 - protein, 15 aa, Artificial Sequence
  Description of Artificial Sequence: Synthetic peptide
  Seed: LRMKWMMAMKYPITA
LRMKYMMGMCYPFTA

SEQ ID NO: 246301 - protein, 15 aa, Artificial Sequence
  Description of Artificial Sequence: Synthetic peptide
  Seed: LRMKWMMAMKYPITA
LRMKYMMGMCYPITA

SEQ ID NO: 246302 - protein, 15 aa, Artificial Sequence
  Description of Artificial Sequence: Synthetic peptide
  Seed: LRMKWMMAMKYPITA
LRMKYMMGMCYPLTA

SEQ ID NO: 246303 - protein, 15 aa, Artificial Sequence
  Description of Artificial Sequence: Synthetic peptide
  Seed: LRMKWMMAMKYPITA
LRMKYMMGMCYPMTA

SEQ ID NO: 246304 - protein, 15 aa, Artificial Sequence
  Description of Artificial Sequence: Synthetic peptide
  Seed: LRMKWMMAMKYPITA
LRMKYMMGMCYPNTA

SEQ ID NO: 246305 - protein, 15 aa, Artificial Sequence
  Description of Artificial Sequence: Synthetic peptide
  Seed: LRMKWMMAMKYPITA
LRMKYMMGMCYPSTA

SEQ ID NO: 246306 - protein, 15 aa, Artificial Sequence
  Description of Artificial Sequence: Synthetic peptide
  Seed: LRMKWMMAMKYPITA
LRMKYMMGMCYPTTA

SEQ ID NO: 246307 - protein, 15 aa, Artificial Sequence
  Description of Artificial Sequence: Synthetic peptide
  Seed: LRMKWMMAMKYPITA
LRMKYMMGMCYPVTA

SEQ ID NO: 246308 - protein, 15 aa, Artificial Sequence
  Description of Artificial Sequence: Synthetic peptide
  Seed: LRMKWMMAMKYPITA
LRMKYMMGMDYPATA

SEQ ID NO: 246309 - protein, 15 aa, Artificial Sequence
  Description of Artificial Sequence: Synthetic peptide
  Seed: LRMKWMMAMKYPITA
LRMKYMMGMDYPITA

SEQ ID NO: 246310 - protein, 15 aa, Artificial Sequence
  Description of Artificial Sequence: Synthetic peptide
  Seed: LRMKWMMAMKYPITA
LRMKYMMGMDYPLTA

SEQ ID NO: 246311 - protein, 15 aa, Artificial Sequence
  Description of Artificial Sequence: Synthetic peptide
  Seed: LRMKWMMAMKYPITA
LRMKYMMGMDYPMTA

SEQ ID NO: 246312 - protein, 15 aa, Artificial Sequence
  Description of Artificial Sequence: Synthetic peptide
  Seed: LRMKWMMAMKYPITA
LRMKYMMGMDYPVTA

SEQ ID NO: 246313 - protein, 15 aa, Artificial Sequence
  Description of Artificial Sequence: Synthetic peptide
  Seed: LRMKWMMAMKYPITA
LRMKYMMGMEYPATA

SEQ ID NO: 246314 - protein, 15 aa, Artificial Sequence
  Description of Artificial Sequence: Synthetic peptide
  Seed: LRMKWMMAMKYPITA
LRMKYMMGMEYPITA

SEQ ID NO: 246315 - protein, 15 aa, Artificial Sequence
  Description of Artificial Sequence: Synthetic peptide
  Seed: LRMKWMMAMKYPITA
LRMKYMMGMEYPLTA

SEQ ID NO: 246316 - protein, 15 aa, Artificial Sequence
  Description of Artificial Sequence: Synthetic peptide
  Seed: LRMKWMMAMKYPITA
LRMKYMMGMEYPMTA

SEQ ID NO: 246317 - protein, 15 aa, Artificial Sequence
  Description of Artificial Sequence: Synthetic peptide
  Seed: LRMKWMMAMKYPITA
LRMKYMMGMEYPSTA

SEQ ID NO: 246318 - protein, 15 aa, Artificial Sequence
  Description of Artificial Sequence: Synthetic peptide
  Seed: LRMKWMMAMKYPITA
LRMKYMMGMEYPTTA

SEQ ID NO: 246319 - protein, 15 aa, Artificial Sequence
  Description of Artificial Sequence: Synthetic peptide
  Seed: LRMKWMMAMKYPITA
LRMKYMMGMEYPVTA

SEQ ID NO: 246320 - protein, 15 aa, Artificial Sequence
  Description of Artificial Sequence: Synthetic peptide
  Seed: LRMKWMMAMKYPITA
LRMKYMMGMFYPATA

SEQ ID NO: 246321 - protein, 15 aa, Artificial Sequence
  Description of Artificial Sequence: Synthetic peptide
  Seed: LRMKWMMAMKYPITA
LRMKYMMGMFYPITA

SEQ ID NO: 246322 - protein, 15 aa, Artificial Sequence
  Description of Artificial Sequence: Synthetic peptide
  Seed: LRMKWMMAMKYPITA
LRMKYMMGMFYPLTA

SEQ ID NO: 246323 - protein, 15 aa, Artificial Sequence
  Description of Artificial Sequence: Synthetic peptide
  Seed: LRMKWMMAMKYPITA
LRMKYMMGMFYPVTA

SEQ ID NO: 246324 - protein, 15 aa, Artificial Sequence
  Description of Artificial Sequence: Synthetic peptide
  Seed: LRMKWMMAMKYPITA
LRMKYMMGMGYPATA

SEQ ID NO: 246325 - protein, 15 aa, Artificial Sequence
  Description of Artificial Sequence: Synthetic peptide
  Seed: LRMKWMMAMKYPITA
LRMKYMMGMGYPCTA

SEQ ID NO: 246326 - protein, 15 aa, Artificial Sequence
  Description of Artificial Sequence: Synthetic peptide
  Seed: LRMKWMMAMKYPITA
LRMKYMMGMGYPDTA

SEQ ID NO: 246327 - protein, 15 aa, Artificial Sequence
  Description of Artificial Sequence: Synthetic peptide
  Seed: LRMKWMMAMKYPITA
LRMKYMMGMGYPETA

SEQ ID NO: 246328 - protein, 15 aa, Artificial Sequence
  Description of Artificial Sequence: Synthetic peptide
  Seed: LRMKWMMAMKYPITA
LRMKYMMGMGYPFTA

SEQ ID NO: 246329 - protein, 15 aa, Artificial Sequence
  Description of Artificial Sequence: Synthetic peptide
  Seed: LRMKWMMAMKYPITA
LRMKYMMGMGYPGTA

SEQ ID NO: 246330 - protein, 15 aa, Artificial Sequence
  Description of Artificial Sequence: Synthetic peptide
  Seed: LRMKWMMAMKYPITA
LRMKYMMGMGYPHTA

SEQ ID NO: 246331 - protein, 15 aa, Artificial Sequence
  Description of Artificial Sequence: Synthetic peptide
  Seed: LRMKWMMAMKYPITA
LRMKYMMGMGYPITA

SEQ ID NO: 246332 - protein, 15 aa, Artificial Sequence
  Description of Artificial Sequence: Synthetic peptide
  Seed: LRMKWMMAMKYPITA
LRMKYMMGMGYPKTA

SEQ ID NO: 246333 - protein, 15 aa, Artificial Sequence
  Description of Artificial Sequence: Synthetic peptide
  Seed: LRMKWMMAMKYPITA
LRMKYMMGMGYPLTA

SEQ ID NO: 246334 - protein, 15 aa, Artificial Sequence
  Description of Artificial Sequence: Synthetic peptide
  Seed: LRMKWMMAMKYPITA
LRMKYMMGMGYPMTA

SEQ ID NO: 246335 - protein, 15 aa, Artificial Sequence
  Description of Artificial Sequence: Synthetic peptide
  Seed: LRMKWMMAMKYPITA
LRMKYMMGMGYPNTA

SEQ ID NO: 246336 - protein, 15 aa, Artificial Sequence
  Description of Artificial Sequence: Synthetic peptide
  Seed: LRMKWMMAMKYPITA
LRMKYMMGMGYPPTA

SEQ ID NO: 246337 - protein, 15 aa, Artificial Sequence
  Description of Artificial Sequence: Synthetic peptide
  Seed: LRMKWMMAMKYPITA
LRMKYMMGMGYPQTA

SEQ ID NO: 246338 - protein, 15 aa, Artificial Sequence
  Description of Artificial Sequence: Synthetic peptide
  Seed: LRMKWMMAMKYPITA
LRMKYMMGMGYPRTA

SEQ ID NO: 246339 - protein, 15 aa, Artificial Sequence
  Description of Artificial Sequence: Synthetic peptide
  Seed: LRMKWMMAMKYPITA
LRMKYMMGMGYPSTA

SEQ ID NO: 246340 - protein, 15 aa, Artificial Sequence
  Description of Artificial Sequence: Synthetic peptide
  Seed: LRMKWMMAMKYPITA
LRMKYMMGMGYPTTA

SEQ ID NO: 246341 - protein, 15 aa, Artificial Sequence
  Description of Artificial Sequence: Synthetic peptide
  Seed: LRMKWMMAMKYPITA
LRMKYMMGMGYPVTA

SEQ ID NO: 246342 - protein, 15 aa, Artificial Sequence
  Description of Artificial Sequence: Synthetic peptide
  Seed: LRMKWMMAMKYPITA
LRMKYMMGMGYPWTA

SEQ ID NO: 246343 - protein, 15 aa, Artificial Sequence
  Description of Artificial Sequence: Synthetic peptide
  Seed: LRMKWMMAMKYPITA
LRMKYMMGMGYPYTA

SEQ ID NO: 246344 - protein, 15 aa, Artificial Sequence
  Description of Artificial Sequence: Synthetic peptide
  Seed: LRMKWMMAMKYPITA
LRMKYMMGMHYPATA

SEQ ID NO: 246345 - protein, 15 aa, Artificial Sequence
  Description of Artificial Sequence: Synthetic peptide
  Seed: LRMKWMMAMKYPITA
LRMKYMMGMHYPGTA

SEQ ID NO: 246346 - protein, 15 aa, Artificial Sequence
  Description of Artificial Sequence: Synthetic peptide
  Seed: LRMKWMMAMKYPITA
LRMKYMMGMHYPITA

SEQ ID NO: 246347 - protein, 15 aa, Artificial Sequence
  Description of Artificial Sequence: Synthetic peptide
  Seed: LRMKWMMAMKYPITA
LRMKYMMGMHYPLTA

SEQ ID NO: 246348 - protein, 15 aa, Artificial Sequence
  Description of Artificial Sequence: Synthetic peptide
  Seed: LRMKWMMAMKYPITA
LRMKYMMGMHYPMTA

SEQ ID NO: 246349 - protein, 15 aa, Artificial Sequence
  Description of Artificial Sequence: Synthetic peptide
  Seed: LRMKWMMAMKYPITA
LRMKYMMGMHYPSTA

SEQ ID NO: 246350 - protein, 15 aa, Artificial Sequence
  Description of Artificial Sequence: Synthetic peptide
  Seed: LRMKWMMAMKYPITA
LRMKYMMGMHYPTTA

SEQ ID NO: 246351 - protein, 15 aa, Artificial Sequence
  Description of Artificial Sequence: Synthetic peptide
  Seed: LRMKWMMAMKYPITA
LRMKYMMGMHYPVTA

SEQ ID NO: 246352 - protein, 15 aa, Artificial Sequence
  Description of Artificial Sequence: Synthetic peptide
  Seed: LRMKWMMAMKYPITA
LRMKYMMGMIYPATA

SEQ ID NO: 246353 - protein, 15 aa, Artificial Sequence
  Description of Artificial Sequence: Synthetic peptide
  Seed: LRMKWMMAMKYPITA
LRMKYMMGMIYPCTA

SEQ ID NO: 246354 - protein, 15 aa, Artificial Sequence
  Description of Artificial Sequence: Synthetic peptide
  Seed: LRMKWMMAMKYPITA
LRMKYMMGMIYPDTA

SEQ ID NO: 246355 - protein, 15 aa, Artificial Sequence
  Description of Artificial Sequence: Synthetic peptide
  Seed: LRMKWMMAMKYPITA
LRMKYMMGMIYPETA

SEQ ID NO: 246356 - protein, 15 aa, Artificial Sequence
  Description of Artificial Sequence: Synthetic peptide
  Seed: LRMKWMMAMKYPITA
LRMKYMMGMIYPFTA

SEQ ID NO: 246357 - protein, 15 aa, Artificial Sequence
  Description of Artificial Sequence: Synthetic peptide
  Seed: LRMKWMMAMKYPITA
LRMKYMMGMIYPGTA

SEQ ID NO: 246358 - protein, 15 aa, Artificial Sequence
  Description of Artificial Sequence: Synthetic peptide
  Seed: LRMKWMMAMKYPITA
LRMKYMMGMIYPHTA

SEQ ID NO: 246359 - protein, 15 aa, Artificial Sequence
  Description of Artificial Sequence: Synthetic peptide
  Seed: LRMKWMMAMKYPITA
LRMKYMMGMIYPITA

SEQ ID NO: 246360 - protein, 15 aa, Artificial Sequence
  Description of Artificial Sequence: Synthetic peptide
  Seed: LRMKWMMAMKYPITA
LRMKYMMGMIYPLTA

SEQ ID NO: 246361 - protein, 15 aa, Artificial Sequence
  Description of Artificial Sequence: Synthetic peptide
  Seed: LRMKWMMAMKYPITA
LRMKYMMGMIYPMTA

SEQ ID NO: 246362 - protein, 15 aa, Artificial Sequence
  Description of Artificial Sequence: Synthetic peptide
  Seed: LRMKWMMAMKYPITA
LRMKYMMGMIYPNTA

SEQ ID NO: 246363 - protein, 15 aa, Artificial Sequence
  Description of Artificial Sequence: Synthetic peptide
  Seed: LRMKWMMAMKYPITA
LRMKYMMGMIYPPTA

SEQ ID NO: 246364 - protein, 15 aa, Artificial Sequence
  Description of Artificial Sequence: Synthetic peptide
  Seed: LRMKWMMAMKYPITA
LRMKYMMGMIYPQTA

SEQ ID NO: 246365 - protein, 15 aa, Artificial Sequence
  Description of Artificial Sequence: Synthetic peptide
  Seed: LRMKWMMAMKYPITA
LRMKYMMGMIYPRTA

SEQ ID NO: 246366 - protein, 15 aa, Artificial Sequence
  Description of Artificial Sequence: Synthetic peptide
  Seed: LRMKWMMAMKYPITA
LRMKYMMGMIYPSTA

SEQ ID NO: 246367 - protein, 15 aa, Artificial Sequence
  Description of Artificial Sequence: Synthetic peptide
  Seed: LRMKWMMAMKYPITA
LRMKYMMGMIYPTTA

SEQ ID NO: 246368 - protein, 15 aa, Artificial Sequence
  Description of Artificial Sequence: Synthetic peptide
  Seed: LRMKWMMAMKYPITA
LRMKYMMGMIYPVTA

SEQ ID NO: 246369 - protein, 15 aa, Artificial Sequence
  Description of Artificial Sequence: Synthetic peptide
  Seed: LRMKWMMAMKYPITA
LRMKYMMGMIYPYTA

SEQ ID NO: 246370 - protein, 15 aa, Artificial Sequence
  Description of Artificial Sequence: Synthetic peptide
  Seed: LRMKWMMAMKYPITA
LRMKYMMGMKYPATA

SEQ ID NO: 246371 - protein, 15 aa, Artificial Sequence
  Description of Artificial Sequence: Synthetic peptide
  Seed: LRMKWMMAMKYPITA
LRMKYMMGMKYPITA

SEQ ID NO: 246372 - protein, 15 aa, Artificial Sequence
  Description of Artificial Sequence: Synthetic peptide
  Seed: LRMKWMMAMKYPITA
LRMKYMMGMKYPLTA

SEQ ID NO: 246373 - protein, 15 aa, Artificial Sequence
  Description of Artificial Sequence: Synthetic peptide
  Seed: LRMKWMMAMKYPITA
LRMKYMMGMKYPMTA

SEQ ID NO: 246374 - protein, 15 aa, Artificial Sequence
  Description of Artificial Sequence: Synthetic peptide
  Seed: LRMKWMMAMKYPITA
LRMKYMMGMKYPRTA

SEQ ID NO: 246375 - protein, 15 aa, Artificial Sequence
  Description of Artificial Sequence: Synthetic peptide
  Seed: LRMKWMMAMKYPITA
LRMKYMMGMKYPSTA

SEQ ID NO: 246376 - protein, 15 aa, Artificial Sequence
  Description of Artificial Sequence: Synthetic peptide
  Seed: LRMKWMMAMKYPITA
LRMKYMMGMKYPTTA

SEQ ID NO: 246377 - protein, 15 aa, Artificial Sequence
  Description of Artificial Sequence: Synthetic peptide
  Seed: LRMKWMMAMKYPITA
LRMKYMMGMKYPVTA

SEQ ID NO: 246378 - protein, 15 aa, Artificial Sequence
  Description of Artificial Sequence: Synthetic peptide
  Seed: LRMKWMMAMKYPITA
LRMKYMMGMLYPATA

SEQ ID NO: 246379 - protein, 15 aa, Artificial Sequence
  Description of Artificial Sequence: Synthetic peptide
  Seed: LRMKWMMAMKYPITA
LRMKYMMGMLYPCTA

SEQ ID NO: 246380 - protein, 15 aa, Artificial Sequence
  Description of Artificial Sequence: Synthetic peptide
  Seed: LRMKWMMAMKYPITA
LRMKYMMGMLYPGTA

SEQ ID NO: 246381 - protein, 15 aa, Artificial Sequence
  Description of Artificial Sequence: Synthetic peptide
  Seed: LRMKWMMAMKYPITA
LRMKYMMGMLYPITA

SEQ ID NO: 246382 - protein, 15 aa, Artificial Sequence
  Description of Artificial Sequence: Synthetic peptide
  Seed: LRMKWMMAMKYPITA
LRMKYMMGMLYPLTA

SEQ ID NO: 246383 - protein, 15 aa, Artificial Sequence
  Description of Artificial Sequence: Synthetic peptide
  Seed: LRMKWMMAMKYPITA
LRMKYMMGMLYPMTA

SEQ ID NO: 246384 - protein, 15 aa, Artificial Sequence
  Description of Artificial Sequence: Synthetic peptide
  Seed: LRMKWMMAMKYPITA
LRMKYMMGMLYPNTA

SEQ ID NO: 246385 - protein, 15 aa, Artificial Sequence
  Description of Artificial Sequence: Synthetic peptide
  Seed: LRMKWMMAMKYPITA
LRMKYMMGMLYPSTA

SEQ ID NO: 246386 - protein, 15 aa, Artificial Sequence
  Description of Artificial Sequence: Synthetic peptide
  Seed: LRMKWMMAMKYPITA
LRMKYMMGMLYPTTA

SEQ ID NO: 246387 - protein, 15 aa, Artificial Sequence
  Description of Artificial Sequence: Synthetic peptide
  Seed: LRMKWMMAMKYPITA
LRMKYMMGMLYPVTA

SEQ ID NO: 246388 - protein, 15 aa, Artificial Sequence
  Description of Artificial Sequence: Synthetic peptide
  Seed: LRMKWMMAMKYPITA
LRMKYMMGMMYPATA

SEQ ID NO: 246389 - protein, 15 aa, Artificial Sequence
  Description of Artificial Sequence: Synthetic peptide
  Seed: LRMKWMMAMKYPITA
LRMKYMMGMMYPCTA

SEQ ID NO: 246390 - protein, 15 aa, Artificial Sequence
  Description of Artificial Sequence: Synthetic peptide
  Seed: LRMKWMMAMKYPITA
LRMKYMMGMMYPDTA

SEQ ID NO: 246391 - protein, 15 aa, Artificial Sequence
  Description of Artificial Sequence: Synthetic peptide
  Seed: LRMKWMMAMKYPITA
LRMKYMMGMMYPGTA

SEQ ID NO: 246392 - protein, 15 aa, Artificial Sequence
  Description of Artificial Sequence: Synthetic peptide
  Seed: LRMKWMMAMKYPITA
LRMKYMMGMMYPITA

SEQ ID NO: 246393 - protein, 15 aa, Artificial Sequence
  Description of Artificial Sequence: Synthetic peptide
  Seed: LRMKWMMAMKYPITA
LRMKYMMGMMYPLTA

SEQ ID NO: 246394 - protein, 15 aa, Artificial Sequence
  Description of Artificial Sequence: Synthetic peptide
  Seed: LRMKWMMAMKYPITA
LRMKYMMGMMYPMTA

SEQ ID NO: 246395 - protein, 15 aa, Artificial Sequence
  Description of Artificial Sequence: Synthetic peptide
  Seed: LRMKWMMAMKYPITA
LRMKYMMGMMYPNTA

SEQ ID NO: 246396 - protein, 15 aa, Artificial Sequence
  Description of Artificial Sequence: Synthetic peptide
  Seed: LRMKWMMAMKYPITA
LRMKYMMGMMYPSTA

SEQ ID NO: 246397 - protein, 15 aa, Artificial Sequence
  Description of Artificial Sequence: Synthetic peptide
  Seed: LRMKWMMAMKYPITA
LRMKYMMGMMYPTTA

SEQ ID NO: 246398 - protein, 15 aa, Artificial Sequence
  Description of Artificial Sequence: Synthetic peptide
  Seed: LRMKWMMAMKYPITA
LRMKYMMGMMYPVTA

SEQ ID NO: 246399 - protein, 15 aa, Artificial Sequence
  Description of Artificial Sequence: Synthetic peptide
  Seed: LRMKWMMAMKYPITA
LRMKYMMGMNYPATA

SEQ ID NO: 246400 - protein, 15 aa, Artificial Sequence
  Description of Artificial Sequence: Synthetic peptide
  Seed: LRMKWMMAMKYPITA
LRMKYMMGMNYPCTA

SEQ ID NO: 246401 - protein, 15 aa, Artificial Sequence
  Description of Artificial Sequence: Synthetic peptide
  Seed: LRMKWMMAMKYPITA
LRMKYMMGMNYPFTA

SEQ ID NO: 246402 - protein, 15 aa, Artificial Sequence
  Description of Artificial Sequence: Synthetic peptide
  Seed: LRMKWMMAMKYPITA
LRMKYMMGMNYPGTA

SEQ ID NO: 246403 - protein, 15 aa, Artificial Sequence
  Description of Artificial Sequence: Synthetic peptide
  Seed: LRMKWMMAMKYPITA
LRMKYMMGMNYPHTA

SEQ ID NO: 246404 - protein, 15 aa, Artificial Sequence
  Description of Artificial Sequence: Synthetic peptide
  Seed: LRMKWMMAMKYPITA
LRMKYMMGMNYPITA

SEQ ID NO: 246405 - protein, 15 aa, Artificial Sequence
  Description of Artificial Sequence: Synthetic peptide
  Seed: LRMKWMMAMKYPITA
LRMKYMMGMNYPKTA

SEQ ID NO: 246406 - protein, 15 aa, Artificial Sequence
  Description of Artificial Sequence: Synthetic peptide
  Seed: LRMKWMMAMKYPITA
LRMKYMMGMNYPLTA

SEQ ID NO: 246407 - protein, 15 aa, Artificial Sequence
  Description of Artificial Sequence: Synthetic peptide
  Seed: LRMKWMMAMKYPITA
LRMKYMMGMNYPMTA

SEQ ID NO: 246408 - protein, 15 aa, Artificial Sequence
  Description of Artificial Sequence: Synthetic peptide
  Seed: LRMKWMMAMKYPITA
LRMKYMMGMNYPNTA

SEQ ID NO: 246409 - protein, 15 aa, Artificial Sequence
  Description of Artificial Sequence: Synthetic peptide
  Seed: LRMKWMMAMKYPITA
LRMKYMMGMNYPPTA

SEQ ID NO: 246410 - protein, 15 aa, Artificial Sequence
  Description of Artificial Sequence: Synthetic peptide
  Seed: LRMKWMMAMKYPITA
LRMKYMMGMNYPQTA

SEQ ID NO: 246411 - protein, 15 aa, Artificial Sequence
  Description of Artificial Sequence: Synthetic peptide
  Seed: LRMKWMMAMKYPITA
LRMKYMMGMNYPRTA

SEQ ID NO: 246412 - protein, 15 aa, Artificial Sequence
  Description of Artificial Sequence: Synthetic peptide
  Seed: LRMKWMMAMKYPITA
LRMKYMMGMNYPSTA

SEQ ID NO: 246413 - protein, 15 aa, Artificial Sequence
  Description of Artificial Sequence: Synthetic peptide
  Seed: LRMKWMMAMKYPITA
LRMKYMMGMNYPTTA

SEQ ID NO: 246414 - protein, 15 aa, Artificial Sequence
  Description of Artificial Sequence: Synthetic peptide
  Seed: LRMKWMMAMKYPITA
LRMKYMMGMNYPVTA

SEQ ID NO: 246415 - protein, 15 aa, Artificial Sequence
  Description of Artificial Sequence: Synthetic peptide
  Seed: LRMKWMMAMKYPITA
LRMKYMMGMNYPWTA

SEQ ID NO: 246416 - protein, 15 aa, Artificial Sequence
  Description of Artificial Sequence: Synthetic peptide
  Seed: LRMKWMMAMKYPITA
LRMKYMMGMNYPYTA

SEQ ID NO: 246417 - protein, 15 aa, Artificial Sequence
  Description of Artificial Sequence: Synthetic peptide
  Seed: LRMKWMMAMKYPITA
LRMKYMMGMPYPATA

SEQ ID NO: 246418 - protein, 15 aa, Artificial Sequence
  Description of Artificial Sequence: Synthetic peptide
  Seed: LRMKWMMAMKYPITA
LRMKYMMGMPYPCTA

SEQ ID NO: 246419 - protein, 15 aa, Artificial Sequence
  Description of Artificial Sequence: Synthetic peptide
  Seed: LRMKWMMAMKYPITA
LRMKYMMGMPYPDTA

SEQ ID NO: 246420 - protein, 15 aa, Artificial Sequence
  Description of Artificial Sequence: Synthetic peptide
  Seed: LRMKWMMAMKYPITA
LRMKYMMGMPYPETA

SEQ ID NO: 246421 - protein, 15 aa, Artificial Sequence
  Description of Artificial Sequence: Synthetic peptide
  Seed: LRMKWMMAMKYPITA
LRMKYMMGMPYPFTA

SEQ ID NO: 246422 - protein, 15 aa, Artificial Sequence
  Description of Artificial Sequence: Synthetic peptide
  Seed: LRMKWMMAMKYPITA
LRMKYMMGMPYPGTA

SEQ ID NO: 246423 - protein, 15 aa, Artificial Sequence
  Description of Artificial Sequence: Synthetic peptide
  Seed: LRMKWMMAMKYPITA
LRMKYMMGMPYPHTA

SEQ ID NO: 246424 - protein, 15 aa, Artificial Sequence
  Description of Artificial Sequence: Synthetic peptide
  Seed: LRMKWMMAMKYPITA
LRMKYMMGMPYPITA

SEQ ID NO: 246425 - protein, 15 aa, Artificial Sequence
  Description of Artificial Sequence: Synthetic peptide
  Seed: LRMKWMMAMKYPITA
LRMKYMMGMPYPKTA

SEQ ID NO: 246426 - protein, 15 aa, Artificial Sequence
  Description of Artificial Sequence: Synthetic peptide
  Seed: LRMKWMMAMKYPITA
LRMKYMMGMPYPLTA

SEQ ID NO: 246427 - protein, 15 aa, Artificial Sequence
  Description of Artificial Sequence: Synthetic peptide
  Seed: LRMKWMMAMKYPITA
LRMKYMMGMPYPMTA

SEQ ID NO: 246428 - protein, 15 aa, Artificial Sequence
  Description of Artificial Sequence: Synthetic peptide
  Seed: LRMKWMMAMKYPITA
LRMKYMMGMPYPNTA

SEQ ID NO: 246429 - protein, 15 aa, Artificial Sequence
  Description of Artificial Sequence: Synthetic peptide
  Seed: LRMKWMMAMKYPITA
LRMKYMMGMPYPPTA

SEQ ID NO: 246430 - protein, 15 aa, Artificial Sequence
  Description of Artificial Sequence: Synthetic peptide
  Seed: LRMKWMMAMKYPITA
LRMKYMMGMPYPQTA

SEQ ID NO: 246431 - protein, 15 aa, Artificial Sequence
  Description of Artificial Sequence: Synthetic peptide
  Seed: LRMKWMMAMKYPITA
LRMKYMMGMPYPRTA

SEQ ID NO: 246432 - protein, 15 aa, Artificial Sequence
  Description of Artificial Sequence: Synthetic peptide
  Seed: LRMKWMMAMKYPITA
LRMKYMMGMPYPSTA

SEQ ID NO: 246433 - protein, 15 aa, Artificial Sequence
  Description of Artificial Sequence: Synthetic peptide
  Seed: LRMKWMMAMKYPITA
LRMKYMMGMPYPTTA

SEQ ID NO: 246434 - protein, 15 aa, Artificial Sequence
  Description of Artificial Sequence: Synthetic peptide
  Seed: LRMKWMMAMKYPITA
LRMKYMMGMPYPVTA

SEQ ID NO: 246435 - protein, 15 aa, Artificial Sequence
  Description of Artificial Sequence: Synthetic peptide
  Seed: LRMKWMMAMKYPITA
LRMKYMMGMPYPWTA

SEQ ID NO: 246436 - protein, 15 aa, Artificial Sequence
  Description of Artificial Sequence: Synthetic peptide
  Seed: LRMKWMMAMKYPITA
LRMKYMMGMPYPYTA

SEQ ID NO: 246437 - protein, 15 aa, Artificial Sequence
  Description of Artificial Sequence: Synthetic peptide
  Seed: LRMKWMMAMKYPITA
LRMKYMMGMQYPATA

SEQ ID NO: 246438 - protein, 15 aa, Artificial Sequence
  Description of Artificial Sequence: Synthetic peptide
  Seed: LRMKWMMAMKYPITA
LRMKYMMGMQYPGTA

SEQ ID NO: 246439 - protein, 15 aa, Artificial Sequence
  Description of Artificial Sequence: Synthetic peptide
  Seed: LRMKWMMAMKYPITA
LRMKYMMGMQYPITA

SEQ ID NO: 246440 - protein, 15 aa, Artificial Sequence
  Description of Artificial Sequence: Synthetic peptide
  Seed: LRMKWMMAMKYPITA
LRMKYMMGMQYPLTA

SEQ ID NO: 246441 - protein, 15 aa, Artificial Sequence
  Description of Artificial Sequence: Synthetic peptide
  Seed: LRMKWMMAMKYPITA
LRMKYMMGMQYPMTA

SEQ ID NO: 246442 - protein, 15 aa, Artificial Sequence
  Description of Artificial Sequence: Synthetic peptide
  Seed: LRMKWMMAMKYPITA
LRMKYMMGMQYPNTA

SEQ ID NO: 246443 - protein, 15 aa, Artificial Sequence
  Description of Artificial Sequence: Synthetic peptide
  Seed: LRMKWMMAMKYPITA
LRMKYMMGMQYPSTA

SEQ ID NO: 246444 - protein, 15 aa, Artificial Sequence
  Description of Artificial Sequence: Synthetic peptide
  Seed: LRMKWMMAMKYPITA
LRMKYMMGMQYPTTA

SEQ ID NO: 246445 - protein, 15 aa, Artificial Sequence
  Description of Artificial Sequence: Synthetic peptide
  Seed: LRMKWMMAMKYPITA
LRMKYMMGMQYPVTA

SEQ ID NO: 246446 - protein, 15 aa, Artificial Sequence
  Description of Artificial Sequence: Synthetic peptide
  Seed: LRMKWMMAMKYPITA
LRMKYMMGMRYPATA

SEQ ID NO: 246447 - protein, 15 aa, Artificial Sequence
  Description of Artificial Sequence: Synthetic peptide
  Seed: LRMKWMMAMKYPITA
LRMKYMMGMRYPFTA

SEQ ID NO: 246448 - protein, 15 aa, Artificial Sequence
  Description of Artificial Sequence: Synthetic peptide
  Seed: LRMKWMMAMKYPITA
LRMKYMMGMRYPGTA

SEQ ID NO: 246449 - protein, 15 aa, Artificial Sequence
  Description of Artificial Sequence: Synthetic peptide
  Seed: LRMKWMMAMKYPITA
LRMKYMMGMRYPHTA

SEQ ID NO: 246450 - protein, 15 aa, Artificial Sequence
  Description of Artificial Sequence: Synthetic peptide
  Seed: LRMKWMMAMKYPITA
LRMKYMMGMRYPITA

SEQ ID NO: 246451 - protein, 15 aa, Artificial Sequence
  Description of Artificial Sequence: Synthetic peptide
  Seed: LRMKWMMAMKYPITA
LRMKYMMGMRYPKTA

SEQ ID NO: 246452 - protein, 15 aa, Artificial Sequence
  Description of Artificial Sequence: Synthetic peptide
  Seed: LRMKWMMAMKYPITA
LRMKYMMGMRYPLTA

SEQ ID NO: 246453 - protein, 15 aa, Artificial Sequence
  Description of Artificial Sequence: Synthetic peptide
  Seed: LRMKWMMAMKYPITA
LRMKYMMGMRYPMTA

SEQ ID NO: 246454 - protein, 15 aa, Artificial Sequence
  Description of Artificial Sequence: Synthetic peptide
  Seed: LRMKWMMAMKYPITA
LRMKYMMGMRYPQTA

SEQ ID NO: 246455 - protein, 15 aa, Artificial Sequence
  Description of Artificial Sequence: Synthetic peptide
  Seed: LRMKWMMAMKYPITA
LRMKYMMGMRYPRTA

SEQ ID NO: 246456 - protein, 15 aa, Artificial Sequence
  Description of Artificial Sequence: Synthetic peptide
  Seed: LRMKWMMAMKYPITA
LRMKYMMGMRYPSTA

SEQ ID NO: 246457 - protein, 15 aa, Artificial Sequence
  Description of Artificial Sequence: Synthetic peptide
  Seed: LRMKWMMAMKYPITA
LRMKYMMGMRYPVTA

SEQ ID NO: 246458 - protein, 15 aa, Artificial Sequence
  Description of Artificial Sequence: Synthetic peptide
  Seed: LRMKWMMAMKYPITA
LRMKYMMGMRYPYTA

SEQ ID NO: 246459 - protein, 15 aa, Artificial Sequence
  Description of Artificial Sequence: Synthetic peptide
  Seed: LRMKWMMAMKYPITA
LRMKYMMGMSYPATA

SEQ ID NO: 246460 - protein, 15 aa, Artificial Sequence
  Description of Artificial Sequence: Synthetic peptide
  Seed: LRMKWMMAMKYPITA
LRMKYMMGMSYPCTA

SEQ ID NO: 246461 - protein, 15 aa, Artificial Sequence
  Description of Artificial Sequence: Synthetic peptide
  Seed: LRMKWMMAMKYPITA
LRMKYMMGMSYPDTA

SEQ ID NO: 246462 - protein, 15 aa, Artificial Sequence
  Description of Artificial Sequence: Synthetic peptide
  Seed: LRMKWMMAMKYPITA
LRMKYMMGMSYPETA

SEQ ID NO: 246463 - protein, 15 aa, Artificial Sequence
  Description of Artificial Sequence: Synthetic peptide
  Seed: LRMKWMMAMKYPITA
LRMKYMMGMSYPFTA

SEQ ID NO: 246464 - protein, 15 aa, Artificial Sequence
  Description of Artificial Sequence: Synthetic peptide
  Seed: LRMKWMMAMKYPITA
LRMKYMMGMSYPGTA

SEQ ID NO: 246465 - protein, 15 aa, Artificial Sequence
  Description of Artificial Sequence: Synthetic peptide
  Seed: LRMKWMMAMKYPITA
LRMKYMMGMSYPHTA

SEQ ID NO: 246466 - protein, 15 aa, Artificial Sequence
  Description of Artificial Sequence: Synthetic peptide
  Seed: LRMKWMMAMKYPITA
LRMKYMMGMSYPITA

SEQ ID NO: 246467 - protein, 15 aa, Artificial Sequence
  Description of Artificial Sequence: Synthetic peptide
  Seed: LRMKWMMAMKYPITA
LRMKYMMGMSYPKTA

SEQ ID NO: 246468 - protein, 15 aa, Artificial Sequence
  Description of Artificial Sequence: Synthetic peptide
  Seed: LRMKWMMAMKYPITA
LRMKYMMGMSYPLTA

SEQ ID NO: 246469 - protein, 15 aa, Artificial Sequence
  Description of Artificial Sequence: Synthetic peptide
  Seed: LRMKWMMAMKYPITA
LRMKYMMGMSYPMTA

SEQ ID NO: 246470 - protein, 15 aa, Artificial Sequence
  Description of Artificial Sequence: Synthetic peptide
  Seed: LRMKWMMAMKYPITA
LRMKYMMGMSYPNTA

SEQ ID NO: 246471 - protein, 15 aa, Artificial Sequence
  Description of Artificial Sequence: Synthetic peptide
  Seed: LRMKWMMAMKYPITA
LRMKYMMGMSYPPTA

SEQ ID NO: 246472 - protein, 15 aa, Artificial Sequence
  Description of Artificial Sequence: Synthetic peptide
  Seed: LRMKWMMAMKYPITA
LRMKYMMGMSYPQTA

SEQ ID NO: 246473 - protein, 15 aa, Artificial Sequence
  Description of Artificial Sequence: Synthetic peptide
  Seed: LRMKWMMAMKYPITA
LRMKYMMGMSYPRTA

SEQ ID NO: 246474 - protein, 15 aa, Artificial Sequence
  Description of Artificial Sequence: Synthetic peptide
  Seed: LRMKWMMAMKYPITA
LRMKYMMGMSYPSTA

SEQ ID NO: 246475 - protein, 15 aa, Artificial Sequence
  Description of Artificial Sequence: Synthetic peptide
  Seed: LRMKWMMAMKYPITA
LRMKYMMGMSYPTTA

SEQ ID NO: 246476 - protein, 15 aa, Artificial Sequence
  Description of Artificial Sequence: Synthetic peptide
  Seed: LRMKWMMAMKYPITA
LRMKYMMGMSYPVTA

SEQ ID NO: 246477 - protein, 15 aa, Artificial Sequence
  Description of Artificial Sequence: Synthetic peptide
  Seed: LRMKWMMAMKYPITA
LRMKYMMGMSYPWTA

SEQ ID NO: 246478 - protein, 15 aa, Artificial Sequence
  Description of Artificial Sequence: Synthetic peptide
  Seed: LRMKWMMAMKYPITA
LRMKYMMGMSYPYTA

SEQ ID NO: 246479 - protein, 15 aa, Artificial Sequence
  Description of Artificial Sequence: Synthetic peptide
  Seed: LRMKWMMAMKYPITA
LRMKYMMGMTYPATA

SEQ ID NO: 246480 - protein, 15 aa, Artificial Sequence
  Description of Artificial Sequence: Synthetic peptide
  Seed: LRMKWMMAMKYPITA
LRMKYMMGMTYPCTA

SEQ ID NO: 246481 - protein, 15 aa, Artificial Sequence
  Description of Artificial Sequence: Synthetic peptide
  Seed: LRMKWMMAMKYPITA
LRMKYMMGMTYPDTA

SEQ ID NO: 246482 - protein, 15 aa, Artificial Sequence
  Description of Artificial Sequence: Synthetic peptide
  Seed: LRMKWMMAMKYPITA
LRMKYMMGMTYPETA

SEQ ID NO: 246483 - protein, 15 aa, Artificial Sequence
  Description of Artificial Sequence: Synthetic peptide
  Seed: LRMKWMMAMKYPITA
LRMKYMMGMTYPFTA

SEQ ID NO: 246484 - protein, 15 aa, Artificial Sequence
  Description of Artificial Sequence: Synthetic peptide
  Seed: LRMKWMMAMKYPITA
LRMKYMMGMTYPGTA

SEQ ID NO: 246485 - protein, 15 aa, Artificial Sequence
  Description of Artificial Sequence: Synthetic peptide
  Seed: LRMKWMMAMKYPITA
LRMKYMMGMTYPHTA

SEQ ID NO: 246486 - protein, 15 aa, Artificial Sequence
  Description of Artificial Sequence: Synthetic peptide
  Seed: LRMKWMMAMKYPITA
LRMKYMMGMTYPITA

SEQ ID NO: 246487 - protein, 15 aa, Artificial Sequence
  Description of Artificial Sequence: Synthetic peptide
  Seed: LRMKWMMAMKYPITA
LRMKYMMGMTYPKTA

SEQ ID NO: 246488 - protein, 15 aa, Artificial Sequence
  Description of Artificial Sequence: Synthetic peptide
  Seed: LRMKWMMAMKYPITA
LRMKYMMGMTYPLTA

SEQ ID NO: 246489 - protein, 15 aa, Artificial Sequence
  Description of Artificial Sequence: Synthetic peptide
  Seed: LRMKWMMAMKYPITA
LRMKYMMGMTYPMTA

SEQ ID NO: 246490 - protein, 15 aa, Artificial Sequence
  Description of Artificial Sequence: Synthetic peptide
  Seed: LRMKWMMAMKYPITA
LRMKYMMGMTYPNTA

SEQ ID NO: 246491 - protein, 15 aa, Artificial Sequence
  Description of Artificial Sequence: Synthetic peptide
  Seed: LRMKWMMAMKYPITA
LRMKYMMGMTYPPTA

SEQ ID NO: 246492 - protein, 15 aa, Artificial Sequence
  Description of Artificial Sequence: Synthetic peptide
  Seed: LRMKWMMAMKYPITA
LRMKYMMGMTYPQTA

SEQ ID NO: 246493 - protein, 15 aa, Artificial Sequence
  Description of Artificial Sequence: Synthetic peptide
  Seed: LRMKWMMAMKYPITA
LRMKYMMGMTYPRTA

SEQ ID NO: 246494 - protein, 15 aa, Artificial Sequence
  Description of Artificial Sequence: Synthetic peptide
  Seed: LRMKWMMAMKYPITA
LRMKYMMGMTYPSTA

SEQ ID NO: 246495 - protein, 15 aa, Artificial Sequence
  Description of Artificial Sequence: Synthetic peptide
  Seed: LRMKWMMAMKYPITA
LRMKYMMGMTYPTTA

SEQ ID NO: 246496 - protein, 15 aa, Artificial Sequence
  Description of Artificial Sequence: Synthetic peptide
  Seed: LRMKWMMAMKYPITA
LRMKYMMGMTYPVTA

SEQ ID NO: 246497 - protein, 15 aa, Artificial Sequence
  Description of Artificial Sequence: Synthetic peptide
  Seed: LRMKWMMAMKYPITA
LRMKYMMGMTYPWTA

SEQ ID NO: 246498 - protein, 15 aa, Artificial Sequence
  Description of Artificial Sequence: Synthetic peptide
  Seed: LRMKWMMAMKYPITA
LRMKYMMGMTYPYTA

SEQ ID NO: 246499 - protein, 15 aa, Artificial Sequence
  Description of Artificial Sequence: Synthetic peptide
  Seed: LRMKWMMAMKYPITA
LRMKYMMGMVYPATA

SEQ ID NO: 246500 - protein, 15 aa, Artificial Sequence
  Description of Artificial Sequence: Synthetic peptide
  Seed: LRMKWMMAMKYPITA
LRMKYMMGMVYPCTA

SEQ ID NO: 246501 - protein, 15 aa, Artificial Sequence
  Description of Artificial Sequence: Synthetic peptide
  Seed: LRMKWMMAMKYPITA
LRMKYMMGMVYPDTA

SEQ ID NO: 246502 - protein, 15 aa, Artificial Sequence
  Description of Artificial Sequence: Synthetic peptide
  Seed: LRMKWMMAMKYPITA
LRMKYMMGMVYPETA

SEQ ID NO: 246503 - protein, 15 aa, Artificial Sequence
  Description of Artificial Sequence: Synthetic peptide
  Seed: LRMKWMMAMKYPITA
LRMKYMMGMVYPFTA

SEQ ID NO: 246504 - protein, 15 aa, Artificial Sequence
  Description of Artificial Sequence: Synthetic peptide
  Seed: LRMKWMMAMKYPITA
LRMKYMMGMVYPGTA

SEQ ID NO: 246505 - protein, 15 aa, Artificial Sequence
  Description of Artificial Sequence: Synthetic peptide
  Seed: LRMKWMMAMKYPITA
LRMKYMMGMVYPHTA

SEQ ID NO: 246506 - protein, 15 aa, Artificial Sequence
  Description of Artificial Sequence: Synthetic peptide
  Seed: LRMKWMMAMKYPITA
LRMKYMMGMVYPITA

SEQ ID NO: 246507 - protein, 15 aa, Artificial Sequence
  Description of Artificial Sequence: Synthetic peptide
  Seed: LRMKWMMAMKYPITA
LRMKYMMGMVYPKTA

SEQ ID NO: 246508 - protein, 15 aa, Artificial Sequence
  Description of Artificial Sequence: Synthetic peptide
  Seed: LRMKWMMAMKYPITA
LRMKYMMGMVYPLTA

SEQ ID NO: 246509 - protein, 15 aa, Artificial Sequence
  Description of Artificial Sequence: Synthetic peptide
  Seed: LRMKWMMAMKYPITA
LRMKYMMGMVYPMTA

SEQ ID NO: 246510 - protein, 15 aa, Artificial Sequence
  Description of Artificial Sequence: Synthetic peptide
  Seed: LRMKWMMAMKYPITA
LRMKYMMGMVYPNTA

SEQ ID NO: 246511 - protein, 15 aa, Artificial Sequence
  Description of Artificial Sequence: Synthetic peptide
  Seed: LRMKWMMAMKYPITA
LRMKYMMGMVYPPTA

SEQ ID NO: 246512 - protein, 15 aa, Artificial Sequence
  Description of Artificial Sequence: Synthetic peptide
  Seed: LRMKWMMAMKYPITA
LRMKYMMGMVYPQTA

SEQ ID NO: 246513 - protein, 15 aa, Artificial Sequence
  Description of Artificial Sequence: Synthetic peptide
  Seed: LRMKWMMAMKYPITA
LRMKYMMGMVYPRTA

SEQ ID NO: 246514 - protein, 15 aa, Artificial Sequence
  Description of Artificial Sequence: Synthetic peptide
  Seed: LRMKWMMAMKYPITA
LRMKYMMGMVYPSTA

SEQ ID NO: 246515 - protein, 15 aa, Artificial Sequence
  Description of Artificial Sequence: Synthetic peptide
  Seed: LRMKWMMAMKYPITA
LRMKYMMGMVYPTTA

SEQ ID NO: 246516 - protein, 15 aa, Artificial Sequence
  Description of Artificial Sequence: Synthetic peptide
  Seed: LRMKWMMAMKYPITA
LRMKYMMGMVYPVTA

SEQ ID NO: 246517 - protein, 15 aa, Artificial Sequence
  Description of Artificial Sequence: Synthetic peptide
  Seed: LRMKWMMAMKYPITA
LRMKYMMGMVYPWTA

SEQ ID NO: 246518 - protein, 15 aa, Artificial Sequence
  Description of Artificial Sequence: Synthetic peptide
  Seed: LRMKWMMAMKYPITA
LRMKYMMGMVYPYTA

SEQ ID NO: 246519 - protein, 15 aa, Artificial Sequence
  Description of Artificial Sequence: Synthetic peptide
  Seed: LRMKWMMAMKYPITA
LRMKYMMGMWYPATA

SEQ ID NO: 246520 - protein, 15 aa, Artificial Sequence
  Description of Artificial Sequence: Synthetic peptide
  Seed: LRMKWMMAMKYPITA
LRMKYMMGMWYPITA

SEQ ID NO: 246521 - protein, 15 aa, Artificial Sequence
  Description of Artificial Sequence: Synthetic peptide
  Seed: LRMKWMMAMKYPITA
LRMKYMMGMWYPLTA

SEQ ID NO: 246522 - protein, 15 aa, Artificial Sequence
  Description of Artificial Sequence: Synthetic peptide
  Seed: LRMKWMMAMKYPITA
LRMKYMMGMWYPMTA

SEQ ID NO: 246523 - protein, 15 aa, Artificial Sequence
  Description of Artificial Sequence: Synthetic peptide
  Seed: LRMKWMMAMKYPITA
LRMKYMMGMWYPVTA

SEQ ID NO: 246524 - protein, 15 aa, Artificial Sequence
  Description of Artificial Sequence: Synthetic peptide
  Seed: LRMKWMMAMKYPITA
LRMKYMMGMYYPATA

SEQ ID NO: 246525 - protein, 15 aa, Artificial Sequence
  Description of Artificial Sequence: Synthetic peptide
  Seed: LRMKWMMAMKYPITA
LRMKYMMGMYYPITA

SEQ ID NO: 246526 - protein, 15 aa, Artificial Sequence
  Description of Artificial Sequence: Synthetic peptide
  Seed: LRMKWMMAMKYPITA
LRMKYMMGMYYPLTA

SEQ ID NO: 246527 - protein, 15 aa, Artificial Sequence
  Description of Artificial Sequence: Synthetic peptide
  Seed: LRMKWMMAMKYPITA
LRMKYMMGMYYPMTA

SEQ ID NO: 246528 - protein, 15 aa, Artificial Sequence
  Description of Artificial Sequence: Synthetic peptide
  Seed: LRMKWMMAMKYPITA
LRMKYMMGMYYPVTA

SEQ ID NO: 246529 - protein, 15 aa, Artificial Sequence
  Description of Artificial Sequence: Synthetic peptide
  Seed: LRMKWMMAMKYPITA
LRMKYMMHMAYPATA

SEQ ID NO: 246530 - protein, 15 aa, Artificial Sequence
  Description of Artificial Sequence: Synthetic peptide
  Seed: LRMKWMMAMKYPITA
LRMKYMMHMAYPCTA

SEQ ID NO: 246531 - protein, 15 aa, Artificial Sequence
  Description of Artificial Sequence: Synthetic peptide
  Seed: LRMKWMMAMKYPITA
LRMKYMMHMAYPDTA

SEQ ID NO: 246532 - protein, 15 aa, Artificial Sequence
  Description of Artificial Sequence: Synthetic peptide
  Seed: LRMKWMMAMKYPITA
LRMKYMMHMAYPETA

SEQ ID NO: 246533 - protein, 15 aa, Artificial Sequence
  Description of Artificial Sequence: Synthetic peptide
  Seed: LRMKWMMAMKYPITA
LRMKYMMHMAYPFTA

SEQ ID NO: 246534 - protein, 15 aa, Artificial Sequence
  Description of Artificial Sequence: Synthetic peptide
  Seed: LRMKWMMAMKYPITA
LRMKYMMHMAYPGTA

SEQ ID NO: 246535 - protein, 15 aa, Artificial Sequence
  Description of Artificial Sequence: Synthetic peptide
  Seed: LRMKWMMAMKYPITA
LRMKYMMHMAYPHTA

SEQ ID NO: 246536 - protein, 15 aa, Artificial Sequence
  Description of Artificial Sequence: Synthetic peptide
  Seed: LRMKWMMAMKYPITA
LRMKYMMHMAYPITA

SEQ ID NO: 246537 - protein, 15 aa, Artificial Sequence
  Description of Artificial Sequence: Synthetic peptide
  Seed: LRMKWMMAMKYPITA
LRMKYMMHMAYPKTA

SEQ ID NO: 246538 - protein, 15 aa, Artificial Sequence
  Description of Artificial Sequence: Synthetic peptide
  Seed: LRMKWMMAMKYPITA
LRMKYMMHMAYPLTA

SEQ ID NO: 246539 - protein, 15 aa, Artificial Sequence
  Description of Artificial Sequence: Synthetic peptide
  Seed: LRMKWMMAMKYPITA
LRMKYMMHMAYPMTA

SEQ ID NO: 246540 - protein, 15 aa, Artificial Sequence
  Description of Artificial Sequence: Synthetic peptide
  Seed: LRMKWMMAMKYPITA
LRMKYMMHMAYPNTA

SEQ ID NO: 246541 - protein, 15 aa, Artificial Sequence
  Description of Artificial Sequence: Synthetic peptide
  Seed: LRMKWMMAMKYPITA
LRMKYMMHMAYPPTA

SEQ ID NO: 246542 - protein, 15 aa, Artificial Sequence
  Description of Artificial Sequence: Synthetic peptide
  Seed: LRMKWMMAMKYPITA
LRMKYMMHMAYPQTA

SEQ ID NO: 246543 - protein, 15 aa, Artificial Sequence
  Description of Artificial Sequence: Synthetic peptide
  Seed: LRMKWMMAMKYPITA
LRMKYMMHMAYPRTA

SEQ ID NO: 246544 - protein, 15 aa, Artificial Sequence
  Description of Artificial Sequence: Synthetic peptide
  Seed: LRMKWMMAMKYPITA
LRMKYMMHMAYPSTA

SEQ ID NO: 246545 - protein, 15 aa, Artificial Sequence
  Description of Artificial Sequence: Synthetic peptide
  Seed: LRMKWMMAMKYPITA
LRMKYMMHMAYPTTA

SEQ ID NO: 246546 - protein, 15 aa, Artificial Sequence
  Description of Artificial Sequence: Synthetic peptide
  Seed: LRMKWMMAMKYPITA
LRMKYMMHMAYPVTA

SEQ ID NO: 246547 - protein, 15 aa, Artificial Sequence
  Description of Artificial Sequence: Synthetic peptide
  Seed: LRMKWMMAMKYPITA
LRMKYMMHMAYPWTA

SEQ ID NO: 246548 - protein, 15 aa, Artificial Sequence
  Description of Artificial Sequence: Synthetic peptide
  Seed: LRMKWMMAMKYPITA
LRMKYMMHMAYPYTA

SEQ ID NO: 246549 - protein, 15 aa, Artificial Sequence
  Description of Artificial Sequence: Synthetic peptide
  Seed: LRMKWMMAMKYPITA
LRMKYMMHMCYPATA

SEQ ID NO: 246550 - protein, 15 aa, Artificial Sequence
  Description of Artificial Sequence: Synthetic peptide
  Seed: LRMKWMMAMKYPITA
LRMKYMMHMCYPITA

SEQ ID NO: 246551 - protein, 15 aa, Artificial Sequence
  Description of Artificial Sequence: Synthetic peptide
  Seed: LRMKWMMAMKYPITA
LRMKYMMHMCYPLTA

SEQ ID NO: 246552 - protein, 15 aa, Artificial Sequence
  Description of Artificial Sequence: Synthetic peptide
  Seed: LRMKWMMAMKYPITA
LRMKYMMHMCYPMTA

SEQ ID NO: 246553 - protein, 15 aa, Artificial Sequence
  Description of Artificial Sequence: Synthetic peptide
  Seed: LRMKWMMAMKYPITA
LRMKYMMHMCYPVTA

SEQ ID NO: 246554 - protein, 15 aa, Artificial Sequence
  Description of Artificial Sequence: Synthetic peptide
  Seed: LRMKWMMAMKYPITA
LRMKYMMHMDYPITA

SEQ ID NO: 246555 - protein, 15 aa, Artificial Sequence
  Description of Artificial Sequence: Synthetic peptide
  Seed: LRMKWMMAMKYPITA
LRMKYMMHMDYPLTA

SEQ ID NO: 246556 - protein, 15 aa, Artificial Sequence
  Description of Artificial Sequence: Synthetic peptide
  Seed: LRMKWMMAMKYPITA
LRMKYMMHMDYPVTA

SEQ ID NO: 246557 - protein, 15 aa, Artificial Sequence
  Description of Artificial Sequence: Synthetic peptide
  Seed: LRMKWMMAMKYPITA
LRMKYMMHMEYPITA

SEQ ID NO: 246558 - protein, 15 aa, Artificial Sequence
  Description of Artificial Sequence: Synthetic peptide
  Seed: LRMKWMMAMKYPITA
LRMKYMMHMEYPLTA

SEQ ID NO: 246559 - protein, 15 aa, Artificial Sequence
  Description of Artificial Sequence: Synthetic peptide
  Seed: LRMKWMMAMKYPITA
LRMKYMMHMEYPVTA

SEQ ID NO: 246560 - protein, 15 aa, Artificial Sequence
  Description of Artificial Sequence: Synthetic peptide
  Seed: LRMKWMMAMKYPITA
LRMKYMMHMFYPFTA

SEQ ID NO: 246561 - protein, 15 aa, Artificial Sequence
  Description of Artificial Sequence: Synthetic peptide
  Seed: LRMKWMMAMKYPITA
LRMKYMMHMFYPITA

SEQ ID NO: 246562 - protein, 15 aa, Artificial Sequence
  Description of Artificial Sequence: Synthetic peptide
  Seed: LRMKWMMAMKYPITA
LRMKYMMHMFYPLTA

SEQ ID NO: 246563 - protein, 15 aa, Artificial Sequence
  Description of Artificial Sequence: Synthetic peptide
  Seed: LRMKWMMAMKYPITA
LRMKYMMHMFYPMTA

SEQ ID NO: 246564 - protein, 15 aa, Artificial Sequence
  Description of Artificial Sequence: Synthetic peptide
  Seed: LRMKWMMAMKYPITA
LRMKYMMHMFYPVTA

SEQ ID NO: 246565 - protein, 15 aa, Artificial Sequence
  Description of Artificial Sequence: Synthetic peptide
  Seed: LRMKWMMAMKYPITA
LRMKYMMHMGYPATA

SEQ ID NO: 246566 - protein, 15 aa, Artificial Sequence
  Description of Artificial Sequence: Synthetic peptide
  Seed: LRMKWMMAMKYPITA
LRMKYMMHMGYPCTA

SEQ ID NO: 246567 - protein, 15 aa, Artificial Sequence
  Description of Artificial Sequence: Synthetic peptide
  Seed: LRMKWMMAMKYPITA
LRMKYMMHMGYPFTA

SEQ ID NO: 246568 - protein, 15 aa, Artificial Sequence
  Description of Artificial Sequence: Synthetic peptide
  Seed: LRMKWMMAMKYPITA
LRMKYMMHMGYPGTA

SEQ ID NO: 246569 - protein, 15 aa, Artificial Sequence
  Description of Artificial Sequence: Synthetic peptide
  Seed: LRMKWMMAMKYPITA
LRMKYMMHMGYPHTA

SEQ ID NO: 246570 - protein, 15 aa, Artificial Sequence
  Description of Artificial Sequence: Synthetic peptide
  Seed: LRMKWMMAMKYPITA
LRMKYMMHMGYPITA

SEQ ID NO: 246571 - protein, 15 aa, Artificial Sequence
  Description of Artificial Sequence: Synthetic peptide
  Seed: LRMKWMMAMKYPITA
LRMKYMMHMGYPLTA

SEQ ID NO: 246572 - protein, 15 aa, Artificial Sequence
  Description of Artificial Sequence: Synthetic peptide
  Seed: LRMKWMMAMKYPITA
LRMKYMMHMGYPMTA

SEQ ID NO: 246573 - protein, 15 aa, Artificial Sequence
  Description of Artificial Sequence: Synthetic peptide
  Seed: LRMKWMMAMKYPITA
LRMKYMMHMGYPNTA

SEQ ID NO: 246574 - protein, 15 aa, Artificial Sequence
  Description of Artificial Sequence: Synthetic peptide
  Seed: LRMKWMMAMKYPITA
LRMKYMMHMGYPPTA

SEQ ID NO: 246575 - protein, 15 aa, Artificial Sequence
  Description of Artificial Sequence: Synthetic peptide
  Seed: LRMKWMMAMKYPITA
LRMKYMMHMGYPQTA

SEQ ID NO: 246576 - protein, 15 aa, Artificial Sequence
  Description of Artificial Sequence: Synthetic peptide
  Seed: LRMKWMMAMKYPITA
LRMKYMMHMGYPRTA

SEQ ID NO: 246577 - protein, 15 aa, Artificial Sequence
  Description of Artificial Sequence: Synthetic peptide
  Seed: LRMKWMMAMKYPITA
LRMKYMMHMGYPSTA

SEQ ID NO: 246578 - protein, 15 aa, Artificial Sequence
  Description of Artificial Sequence: Synthetic peptide
  Seed: LRMKWMMAMKYPITA
LRMKYMMHMGYPTTA

SEQ ID NO: 246579 - protein, 15 aa, Artificial Sequence
  Description of Artificial Sequence: Synthetic peptide
  Seed: LRMKWMMAMKYPITA
LRMKYMMHMGYPVTA

SEQ ID NO: 246580 - protein, 15 aa, Artificial Sequence
  Description of Artificial Sequence: Synthetic peptide
  Seed: LRMKWMMAMKYPITA
LRMKYMMHMGYPWTA

SEQ ID NO: 246581 - protein, 15 aa, Artificial Sequence
  Description of Artificial Sequence: Synthetic peptide
  Seed: LRMKWMMAMKYPITA
LRMKYMMHMGYPYTA

SEQ ID NO: 246582 - protein, 15 aa, Artificial Sequence
  Description of Artificial Sequence: Synthetic peptide
  Seed: LRMKWMMAMKYPITA
LRMKYMMHMHYPATA

SEQ ID NO: 246583 - protein, 15 aa, Artificial Sequence
  Description of Artificial Sequence: Synthetic peptide
  Seed: LRMKWMMAMKYPITA
LRMKYMMHMHYPFTA

SEQ ID NO: 246584 - protein, 15 aa, Artificial Sequence
  Description of Artificial Sequence: Synthetic peptide
  Seed: LRMKWMMAMKYPITA
LRMKYMMHMHYPITA

SEQ ID NO: 246585 - protein, 15 aa, Artificial Sequence
  Description of Artificial Sequence: Synthetic peptide
  Seed: LRMKWMMAMKYPITA
LRMKYMMHMHYPLTA

SEQ ID NO: 246586 - protein, 15 aa, Artificial Sequence
  Description of Artificial Sequence: Synthetic peptide
  Seed: LRMKWMMAMKYPITA
LRMKYMMHMHYPRTA

SEQ ID NO: 246587 - protein, 15 aa, Artificial Sequence
  Description of Artificial Sequence: Synthetic peptide
  Seed: LRMKWMMAMKYPITA
LRMKYMMHMHYPVTA

SEQ ID NO: 246588 - protein, 15 aa, Artificial Sequence
  Description of Artificial Sequence: Synthetic peptide
  Seed: LRMKWMMAMKYPITA
LRMKYMMHMHYPYTA

SEQ ID NO: 246589 - protein, 15 aa, Artificial Sequence
  Description of Artificial Sequence: Synthetic peptide
  Seed: LRMKWMMAMKYPITA
LRMKYMMHMIYPATA

SEQ ID NO: 246590 - protein, 15 aa, Artificial Sequence
  Description of Artificial Sequence: Synthetic peptide
  Seed: LRMKWMMAMKYPITA
LRMKYMMHMIYPCTA

SEQ ID NO: 246591 - protein, 15 aa, Artificial Sequence
  Description of Artificial Sequence: Synthetic peptide
  Seed: LRMKWMMAMKYPITA
LRMKYMMHMIYPDTA

SEQ ID NO: 246592 - protein, 15 aa, Artificial Sequence
  Description of Artificial Sequence: Synthetic peptide
  Seed: LRMKWMMAMKYPITA
LRMKYMMHMIYPFTA

SEQ ID NO: 246593 - protein, 15 aa, Artificial Sequence
  Description of Artificial Sequence: Synthetic peptide
  Seed: LRMKWMMAMKYPITA
LRMKYMMHMIYPGTA

SEQ ID NO: 246594 - protein, 15 aa, Artificial Sequence
  Description of Artificial Sequence: Synthetic peptide
  Seed: LRMKWMMAMKYPITA
LRMKYMMHMIYPITA

SEQ ID NO: 246595 - protein, 15 aa, Artificial Sequence
  Description of Artificial Sequence: Synthetic peptide
  Seed: LRMKWMMAMKYPITA
LRMKYMMHMIYPLTA

SEQ ID NO: 246596 - protein, 15 aa, Artificial Sequence
  Description of Artificial Sequence: Synthetic peptide
  Seed: LRMKWMMAMKYPITA
LRMKYMMHMIYPMTA

SEQ ID NO: 246597 - protein, 15 aa, Artificial Sequence
  Description of Artificial Sequence: Synthetic peptide
  Seed: LRMKWMMAMKYPITA
LRMKYMMHMIYPNTA

SEQ ID NO: 246598 - protein, 15 aa, Artificial Sequence
  Description of Artificial Sequence: Synthetic peptide
  Seed: LRMKWMMAMKYPITA
LRMKYMMHMIYPRTA

SEQ ID NO: 246599 - protein, 15 aa, Artificial Sequence
  Description of Artificial Sequence: Synthetic peptide
  Seed: LRMKWMMAMKYPITA
LRMKYMMHMIYPSTA

SEQ ID NO: 246600 - protein, 15 aa, Artificial Sequence
  Description of Artificial Sequence: Synthetic peptide
  Seed: LRMKWMMAMKYPITA
LRMKYMMHMIYPTTA

SEQ ID NO: 246601 - protein, 15 aa, Artificial Sequence
  Description of Artificial Sequence: Synthetic peptide
  Seed: LRMKWMMAMKYPITA
LRMKYMMHMIYPVTA

SEQ ID NO: 246602 - protein, 15 aa, Artificial Sequence
  Description of Artificial Sequence: Synthetic peptide
  Seed: LRMKWMMAMKYPITA
LRMKYMMHMKYPATA

SEQ ID NO: 246603 - protein, 15 aa, Artificial Sequence
  Description of Artificial Sequence: Synthetic peptide
  Seed: LRMKWMMAMKYPITA
LRMKYMMHMKYPFTA

SEQ ID NO: 246604 - protein, 15 aa, Artificial Sequence
  Description of Artificial Sequence: Synthetic peptide
  Seed: LRMKWMMAMKYPITA
LRMKYMMHMKYPGTA

SEQ ID NO: 246605 - protein, 15 aa, Artificial Sequence
  Description of Artificial Sequence: Synthetic peptide
  Seed: LRMKWMMAMKYPITA
LRMKYMMHMKYPHTA

SEQ ID NO: 246606 - protein, 15 aa, Artificial Sequence
  Description of Artificial Sequence: Synthetic peptide
  Seed: LRMKWMMAMKYPITA
LRMKYMMHMKYPITA

SEQ ID NO: 246607 - protein, 15 aa, Artificial Sequence
  Description of Artificial Sequence: Synthetic peptide
  Seed: LRMKWMMAMKYPITA
LRMKYMMHMKYPKTA

SEQ ID NO: 246608 - protein, 15 aa, Artificial Sequence
  Description of Artificial Sequence: Synthetic peptide
  Seed: LRMKWMMAMKYPITA
LRMKYMMHMKYPLTA

SEQ ID NO: 246609 - protein, 15 aa, Artificial Sequence
  Description of Artificial Sequence: Synthetic peptide
  Seed: LRMKWMMAMKYPITA
LRMKYMMHMKYPMTA

SEQ ID NO: 246610 - protein, 15 aa, Artificial Sequence
  Description of Artificial Sequence: Synthetic peptide
  Seed: LRMKWMMAMKYPITA
LRMKYMMHMKYPQTA

SEQ ID NO: 246611 - protein, 15 aa, Artificial Sequence
  Description of Artificial Sequence: Synthetic peptide
  Seed: LRMKWMMAMKYPITA
LRMKYMMHMKYPRTA

SEQ ID NO: 246612 - protein, 15 aa, Artificial Sequence
  Description of Artificial Sequence: Synthetic peptide
  Seed: LRMKWMMAMKYPITA
LRMKYMMHMKYPSTA

SEQ ID NO: 246613 - protein, 15 aa, Artificial Sequence
  Description of Artificial Sequence: Synthetic peptide
  Seed: LRMKWMMAMKYPITA
LRMKYMMHMKYPTTA

SEQ ID NO: 246614 - protein, 15 aa, Artificial Sequence
  Description of Artificial Sequence: Synthetic peptide
  Seed: LRMKWMMAMKYPITA
LRMKYMMHMKYPVTA

SEQ ID NO: 246615 - protein, 15 aa, Artificial Sequence
  Description of Artificial Sequence: Synthetic peptide
  Seed: LRMKWMMAMKYPITA
LRMKYMMHMKYPWTA

SEQ ID NO: 246616 - protein, 15 aa, Artificial Sequence
  Description of Artificial Sequence: Synthetic peptide
  Seed: LRMKWMMAMKYPITA
LRMKYMMHMKYPYTA

SEQ ID NO: 246617 - protein, 15 aa, Artificial Sequence
  Description of Artificial Sequence: Synthetic peptide
  Seed: LRMKWMMAMKYPITA
LRMKYMMHMLYPITA

SEQ ID NO: 246618 - protein, 15 aa, Artificial Sequence
  Description of Artificial Sequence: Synthetic peptide
  Seed: LRMKWMMAMKYPITA
LRMKYMMHMMYPITA

SEQ ID NO: 246619 - protein, 15 aa, Artificial Sequence
  Description of Artificial Sequence: Synthetic peptide
  Seed: LRMKWMMAMKYPITA
LRMKYMMHMMYPLTA

SEQ ID NO: 246620 - protein, 15 aa, Artificial Sequence
  Description of Artificial Sequence: Synthetic peptide
  Seed: LRMKWMMAMKYPITA
LRMKYMMHMMYPRTA

SEQ ID NO: 246621 - protein, 15 aa, Artificial Sequence
  Description of Artificial Sequence: Synthetic peptide
  Seed: LRMKWMMAMKYPITA
LRMKYMMHMMYPVTA

SEQ ID NO: 246622 - protein, 15 aa, Artificial Sequence
  Description of Artificial Sequence: Synthetic peptide
  Seed: LRMKWMMAMKYPITA
LRMKYMMHMNYPATA

SEQ ID NO: 246623 - protein, 15 aa, Artificial Sequence
  Description of Artificial Sequence: Synthetic peptide
  Seed: LRMKWMMAMKYPITA
LRMKYMMHMNYPFTA

SEQ ID NO: 246624 - protein, 15 aa, Artificial Sequence
  Description of Artificial Sequence: Synthetic peptide
  Seed: LRMKWMMAMKYPITA
LRMKYMMHMNYPGTA

SEQ ID NO: 246625 - protein, 15 aa, Artificial Sequence
  Description of Artificial Sequence: Synthetic peptide
  Seed: LRMKWMMAMKYPITA
LRMKYMMHMNYPITA

SEQ ID NO: 246626 - protein, 15 aa, Artificial Sequence
  Description of Artificial Sequence: Synthetic peptide
  Seed: LRMKWMMAMKYPITA
LRMKYMMHMNYPLTA

SEQ ID NO: 246627 - protein, 15 aa, Artificial Sequence
  Description of Artificial Sequence: Synthetic peptide
  Seed: LRMKWMMAMKYPITA
LRMKYMMHMNYPMTA

SEQ ID NO: 246628 - protein, 15 aa, Artificial Sequence
  Description of Artificial Sequence: Synthetic peptide
  Seed: LRMKWMMAMKYPITA
LRMKYMMHMNYPSTA

SEQ ID NO: 246629 - protein, 15 aa, Artificial Sequence
  Description of Artificial Sequence: Synthetic peptide
  Seed: LRMKWMMAMKYPITA
LRMKYMMHMNYPTTA

SEQ ID NO: 246630 - protein, 15 aa, Artificial Sequence
  Description of Artificial Sequence: Synthetic peptide
  Seed: LRMKWMMAMKYPITA
LRMKYMMHMNYPVTA

SEQ ID NO: 246631 - protein, 15 aa, Artificial Sequence
  Description of Artificial Sequence: Synthetic peptide
  Seed: LRMKWMMAMKYPITA
LRMKYMMHMNYPYTA

SEQ ID NO: 246632 - protein, 15 aa, Artificial Sequence
  Description of Artificial Sequence: Synthetic peptide
  Seed: LRMKWMMAMKYPITA
LRMKYMMHMPYPATA

SEQ ID NO: 246633 - protein, 15 aa, Artificial Sequence
  Description of Artificial Sequence: Synthetic peptide
  Seed: LRMKWMMAMKYPITA
LRMKYMMHMPYPCTA

SEQ ID NO: 246634 - protein, 15 aa, Artificial Sequence
  Description of Artificial Sequence: Synthetic peptide
  Seed: LRMKWMMAMKYPITA
LRMKYMMHMPYPFTA

SEQ ID NO: 246635 - protein, 15 aa, Artificial Sequence
  Description of Artificial Sequence: Synthetic peptide
  Seed: LRMKWMMAMKYPITA
LRMKYMMHMPYPGTA

SEQ ID NO: 246636 - protein, 15 aa, Artificial Sequence
  Description of Artificial Sequence: Synthetic peptide
  Seed: LRMKWMMAMKYPITA
LRMKYMMHMPYPHTA

SEQ ID NO: 246637 - protein, 15 aa, Artificial Sequence
  Description of Artificial Sequence: Synthetic peptide
  Seed: LRMKWMMAMKYPITA
LRMKYMMHMPYPITA

SEQ ID NO: 246638 - protein, 15 aa, Artificial Sequence
  Description of Artificial Sequence: Synthetic peptide
  Seed: LRMKWMMAMKYPITA
LRMKYMMHMPYPLTA

SEQ ID NO: 246639 - protein, 15 aa, Artificial Sequence
  Description of Artificial Sequence: Synthetic peptide
  Seed: LRMKWMMAMKYPITA
LRMKYMMHMPYPMTA

SEQ ID NO: 246640 - protein, 15 aa, Artificial Sequence
  Description of Artificial Sequence: Synthetic peptide
  Seed: LRMKWMMAMKYPITA
LRMKYMMHMPYPNTA

SEQ ID NO: 246641 - protein, 15 aa, Artificial Sequence
  Description of Artificial Sequence: Synthetic peptide
  Seed: LRMKWMMAMKYPITA
LRMKYMMHMPYPQTA

SEQ ID NO: 246642 - protein, 15 aa, Artificial Sequence
  Description of Artificial Sequence: Synthetic peptide
  Seed: LRMKWMMAMKYPITA
LRMKYMMHMPYPRTA

SEQ ID NO: 246643 - protein, 15 aa, Artificial Sequence
  Description of Artificial Sequence: Synthetic peptide
  Seed: LRMKWMMAMKYPITA
LRMKYMMHMPYPSTA

SEQ ID NO: 246644 - protein, 15 aa, Artificial Sequence
  Description of Artificial Sequence: Synthetic peptide
  Seed: LRMKWMMAMKYPITA
LRMKYMMHMPYPTTA

SEQ ID NO: 246645 - protein, 15 aa, Artificial Sequence
  Description of Artificial Sequence: Synthetic peptide
  Seed: LRMKWMMAMKYPITA
LRMKYMMHMPYPVTA

SEQ ID NO: 246646 - protein, 15 aa, Artificial Sequence
  Description of Artificial Sequence: Synthetic peptide
  Seed: LRMKWMMAMKYPITA
LRMKYMMHMPYPWTA

SEQ ID NO: 246647 - protein, 15 aa, Artificial Sequence
  Description of Artificial Sequence: Synthetic peptide
  Seed: LRMKWMMAMKYPITA
LRMKYMMHMPYPYTA

SEQ ID NO: 246648 - protein, 15 aa, Artificial Sequence
  Description of Artificial Sequence: Synthetic peptide
  Seed: LRMKWMMAMKYPITA
LRMKYMMHMQYPATA

SEQ ID NO: 246649 - protein, 15 aa, Artificial Sequence
  Description of Artificial Sequence: Synthetic peptide
  Seed: LRMKWMMAMKYPITA
LRMKYMMHMQYPITA

SEQ ID NO: 246650 - protein, 15 aa, Artificial Sequence
  Description of Artificial Sequence: Synthetic peptide
  Seed: LRMKWMMAMKYPITA
LRMKYMMHMQYPLTA

SEQ ID NO: 246651 - protein, 15 aa, Artificial Sequence
  Description of Artificial Sequence: Synthetic peptide
  Seed: LRMKWMMAMKYPITA
LRMKYMMHMQYPMTA

SEQ ID NO: 246652 - protein, 15 aa, Artificial Sequence
  Description of Artificial Sequence: Synthetic peptide
  Seed: LRMKWMMAMKYPITA
LRMKYMMHMQYPVTA

SEQ ID NO: 246653 - protein, 15 aa, Artificial Sequence
  Description of Artificial Sequence: Synthetic peptide
  Seed: LRMKWMMAMKYPITA
LRMKYMMHMRYPATA

SEQ ID NO: 246654 - protein, 15 aa, Artificial Sequence
  Description of Artificial Sequence: Synthetic peptide
  Seed: LRMKWMMAMKYPITA
LRMKYMMHMRYPDTA

SEQ ID NO: 246655 - protein, 15 aa, Artificial Sequence
  Description of Artificial Sequence: Synthetic peptide
  Seed: LRMKWMMAMKYPITA
LRMKYMMHMRYPETA

SEQ ID NO: 246656 - protein, 15 aa, Artificial Sequence
  Description of Artificial Sequence: Synthetic peptide
  Seed: LRMKWMMAMKYPITA
LRMKYMMHMRYPFTA

SEQ ID NO: 246657 - protein, 15 aa, Artificial Sequence
  Description of Artificial Sequence: Synthetic peptide
  Seed: LRMKWMMAMKYPITA
LRMKYMMHMRYPGTA

SEQ ID NO: 246658 - protein, 15 aa, Artificial Sequence
  Description of Artificial Sequence: Synthetic peptide
  Seed: LRMKWMMAMKYPITA
LRMKYMMHMRYPHTA

SEQ ID NO: 246659 - protein, 15 aa, Artificial Sequence
  Description of Artificial Sequence: Synthetic peptide
  Seed: LRMKWMMAMKYPITA
LRMKYMMHMRYPITA

SEQ ID NO: 246660 - protein, 15 aa, Artificial Sequence
  Description of Artificial Sequence: Synthetic peptide
  Seed: LRMKWMMAMKYPITA
LRMKYMMHMRYPKTA

SEQ ID NO: 246661 - protein, 15 aa, Artificial Sequence
  Description of Artificial Sequence: Synthetic peptide
  Seed: LRMKWMMAMKYPITA
LRMKYMMHMRYPLTA

SEQ ID NO: 246662 - protein, 15 aa, Artificial Sequence
  Description of Artificial Sequence: Synthetic peptide
  Seed: LRMKWMMAMKYPITA
LRMKYMMHMRYPMTA

SEQ ID NO: 246663 - protein, 15 aa, Artificial Sequence
  Description of Artificial Sequence: Synthetic peptide
  Seed: LRMKWMMAMKYPITA
LRMKYMMHMRYPNTA

SEQ ID NO: 246664 - protein, 15 aa, Artificial Sequence
  Description of Artificial Sequence: Synthetic peptide
  Seed: LRMKWMMAMKYPITA
LRMKYMMHMRYPPTA

SEQ ID NO: 246665 - protein, 15 aa, Artificial Sequence
  Description of Artificial Sequence: Synthetic peptide
  Seed: LRMKWMMAMKYPITA
LRMKYMMHMRYPQTA

SEQ ID NO: 246666 - protein, 15 aa, Artificial Sequence
  Description of Artificial Sequence: Synthetic peptide
  Seed: LRMKWMMAMKYPITA
LRMKYMMHMRYPRTA

SEQ ID NO: 246667 - protein, 15 aa, Artificial Sequence
  Description of Artificial Sequence: Synthetic peptide
  Seed: LRMKWMMAMKYPITA
LRMKYMMHMRYPSTA

SEQ ID NO: 246668 - protein, 15 aa, Artificial Sequence
  Description of Artificial Sequence: Synthetic peptide
  Seed: LRMKWMMAMKYPITA
LRMKYMMHMRYPTTA

SEQ ID NO: 246669 - protein, 15 aa, Artificial Sequence
  Description of Artificial Sequence: Synthetic peptide
  Seed: LRMKWMMAMKYPITA
LRMKYMMHMRYPVTA

SEQ ID NO: 246670 - protein, 15 aa, Artificial Sequence
  Description of Artificial Sequence: Synthetic peptide
  Seed: LRMKWMMAMKYPITA
LRMKYMMHMRYPWTA

SEQ ID NO: 246671 - protein, 15 aa, Artificial Sequence
  Description of Artificial Sequence: Synthetic peptide
  Seed: LRMKWMMAMKYPITA
LRMKYMMHMRYPYTA

SEQ ID NO: 246672 - protein, 15 aa, Artificial Sequence
  Description of Artificial Sequence: Synthetic peptide
  Seed: LRMKWMMAMKYPITA
LRMKYMMHMSYPATA

SEQ ID NO: 246673 - protein, 15 aa, Artificial Sequence
  Description of Artificial Sequence: Synthetic peptide
  Seed: LRMKWMMAMKYPITA
LRMKYMMHMSYPCTA

SEQ ID NO: 246674 - protein, 15 aa, Artificial Sequence
  Description of Artificial Sequence: Synthetic peptide
  Seed: LRMKWMMAMKYPITA
LRMKYMMHMSYPFTA

SEQ ID NO: 246675 - protein, 15 aa, Artificial Sequence
  Description of Artificial Sequence: Synthetic peptide
  Seed: LRMKWMMAMKYPITA
LRMKYMMHMSYPGTA

SEQ ID NO: 246676 - protein, 15 aa, Artificial Sequence
  Description of Artificial Sequence: Synthetic peptide
  Seed: LRMKWMMAMKYPITA
LRMKYMMHMSYPHTA

SEQ ID NO: 246677 - protein, 15 aa, Artificial Sequence
  Description of Artificial Sequence: Synthetic peptide
  Seed: LRMKWMMAMKYPITA
LRMKYMMHMSYPITA

SEQ ID NO: 246678 - protein, 15 aa, Artificial Sequence
  Description of Artificial Sequence: Synthetic peptide
  Seed: LRMKWMMAMKYPITA
LRMKYMMHMSYPLTA

SEQ ID NO: 246679 - protein, 15 aa, Artificial Sequence
  Description of Artificial Sequence: Synthetic peptide
  Seed: LRMKWMMAMKYPITA
LRMKYMMHMSYPMTA

SEQ ID NO: 246680 - protein, 15 aa, Artificial Sequence
  Description of Artificial Sequence: Synthetic peptide
  Seed: LRMKWMMAMKYPITA
LRMKYMMHMSYPNTA

SEQ ID NO: 246681 - protein, 15 aa, Artificial Sequence
  Description of Artificial Sequence: Synthetic peptide
  Seed: LRMKWMMAMKYPITA
LRMKYMMHMSYPPTA

SEQ ID NO: 246682 - protein, 15 aa, Artificial Sequence
  Description of Artificial Sequence: Synthetic peptide
  Seed: LRMKWMMAMKYPITA
LRMKYMMHMSYPQTA

SEQ ID NO: 246683 - protein, 15 aa, Artificial Sequence
  Description of Artificial Sequence: Synthetic peptide
  Seed: LRMKWMMAMKYPITA
LRMKYMMHMSYPRTA

SEQ ID NO: 246684 - protein, 15 aa, Artificial Sequence
  Description of Artificial Sequence: Synthetic peptide
  Seed: LRMKWMMAMKYPITA
LRMKYMMHMSYPSTA

SEQ ID NO: 246685 - protein, 15 aa, Artificial Sequence
  Description of Artificial Sequence: Synthetic peptide
  Seed: LRMKWMMAMKYPITA
LRMKYMMHMSYPTTA

SEQ ID NO: 246686 - protein, 15 aa, Artificial Sequence
  Description of Artificial Sequence: Synthetic peptide
  Seed: LRMKWMMAMKYPITA
LRMKYMMHMSYPVTA

SEQ ID NO: 246687 - protein, 15 aa, Artificial Sequence
  Description of Artificial Sequence: Synthetic peptide
  Seed: LRMKWMMAMKYPITA
LRMKYMMHMSYPWTA

SEQ ID NO: 246688 - protein, 15 aa, Artificial Sequence
  Description of Artificial Sequence: Synthetic peptide
  Seed: LRMKWMMAMKYPITA
LRMKYMMHMSYPYTA

SEQ ID NO: 246689 - protein, 15 aa, Artificial Sequence
  Description of Artificial Sequence: Synthetic peptide
  Seed: LRMKWMMAMKYPITA
LRMKYMMHMTYPATA

SEQ ID NO: 246690 - protein, 15 aa, Artificial Sequence
  Description of Artificial Sequence: Synthetic peptide
  Seed: LRMKWMMAMKYPITA
LRMKYMMHMTYPCTA

SEQ ID NO: 246691 - protein, 15 aa, Artificial Sequence
  Description of Artificial Sequence: Synthetic peptide
  Seed: LRMKWMMAMKYPITA
LRMKYMMHMTYPFTA

SEQ ID NO: 246692 - protein, 15 aa, Artificial Sequence
  Description of Artificial Sequence: Synthetic peptide
  Seed: LRMKWMMAMKYPITA
LRMKYMMHMTYPGTA

SEQ ID NO: 246693 - protein, 15 aa, Artificial Sequence
  Description of Artificial Sequence: Synthetic peptide
  Seed: LRMKWMMAMKYPITA
LRMKYMMHMTYPHTA

SEQ ID NO: 246694 - protein, 15 aa, Artificial Sequence
  Description of Artificial Sequence: Synthetic peptide
  Seed: LRMKWMMAMKYPITA
LRMKYMMHMTYPITA

SEQ ID NO: 246695 - protein, 15 aa, Artificial Sequence
  Description of Artificial Sequence: Synthetic peptide
  Seed: LRMKWMMAMKYPITA
LRMKYMMHMTYPLTA

SEQ ID NO: 246696 - protein, 15 aa, Artificial Sequence
  Description of Artificial Sequence: Synthetic peptide
  Seed: LRMKWMMAMKYPITA
LRMKYMMHMTYPMTA

SEQ ID NO: 246697 - protein, 15 aa, Artificial Sequence
  Description of Artificial Sequence: Synthetic peptide
  Seed: LRMKWMMAMKYPITA
LRMKYMMHMTYPNTA

SEQ ID NO: 246698 - protein, 15 aa, Artificial Sequence
  Description of Artificial Sequence: Synthetic peptide
  Seed: LRMKWMMAMKYPITA
LRMKYMMHMTYPQTA

SEQ ID NO: 246699 - protein, 15 aa, Artificial Sequence
  Description of Artificial Sequence: Synthetic peptide
  Seed: LRMKWMMAMKYPITA
LRMKYMMHMTYPRTA

SEQ ID NO: 246700 - protein, 15 aa, Artificial Sequence
  Description of Artificial Sequence: Synthetic peptide
  Seed: LRMKWMMAMKYPITA
LRMKYMMHMTYPSTA

SEQ ID NO: 246701 - protein, 15 aa, Artificial Sequence
  Description of Artificial Sequence: Synthetic peptide
  Seed: LRMKWMMAMKYPITA
LRMKYMMHMTYPTTA

SEQ ID NO: 246702 - protein, 15 aa, Artificial Sequence
  Description of Artificial Sequence: Synthetic peptide
  Seed: LRMKWMMAMKYPITA
LRMKYMMHMTYPVTA

SEQ ID NO: 246703 - protein, 15 aa, Artificial Sequence
  Description of Artificial Sequence: Synthetic peptide
  Seed: LRMKWMMAMKYPITA
LRMKYMMHMTYPYTA

SEQ ID NO: 246704 - protein, 15 aa, Artificial Sequence
  Description of Artificial Sequence: Synthetic peptide
  Seed: LRMKWMMAMKYPITA
LRMKYMMHMVYPATA

SEQ ID NO: 246705 - protein, 15 aa, Artificial Sequence
  Description of Artificial Sequence: Synthetic peptide
  Seed: LRMKWMMAMKYPITA
LRMKYMMHMVYPCTA

SEQ ID NO: 246706 - protein, 15 aa, Artificial Sequence
  Description of Artificial Sequence: Synthetic peptide
  Seed: LRMKWMMAMKYPITA
LRMKYMMHMVYPDTA

SEQ ID NO: 246707 - protein, 15 aa, Artificial Sequence
  Description of Artificial Sequence: Synthetic peptide
  Seed: LRMKWMMAMKYPITA
LRMKYMMHMVYPETA

SEQ ID NO: 246708 - protein, 15 aa, Artificial Sequence
  Description of Artificial Sequence: Synthetic peptide
  Seed: LRMKWMMAMKYPITA
LRMKYMMHMVYPFTA

SEQ ID NO: 246709 - protein, 15 aa, Artificial Sequence
  Description of Artificial Sequence: Synthetic peptide
  Seed: LRMKWMMAMKYPITA
LRMKYMMHMVYPGTA

SEQ ID NO: 246710 - protein, 15 aa, Artificial Sequence
  Description of Artificial Sequence: Synthetic peptide
  Seed: LRMKWMMAMKYPITA
LRMKYMMHMVYPHTA

SEQ ID NO: 246711 - protein, 15 aa, Artificial Sequence
  Description of Artificial Sequence: Synthetic peptide
  Seed: LRMKWMMAMKYPITA
LRMKYMMHMVYPITA

SEQ ID NO: 246712 - protein, 15 aa, Artificial Sequence
  Description of Artificial Sequence: Synthetic peptide
  Seed: LRMKWMMAMKYPITA
LRMKYMMHMVYPLTA

SEQ ID NO: 246713 - protein, 15 aa, Artificial Sequence
  Description of Artificial Sequence: Synthetic peptide
  Seed: LRMKWMMAMKYPITA
LRMKYMMHMVYPMTA

SEQ ID NO: 246714 - protein, 15 aa, Artificial Sequence
  Description of Artificial Sequence: Synthetic peptide
  Seed: LRMKWMMAMKYPITA
LRMKYMMHMVYPNTA

SEQ ID NO: 246715 - protein, 15 aa, Artificial Sequence
  Description of Artificial Sequence: Synthetic peptide
  Seed: LRMKWMMAMKYPITA
LRMKYMMHMVYPPTA

SEQ ID NO: 246716 - protein, 15 aa, Artificial Sequence
  Description of Artificial Sequence: Synthetic peptide
  Seed: LRMKWMMAMKYPITA
LRMKYMMHMVYPQTA

SEQ ID NO: 246717 - protein, 15 aa, Artificial Sequence
  Description of Artificial Sequence: Synthetic peptide
  Seed: LRMKWMMAMKYPITA
LRMKYMMHMVYPRTA

SEQ ID NO: 246718 - protein, 15 aa, Artificial Sequence
  Description of Artificial Sequence: Synthetic peptide
  Seed: LRMKWMMAMKYPITA
LRMKYMMHMVYPSTA

SEQ ID NO: 246719 - protein, 15 aa, Artificial Sequence
  Description of Artificial Sequence: Synthetic peptide
  Seed: LRMKWMMAMKYPITA
LRMKYMMHMVYPTTA

SEQ ID NO: 246720 - protein, 15 aa, Artificial Sequence
  Description of Artificial Sequence: Synthetic peptide
  Seed: LRMKWMMAMKYPITA
LRMKYMMHMVYPVTA

SEQ ID NO: 246721 - protein, 15 aa, Artificial Sequence
  Description of Artificial Sequence: Synthetic peptide
  Seed: LRMKWMMAMKYPITA
LRMKYMMHMVYPYTA

SEQ ID NO: 246722 - protein, 15 aa, Artificial Sequence
  Description of Artificial Sequence: Synthetic peptide
  Seed: LRMKWMMAMKYPITA
LRMKYMMIMAYPATA

SEQ ID NO: 246723 - protein, 15 aa, Artificial Sequence
  Description of Artificial Sequence: Synthetic peptide
  Seed: LRMKWMMAMKYPITA
LRMKYMMIMAYPCTA

SEQ ID NO: 246724 - protein, 15 aa, Artificial Sequence
  Description of Artificial Sequence: Synthetic peptide
  Seed: LRMKWMMAMKYPITA
LRMKYMMIMAYPDTA

SEQ ID NO: 246725 - protein, 15 aa, Artificial Sequence
  Description of Artificial Sequence: Synthetic peptide
  Seed: LRMKWMMAMKYPITA
LRMKYMMIMAYPETA

SEQ ID NO: 246726 - protein, 15 aa, Artificial Sequence
  Description of Artificial Sequence: Synthetic peptide
  Seed: LRMKWMMAMKYPITA
LRMKYMMIMAYPFTA

SEQ ID NO: 246727 - protein, 15 aa, Artificial Sequence
  Description of Artificial Sequence: Synthetic peptide
  Seed: LRMKWMMAMKYPITA
LRMKYMMIMAYPGTA

SEQ ID NO: 246728 - protein, 15 aa, Artificial Sequence
  Description of Artificial Sequence: Synthetic peptide
  Seed: LRMKWMMAMKYPITA
LRMKYMMIMAYPHTA

SEQ ID NO: 246729 - protein, 15 aa, Artificial Sequence
  Description of Artificial Sequence: Synthetic peptide
  Seed: LRMKWMMAMKYPITA
LRMKYMMIMAYPITA

SEQ ID NO: 246730 - protein, 15 aa, Artificial Sequence
  Description of Artificial Sequence: Synthetic peptide
  Seed: LRMKWMMAMKYPITA
LRMKYMMIMAYPKTA

SEQ ID NO: 246731 - protein, 15 aa, Artificial Sequence
  Description of Artificial Sequence: Synthetic peptide
  Seed: LRMKWMMAMKYPITA
LRMKYMMIMAYPLTA

SEQ ID NO: 246732 - protein, 15 aa, Artificial Sequence
  Description of Artificial Sequence: Synthetic peptide
  Seed: LRMKWMMAMKYPITA
LRMKYMMIMAYPMTA

SEQ ID NO: 246733 - protein, 15 aa, Artificial Sequence
  Description of Artificial Sequence: Synthetic peptide
  Seed: LRMKWMMAMKYPITA
LRMKYMMIMAYPNTA

SEQ ID NO: 246734 - protein, 15 aa, Artificial Sequence
  Description of Artificial Sequence: Synthetic peptide
  Seed: LRMKWMMAMKYPITA
LRMKYMMIMAYPPTA

SEQ ID NO: 246735 - protein, 15 aa, Artificial Sequence
  Description of Artificial Sequence: Synthetic peptide
  Seed: LRMKWMMAMKYPITA
LRMKYMMIMAYPQTA

SEQ ID NO: 246736 - protein, 15 aa, Artificial Sequence
  Description of Artificial Sequence: Synthetic peptide
  Seed: LRMKWMMAMKYPITA
LRMKYMMIMAYPRTA

SEQ ID NO: 246737 - protein, 15 aa, Artificial Sequence
  Description of Artificial Sequence: Synthetic peptide
  Seed: LRMKWMMAMKYPITA
LRMKYMMIMAYPSTA

SEQ ID NO: 246738 - protein, 15 aa, Artificial Sequence
  Description of Artificial Sequence: Synthetic peptide
  Seed: LRMKWMMAMKYPITA
LRMKYMMIMAYPTTA

SEQ ID NO: 246739 - protein, 15 aa, Artificial Sequence
  Description of Artificial Sequence: Synthetic peptide
  Seed: LRMKWMMAMKYPITA
LRMKYMMIMAYPVTA

SEQ ID NO: 246740 - protein, 15 aa, Artificial Sequence
  Description of Artificial Sequence: Synthetic peptide
  Seed: LRMKWMMAMKYPITA
LRMKYMMIMAYPWTA

SEQ ID NO: 246741 - protein, 15 aa, Artificial Sequence
  Description of Artificial Sequence: Synthetic peptide
  Seed: LRMKWMMAMKYPITA
LRMKYMMIMAYPYTA

SEQ ID NO: 246742 - protein, 15 aa, Artificial Sequence
  Description of Artificial Sequence: Synthetic peptide
  Seed: LRMKWMMAMKYPITA
LRMKYMMIMCYPATA

SEQ ID NO: 246743 - protein, 15 aa, Artificial Sequence
  Description of Artificial Sequence: Synthetic peptide
  Seed: LRMKWMMAMKYPITA
LRMKYMMIMCYPDTA

SEQ ID NO: 246744 - protein, 15 aa, Artificial Sequence
  Description of Artificial Sequence: Synthetic peptide
  Seed: LRMKWMMAMKYPITA
LRMKYMMIMCYPETA

SEQ ID NO: 246745 - protein, 15 aa, Artificial Sequence
  Description of Artificial Sequence: Synthetic peptide
  Seed: LRMKWMMAMKYPITA
LRMKYMMIMCYPGTA

SEQ ID NO: 246746 - protein, 15 aa, Artificial Sequence
  Description of Artificial Sequence: Synthetic peptide
  Seed: LRMKWMMAMKYPITA
LRMKYMMIMCYPHTA

SEQ ID NO: 246747 - protein, 15 aa, Artificial Sequence
  Description of Artificial Sequence: Synthetic peptide
  Seed: LRMKWMMAMKYPITA
LRMKYMMIMCYPITA

SEQ ID NO: 246748 - protein, 15 aa, Artificial Sequence
  Description of Artificial Sequence: Synthetic peptide
  Seed: LRMKWMMAMKYPITA
LRMKYMMIMCYPLTA

SEQ ID NO: 246749 - protein, 15 aa, Artificial Sequence
  Description of Artificial Sequence: Synthetic peptide
  Seed: LRMKWMMAMKYPITA
LRMKYMMIMCYPMTA

SEQ ID NO: 246750 - protein, 15 aa, Artificial Sequence
  Description of Artificial Sequence: Synthetic peptide
  Seed: LRMKWMMAMKYPITA
LRMKYMMIMCYPNTA

SEQ ID NO: 246751 - protein, 15 aa, Artificial Sequence
  Description of Artificial Sequence: Synthetic peptide
  Seed: LRMKWMMAMKYPITA
LRMKYMMIMCYPPTA

SEQ ID NO: 246752 - protein, 15 aa, Artificial Sequence
  Description of Artificial Sequence: Synthetic peptide
  Seed: LRMKWMMAMKYPITA
LRMKYMMIMCYPQTA

SEQ ID NO: 246753 - protein, 15 aa, Artificial Sequence
  Description of Artificial Sequence: Synthetic peptide
  Seed: LRMKWMMAMKYPITA
LRMKYMMIMCYPSTA

SEQ ID NO: 246754 - protein, 15 aa, Artificial Sequence
  Description of Artificial Sequence: Synthetic peptide
  Seed: LRMKWMMAMKYPITA
LRMKYMMIMCYPTTA

SEQ ID NO: 246755 - protein, 15 aa, Artificial Sequence
  Description of Artificial Sequence: Synthetic peptide
  Seed: LRMKWMMAMKYPITA
LRMKYMMIMCYPVTA

SEQ ID NO: 246756 - protein, 15 aa, Artificial Sequence
  Description of Artificial Sequence: Synthetic peptide
  Seed: LRMKWMMAMKYPITA
LRMKYMMIMDYPATA

SEQ ID NO: 246757 - protein, 15 aa, Artificial Sequence
  Description of Artificial Sequence: Synthetic peptide
  Seed: LRMKWMMAMKYPITA
LRMKYMMIMDYPDTA

SEQ ID NO: 246758 - protein, 15 aa, Artificial Sequence
  Description of Artificial Sequence: Synthetic peptide
  Seed: LRMKWMMAMKYPITA
LRMKYMMIMDYPETA

SEQ ID NO: 246759 - protein, 15 aa, Artificial Sequence
  Description of Artificial Sequence: Synthetic peptide
  Seed: LRMKWMMAMKYPITA
LRMKYMMIMDYPGTA

SEQ ID NO: 246760 - protein, 15 aa, Artificial Sequence
  Description of Artificial Sequence: Synthetic peptide
  Seed: LRMKWMMAMKYPITA
LRMKYMMIMDYPHTA

SEQ ID NO: 246761 - protein, 15 aa, Artificial Sequence
  Description of Artificial Sequence: Synthetic peptide
  Seed: LRMKWMMAMKYPITA
LRMKYMMIMDYPITA

SEQ ID NO: 246762 - protein, 15 aa, Artificial Sequence
  Description of Artificial Sequence: Synthetic peptide
  Seed: LRMKWMMAMKYPITA
LRMKYMMIMDYPLTA

SEQ ID NO: 246763 - protein, 15 aa, Artificial Sequence
  Description of Artificial Sequence: Synthetic peptide
  Seed: LRMKWMMAMKYPITA
LRMKYMMIMDYPMTA

SEQ ID NO: 246764 - protein, 15 aa, Artificial Sequence
  Description of Artificial Sequence: Synthetic peptide
  Seed: LRMKWMMAMKYPITA
LRMKYMMIMDYPNTA

SEQ ID NO: 246765 - protein, 15 aa, Artificial Sequence
  Description of Artificial Sequence: Synthetic peptide
  Seed: LRMKWMMAMKYPITA
LRMKYMMIMDYPQTA

SEQ ID NO: 246766 - protein, 15 aa, Artificial Sequence
  Description of Artificial Sequence: Synthetic peptide
  Seed: LRMKWMMAMKYPITA
LRMKYMMIMDYPSTA

SEQ ID NO: 246767 - protein, 15 aa, Artificial Sequence
  Description of Artificial Sequence: Synthetic peptide
  Seed: LRMKWMMAMKYPITA
LRMKYMMIMDYPTTA

SEQ ID NO: 246768 - protein, 15 aa, Artificial Sequence
  Description of Artificial Sequence: Synthetic peptide
  Seed: LRMKWMMAMKYPITA
LRMKYMMIMDYPVTA

SEQ ID NO: 246769 - protein, 15 aa, Artificial Sequence
  Description of Artificial Sequence: Synthetic peptide
  Seed: LRMKWMMAMKYPITA
LRMKYMMIMEYPATA

SEQ ID NO: 246770 - protein, 15 aa, Artificial Sequence
  Description of Artificial Sequence: Synthetic peptide
  Seed: LRMKWMMAMKYPITA
LRMKYMMIMEYPCTA

SEQ ID NO: 246771 - protein, 15 aa, Artificial Sequence
  Description of Artificial Sequence: Synthetic peptide
  Seed: LRMKWMMAMKYPITA
LRMKYMMIMEYPDTA

SEQ ID NO: 246772 - protein, 15 aa, Artificial Sequence
  Description of Artificial Sequence: Synthetic peptide
  Seed: LRMKWMMAMKYPITA
LRMKYMMIMEYPETA

SEQ ID NO: 246773 - protein, 15 aa, Artificial Sequence
  Description of Artificial Sequence: Synthetic peptide
  Seed: LRMKWMMAMKYPITA
LRMKYMMIMEYPFTA

SEQ ID NO: 246774 - protein, 15 aa, Artificial Sequence
  Description of Artificial Sequence: Synthetic peptide
  Seed: LRMKWMMAMKYPITA
LRMKYMMIMEYPGTA

SEQ ID NO: 246775 - protein, 15 aa, Artificial Sequence
  Description of Artificial Sequence: Synthetic peptide
  Seed: LRMKWMMAMKYPITA
LRMKYMMIMEYPHTA

SEQ ID NO: 246776 - protein, 15 aa, Artificial Sequence
  Description of Artificial Sequence: Synthetic peptide
  Seed: LRMKWMMAMKYPITA
LRMKYMMIMEYPITA

SEQ ID NO: 246777 - protein, 15 aa, Artificial Sequence
  Description of Artificial Sequence: Synthetic peptide
  Seed: LRMKWMMAMKYPITA
LRMKYMMIMEYPLTA

SEQ ID NO: 246778 - protein, 15 aa, Artificial Sequence
  Description of Artificial Sequence: Synthetic peptide
  Seed: LRMKWMMAMKYPITA
LRMKYMMIMEYPMTA

SEQ ID NO: 246779 - protein, 15 aa, Artificial Sequence
  Description of Artificial Sequence: Synthetic peptide
  Seed: LRMKWMMAMKYPITA
LRMKYMMIMEYPNTA

SEQ ID NO: 246780 - protein, 15 aa, Artificial Sequence
  Description of Artificial Sequence: Synthetic peptide
  Seed: LRMKWMMAMKYPITA
LRMKYMMIMEYPPTA

SEQ ID NO: 246781 - protein, 15 aa, Artificial Sequence
  Description of Artificial Sequence: Synthetic peptide
  Seed: LRMKWMMAMKYPITA
LRMKYMMIMEYPQTA

SEQ ID NO: 246782 - protein, 15 aa, Artificial Sequence
  Description of Artificial Sequence: Synthetic peptide
  Seed: LRMKWMMAMKYPITA
LRMKYMMIMEYPRTA

SEQ ID NO: 246783 - protein, 15 aa, Artificial Sequence
  Description of Artificial Sequence: Synthetic peptide
  Seed: LRMKWMMAMKYPITA
LRMKYMMIMEYPSTA

SEQ ID NO: 246784 - protein, 15 aa, Artificial Sequence
  Description of Artificial Sequence: Synthetic peptide
  Seed: LRMKWMMAMKYPITA
LRMKYMMIMEYPTTA

SEQ ID NO: 246785 - protein, 15 aa, Artificial Sequence
  Description of Artificial Sequence: Synthetic peptide
  Seed: LRMKWMMAMKYPITA
LRMKYMMIMEYPVTA

SEQ ID NO: 246786 - protein, 15 aa, Artificial Sequence
  Description of Artificial Sequence: Synthetic peptide
  Seed: LRMKWMMAMKYPITA
LRMKYMMIMEYPYTA

SEQ ID NO: 246787 - protein, 15 aa, Artificial Sequence
  Description of Artificial Sequence: Synthetic peptide
  Seed: LRMKWMMAMKYPITA
LRMKYMMIMFYPATA

SEQ ID NO: 246788 - protein, 15 aa, Artificial Sequence
  Description of Artificial Sequence: Synthetic peptide
  Seed: LRMKWMMAMKYPITA
LRMKYMMIMFYPETA

SEQ ID NO: 246789 - protein, 15 aa, Artificial Sequence
  Description of Artificial Sequence: Synthetic peptide
  Seed: LRMKWMMAMKYPITA
LRMKYMMIMFYPITA

SEQ ID NO: 246790 - protein, 15 aa, Artificial Sequence
  Description of Artificial Sequence: Synthetic peptide
  Seed: LRMKWMMAMKYPITA
LRMKYMMIMFYPLTA

SEQ ID NO: 246791 - protein, 15 aa, Artificial Sequence
  Description of Artificial Sequence: Synthetic peptide
  Seed: LRMKWMMAMKYPITA
LRMKYMMIMFYPMTA

SEQ ID NO: 246792 - protein, 15 aa, Artificial Sequence
  Description of Artificial Sequence: Synthetic peptide
  Seed: LRMKWMMAMKYPITA
LRMKYMMIMFYPNTA

SEQ ID NO: 246793 - protein, 15 aa, Artificial Sequence
  Description of Artificial Sequence: Synthetic peptide
  Seed: LRMKWMMAMKYPITA
LRMKYMMIMFYPQTA

SEQ ID NO: 246794 - protein, 15 aa, Artificial Sequence
  Description of Artificial Sequence: Synthetic peptide
  Seed: LRMKWMMAMKYPITA
LRMKYMMIMFYPSTA

SEQ ID NO: 246795 - protein, 15 aa, Artificial Sequence
  Description of Artificial Sequence: Synthetic peptide
  Seed: LRMKWMMAMKYPITA
LRMKYMMIMFYPTTA

SEQ ID NO: 246796 - protein, 15 aa, Artificial Sequence
  Description of Artificial Sequence: Synthetic peptide
  Seed: LRMKWMMAMKYPITA
LRMKYMMIMFYPVTA

SEQ ID NO: 246797 - protein, 15 aa, Artificial Sequence
  Description of Artificial Sequence: Synthetic peptide
  Seed: LRMKWMMAMKYPITA
LRMKYMMIMGYPATA

SEQ ID NO: 246798 - protein, 15 aa, Artificial Sequence
  Description of Artificial Sequence: Synthetic peptide
  Seed: LRMKWMMAMKYPITA
LRMKYMMIMGYPCTA

SEQ ID NO: 246799 - protein, 15 aa, Artificial Sequence
  Description of Artificial Sequence: Synthetic peptide
  Seed: LRMKWMMAMKYPITA
LRMKYMMIMGYPDTA

SEQ ID NO: 246800 - protein, 15 aa, Artificial Sequence
  Description of Artificial Sequence: Synthetic peptide
  Seed: LRMKWMMAMKYPITA
LRMKYMMIMGYPETA

SEQ ID NO: 246801 - protein, 15 aa, Artificial Sequence
  Description of Artificial Sequence: Synthetic peptide
  Seed: LRMKWMMAMKYPITA
LRMKYMMIMGYPFTA

SEQ ID NO: 246802 - protein, 15 aa, Artificial Sequence
  Description of Artificial Sequence: Synthetic peptide
  Seed: LRMKWMMAMKYPITA
LRMKYMMIMGYPGTA

SEQ ID NO: 246803 - protein, 15 aa, Artificial Sequence
  Description of Artificial Sequence: Synthetic peptide
  Seed: LRMKWMMAMKYPITA
LRMKYMMIMGYPHTA

SEQ ID NO: 246804 - protein, 15 aa, Artificial Sequence
  Description of Artificial Sequence: Synthetic peptide
  Seed: LRMKWMMAMKYPITA
LRMKYMMIMGYPITA

SEQ ID NO: 246805 - protein, 15 aa, Artificial Sequence
  Description of Artificial Sequence: Synthetic peptide
  Seed: LRMKWMMAMKYPITA
LRMKYMMIMGYPKTA

SEQ ID NO: 246806 - protein, 15 aa, Artificial Sequence
  Description of Artificial Sequence: Synthetic peptide
  Seed: LRMKWMMAMKYPITA
LRMKYMMIMGYPLTA

SEQ ID NO: 246807 - protein, 15 aa, Artificial Sequence
  Description of Artificial Sequence: Synthetic peptide
  Seed: LRMKWMMAMKYPITA
LRMKYMMIMGYPMTA

SEQ ID NO: 246808 - protein, 15 aa, Artificial Sequence
  Description of Artificial Sequence: Synthetic peptide
  Seed: LRMKWMMAMKYPITA
LRMKYMMIMGYPNTA

SEQ ID NO: 246809 - protein, 15 aa, Artificial Sequence
  Description of Artificial Sequence: Synthetic peptide
  Seed: LRMKWMMAMKYPITA
LRMKYMMIMGYPPTA

SEQ ID NO: 246810 - protein, 15 aa, Artificial Sequence
  Description of Artificial Sequence: Synthetic peptide
  Seed: LRMKWMMAMKYPITA
LRMKYMMIMGYPQTA

SEQ ID NO: 246811 - protein, 15 aa, Artificial Sequence
  Description of Artificial Sequence: Synthetic peptide
  Seed: LRMKWMMAMKYPITA
LRMKYMMIMGYPRTA

SEQ ID NO: 246812 - protein, 15 aa, Artificial Sequence
  Description of Artificial Sequence: Synthetic peptide
  Seed: LRMKWMMAMKYPITA
LRMKYMMIMGYPSTA

SEQ ID NO: 246813 - protein, 15 aa, Artificial Sequence
  Description of Artificial Sequence: Synthetic peptide
  Seed: LRMKWMMAMKYPITA
LRMKYMMIMGYPTTA

SEQ ID NO: 246814 - protein, 15 aa, Artificial Sequence
  Description of Artificial Sequence: Synthetic peptide
  Seed: LRMKWMMAMKYPITA
LRMKYMMIMGYPVTA

SEQ ID NO: 246815 - protein, 15 aa, Artificial Sequence
  Description of Artificial Sequence: Synthetic peptide
  Seed: LRMKWMMAMKYPITA
LRMKYMMIMGYPWTA

SEQ ID NO: 246816 - protein, 15 aa, Artificial Sequence
  Description of Artificial Sequence: Synthetic peptide
  Seed: LRMKWMMAMKYPITA
LRMKYMMIMGYPYTA

SEQ ID NO: 246817 - protein, 15 aa, Artificial Sequence
  Description of Artificial Sequence: Synthetic peptide
  Seed: LRMKWMMAMKYPITA
LRMKYMMIMHYPATA

SEQ ID NO: 246818 - protein, 15 aa, Artificial Sequence
  Description of Artificial Sequence: Synthetic peptide
  Seed: LRMKWMMAMKYPITA
LRMKYMMIMHYPCTA

SEQ ID NO: 246819 - protein, 15 aa, Artificial Sequence
  Description of Artificial Sequence: Synthetic peptide
  Seed: LRMKWMMAMKYPITA
LRMKYMMIMHYPDTA

SEQ ID NO: 246820 - protein, 15 aa, Artificial Sequence
  Description of Artificial Sequence: Synthetic peptide
  Seed: LRMKWMMAMKYPITA
LRMKYMMIMHYPETA

SEQ ID NO: 246821 - protein, 15 aa, Artificial Sequence
  Description of Artificial Sequence: Synthetic peptide
  Seed: LRMKWMMAMKYPITA
LRMKYMMIMHYPFTA

SEQ ID NO: 246822 - protein, 15 aa, Artificial Sequence
  Description of Artificial Sequence: Synthetic peptide
  Seed: LRMKWMMAMKYPITA
LRMKYMMIMHYPGTA

SEQ ID NO: 246823 - protein, 15 aa, Artificial Sequence
  Description of Artificial Sequence: Synthetic peptide
  Seed: LRMKWMMAMKYPITA
LRMKYMMIMHYPHTA

SEQ ID NO: 246824 - protein, 15 aa, Artificial Sequence
  Description of Artificial Sequence: Synthetic peptide
  Seed: LRMKWMMAMKYPITA
LRMKYMMIMHYPITA

SEQ ID NO: 246825 - protein, 15 aa, Artificial Sequence
  Description of Artificial Sequence: Synthetic peptide
  Seed: LRMKWMMAMKYPITA
LRMKYMMIMHYPKTA

SEQ ID NO: 246826 - protein, 15 aa, Artificial Sequence
  Description of Artificial Sequence: Synthetic peptide
  Seed: LRMKWMMAMKYPITA
LRMKYMMIMHYPLTA

SEQ ID NO: 246827 - protein, 15 aa, Artificial Sequence
  Description of Artificial Sequence: Synthetic peptide
  Seed: LRMKWMMAMKYPITA
LRMKYMMIMHYPMTA

SEQ ID NO: 246828 - protein, 15 aa, Artificial Sequence
  Description of Artificial Sequence: Synthetic peptide
  Seed: LRMKWMMAMKYPITA
LRMKYMMIMHYPNTA

SEQ ID NO: 246829 - protein, 15 aa, Artificial Sequence
  Description of Artificial Sequence: Synthetic peptide
  Seed: LRMKWMMAMKYPITA
LRMKYMMIMHYPPTA

SEQ ID NO: 246830 - protein, 15 aa, Artificial Sequence
  Description of Artificial Sequence: Synthetic peptide
  Seed: LRMKWMMAMKYPITA
LRMKYMMIMHYPQTA

SEQ ID NO: 246831 - protein, 15 aa, Artificial Sequence
  Description of Artificial Sequence: Synthetic peptide
  Seed: LRMKWMMAMKYPITA
LRMKYMMIMHYPRTA

SEQ ID NO: 246832 - protein, 15 aa, Artificial Sequence
  Description of Artificial Sequence: Synthetic peptide
  Seed: LRMKWMMAMKYPITA
LRMKYMMIMHYPSTA

SEQ ID NO: 246833 - protein, 15 aa, Artificial Sequence
  Description of Artificial Sequence: Synthetic peptide
  Seed: LRMKWMMAMKYPITA
LRMKYMMIMHYPTTA

SEQ ID NO: 246834 - protein, 15 aa, Artificial Sequence
  Description of Artificial Sequence: Synthetic peptide
  Seed: LRMKWMMAMKYPITA
LRMKYMMIMHYPVTA

SEQ ID NO: 246835 - protein, 15 aa, Artificial Sequence
  Description of Artificial Sequence: Synthetic peptide
  Seed: LRMKWMMAMKYPITA
LRMKYMMIMHYPYTA

SEQ ID NO: 246836 - protein, 15 aa, Artificial Sequence
  Description of Artificial Sequence: Synthetic peptide
  Seed: LRMKWMMAMKYPITA
LRMKYMMIMIYPATA

SEQ ID NO: 246837 - protein, 15 aa, Artificial Sequence
  Description of Artificial Sequence: Synthetic peptide
  Seed: LRMKWMMAMKYPITA
LRMKYMMIMIYPCTA

SEQ ID NO: 246838 - protein, 15 aa, Artificial Sequence
  Description of Artificial Sequence: Synthetic peptide
  Seed: LRMKWMMAMKYPITA
LRMKYMMIMIYPDTA

SEQ ID NO: 246839 - protein, 15 aa, Artificial Sequence
  Description of Artificial Sequence: Synthetic peptide
  Seed: LRMKWMMAMKYPITA
LRMKYMMIMIYPETA

SEQ ID NO: 246840 - protein, 15 aa, Artificial Sequence
  Description of Artificial Sequence: Synthetic peptide
  Seed: LRMKWMMAMKYPITA
LRMKYMMIMIYPFTA

SEQ ID NO: 246841 - protein, 15 aa, Artificial Sequence
  Description of Artificial Sequence: Synthetic peptide
  Seed: LRMKWMMAMKYPITA
LRMKYMMIMIYPGTA

SEQ ID NO: 246842 - protein, 15 aa, Artificial Sequence
  Description of Artificial Sequence: Synthetic peptide
  Seed: LRMKWMMAMKYPITA
LRMKYMMIMIYPHTA

SEQ ID NO: 246843 - protein, 15 aa, Artificial Sequence
  Description of Artificial Sequence: Synthetic peptide
  Seed: LRMKWMMAMKYPITA
LRMKYMMIMIYPITA

SEQ ID NO: 246844 - protein, 15 aa, Artificial Sequence
  Description of Artificial Sequence: Synthetic peptide
  Seed: LRMKWMMAMKYPITA
LRMKYMMIMIYPKTA

SEQ ID NO: 246845 - protein, 15 aa, Artificial Sequence
  Description of Artificial Sequence: Synthetic peptide
  Seed: LRMKWMMAMKYPITA
LRMKYMMIMIYPLTA

SEQ ID NO: 246846 - protein, 15 aa, Artificial Sequence
  Description of Artificial Sequence: Synthetic peptide
  Seed: LRMKWMMAMKYPITA
LRMKYMMIMIYPMTA

SEQ ID NO: 246847 - protein, 15 aa, Artificial Sequence
  Description of Artificial Sequence: Synthetic peptide
  Seed: LRMKWMMAMKYPITA
LRMKYMMIMIYPNTA

SEQ ID NO: 246848 - protein, 15 aa, Artificial Sequence
  Description of Artificial Sequence: Synthetic peptide
  Seed: LRMKWMMAMKYPITA
LRMKYMMIMIYPPTA

SEQ ID NO: 246849 - protein, 15 aa, Artificial Sequence
  Description of Artificial Sequence: Synthetic peptide
  Seed: LRMKWMMAMKYPITA
LRMKYMMIMIYPQTA

SEQ ID NO: 246850 - protein, 15 aa, Artificial Sequence
  Description of Artificial Sequence: Synthetic peptide
  Seed: LRMKWMMAMKYPITA
LRMKYMMIMIYPRTA

SEQ ID NO: 246851 - protein, 15 aa, Artificial Sequence
  Description of Artificial Sequence: Synthetic peptide
  Seed: LRMKWMMAMKYPITA
LRMKYMMIMIYPSTA

SEQ ID NO: 246852 - protein, 15 aa, Artificial Sequence
  Description of Artificial Sequence: Synthetic peptide
  Seed: LRMKWMMAMKYPITA
LRMKYMMIMIYPTTA

SEQ ID NO: 246853 - protein, 15 aa, Artificial Sequence
  Description of Artificial Sequence: Synthetic peptide
  Seed: LRMKWMMAMKYPITA
LRMKYMMIMIYPVTA

SEQ ID NO: 246854 - protein, 15 aa, Artificial Sequence
  Description of Artificial Sequence: Synthetic peptide
  Seed: LRMKWMMAMKYPITA
LRMKYMMIMIYPYTA

SEQ ID NO: 246855 - protein, 15 aa, Artificial Sequence
  Description of Artificial Sequence: Synthetic peptide
  Seed: LRMKWMMAMKYPITA
LRMKYMMIMKYPATA

SEQ ID NO: 246856 - protein, 15 aa, Artificial Sequence
  Description of Artificial Sequence: Synthetic peptide
  Seed: LRMKWMMAMKYPITA
LRMKYMMIMKYPCTA

SEQ ID NO: 246857 - protein, 15 aa, Artificial Sequence
  Description of Artificial Sequence: Synthetic peptide
  Seed: LRMKWMMAMKYPITA
LRMKYMMIMKYPDTA

SEQ ID NO: 246858 - protein, 15 aa, Artificial Sequence
  Description of Artificial Sequence: Synthetic peptide
  Seed: LRMKWMMAMKYPITA
LRMKYMMIMKYPETA

SEQ ID NO: 246859 - protein, 15 aa, Artificial Sequence
  Description of Artificial Sequence: Synthetic peptide
  Seed: LRMKWMMAMKYPITA
LRMKYMMIMKYPFTA

SEQ ID NO: 246860 - protein, 15 aa, Artificial Sequence
  Description of Artificial Sequence: Synthetic peptide
  Seed: LRMKWMMAMKYPITA
LRMKYMMIMKYPGTA

SEQ ID NO: 246861 - protein, 15 aa, Artificial Sequence
  Description of Artificial Sequence: Synthetic peptide
  Seed: LRMKWMMAMKYPITA
LRMKYMMIMKYPHTA

SEQ ID NO: 246862 - protein, 15 aa, Artificial Sequence
  Description of Artificial Sequence: Synthetic peptide
  Seed: LRMKWMMAMKYPITA
LRMKYMMIMKYPITA

SEQ ID NO: 246863 - protein, 15 aa, Artificial Sequence
  Description of Artificial Sequence: Synthetic peptide
  Seed: LRMKWMMAMKYPITA
LRMKYMMIMKYPKTA

SEQ ID NO: 246864 - protein, 15 aa, Artificial Sequence
  Description of Artificial Sequence: Synthetic peptide
  Seed: LRMKWMMAMKYPITA
LRMKYMMIMKYPLTA

SEQ ID NO: 246865 - protein, 15 aa, Artificial Sequence
  Description of Artificial Sequence: Synthetic peptide
  Seed: LRMKWMMAMKYPITA
LRMKYMMIMKYPMTA

SEQ ID NO: 246866 - protein, 15 aa, Artificial Sequence
  Description of Artificial Sequence: Synthetic peptide
  Seed: LRMKWMMAMKYPITA
LRMKYMMIMKYPNTA

SEQ ID NO: 246867 - protein, 15 aa, Artificial Sequence
  Description of Artificial Sequence: Synthetic peptide
  Seed: LRMKWMMAMKYPITA
LRMKYMMIMKYPPTA

SEQ ID NO: 246868 - protein, 15 aa, Artificial Sequence
  Description of Artificial Sequence: Synthetic peptide
  Seed: LRMKWMMAMKYPITA
LRMKYMMIMKYPQTA

SEQ ID NO: 246869 - protein, 15 aa, Artificial Sequence
  Description of Artificial Sequence: Synthetic peptide
  Seed: LRMKWMMAMKYPITA
LRMKYMMIMKYPRTA

SEQ ID NO: 246870 - protein, 15 aa, Artificial Sequence
  Description of Artificial Sequence: Synthetic peptide
  Seed: LRMKWMMAMKYPITA
LRMKYMMIMKYPSTA

SEQ ID NO: 246871 - protein, 15 aa, Artificial Sequence
  Description of Artificial Sequence: Synthetic peptide
  Seed: LRMKWMMAMKYPITA
LRMKYMMIMKYPTTA

SEQ ID NO: 246872 - protein, 15 aa, Artificial Sequence
  Description of Artificial Sequence: Synthetic peptide
  Seed: LRMKWMMAMKYPITA
LRMKYMMIMKYPVTA

SEQ ID NO: 246873 - protein, 15 aa, Artificial Sequence
  Description of Artificial Sequence: Synthetic peptide
  Seed: LRMKWMMAMKYPITA
LRMKYMMIMKYPWTA

SEQ ID NO: 246874 - protein, 15 aa, Artificial Sequence
  Description of Artificial Sequence: Synthetic peptide
  Seed: LRMKWMMAMKYPITA
LRMKYMMIMKYPYTA

SEQ ID NO: 246875 - protein, 15 aa, Artificial Sequence
  Description of Artificial Sequence: Synthetic peptide
  Seed: LRMKWMMAMKYPITA
LRMKYMMIMLYPATA

SEQ ID NO: 246876 - protein, 15 aa, Artificial Sequence
  Description of Artificial Sequence: Synthetic peptide
  Seed: LRMKWMMAMKYPITA
LRMKYMMIMLYPCTA

SEQ ID NO: 246877 - protein, 15 aa, Artificial Sequence
  Description of Artificial Sequence: Synthetic peptide
  Seed: LRMKWMMAMKYPITA
LRMKYMMIMLYPDTA

SEQ ID NO: 246878 - protein, 15 aa, Artificial Sequence
  Description of Artificial Sequence: Synthetic peptide
  Seed: LRMKWMMAMKYPITA
LRMKYMMIMLYPGTA

SEQ ID NO: 246879 - protein, 15 aa, Artificial Sequence
  Description of Artificial Sequence: Synthetic peptide
  Seed: LRMKWMMAMKYPITA
LRMKYMMIMLYPITA

SEQ ID NO: 246880 - protein, 15 aa, Artificial Sequence
  Description of Artificial Sequence: Synthetic peptide
  Seed: LRMKWMMAMKYPITA
LRMKYMMIMLYPLTA

SEQ ID NO: 246881 - protein, 15 aa, Artificial Sequence
  Description of Artificial Sequence: Synthetic peptide
  Seed: LRMKWMMAMKYPITA
LRMKYMMIMLYPMTA

SEQ ID NO: 246882 - protein, 15 aa, Artificial Sequence
  Description of Artificial Sequence: Synthetic peptide
  Seed: LRMKWMMAMKYPITA
LRMKYMMIMLYPNTA

SEQ ID NO: 246883 - protein, 15 aa, Artificial Sequence
  Description of Artificial Sequence: Synthetic peptide
  Seed: LRMKWMMAMKYPITA
LRMKYMMIMLYPSTA

SEQ ID NO: 246884 - protein, 15 aa, Artificial Sequence
  Description of Artificial Sequence: Synthetic peptide
  Seed: LRMKWMMAMKYPITA
LRMKYMMIMLYPTTA

SEQ ID NO: 246885 - protein, 15 aa, Artificial Sequence
  Description of Artificial Sequence: Synthetic peptide
  Seed: LRMKWMMAMKYPITA
LRMKYMMIMLYPVTA

SEQ ID NO: 246886 - protein, 15 aa, Artificial Sequence
  Description of Artificial Sequence: Synthetic peptide
  Seed: LRMKWMMAMKYPITA
LRMKYMMIMMYPATA

SEQ ID NO: 246887 - protein, 15 aa, Artificial Sequence
  Description of Artificial Sequence: Synthetic peptide
  Seed: LRMKWMMAMKYPITA
LRMKYMMIMMYPCTA

SEQ ID NO: 246888 - protein, 15 aa, Artificial Sequence
  Description of Artificial Sequence: Synthetic peptide
  Seed: LRMKWMMAMKYPITA
LRMKYMMIMMYPDTA

SEQ ID NO: 246889 - protein, 15 aa, Artificial Sequence
  Description of Artificial Sequence: Synthetic peptide
  Seed: LRMKWMMAMKYPITA
LRMKYMMIMMYPGTA

SEQ ID NO: 246890 - protein, 15 aa, Artificial Sequence
  Description of Artificial Sequence: Synthetic peptide
  Seed: LRMKWMMAMKYPITA
LRMKYMMIMMYPITA

SEQ ID NO: 246891 - protein, 15 aa, Artificial Sequence
  Description of Artificial Sequence: Synthetic peptide
  Seed: LRMKWMMAMKYPITA
LRMKYMMIMMYPLTA

SEQ ID NO: 246892 - protein, 15 aa, Artificial Sequence
  Description of Artificial Sequence: Synthetic peptide
  Seed: LRMKWMMAMKYPITA
LRMKYMMIMMYPMTA

SEQ ID NO: 246893 - protein, 15 aa, Artificial Sequence
  Description of Artificial Sequence: Synthetic peptide
  Seed: LRMKWMMAMKYPITA
LRMKYMMIMMYPNTA

SEQ ID NO: 246894 - protein, 15 aa, Artificial Sequence
  Description of Artificial Sequence: Synthetic peptide
  Seed: LRMKWMMAMKYPITA
LRMKYMMIMMYPRTA

SEQ ID NO: 246895 - protein, 15 aa, Artificial Sequence
  Description of Artificial Sequence: Synthetic peptide
  Seed: LRMKWMMAMKYPITA
LRMKYMMIMMYPSTA

SEQ ID NO: 246896 - protein, 15 aa, Artificial Sequence
  Description of Artificial Sequence: Synthetic peptide
  Seed: LRMKWMMAMKYPITA
LRMKYMMIMMYPTTA

SEQ ID NO: 246897 - protein, 15 aa, Artificial Sequence
  Description of Artificial Sequence: Synthetic peptide
  Seed: LRMKWMMAMKYPITA
LRMKYMMIMMYPVTA

SEQ ID NO: 246898 - protein, 15 aa, Artificial Sequence
  Description of Artificial Sequence: Synthetic peptide
  Seed: LRMKWMMAMKYPITA
LRMKYMMIMNYPATA

SEQ ID NO: 246899 - protein, 15 aa, Artificial Sequence
  Description of Artificial Sequence: Synthetic peptide
  Seed: LRMKWMMAMKYPITA
LRMKYMMIMNYPCTA

SEQ ID NO: 246900 - protein, 15 aa, Artificial Sequence
  Description of Artificial Sequence: Synthetic peptide
  Seed: LRMKWMMAMKYPITA
LRMKYMMIMNYPDTA

SEQ ID NO: 246901 - protein, 15 aa, Artificial Sequence
  Description of Artificial Sequence: Synthetic peptide
  Seed: LRMKWMMAMKYPITA
LRMKYMMIMNYPETA

SEQ ID NO: 246902 - protein, 15 aa, Artificial Sequence
  Description of Artificial Sequence: Synthetic peptide
  Seed: LRMKWMMAMKYPITA
LRMKYMMIMNYPFTA

SEQ ID NO: 246903 - protein, 15 aa, Artificial Sequence
  Description of Artificial Sequence: Synthetic peptide
  Seed: LRMKWMMAMKYPITA
LRMKYMMIMNYPGTA

SEQ ID NO: 246904 - protein, 15 aa, Artificial Sequence
  Description of Artificial Sequence: Synthetic peptide
  Seed: LRMKWMMAMKYPITA
LRMKYMMIMNYPHTA

SEQ ID NO: 246905 - protein, 15 aa, Artificial Sequence
  Description of Artificial Sequence: Synthetic peptide
  Seed: LRMKWMMAMKYPITA
LRMKYMMIMNYPITA

SEQ ID NO: 246906 - protein, 15 aa, Artificial Sequence
  Description of Artificial Sequence: Synthetic peptide
  Seed: LRMKWMMAMKYPITA
LRMKYMMIMNYPKTA

SEQ ID NO: 246907 - protein, 15 aa, Artificial Sequence
  Description of Artificial Sequence: Synthetic peptide
  Seed: LRMKWMMAMKYPITA
LRMKYMMIMNYPLTA

SEQ ID NO: 246908 - protein, 15 aa, Artificial Sequence
  Description of Artificial Sequence: Synthetic peptide
  Seed: LRMKWMMAMKYPITA
LRMKYMMIMNYPMTA

SEQ ID NO: 246909 - protein, 15 aa, Artificial Sequence
  Description of Artificial Sequence: Synthetic peptide
  Seed: LRMKWMMAMKYPITA
LRMKYMMIMNYPNTA

SEQ ID NO: 246910 - protein, 15 aa, Artificial Sequence
  Description of Artificial Sequence: Synthetic peptide
  Seed: LRMKWMMAMKYPITA
LRMKYMMIMNYPPTA

SEQ ID NO: 246911 - protein, 15 aa, Artificial Sequence
  Description of Artificial Sequence: Synthetic peptide
  Seed: LRMKWMMAMKYPITA
LRMKYMMIMNYPQTA

SEQ ID NO: 246912 - protein, 15 aa, Artificial Sequence
  Description of Artificial Sequence: Synthetic peptide
  Seed: LRMKWMMAMKYPITA
LRMKYMMIMNYPRTA

SEQ ID NO: 246913 - protein, 15 aa, Artificial Sequence
  Description of Artificial Sequence: Synthetic peptide
  Seed: LRMKWMMAMKYPITA
LRMKYMMIMNYPSTA

SEQ ID NO: 246914 - protein, 15 aa, Artificial Sequence
  Description of Artificial Sequence: Synthetic peptide
  Seed: LRMKWMMAMKYPITA
LRMKYMMIMNYPTTA

SEQ ID NO: 246915 - protein, 15 aa, Artificial Sequence
  Description of Artificial Sequence: Synthetic peptide
  Seed: LRMKWMMAMKYPITA
LRMKYMMIMNYPVTA

SEQ ID NO: 246916 - protein, 15 aa, Artificial Sequence
  Description of Artificial Sequence: Synthetic peptide
  Seed: LRMKWMMAMKYPITA
LRMKYMMIMNYPWTA

SEQ ID NO: 246917 - protein, 15 aa, Artificial Sequence
  Description of Artificial Sequence: Synthetic peptide
  Seed: LRMKWMMAMKYPITA
LRMKYMMIMNYPYTA

SEQ ID NO: 246918 - protein, 15 aa, Artificial Sequence
  Description of Artificial Sequence: Synthetic peptide
  Seed: LRMKWMMAMKYPITA
LRMKYMMIMPYPATA

SEQ ID NO: 246919 - protein, 15 aa, Artificial Sequence
  Description of Artificial Sequence: Synthetic peptide
  Seed: LRMKWMMAMKYPITA
LRMKYMMIMPYPCTA

SEQ ID NO: 246920 - protein, 15 aa, Artificial Sequence
  Description of Artificial Sequence: Synthetic peptide
  Seed: LRMKWMMAMKYPITA
LRMKYMMIMPYPDTA

SEQ ID NO: 246921 - protein, 15 aa, Artificial Sequence
  Description of Artificial Sequence: Synthetic peptide
  Seed: LRMKWMMAMKYPITA
LRMKYMMIMPYPETA

SEQ ID NO: 246922 - protein, 15 aa, Artificial Sequence
  Description of Artificial Sequence: Synthetic peptide
  Seed: LRMKWMMAMKYPITA
LRMKYMMIMPYPFTA

SEQ ID NO: 246923 - protein, 15 aa, Artificial Sequence
  Description of Artificial Sequence: Synthetic peptide
  Seed: LRMKWMMAMKYPITA
LRMKYMMIMPYPGTA

SEQ ID NO: 246924 - protein, 15 aa, Artificial Sequence
  Description of Artificial Sequence: Synthetic peptide
  Seed: LRMKWMMAMKYPITA
LRMKYMMIMPYPHTA

SEQ ID NO: 246925 - protein, 15 aa, Artificial Sequence
  Description of Artificial Sequence: Synthetic peptide
  Seed: LRMKWMMAMKYPITA
LRMKYMMIMPYPITA

SEQ ID NO: 246926 - protein, 15 aa, Artificial Sequence
  Description of Artificial Sequence: Synthetic peptide
  Seed: LRMKWMMAMKYPITA
LRMKYMMIMPYPKTA

SEQ ID NO: 246927 - protein, 15 aa, Artificial Sequence
  Description of Artificial Sequence: Synthetic peptide
  Seed: LRMKWMMAMKYPITA
LRMKYMMIMPYPLTA

SEQ ID NO: 246928 - protein, 15 aa, Artificial Sequence
  Description of Artificial Sequence: Synthetic peptide
  Seed: LRMKWMMAMKYPITA
LRMKYMMIMPYPMTA

SEQ ID NO: 246929 - protein, 15 aa, Artificial Sequence
  Description of Artificial Sequence: Synthetic peptide
  Seed: LRMKWMMAMKYPITA
LRMKYMMIMPYPNTA

SEQ ID NO: 246930 - protein, 15 aa, Artificial Sequence
  Description of Artificial Sequence: Synthetic peptide
  Seed: LRMKWMMAMKYPITA
LRMKYMMIMPYPPTA

SEQ ID NO: 246931 - protein, 15 aa, Artificial Sequence
  Description of Artificial Sequence: Synthetic peptide
  Seed: LRMKWMMAMKYPITA
LRMKYMMIMPYPQTA

SEQ ID NO: 246932 - protein, 15 aa, Artificial Sequence
  Description of Artificial Sequence: Synthetic peptide
  Seed: LRMKWMMAMKYPITA
LRMKYMMIMPYPRTA

SEQ ID NO: 246933 - protein, 15 aa, Artificial Sequence
  Description of Artificial Sequence: Synthetic peptide
  Seed: LRMKWMMAMKYPITA
LRMKYMMIMPYPSTA

SEQ ID NO: 246934 - protein, 15 aa, Artificial Sequence
  Description of Artificial Sequence: Synthetic peptide
  Seed: LRMKWMMAMKYPITA
LRMKYMMIMPYPTTA

SEQ ID NO: 246935 - protein, 15 aa, Artificial Sequence
  Description of Artificial Sequence: Synthetic peptide
  Seed: LRMKWMMAMKYPITA
LRMKYMMIMPYPVTA

SEQ ID NO: 246936 - protein, 15 aa, Artificial Sequence
  Description of Artificial Sequence: Synthetic peptide
  Seed: LRMKWMMAMKYPITA
LRMKYMMIMPYPWTA

SEQ ID NO: 246937 - protein, 15 aa, Artificial Sequence
  Description of Artificial Sequence: Synthetic peptide
  Seed: LRMKWMMAMKYPITA
LRMKYMMIMPYPYTA

SEQ ID NO: 246938 - protein, 15 aa, Artificial Sequence
  Description of Artificial Sequence: Synthetic peptide
  Seed: LRMKWMMAMKYPITA
LRMKYMMIMQYPATA

SEQ ID NO: 246939 - protein, 15 aa, Artificial Sequence
  Description of Artificial Sequence: Synthetic peptide
  Seed: LRMKWMMAMKYPITA
LRMKYMMIMQYPCTA

SEQ ID NO: 246940 - protein, 15 aa, Artificial Sequence
  Description of Artificial Sequence: Synthetic peptide
  Seed: LRMKWMMAMKYPITA
LRMKYMMIMQYPDTA

SEQ ID NO: 246941 - protein, 15 aa, Artificial Sequence
  Description of Artificial Sequence: Synthetic peptide
  Seed: LRMKWMMAMKYPITA
LRMKYMMIMQYPETA

SEQ ID NO: 246942 - protein, 15 aa, Artificial Sequence
  Description of Artificial Sequence: Synthetic peptide
  Seed: LRMKWMMAMKYPITA
LRMKYMMIMQYPFTA

SEQ ID NO: 246943 - protein, 15 aa, Artificial Sequence
  Description of Artificial Sequence: Synthetic peptide
  Seed: LRMKWMMAMKYPITA
LRMKYMMIMQYPGTA

SEQ ID NO: 246944 - protein, 15 aa, Artificial Sequence
  Description of Artificial Sequence: Synthetic peptide
  Seed: LRMKWMMAMKYPITA
LRMKYMMIMQYPHTA

SEQ ID NO: 246945 - protein, 15 aa, Artificial Sequence
  Description of Artificial Sequence: Synthetic peptide
  Seed: LRMKWMMAMKYPITA
LRMKYMMIMQYPITA

SEQ ID NO: 246946 - protein, 15 aa, Artificial Sequence
  Description of Artificial Sequence: Synthetic peptide
  Seed: LRMKWMMAMKYPITA
LRMKYMMIMQYPKTA

SEQ ID NO: 246947 - protein, 15 aa, Artificial Sequence
  Description of Artificial Sequence: Synthetic peptide
  Seed: LRMKWMMAMKYPITA
LRMKYMMIMQYPLTA

SEQ ID NO: 246948 - protein, 15 aa, Artificial Sequence
  Description of Artificial Sequence: Synthetic peptide
  Seed: LRMKWMMAMKYPITA
LRMKYMMIMQYPMTA

SEQ ID NO: 246949 - protein, 15 aa, Artificial Sequence
  Description of Artificial Sequence: Synthetic peptide
  Seed: LRMKWMMAMKYPITA
LRMKYMMIMQYPNTA

SEQ ID NO: 246950 - protein, 15 aa, Artificial Sequence
  Description of Artificial Sequence: Synthetic peptide
  Seed: LRMKWMMAMKYPITA
LRMKYMMIMQYPPTA

SEQ ID NO: 246951 - protein, 15 aa, Artificial Sequence
  Description of Artificial Sequence: Synthetic peptide
  Seed: LRMKWMMAMKYPITA
LRMKYMMIMQYPQTA

SEQ ID NO: 246952 - protein, 15 aa, Artificial Sequence
  Description of Artificial Sequence: Synthetic peptide
  Seed: LRMKWMMAMKYPITA
LRMKYMMIMQYPRTA

SEQ ID NO: 246953 - protein, 15 aa, Artificial Sequence
  Description of Artificial Sequence: Synthetic peptide
  Seed: LRMKWMMAMKYPITA
LRMKYMMIMQYPSTA

SEQ ID NO: 246954 - protein, 15 aa, Artificial Sequence
  Description of Artificial Sequence: Synthetic peptide
  Seed: LRMKWMMAMKYPITA
LRMKYMMIMQYPTTA

SEQ ID NO: 246955 - protein, 15 aa, Artificial Sequence
  Description of Artificial Sequence: Synthetic peptide
  Seed: LRMKWMMAMKYPITA
LRMKYMMIMQYPVTA

SEQ ID NO: 246956 - protein, 15 aa, Artificial Sequence
  Description of Artificial Sequence: Synthetic peptide
  Seed: LRMKWMMAMKYPITA
LRMKYMMIMQYPYTA

SEQ ID NO: 246957 - protein, 15 aa, Artificial Sequence
  Description of Artificial Sequence: Synthetic peptide
  Seed: LRMKWMMAMKYPITA
LRMKYMMIMRYPATA

SEQ ID NO: 246958 - protein, 15 aa, Artificial Sequence
  Description of Artificial Sequence: Synthetic peptide
  Seed: LRMKWMMAMKYPITA
LRMKYMMIMRYPCTA

SEQ ID NO: 246959 - protein, 15 aa, Artificial Sequence
  Description of Artificial Sequence: Synthetic peptide
  Seed: LRMKWMMAMKYPITA
LRMKYMMIMRYPDTA

SEQ ID NO: 246960 - protein, 15 aa, Artificial Sequence
  Description of Artificial Sequence: Synthetic peptide
  Seed: LRMKWMMAMKYPITA
LRMKYMMIMRYPETA

SEQ ID NO: 246961 - protein, 15 aa, Artificial Sequence
  Description of Artificial Sequence: Synthetic peptide
  Seed: LRMKWMMAMKYPITA
LRMKYMMIMRYPFTA

SEQ ID NO: 246962 - protein, 15 aa, Artificial Sequence
  Description of Artificial Sequence: Synthetic peptide
  Seed: LRMKWMMAMKYPITA
LRMKYMMIMRYPGTA

SEQ ID NO: 246963 - protein, 15 aa, Artificial Sequence
  Description of Artificial Sequence: Synthetic peptide
  Seed: LRMKWMMAMKYPITA
LRMKYMMIMRYPHTA

SEQ ID NO: 246964 - protein, 15 aa, Artificial Sequence
  Description of Artificial Sequence: Synthetic peptide
  Seed: LRMKWMMAMKYPITA
LRMKYMMIMRYPITA

SEQ ID NO: 246965 - protein, 15 aa, Artificial Sequence
  Description of Artificial Sequence: Synthetic peptide
  Seed: LRMKWMMAMKYPITA
LRMKYMMIMRYPKTA

SEQ ID NO: 246966 - protein, 15 aa, Artificial Sequence
  Description of Artificial Sequence: Synthetic peptide
  Seed: LRMKWMMAMKYPITA
LRMKYMMIMRYPLTA

SEQ ID NO: 246967 - protein, 15 aa, Artificial Sequence
  Description of Artificial Sequence: Synthetic peptide
  Seed: LRMKWMMAMKYPITA
LRMKYMMIMRYPMTA

SEQ ID NO: 246968 - protein, 15 aa, Artificial Sequence
  Description of Artificial Sequence: Synthetic peptide
  Seed: LRMKWMMAMKYPITA
LRMKYMMIMRYPNTA

SEQ ID NO: 246969 - protein, 15 aa, Artificial Sequence
  Description of Artificial Sequence: Synthetic peptide
  Seed: LRMKWMMAMKYPITA
LRMKYMMIMRYPPTA

SEQ ID NO: 246970 - protein, 15 aa, Artificial Sequence
  Description of Artificial Sequence: Synthetic peptide
  Seed: LRMKWMMAMKYPITA
LRMKYMMIMRYPQTA

SEQ ID NO: 246971 - protein, 15 aa, Artificial Sequence
  Description of Artificial Sequence: Synthetic peptide
  Seed: LRMKWMMAMKYPITA
LRMKYMMIMRYPRTA

SEQ ID NO: 246972 - protein, 15 aa, Artificial Sequence
  Description of Artificial Sequence: Synthetic peptide
  Seed: LRMKWMMAMKYPITA
LRMKYMMIMRYPSTA

SEQ ID NO: 246973 - protein, 15 aa, Artificial Sequence
  Description of Artificial Sequence: Synthetic peptide
  Seed: LRMKWMMAMKYPITA
LRMKYMMIMRYPTTA

SEQ ID NO: 246974 - protein, 15 aa, Artificial Sequence
  Description of Artificial Sequence: Synthetic peptide
  Seed: LRMKWMMAMKYPITA
LRMKYMMIMRYPVTA

SEQ ID NO: 246975 - protein, 15 aa, Artificial Sequence
  Description of Artificial Sequence: Synthetic peptide
  Seed: LRMKWMMAMKYPITA
LRMKYMMIMRYPWTA

SEQ ID NO: 246976 - protein, 15 aa, Artificial Sequence
  Description of Artificial Sequence: Synthetic peptide
  Seed: LRMKWMMAMKYPITA
LRMKYMMIMRYPYTA

SEQ ID NO: 246977 - protein, 15 aa, Artificial Sequence
  Description of Artificial Sequence: Synthetic peptide
  Seed: LRMKWMMAMKYPITA
LRMKYMMIMSYPATA

SEQ ID NO: 246978 - protein, 15 aa, Artificial Sequence
  Description of Artificial Sequence: Synthetic peptide
  Seed: LRMKWMMAMKYPITA
LRMKYMMIMSYPCTA

SEQ ID NO: 246979 - protein, 15 aa, Artificial Sequence
  Description of Artificial Sequence: Synthetic peptide
  Seed: LRMKWMMAMKYPITA
LRMKYMMIMSYPDTA

SEQ ID NO: 246980 - protein, 15 aa, Artificial Sequence
  Description of Artificial Sequence: Synthetic peptide
  Seed: LRMKWMMAMKYPITA
LRMKYMMIMSYPETA

SEQ ID NO: 246981 - protein, 15 aa, Artificial Sequence
  Description of Artificial Sequence: Synthetic peptide
  Seed: LRMKWMMAMKYPITA
LRMKYMMIMSYPFTA

SEQ ID NO: 246982 - protein, 15 aa, Artificial Sequence
  Description of Artificial Sequence: Synthetic peptide
  Seed: LRMKWMMAMKYPITA
LRMKYMMIMSYPGTA

SEQ ID NO: 246983 - protein, 15 aa, Artificial Sequence
  Description of Artificial Sequence: Synthetic peptide
  Seed: LRMKWMMAMKYPITA
LRMKYMMIMSYPHTA

SEQ ID NO: 246984 - protein, 15 aa, Artificial Sequence
  Description of Artificial Sequence: Synthetic peptide
  Seed: LRMKWMMAMKYPITA
LRMKYMMIMSYPITA

SEQ ID NO: 246985 - protein, 15 aa, Artificial Sequence
  Description of Artificial Sequence: Synthetic peptide
  Seed: LRMKWMMAMKYPITA
LRMKYMMIMSYPKTA

SEQ ID NO: 246986 - protein, 15 aa, Artificial Sequence
  Description of Artificial Sequence: Synthetic peptide
  Seed: LRMKWMMAMKYPITA
LRMKYMMIMSYPLTA

SEQ ID NO: 246987 - protein, 15 aa, Artificial Sequence
  Description of Artificial Sequence: Synthetic peptide
  Seed: LRMKWMMAMKYPITA
LRMKYMMIMSYPMTA

SEQ ID NO: 246988 - protein, 15 aa, Artificial Sequence
  Description of Artificial Sequence: Synthetic peptide
  Seed: LRMKWMMAMKYPITA
LRMKYMMIMSYPNTA

SEQ ID NO: 246989 - protein, 15 aa, Artificial Sequence
  Description of Artificial Sequence: Synthetic peptide
  Seed: LRMKWMMAMKYPITA
LRMKYMMIMSYPPTA

SEQ ID NO: 246990 - protein, 15 aa, Artificial Sequence
  Description of Artificial Sequence: Synthetic peptide
  Seed: LRMKWMMAMKYPITA
LRMKYMMIMSYPQTA

SEQ ID NO: 246991 - protein, 15 aa, Artificial Sequence
  Description of Artificial Sequence: Synthetic peptide
  Seed: LRMKWMMAMKYPITA
LRMKYMMIMSYPRTA

SEQ ID NO: 246992 - protein, 15 aa, Artificial Sequence
  Description of Artificial Sequence: Synthetic peptide
  Seed: LRMKWMMAMKYPITA
LRMKYMMIMSYPSTA

SEQ ID NO: 246993 - protein, 15 aa, Artificial Sequence
  Description of Artificial Sequence: Synthetic peptide
  Seed: LRMKWMMAMKYPITA
LRMKYMMIMSYPTTA

SEQ ID NO: 246994 - protein, 15 aa, Artificial Sequence
  Description of Artificial Sequence: Synthetic peptide
  Seed: LRMKWMMAMKYPITA
LRMKYMMIMSYPVTA

SEQ ID NO: 246995 - protein, 15 aa, Artificial Sequence
  Description of Artificial Sequence: Synthetic peptide
  Seed: LRMKWMMAMKYPITA
LRMKYMMIMSYPWTA

SEQ ID NO: 246996 - protein, 15 aa, Artificial Sequence
  Description of Artificial Sequence: Synthetic peptide
  Seed: LRMKWMMAMKYPITA
LRMKYMMIMSYPYTA

SEQ ID NO: 246997 - protein, 15 aa, Artificial Sequence
  Description of Artificial Sequence: Synthetic peptide
  Seed: LRMKWMMAMKYPITA
LRMKYMMIMTYPATA

SEQ ID NO: 246998 - protein, 15 aa, Artificial Sequence
  Description of Artificial Sequence: Synthetic peptide
  Seed: LRMKWMMAMKYPITA
LRMKYMMIMTYPCTA

SEQ ID NO: 246999 - protein, 15 aa, Artificial Sequence
  Description of Artificial Sequence: Synthetic peptide
  Seed: LRMKWMMAMKYPITA
LRMKYMMIMTYPDTA

SEQ ID NO: 247000 - protein, 15 aa, Artificial Sequence
  Description of Artificial Sequence: Synthetic peptide
  Seed: LRMKWMMAMKYPITA
LRMKYMMIMTYPETA

SEQ ID NO: 247001 - protein, 15 aa, Artificial Sequence
  Description of Artificial Sequence: Synthetic peptide
  Seed: LRMKWMMAMKYPITA
LRMKYMMIMTYPFTA

SEQ ID NO: 247002 - protein, 15 aa, Artificial Sequence
  Description of Artificial Sequence: Synthetic peptide
  Seed: LRMKWMMAMKYPITA
LRMKYMMIMTYPGTA

SEQ ID NO: 247003 - protein, 15 aa, Artificial Sequence
  Description of Artificial Sequence: Synthetic peptide
  Seed: LRMKWMMAMKYPITA
LRMKYMMIMTYPHTA

SEQ ID NO: 247004 - protein, 15 aa, Artificial Sequence
  Description of Artificial Sequence: Synthetic peptide
  Seed: LRMKWMMAMKYPITA
LRMKYMMIMTYPITA

SEQ ID NO: 247005 - protein, 15 aa, Artificial Sequence
  Description of Artificial Sequence: Synthetic peptide
  Seed: LRMKWMMAMKYPITA
LRMKYMMIMTYPKTA

SEQ ID NO: 247006 - protein, 15 aa, Artificial Sequence
  Description of Artificial Sequence: Synthetic peptide
  Seed: LRMKWMMAMKYPITA
LRMKYMMIMTYPLTA

SEQ ID NO: 247007 - protein, 15 aa, Artificial Sequence
  Description of Artificial Sequence: Synthetic peptide
  Seed: LRMKWMMAMKYPITA
LRMKYMMIMTYPMTA

SEQ ID NO: 247008 - protein, 15 aa, Artificial Sequence
  Description of Artificial Sequence: Synthetic peptide
  Seed: LRMKWMMAMKYPITA
LRMKYMMIMTYPNTA

SEQ ID NO: 247009 - protein, 15 aa, Artificial Sequence
  Description of Artificial Sequence: Synthetic peptide
  Seed: LRMKWMMAMKYPITA
LRMKYMMIMTYPPTA

SEQ ID NO: 247010 - protein, 15 aa, Artificial Sequence
  Description of Artificial Sequence: Synthetic peptide
  Seed: LRMKWMMAMKYPITA
LRMKYMMIMTYPQTA

SEQ ID NO: 247011 - protein, 15 aa, Artificial Sequence
  Description of Artificial Sequence: Synthetic peptide
  Seed: LRMKWMMAMKYPITA
LRMKYMMIMTYPRTA

SEQ ID NO: 247012 - protein, 15 aa, Artificial Sequence
  Description of Artificial Sequence: Synthetic peptide
  Seed: LRMKWMMAMKYPITA
LRMKYMMIMTYPSTA

SEQ ID NO: 247013 - protein, 15 aa, Artificial Sequence
  Description of Artificial Sequence: Synthetic peptide
  Seed: LRMKWMMAMKYPITA
LRMKYMMIMTYPTTA

SEQ ID NO: 247014 - protein, 15 aa, Artificial Sequence
  Description of Artificial Sequence: Synthetic peptide
  Seed: LRMKWMMAMKYPITA
LRMKYMMIMTYPVTA

SEQ ID NO: 247015 - protein, 15 aa, Artificial Sequence
  Description of Artificial Sequence: Synthetic peptide
  Seed: LRMKWMMAMKYPITA
LRMKYMMIMTYPWTA

SEQ ID NO: 247016 - protein, 15 aa, Artificial Sequence
  Description of Artificial Sequence: Synthetic peptide
  Seed: LRMKWMMAMKYPITA
LRMKYMMIMTYPYTA

SEQ ID NO: 247017 - protein, 15 aa, Artificial Sequence
  Description of Artificial Sequence: Synthetic peptide
  Seed: LRMKWMMAMKYPITA
LRMKYMMIMVYPATA

SEQ ID NO: 247018 - protein, 15 aa, Artificial Sequence
  Description of Artificial Sequence: Synthetic peptide
  Seed: LRMKWMMAMKYPITA
LRMKYMMIMVYPCTA

SEQ ID NO: 247019 - protein, 15 aa, Artificial Sequence
  Description of Artificial Sequence: Synthetic peptide
  Seed: LRMKWMMAMKYPITA
LRMKYMMIMVYPDTA

SEQ ID NO: 247020 - protein, 15 aa, Artificial Sequence
  Description of Artificial Sequence: Synthetic peptide
  Seed: LRMKWMMAMKYPITA
LRMKYMMIMVYPETA

SEQ ID NO: 247021 - protein, 15 aa, Artificial Sequence
  Description of Artificial Sequence: Synthetic peptide
  Seed: LRMKWMMAMKYPITA
LRMKYMMIMVYPFTA

SEQ ID NO: 247022 - protein, 15 aa, Artificial Sequence
  Description of Artificial Sequence: Synthetic peptide
  Seed: LRMKWMMAMKYPITA
LRMKYMMIMVYPGTA

SEQ ID NO: 247023 - protein, 15 aa, Artificial Sequence
  Description of Artificial Sequence: Synthetic peptide
  Seed: LRMKWMMAMKYPITA
LRMKYMMIMVYPHTA

SEQ ID NO: 247024 - protein, 15 aa, Artificial Sequence
  Description of Artificial Sequence: Synthetic peptide
  Seed: LRMKWMMAMKYPITA
LRMKYMMIMVYPITA

SEQ ID NO: 247025 - protein, 15 aa, Artificial Sequence
  Description of Artificial Sequence: Synthetic peptide
  Seed: LRMKWMMAMKYPITA
LRMKYMMIMVYPKTA

SEQ ID NO: 247026 - protein, 15 aa, Artificial Sequence
  Description of Artificial Sequence: Synthetic peptide
  Seed: LRMKWMMAMKYPITA
LRMKYMMIMVYPLTA

SEQ ID NO: 247027 - protein, 15 aa, Artificial Sequence
  Description of Artificial Sequence: Synthetic peptide
  Seed: LRMKWMMAMKYPITA
LRMKYMMIMVYPMTA

SEQ ID NO: 247028 - protein, 15 aa, Artificial Sequence
  Description of Artificial Sequence: Synthetic peptide
  Seed: LRMKWMMAMKYPITA
LRMKYMMIMVYPNTA

SEQ ID NO: 247029 - protein, 15 aa, Artificial Sequence
  Description of Artificial Sequence: Synthetic peptide
  Seed: LRMKWMMAMKYPITA
LRMKYMMIMVYPPTA

SEQ ID NO: 247030 - protein, 15 aa, Artificial Sequence
  Description of Artificial Sequence: Synthetic peptide
  Seed: LRMKWMMAMKYPITA
LRMKYMMIMVYPQTA

SEQ ID NO: 247031 - protein, 15 aa, Artificial Sequence
  Description of Artificial Sequence: Synthetic peptide
  Seed: LRMKWMMAMKYPITA
LRMKYMMIMVYPRTA

SEQ ID NO: 247032 - protein, 15 aa, Artificial Sequence
  Description of Artificial Sequence: Synthetic peptide
  Seed: LRMKWMMAMKYPITA
LRMKYMMIMVYPSTA

SEQ ID NO: 247033 - protein, 15 aa, Artificial Sequence
  Description of Artificial Sequence: Synthetic peptide
  Seed: LRMKWMMAMKYPITA
LRMKYMMIMVYPTTA

SEQ ID NO: 247034 - protein, 15 aa, Artificial Sequence
  Description of Artificial Sequence: Synthetic peptide
  Seed: LRMKWMMAMKYPITA
LRMKYMMIMVYPVTA

SEQ ID NO: 247035 - protein, 15 aa, Artificial Sequence
  Description of Artificial Sequence: Synthetic peptide
  Seed: LRMKWMMAMKYPITA
LRMKYMMIMVYPYTA

SEQ ID NO: 247036 - protein, 15 aa, Artificial Sequence
  Description of Artificial Sequence: Synthetic peptide
  Seed: LRMKWMMAMKYPITA
LRMKYMMIMWYPATA

SEQ ID NO: 247037 - protein, 15 aa, Artificial Sequence
  Description of Artificial Sequence: Synthetic peptide
  Seed: LRMKWMMAMKYPITA
LRMKYMMIMWYPHTA

SEQ ID NO: 247038 - protein, 15 aa, Artificial Sequence
  Description of Artificial Sequence: Synthetic peptide
  Seed: LRMKWMMAMKYPITA
LRMKYMMIMWYPITA

SEQ ID NO: 247039 - protein, 15 aa, Artificial Sequence
  Description of Artificial Sequence: Synthetic peptide
  Seed: LRMKWMMAMKYPITA
LRMKYMMIMWYPLTA

SEQ ID NO: 247040 - protein, 15 aa, Artificial Sequence
  Description of Artificial Sequence: Synthetic peptide
  Seed: LRMKWMMAMKYPITA
LRMKYMMIMWYPMTA

SEQ ID NO: 247041 - protein, 15 aa, Artificial Sequence
  Description of Artificial Sequence: Synthetic peptide
  Seed: LRMKWMMAMKYPITA
LRMKYMMIMWYPNTA

SEQ ID NO: 247042 - protein, 15 aa, Artificial Sequence
  Description of Artificial Sequence: Synthetic peptide
  Seed: LRMKWMMAMKYPITA
LRMKYMMIMWYPSTA

SEQ ID NO: 247043 - protein, 15 aa, Artificial Sequence
  Description of Artificial Sequence: Synthetic peptide
  Seed: LRMKWMMAMKYPITA
LRMKYMMIMWYPTTA

SEQ ID NO: 247044 - protein, 15 aa, Artificial Sequence
  Description of Artificial Sequence: Synthetic peptide
  Seed: LRMKWMMAMKYPITA
LRMKYMMIMWYPVTA

SEQ ID NO: 247045 - protein, 15 aa, Artificial Sequence
  Description of Artificial Sequence: Synthetic peptide
  Seed: LRMKWMMAMKYPITA
LRMKYMMIMYYPATA

SEQ ID NO: 247046 - protein, 15 aa, Artificial Sequence
  Description of Artificial Sequence: Synthetic peptide
  Seed: LRMKWMMAMKYPITA
LRMKYMMIMYYPGTA

SEQ ID NO: 247047 - protein, 15 aa, Artificial Sequence
  Description of Artificial Sequence: Synthetic peptide
  Seed: LRMKWMMAMKYPITA
LRMKYMMIMYYPHTA

SEQ ID NO: 247048 - protein, 15 aa, Artificial Sequence
  Description of Artificial Sequence: Synthetic peptide
  Seed: LRMKWMMAMKYPITA
LRMKYMMIMYYPITA

SEQ ID NO: 247049 - protein, 15 aa, Artificial Sequence
  Description of Artificial Sequence: Synthetic peptide
  Seed: LRMKWMMAMKYPITA
LRMKYMMIMYYPLTA

SEQ ID NO: 247050 - protein, 15 aa, Artificial Sequence
  Description of Artificial Sequence: Synthetic peptide
  Seed: LRMKWMMAMKYPITA
LRMKYMMIMYYPMTA

SEQ ID NO: 247051 - protein, 15 aa, Artificial Sequence
  Description of Artificial Sequence: Synthetic peptide
  Seed: LRMKWMMAMKYPITA
LRMKYMMIMYYPNTA

SEQ ID NO: 247052 - protein, 15 aa, Artificial Sequence
  Description of Artificial Sequence: Synthetic peptide
  Seed: LRMKWMMAMKYPITA
LRMKYMMIMYYPQTA

SEQ ID NO: 247053 - protein, 15 aa, Artificial Sequence
  Description of Artificial Sequence: Synthetic peptide
  Seed: LRMKWMMAMKYPITA
LRMKYMMIMYYPSTA

SEQ ID NO: 247054 - protein, 15 aa, Artificial Sequence
  Description of Artificial Sequence: Synthetic peptide
  Seed: LRMKWMMAMKYPITA
LRMKYMMIMYYPTTA

SEQ ID NO: 247055 - protein, 15 aa, Artificial Sequence
  Description of Artificial Sequence: Synthetic peptide
  Seed: LRMKWMMAMKYPITA
LRMKYMMIMYYPVTA

SEQ ID NO: 247056 - protein, 15 aa, Artificial Sequence
  Description of Artificial Sequence: Synthetic peptide
  Seed: LRMKWMMAMKYPITA
LRMKYMMKMAYPATA

SEQ ID NO: 247057 - protein, 15 aa, Artificial Sequence
  Description of Artificial Sequence: Synthetic peptide
  Seed: LRMKWMMAMKYPITA
LRMKYMMKMAYPCTA

SEQ ID NO: 247058 - protein, 15 aa, Artificial Sequence
  Description of Artificial Sequence: Synthetic peptide
  Seed: LRMKWMMAMKYPITA
LRMKYMMKMAYPETA

SEQ ID NO: 247059 - protein, 15 aa, Artificial Sequence
  Description of Artificial Sequence: Synthetic peptide
  Seed: LRMKWMMAMKYPITA
LRMKYMMKMAYPFTA

SEQ ID NO: 247060 - protein, 15 aa, Artificial Sequence
  Description of Artificial Sequence: Synthetic peptide
  Seed: LRMKWMMAMKYPITA
LRMKYMMKMAYPGTA

SEQ ID NO: 247061 - protein, 15 aa, Artificial Sequence
  Description of Artificial Sequence: Synthetic peptide
  Seed: LRMKWMMAMKYPITA
LRMKYMMKMAYPHTA

SEQ ID NO: 247062 - protein, 15 aa, Artificial Sequence
  Description of Artificial Sequence: Synthetic peptide
  Seed: LRMKWMMAMKYPITA
LRMKYMMKMAYPITA

SEQ ID NO: 247063 - protein, 15 aa, Artificial Sequence
  Description of Artificial Sequence: Synthetic peptide
  Seed: LRMKWMMAMKYPITA
LRMKYMMKMAYPKTA

SEQ ID NO: 247064 - protein, 15 aa, Artificial Sequence
  Description of Artificial Sequence: Synthetic peptide
  Seed: LRMKWMMAMKYPITA
LRMKYMMKMAYPLTA

SEQ ID NO: 247065 - protein, 15 aa, Artificial Sequence
  Description of Artificial Sequence: Synthetic peptide
  Seed: LRMKWMMAMKYPITA
LRMKYMMKMAYPMTA

SEQ ID NO: 247066 - protein, 15 aa, Artificial Sequence
  Description of Artificial Sequence: Synthetic peptide
  Seed: LRMKWMMAMKYPITA
LRMKYMMKMAYPNTA

SEQ ID NO: 247067 - protein, 15 aa, Artificial Sequence
  Description of Artificial Sequence: Synthetic peptide
  Seed: LRMKWMMAMKYPITA
LRMKYMMKMAYPPTA

SEQ ID NO: 247068 - protein, 15 aa, Artificial Sequence
  Description of Artificial Sequence: Synthetic peptide
  Seed: LRMKWMMAMKYPITA
LRMKYMMKMAYPQTA

SEQ ID NO: 247069 - protein, 15 aa, Artificial Sequence
  Description of Artificial Sequence: Synthetic peptide
  Seed: LRMKWMMAMKYPITA
LRMKYMMKMAYPRTA

SEQ ID NO: 247070 - protein, 15 aa, Artificial Sequence
  Description of Artificial Sequence: Synthetic peptide
  Seed: LRMKWMMAMKYPITA
LRMKYMMKMAYPSTA

SEQ ID NO: 247071 - protein, 15 aa, Artificial Sequence
  Description of Artificial Sequence: Synthetic peptide
  Seed: LRMKWMMAMKYPITA
LRMKYMMKMAYPTTA

SEQ ID NO: 247072 - protein, 15 aa, Artificial Sequence
  Description of Artificial Sequence: Synthetic peptide
  Seed: LRMKWMMAMKYPITA
LRMKYMMKMAYPVTA

SEQ ID NO: 247073 - protein, 15 aa, Artificial Sequence
  Description of Artificial Sequence: Synthetic peptide
  Seed: LRMKWMMAMKYPITA
LRMKYMMKMAYPWTA

SEQ ID NO: 247074 - protein, 15 aa, Artificial Sequence
  Description of Artificial Sequence: Synthetic peptide
  Seed: LRMKWMMAMKYPITA
LRMKYMMKMAYPYTA

SEQ ID NO: 247075 - protein, 15 aa, Artificial Sequence
  Description of Artificial Sequence: Synthetic peptide
  Seed: LRMKWMMAMKYPITA
LRMKYMMKMCYPITA

SEQ ID NO: 247076 - protein, 15 aa, Artificial Sequence
  Description of Artificial Sequence: Synthetic peptide
  Seed: LRMKWMMAMKYPITA
LRMKYMMKMCYPLTA

SEQ ID NO: 247077 - protein, 15 aa, Artificial Sequence
  Description of Artificial Sequence: Synthetic peptide
  Seed: LRMKWMMAMKYPITA
LRMKYMMKMCYPVTA

SEQ ID NO: 247078 - protein, 15 aa, Artificial Sequence
  Description of Artificial Sequence: Synthetic peptide
  Seed: LRMKWMMAMKYPITA
LRMKYMMKMGYPATA

SEQ ID NO: 247079 - protein, 15 aa, Artificial Sequence
  Description of Artificial Sequence: Synthetic peptide
  Seed: LRMKWMMAMKYPITA
LRMKYMMKMGYPCTA

SEQ ID NO: 247080 - protein, 15 aa, Artificial Sequence
  Description of Artificial Sequence: Synthetic peptide
  Seed: LRMKWMMAMKYPITA
LRMKYMMKMGYPFTA

SEQ ID NO: 247081 - protein, 15 aa, Artificial Sequence
  Description of Artificial Sequence: Synthetic peptide
  Seed: LRMKWMMAMKYPITA
LRMKYMMKMGYPGTA

SEQ ID NO: 247082 - protein, 15 aa, Artificial Sequence
  Description of Artificial Sequence: Synthetic peptide
  Seed: LRMKWMMAMKYPITA
LRMKYMMKMGYPITA

SEQ ID NO: 247083 - protein, 15 aa, Artificial Sequence
  Description of Artificial Sequence: Synthetic peptide
  Seed: LRMKWMMAMKYPITA
LRMKYMMKMGYPLTA

SEQ ID NO: 247084 - protein, 15 aa, Artificial Sequence
  Description of Artificial Sequence: Synthetic peptide
  Seed: LRMKWMMAMKYPITA
LRMKYMMKMGYPMTA

SEQ ID NO: 247085 - protein, 15 aa, Artificial Sequence
  Description of Artificial Sequence: Synthetic peptide
  Seed: LRMKWMMAMKYPITA
LRMKYMMKMGYPSTA

SEQ ID NO: 247086 - protein, 15 aa, Artificial Sequence
  Description of Artificial Sequence: Synthetic peptide
  Seed: LRMKWMMAMKYPITA
LRMKYMMKMGYPTTA

SEQ ID NO: 247087 - protein, 15 aa, Artificial Sequence
  Description of Artificial Sequence: Synthetic peptide
  Seed: LRMKWMMAMKYPITA
LRMKYMMKMGYPVTA

SEQ ID NO: 247088 - protein, 15 aa, Artificial Sequence
  Description of Artificial Sequence: Synthetic peptide
  Seed: LRMKWMMAMKYPITA
LRMKYMMKMGYPWTA

SEQ ID NO: 247089 - protein, 15 aa, Artificial Sequence
  Description of Artificial Sequence: Synthetic peptide
  Seed: LRMKWMMAMKYPITA
LRMKYMMKMGYPYTA

SEQ ID NO: 247090 - protein, 15 aa, Artificial Sequence
  Description of Artificial Sequence: Synthetic peptide
  Seed: LRMKWMMAMKYPITA
LRMKYMMKMHYPATA

SEQ ID NO: 247091 - protein, 15 aa, Artificial Sequence
  Description of Artificial Sequence: Synthetic peptide
  Seed: LRMKWMMAMKYPITA
LRMKYMMKMHYPLTA

SEQ ID NO: 247092 - protein, 15 aa, Artificial Sequence
  Description of Artificial Sequence: Synthetic peptide
  Seed: LRMKWMMAMKYPITA
LRMKYMMKMHYPSTA

SEQ ID NO: 247093 - protein, 15 aa, Artificial Sequence
  Description of Artificial Sequence: Synthetic peptide
  Seed: LRMKWMMAMKYPITA
LRMKYMMKMIYPATA

SEQ ID NO: 247094 - protein, 15 aa, Artificial Sequence
  Description of Artificial Sequence: Synthetic peptide
  Seed: LRMKWMMAMKYPITA
LRMKYMMKMIYPCTA

SEQ ID NO: 247095 - protein, 15 aa, Artificial Sequence
  Description of Artificial Sequence: Synthetic peptide
  Seed: LRMKWMMAMKYPITA
LRMKYMMKMIYPITA

SEQ ID NO: 247096 - protein, 15 aa, Artificial Sequence
  Description of Artificial Sequence: Synthetic peptide
  Seed: LRMKWMMAMKYPITA
LRMKYMMKMIYPLTA

SEQ ID NO: 247097 - protein, 15 aa, Artificial Sequence
  Description of Artificial Sequence: Synthetic peptide
  Seed: LRMKWMMAMKYPITA
LRMKYMMKMIYPMTA

SEQ ID NO: 247098 - protein, 15 aa, Artificial Sequence
  Description of Artificial Sequence: Synthetic peptide
  Seed: LRMKWMMAMKYPITA
LRMKYMMKMIYPNTA

SEQ ID NO: 247099 - protein, 15 aa, Artificial Sequence
  Description of Artificial Sequence: Synthetic peptide
  Seed: LRMKWMMAMKYPITA
LRMKYMMKMIYPSTA

SEQ ID NO: 247100 - protein, 15 aa, Artificial Sequence
  Description of Artificial Sequence: Synthetic peptide
  Seed: LRMKWMMAMKYPITA
LRMKYMMKMIYPTTA

SEQ ID NO: 247101 - protein, 15 aa, Artificial Sequence
  Description of Artificial Sequence: Synthetic peptide
  Seed: LRMKWMMAMKYPITA
LRMKYMMKMIYPVTA

SEQ ID NO: 247102 - protein, 15 aa, Artificial Sequence
  Description of Artificial Sequence: Synthetic peptide
  Seed: LRMKWMMAMKYPITA
LRMKYMMKMKYPATA

SEQ ID NO: 247103 - protein, 15 aa, Artificial Sequence
  Description of Artificial Sequence: Synthetic peptide
  Seed: LRMKWMMAMKYPITA
LRMKYMMKMKYPCTA

SEQ ID NO: 247104 - protein, 15 aa, Artificial Sequence
  Description of Artificial Sequence: Synthetic peptide
  Seed: LRMKWMMAMKYPITA
LRMKYMMKMKYPFTA

SEQ ID NO: 247105 - protein, 15 aa, Artificial Sequence
  Description of Artificial Sequence: Synthetic peptide
  Seed: LRMKWMMAMKYPITA
LRMKYMMKMKYPGTA

SEQ ID NO: 247106 - protein, 15 aa, Artificial Sequence
  Description of Artificial Sequence: Synthetic peptide
  Seed: LRMKWMMAMKYPITA
LRMKYMMKMKYPHTA

SEQ ID NO: 247107 - protein, 15 aa, Artificial Sequence
  Description of Artificial Sequence: Synthetic peptide
  Seed: LRMKWMMAMKYPITA
LRMKYMMKMKYPITA

SEQ ID NO: 247108 - protein, 15 aa, Artificial Sequence
  Description of Artificial Sequence: Synthetic peptide
  Seed: LRMKWMMAMKYPITA
LRMKYMMKMKYPKTA

SEQ ID NO: 247109 - protein, 15 aa, Artificial Sequence
  Description of Artificial Sequence: Synthetic peptide
  Seed: LRMKWMMAMKYPITA
LRMKYMMKMKYPLTA

SEQ ID NO: 247110 - protein, 15 aa, Artificial Sequence
  Description of Artificial Sequence: Synthetic peptide
  Seed: LRMKWMMAMKYPITA
LRMKYMMKMKYPMTA

SEQ ID NO: 247111 - protein, 15 aa, Artificial Sequence
  Description of Artificial Sequence: Synthetic peptide
  Seed: LRMKWMMAMKYPITA
LRMKYMMKMKYPNTA

SEQ ID NO: 247112 - protein, 15 aa, Artificial Sequence
  Description of Artificial Sequence: Synthetic peptide
  Seed: LRMKWMMAMKYPITA
LRMKYMMKMKYPPTA

SEQ ID NO: 247113 - protein, 15 aa, Artificial Sequence
  Description of Artificial Sequence: Synthetic peptide
  Seed: LRMKWMMAMKYPITA
LRMKYMMKMKYPQTA

SEQ ID NO: 247114 - protein, 15 aa, Artificial Sequence
  Description of Artificial Sequence: Synthetic peptide
  Seed: LRMKWMMAMKYPITA
LRMKYMMKMKYPRTA

SEQ ID NO: 247115 - protein, 15 aa, Artificial Sequence
  Description of Artificial Sequence: Synthetic peptide
  Seed: LRMKWMMAMKYPITA
LRMKYMMKMKYPSTA

SEQ ID NO: 247116 - protein, 15 aa, Artificial Sequence
  Description of Artificial Sequence: Synthetic peptide
  Seed: LRMKWMMAMKYPITA
LRMKYMMKMKYPTTA

SEQ ID NO: 247117 - protein, 15 aa, Artificial Sequence
  Description of Artificial Sequence: Synthetic peptide
  Seed: LRMKWMMAMKYPITA
LRMKYMMKMKYPVTA

SEQ ID NO: 247118 - protein, 15 aa, Artificial Sequence
  Description of Artificial Sequence: Synthetic peptide
  Seed: LRMKWMMAMKYPITA
LRMKYMMKMKYPWTA

SEQ ID NO: 247119 - protein, 15 aa, Artificial Sequence
  Description of Artificial Sequence: Synthetic peptide
  Seed: LRMKWMMAMKYPITA
LRMKYMMKMKYPYTA

SEQ ID NO: 247120 - protein, 15 aa, Artificial Sequence
  Description of Artificial Sequence: Synthetic peptide
  Seed: LRMKWMMAMKYPITA
LRMKYMMKMMYPATA

SEQ ID NO: 247121 - protein, 15 aa, Artificial Sequence
  Description of Artificial Sequence: Synthetic peptide
  Seed: LRMKWMMAMKYPITA
LRMKYMMKMNYPATA

SEQ ID NO: 247122 - protein, 15 aa, Artificial Sequence
  Description of Artificial Sequence: Synthetic peptide
  Seed: LRMKWMMAMKYPITA
LRMKYMMKMNYPFTA

SEQ ID NO: 247123 - protein, 15 aa, Artificial Sequence
  Description of Artificial Sequence: Synthetic peptide
  Seed: LRMKWMMAMKYPITA
LRMKYMMKMNYPITA

SEQ ID NO: 247124 - protein, 15 aa, Artificial Sequence
  Description of Artificial Sequence: Synthetic peptide
  Seed: LRMKWMMAMKYPITA
LRMKYMMKMNYPLTA

SEQ ID NO: 247125 - protein, 15 aa, Artificial Sequence
  Description of Artificial Sequence: Synthetic peptide
  Seed: LRMKWMMAMKYPITA
LRMKYMMKMNYPMTA

SEQ ID NO: 247126 - protein, 15 aa, Artificial Sequence
  Description of Artificial Sequence: Synthetic peptide
  Seed: LRMKWMMAMKYPITA
LRMKYMMKMNYPSTA

SEQ ID NO: 247127 - protein, 15 aa, Artificial Sequence
  Description of Artificial Sequence: Synthetic peptide
  Seed: LRMKWMMAMKYPITA
LRMKYMMKMNYPTTA

SEQ ID NO: 247128 - protein, 15 aa, Artificial Sequence
  Description of Artificial Sequence: Synthetic peptide
  Seed: LRMKWMMAMKYPITA
LRMKYMMKMNYPVTA

SEQ ID NO: 247129 - protein, 15 aa, Artificial Sequence
  Description of Artificial Sequence: Synthetic peptide
  Seed: LRMKWMMAMKYPITA
LRMKYMMKMPYPATA

SEQ ID NO: 247130 - protein, 15 aa, Artificial Sequence
  Description of Artificial Sequence: Synthetic peptide
  Seed: LRMKWMMAMKYPITA
LRMKYMMKMPYPFTA

SEQ ID NO: 247131 - protein, 15 aa, Artificial Sequence
  Description of Artificial Sequence: Synthetic peptide
  Seed: LRMKWMMAMKYPITA
LRMKYMMKMPYPITA

SEQ ID NO: 247132 - protein, 15 aa, Artificial Sequence
  Description of Artificial Sequence: Synthetic peptide
  Seed: LRMKWMMAMKYPITA
LRMKYMMKMPYPLTA

SEQ ID NO: 247133 - protein, 15 aa, Artificial Sequence
  Description of Artificial Sequence: Synthetic peptide
  Seed: LRMKWMMAMKYPITA
LRMKYMMKMPYPMTA

SEQ ID NO: 247134 - protein, 15 aa, Artificial Sequence
  Description of Artificial Sequence: Synthetic peptide
  Seed: LRMKWMMAMKYPITA
LRMKYMMKMPYPSTA

SEQ ID NO: 247135 - protein, 15 aa, Artificial Sequence
  Description of Artificial Sequence: Synthetic peptide
  Seed: LRMKWMMAMKYPITA
LRMKYMMKMPYPTTA

SEQ ID NO: 247136 - protein, 15 aa, Artificial Sequence
  Description of Artificial Sequence: Synthetic peptide
  Seed: LRMKWMMAMKYPITA
LRMKYMMKMPYPVTA

SEQ ID NO: 247137 - protein, 15 aa, Artificial Sequence
  Description of Artificial Sequence: Synthetic peptide
  Seed: LRMKWMMAMKYPITA
LRMKYMMKMQYPITA

SEQ ID NO: 247138 - protein, 15 aa, Artificial Sequence
  Description of Artificial Sequence: Synthetic peptide
  Seed: LRMKWMMAMKYPITA
LRMKYMMKMQYPLTA

SEQ ID NO: 247139 - protein, 15 aa, Artificial Sequence
  Description of Artificial Sequence: Synthetic peptide
  Seed: LRMKWMMAMKYPITA
LRMKYMMKMQYPVTA

SEQ ID NO: 247140 - protein, 15 aa, Artificial Sequence
  Description of Artificial Sequence: Synthetic peptide
  Seed: LRMKWMMAMKYPITA
LRMKYMMKMRYPATA

SEQ ID NO: 247141 - protein, 15 aa, Artificial Sequence
  Description of Artificial Sequence: Synthetic peptide
  Seed: LRMKWMMAMKYPITA
LRMKYMMKMRYPCTA

SEQ ID NO: 247142 - protein, 15 aa, Artificial Sequence
  Description of Artificial Sequence: Synthetic peptide
  Seed: LRMKWMMAMKYPITA
LRMKYMMKMRYPETA

SEQ ID NO: 247143 - protein, 15 aa, Artificial Sequence
  Description of Artificial Sequence: Synthetic peptide
  Seed: LRMKWMMAMKYPITA
LRMKYMMKMRYPFTA

SEQ ID NO: 247144 - protein, 15 aa, Artificial Sequence
  Description of Artificial Sequence: Synthetic peptide
  Seed: LRMKWMMAMKYPITA
LRMKYMMKMRYPGTA

SEQ ID NO: 247145 - protein, 15 aa, Artificial Sequence
  Description of Artificial Sequence: Synthetic peptide
  Seed: LRMKWMMAMKYPITA
LRMKYMMKMRYPHTA

SEQ ID NO: 247146 - protein, 15 aa, Artificial Sequence
  Description of Artificial Sequence: Synthetic peptide
  Seed: LRMKWMMAMKYPITA
LRMKYMMKMRYPITA

SEQ ID NO: 247147 - protein, 15 aa, Artificial Sequence
  Description of Artificial Sequence: Synthetic peptide
  Seed: LRMKWMMAMKYPITA
LRMKYMMKMRYPKTA

SEQ ID NO: 247148 - protein, 15 aa, Artificial Sequence
  Description of Artificial Sequence: Synthetic peptide
  Seed: LRMKWMMAMKYPITA
LRMKYMMKMRYPLTA

SEQ ID NO: 247149 - protein, 15 aa, Artificial Sequence
  Description of Artificial Sequence: Synthetic peptide
  Seed: LRMKWMMAMKYPITA
LRMKYMMKMRYPMTA

SEQ ID NO: 247150 - protein, 15 aa, Artificial Sequence
  Description of Artificial Sequence: Synthetic peptide
  Seed: LRMKWMMAMKYPITA
LRMKYMMKMRYPNTA

SEQ ID NO: 247151 - protein, 15 aa, Artificial Sequence
  Description of Artificial Sequence: Synthetic peptide
  Seed: LRMKWMMAMKYPITA
LRMKYMMKMRYPPTA

SEQ ID NO: 247152 - protein, 15 aa, Artificial Sequence
  Description of Artificial Sequence: Synthetic peptide
  Seed: LRMKWMMAMKYPITA
LRMKYMMKMRYPQTA

SEQ ID NO: 247153 - protein, 15 aa, Artificial Sequence
  Description of Artificial Sequence: Synthetic peptide
  Seed: LRMKWMMAMKYPITA
LRMKYMMKMRYPRTA

SEQ ID NO: 247154 - protein, 15 aa, Artificial Sequence
  Description of Artificial Sequence: Synthetic peptide
  Seed: LRMKWMMAMKYPITA
LRMKYMMKMRYPSTA

SEQ ID NO: 247155 - protein, 15 aa, Artificial Sequence
  Description of Artificial Sequence: Synthetic peptide
  Seed: LRMKWMMAMKYPITA
LRMKYMMKMRYPTTA

SEQ ID NO: 247156 - protein, 15 aa, Artificial Sequence
  Description of Artificial Sequence: Synthetic peptide
  Seed: LRMKWMMAMKYPITA
LRMKYMMKMRYPVTA

SEQ ID NO: 247157 - protein, 15 aa, Artificial Sequence
  Description of Artificial Sequence: Synthetic peptide
  Seed: LRMKWMMAMKYPITA
LRMKYMMKMRYPWTA

SEQ ID NO: 247158 - protein, 15 aa, Artificial Sequence
  Description of Artificial Sequence: Synthetic peptide
  Seed: LRMKWMMAMKYPITA
LRMKYMMKMRYPYTA

SEQ ID NO: 247159 - protein, 15 aa, Artificial Sequence
  Description of Artificial Sequence: Synthetic peptide
  Seed: LRMKWMMAMKYPITA
LRMKYMMKMSYPATA

SEQ ID NO: 247160 - protein, 15 aa, Artificial Sequence
  Description of Artificial Sequence: Synthetic peptide
  Seed: LRMKWMMAMKYPITA
LRMKYMMKMSYPCTA

SEQ ID NO: 247161 - protein, 15 aa, Artificial Sequence
  Description of Artificial Sequence: Synthetic peptide
  Seed: LRMKWMMAMKYPITA
LRMKYMMKMSYPFTA

SEQ ID NO: 247162 - protein, 15 aa, Artificial Sequence
  Description of Artificial Sequence: Synthetic peptide
  Seed: LRMKWMMAMKYPITA
LRMKYMMKMSYPGTA

SEQ ID NO: 247163 - protein, 15 aa, Artificial Sequence
  Description of Artificial Sequence: Synthetic peptide
  Seed: LRMKWMMAMKYPITA
LRMKYMMKMSYPITA

SEQ ID NO: 247164 - protein, 15 aa, Artificial Sequence
  Description of Artificial Sequence: Synthetic peptide
  Seed: LRMKWMMAMKYPITA
LRMKYMMKMSYPLTA

SEQ ID NO: 247165 - protein, 15 aa, Artificial Sequence
  Description of Artificial Sequence: Synthetic peptide
  Seed: LRMKWMMAMKYPITA
LRMKYMMKMSYPMTA

SEQ ID NO: 247166 - protein, 15 aa, Artificial Sequence
  Description of Artificial Sequence: Synthetic peptide
  Seed: LRMKWMMAMKYPITA
LRMKYMMKMSYPNTA

SEQ ID NO: 247167 - protein, 15 aa, Artificial Sequence
  Description of Artificial Sequence: Synthetic peptide
  Seed: LRMKWMMAMKYPITA
LRMKYMMKMSYPSTA

SEQ ID NO: 247168 - protein, 15 aa, Artificial Sequence
  Description of Artificial Sequence: Synthetic peptide
  Seed: LRMKWMMAMKYPITA
LRMKYMMKMSYPTTA

SEQ ID NO: 247169 - protein, 15 aa, Artificial Sequence
  Description of Artificial Sequence: Synthetic peptide
  Seed: LRMKWMMAMKYPITA
LRMKYMMKMSYPVTA

SEQ ID NO: 247170 - protein, 15 aa, Artificial Sequence
  Description of Artificial Sequence: Synthetic peptide
  Seed: LRMKWMMAMKYPITA
LRMKYMMKMSYPWTA

SEQ ID NO: 247171 - protein, 15 aa, Artificial Sequence
  Description of Artificial Sequence: Synthetic peptide
  Seed: LRMKWMMAMKYPITA
LRMKYMMKMSYPYTA

SEQ ID NO: 247172 - protein, 15 aa, Artificial Sequence
  Description of Artificial Sequence: Synthetic peptide
  Seed: LRMKWMMAMKYPITA
LRMKYMMKMTYPATA

SEQ ID NO: 247173 - protein, 15 aa, Artificial Sequence
  Description of Artificial Sequence: Synthetic peptide
  Seed: LRMKWMMAMKYPITA
LRMKYMMKMTYPFTA

SEQ ID NO: 247174 - protein, 15 aa, Artificial Sequence
  Description of Artificial Sequence: Synthetic peptide
  Seed: LRMKWMMAMKYPITA
LRMKYMMKMTYPITA

SEQ ID NO: 247175 - protein, 15 aa, Artificial Sequence
  Description of Artificial Sequence: Synthetic peptide
  Seed: LRMKWMMAMKYPITA
LRMKYMMKMTYPLTA

SEQ ID NO: 247176 - protein, 15 aa, Artificial Sequence
  Description of Artificial Sequence: Synthetic peptide
  Seed: LRMKWMMAMKYPITA
LRMKYMMKMTYPMTA

SEQ ID NO: 247177 - protein, 15 aa, Artificial Sequence
  Description of Artificial Sequence: Synthetic peptide
  Seed: LRMKWMMAMKYPITA
LRMKYMMKMTYPNTA

SEQ ID NO: 247178 - protein, 15 aa, Artificial Sequence
  Description of Artificial Sequence: Synthetic peptide
  Seed: LRMKWMMAMKYPITA
LRMKYMMKMTYPQTA

SEQ ID NO: 247179 - protein, 15 aa, Artificial Sequence
  Description of Artificial Sequence: Synthetic peptide
  Seed: LRMKWMMAMKYPITA
LRMKYMMKMTYPRTA

SEQ ID NO: 247180 - protein, 15 aa, Artificial Sequence
  Description of Artificial Sequence: Synthetic peptide
  Seed: LRMKWMMAMKYPITA
LRMKYMMKMTYPSTA

SEQ ID NO: 247181 - protein, 15 aa, Artificial Sequence
  Description of Artificial Sequence: Synthetic peptide
  Seed: LRMKWMMAMKYPITA
LRMKYMMKMTYPTTA

SEQ ID NO: 247182 - protein, 15 aa, Artificial Sequence
  Description of Artificial Sequence: Synthetic peptide
  Seed: LRMKWMMAMKYPITA
LRMKYMMKMTYPVTA

SEQ ID NO: 247183 - protein, 15 aa, Artificial Sequence
  Description of Artificial Sequence: Synthetic peptide
  Seed: LRMKWMMAMKYPITA
LRMKYMMKMTYPYTA

SEQ ID NO: 247184 - protein, 15 aa, Artificial Sequence
  Description of Artificial Sequence: Synthetic peptide
  Seed: LRMKWMMAMKYPITA
LRMKYMMKMVYPATA

SEQ ID NO: 247185 - protein, 15 aa, Artificial Sequence
  Description of Artificial Sequence: Synthetic peptide
  Seed: LRMKWMMAMKYPITA
LRMKYMMKMVYPFTA

SEQ ID NO: 247186 - protein, 15 aa, Artificial Sequence
  Description of Artificial Sequence: Synthetic peptide
  Seed: LRMKWMMAMKYPITA
LRMKYMMKMVYPHTA

SEQ ID NO: 247187 - protein, 15 aa, Artificial Sequence
  Description of Artificial Sequence: Synthetic peptide
  Seed: LRMKWMMAMKYPITA
LRMKYMMKMVYPITA

SEQ ID NO: 247188 - protein, 15 aa, Artificial Sequence
  Description of Artificial Sequence: Synthetic peptide
  Seed: LRMKWMMAMKYPITA
LRMKYMMKMVYPKTA

SEQ ID NO: 247189 - protein, 15 aa, Artificial Sequence
  Description of Artificial Sequence: Synthetic peptide
  Seed: LRMKWMMAMKYPITA
LRMKYMMKMVYPLTA

SEQ ID NO: 247190 - protein, 15 aa, Artificial Sequence
  Description of Artificial Sequence: Synthetic peptide
  Seed: LRMKWMMAMKYPITA
LRMKYMMKMVYPMTA

SEQ ID NO: 247191 - protein, 15 aa, Artificial Sequence
  Description of Artificial Sequence: Synthetic peptide
  Seed: LRMKWMMAMKYPITA
LRMKYMMKMVYPNTA

SEQ ID NO: 247192 - protein, 15 aa, Artificial Sequence
  Description of Artificial Sequence: Synthetic peptide
  Seed: LRMKWMMAMKYPITA
LRMKYMMKMVYPPTA

SEQ ID NO: 247193 - protein, 15 aa, Artificial Sequence
  Description of Artificial Sequence: Synthetic peptide
  Seed: LRMKWMMAMKYPITA
LRMKYMMKMVYPQTA

SEQ ID NO: 247194 - protein, 15 aa, Artificial Sequence
  Description of Artificial Sequence: Synthetic peptide
  Seed: LRMKWMMAMKYPITA
LRMKYMMKMVYPRTA

SEQ ID NO: 247195 - protein, 15 aa, Artificial Sequence
  Description of Artificial Sequence: Synthetic peptide
  Seed: LRMKWMMAMKYPITA
LRMKYMMKMVYPSTA

SEQ ID NO: 247196 - protein, 15 aa, Artificial Sequence
  Description of Artificial Sequence: Synthetic peptide
  Seed: LRMKWMMAMKYPITA
LRMKYMMKMVYPTTA

SEQ ID NO: 247197 - protein, 15 aa, Artificial Sequence
  Description of Artificial Sequence: Synthetic peptide
  Seed: LRMKWMMAMKYPITA
LRMKYMMKMVYPVTA

SEQ ID NO: 247198 - protein, 15 aa, Artificial Sequence
  Description of Artificial Sequence: Synthetic peptide
  Seed: LRMKWMMAMKYPITA
LRMKYMMKMVYPYTA

SEQ ID NO: 247199 - protein, 15 aa, Artificial Sequence
  Description of Artificial Sequence: Synthetic peptide
  Seed: LRMKWMMAMKYPITA
LRMKYMMLMAYPATA

SEQ ID NO: 247200 - protein, 15 aa, Artificial Sequence
  Description of Artificial Sequence: Synthetic peptide
  Seed: LRMKWMMAMKYPITA
LRMKYMMLMAYPCTA

SEQ ID NO: 247201 - protein, 15 aa, Artificial Sequence
  Description of Artificial Sequence: Synthetic peptide
  Seed: LRMKWMMAMKYPITA
LRMKYMMLMAYPDTA

SEQ ID NO: 247202 - protein, 15 aa, Artificial Sequence
  Description of Artificial Sequence: Synthetic peptide
  Seed: LRMKWMMAMKYPITA
LRMKYMMLMAYPETA

SEQ ID NO: 247203 - protein, 15 aa, Artificial Sequence
  Description of Artificial Sequence: Synthetic peptide
  Seed: LRMKWMMAMKYPITA
LRMKYMMLMAYPFTA

SEQ ID NO: 247204 - protein, 15 aa, Artificial Sequence
  Description of Artificial Sequence: Synthetic peptide
  Seed: LRMKWMMAMKYPITA
LRMKYMMLMAYPGTA

SEQ ID NO: 247205 - protein, 15 aa, Artificial Sequence
  Description of Artificial Sequence: Synthetic peptide
  Seed: LRMKWMMAMKYPITA
LRMKYMMLMAYPHTA

SEQ ID NO: 247206 - protein, 15 aa, Artificial Sequence
  Description of Artificial Sequence: Synthetic peptide
  Seed: LRMKWMMAMKYPITA
LRMKYMMLMAYPITA

SEQ ID NO: 247207 - protein, 15 aa, Artificial Sequence
  Description of Artificial Sequence: Synthetic peptide
  Seed: LRMKWMMAMKYPITA
LRMKYMMLMAYPKTA

SEQ ID NO: 247208 - protein, 15 aa, Artificial Sequence
  Description of Artificial Sequence: Synthetic peptide
  Seed: LRMKWMMAMKYPITA
LRMKYMMLMAYPLTA

SEQ ID NO: 247209 - protein, 15 aa, Artificial Sequence
  Description of Artificial Sequence: Synthetic peptide
  Seed: LRMKWMMAMKYPITA
LRMKYMMLMAYPMTA

SEQ ID NO: 247210 - protein, 15 aa, Artificial Sequence
  Description of Artificial Sequence: Synthetic peptide
  Seed: LRMKWMMAMKYPITA
LRMKYMMLMAYPNTA

SEQ ID NO: 247211 - protein, 15 aa, Artificial Sequence
  Description of Artificial Sequence: Synthetic peptide
  Seed: LRMKWMMAMKYPITA
LRMKYMMLMAYPPTA

SEQ ID NO: 247212 - protein, 15 aa, Artificial Sequence
  Description of Artificial Sequence: Synthetic peptide
  Seed: LRMKWMMAMKYPITA
LRMKYMMLMAYPQTA

SEQ ID NO: 247213 - protein, 15 aa, Artificial Sequence
  Description of Artificial Sequence: Synthetic peptide
  Seed: LRMKWMMAMKYPITA
LRMKYMMLMAYPRTA

SEQ ID NO: 247214 - protein, 15 aa, Artificial Sequence
  Description of Artificial Sequence: Synthetic peptide
  Seed: LRMKWMMAMKYPITA
LRMKYMMLMAYPSTA

SEQ ID NO: 247215 - protein, 15 aa, Artificial Sequence
  Description of Artificial Sequence: Synthetic peptide
  Seed: LRMKWMMAMKYPITA
LRMKYMMLMAYPTTA

SEQ ID NO: 247216 - protein, 15 aa, Artificial Sequence
  Description of Artificial Sequence: Synthetic peptide
  Seed: LRMKWMMAMKYPITA
LRMKYMMLMAYPVTA

SEQ ID NO: 247217 - protein, 15 aa, Artificial Sequence
  Description of Artificial Sequence: Synthetic peptide
  Seed: LRMKWMMAMKYPITA
LRMKYMMLMAYPWTA

SEQ ID NO: 247218 - protein, 15 aa, Artificial Sequence
  Description of Artificial Sequence: Synthetic peptide
  Seed: LRMKWMMAMKYPITA
LRMKYMMLMAYPYTA

SEQ ID NO: 247219 - protein, 15 aa, Artificial Sequence
  Description of Artificial Sequence: Synthetic peptide
  Seed: LRMKWMMAMKYPITA
LRMKYMMLMCYPATA

SEQ ID NO: 247220 - protein, 15 aa, Artificial Sequence
  Description of Artificial Sequence: Synthetic peptide
  Seed: LRMKWMMAMKYPITA
LRMKYMMLMCYPDTA

SEQ ID NO: 247221 - protein, 15 aa, Artificial Sequence
  Description of Artificial Sequence: Synthetic peptide
  Seed: LRMKWMMAMKYPITA
LRMKYMMLMCYPETA

SEQ ID NO: 247222 - protein, 15 aa, Artificial Sequence
  Description of Artificial Sequence: Synthetic peptide
  Seed: LRMKWMMAMKYPITA
LRMKYMMLMCYPGTA

SEQ ID NO: 247223 - protein, 15 aa, Artificial Sequence
  Description of Artificial Sequence: Synthetic peptide
  Seed: LRMKWMMAMKYPITA
LRMKYMMLMCYPHTA

SEQ ID NO: 247224 - protein, 15 aa, Artificial Sequence
  Description of Artificial Sequence: Synthetic peptide
  Seed: LRMKWMMAMKYPITA
LRMKYMMLMCYPITA

SEQ ID NO: 247225 - protein, 15 aa, Artificial Sequence
  Description of Artificial Sequence: Synthetic peptide
  Seed: LRMKWMMAMKYPITA
LRMKYMMLMCYPLTA

SEQ ID NO: 247226 - protein, 15 aa, Artificial Sequence
  Description of Artificial Sequence: Synthetic peptide
  Seed: LRMKWMMAMKYPITA
LRMKYMMLMCYPMTA

SEQ ID NO: 247227 - protein, 15 aa, Artificial Sequence
  Description of Artificial Sequence: Synthetic peptide
  Seed: LRMKWMMAMKYPITA
LRMKYMMLMCYPNTA

SEQ ID NO: 247228 - protein, 15 aa, Artificial Sequence
  Description of Artificial Sequence: Synthetic peptide
  Seed: LRMKWMMAMKYPITA
LRMKYMMLMCYPPTA

SEQ ID NO: 247229 - protein, 15 aa, Artificial Sequence
  Description of Artificial Sequence: Synthetic peptide
  Seed: LRMKWMMAMKYPITA
LRMKYMMLMCYPQTA

SEQ ID NO: 247230 - protein, 15 aa, Artificial Sequence
  Description of Artificial Sequence: Synthetic peptide
  Seed: LRMKWMMAMKYPITA
LRMKYMMLMCYPRTA

SEQ ID NO: 247231 - protein, 15 aa, Artificial Sequence
  Description of Artificial Sequence: Synthetic peptide
  Seed: LRMKWMMAMKYPITA
LRMKYMMLMCYPSTA

SEQ ID NO: 247232 - protein, 15 aa, Artificial Sequence
  Description of Artificial Sequence: Synthetic peptide
  Seed: LRMKWMMAMKYPITA
LRMKYMMLMCYPTTA

SEQ ID NO: 247233 - protein, 15 aa, Artificial Sequence
  Description of Artificial Sequence: Synthetic peptide
  Seed: LRMKWMMAMKYPITA
LRMKYMMLMCYPVTA

SEQ ID NO: 247234 - protein, 15 aa, Artificial Sequence
  Description of Artificial Sequence: Synthetic peptide
  Seed: LRMKWMMAMKYPITA
LRMKYMMLMDYPATA

SEQ ID NO: 247235 - protein, 15 aa, Artificial Sequence
  Description of Artificial Sequence: Synthetic peptide
  Seed: LRMKWMMAMKYPITA
LRMKYMMLMDYPDTA

SEQ ID NO: 247236 - protein, 15 aa, Artificial Sequence
  Description of Artificial Sequence: Synthetic peptide
  Seed: LRMKWMMAMKYPITA
LRMKYMMLMDYPETA

SEQ ID NO: 247237 - protein, 15 aa, Artificial Sequence
  Description of Artificial Sequence: Synthetic peptide
  Seed: LRMKWMMAMKYPITA
LRMKYMMLMDYPFTA

SEQ ID NO: 247238 - protein, 15 aa, Artificial Sequence
  Description of Artificial Sequence: Synthetic peptide
  Seed: LRMKWMMAMKYPITA
LRMKYMMLMDYPGTA

SEQ ID NO: 247239 - protein, 15 aa, Artificial Sequence
  Description of Artificial Sequence: Synthetic peptide
  Seed: LRMKWMMAMKYPITA
LRMKYMMLMDYPHTA

SEQ ID NO: 247240 - protein, 15 aa, Artificial Sequence
  Description of Artificial Sequence: Synthetic peptide
  Seed: LRMKWMMAMKYPITA
LRMKYMMLMDYPITA

SEQ ID NO: 247241 - protein, 15 aa, Artificial Sequence
  Description of Artificial Sequence: Synthetic peptide
  Seed: LRMKWMMAMKYPITA
LRMKYMMLMDYPLTA

SEQ ID NO: 247242 - protein, 15 aa, Artificial Sequence
  Description of Artificial Sequence: Synthetic peptide
  Seed: LRMKWMMAMKYPITA
LRMKYMMLMDYPMTA

SEQ ID NO: 247243 - protein, 15 aa, Artificial Sequence
  Description of Artificial Sequence: Synthetic peptide
  Seed: LRMKWMMAMKYPITA
LRMKYMMLMDYPNTA

SEQ ID NO: 247244 - protein, 15 aa, Artificial Sequence
  Description of Artificial Sequence: Synthetic peptide
  Seed: LRMKWMMAMKYPITA
LRMKYMMLMDYPSTA

SEQ ID NO: 247245 - protein, 15 aa, Artificial Sequence
  Description of Artificial Sequence: Synthetic peptide
  Seed: LRMKWMMAMKYPITA
LRMKYMMLMDYPTTA

SEQ ID NO: 247246 - protein, 15 aa, Artificial Sequence
  Description of Artificial Sequence: Synthetic peptide
  Seed: LRMKWMMAMKYPITA
LRMKYMMLMDYPVTA

SEQ ID NO: 247247 - protein, 15 aa, Artificial Sequence
  Description of Artificial Sequence: Synthetic peptide
  Seed: LRMKWMMAMKYPITA
LRMKYMMLMEYPATA

SEQ ID NO: 247248 - protein, 15 aa, Artificial Sequence
  Description of Artificial Sequence: Synthetic peptide
  Seed: LRMKWMMAMKYPITA
LRMKYMMLMEYPCTA

SEQ ID NO: 247249 - protein, 15 aa, Artificial Sequence
  Description of Artificial Sequence: Synthetic peptide
  Seed: LRMKWMMAMKYPITA
LRMKYMMLMEYPDTA

SEQ ID NO: 247250 - protein, 15 aa, Artificial Sequence
  Description of Artificial Sequence: Synthetic peptide
  Seed: LRMKWMMAMKYPITA
LRMKYMMLMEYPETA

SEQ ID NO: 247251 - protein, 15 aa, Artificial Sequence
  Description of Artificial Sequence: Synthetic peptide
  Seed: LRMKWMMAMKYPITA
LRMKYMMLMEYPFTA

SEQ ID NO: 247252 - protein, 15 aa, Artificial Sequence
  Description of Artificial Sequence: Synthetic peptide
  Seed: LRMKWMMAMKYPITA
LRMKYMMLMEYPGTA

SEQ ID NO: 247253 - protein, 15 aa, Artificial Sequence
  Description of Artificial Sequence: Synthetic peptide
  Seed: LRMKWMMAMKYPITA
LRMKYMMLMEYPHTA

SEQ ID NO: 247254 - protein, 15 aa, Artificial Sequence
  Description of Artificial Sequence: Synthetic peptide
  Seed: LRMKWMMAMKYPITA
LRMKYMMLMEYPITA

SEQ ID NO: 247255 - protein, 15 aa, Artificial Sequence
  Description of Artificial Sequence: Synthetic peptide
  Seed: LRMKWMMAMKYPITA
LRMKYMMLMEYPLTA

SEQ ID NO: 247256 - protein, 15 aa, Artificial Sequence
  Description of Artificial Sequence: Synthetic peptide
  Seed: LRMKWMMAMKYPITA
LRMKYMMLMEYPMTA

SEQ ID NO: 247257 - protein, 15 aa, Artificial Sequence
  Description of Artificial Sequence: Synthetic peptide
  Seed: LRMKWMMAMKYPITA
LRMKYMMLMEYPNTA

SEQ ID NO: 247258 - protein, 15 aa, Artificial Sequence
  Description of Artificial Sequence: Synthetic peptide
  Seed: LRMKWMMAMKYPITA
LRMKYMMLMEYPPTA

SEQ ID NO: 247259 - protein, 15 aa, Artificial Sequence
  Description of Artificial Sequence: Synthetic peptide
  Seed: LRMKWMMAMKYPITA
LRMKYMMLMEYPQTA

SEQ ID NO: 247260 - protein, 15 aa, Artificial Sequence
  Description of Artificial Sequence: Synthetic peptide
  Seed: LRMKWMMAMKYPITA
LRMKYMMLMEYPRTA

SEQ ID NO: 247261 - protein, 15 aa, Artificial Sequence
  Description of Artificial Sequence: Synthetic peptide
  Seed: LRMKWMMAMKYPITA
LRMKYMMLMEYPSTA

SEQ ID NO: 247262 - protein, 15 aa, Artificial Sequence
  Description of Artificial Sequence: Synthetic peptide
  Seed: LRMKWMMAMKYPITA
LRMKYMMLMEYPTTA

SEQ ID NO: 247263 - protein, 15 aa, Artificial Sequence
  Description of Artificial Sequence: Synthetic peptide
  Seed: LRMKWMMAMKYPITA
LRMKYMMLMEYPVTA

SEQ ID NO: 247264 - protein, 15 aa, Artificial Sequence
  Description of Artificial Sequence: Synthetic peptide
  Seed: LRMKWMMAMKYPITA
LRMKYMMLMEYPYTA

SEQ ID NO: 247265 - protein, 15 aa, Artificial Sequence
  Description of Artificial Sequence: Synthetic peptide
  Seed: LRMKWMMAMKYPITA
LRMKYMMLMFYPATA

SEQ ID NO: 247266 - protein, 15 aa, Artificial Sequence
  Description of Artificial Sequence: Synthetic peptide
  Seed: LRMKWMMAMKYPITA
LRMKYMMLMFYPETA

SEQ ID NO: 247267 - protein, 15 aa, Artificial Sequence
  Description of Artificial Sequence: Synthetic peptide
  Seed: LRMKWMMAMKYPITA
LRMKYMMLMFYPHTA

SEQ ID NO: 247268 - protein, 15 aa, Artificial Sequence
  Description of Artificial Sequence: Synthetic peptide
  Seed: LRMKWMMAMKYPITA
LRMKYMMLMFYPMTA

SEQ ID NO: 247269 - protein, 15 aa, Artificial Sequence
  Description of Artificial Sequence: Synthetic peptide
  Seed: LRMKWMMAMKYPITA
LRMKYMMLMFYPNTA

SEQ ID NO: 247270 - protein, 15 aa, Artificial Sequence
  Description of Artificial Sequence: Synthetic peptide
  Seed: LRMKWMMAMKYPITA
LRMKYMMLMFYPQTA

SEQ ID NO: 247271 - protein, 15 aa, Artificial Sequence
  Description of Artificial Sequence: Synthetic peptide
  Seed: LRMKWMMAMKYPITA
LRMKYMMLMFYPSTA

SEQ ID NO: 247272 - protein, 15 aa, Artificial Sequence
  Description of Artificial Sequence: Synthetic peptide
  Seed: LRMKWMMAMKYPITA
LRMKYMMLMFYPTTA

SEQ ID NO: 247273 - protein, 15 aa, Artificial Sequence
  Description of Artificial Sequence: Synthetic peptide
  Seed: LRMKWMMAMKYPITA
LRMKYMMLMFYPVTA

SEQ ID NO: 247274 - protein, 15 aa, Artificial Sequence
  Description of Artificial Sequence: Synthetic peptide
  Seed: LRMKWMMAMKYPITA
LRMKYMMLMGYPATA

SEQ ID NO: 247275 - protein, 15 aa, Artificial Sequence
  Description of Artificial Sequence: Synthetic peptide
  Seed: LRMKWMMAMKYPITA
LRMKYMMLMGYPCTA

SEQ ID NO: 247276 - protein, 15 aa, Artificial Sequence
  Description of Artificial Sequence: Synthetic peptide
  Seed: LRMKWMMAMKYPITA
LRMKYMMLMGYPDTA

SEQ ID NO: 247277 - protein, 15 aa, Artificial Sequence
  Description of Artificial Sequence: Synthetic peptide
  Seed: LRMKWMMAMKYPITA
LRMKYMMLMGYPETA

SEQ ID NO: 247278 - protein, 15 aa, Artificial Sequence
  Description of Artificial Sequence: Synthetic peptide
  Seed: LRMKWMMAMKYPITA
LRMKYMMLMGYPFTA

SEQ ID NO: 247279 - protein, 15 aa, Artificial Sequence
  Description of Artificial Sequence: Synthetic peptide
  Seed: LRMKWMMAMKYPITA
LRMKYMMLMGYPGTA

SEQ ID NO: 247280 - protein, 15 aa, Artificial Sequence
  Description of Artificial Sequence: Synthetic peptide
  Seed: LRMKWMMAMKYPITA
LRMKYMMLMGYPHTA

SEQ ID NO: 247281 - protein, 15 aa, Artificial Sequence
  Description of Artificial Sequence: Synthetic peptide
  Seed: LRMKWMMAMKYPITA
LRMKYMMLMGYPITA

SEQ ID NO: 247282 - protein, 15 aa, Artificial Sequence
  Description of Artificial Sequence: Synthetic peptide
  Seed: LRMKWMMAMKYPITA
LRMKYMMLMGYPKTA

SEQ ID NO: 247283 - protein, 15 aa, Artificial Sequence
  Description of Artificial Sequence: Synthetic peptide
  Seed: LRMKWMMAMKYPITA
LRMKYMMLMGYPLTA

SEQ ID NO: 247284 - protein, 15 aa, Artificial Sequence
  Description of Artificial Sequence: Synthetic peptide
  Seed: LRMKWMMAMKYPITA
LRMKYMMLMGYPMTA

SEQ ID NO: 247285 - protein, 15 aa, Artificial Sequence
  Description of Artificial Sequence: Synthetic peptide
  Seed: LRMKWMMAMKYPITA
LRMKYMMLMGYPNTA

SEQ ID NO: 247286 - protein, 15 aa, Artificial Sequence
  Description of Artificial Sequence: Synthetic peptide
  Seed: LRMKWMMAMKYPITA
LRMKYMMLMGYPPTA

SEQ ID NO: 247287 - protein, 15 aa, Artificial Sequence
  Description of Artificial Sequence: Synthetic peptide
  Seed: LRMKWMMAMKYPITA
LRMKYMMLMGYPQTA

SEQ ID NO: 247288 - protein, 15 aa, Artificial Sequence
  Description of Artificial Sequence: Synthetic peptide
  Seed: LRMKWMMAMKYPITA
LRMKYMMLMGYPRTA

SEQ ID NO: 247289 - protein, 15 aa, Artificial Sequence
  Description of Artificial Sequence: Synthetic peptide
  Seed: LRMKWMMAMKYPITA
LRMKYMMLMGYPSTA

SEQ ID NO: 247290 - protein, 15 aa, Artificial Sequence
  Description of Artificial Sequence: Synthetic peptide
  Seed: LRMKWMMAMKYPITA
LRMKYMMLMGYPTTA

SEQ ID NO: 247291 - protein, 15 aa, Artificial Sequence
  Description of Artificial Sequence: Synthetic peptide
  Seed: LRMKWMMAMKYPITA
LRMKYMMLMGYPVTA

SEQ ID NO: 247292 - protein, 15 aa, Artificial Sequence
  Description of Artificial Sequence: Synthetic peptide
  Seed: LRMKWMMAMKYPITA
LRMKYMMLMGYPWTA

SEQ ID NO: 247293 - protein, 15 aa, Artificial Sequence
  Description of Artificial Sequence: Synthetic peptide
  Seed: LRMKWMMAMKYPITA
LRMKYMMLMGYPYTA

SEQ ID NO: 247294 - protein, 15 aa, Artificial Sequence
  Description of Artificial Sequence: Synthetic peptide
  Seed: LRMKWMMAMKYPITA
LRMKYMMLMHYPATA

SEQ ID NO: 247295 - protein, 15 aa, Artificial Sequence
  Description of Artificial Sequence: Synthetic peptide
  Seed: LRMKWMMAMKYPITA
LRMKYMMLMHYPCTA

SEQ ID NO: 247296 - protein, 15 aa, Artificial Sequence
  Description of Artificial Sequence: Synthetic peptide
  Seed: LRMKWMMAMKYPITA
LRMKYMMLMHYPDTA

SEQ ID NO: 247297 - protein, 15 aa, Artificial Sequence
  Description of Artificial Sequence: Synthetic peptide
  Seed: LRMKWMMAMKYPITA
LRMKYMMLMHYPETA

SEQ ID NO: 247298 - protein, 15 aa, Artificial Sequence
  Description of Artificial Sequence: Synthetic peptide
  Seed: LRMKWMMAMKYPITA
LRMKYMMLMHYPFTA

SEQ ID NO: 247299 - protein, 15 aa, Artificial Sequence
  Description of Artificial Sequence: Synthetic peptide
  Seed: LRMKWMMAMKYPITA
LRMKYMMLMHYPGTA

SEQ ID NO: 247300 - protein, 15 aa, Artificial Sequence
  Description of Artificial Sequence: Synthetic peptide
  Seed: LRMKWMMAMKYPITA
LRMKYMMLMHYPHTA

SEQ ID NO: 247301 - protein, 15 aa, Artificial Sequence
  Description of Artificial Sequence: Synthetic peptide
  Seed: LRMKWMMAMKYPITA
LRMKYMMLMHYPITA

SEQ ID NO: 247302 - protein, 15 aa, Artificial Sequence
  Description of Artificial Sequence: Synthetic peptide
  Seed: LRMKWMMAMKYPITA
LRMKYMMLMHYPKTA

SEQ ID NO: 247303 - protein, 15 aa, Artificial Sequence
  Description of Artificial Sequence: Synthetic peptide
  Seed: LRMKWMMAMKYPITA
LRMKYMMLMHYPLTA

SEQ ID NO: 247304 - protein, 15 aa, Artificial Sequence
  Description of Artificial Sequence: Synthetic peptide
  Seed: LRMKWMMAMKYPITA
LRMKYMMLMHYPMTA

SEQ ID NO: 247305 - protein, 15 aa, Artificial Sequence
  Description of Artificial Sequence: Synthetic peptide
  Seed: LRMKWMMAMKYPITA
LRMKYMMLMHYPNTA

SEQ ID NO: 247306 - protein, 15 aa, Artificial Sequence
  Description of Artificial Sequence: Synthetic peptide
  Seed: LRMKWMMAMKYPITA
LRMKYMMLMHYPPTA

SEQ ID NO: 247307 - protein, 15 aa, Artificial Sequence
  Description of Artificial Sequence: Synthetic peptide
  Seed: LRMKWMMAMKYPITA
LRMKYMMLMHYPQTA

SEQ ID NO: 247308 - protein, 15 aa, Artificial Sequence
  Description of Artificial Sequence: Synthetic peptide
  Seed: LRMKWMMAMKYPITA
LRMKYMMLMHYPRTA

SEQ ID NO: 247309 - protein, 15 aa, Artificial Sequence
  Description of Artificial Sequence: Synthetic peptide
  Seed: LRMKWMMAMKYPITA
LRMKYMMLMHYPSTA

SEQ ID NO: 247310 - protein, 15 aa, Artificial Sequence
  Description of Artificial Sequence: Synthetic peptide
  Seed: LRMKWMMAMKYPITA
LRMKYMMLMHYPTTA

SEQ ID NO: 247311 - protein, 15 aa, Artificial Sequence
  Description of Artificial Sequence: Synthetic peptide
  Seed: LRMKWMMAMKYPITA
LRMKYMMLMHYPVTA

SEQ ID NO: 247312 - protein, 15 aa, Artificial Sequence
  Description of Artificial Sequence: Synthetic peptide
  Seed: LRMKWMMAMKYPITA
LRMKYMMLMHYPYTA

SEQ ID NO: 247313 - protein, 15 aa, Artificial Sequence
  Description of Artificial Sequence: Synthetic peptide
  Seed: LRMKWMMAMKYPITA
LRMKYMMLMIYPATA

SEQ ID NO: 247314 - protein, 15 aa, Artificial Sequence
  Description of Artificial Sequence: Synthetic peptide
  Seed: LRMKWMMAMKYPITA
LRMKYMMLMIYPCTA

SEQ ID NO: 247315 - protein, 15 aa, Artificial Sequence
  Description of Artificial Sequence: Synthetic peptide
  Seed: LRMKWMMAMKYPITA
LRMKYMMLMIYPDTA

SEQ ID NO: 247316 - protein, 15 aa, Artificial Sequence
  Description of Artificial Sequence: Synthetic peptide
  Seed: LRMKWMMAMKYPITA
LRMKYMMLMIYPETA

SEQ ID NO: 247317 - protein, 15 aa, Artificial Sequence
  Description of Artificial Sequence: Synthetic peptide
  Seed: LRMKWMMAMKYPITA
LRMKYMMLMIYPFTA

SEQ ID NO: 247318 - protein, 15 aa, Artificial Sequence
  Description of Artificial Sequence: Synthetic peptide
  Seed: LRMKWMMAMKYPITA
LRMKYMMLMIYPGTA

SEQ ID NO: 247319 - protein, 15 aa, Artificial Sequence
  Description of Artificial Sequence: Synthetic peptide
  Seed: LRMKWMMAMKYPITA
LRMKYMMLMIYPHTA

SEQ ID NO: 247320 - protein, 15 aa, Artificial Sequence
  Description of Artificial Sequence: Synthetic peptide
  Seed: LRMKWMMAMKYPITA
LRMKYMMLMIYPITA

SEQ ID NO: 247321 - protein, 15 aa, Artificial Sequence
  Description of Artificial Sequence: Synthetic peptide
  Seed: LRMKWMMAMKYPITA
LRMKYMMLMIYPKTA

SEQ ID NO: 247322 - protein, 15 aa, Artificial Sequence
  Description of Artificial Sequence: Synthetic peptide
  Seed: LRMKWMMAMKYPITA
LRMKYMMLMIYPLTA

SEQ ID NO: 247323 - protein, 15 aa, Artificial Sequence
  Description of Artificial Sequence: Synthetic peptide
  Seed: LRMKWMMAMKYPITA
LRMKYMMLMIYPMTA

SEQ ID NO: 247324 - protein, 15 aa, Artificial Sequence
  Description of Artificial Sequence: Synthetic peptide
  Seed: LRMKWMMAMKYPITA
LRMKYMMLMIYPNTA

SEQ ID NO: 247325 - protein, 15 aa, Artificial Sequence
  Description of Artificial Sequence: Synthetic peptide
  Seed: LRMKWMMAMKYPITA
LRMKYMMLMIYPPTA

SEQ ID NO: 247326 - protein, 15 aa, Artificial Sequence
  Description of Artificial Sequence: Synthetic peptide
  Seed: LRMKWMMAMKYPITA
LRMKYMMLMIYPQTA

SEQ ID NO: 247327 - protein, 15 aa, Artificial Sequence
  Description of Artificial Sequence: Synthetic peptide
  Seed: LRMKWMMAMKYPITA
LRMKYMMLMIYPRTA

SEQ ID NO: 247328 - protein, 15 aa, Artificial Sequence
  Description of Artificial Sequence: Synthetic peptide
  Seed: LRMKWMMAMKYPITA
LRMKYMMLMIYPSTA

SEQ ID NO: 247329 - protein, 15 aa, Artificial Sequence
  Description of Artificial Sequence: Synthetic peptide
  Seed: LRMKWMMAMKYPITA
LRMKYMMLMIYPTTA

SEQ ID NO: 247330 - protein, 15 aa, Artificial Sequence
  Description of Artificial Sequence: Synthetic peptide
  Seed: LRMKWMMAMKYPITA
LRMKYMMLMIYPVTA

SEQ ID NO: 247331 - protein, 15 aa, Artificial Sequence
  Description of Artificial Sequence: Synthetic peptide
  Seed: LRMKWMMAMKYPITA
LRMKYMMLMIYPYTA

SEQ ID NO: 247332 - protein, 15 aa, Artificial Sequence
  Description of Artificial Sequence: Synthetic peptide
  Seed: LRMKWMMAMKYPITA
LRMKYMMLMKYPATA

SEQ ID NO: 247333 - protein, 15 aa, Artificial Sequence
  Description of Artificial Sequence: Synthetic peptide
  Seed: LRMKWMMAMKYPITA
LRMKYMMLMKYPCTA

SEQ ID NO: 247334 - protein, 15 aa, Artificial Sequence
  Description of Artificial Sequence: Synthetic peptide
  Seed: LRMKWMMAMKYPITA
LRMKYMMLMKYPDTA

SEQ ID NO: 247335 - protein, 15 aa, Artificial Sequence
  Description of Artificial Sequence: Synthetic peptide
  Seed: LRMKWMMAMKYPITA
LRMKYMMLMKYPETA

SEQ ID NO: 247336 - protein, 15 aa, Artificial Sequence
  Description of Artificial Sequence: Synthetic peptide
  Seed: LRMKWMMAMKYPITA
LRMKYMMLMKYPFTA

SEQ ID NO: 247337 - protein, 15 aa, Artificial Sequence
  Description of Artificial Sequence: Synthetic peptide
  Seed: LRMKWMMAMKYPITA
LRMKYMMLMKYPGTA

SEQ ID NO: 247338 - protein, 15 aa, Artificial Sequence
  Description of Artificial Sequence: Synthetic peptide
  Seed: LRMKWMMAMKYPITA
LRMKYMMLMKYPHTA

SEQ ID NO: 247339 - protein, 15 aa, Artificial Sequence
  Description of Artificial Sequence: Synthetic peptide
  Seed: LRMKWMMAMKYPITA
LRMKYMMLMKYPITA

SEQ ID NO: 247340 - protein, 15 aa, Artificial Sequence
  Description of Artificial Sequence: Synthetic peptide
  Seed: LRMKWMMAMKYPITA
LRMKYMMLMKYPKTA

SEQ ID NO: 247341 - protein, 15 aa, Artificial Sequence
  Description of Artificial Sequence: Synthetic peptide
  Seed: LRMKWMMAMKYPITA
LRMKYMMLMKYPLTA

SEQ ID NO: 247342 - protein, 15 aa, Artificial Sequence
  Description of Artificial Sequence: Synthetic peptide
  Seed: LRMKWMMAMKYPITA
LRMKYMMLMKYPMTA

SEQ ID NO: 247343 - protein, 15 aa, Artificial Sequence
  Description of Artificial Sequence: Synthetic peptide
  Seed: LRMKWMMAMKYPITA
LRMKYMMLMKYPNTA

SEQ ID NO: 247344 - protein, 15 aa, Artificial Sequence
  Description of Artificial Sequence: Synthetic peptide
  Seed: LRMKWMMAMKYPITA
LRMKYMMLMKYPPTA

SEQ ID NO: 247345 - protein, 15 aa, Artificial Sequence
  Description of Artificial Sequence: Synthetic peptide
  Seed: LRMKWMMAMKYPITA
LRMKYMMLMKYPQTA

SEQ ID NO: 247346 - protein, 15 aa, Artificial Sequence
  Description of Artificial Sequence: Synthetic peptide
  Seed: LRMKWMMAMKYPITA
LRMKYMMLMKYPRTA

SEQ ID NO: 247347 - protein, 15 aa, Artificial Sequence
  Description of Artificial Sequence: Synthetic peptide
  Seed: LRMKWMMAMKYPITA
LRMKYMMLMKYPSTA

SEQ ID NO: 247348 - protein, 15 aa, Artificial Sequence
  Description of Artificial Sequence: Synthetic peptide
  Seed: LRMKWMMAMKYPITA
LRMKYMMLMKYPTTA

SEQ ID NO: 247349 - protein, 15 aa, Artificial Sequence
  Description of Artificial Sequence: Synthetic peptide
  Seed: LRMKWMMAMKYPITA
LRMKYMMLMKYPVTA

SEQ ID NO: 247350 - protein, 15 aa, Artificial Sequence
  Description of Artificial Sequence: Synthetic peptide
  Seed: LRMKWMMAMKYPITA
LRMKYMMLMKYPYTA

SEQ ID NO: 247351 - protein, 15 aa, Artificial Sequence
  Description of Artificial Sequence: Synthetic peptide
  Seed: LRMKWMMAMKYPITA
LRMKYMMLMLYPATA

SEQ ID NO: 247352 - protein, 15 aa, Artificial Sequence
  Description of Artificial Sequence: Synthetic peptide
  Seed: LRMKWMMAMKYPITA
LRMKYMMLMLYPCTA

SEQ ID NO: 247353 - protein, 15 aa, Artificial Sequence
  Description of Artificial Sequence: Synthetic peptide
  Seed: LRMKWMMAMKYPITA
LRMKYMMLMLYPDTA

SEQ ID NO: 247354 - protein, 15 aa, Artificial Sequence
  Description of Artificial Sequence: Synthetic peptide
  Seed: LRMKWMMAMKYPITA
LRMKYMMLMLYPETA

SEQ ID NO: 247355 - protein, 15 aa, Artificial Sequence
  Description of Artificial Sequence: Synthetic peptide
  Seed: LRMKWMMAMKYPITA
LRMKYMMLMLYPGTA

SEQ ID NO: 247356 - protein, 15 aa, Artificial Sequence
  Description of Artificial Sequence: Synthetic peptide
  Seed: LRMKWMMAMKYPITA
LRMKYMMLMLYPHTA

SEQ ID NO: 247357 - protein, 15 aa, Artificial Sequence
  Description of Artificial Sequence: Synthetic peptide
  Seed: LRMKWMMAMKYPITA
LRMKYMMLMLYPITA

SEQ ID NO: 247358 - protein, 15 aa, Artificial Sequence
  Description of Artificial Sequence: Synthetic peptide
  Seed: LRMKWMMAMKYPITA
LRMKYMMLMLYPLTA

SEQ ID NO: 247359 - protein, 15 aa, Artificial Sequence
  Description of Artificial Sequence: Synthetic peptide
  Seed: LRMKWMMAMKYPITA
LRMKYMMLMLYPMTA

SEQ ID NO: 247360 - protein, 15 aa, Artificial Sequence
  Description of Artificial Sequence: Synthetic peptide
  Seed: LRMKWMMAMKYPITA
LRMKYMMLMLYPNTA

SEQ ID NO: 247361 - protein, 15 aa, Artificial Sequence
  Description of Artificial Sequence: Synthetic peptide
  Seed: LRMKWMMAMKYPITA
LRMKYMMLMLYPPTA

SEQ ID NO: 247362 - protein, 15 aa, Artificial Sequence
  Description of Artificial Sequence: Synthetic peptide
  Seed: LRMKWMMAMKYPITA
LRMKYMMLMLYPQTA

SEQ ID NO: 247363 - protein, 15 aa, Artificial Sequence
  Description of Artificial Sequence: Synthetic peptide
  Seed: LRMKWMMAMKYPITA
LRMKYMMLMLYPSTA

SEQ ID NO: 247364 - protein, 15 aa, Artificial Sequence
  Description of Artificial Sequence: Synthetic peptide
  Seed: LRMKWMMAMKYPITA
LRMKYMMLMLYPTTA

SEQ ID NO: 247365 - protein, 15 aa, Artificial Sequence
  Description of Artificial Sequence: Synthetic peptide
  Seed: LRMKWMMAMKYPITA
LRMKYMMLMLYPVTA

SEQ ID NO: 247366 - protein, 15 aa, Artificial Sequence
  Description of Artificial Sequence: Synthetic peptide
  Seed: LRMKWMMAMKYPITA
LRMKYMMLMMYPATA

SEQ ID NO: 247367 - protein, 15 aa, Artificial Sequence
  Description of Artificial Sequence: Synthetic peptide
  Seed: LRMKWMMAMKYPITA
LRMKYMMLMMYPCTA

SEQ ID NO: 247368 - protein, 15 aa, Artificial Sequence
  Description of Artificial Sequence: Synthetic peptide
  Seed: LRMKWMMAMKYPITA
LRMKYMMLMMYPDTA

SEQ ID NO: 247369 - protein, 15 aa, Artificial Sequence
  Description of Artificial Sequence: Synthetic peptide
  Seed: LRMKWMMAMKYPITA
LRMKYMMLMMYPETA

SEQ ID NO: 247370 - protein, 15 aa, Artificial Sequence
  Description of Artificial Sequence: Synthetic peptide
  Seed: LRMKWMMAMKYPITA
LRMKYMMLMMYPFTA

SEQ ID NO: 247371 - protein, 15 aa, Artificial Sequence
  Description of Artificial Sequence: Synthetic peptide
  Seed: LRMKWMMAMKYPITA
LRMKYMMLMMYPGTA

SEQ ID NO: 247372 - protein, 15 aa, Artificial Sequence
  Description of Artificial Sequence: Synthetic peptide
  Seed: LRMKWMMAMKYPITA
LRMKYMMLMMYPHTA

SEQ ID NO: 247373 - protein, 15 aa, Artificial Sequence
  Description of Artificial Sequence: Synthetic peptide
  Seed: LRMKWMMAMKYPITA
LRMKYMMLMMYPITA

SEQ ID NO: 247374 - protein, 15 aa, Artificial Sequence
  Description of Artificial Sequence: Synthetic peptide
  Seed: LRMKWMMAMKYPITA
LRMKYMMLMMYPLTA

SEQ ID NO: 247375 - protein, 15 aa, Artificial Sequence
  Description of Artificial Sequence: Synthetic peptide
  Seed: LRMKWMMAMKYPITA
LRMKYMMLMMYPMTA

SEQ ID NO: 247376 - protein, 15 aa, Artificial Sequence
  Description of Artificial Sequence: Synthetic peptide
  Seed: LRMKWMMAMKYPITA
LRMKYMMLMMYPNTA

SEQ ID NO: 247377 - protein, 15 aa, Artificial Sequence
  Description of Artificial Sequence: Synthetic peptide
  Seed: LRMKWMMAMKYPITA
LRMKYMMLMMYPQTA

SEQ ID NO: 247378 - protein, 15 aa, Artificial Sequence
  Description of Artificial Sequence: Synthetic peptide
  Seed: LRMKWMMAMKYPITA
LRMKYMMLMMYPSTA

SEQ ID NO: 247379 - protein, 15 aa, Artificial Sequence
  Description of Artificial Sequence: Synthetic peptide
  Seed: LRMKWMMAMKYPITA
LRMKYMMLMMYPTTA

SEQ ID NO: 247380 - protein, 15 aa, Artificial Sequence
  Description of Artificial Sequence: Synthetic peptide
  Seed: LRMKWMMAMKYPITA
LRMKYMMLMMYPVTA

SEQ ID NO: 247381 - protein, 15 aa, Artificial Sequence
  Description of Artificial Sequence: Synthetic peptide
  Seed: LRMKWMMAMKYPITA
LRMKYMMLMNYPATA

SEQ ID NO: 247382 - protein, 15 aa, Artificial Sequence
  Description of Artificial Sequence: Synthetic peptide
  Seed: LRMKWMMAMKYPITA
LRMKYMMLMNYPCTA

SEQ ID NO: 247383 - protein, 15 aa, Artificial Sequence
  Description of Artificial Sequence: Synthetic peptide
  Seed: LRMKWMMAMKYPITA
LRMKYMMLMNYPDTA

SEQ ID NO: 247384 - protein, 15 aa, Artificial Sequence
  Description of Artificial Sequence: Synthetic peptide
  Seed: LRMKWMMAMKYPITA
LRMKYMMLMNYPETA

SEQ ID NO: 247385 - protein, 15 aa, Artificial Sequence
  Description of Artificial Sequence: Synthetic peptide
  Seed: LRMKWMMAMKYPITA
LRMKYMMLMNYPFTA

SEQ ID NO: 247386 - protein, 15 aa, Artificial Sequence
  Description of Artificial Sequence: Synthetic peptide
  Seed: LRMKWMMAMKYPITA
LRMKYMMLMNYPGTA

SEQ ID NO: 247387 - protein, 15 aa, Artificial Sequence
  Description of Artificial Sequence: Synthetic peptide
  Seed: LRMKWMMAMKYPITA
LRMKYMMLMNYPHTA

SEQ ID NO: 247388 - protein, 15 aa, Artificial Sequence
  Description of Artificial Sequence: Synthetic peptide
  Seed: LRMKWMMAMKYPITA
LRMKYMMLMNYPITA

SEQ ID NO: 247389 - protein, 15 aa, Artificial Sequence
  Description of Artificial Sequence: Synthetic peptide
  Seed: LRMKWMMAMKYPITA
LRMKYMMLMNYPKTA

SEQ ID NO: 247390 - protein, 15 aa, Artificial Sequence
  Description of Artificial Sequence: Synthetic peptide
  Seed: LRMKWMMAMKYPITA
LRMKYMMLMNYPLTA

SEQ ID NO: 247391 - protein, 15 aa, Artificial Sequence
  Description of Artificial Sequence: Synthetic peptide
  Seed: LRMKWMMAMKYPITA
LRMKYMMLMNYPMTA

SEQ ID NO: 247392 - protein, 15 aa, Artificial Sequence
  Description of Artificial Sequence: Synthetic peptide
  Seed: LRMKWMMAMKYPITA
LRMKYMMLMNYPNTA

SEQ ID NO: 247393 - protein, 15 aa, Artificial Sequence
  Description of Artificial Sequence: Synthetic peptide
  Seed: LRMKWMMAMKYPITA
LRMKYMMLMNYPPTA

SEQ ID NO: 247394 - protein, 15 aa, Artificial Sequence
  Description of Artificial Sequence: Synthetic peptide
  Seed: LRMKWMMAMKYPITA
LRMKYMMLMNYPQTA

SEQ ID NO: 247395 - protein, 15 aa, Artificial Sequence
  Description of Artificial Sequence: Synthetic peptide
  Seed: LRMKWMMAMKYPITA
LRMKYMMLMNYPRTA

SEQ ID NO: 247396 - protein, 15 aa, Artificial Sequence
  Description of Artificial Sequence: Synthetic peptide
  Seed: LRMKWMMAMKYPITA
LRMKYMMLMNYPSTA

SEQ ID NO: 247397 - protein, 15 aa, Artificial Sequence
  Description of Artificial Sequence: Synthetic peptide
  Seed: LRMKWMMAMKYPITA
LRMKYMMLMNYPTTA

SEQ ID NO: 247398 - protein, 15 aa, Artificial Sequence
  Description of Artificial Sequence: Synthetic peptide
  Seed: LRMKWMMAMKYPITA
LRMKYMMLMNYPVTA

SEQ ID NO: 247399 - protein, 15 aa, Artificial Sequence
  Description of Artificial Sequence: Synthetic peptide
  Seed: LRMKWMMAMKYPITA
LRMKYMMLMNYPWTA

SEQ ID NO: 247400 - protein, 15 aa, Artificial Sequence
  Description of Artificial Sequence: Synthetic peptide
  Seed: LRMKWMMAMKYPITA
LRMKYMMLMNYPYTA

SEQ ID NO: 247401 - protein, 15 aa, Artificial Sequence
  Description of Artificial Sequence: Synthetic peptide
  Seed: LRMKWMMAMKYPITA
LRMKYMMLMPYPATA

SEQ ID NO: 247402 - protein, 15 aa, Artificial Sequence
  Description of Artificial Sequence: Synthetic peptide
  Seed: LRMKWMMAMKYPITA
LRMKYMMLMPYPCTA

SEQ ID NO: 247403 - protein, 15 aa, Artificial Sequence
  Description of Artificial Sequence: Synthetic peptide
  Seed: LRMKWMMAMKYPITA
LRMKYMMLMPYPDTA

SEQ ID NO: 247404 - protein, 15 aa, Artificial Sequence
  Description of Artificial Sequence: Synthetic peptide
  Seed: LRMKWMMAMKYPITA
LRMKYMMLMPYPETA

SEQ ID NO: 247405 - protein, 15 aa, Artificial Sequence
  Description of Artificial Sequence: Synthetic peptide
  Seed: LRMKWMMAMKYPITA
LRMKYMMLMPYPFTA

SEQ ID NO: 247406 - protein, 15 aa, Artificial Sequence
  Description of Artificial Sequence: Synthetic peptide
  Seed: LRMKWMMAMKYPITA
LRMKYMMLMPYPGTA

SEQ ID NO: 247407 - protein, 15 aa, Artificial Sequence
  Description of Artificial Sequence: Synthetic peptide
  Seed: LRMKWMMAMKYPITA
LRMKYMMLMPYPHTA

SEQ ID NO: 247408 - protein, 15 aa, Artificial Sequence
  Description of Artificial Sequence: Synthetic peptide
  Seed: LRMKWMMAMKYPITA
LRMKYMMLMPYPITA

SEQ ID NO: 247409 - protein, 15 aa, Artificial Sequence
  Description of Artificial Sequence: Synthetic peptide
  Seed: LRMKWMMAMKYPITA
LRMKYMMLMPYPKTA

SEQ ID NO: 247410 - protein, 15 aa, Artificial Sequence
  Description of Artificial Sequence: Synthetic peptide
  Seed: LRMKWMMAMKYPITA
LRMKYMMLMPYPLTA

SEQ ID NO: 247411 - protein, 15 aa, Artificial Sequence
  Description of Artificial Sequence: Synthetic peptide
  Seed: LRMKWMMAMKYPITA
LRMKYMMLMPYPMTA

SEQ ID NO: 247412 - protein, 15 aa, Artificial Sequence
  Description of Artificial Sequence: Synthetic peptide
  Seed: LRMKWMMAMKYPITA
LRMKYMMLMPYPNTA

SEQ ID NO: 247413 - protein, 15 aa, Artificial Sequence
  Description of Artificial Sequence: Synthetic peptide
  Seed: LRMKWMMAMKYPITA
LRMKYMMLMPYPPTA

SEQ ID NO: 247414 - protein, 15 aa, Artificial Sequence
  Description of Artificial Sequence: Synthetic peptide
  Seed: LRMKWMMAMKYPITA
LRMKYMMLMPYPQTA

SEQ ID NO: 247415 - protein, 15 aa, Artificial Sequence
  Description of Artificial Sequence: Synthetic peptide
  Seed: LRMKWMMAMKYPITA
LRMKYMMLMPYPRTA

SEQ ID NO: 247416 - protein, 15 aa, Artificial Sequence
  Description of Artificial Sequence: Synthetic peptide
  Seed: LRMKWMMAMKYPITA
LRMKYMMLMPYPSTA

SEQ ID NO: 247417 - protein, 15 aa, Artificial Sequence
  Description of Artificial Sequence: Synthetic peptide
  Seed: LRMKWMMAMKYPITA
LRMKYMMLMPYPTTA

SEQ ID NO: 247418 - protein, 15 aa, Artificial Sequence
  Description of Artificial Sequence: Synthetic peptide
  Seed: LRMKWMMAMKYPITA
LRMKYMMLMPYPVTA

SEQ ID NO: 247419 - protein, 15 aa, Artificial Sequence
  Description of Artificial Sequence: Synthetic peptide
  Seed: LRMKWMMAMKYPITA
LRMKYMMLMPYPWTA

SEQ ID NO: 247420 - protein, 15 aa, Artificial Sequence
  Description of Artificial Sequence: Synthetic peptide
  Seed: LRMKWMMAMKYPITA
LRMKYMMLMPYPYTA

SEQ ID NO: 247421 - protein, 15 aa, Artificial Sequence
  Description of Artificial Sequence: Synthetic peptide
  Seed: LRMKWMMAMKYPITA
LRMKYMMLMQYPATA

SEQ ID NO: 247422 - protein, 15 aa, Artificial Sequence
  Description of Artificial Sequence: Synthetic peptide
  Seed: LRMKWMMAMKYPITA
LRMKYMMLMQYPCTA

SEQ ID NO: 247423 - protein, 15 aa, Artificial Sequence
  Description of Artificial Sequence: Synthetic peptide
  Seed: LRMKWMMAMKYPITA
LRMKYMMLMQYPDTA

SEQ ID NO: 247424 - protein, 15 aa, Artificial Sequence
  Description of Artificial Sequence: Synthetic peptide
  Seed: LRMKWMMAMKYPITA
LRMKYMMLMQYPETA

SEQ ID NO: 247425 - protein, 15 aa, Artificial Sequence
  Description of Artificial Sequence: Synthetic peptide
  Seed: LRMKWMMAMKYPITA
LRMKYMMLMQYPFTA

SEQ ID NO: 247426 - protein, 15 aa, Artificial Sequence
  Description of Artificial Sequence: Synthetic peptide
  Seed: LRMKWMMAMKYPITA
LRMKYMMLMQYPGTA

SEQ ID NO: 247427 - protein, 15 aa, Artificial Sequence
  Description of Artificial Sequence: Synthetic peptide
  Seed: LRMKWMMAMKYPITA
LRMKYMMLMQYPHTA

SEQ ID NO: 247428 - protein, 15 aa, Artificial Sequence
  Description of Artificial Sequence: Synthetic peptide
  Seed: LRMKWMMAMKYPITA
LRMKYMMLMQYPITA

SEQ ID NO: 247429 - protein, 15 aa, Artificial Sequence
  Description of Artificial Sequence: Synthetic peptide
  Seed: LRMKWMMAMKYPITA
LRMKYMMLMQYPKTA

SEQ ID NO: 247430 - protein, 15 aa, Artificial Sequence
  Description of Artificial Sequence: Synthetic peptide
  Seed: LRMKWMMAMKYPITA
LRMKYMMLMQYPLTA

SEQ ID NO: 247431 - protein, 15 aa, Artificial Sequence
  Description of Artificial Sequence: Synthetic peptide
  Seed: LRMKWMMAMKYPITA
LRMKYMMLMQYPMTA

SEQ ID NO: 247432 - protein, 15 aa, Artificial Sequence
  Description of Artificial Sequence: Synthetic peptide
  Seed: LRMKWMMAMKYPITA
LRMKYMMLMQYPNTA

SEQ ID NO: 247433 - protein, 15 aa, Artificial Sequence
  Description of Artificial Sequence: Synthetic peptide
  Seed: LRMKWMMAMKYPITA
LRMKYMMLMQYPPTA

SEQ ID NO: 247434 - protein, 15 aa, Artificial Sequence
  Description of Artificial Sequence: Synthetic peptide
  Seed: LRMKWMMAMKYPITA
LRMKYMMLMQYPQTA

SEQ ID NO: 247435 - protein, 15 aa, Artificial Sequence
  Description of Artificial Sequence: Synthetic peptide
  Seed: LRMKWMMAMKYPITA
LRMKYMMLMQYPRTA

SEQ ID NO: 247436 - protein, 15 aa, Artificial Sequence
  Description of Artificial Sequence: Synthetic peptide
  Seed: LRMKWMMAMKYPITA
LRMKYMMLMQYPSTA

SEQ ID NO: 247437 - protein, 15 aa, Artificial Sequence
  Description of Artificial Sequence: Synthetic peptide
  Seed: LRMKWMMAMKYPITA
LRMKYMMLMQYPTTA

SEQ ID NO: 247438 - protein, 15 aa, Artificial Sequence
  Description of Artificial Sequence: Synthetic peptide
  Seed: LRMKWMMAMKYPITA
LRMKYMMLMQYPVTA

SEQ ID NO: 247439 - protein, 15 aa, Artificial Sequence
  Description of Artificial Sequence: Synthetic peptide
  Seed: LRMKWMMAMKYPITA
LRMKYMMLMQYPYTA

SEQ ID NO: 247440 - protein, 15 aa, Artificial Sequence
  Description of Artificial Sequence: Synthetic peptide
  Seed: LRMKWMMAMKYPITA
LRMKYMMLMRYPATA

SEQ ID NO: 247441 - protein, 15 aa, Artificial Sequence
  Description of Artificial Sequence: Synthetic peptide
  Seed: LRMKWMMAMKYPITA
LRMKYMMLMRYPCTA

SEQ ID NO: 247442 - protein, 15 aa, Artificial Sequence
  Description of Artificial Sequence: Synthetic peptide
  Seed: LRMKWMMAMKYPITA
LRMKYMMLMRYPDTA

SEQ ID NO: 247443 - protein, 15 aa, Artificial Sequence
  Description of Artificial Sequence: Synthetic peptide
  Seed: LRMKWMMAMKYPITA
LRMKYMMLMRYPETA

SEQ ID NO: 247444 - protein, 15 aa, Artificial Sequence
  Description of Artificial Sequence: Synthetic peptide
  Seed: LRMKWMMAMKYPITA
LRMKYMMLMRYPFTA

SEQ ID NO: 247445 - protein, 15 aa, Artificial Sequence
  Description of Artificial Sequence: Synthetic peptide
  Seed: LRMKWMMAMKYPITA
LRMKYMMLMRYPGTA

SEQ ID NO: 247446 - protein, 15 aa, Artificial Sequence
  Description of Artificial Sequence: Synthetic peptide
  Seed: LRMKWMMAMKYPITA
LRMKYMMLMRYPHTA

SEQ ID NO: 247447 - protein, 15 aa, Artificial Sequence
  Description of Artificial Sequence: Synthetic peptide
  Seed: LRMKWMMAMKYPITA
LRMKYMMLMRYPITA

SEQ ID NO: 247448 - protein, 15 aa, Artificial Sequence
  Description of Artificial Sequence: Synthetic peptide
  Seed: LRMKWMMAMKYPITA
LRMKYMMLMRYPKTA

SEQ ID NO: 247449 - protein, 15 aa, Artificial Sequence
  Description of Artificial Sequence: Synthetic peptide
  Seed: LRMKWMMAMKYPITA
LRMKYMMLMRYPLTA

SEQ ID NO: 247450 - protein, 15 aa, Artificial Sequence
  Description of Artificial Sequence: Synthetic peptide
  Seed: LRMKWMMAMKYPITA
LRMKYMMLMRYPMTA

SEQ ID NO: 247451 - protein, 15 aa, Artificial Sequence
  Description of Artificial Sequence: Synthetic peptide
  Seed: LRMKWMMAMKYPITA
LRMKYMMLMRYPNTA

SEQ ID NO: 247452 - protein, 15 aa, Artificial Sequence
  Description of Artificial Sequence: Synthetic peptide
  Seed: LRMKWMMAMKYPITA
LRMKYMMLMRYPPTA

SEQ ID NO: 247453 - protein, 15 aa, Artificial Sequence
  Description of Artificial Sequence: Synthetic peptide
  Seed: LRMKWMMAMKYPITA
LRMKYMMLMRYPQTA

SEQ ID NO: 247454 - protein, 15 aa, Artificial Sequence
  Description of Artificial Sequence: Synthetic peptide
  Seed: LRMKWMMAMKYPITA
LRMKYMMLMRYPRTA

SEQ ID NO: 247455 - protein, 15 aa, Artificial Sequence
  Description of Artificial Sequence: Synthetic peptide
  Seed: LRMKWMMAMKYPITA
LRMKYMMLMRYPSTA

SEQ ID NO: 247456 - protein, 15 aa, Artificial Sequence
  Description of Artificial Sequence: Synthetic peptide
  Seed: LRMKWMMAMKYPITA
LRMKYMMLMRYPTTA

SEQ ID NO: 247457 - protein, 15 aa, Artificial Sequence
  Description of Artificial Sequence: Synthetic peptide
  Seed: LRMKWMMAMKYPITA
LRMKYMMLMRYPVTA

SEQ ID NO: 247458 - protein, 15 aa, Artificial Sequence
  Description of Artificial Sequence: Synthetic peptide
  Seed: LRMKWMMAMKYPITA
LRMKYMMLMRYPWTA

SEQ ID NO: 247459 - protein, 15 aa, Artificial Sequence
  Description of Artificial Sequence: Synthetic peptide
  Seed: LRMKWMMAMKYPITA
LRMKYMMLMRYPYTA

SEQ ID NO: 247460 - protein, 15 aa, Artificial Sequence
  Description of Artificial Sequence: Synthetic peptide
  Seed: LRMKWMMAMKYPITA
LRMKYMMLMSYPATA

SEQ ID NO: 247461 - protein, 15 aa, Artificial Sequence
  Description of Artificial Sequence: Synthetic peptide
  Seed: LRMKWMMAMKYPITA
LRMKYMMLMSYPCTA

SEQ ID NO: 247462 - protein, 15 aa, Artificial Sequence
  Description of Artificial Sequence: Synthetic peptide
  Seed: LRMKWMMAMKYPITA
LRMKYMMLMSYPDTA

SEQ ID NO: 247463 - protein, 15 aa, Artificial Sequence
  Description of Artificial Sequence: Synthetic peptide
  Seed: LRMKWMMAMKYPITA
LRMKYMMLMSYPETA

SEQ ID NO: 247464 - protein, 15 aa, Artificial Sequence
  Description of Artificial Sequence: Synthetic peptide
  Seed: LRMKWMMAMKYPITA
LRMKYMMLMSYPFTA

SEQ ID NO: 247465 - protein, 15 aa, Artificial Sequence
  Description of Artificial Sequence: Synthetic peptide
  Seed: LRMKWMMAMKYPITA
LRMKYMMLMSYPGTA

SEQ ID NO: 247466 - protein, 15 aa, Artificial Sequence
  Description of Artificial Sequence: Synthetic peptide
  Seed: LRMKWMMAMKYPITA
LRMKYMMLMSYPHTA

SEQ ID NO: 247467 - protein, 15 aa, Artificial Sequence
  Description of Artificial Sequence: Synthetic peptide
  Seed: LRMKWMMAMKYPITA
LRMKYMMLMSYPITA

SEQ ID NO: 247468 - protein, 15 aa, Artificial Sequence
  Description of Artificial Sequence: Synthetic peptide
  Seed: LRMKWMMAMKYPITA
LRMKYMMLMSYPKTA

SEQ ID NO: 247469 - protein, 15 aa, Artificial Sequence
  Description of Artificial Sequence: Synthetic peptide
  Seed: LRMKWMMAMKYPITA
LRMKYMMLMSYPLTA

SEQ ID NO: 247470 - protein, 15 aa, Artificial Sequence
  Description of Artificial Sequence: Synthetic peptide
  Seed: LRMKWMMAMKYPITA
LRMKYMMLMSYPMTA

SEQ ID NO: 247471 - protein, 15 aa, Artificial Sequence
  Description of Artificial Sequence: Synthetic peptide
  Seed: LRMKWMMAMKYPITA
LRMKYMMLMSYPNTA

SEQ ID NO: 247472 - protein, 15 aa, Artificial Sequence
  Description of Artificial Sequence: Synthetic peptide
  Seed: LRMKWMMAMKYPITA
LRMKYMMLMSYPPTA

SEQ ID NO: 247473 - protein, 15 aa, Artificial Sequence
  Description of Artificial Sequence: Synthetic peptide
  Seed: LRMKWMMAMKYPITA
LRMKYMMLMSYPQTA

SEQ ID NO: 247474 - protein, 15 aa, Artificial Sequence
  Description of Artificial Sequence: Synthetic peptide
  Seed: LRMKWMMAMKYPITA
LRMKYMMLMSYPRTA

SEQ ID NO: 247475 - protein, 15 aa, Artificial Sequence
  Description of Artificial Sequence: Synthetic peptide
  Seed: LRMKWMMAMKYPITA
LRMKYMMLMSYPSTA

SEQ ID NO: 247476 - protein, 15 aa, Artificial Sequence
  Description of Artificial Sequence: Synthetic peptide
  Seed: LRMKWMMAMKYPITA
LRMKYMMLMSYPTTA

SEQ ID NO: 247477 - protein, 15 aa, Artificial Sequence
  Description of Artificial Sequence: Synthetic peptide
  Seed: LRMKWMMAMKYPITA
LRMKYMMLMSYPVTA

SEQ ID NO: 247478 - protein, 15 aa, Artificial Sequence
  Description of Artificial Sequence: Synthetic peptide
  Seed: LRMKWMMAMKYPITA
LRMKYMMLMSYPWTA

SEQ ID NO: 247479 - protein, 15 aa, Artificial Sequence
  Description of Artificial Sequence: Synthetic peptide
  Seed: LRMKWMMAMKYPITA
LRMKYMMLMSYPYTA

SEQ ID NO: 247480 - protein, 15 aa, Artificial Sequence
  Description of Artificial Sequence: Synthetic peptide
  Seed: LRMKWMMAMKYPITA
LRMKYMMLMTYPATA

SEQ ID NO: 247481 - protein, 15 aa, Artificial Sequence
  Description of Artificial Sequence: Synthetic peptide
  Seed: LRMKWMMAMKYPITA
LRMKYMMLMTYPCTA

SEQ ID NO: 247482 - protein, 15 aa, Artificial Sequence
  Description of Artificial Sequence: Synthetic peptide
  Seed: LRMKWMMAMKYPITA
LRMKYMMLMTYPDTA

SEQ ID NO: 247483 - protein, 15 aa, Artificial Sequence
  Description of Artificial Sequence: Synthetic peptide
  Seed: LRMKWMMAMKYPITA
LRMKYMMLMTYPETA

SEQ ID NO: 247484 - protein, 15 aa, Artificial Sequence
  Description of Artificial Sequence: Synthetic peptide
  Seed: LRMKWMMAMKYPITA
LRMKYMMLMTYPFTA

SEQ ID NO: 247485 - protein, 15 aa, Artificial Sequence
  Description of Artificial Sequence: Synthetic peptide
  Seed: LRMKWMMAMKYPITA
LRMKYMMLMTYPGTA

SEQ ID NO: 247486 - protein, 15 aa, Artificial Sequence
  Description of Artificial Sequence: Synthetic peptide
  Seed: LRMKWMMAMKYPITA
LRMKYMMLMTYPHTA

SEQ ID NO: 247487 - protein, 15 aa, Artificial Sequence
  Description of Artificial Sequence: Synthetic peptide
  Seed: LRMKWMMAMKYPITA
LRMKYMMLMTYPITA

SEQ ID NO: 247488 - protein, 15 aa, Artificial Sequence
  Description of Artificial Sequence: Synthetic peptide
  Seed: LRMKWMMAMKYPITA
LRMKYMMLMTYPKTA

SEQ ID NO: 247489 - protein, 15 aa, Artificial Sequence
  Description of Artificial Sequence: Synthetic peptide
  Seed: LRMKWMMAMKYPITA
LRMKYMMLMTYPLTA

SEQ ID NO: 247490 - protein, 15 aa, Artificial Sequence
  Description of Artificial Sequence: Synthetic peptide
  Seed: LRMKWMMAMKYPITA
LRMKYMMLMTYPMTA

SEQ ID NO: 247491 - protein, 15 aa, Artificial Sequence
  Description of Artificial Sequence: Synthetic peptide
  Seed: LRMKWMMAMKYPITA
LRMKYMMLMTYPNTA

SEQ ID NO: 247492 - protein, 15 aa, Artificial Sequence
  Description of Artificial Sequence: Synthetic peptide
  Seed: LRMKWMMAMKYPITA
LRMKYMMLMTYPPTA

SEQ ID NO: 247493 - protein, 15 aa, Artificial Sequence
  Description of Artificial Sequence: Synthetic peptide
  Seed: LRMKWMMAMKYPITA
LRMKYMMLMTYPQTA

SEQ ID NO: 247494 - protein, 15 aa, Artificial Sequence
  Description of Artificial Sequence: Synthetic peptide
  Seed: LRMKWMMAMKYPITA
LRMKYMMLMTYPRTA

SEQ ID NO: 247495 - protein, 15 aa, Artificial Sequence
  Description of Artificial Sequence: Synthetic peptide
  Seed: LRMKWMMAMKYPITA
LRMKYMMLMTYPSTA

SEQ ID NO: 247496 - protein, 15 aa, Artificial Sequence
  Description of Artificial Sequence: Synthetic peptide
  Seed: LRMKWMMAMKYPITA
LRMKYMMLMTYPTTA

SEQ ID NO: 247497 - protein, 15 aa, Artificial Sequence
  Description of Artificial Sequence: Synthetic peptide
  Seed: LRMKWMMAMKYPITA
LRMKYMMLMTYPVTA

SEQ ID NO: 247498 - protein, 15 aa, Artificial Sequence
  Description of Artificial Sequence: Synthetic peptide
  Seed: LRMKWMMAMKYPITA
LRMKYMMLMTYPWTA

SEQ ID NO: 247499 - protein, 15 aa, Artificial Sequence
  Description of Artificial Sequence: Synthetic peptide
  Seed: LRMKWMMAMKYPITA
LRMKYMMLMTYPYTA

SEQ ID NO: 247500 - protein, 15 aa, Artificial Sequence
  Description of Artificial Sequence: Synthetic peptide
  Seed: LRMKWMMAMKYPITA
LRMKYMMLMVYPATA

SEQ ID NO: 247501 - protein, 15 aa, Artificial Sequence
  Description of Artificial Sequence: Synthetic peptide
  Seed: LRMKWMMAMKYPITA
LRMKYMMLMVYPCTA

SEQ ID NO: 247502 - protein, 15 aa, Artificial Sequence
  Description of Artificial Sequence: Synthetic peptide
  Seed: LRMKWMMAMKYPITA
LRMKYMMLMVYPDTA

SEQ ID NO: 247503 - protein, 15 aa, Artificial Sequence
  Description of Artificial Sequence: Synthetic peptide
  Seed: LRMKWMMAMKYPITA
LRMKYMMLMVYPETA

SEQ ID NO: 247504 - protein, 15 aa, Artificial Sequence
  Description of Artificial Sequence: Synthetic peptide
  Seed: LRMKWMMAMKYPITA
LRMKYMMLMVYPFTA

SEQ ID NO: 247505 - protein, 15 aa, Artificial Sequence
  Description of Artificial Sequence: Synthetic peptide
  Seed: LRMKWMMAMKYPITA
LRMKYMMLMVYPGTA

SEQ ID NO: 247506 - protein, 15 aa, Artificial Sequence
  Description of Artificial Sequence: Synthetic peptide
  Seed: LRMKWMMAMKYPITA
LRMKYMMLMVYPHTA

SEQ ID NO: 247507 - protein, 15 aa, Artificial Sequence
  Description of Artificial Sequence: Synthetic peptide
  Seed: LRMKWMMAMKYPITA
LRMKYMMLMVYPITA

SEQ ID NO: 247508 - protein, 15 aa, Artificial Sequence
  Description of Artificial Sequence: Synthetic peptide
  Seed: LRMKWMMAMKYPITA
LRMKYMMLMVYPKTA

SEQ ID NO: 247509 - protein, 15 aa, Artificial Sequence
  Description of Artificial Sequence: Synthetic peptide
  Seed: LRMKWMMAMKYPITA
LRMKYMMLMVYPLTA

SEQ ID NO: 247510 - protein, 15 aa, Artificial Sequence
  Description of Artificial Sequence: Synthetic peptide
  Seed: LRMKWMMAMKYPITA
LRMKYMMLMVYPMTA

SEQ ID NO: 247511 - protein, 15 aa, Artificial Sequence
  Description of Artificial Sequence: Synthetic peptide
  Seed: LRMKWMMAMKYPITA
LRMKYMMLMVYPNTA

SEQ ID NO: 247512 - protein, 15 aa, Artificial Sequence
  Description of Artificial Sequence: Synthetic peptide
  Seed: LRMKWMMAMKYPITA
LRMKYMMLMVYPPTA

SEQ ID NO: 247513 - protein, 15 aa, Artificial Sequence
  Description of Artificial Sequence: Synthetic peptide
  Seed: LRMKWMMAMKYPITA
LRMKYMMLMVYPQTA

SEQ ID NO: 247514 - protein, 15 aa, Artificial Sequence
  Description of Artificial Sequence: Synthetic peptide
  Seed: LRMKWMMAMKYPITA
LRMKYMMLMVYPRTA

SEQ ID NO: 247515 - protein, 15 aa, Artificial Sequence
  Description of Artificial Sequence: Synthetic peptide
  Seed: LRMKWMMAMKYPITA
LRMKYMMLMVYPSTA

SEQ ID NO: 247516 - protein, 15 aa, Artificial Sequence
  Description of Artificial Sequence: Synthetic peptide
  Seed: LRMKWMMAMKYPITA
LRMKYMMLMVYPTTA

SEQ ID NO: 247517 - protein, 15 aa, Artificial Sequence
  Description of Artificial Sequence: Synthetic peptide
  Seed: LRMKWMMAMKYPITA
LRMKYMMLMVYPVTA

SEQ ID NO: 247518 - protein, 15 aa, Artificial Sequence
  Description of Artificial Sequence: Synthetic peptide
  Seed: LRMKWMMAMKYPITA
LRMKYMMLMVYPYTA

SEQ ID NO: 247519 - protein, 15 aa, Artificial Sequence
  Description of Artificial Sequence: Synthetic peptide
  Seed: LRMKWMMAMKYPITA
LRMKYMMLMWYPATA

SEQ ID NO: 247520 - protein, 15 aa, Artificial Sequence
  Description of Artificial Sequence: Synthetic peptide
  Seed: LRMKWMMAMKYPITA
LRMKYMMLMWYPHTA

SEQ ID NO: 247521 - protein, 15 aa, Artificial Sequence
  Description of Artificial Sequence: Synthetic peptide
  Seed: LRMKWMMAMKYPITA
LRMKYMMLMWYPITA

SEQ ID NO: 247522 - protein, 15 aa, Artificial Sequence
  Description of Artificial Sequence: Synthetic peptide
  Seed: LRMKWMMAMKYPITA
LRMKYMMLMWYPLTA

SEQ ID NO: 247523 - protein, 15 aa, Artificial Sequence
  Description of Artificial Sequence: Synthetic peptide
  Seed: LRMKWMMAMKYPITA
LRMKYMMLMWYPMTA

SEQ ID NO: 247524 - protein, 15 aa, Artificial Sequence
  Description of Artificial Sequence: Synthetic peptide
  Seed: LRMKWMMAMKYPITA
LRMKYMMLMWYPNTA

SEQ ID NO: 247525 - protein, 15 aa, Artificial Sequence
  Description of Artificial Sequence: Synthetic peptide
  Seed: LRMKWMMAMKYPITA
LRMKYMMLMWYPSTA

SEQ ID NO: 247526 - protein, 15 aa, Artificial Sequence
  Description of Artificial Sequence: Synthetic peptide
  Seed: LRMKWMMAMKYPITA
LRMKYMMLMWYPVTA

SEQ ID NO: 247527 - protein, 15 aa, Artificial Sequence
  Description of Artificial Sequence: Synthetic peptide
  Seed: LRMKWMMAMKYPITA
LRMKYMMLMYYPATA

SEQ ID NO: 247528 - protein, 15 aa, Artificial Sequence
  Description of Artificial Sequence: Synthetic peptide
  Seed: LRMKWMMAMKYPITA
LRMKYMMLMYYPITA

SEQ ID NO: 247529 - protein, 15 aa, Artificial Sequence
  Description of Artificial Sequence: Synthetic peptide
  Seed: LRMKWMMAMKYPITA
LRMKYMMLMYYPLTA

SEQ ID NO: 247530 - protein, 15 aa, Artificial Sequence
  Description of Artificial Sequence: Synthetic peptide
  Seed: LRMKWMMAMKYPITA
LRMKYMMLMYYPMTA

SEQ ID NO: 247531 - protein, 15 aa, Artificial Sequence
  Description of Artificial Sequence: Synthetic peptide
  Seed: LRMKWMMAMKYPITA
LRMKYMMLMYYPNTA

SEQ ID NO: 247532 - protein, 15 aa, Artificial Sequence
  Description of Artificial Sequence: Synthetic peptide
  Seed: LRMKWMMAMKYPITA
LRMKYMMLMYYPSTA

SEQ ID NO: 247533 - protein, 15 aa, Artificial Sequence
  Description of Artificial Sequence: Synthetic peptide
  Seed: LRMKWMMAMKYPITA
LRMKYMMLMYYPTTA

SEQ ID NO: 247534 - protein, 15 aa, Artificial Sequence
  Description of Artificial Sequence: Synthetic peptide
  Seed: LRMKWMMAMKYPITA
LRMKYMMLMYYPVTA

SEQ ID NO: 247535 - protein, 15 aa, Artificial Sequence
  Description of Artificial Sequence: Synthetic peptide
  Seed: LRMKWMMAMKYPITA
LRMKYMMMMAYPATA

SEQ ID NO: 247536 - protein, 15 aa, Artificial Sequence
  Description of Artificial Sequence: Synthetic peptide
  Seed: LRMKWMMAMKYPITA
LRMKYMMMMAYPCTA

SEQ ID NO: 247537 - protein, 15 aa, Artificial Sequence
  Description of Artificial Sequence: Synthetic peptide
  Seed: LRMKWMMAMKYPITA
LRMKYMMMMAYPDTA

SEQ ID NO: 247538 - protein, 15 aa, Artificial Sequence
  Description of Artificial Sequence: Synthetic peptide
  Seed: LRMKWMMAMKYPITA
LRMKYMMMMAYPETA

SEQ ID NO: 247539 - protein, 15 aa, Artificial Sequence
  Description of Artificial Sequence: Synthetic peptide
  Seed: LRMKWMMAMKYPITA
LRMKYMMMMAYPFTA

SEQ ID NO: 247540 - protein, 15 aa, Artificial Sequence
  Description of Artificial Sequence: Synthetic peptide
  Seed: LRMKWMMAMKYPITA
LRMKYMMMMAYPGTA

SEQ ID NO: 247541 - protein, 15 aa, Artificial Sequence
  Description of Artificial Sequence: Synthetic peptide
  Seed: LRMKWMMAMKYPITA
LRMKYMMMMAYPHTA

SEQ ID NO: 247542 - protein, 15 aa, Artificial Sequence
  Description of Artificial Sequence: Synthetic peptide
  Seed: LRMKWMMAMKYPITA
LRMKYMMMMAYPITA

SEQ ID NO: 247543 - protein, 15 aa, Artificial Sequence
  Description of Artificial Sequence: Synthetic peptide
  Seed: LRMKWMMAMKYPITA
LRMKYMMMMAYPKTA

SEQ ID NO: 247544 - protein, 15 aa, Artificial Sequence
  Description of Artificial Sequence: Synthetic peptide
  Seed: LRMKWMMAMKYPITA
LRMKYMMMMAYPLTA

SEQ ID NO: 247545 - protein, 15 aa, Artificial Sequence
  Description of Artificial Sequence: Synthetic peptide
  Seed: LRMKWMMAMKYPITA
LRMKYMMMMAYPMTA

SEQ ID NO: 247546 - protein, 15 aa, Artificial Sequence
  Description of Artificial Sequence: Synthetic peptide
  Seed: LRMKWMMAMKYPITA
LRMKYMMMMAYPNTA

SEQ ID NO: 247547 - protein, 15 aa, Artificial Sequence
  Description of Artificial Sequence: Synthetic peptide
  Seed: LRMKWMMAMKYPITA
LRMKYMMMMAYPPTA

SEQ ID NO: 247548 - protein, 15 aa, Artificial Sequence
  Description of Artificial Sequence: Synthetic peptide
  Seed: LRMKWMMAMKYPITA
LRMKYMMMMAYPQTA

SEQ ID NO: 247549 - protein, 15 aa, Artificial Sequence
  Description of Artificial Sequence: Synthetic peptide
  Seed: LRMKWMMAMKYPITA
LRMKYMMMMAYPRTA

SEQ ID NO: 247550 - protein, 15 aa, Artificial Sequence
  Description of Artificial Sequence: Synthetic peptide
  Seed: LRMKWMMAMKYPITA
LRMKYMMMMAYPSTA

SEQ ID NO: 247551 - protein, 15 aa, Artificial Sequence
  Description of Artificial Sequence: Synthetic peptide
  Seed: LRMKWMMAMKYPITA
LRMKYMMMMAYPTTA

SEQ ID NO: 247552 - protein, 15 aa, Artificial Sequence
  Description of Artificial Sequence: Synthetic peptide
  Seed: LRMKWMMAMKYPITA
LRMKYMMMMAYPVTA

SEQ ID NO: 247553 - protein, 15 aa, Artificial Sequence
  Description of Artificial Sequence: Synthetic peptide
  Seed: LRMKWMMAMKYPITA
LRMKYMMMMAYPWTA

SEQ ID NO: 247554 - protein, 15 aa, Artificial Sequence
  Description of Artificial Sequence: Synthetic peptide
  Seed: LRMKWMMAMKYPITA
LRMKYMMMMAYPYTA

SEQ ID NO: 247555 - protein, 15 aa, Artificial Sequence
  Description of Artificial Sequence: Synthetic peptide
  Seed: LRMKWMMAMKYPITA
LRMKYMMMMCYPATA

SEQ ID NO: 247556 - protein, 15 aa, Artificial Sequence
  Description of Artificial Sequence: Synthetic peptide
  Seed: LRMKWMMAMKYPITA
LRMKYMMMMCYPDTA

SEQ ID NO: 247557 - protein, 15 aa, Artificial Sequence
  Description of Artificial Sequence: Synthetic peptide
  Seed: LRMKWMMAMKYPITA
LRMKYMMMMCYPETA

SEQ ID NO: 247558 - protein, 15 aa, Artificial Sequence
  Description of Artificial Sequence: Synthetic peptide
  Seed: LRMKWMMAMKYPITA
LRMKYMMMMCYPFTA

SEQ ID NO: 247559 - protein, 15 aa, Artificial Sequence
  Description of Artificial Sequence: Synthetic peptide
  Seed: LRMKWMMAMKYPITA
LRMKYMMMMCYPGTA

SEQ ID NO: 247560 - protein, 15 aa, Artificial Sequence
  Description of Artificial Sequence: Synthetic peptide
  Seed: LRMKWMMAMKYPITA
LRMKYMMMMCYPHTA

SEQ ID NO: 247561 - protein, 15 aa, Artificial Sequence
  Description of Artificial Sequence: Synthetic peptide
  Seed: LRMKWMMAMKYPITA
LRMKYMMMMCYPITA

SEQ ID NO: 247562 - protein, 15 aa, Artificial Sequence
  Description of Artificial Sequence: Synthetic peptide
  Seed: LRMKWMMAMKYPITA
LRMKYMMMMCYPLTA

SEQ ID NO: 247563 - protein, 15 aa, Artificial Sequence
  Description of Artificial Sequence: Synthetic peptide
  Seed: LRMKWMMAMKYPITA
LRMKYMMMMCYPMTA

SEQ ID NO: 247564 - protein, 15 aa, Artificial Sequence
  Description of Artificial Sequence: Synthetic peptide
  Seed: LRMKWMMAMKYPITA
LRMKYMMMMCYPNTA

SEQ ID NO: 247565 - protein, 15 aa, Artificial Sequence
  Description of Artificial Sequence: Synthetic peptide
  Seed: LRMKWMMAMKYPITA
LRMKYMMMMCYPPTA

SEQ ID NO: 247566 - protein, 15 aa, Artificial Sequence
  Description of Artificial Sequence: Synthetic peptide
  Seed: LRMKWMMAMKYPITA
LRMKYMMMMCYPQTA

SEQ ID NO: 247567 - protein, 15 aa, Artificial Sequence
  Description of Artificial Sequence: Synthetic peptide
  Seed: LRMKWMMAMKYPITA
LRMKYMMMMCYPRTA

SEQ ID NO: 247568 - protein, 15 aa, Artificial Sequence
  Description of Artificial Sequence: Synthetic peptide
  Seed: LRMKWMMAMKYPITA
LRMKYMMMMCYPSTA

SEQ ID NO: 247569 - protein, 15 aa, Artificial Sequence
  Description of Artificial Sequence: Synthetic peptide
  Seed: LRMKWMMAMKYPITA
LRMKYMMMMCYPTTA

SEQ ID NO: 247570 - protein, 15 aa, Artificial Sequence
  Description of Artificial Sequence: Synthetic peptide
  Seed: LRMKWMMAMKYPITA
LRMKYMMMMCYPVTA

SEQ ID NO: 247571 - protein, 15 aa, Artificial Sequence
  Description of Artificial Sequence: Synthetic peptide
  Seed: LRMKWMMAMKYPITA
LRMKYMMMMCYPYTA

SEQ ID NO: 247572 - protein, 15 aa, Artificial Sequence
  Description of Artificial Sequence: Synthetic peptide
  Seed: LRMKWMMAMKYPITA
LRMKYMMMMDYPATA

SEQ ID NO: 247573 - protein, 15 aa, Artificial Sequence
  Description of Artificial Sequence: Synthetic peptide
  Seed: LRMKWMMAMKYPITA
LRMKYMMMMDYPCTA

SEQ ID NO: 247574 - protein, 15 aa, Artificial Sequence
  Description of Artificial Sequence: Synthetic peptide
  Seed: LRMKWMMAMKYPITA
LRMKYMMMMDYPDTA

SEQ ID NO: 247575 - protein, 15 aa, Artificial Sequence
  Description of Artificial Sequence: Synthetic peptide
  Seed: LRMKWMMAMKYPITA
LRMKYMMMMDYPETA

SEQ ID NO: 247576 - protein, 15 aa, Artificial Sequence
  Description of Artificial Sequence: Synthetic peptide
  Seed: LRMKWMMAMKYPITA
LRMKYMMMMDYPFTA

SEQ ID NO: 247577 - protein, 15 aa, Artificial Sequence
  Description of Artificial Sequence: Synthetic peptide
  Seed: LRMKWMMAMKYPITA
LRMKYMMMMDYPGTA

SEQ ID NO: 247578 - protein, 15 aa, Artificial Sequence
  Description of Artificial Sequence: Synthetic peptide
  Seed: LRMKWMMAMKYPITA
LRMKYMMMMDYPHTA

SEQ ID NO: 247579 - protein, 15 aa, Artificial Sequence
  Description of Artificial Sequence: Synthetic peptide
  Seed: LRMKWMMAMKYPITA
LRMKYMMMMDYPITA

SEQ ID NO: 247580 - protein, 15 aa, Artificial Sequence
  Description of Artificial Sequence: Synthetic peptide
  Seed: LRMKWMMAMKYPITA
LRMKYMMMMDYPLTA

SEQ ID NO: 247581 - protein, 15 aa, Artificial Sequence
  Description of Artificial Sequence: Synthetic peptide
  Seed: LRMKWMMAMKYPITA
LRMKYMMMMDYPMTA

SEQ ID NO: 247582 - protein, 15 aa, Artificial Sequence
  Description of Artificial Sequence: Synthetic peptide
  Seed: LRMKWMMAMKYPITA
LRMKYMMMMDYPNTA

SEQ ID NO: 247583 - protein, 15 aa, Artificial Sequence
  Description of Artificial Sequence: Synthetic peptide
  Seed: LRMKWMMAMKYPITA
LRMKYMMMMDYPQTA

SEQ ID NO: 247584 - protein, 15 aa, Artificial Sequence
  Description of Artificial Sequence: Synthetic peptide
  Seed: LRMKWMMAMKYPITA
LRMKYMMMMDYPSTA

SEQ ID NO: 247585 - protein, 15 aa, Artificial Sequence
  Description of Artificial Sequence: Synthetic peptide
  Seed: LRMKWMMAMKYPITA
LRMKYMMMMDYPTTA

SEQ ID NO: 247586 - protein, 15 aa, Artificial Sequence
  Description of Artificial Sequence: Synthetic peptide
  Seed: LRMKWMMAMKYPITA
LRMKYMMMMDYPVTA

SEQ ID NO: 247587 - protein, 15 aa, Artificial Sequence
  Description of Artificial Sequence: Synthetic peptide
  Seed: LRMKWMMAMKYPITA
LRMKYMMMMEYPATA

SEQ ID NO: 247588 - protein, 15 aa, Artificial Sequence
  Description of Artificial Sequence: Synthetic peptide
  Seed: LRMKWMMAMKYPITA
LRMKYMMMMEYPCTA

SEQ ID NO: 247589 - protein, 15 aa, Artificial Sequence
  Description of Artificial Sequence: Synthetic peptide
  Seed: LRMKWMMAMKYPITA
LRMKYMMMMEYPDTA

SEQ ID NO: 247590 - protein, 15 aa, Artificial Sequence
  Description of Artificial Sequence: Synthetic peptide
  Seed: LRMKWMMAMKYPITA
LRMKYMMMMEYPETA

SEQ ID NO: 247591 - protein, 15 aa, Artificial Sequence
  Description of Artificial Sequence: Synthetic peptide
  Seed: LRMKWMMAMKYPITA
LRMKYMMMMEYPFTA

SEQ ID NO: 247592 - protein, 15 aa, Artificial Sequence
  Description of Artificial Sequence: Synthetic peptide
  Seed: LRMKWMMAMKYPITA
LRMKYMMMMEYPGTA

SEQ ID NO: 247593 - protein, 15 aa, Artificial Sequence
  Description of Artificial Sequence: Synthetic peptide
  Seed: LRMKWMMAMKYPITA
LRMKYMMMMEYPHTA

SEQ ID NO: 247594 - protein, 15 aa, Artificial Sequence
  Description of Artificial Sequence: Synthetic peptide
  Seed: LRMKWMMAMKYPITA
LRMKYMMMMEYPITA

SEQ ID NO: 247595 - protein, 15 aa, Artificial Sequence
  Description of Artificial Sequence: Synthetic peptide
  Seed: LRMKWMMAMKYPITA
LRMKYMMMMEYPLTA

SEQ ID NO: 247596 - protein, 15 aa, Artificial Sequence
  Description of Artificial Sequence: Synthetic peptide
  Seed: LRMKWMMAMKYPITA
LRMKYMMMMEYPMTA

SEQ ID NO: 247597 - protein, 15 aa, Artificial Sequence
  Description of Artificial Sequence: Synthetic peptide
  Seed: LRMKWMMAMKYPITA
LRMKYMMMMEYPNTA

SEQ ID NO: 247598 - protein, 15 aa, Artificial Sequence
  Description of Artificial Sequence: Synthetic peptide
  Seed: LRMKWMMAMKYPITA
LRMKYMMMMEYPPTA

SEQ ID NO: 247599 - protein, 15 aa, Artificial Sequence
  Description of Artificial Sequence: Synthetic peptide
  Seed: LRMKWMMAMKYPITA
LRMKYMMMMEYPQTA

SEQ ID NO: 247600 - protein, 15 aa, Artificial Sequence
  Description of Artificial Sequence: Synthetic peptide
  Seed: LRMKWMMAMKYPITA
LRMKYMMMMEYPRTA

SEQ ID NO: 247601 - protein, 15 aa, Artificial Sequence
  Description of Artificial Sequence: Synthetic peptide
  Seed: LRMKWMMAMKYPITA
LRMKYMMMMEYPSTA

SEQ ID NO: 247602 - protein, 15 aa, Artificial Sequence
  Description of Artificial Sequence: Synthetic peptide
  Seed: LRMKWMMAMKYPITA
LRMKYMMMMEYPTTA

SEQ ID NO: 247603 - protein, 15 aa, Artificial Sequence
  Description of Artificial Sequence: Synthetic peptide
  Seed: LRMKWMMAMKYPITA
LRMKYMMMMEYPVTA

SEQ ID NO: 247604 - protein, 15 aa, Artificial Sequence
  Description of Artificial Sequence: Synthetic peptide
  Seed: LRMKWMMAMKYPITA
LRMKYMMMMEYPWTA

SEQ ID NO: 247605 - protein, 15 aa, Artificial Sequence
  Description of Artificial Sequence: Synthetic peptide
  Seed: LRMKWMMAMKYPITA
LRMKYMMMMEYPYTA

SEQ ID NO: 247606 - protein, 15 aa, Artificial Sequence
  Description of Artificial Sequence: Synthetic peptide
  Seed: LRMKWMMAMKYPITA
LRMKYMMMMFYPATA

SEQ ID NO: 247607 - protein, 15 aa, Artificial Sequence
  Description of Artificial Sequence: Synthetic peptide
  Seed: LRMKWMMAMKYPITA
LRMKYMMMMFYPDTA

SEQ ID NO: 247608 - protein, 15 aa, Artificial Sequence
  Description of Artificial Sequence: Synthetic peptide
  Seed: LRMKWMMAMKYPITA
LRMKYMMMMFYPETA

SEQ ID NO: 247609 - protein, 15 aa, Artificial Sequence
  Description of Artificial Sequence: Synthetic peptide
  Seed: LRMKWMMAMKYPITA
LRMKYMMMMFYPGTA

SEQ ID NO: 247610 - protein, 15 aa, Artificial Sequence
  Description of Artificial Sequence: Synthetic peptide
  Seed: LRMKWMMAMKYPITA
LRMKYMMMMFYPHTA

SEQ ID NO: 247611 - protein, 15 aa, Artificial Sequence
  Description of Artificial Sequence: Synthetic peptide
  Seed: LRMKWMMAMKYPITA
LRMKYMMMMFYPITA

SEQ ID NO: 247612 - protein, 15 aa, Artificial Sequence
  Description of Artificial Sequence: Synthetic peptide
  Seed: LRMKWMMAMKYPITA
LRMKYMMMMFYPLTA

SEQ ID NO: 247613 - protein, 15 aa, Artificial Sequence
  Description of Artificial Sequence: Synthetic peptide
  Seed: LRMKWMMAMKYPITA
LRMKYMMMMFYPMTA

SEQ ID NO: 247614 - protein, 15 aa, Artificial Sequence
  Description of Artificial Sequence: Synthetic peptide
  Seed: LRMKWMMAMKYPITA
LRMKYMMMMFYPNTA

SEQ ID NO: 247615 - protein, 15 aa, Artificial Sequence
  Description of Artificial Sequence: Synthetic peptide
  Seed: LRMKWMMAMKYPITA
LRMKYMMMMFYPQTA

SEQ ID NO: 247616 - protein, 15 aa, Artificial Sequence
  Description of Artificial Sequence: Synthetic peptide
  Seed: LRMKWMMAMKYPITA
LRMKYMMMMFYPSTA

SEQ ID NO: 247617 - protein, 15 aa, Artificial Sequence
  Description of Artificial Sequence: Synthetic peptide
  Seed: LRMKWMMAMKYPITA
LRMKYMMMMFYPTTA

SEQ ID NO: 247618 - protein, 15 aa, Artificial Sequence
  Description of Artificial Sequence: Synthetic peptide
  Seed: LRMKWMMAMKYPITA
LRMKYMMMMFYPVTA

SEQ ID NO: 247619 - protein, 15 aa, Artificial Sequence
  Description of Artificial Sequence: Synthetic peptide
  Seed: LRMKWMMAMKYPITA
LRMKYMMMMGYPATA

SEQ ID NO: 247620 - protein, 15 aa, Artificial Sequence
  Description of Artificial Sequence: Synthetic peptide
  Seed: LRMKWMMAMKYPITA
LRMKYMMMMGYPCTA

SEQ ID NO: 247621 - protein, 15 aa, Artificial Sequence
  Description of Artificial Sequence: Synthetic peptide
  Seed: LRMKWMMAMKYPITA
LRMKYMMMMGYPDTA

SEQ ID NO: 247622 - protein, 15 aa, Artificial Sequence
  Description of Artificial Sequence: Synthetic peptide
  Seed: LRMKWMMAMKYPITA
LRMKYMMMMGYPETA

SEQ ID NO: 247623 - protein, 15 aa, Artificial Sequence
  Description of Artificial Sequence: Synthetic peptide
  Seed: LRMKWMMAMKYPITA
LRMKYMMMMGYPFTA

SEQ ID NO: 247624 - protein, 15 aa, Artificial Sequence
  Description of Artificial Sequence: Synthetic peptide
  Seed: LRMKWMMAMKYPITA
LRMKYMMMMGYPGTA

SEQ ID NO: 247625 - protein, 15 aa, Artificial Sequence
  Description of Artificial Sequence: Synthetic peptide
  Seed: LRMKWMMAMKYPITA
LRMKYMMMMGYPHTA

SEQ ID NO: 247626 - protein, 15 aa, Artificial Sequence
  Description of Artificial Sequence: Synthetic peptide
  Seed: LRMKWMMAMKYPITA
LRMKYMMMMGYPITA

SEQ ID NO: 247627 - protein, 15 aa, Artificial Sequence
  Description of Artificial Sequence: Synthetic peptide
  Seed: LRMKWMMAMKYPITA
LRMKYMMMMGYPKTA

SEQ ID NO: 247628 - protein, 15 aa, Artificial Sequence
  Description of Artificial Sequence: Synthetic peptide
  Seed: LRMKWMMAMKYPITA
LRMKYMMMMGYPLTA

SEQ ID NO: 247629 - protein, 15 aa, Artificial Sequence
  Description of Artificial Sequence: Synthetic peptide
  Seed: LRMKWMMAMKYPITA
LRMKYMMMMGYPMTA

SEQ ID NO: 247630 - protein, 15 aa, Artificial Sequence
  Description of Artificial Sequence: Synthetic peptide
  Seed: LRMKWMMAMKYPITA
LRMKYMMMMGYPNTA

SEQ ID NO: 247631 - protein, 15 aa, Artificial Sequence
  Description of Artificial Sequence: Synthetic peptide
  Seed: LRMKWMMAMKYPITA
LRMKYMMMMGYPPTA

SEQ ID NO: 247632 - protein, 15 aa, Artificial Sequence
  Description of Artificial Sequence: Synthetic peptide
  Seed: LRMKWMMAMKYPITA
LRMKYMMMMGYPQTA

SEQ ID NO: 247633 - protein, 15 aa, Artificial Sequence
  Description of Artificial Sequence: Synthetic peptide
  Seed: LRMKWMMAMKYPITA
LRMKYMMMMGYPRTA

SEQ ID NO: 247634 - protein, 15 aa, Artificial Sequence
  Description of Artificial Sequence: Synthetic peptide
  Seed: LRMKWMMAMKYPITA
LRMKYMMMMGYPSTA

SEQ ID NO: 247635 - protein, 15 aa, Artificial Sequence
  Description of Artificial Sequence: Synthetic peptide
  Seed: LRMKWMMAMKYPITA
LRMKYMMMMGYPTTA

SEQ ID NO: 247636 - protein, 15 aa, Artificial Sequence
  Description of Artificial Sequence: Synthetic peptide
  Seed: LRMKWMMAMKYPITA
LRMKYMMMMGYPVTA

SEQ ID NO: 247637 - protein, 15 aa, Artificial Sequence
  Description of Artificial Sequence: Synthetic peptide
  Seed: LRMKWMMAMKYPITA
LRMKYMMMMGYPWTA

SEQ ID NO: 247638 - protein, 15 aa, Artificial Sequence
  Description of Artificial Sequence: Synthetic peptide
  Seed: LRMKWMMAMKYPITA
LRMKYMMMMGYPYTA

SEQ ID NO: 247639 - protein, 15 aa, Artificial Sequence
  Description of Artificial Sequence: Synthetic peptide
  Seed: LRMKWMMAMKYPITA
LRMKYMMMMHYPATA

SEQ ID NO: 247640 - protein, 15 aa, Artificial Sequence
  Description of Artificial Sequence: Synthetic peptide
  Seed: LRMKWMMAMKYPITA
LRMKYMMMMHYPCTA

SEQ ID NO: 247641 - protein, 15 aa, Artificial Sequence
  Description of Artificial Sequence: Synthetic peptide
  Seed: LRMKWMMAMKYPITA
LRMKYMMMMHYPDTA

SEQ ID NO: 247642 - protein, 15 aa, Artificial Sequence
  Description of Artificial Sequence: Synthetic peptide
  Seed: LRMKWMMAMKYPITA
LRMKYMMMMHYPETA

SEQ ID NO: 247643 - protein, 15 aa, Artificial Sequence
  Description of Artificial Sequence: Synthetic peptide
  Seed: LRMKWMMAMKYPITA
LRMKYMMMMHYPFTA

SEQ ID NO: 247644 - protein, 15 aa, Artificial Sequence
  Description of Artificial Sequence: Synthetic peptide
  Seed: LRMKWMMAMKYPITA
LRMKYMMMMHYPGTA

SEQ ID NO: 247645 - protein, 15 aa, Artificial Sequence
  Description of Artificial Sequence: Synthetic peptide
  Seed: LRMKWMMAMKYPITA
LRMKYMMMMHYPHTA

SEQ ID NO: 247646 - protein, 15 aa, Artificial Sequence
  Description of Artificial Sequence: Synthetic peptide
  Seed: LRMKWMMAMKYPITA
LRMKYMMMMHYPITA

SEQ ID NO: 247647 - protein, 15 aa, Artificial Sequence
  Description of Artificial Sequence: Synthetic peptide
  Seed: LRMKWMMAMKYPITA
LRMKYMMMMHYPKTA

SEQ ID NO: 247648 - protein, 15 aa, Artificial Sequence
  Description of Artificial Sequence: Synthetic peptide
  Seed: LRMKWMMAMKYPITA
LRMKYMMMMHYPLTA

SEQ ID NO: 247649 - protein, 15 aa, Artificial Sequence
  Description of Artificial Sequence: Synthetic peptide
  Seed: LRMKWMMAMKYPITA
LRMKYMMMMHYPMTA

SEQ ID NO: 247650 - protein, 15 aa, Artificial Sequence
  Description of Artificial Sequence: Synthetic peptide
  Seed: LRMKWMMAMKYPITA
LRMKYMMMMHYPNTA

SEQ ID NO: 247651 - protein, 15 aa, Artificial Sequence
  Description of Artificial Sequence: Synthetic peptide
  Seed: LRMKWMMAMKYPITA
LRMKYMMMMHYPPTA

SEQ ID NO: 247652 - protein, 15 aa, Artificial Sequence
  Description of Artificial Sequence: Synthetic peptide
  Seed: LRMKWMMAMKYPITA
LRMKYMMMMHYPQTA

SEQ ID NO: 247653 - protein, 15 aa, Artificial Sequence
  Description of Artificial Sequence: Synthetic peptide
  Seed: LRMKWMMAMKYPITA
LRMKYMMMMHYPRTA

SEQ ID NO: 247654 - protein, 15 aa, Artificial Sequence
  Description of Artificial Sequence: Synthetic peptide
  Seed: LRMKWMMAMKYPITA
LRMKYMMMMHYPSTA

SEQ ID NO: 247655 - protein, 15 aa, Artificial Sequence
  Description of Artificial Sequence: Synthetic peptide
  Seed: LRMKWMMAMKYPITA
LRMKYMMMMHYPTTA

SEQ ID NO: 247656 - protein, 15 aa, Artificial Sequence
  Description of Artificial Sequence: Synthetic peptide
  Seed: LRMKWMMAMKYPITA
LRMKYMMMMHYPVTA

SEQ ID NO: 247657 - protein, 15 aa, Artificial Sequence
  Description of Artificial Sequence: Synthetic peptide
  Seed: LRMKWMMAMKYPITA
LRMKYMMMMHYPWTA

SEQ ID NO: 247658 - protein, 15 aa, Artificial Sequence
  Description of Artificial Sequence: Synthetic peptide
  Seed: LRMKWMMAMKYPITA
LRMKYMMMMHYPYTA

SEQ ID NO: 247659 - protein, 15 aa, Artificial Sequence
  Description of Artificial Sequence: Synthetic peptide
  Seed: LRMKWMMAMKYPITA
LRMKYMMMMIYPATA

SEQ ID NO: 247660 - protein, 15 aa, Artificial Sequence
  Description of Artificial Sequence: Synthetic peptide
  Seed: LRMKWMMAMKYPITA
LRMKYMMMMIYPCTA

SEQ ID NO: 247661 - protein, 15 aa, Artificial Sequence
  Description of Artificial Sequence: Synthetic peptide
  Seed: LRMKWMMAMKYPITA
LRMKYMMMMIYPDTA

SEQ ID NO: 247662 - protein, 15 aa, Artificial Sequence
  Description of Artificial Sequence: Synthetic peptide
  Seed: LRMKWMMAMKYPITA
LRMKYMMMMIYPETA

SEQ ID NO: 247663 - protein, 15 aa, Artificial Sequence
  Description of Artificial Sequence: Synthetic peptide
  Seed: LRMKWMMAMKYPITA
LRMKYMMMMIYPFTA

SEQ ID NO: 247664 - protein, 15 aa, Artificial Sequence
  Description of Artificial Sequence: Synthetic peptide
  Seed: LRMKWMMAMKYPITA
LRMKYMMMMIYPGTA

SEQ ID NO: 247665 - protein, 15 aa, Artificial Sequence
  Description of Artificial Sequence: Synthetic peptide
  Seed: LRMKWMMAMKYPITA
LRMKYMMMMIYPHTA

SEQ ID NO: 247666 - protein, 15 aa, Artificial Sequence
  Description of Artificial Sequence: Synthetic peptide
  Seed: LRMKWMMAMKYPITA
LRMKYMMMMIYPITA

SEQ ID NO: 247667 - protein, 15 aa, Artificial Sequence
  Description of Artificial Sequence: Synthetic peptide
  Seed: LRMKWMMAMKYPITA
LRMKYMMMMIYPKTA

SEQ ID NO: 247668 - protein, 15 aa, Artificial Sequence
  Description of Artificial Sequence: Synthetic peptide
  Seed: LRMKWMMAMKYPITA
LRMKYMMMMIYPLTA

SEQ ID NO: 247669 - protein, 15 aa, Artificial Sequence
  Description of Artificial Sequence: Synthetic peptide
  Seed: LRMKWMMAMKYPITA
LRMKYMMMMIYPMTA

SEQ ID NO: 247670 - protein, 15 aa, Artificial Sequence
  Description of Artificial Sequence: Synthetic peptide
  Seed: LRMKWMMAMKYPITA
LRMKYMMMMIYPNTA

SEQ ID NO: 247671 - protein, 15 aa, Artificial Sequence
  Description of Artificial Sequence: Synthetic peptide
  Seed: LRMKWMMAMKYPITA
LRMKYMMMMIYPPTA

SEQ ID NO: 247672 - protein, 15 aa, Artificial Sequence
  Description of Artificial Sequence: Synthetic peptide
  Seed: LRMKWMMAMKYPITA
LRMKYMMMMIYPQTA

SEQ ID NO: 247673 - protein, 15 aa, Artificial Sequence
  Description of Artificial Sequence: Synthetic peptide
  Seed: LRMKWMMAMKYPITA
LRMKYMMMMIYPRTA

SEQ ID NO: 247674 - protein, 15 aa, Artificial Sequence
  Description of Artificial Sequence: Synthetic peptide
  Seed: LRMKWMMAMKYPITA
LRMKYMMMMIYPSTA

SEQ ID NO: 247675 - protein, 15 aa, Artificial Sequence
  Description of Artificial Sequence: Synthetic peptide
  Seed: LRMKWMMAMKYPITA
LRMKYMMMMIYPTTA

SEQ ID NO: 247676 - protein, 15 aa, Artificial Sequence
  Description of Artificial Sequence: Synthetic peptide
  Seed: LRMKWMMAMKYPITA
LRMKYMMMMIYPVTA

SEQ ID NO: 247677 - protein, 15 aa, Artificial Sequence
  Description of Artificial Sequence: Synthetic peptide
  Seed: LRMKWMMAMKYPITA
LRMKYMMMMIYPYTA

SEQ ID NO: 247678 - protein, 15 aa, Artificial Sequence
  Description of Artificial Sequence: Synthetic peptide
  Seed: LRMKWMMAMKYPITA
LRMKYMMMMKYPATA

SEQ ID NO: 247679 - protein, 15 aa, Artificial Sequence
  Description of Artificial Sequence: Synthetic peptide
  Seed: LRMKWMMAMKYPITA
LRMKYMMMMKYPCTA

SEQ ID NO: 247680 - protein, 15 aa, Artificial Sequence
  Description of Artificial Sequence: Synthetic peptide
  Seed: LRMKWMMAMKYPITA
LRMKYMMMMKYPDTA

SEQ ID NO: 247681 - protein, 15 aa, Artificial Sequence
  Description of Artificial Sequence: Synthetic peptide
  Seed: LRMKWMMAMKYPITA
LRMKYMMMMKYPETA

SEQ ID NO: 247682 - protein, 15 aa, Artificial Sequence
  Description of Artificial Sequence: Synthetic peptide
  Seed: LRMKWMMAMKYPITA
LRMKYMMMMKYPFTA

SEQ ID NO: 247683 - protein, 15 aa, Artificial Sequence
  Description of Artificial Sequence: Synthetic peptide
  Seed: LRMKWMMAMKYPITA
LRMKYMMMMKYPGTA

SEQ ID NO: 247684 - protein, 15 aa, Artificial Sequence
  Description of Artificial Sequence: Synthetic peptide
  Seed: LRMKWMMAMKYPITA
LRMKYMMMMKYPHTA

SEQ ID NO: 247685 - protein, 15 aa, Artificial Sequence
  Description of Artificial Sequence: Synthetic peptide
  Seed: LRMKWMMAMKYPITA
LRMKYMMMMKYPITA

SEQ ID NO: 247686 - protein, 15 aa, Artificial Sequence
  Description of Artificial Sequence: Synthetic peptide
  Seed: LRMKWMMAMKYPITA
LRMKYMMMMKYPKTA

SEQ ID NO: 247687 - protein, 15 aa, Artificial Sequence
  Description of Artificial Sequence: Synthetic peptide
  Seed: LRMKWMMAMKYPITA
LRMKYMMMMKYPLTA

SEQ ID NO: 247688 - protein, 15 aa, Artificial Sequence
  Description of Artificial Sequence: Synthetic peptide
  Seed: LRMKWMMAMKYPITA
LRMKYMMMMKYPMTA

SEQ ID NO: 247689 - protein, 15 aa, Artificial Sequence
  Description of Artificial Sequence: Synthetic peptide
  Seed: LRMKWMMAMKYPITA
LRMKYMMMMKYPNTA

SEQ ID NO: 247690 - protein, 15 aa, Artificial Sequence
  Description of Artificial Sequence: Synthetic peptide
  Seed: LRMKWMMAMKYPITA
LRMKYMMMMKYPPTA

SEQ ID NO: 247691 - protein, 15 aa, Artificial Sequence
  Description of Artificial Sequence: Synthetic peptide
  Seed: LRMKWMMAMKYPITA
LRMKYMMMMKYPQTA

SEQ ID NO: 247692 - protein, 15 aa, Artificial Sequence
  Description of Artificial Sequence: Synthetic peptide
  Seed: LRMKWMMAMKYPITA
LRMKYMMMMKYPRTA

SEQ ID NO: 247693 - protein, 15 aa, Artificial Sequence
  Description of Artificial Sequence: Synthetic peptide
  Seed: LRMKWMMAMKYPITA
LRMKYMMMMKYPSTA

SEQ ID NO: 247694 - protein, 15 aa, Artificial Sequence
  Description of Artificial Sequence: Synthetic peptide
  Seed: LRMKWMMAMKYPITA
LRMKYMMMMKYPTTA

SEQ ID NO: 247695 - protein, 15 aa, Artificial Sequence
  Description of Artificial Sequence: Synthetic peptide
  Seed: LRMKWMMAMKYPITA
LRMKYMMMMKYPVTA

SEQ ID NO: 247696 - protein, 15 aa, Artificial Sequence
  Description of Artificial Sequence: Synthetic peptide
  Seed: LRMKWMMAMKYPITA
LRMKYMMMMKYPWTA

SEQ ID NO: 247697 - protein, 15 aa, Artificial Sequence
  Description of Artificial Sequence: Synthetic peptide
  Seed: LRMKWMMAMKYPITA
LRMKYMMMMKYPYTA

SEQ ID NO: 247698 - protein, 15 aa, Artificial Sequence
  Description of Artificial Sequence: Synthetic peptide
  Seed: LRMKWMMAMKYPITA
LRMKYMMMMLYPATA

SEQ ID NO: 247699 - protein, 15 aa, Artificial Sequence
  Description of Artificial Sequence: Synthetic peptide
  Seed: LRMKWMMAMKYPITA
LRMKYMMMMLYPCTA

SEQ ID NO: 247700 - protein, 15 aa, Artificial Sequence
  Description of Artificial Sequence: Synthetic peptide
  Seed: LRMKWMMAMKYPITA
LRMKYMMMMLYPDTA

SEQ ID NO: 247701 - protein, 15 aa, Artificial Sequence
  Description of Artificial Sequence: Synthetic peptide
  Seed: LRMKWMMAMKYPITA
LRMKYMMMMLYPETA

SEQ ID NO: 247702 - protein, 15 aa, Artificial Sequence
  Description of Artificial Sequence: Synthetic peptide
  Seed: LRMKWMMAMKYPITA
LRMKYMMMMLYPGTA

SEQ ID NO: 247703 - protein, 15 aa, Artificial Sequence
  Description of Artificial Sequence: Synthetic peptide
  Seed: LRMKWMMAMKYPITA
LRMKYMMMMLYPHTA

SEQ ID NO: 247704 - protein, 15 aa, Artificial Sequence
  Description of Artificial Sequence: Synthetic peptide
  Seed: LRMKWMMAMKYPITA
LRMKYMMMMLYPITA

SEQ ID NO: 247705 - protein, 15 aa, Artificial Sequence
  Description of Artificial Sequence: Synthetic peptide
  Seed: LRMKWMMAMKYPITA
LRMKYMMMMLYPLTA

SEQ ID NO: 247706 - protein, 15 aa, Artificial Sequence
  Description of Artificial Sequence: Synthetic peptide
  Seed: LRMKWMMAMKYPITA
LRMKYMMMMLYPMTA

SEQ ID NO: 247707 - protein, 15 aa, Artificial Sequence
  Description of Artificial Sequence: Synthetic peptide
  Seed: LRMKWMMAMKYPITA
LRMKYMMMMLYPNTA

SEQ ID NO: 247708 - protein, 15 aa, Artificial Sequence
  Description of Artificial Sequence: Synthetic peptide
  Seed: LRMKWMMAMKYPITA
LRMKYMMMMLYPQTA

SEQ ID NO: 247709 - protein, 15 aa, Artificial Sequence
  Description of Artificial Sequence: Synthetic peptide
  Seed: LRMKWMMAMKYPITA
LRMKYMMMMLYPSTA

SEQ ID NO: 247710 - protein, 15 aa, Artificial Sequence
  Description of Artificial Sequence: Synthetic peptide
  Seed: LRMKWMMAMKYPITA
LRMKYMMMMLYPTTA

SEQ ID NO: 247711 - protein, 15 aa, Artificial Sequence
  Description of Artificial Sequence: Synthetic peptide
  Seed: LRMKWMMAMKYPITA
LRMKYMMMMLYPVTA

SEQ ID NO: 247712 - protein, 15 aa, Artificial Sequence
  Description of Artificial Sequence: Synthetic peptide
  Seed: LRMKWMMAMKYPITA
LRMKYMMMMMYPATA

SEQ ID NO: 247713 - protein, 15 aa, Artificial Sequence
  Description of Artificial Sequence: Synthetic peptide
  Seed: LRMKWMMAMKYPITA
LRMKYMMMMMYPCTA

SEQ ID NO: 247714 - protein, 15 aa, Artificial Sequence
  Description of Artificial Sequence: Synthetic peptide
  Seed: LRMKWMMAMKYPITA
LRMKYMMMMMYPDTA

SEQ ID NO: 247715 - protein, 15 aa, Artificial Sequence
  Description of Artificial Sequence: Synthetic peptide
  Seed: LRMKWMMAMKYPITA
LRMKYMMMMMYPETA

SEQ ID NO: 247716 - protein, 15 aa, Artificial Sequence
  Description of Artificial Sequence: Synthetic peptide
  Seed: LRMKWMMAMKYPITA
LRMKYMMMMMYPFTA

SEQ ID NO: 247717 - protein, 15 aa, Artificial Sequence
  Description of Artificial Sequence: Synthetic peptide
  Seed: LRMKWMMAMKYPITA
LRMKYMMMMMYPGTA

SEQ ID NO: 247718 - protein, 15 aa, Artificial Sequence
  Description of Artificial Sequence: Synthetic peptide
  Seed: LRMKWMMAMKYPITA
LRMKYMMMMMYPHTA

SEQ ID NO: 247719 - protein, 15 aa, Artificial Sequence
  Description of Artificial Sequence: Synthetic peptide
  Seed: LRMKWMMAMKYPITA
LRMKYMMMMMYPITA

SEQ ID NO: 247720 - protein, 15 aa, Artificial Sequence
  Description of Artificial Sequence: Synthetic peptide
  Seed: LRMKWMMAMKYPITA
LRMKYMMMMMYPLTA

SEQ ID NO: 247721 - protein, 15 aa, Artificial Sequence
  Description of Artificial Sequence: Synthetic peptide
  Seed: LRMKWMMAMKYPITA
LRMKYMMMMMYPMTA

SEQ ID NO: 247722 - protein, 15 aa, Artificial Sequence
  Description of Artificial Sequence: Synthetic peptide
  Seed: LRMKWMMAMKYPITA
LRMKYMMMMMYPNTA

SEQ ID NO: 247723 - protein, 15 aa, Artificial Sequence
  Description of Artificial Sequence: Synthetic peptide
  Seed: LRMKWMMAMKYPITA
LRMKYMMMMMYPPTA

SEQ ID NO: 247724 - protein, 15 aa, Artificial Sequence
  Description of Artificial Sequence: Synthetic peptide
  Seed: LRMKWMMAMKYPITA
LRMKYMMMMMYPQTA

SEQ ID NO: 247725 - protein, 15 aa, Artificial Sequence
  Description of Artificial Sequence: Synthetic peptide
  Seed: LRMKWMMAMKYPITA
LRMKYMMMMMYPRTA

SEQ ID NO: 247726 - protein, 15 aa, Artificial Sequence
  Description of Artificial Sequence: Synthetic peptide
  Seed: LRMKWMMAMKYPITA
LRMKYMMMMMYPSTA

SEQ ID NO: 247727 - protein, 15 aa, Artificial Sequence
  Description of Artificial Sequence: Synthetic peptide
  Seed: LRMKWMMAMKYPITA
LRMKYMMMMMYPTTA

SEQ ID NO: 247728 - protein, 15 aa, Artificial Sequence
  Description of Artificial Sequence: Synthetic peptide
  Seed: LRMKWMMAMKYPITA
LRMKYMMMMMYPVTA

SEQ ID NO: 247729 - protein, 15 aa, Artificial Sequence
  Description of Artificial Sequence: Synthetic peptide
  Seed: LRMKWMMAMKYPITA
LRMKYMMMMNYPATA

SEQ ID NO: 247730 - protein, 15 aa, Artificial Sequence
  Description of Artificial Sequence: Synthetic peptide
  Seed: LRMKWMMAMKYPITA
LRMKYMMMMNYPCTA

SEQ ID NO: 247731 - protein, 15 aa, Artificial Sequence
  Description of Artificial Sequence: Synthetic peptide
  Seed: LRMKWMMAMKYPITA
LRMKYMMMMNYPDTA

SEQ ID NO: 247732 - protein, 15 aa, Artificial Sequence
  Description of Artificial Sequence: Synthetic peptide
  Seed: LRMKWMMAMKYPITA
LRMKYMMMMNYPETA

SEQ ID NO: 247733 - protein, 15 aa, Artificial Sequence
  Description of Artificial Sequence: Synthetic peptide
  Seed: LRMKWMMAMKYPITA
LRMKYMMMMNYPFTA

SEQ ID NO: 247734 - protein, 15 aa, Artificial Sequence
  Description of Artificial Sequence: Synthetic peptide
  Seed: LRMKWMMAMKYPITA
LRMKYMMMMNYPGTA

SEQ ID NO: 247735 - protein, 15 aa, Artificial Sequence
  Description of Artificial Sequence: Synthetic peptide
  Seed: LRMKWMMAMKYPITA
LRMKYMMMMNYPHTA

SEQ ID NO: 247736 - protein, 15 aa, Artificial Sequence
  Description of Artificial Sequence: Synthetic peptide
  Seed: LRMKWMMAMKYPITA
LRMKYMMMMNYPITA

SEQ ID NO: 247737 - protein, 15 aa, Artificial Sequence
  Description of Artificial Sequence: Synthetic peptide
  Seed: LRMKWMMAMKYPITA
LRMKYMMMMNYPKTA

SEQ ID NO: 247738 - protein, 15 aa, Artificial Sequence
  Description of Artificial Sequence: Synthetic peptide
  Seed: LRMKWMMAMKYPITA
LRMKYMMMMNYPLTA

SEQ ID NO: 247739 - protein, 15 aa, Artificial Sequence
  Description of Artificial Sequence: Synthetic peptide
  Seed: LRMKWMMAMKYPITA
LRMKYMMMMNYPMTA

SEQ ID NO: 247740 - protein, 15 aa, Artificial Sequence
  Description of Artificial Sequence: Synthetic peptide
  Seed: LRMKWMMAMKYPITA
LRMKYMMMMNYPNTA

SEQ ID NO: 247741 - protein, 15 aa, Artificial Sequence
  Description of Artificial Sequence: Synthetic peptide
  Seed: LRMKWMMAMKYPITA
LRMKYMMMMNYPPTA

SEQ ID NO: 247742 - protein, 15 aa, Artificial Sequence
  Description of Artificial Sequence: Synthetic peptide
  Seed: LRMKWMMAMKYPITA
LRMKYMMMMNYPQTA

SEQ ID NO: 247743 - protein, 15 aa, Artificial Sequence
  Description of Artificial Sequence: Synthetic peptide
  Seed: LRMKWMMAMKYPITA
LRMKYMMMMNYPRTA

SEQ ID NO: 247744 - protein, 15 aa, Artificial Sequence
  Description of Artificial Sequence: Synthetic peptide
  Seed: LRMKWMMAMKYPITA
LRMKYMMMMNYPSTA

SEQ ID NO: 247745 - protein, 15 aa, Artificial Sequence
  Description of Artificial Sequence: Synthetic peptide
  Seed: LRMKWMMAMKYPITA
LRMKYMMMMNYPTTA

SEQ ID NO: 247746 - protein, 15 aa, Artificial Sequence
  Description of Artificial Sequence: Synthetic peptide
  Seed: LRMKWMMAMKYPITA
LRMKYMMMMNYPVTA

SEQ ID NO: 247747 - protein, 15 aa, Artificial Sequence
  Description of Artificial Sequence: Synthetic peptide
  Seed: LRMKWMMAMKYPITA
LRMKYMMMMNYPWTA

SEQ ID NO: 247748 - protein, 15 aa, Artificial Sequence
  Description of Artificial Sequence: Synthetic peptide
  Seed: LRMKWMMAMKYPITA
LRMKYMMMMNYPYTA

SEQ ID NO: 247749 - protein, 15 aa, Artificial Sequence
  Description of Artificial Sequence: Synthetic peptide
  Seed: LRMKWMMAMKYPITA
LRMKYMMMMPYPATA

SEQ ID NO: 247750 - protein, 15 aa, Artificial Sequence
  Description of Artificial Sequence: Synthetic peptide
  Seed: LRMKWMMAMKYPITA
LRMKYMMMMPYPCTA

SEQ ID NO: 247751 - protein, 15 aa, Artificial Sequence
  Description of Artificial Sequence: Synthetic peptide
  Seed: LRMKWMMAMKYPITA
LRMKYMMMMPYPDTA

SEQ ID NO: 247752 - protein, 15 aa, Artificial Sequence
  Description of Artificial Sequence: Synthetic peptide
  Seed: LRMKWMMAMKYPITA
LRMKYMMMMPYPETA

SEQ ID NO: 247753 - protein, 15 aa, Artificial Sequence
  Description of Artificial Sequence: Synthetic peptide
  Seed: LRMKWMMAMKYPITA
LRMKYMMMMPYPFTA

SEQ ID NO: 247754 - protein, 15 aa, Artificial Sequence
  Description of Artificial Sequence: Synthetic peptide
  Seed: LRMKWMMAMKYPITA
LRMKYMMMMPYPGTA

SEQ ID NO: 247755 - protein, 15 aa, Artificial Sequence
  Description of Artificial Sequence: Synthetic peptide
  Seed: LRMKWMMAMKYPITA
LRMKYMMMMPYPHTA

SEQ ID NO: 247756 - protein, 15 aa, Artificial Sequence
  Description of Artificial Sequence: Synthetic peptide
  Seed: LRMKWMMAMKYPITA
LRMKYMMMMPYPITA

SEQ ID NO: 247757 - protein, 15 aa, Artificial Sequence
  Description of Artificial Sequence: Synthetic peptide
  Seed: LRMKWMMAMKYPITA
LRMKYMMMMPYPKTA

SEQ ID NO: 247758 - protein, 15 aa, Artificial Sequence
  Description of Artificial Sequence: Synthetic peptide
  Seed: LRMKWMMAMKYPITA
LRMKYMMMMPYPLTA

SEQ ID NO: 247759 - protein, 15 aa, Artificial Sequence
  Description of Artificial Sequence: Synthetic peptide
  Seed: LRMKWMMAMKYPITA
LRMKYMMMMPYPMTA

SEQ ID NO: 247760 - protein, 15 aa, Artificial Sequence
  Description of Artificial Sequence: Synthetic peptide
  Seed: LRMKWMMAMKYPITA
LRMKYMMMMPYPNTA

SEQ ID NO: 247761 - protein, 15 aa, Artificial Sequence
  Description of Artificial Sequence: Synthetic peptide
  Seed: LRMKWMMAMKYPITA
LRMKYMMMMPYPPTA

SEQ ID NO: 247762 - protein, 15 aa, Artificial Sequence
  Description of Artificial Sequence: Synthetic peptide
  Seed: LRMKWMMAMKYPITA
LRMKYMMMMPYPQTA

SEQ ID NO: 247763 - protein, 15 aa, Artificial Sequence
  Description of Artificial Sequence: Synthetic peptide
  Seed: LRMKWMMAMKYPITA
LRMKYMMMMPYPRTA

SEQ ID NO: 247764 - protein, 15 aa, Artificial Sequence
  Description of Artificial Sequence: Synthetic peptide
  Seed: LRMKWMMAMKYPITA
LRMKYMMMMPYPSTA

SEQ ID NO: 247765 - protein, 15 aa, Artificial Sequence
  Description of Artificial Sequence: Synthetic peptide
  Seed: LRMKWMMAMKYPITA
LRMKYMMMMPYPTTA

SEQ ID NO: 247766 - protein, 15 aa, Artificial Sequence
  Description of Artificial Sequence: Synthetic peptide
  Seed: LRMKWMMAMKYPITA
LRMKYMMMMPYPVTA

SEQ ID NO: 247767 - protein, 15 aa, Artificial Sequence
  Description of Artificial Sequence: Synthetic peptide
  Seed: LRMKWMMAMKYPITA
LRMKYMMMMPYPWTA

SEQ ID NO: 247768 - protein, 15 aa, Artificial Sequence
  Description of Artificial Sequence: Synthetic peptide
  Seed: LRMKWMMAMKYPITA
LRMKYMMMMPYPYTA

SEQ ID NO: 247769 - protein, 15 aa, Artificial Sequence
  Description of Artificial Sequence: Synthetic peptide
  Seed: LRMKWMMAMKYPITA
LRMKYMMMMQYPATA

SEQ ID NO: 247770 - protein, 15 aa, Artificial Sequence
  Description of Artificial Sequence: Synthetic peptide
  Seed: LRMKWMMAMKYPITA
LRMKYMMMMQYPCTA

SEQ ID NO: 247771 - protein, 15 aa, Artificial Sequence
  Description of Artificial Sequence: Synthetic peptide
  Seed: LRMKWMMAMKYPITA
LRMKYMMMMQYPDTA

SEQ ID NO: 247772 - protein, 15 aa, Artificial Sequence
  Description of Artificial Sequence: Synthetic peptide
  Seed: LRMKWMMAMKYPITA
LRMKYMMMMQYPETA

SEQ ID NO: 247773 - protein, 15 aa, Artificial Sequence
  Description of Artificial Sequence: Synthetic peptide
  Seed: LRMKWMMAMKYPITA
LRMKYMMMMQYPFTA

SEQ ID NO: 247774 - protein, 15 aa, Artificial Sequence
  Description of Artificial Sequence: Synthetic peptide
  Seed: LRMKWMMAMKYPITA
LRMKYMMMMQYPGTA

SEQ ID NO: 247775 - protein, 15 aa, Artificial Sequence
  Description of Artificial Sequence: Synthetic peptide
  Seed: LRMKWMMAMKYPITA
LRMKYMMMMQYPHTA

SEQ ID NO: 247776 - protein, 15 aa, Artificial Sequence
  Description of Artificial Sequence: Synthetic peptide
  Seed: LRMKWMMAMKYPITA
LRMKYMMMMQYPITA

SEQ ID NO: 247777 - protein, 15 aa, Artificial Sequence
  Description of Artificial Sequence: Synthetic peptide
  Seed: LRMKWMMAMKYPITA
LRMKYMMMMQYPKTA

SEQ ID NO: 247778 - protein, 15 aa, Artificial Sequence
  Description of Artificial Sequence: Synthetic peptide
  Seed: LRMKWMMAMKYPITA
LRMKYMMMMQYPLTA

SEQ ID NO: 247779 - protein, 15 aa, Artificial Sequence
  Description of Artificial Sequence: Synthetic peptide
  Seed: LRMKWMMAMKYPITA
LRMKYMMMMQYPMTA

SEQ ID NO: 247780 - protein, 15 aa, Artificial Sequence
  Description of Artificial Sequence: Synthetic peptide
  Seed: LRMKWMMAMKYPITA
LRMKYMMMMQYPNTA

SEQ ID NO: 247781 - protein, 15 aa, Artificial Sequence
  Description of Artificial Sequence: Synthetic peptide
  Seed: LRMKWMMAMKYPITA
LRMKYMMMMQYPPTA

SEQ ID NO: 247782 - protein, 15 aa, Artificial Sequence
  Description of Artificial Sequence: Synthetic peptide
  Seed: LRMKWMMAMKYPITA
LRMKYMMMMQYPQTA

SEQ ID NO: 247783 - protein, 15 aa, Artificial Sequence
  Description of Artificial Sequence: Synthetic peptide
  Seed: LRMKWMMAMKYPITA
LRMKYMMMMQYPRTA

SEQ ID NO: 247784 - protein, 15 aa, Artificial Sequence
  Description of Artificial Sequence: Synthetic peptide
  Seed: LRMKWMMAMKYPITA
LRMKYMMMMQYPSTA

SEQ ID NO: 247785 - protein, 15 aa, Artificial Sequence
  Description of Artificial Sequence: Synthetic peptide
  Seed: LRMKWMMAMKYPITA
LRMKYMMMMQYPTTA

SEQ ID NO: 247786 - protein, 15 aa, Artificial Sequence
  Description of Artificial Sequence: Synthetic peptide
  Seed: LRMKWMMAMKYPITA
LRMKYMMMMQYPVTA

SEQ ID NO: 247787 - protein, 15 aa, Artificial Sequence
  Description of Artificial Sequence: Synthetic peptide
  Seed: LRMKWMMAMKYPITA
LRMKYMMMMQYPWTA

SEQ ID NO: 247788 - protein, 15 aa, Artificial Sequence
  Description of Artificial Sequence: Synthetic peptide
  Seed: LRMKWMMAMKYPITA
LRMKYMMMMQYPYTA

SEQ ID NO: 247789 - protein, 15 aa, Artificial Sequence
  Description of Artificial Sequence: Synthetic peptide
  Seed: LRMKWMMAMKYPITA
LRMKYMMMMRYPATA

SEQ ID NO: 247790 - protein, 15 aa, Artificial Sequence
  Description of Artificial Sequence: Synthetic peptide
  Seed: LRMKWMMAMKYPITA
LRMKYMMMMRYPCTA

SEQ ID NO: 247791 - protein, 15 aa, Artificial Sequence
  Description of Artificial Sequence: Synthetic peptide
  Seed: LRMKWMMAMKYPITA
LRMKYMMMMRYPDTA

SEQ ID NO: 247792 - protein, 15 aa, Artificial Sequence
  Description of Artificial Sequence: Synthetic peptide
  Seed: LRMKWMMAMKYPITA
LRMKYMMMMRYPETA

SEQ ID NO: 247793 - protein, 15 aa, Artificial Sequence
  Description of Artificial Sequence: Synthetic peptide
  Seed: LRMKWMMAMKYPITA
LRMKYMMMMRYPFTA

SEQ ID NO: 247794 - protein, 15 aa, Artificial Sequence
  Description of Artificial Sequence: Synthetic peptide
  Seed: LRMKWMMAMKYPITA
LRMKYMMMMRYPGTA

SEQ ID NO: 247795 - protein, 15 aa, Artificial Sequence
  Description of Artificial Sequence: Synthetic peptide
  Seed: LRMKWMMAMKYPITA
LRMKYMMMMRYPHTA

SEQ ID NO: 247796 - protein, 15 aa, Artificial Sequence
  Description of Artificial Sequence: Synthetic peptide
  Seed: LRMKWMMAMKYPITA
LRMKYMMMMRYPITA

SEQ ID NO: 247797 - protein, 15 aa, Artificial Sequence
  Description of Artificial Sequence: Synthetic peptide
  Seed: LRMKWMMAMKYPITA
LRMKYMMMMRYPKTA

SEQ ID NO: 247798 - protein, 15 aa, Artificial Sequence
  Description of Artificial Sequence: Synthetic peptide
  Seed: LRMKWMMAMKYPITA
LRMKYMMMMRYPLTA

SEQ ID NO: 247799 - protein, 15 aa, Artificial Sequence
  Description of Artificial Sequence: Synthetic peptide
  Seed: LRMKWMMAMKYPITA
LRMKYMMMMRYPMTA

SEQ ID NO: 247800 - protein, 15 aa, Artificial Sequence
  Description of Artificial Sequence: Synthetic peptide
  Seed: LRMKWMMAMKYPITA
LRMKYMMMMRYPNTA

SEQ ID NO: 247801 - protein, 15 aa, Artificial Sequence
  Description of Artificial Sequence: Synthetic peptide
  Seed: LRMKWMMAMKYPITA
LRMKYMMMMRYPPTA

SEQ ID NO: 247802 - protein, 15 aa, Artificial Sequence
  Description of Artificial Sequence: Synthetic peptide
  Seed: LRMKWMMAMKYPITA
LRMKYMMMMRYPQTA

SEQ ID NO: 247803 - protein, 15 aa, Artificial Sequence
  Description of Artificial Sequence: Synthetic peptide
  Seed: LRMKWMMAMKYPITA
LRMKYMMMMRYPRTA

SEQ ID NO: 247804 - protein, 15 aa, Artificial Sequence
  Description of Artificial Sequence: Synthetic peptide
  Seed: LRMKWMMAMKYPITA
LRMKYMMMMRYPSTA

SEQ ID NO: 247805 - protein, 15 aa, Artificial Sequence
  Description of Artificial Sequence: Synthetic peptide
  Seed: LRMKWMMAMKYPITA
LRMKYMMMMRYPTTA

SEQ ID NO: 247806 - protein, 15 aa, Artificial Sequence
  Description of Artificial Sequence: Synthetic peptide
  Seed: LRMKWMMAMKYPITA
LRMKYMMMMRYPVTA

SEQ ID NO: 247807 - protein, 15 aa, Artificial Sequence
  Description of Artificial Sequence: Synthetic peptide
  Seed: LRMKWMMAMKYPITA
LRMKYMMMMRYPWTA

SEQ ID NO: 247808 - protein, 15 aa, Artificial Sequence
  Description of Artificial Sequence: Synthetic peptide
  Seed: LRMKWMMAMKYPITA
LRMKYMMMMRYPYTA

SEQ ID NO: 247809 - protein, 15 aa, Artificial Sequence
  Description of Artificial Sequence: Synthetic peptide
  Seed: LRMKWMMAMKYPITA
LRMKYMMMMSYPATA

SEQ ID NO: 247810 - protein, 15 aa, Artificial Sequence
  Description of Artificial Sequence: Synthetic peptide
  Seed: LRMKWMMAMKYPITA
LRMKYMMMMSYPCTA

SEQ ID NO: 247811 - protein, 15 aa, Artificial Sequence
  Description of Artificial Sequence: Synthetic peptide
  Seed: LRMKWMMAMKYPITA
LRMKYMMMMSYPDTA

SEQ ID NO: 247812 - protein, 15 aa, Artificial Sequence
  Description of Artificial Sequence: Synthetic peptide
  Seed: LRMKWMMAMKYPITA
LRMKYMMMMSYPETA

SEQ ID NO: 247813 - protein, 15 aa, Artificial Sequence
  Description of Artificial Sequence: Synthetic peptide
  Seed: LRMKWMMAMKYPITA
LRMKYMMMMSYPFTA

SEQ ID NO: 247814 - protein, 15 aa, Artificial Sequence
  Description of Artificial Sequence: Synthetic peptide
  Seed: LRMKWMMAMKYPITA
LRMKYMMMMSYPGTA

SEQ ID NO: 247815 - protein, 15 aa, Artificial Sequence
  Description of Artificial Sequence: Synthetic peptide
  Seed: LRMKWMMAMKYPITA
LRMKYMMMMSYPHTA

SEQ ID NO: 247816 - protein, 15 aa, Artificial Sequence
  Description of Artificial Sequence: Synthetic peptide
  Seed: LRMKWMMAMKYPITA
LRMKYMMMMSYPITA

SEQ ID NO: 247817 - protein, 15 aa, Artificial Sequence
  Description of Artificial Sequence: Synthetic peptide
  Seed: LRMKWMMAMKYPITA
LRMKYMMMMSYPKTA

SEQ ID NO: 247818 - protein, 15 aa, Artificial Sequence
  Description of Artificial Sequence: Synthetic peptide
  Seed: LRMKWMMAMKYPITA
LRMKYMMMMSYPLTA

SEQ ID NO: 247819 - protein, 15 aa, Artificial Sequence
  Description of Artificial Sequence: Synthetic peptide
  Seed: LRMKWMMAMKYPITA
LRMKYMMMMSYPMTA

SEQ ID NO: 247820 - protein, 15 aa, Artificial Sequence
  Description of Artificial Sequence: Synthetic peptide
  Seed: LRMKWMMAMKYPITA
LRMKYMMMMSYPNTA

SEQ ID NO: 247821 - protein, 15 aa, Artificial Sequence
  Description of Artificial Sequence: Synthetic peptide
  Seed: LRMKWMMAMKYPITA
LRMKYMMMMSYPPTA

SEQ ID NO: 247822 - protein, 15 aa, Artificial Sequence
  Description of Artificial Sequence: Synthetic peptide
  Seed: LRMKWMMAMKYPITA
LRMKYMMMMSYPQTA

SEQ ID NO: 247823 - protein, 15 aa, Artificial Sequence
  Description of Artificial Sequence: Synthetic peptide
  Seed: LRMKWMMAMKYPITA
LRMKYMMMMSYPRTA

SEQ ID NO: 247824 - protein, 15 aa, Artificial Sequence
  Description of Artificial Sequence: Synthetic peptide
  Seed: LRMKWMMAMKYPITA
LRMKYMMMMSYPSTA

SEQ ID NO: 247825 - protein, 15 aa, Artificial Sequence
  Description of Artificial Sequence: Synthetic peptide
  Seed: LRMKWMMAMKYPITA
LRMKYMMMMSYPTTA

SEQ ID NO: 247826 - protein, 15 aa, Artificial Sequence
  Description of Artificial Sequence: Synthetic peptide
  Seed: LRMKWMMAMKYPITA
LRMKYMMMMSYPVTA

SEQ ID NO: 247827 - protein, 15 aa, Artificial Sequence
  Description of Artificial Sequence: Synthetic peptide
  Seed: LRMKWMMAMKYPITA
LRMKYMMMMSYPWTA

SEQ ID NO: 247828 - protein, 15 aa, Artificial Sequence
  Description of Artificial Sequence: Synthetic peptide
  Seed: LRMKWMMAMKYPITA
LRMKYMMMMSYPYTA

SEQ ID NO: 247829 - protein, 15 aa, Artificial Sequence
  Description of Artificial Sequence: Synthetic peptide
  Seed: LRMKWMMAMKYPITA
LRMKYMMMMTYPATA

SEQ ID NO: 247830 - protein, 15 aa, Artificial Sequence
  Description of Artificial Sequence: Synthetic peptide
  Seed: LRMKWMMAMKYPITA
LRMKYMMMMTYPCTA

SEQ ID NO: 247831 - protein, 15 aa, Artificial Sequence
  Description of Artificial Sequence: Synthetic peptide
  Seed: LRMKWMMAMKYPITA
LRMKYMMMMTYPDTA

SEQ ID NO: 247832 - protein, 15 aa, Artificial Sequence
  Description of Artificial Sequence: Synthetic peptide
  Seed: LRMKWMMAMKYPITA
LRMKYMMMMTYPETA

SEQ ID NO: 247833 - protein, 15 aa, Artificial Sequence
  Description of Artificial Sequence: Synthetic peptide
  Seed: LRMKWMMAMKYPITA
LRMKYMMMMTYPFTA

SEQ ID NO: 247834 - protein, 15 aa, Artificial Sequence
  Description of Artificial Sequence: Synthetic peptide
  Seed: LRMKWMMAMKYPITA
LRMKYMMMMTYPGTA

SEQ ID NO: 247835 - protein, 15 aa, Artificial Sequence
  Description of Artificial Sequence: Synthetic peptide
  Seed: LRMKWMMAMKYPITA
LRMKYMMMMTYPHTA

SEQ ID NO: 247836 - protein, 15 aa, Artificial Sequence
  Description of Artificial Sequence: Synthetic peptide
  Seed: LRMKWMMAMKYPITA
LRMKYMMMMTYPITA

SEQ ID NO: 247837 - protein, 15 aa, Artificial Sequence
  Description of Artificial Sequence: Synthetic peptide
  Seed: LRMKWMMAMKYPITA
LRMKYMMMMTYPKTA

SEQ ID NO: 247838 - protein, 15 aa, Artificial Sequence
  Description of Artificial Sequence: Synthetic peptide
  Seed: LRMKWMMAMKYPITA
LRMKYMMMMTYPLTA

SEQ ID NO: 247839 - protein, 15 aa, Artificial Sequence
  Description of Artificial Sequence: Synthetic peptide
  Seed: LRMKWMMAMKYPITA
LRMKYMMMMTYPMTA

SEQ ID NO: 247840 - protein, 15 aa, Artificial Sequence
  Description of Artificial Sequence: Synthetic peptide
  Seed: LRMKWMMAMKYPITA
LRMKYMMMMTYPNTA

SEQ ID NO: 247841 - protein, 15 aa, Artificial Sequence
  Description of Artificial Sequence: Synthetic peptide
  Seed: LRMKWMMAMKYPITA
LRMKYMMMMTYPPTA

SEQ ID NO: 247842 - protein, 15 aa, Artificial Sequence
  Description of Artificial Sequence: Synthetic peptide
  Seed: LRMKWMMAMKYPITA
LRMKYMMMMTYPQTA

SEQ ID NO: 247843 - protein, 15 aa, Artificial Sequence
  Description of Artificial Sequence: Synthetic peptide
  Seed: LRMKWMMAMKYPITA
LRMKYMMMMTYPRTA

SEQ ID NO: 247844 - protein, 15 aa, Artificial Sequence
  Description of Artificial Sequence: Synthetic peptide
  Seed: LRMKWMMAMKYPITA
LRMKYMMMMTYPSTA

SEQ ID NO: 247845 - protein, 15 aa, Artificial Sequence
  Description of Artificial Sequence: Synthetic peptide
  Seed: LRMKWMMAMKYPITA
LRMKYMMMMTYPTTA

SEQ ID NO: 247846 - protein, 15 aa, Artificial Sequence
  Description of Artificial Sequence: Synthetic peptide
  Seed: LRMKWMMAMKYPITA
LRMKYMMMMTYPVTA

SEQ ID NO: 247847 - protein, 15 aa, Artificial Sequence
  Description of Artificial Sequence: Synthetic peptide
  Seed: LRMKWMMAMKYPITA
LRMKYMMMMTYPWTA

SEQ ID NO: 247848 - protein, 15 aa, Artificial Sequence
  Description of Artificial Sequence: Synthetic peptide
  Seed: LRMKWMMAMKYPITA
LRMKYMMMMTYPYTA

SEQ ID NO: 247849 - protein, 15 aa, Artificial Sequence
  Description of Artificial Sequence: Synthetic peptide
  Seed: LRMKWMMAMKYPITA
LRMKYMMMMVYPATA

SEQ ID NO: 247850 - protein, 15 aa, Artificial Sequence
  Description of Artificial Sequence: Synthetic peptide
  Seed: LRMKWMMAMKYPITA
LRMKYMMMMVYPCTA

SEQ ID NO: 247851 - protein, 15 aa, Artificial Sequence
  Description of Artificial Sequence: Synthetic peptide
  Seed: LRMKWMMAMKYPITA
LRMKYMMMMVYPDTA

SEQ ID NO: 247852 - protein, 15 aa, Artificial Sequence
  Description of Artificial Sequence: Synthetic peptide
  Seed: LRMKWMMAMKYPITA
LRMKYMMMMVYPETA

SEQ ID NO: 247853 - protein, 15 aa, Artificial Sequence
  Description of Artificial Sequence: Synthetic peptide
  Seed: LRMKWMMAMKYPITA
LRMKYMMMMVYPFTA

SEQ ID NO: 247854 - protein, 15 aa, Artificial Sequence
  Description of Artificial Sequence: Synthetic peptide
  Seed: LRMKWMMAMKYPITA
LRMKYMMMMVYPGTA

SEQ ID NO: 247855 - protein, 15 aa, Artificial Sequence
  Description of Artificial Sequence: Synthetic peptide
  Seed: LRMKWMMAMKYPITA
LRMKYMMMMVYPHTA

SEQ ID NO: 247856 - protein, 15 aa, Artificial Sequence
  Description of Artificial Sequence: Synthetic peptide
  Seed: LRMKWMMAMKYPITA
LRMKYMMMMVYPITA

SEQ ID NO: 247857 - protein, 15 aa, Artificial Sequence
  Description of Artificial Sequence: Synthetic peptide
  Seed: LRMKWMMAMKYPITA
LRMKYMMMMVYPKTA

SEQ ID NO: 247858 - protein, 15 aa, Artificial Sequence
  Description of Artificial Sequence: Synthetic peptide
  Seed: LRMKWMMAMKYPITA
LRMKYMMMMVYPLTA

SEQ ID NO: 247859 - protein, 15 aa, Artificial Sequence
  Description of Artificial Sequence: Synthetic peptide
  Seed: LRMKWMMAMKYPITA
LRMKYMMMMVYPMTA

SEQ ID NO: 247860 - protein, 15 aa, Artificial Sequence
  Description of Artificial Sequence: Synthetic peptide
  Seed: LRMKWMMAMKYPITA
LRMKYMMMMVYPNTA

SEQ ID NO: 247861 - protein, 15 aa, Artificial Sequence
  Description of Artificial Sequence: Synthetic peptide
  Seed: LRMKWMMAMKYPITA
LRMKYMMMMVYPPTA

SEQ ID NO: 247862 - protein, 15 aa, Artificial Sequence
  Description of Artificial Sequence: Synthetic peptide
  Seed: LRMKWMMAMKYPITA
LRMKYMMMMVYPQTA

SEQ ID NO: 247863 - protein, 15 aa, Artificial Sequence
  Description of Artificial Sequence: Synthetic peptide
  Seed: LRMKWMMAMKYPITA
LRMKYMMMMVYPRTA

SEQ ID NO: 247864 - protein, 15 aa, Artificial Sequence
  Description of Artificial Sequence: Synthetic peptide
  Seed: LRMKWMMAMKYPITA
LRMKYMMMMVYPSTA

SEQ ID NO: 247865 - protein, 15 aa, Artificial Sequence
  Description of Artificial Sequence: Synthetic peptide
  Seed: LRMKWMMAMKYPITA
LRMKYMMMMVYPTTA

SEQ ID NO: 247866 - protein, 15 aa, Artificial Sequence
  Description of Artificial Sequence: Synthetic peptide
  Seed: LRMKWMMAMKYPITA
LRMKYMMMMVYPVTA

SEQ ID NO: 247867 - protein, 15 aa, Artificial Sequence
  Description of Artificial Sequence: Synthetic peptide
  Seed: LRMKWMMAMKYPITA
LRMKYMMMMVYPWTA

SEQ ID NO: 247868 - protein, 15 aa, Artificial Sequence
  Description of Artificial Sequence: Synthetic peptide
  Seed: LRMKWMMAMKYPITA
LRMKYMMMMVYPYTA

SEQ ID NO: 247869 - protein, 15 aa, Artificial Sequence
  Description of Artificial Sequence: Synthetic peptide
  Seed: LRMKWMMAMKYPITA
LRMKYMMMMWYPATA

SEQ ID NO: 247870 - protein, 15 aa, Artificial Sequence
  Description of Artificial Sequence: Synthetic peptide
  Seed: LRMKWMMAMKYPITA
LRMKYMMMMWYPHTA

SEQ ID NO: 247871 - protein, 15 aa, Artificial Sequence
  Description of Artificial Sequence: Synthetic peptide
  Seed: LRMKWMMAMKYPITA
LRMKYMMMMWYPITA

SEQ ID NO: 247872 - protein, 15 aa, Artificial Sequence
  Description of Artificial Sequence: Synthetic peptide
  Seed: LRMKWMMAMKYPITA
LRMKYMMMMWYPLTA

SEQ ID NO: 247873 - protein, 15 aa, Artificial Sequence
  Description of Artificial Sequence: Synthetic peptide
  Seed: LRMKWMMAMKYPITA
LRMKYMMMMWYPMTA

SEQ ID NO: 247874 - protein, 15 aa, Artificial Sequence
  Description of Artificial Sequence: Synthetic peptide
  Seed: LRMKWMMAMKYPITA
LRMKYMMMMWYPNTA

SEQ ID NO: 247875 - protein, 15 aa, Artificial Sequence
  Description of Artificial Sequence: Synthetic peptide
  Seed: LRMKWMMAMKYPITA
LRMKYMMMMWYPQTA

SEQ ID NO: 247876 - protein, 15 aa, Artificial Sequence
  Description of Artificial Sequence: Synthetic peptide
  Seed: LRMKWMMAMKYPITA
LRMKYMMMMWYPSTA

SEQ ID NO: 247877 - protein, 15 aa, Artificial Sequence
  Description of Artificial Sequence: Synthetic peptide
  Seed: LRMKWMMAMKYPITA
LRMKYMMMMWYPTTA

SEQ ID NO: 247878 - protein, 15 aa, Artificial Sequence
  Description of Artificial Sequence: Synthetic peptide
  Seed: LRMKWMMAMKYPITA
LRMKYMMMMWYPVTA

SEQ ID NO: 247879 - protein, 15 aa, Artificial Sequence
  Description of Artificial Sequence: Synthetic peptide
  Seed: LRMKWMMAMKYPITA
LRMKYMMMMYYPATA

SEQ ID NO: 247880 - protein, 15 aa, Artificial Sequence
  Description of Artificial Sequence: Synthetic peptide
  Seed: LRMKWMMAMKYPITA
LRMKYMMMMYYPDTA

SEQ ID NO: 247881 - protein, 15 aa, Artificial Sequence
  Description of Artificial Sequence: Synthetic peptide
  Seed: LRMKWMMAMKYPITA
LRMKYMMMMYYPETA

SEQ ID NO: 247882 - protein, 15 aa, Artificial Sequence
  Description of Artificial Sequence: Synthetic peptide
  Seed: LRMKWMMAMKYPITA
LRMKYMMMMYYPGTA

SEQ ID NO: 247883 - protein, 15 aa, Artificial Sequence
  Description of Artificial Sequence: Synthetic peptide
  Seed: LRMKWMMAMKYPITA
LRMKYMMMMYYPHTA

SEQ ID NO: 247884 - protein, 15 aa, Artificial Sequence
  Description of Artificial Sequence: Synthetic peptide
  Seed: LRMKWMMAMKYPITA
LRMKYMMMMYYPITA

SEQ ID NO: 247885 - protein, 15 aa, Artificial Sequence
  Description of Artificial Sequence: Synthetic peptide
  Seed: LRMKWMMAMKYPITA
LRMKYMMMMYYPLTA

SEQ ID NO: 247886 - protein, 15 aa, Artificial Sequence
  Description of Artificial Sequence: Synthetic peptide
  Seed: LRMKWMMAMKYPITA
LRMKYMMMMYYPMTA

SEQ ID NO: 247887 - protein, 15 aa, Artificial Sequence
  Description of Artificial Sequence: Synthetic peptide
  Seed: LRMKWMMAMKYPITA
LRMKYMMMMYYPNTA

SEQ ID NO: 247888 - protein, 15 aa, Artificial Sequence
  Description of Artificial Sequence: Synthetic peptide
  Seed: LRMKWMMAMKYPITA
LRMKYMMMMYYPPTA

SEQ ID NO: 247889 - protein, 15 aa, Artificial Sequence
  Description of Artificial Sequence: Synthetic peptide
  Seed: LRMKWMMAMKYPITA
LRMKYMMMMYYPQTA

SEQ ID NO: 247890 - protein, 15 aa, Artificial Sequence
  Description of Artificial Sequence: Synthetic peptide
  Seed: LRMKWMMAMKYPITA
LRMKYMMMMYYPSTA

SEQ ID NO: 247891 - protein, 15 aa, Artificial Sequence
  Description of Artificial Sequence: Synthetic peptide
  Seed: LRMKWMMAMKYPITA
LRMKYMMMMYYPTTA

SEQ ID NO: 247892 - protein, 15 aa, Artificial Sequence
  Description of Artificial Sequence: Synthetic peptide
  Seed: LRMKWMMAMKYPITA
LRMKYMMMMYYPVTA

SEQ ID NO: 247893 - protein, 15 aa, Artificial Sequence
  Description of Artificial Sequence: Synthetic peptide
  Seed: LRMKWMMAMKYPITA
LRMKYMMNMAYPATA

SEQ ID NO: 247894 - protein, 15 aa, Artificial Sequence
  Description of Artificial Sequence: Synthetic peptide
  Seed: LRMKWMMAMKYPITA
LRMKYMMNMAYPCTA

SEQ ID NO: 247895 - protein, 15 aa, Artificial Sequence
  Description of Artificial Sequence: Synthetic peptide
  Seed: LRMKWMMAMKYPITA
LRMKYMMNMAYPDTA

SEQ ID NO: 247896 - protein, 15 aa, Artificial Sequence
  Description of Artificial Sequence: Synthetic peptide
  Seed: LRMKWMMAMKYPITA
LRMKYMMNMAYPETA

SEQ ID NO: 247897 - protein, 15 aa, Artificial Sequence
  Description of Artificial Sequence: Synthetic peptide
  Seed: LRMKWMMAMKYPITA
LRMKYMMNMAYPFTA

SEQ ID NO: 247898 - protein, 15 aa, Artificial Sequence
  Description of Artificial Sequence: Synthetic peptide
  Seed: LRMKWMMAMKYPITA
LRMKYMMNMAYPGTA

SEQ ID NO: 247899 - protein, 15 aa, Artificial Sequence
  Description of Artificial Sequence: Synthetic peptide
  Seed: LRMKWMMAMKYPITA
LRMKYMMNMAYPHTA

SEQ ID NO: 247900 - protein, 15 aa, Artificial Sequence
  Description of Artificial Sequence: Synthetic peptide
  Seed: LRMKWMMAMKYPITA
LRMKYMMNMAYPITA

SEQ ID NO: 247901 - protein, 15 aa, Artificial Sequence
  Description of Artificial Sequence: Synthetic peptide
  Seed: LRMKWMMAMKYPITA
LRMKYMMNMAYPKTA

SEQ ID NO: 247902 - protein, 15 aa, Artificial Sequence
  Description of Artificial Sequence: Synthetic peptide
  Seed: LRMKWMMAMKYPITA
LRMKYMMNMAYPLTA

SEQ ID NO: 247903 - protein, 15 aa, Artificial Sequence
  Description of Artificial Sequence: Synthetic peptide
  Seed: LRMKWMMAMKYPITA
LRMKYMMNMAYPMTA

SEQ ID NO: 247904 - protein, 15 aa, Artificial Sequence
  Description of Artificial Sequence: Synthetic peptide
  Seed: LRMKWMMAMKYPITA
LRMKYMMNMAYPNTA

SEQ ID NO: 247905 - protein, 15 aa, Artificial Sequence
  Description of Artificial Sequence: Synthetic peptide
  Seed: LRMKWMMAMKYPITA
LRMKYMMNMAYPPTA

SEQ ID NO: 247906 - protein, 15 aa, Artificial Sequence
  Description of Artificial Sequence: Synthetic peptide
  Seed: LRMKWMMAMKYPITA
LRMKYMMNMAYPQTA

SEQ ID NO: 247907 - protein, 15 aa, Artificial Sequence
  Description of Artificial Sequence: Synthetic peptide
  Seed: LRMKWMMAMKYPITA
LRMKYMMNMAYPRTA

SEQ ID NO: 247908 - protein, 15 aa, Artificial Sequence
  Description of Artificial Sequence: Synthetic peptide
  Seed: LRMKWMMAMKYPITA
LRMKYMMNMAYPSTA

SEQ ID NO: 247909 - protein, 15 aa, Artificial Sequence
  Description of Artificial Sequence: Synthetic peptide
  Seed: LRMKWMMAMKYPITA
LRMKYMMNMAYPTTA

SEQ ID NO: 247910 - protein, 15 aa, Artificial Sequence
  Description of Artificial Sequence: Synthetic peptide
  Seed: LRMKWMMAMKYPITA
LRMKYMMNMAYPVTA

SEQ ID NO: 247911 - protein, 15 aa, Artificial Sequence
  Description of Artificial Sequence: Synthetic peptide
  Seed: LRMKWMMAMKYPITA
LRMKYMMNMAYPWTA

SEQ ID NO: 247912 - protein, 15 aa, Artificial Sequence
  Description of Artificial Sequence: Synthetic peptide
  Seed: LRMKWMMAMKYPITA
LRMKYMMNMAYPYTA

SEQ ID NO: 247913 - protein, 15 aa, Artificial Sequence
  Description of Artificial Sequence: Synthetic peptide
  Seed: LRMKWMMAMKYPITA
LRMKYMMNMCYPATA

SEQ ID NO: 247914 - protein, 15 aa, Artificial Sequence
  Description of Artificial Sequence: Synthetic peptide
  Seed: LRMKWMMAMKYPITA
LRMKYMMNMCYPFTA

SEQ ID NO: 247915 - protein, 15 aa, Artificial Sequence
  Description of Artificial Sequence: Synthetic peptide
  Seed: LRMKWMMAMKYPITA
LRMKYMMNMCYPITA

SEQ ID NO: 247916 - protein, 15 aa, Artificial Sequence
  Description of Artificial Sequence: Synthetic peptide
  Seed: LRMKWMMAMKYPITA
LRMKYMMNMCYPLTA

SEQ ID NO: 247917 - protein, 15 aa, Artificial Sequence
  Description of Artificial Sequence: Synthetic peptide
  Seed: LRMKWMMAMKYPITA
LRMKYMMNMCYPMTA

SEQ ID NO: 247918 - protein, 15 aa, Artificial Sequence
  Description of Artificial Sequence: Synthetic peptide
  Seed: LRMKWMMAMKYPITA
LRMKYMMNMCYPSTA

SEQ ID NO: 247919 - protein, 15 aa, Artificial Sequence
  Description of Artificial Sequence: Synthetic peptide
  Seed: LRMKWMMAMKYPITA
LRMKYMMNMCYPTTA

SEQ ID NO: 247920 - protein, 15 aa, Artificial Sequence
  Description of Artificial Sequence: Synthetic peptide
  Seed: LRMKWMMAMKYPITA
LRMKYMMNMCYPVTA

SEQ ID NO: 247921 - protein, 15 aa, Artificial Sequence
  Description of Artificial Sequence: Synthetic peptide
  Seed: LRMKWMMAMKYPITA
LRMKYMMNMCYPYTA

SEQ ID NO: 247922 - protein, 15 aa, Artificial Sequence
  Description of Artificial Sequence: Synthetic peptide
  Seed: LRMKWMMAMKYPITA
LRMKYMMNMDYPATA

SEQ ID NO: 247923 - protein, 15 aa, Artificial Sequence
  Description of Artificial Sequence: Synthetic peptide
  Seed: LRMKWMMAMKYPITA
LRMKYMMNMDYPFTA

SEQ ID NO: 247924 - protein, 15 aa, Artificial Sequence
  Description of Artificial Sequence: Synthetic peptide
  Seed: LRMKWMMAMKYPITA
LRMKYMMNMDYPITA

SEQ ID NO: 247925 - protein, 15 aa, Artificial Sequence
  Description of Artificial Sequence: Synthetic peptide
  Seed: LRMKWMMAMKYPITA
LRMKYMMNMDYPLTA

SEQ ID NO: 247926 - protein, 15 aa, Artificial Sequence
  Description of Artificial Sequence: Synthetic peptide
  Seed: LRMKWMMAMKYPITA
LRMKYMMNMDYPMTA

SEQ ID NO: 247927 - protein, 15 aa, Artificial Sequence
  Description of Artificial Sequence: Synthetic peptide
  Seed: LRMKWMMAMKYPITA
LRMKYMMNMDYPVTA

SEQ ID NO: 247928 - protein, 15 aa, Artificial Sequence
  Description of Artificial Sequence: Synthetic peptide
  Seed: LRMKWMMAMKYPITA
LRMKYMMNMEYPATA

SEQ ID NO: 247929 - protein, 15 aa, Artificial Sequence
  Description of Artificial Sequence: Synthetic peptide
  Seed: LRMKWMMAMKYPITA
LRMKYMMNMEYPITA

SEQ ID NO: 247930 - protein, 15 aa, Artificial Sequence
  Description of Artificial Sequence: Synthetic peptide
  Seed: LRMKWMMAMKYPITA
LRMKYMMNMEYPLTA

SEQ ID NO: 247931 - protein, 15 aa, Artificial Sequence
  Description of Artificial Sequence: Synthetic peptide
  Seed: LRMKWMMAMKYPITA
LRMKYMMNMEYPMTA

SEQ ID NO: 247932 - protein, 15 aa, Artificial Sequence
  Description of Artificial Sequence: Synthetic peptide
  Seed: LRMKWMMAMKYPITA
LRMKYMMNMEYPVTA

SEQ ID NO: 247933 - protein, 15 aa, Artificial Sequence
  Description of Artificial Sequence: Synthetic peptide
  Seed: LRMKWMMAMKYPITA
LRMKYMMNMFYPATA

SEQ ID NO: 247934 - protein, 15 aa, Artificial Sequence
  Description of Artificial Sequence: Synthetic peptide
  Seed: LRMKWMMAMKYPITA
LRMKYMMNMFYPFTA

SEQ ID NO: 247935 - protein, 15 aa, Artificial Sequence
  Description of Artificial Sequence: Synthetic peptide
  Seed: LRMKWMMAMKYPITA
LRMKYMMNMFYPITA

SEQ ID NO: 247936 - protein, 15 aa, Artificial Sequence
  Description of Artificial Sequence: Synthetic peptide
  Seed: LRMKWMMAMKYPITA
LRMKYMMNMFYPLTA

SEQ ID NO: 247937 - protein, 15 aa, Artificial Sequence
  Description of Artificial Sequence: Synthetic peptide
  Seed: LRMKWMMAMKYPITA
LRMKYMMNMFYPMTA

SEQ ID NO: 247938 - protein, 15 aa, Artificial Sequence
  Description of Artificial Sequence: Synthetic peptide
  Seed: LRMKWMMAMKYPITA
LRMKYMMNMFYPVTA

SEQ ID NO: 247939 - protein, 15 aa, Artificial Sequence
  Description of Artificial Sequence: Synthetic peptide
  Seed: LRMKWMMAMKYPITA
LRMKYMMNMGYPATA

SEQ ID NO: 247940 - protein, 15 aa, Artificial Sequence
  Description of Artificial Sequence: Synthetic peptide
  Seed: LRMKWMMAMKYPITA
LRMKYMMNMGYPCTA

SEQ ID NO: 247941 - protein, 15 aa, Artificial Sequence
  Description of Artificial Sequence: Synthetic peptide
  Seed: LRMKWMMAMKYPITA
LRMKYMMNMGYPFTA

SEQ ID NO: 247942 - protein, 15 aa, Artificial Sequence
  Description of Artificial Sequence: Synthetic peptide
  Seed: LRMKWMMAMKYPITA
LRMKYMMNMGYPGTA

SEQ ID NO: 247943 - protein, 15 aa, Artificial Sequence
  Description of Artificial Sequence: Synthetic peptide
  Seed: LRMKWMMAMKYPITA
LRMKYMMNMGYPHTA

SEQ ID NO: 247944 - protein, 15 aa, Artificial Sequence
  Description of Artificial Sequence: Synthetic peptide
  Seed: LRMKWMMAMKYPITA
LRMKYMMNMGYPITA

SEQ ID NO: 247945 - protein, 15 aa, Artificial Sequence
  Description of Artificial Sequence: Synthetic peptide
  Seed: LRMKWMMAMKYPITA
LRMKYMMNMGYPKTA

SEQ ID NO: 247946 - protein, 15 aa, Artificial Sequence
  Description of Artificial Sequence: Synthetic peptide
  Seed: LRMKWMMAMKYPITA
LRMKYMMNMGYPLTA

SEQ ID NO: 247947 - protein, 15 aa, Artificial Sequence
  Description of Artificial Sequence: Synthetic peptide
  Seed: LRMKWMMAMKYPITA
LRMKYMMNMGYPMTA

SEQ ID NO: 247948 - protein, 15 aa, Artificial Sequence
  Description of Artificial Sequence: Synthetic peptide
  Seed: LRMKWMMAMKYPITA
LRMKYMMNMGYPNTA

SEQ ID NO: 247949 - protein, 15 aa, Artificial Sequence
  Description of Artificial Sequence: Synthetic peptide
  Seed: LRMKWMMAMKYPITA
LRMKYMMNMGYPPTA

SEQ ID NO: 247950 - protein, 15 aa, Artificial Sequence
  Description of Artificial Sequence: Synthetic peptide
  Seed: LRMKWMMAMKYPITA
LRMKYMMNMGYPQTA

SEQ ID NO: 247951 - protein, 15 aa, Artificial Sequence
  Description of Artificial Sequence: Synthetic peptide
  Seed: LRMKWMMAMKYPITA
LRMKYMMNMGYPRTA

SEQ ID NO: 247952 - protein, 15 aa, Artificial Sequence
  Description of Artificial Sequence: Synthetic peptide
  Seed: LRMKWMMAMKYPITA
LRMKYMMNMGYPSTA

SEQ ID NO: 247953 - protein, 15 aa, Artificial Sequence
  Description of Artificial Sequence: Synthetic peptide
  Seed: LRMKWMMAMKYPITA
LRMKYMMNMGYPTTA

SEQ ID NO: 247954 - protein, 15 aa, Artificial Sequence
  Description of Artificial Sequence: Synthetic peptide
  Seed: LRMKWMMAMKYPITA
LRMKYMMNMGYPVTA

SEQ ID NO: 247955 - protein, 15 aa, Artificial Sequence
  Description of Artificial Sequence: Synthetic peptide
  Seed: LRMKWMMAMKYPITA
LRMKYMMNMGYPWTA

SEQ ID NO: 247956 - protein, 15 aa, Artificial Sequence
  Description of Artificial Sequence: Synthetic peptide
  Seed: LRMKWMMAMKYPITA
LRMKYMMNMGYPYTA

SEQ ID NO: 247957 - protein, 15 aa, Artificial Sequence
  Description of Artificial Sequence: Synthetic peptide
  Seed: LRMKWMMAMKYPITA
LRMKYMMNMHYPATA

SEQ ID NO: 247958 - protein, 15 aa, Artificial Sequence
  Description of Artificial Sequence: Synthetic peptide
  Seed: LRMKWMMAMKYPITA
LRMKYMMNMHYPFTA

SEQ ID NO: 247959 - protein, 15 aa, Artificial Sequence
  Description of Artificial Sequence: Synthetic peptide
  Seed: LRMKWMMAMKYPITA
LRMKYMMNMHYPITA

SEQ ID NO: 247960 - protein, 15 aa, Artificial Sequence
  Description of Artificial Sequence: Synthetic peptide
  Seed: LRMKWMMAMKYPITA
LRMKYMMNMHYPLTA

SEQ ID NO: 247961 - protein, 15 aa, Artificial Sequence
  Description of Artificial Sequence: Synthetic peptide
  Seed: LRMKWMMAMKYPITA
LRMKYMMNMHYPMTA

SEQ ID NO: 247962 - protein, 15 aa, Artificial Sequence
  Description of Artificial Sequence: Synthetic peptide
  Seed: LRMKWMMAMKYPITA
LRMKYMMNMHYPSTA

SEQ ID NO: 247963 - protein, 15 aa, Artificial Sequence
  Description of Artificial Sequence: Synthetic peptide
  Seed: LRMKWMMAMKYPITA
LRMKYMMNMHYPVTA

SEQ ID NO: 247964 - protein, 15 aa, Artificial Sequence
  Description of Artificial Sequence: Synthetic peptide
  Seed: LRMKWMMAMKYPITA
LRMKYMMNMHYPYTA

SEQ ID NO: 247965 - protein, 15 aa, Artificial Sequence
  Description of Artificial Sequence: Synthetic peptide
  Seed: LRMKWMMAMKYPITA
LRMKYMMNMIYPATA

SEQ ID NO: 247966 - protein, 15 aa, Artificial Sequence
  Description of Artificial Sequence: Synthetic peptide
  Seed: LRMKWMMAMKYPITA
LRMKYMMNMIYPCTA

SEQ ID NO: 247967 - protein, 15 aa, Artificial Sequence
  Description of Artificial Sequence: Synthetic peptide
  Seed: LRMKWMMAMKYPITA
LRMKYMMNMIYPDTA

SEQ ID NO: 247968 - protein, 15 aa, Artificial Sequence
  Description of Artificial Sequence: Synthetic peptide
  Seed: LRMKWMMAMKYPITA
LRMKYMMNMIYPETA

SEQ ID NO: 247969 - protein, 15 aa, Artificial Sequence
  Description of Artificial Sequence: Synthetic peptide
  Seed: LRMKWMMAMKYPITA
LRMKYMMNMIYPFTA

SEQ ID NO: 247970 - protein, 15 aa, Artificial Sequence
  Description of Artificial Sequence: Synthetic peptide
  Seed: LRMKWMMAMKYPITA
LRMKYMMNMIYPGTA

SEQ ID NO: 247971 - protein, 15 aa, Artificial Sequence
  Description of Artificial Sequence: Synthetic peptide
  Seed: LRMKWMMAMKYPITA
LRMKYMMNMIYPHTA

SEQ ID NO: 247972 - protein, 15 aa, Artificial Sequence
  Description of Artificial Sequence: Synthetic peptide
  Seed: LRMKWMMAMKYPITA
LRMKYMMNMIYPITA

SEQ ID NO: 247973 - protein, 15 aa, Artificial Sequence
  Description of Artificial Sequence: Synthetic peptide
  Seed: LRMKWMMAMKYPITA
LRMKYMMNMIYPLTA

SEQ ID NO: 247974 - protein, 15 aa, Artificial Sequence
  Description of Artificial Sequence: Synthetic peptide
  Seed: LRMKWMMAMKYPITA
LRMKYMMNMIYPMTA

SEQ ID NO: 247975 - protein, 15 aa, Artificial Sequence
  Description of Artificial Sequence: Synthetic peptide
  Seed: LRMKWMMAMKYPITA
LRMKYMMNMIYPNTA

SEQ ID NO: 247976 - protein, 15 aa, Artificial Sequence
  Description of Artificial Sequence: Synthetic peptide
  Seed: LRMKWMMAMKYPITA
LRMKYMMNMIYPPTA

SEQ ID NO: 247977 - protein, 15 aa, Artificial Sequence
  Description of Artificial Sequence: Synthetic peptide
  Seed: LRMKWMMAMKYPITA
LRMKYMMNMIYPQTA

SEQ ID NO: 247978 - protein, 15 aa, Artificial Sequence
  Description of Artificial Sequence: Synthetic peptide
  Seed: LRMKWMMAMKYPITA
LRMKYMMNMIYPRTA

SEQ ID NO: 247979 - protein, 15 aa, Artificial Sequence
  Description of Artificial Sequence: Synthetic peptide
  Seed: LRMKWMMAMKYPITA
LRMKYMMNMIYPSTA

SEQ ID NO: 247980 - protein, 15 aa, Artificial Sequence
  Description of Artificial Sequence: Synthetic peptide
  Seed: LRMKWMMAMKYPITA
LRMKYMMNMIYPTTA

SEQ ID NO: 247981 - protein, 15 aa, Artificial Sequence
  Description of Artificial Sequence: Synthetic peptide
  Seed: LRMKWMMAMKYPITA
LRMKYMMNMIYPVTA

SEQ ID NO: 247982 - protein, 15 aa, Artificial Sequence
  Description of Artificial Sequence: Synthetic peptide
  Seed: LRMKWMMAMKYPITA
LRMKYMMNMIYPWTA

SEQ ID NO: 247983 - protein, 15 aa, Artificial Sequence
  Description of Artificial Sequence: Synthetic peptide
  Seed: LRMKWMMAMKYPITA
LRMKYMMNMIYPYTA

SEQ ID NO: 247984 - protein, 15 aa, Artificial Sequence
  Description of Artificial Sequence: Synthetic peptide
  Seed: LRMKWMMAMKYPITA
LRMKYMMNMKYPATA

SEQ ID NO: 247985 - protein, 15 aa, Artificial Sequence
  Description of Artificial Sequence: Synthetic peptide
  Seed: LRMKWMMAMKYPITA
LRMKYMMNMKYPFTA

SEQ ID NO: 247986 - protein, 15 aa, Artificial Sequence
  Description of Artificial Sequence: Synthetic peptide
  Seed: LRMKWMMAMKYPITA
LRMKYMMNMKYPGTA

SEQ ID NO: 247987 - protein, 15 aa, Artificial Sequence
  Description of Artificial Sequence: Synthetic peptide
  Seed: LRMKWMMAMKYPITA
LRMKYMMNMKYPITA

SEQ ID NO: 247988 - protein, 15 aa, Artificial Sequence
  Description of Artificial Sequence: Synthetic peptide
  Seed: LRMKWMMAMKYPITA
LRMKYMMNMKYPLTA

SEQ ID NO: 247989 - protein, 15 aa, Artificial Sequence
  Description of Artificial Sequence: Synthetic peptide
  Seed: LRMKWMMAMKYPITA
LRMKYMMNMKYPMTA

SEQ ID NO: 247990 - protein, 15 aa, Artificial Sequence
  Description of Artificial Sequence: Synthetic peptide
  Seed: LRMKWMMAMKYPITA
LRMKYMMNMKYPQTA

SEQ ID NO: 247991 - protein, 15 aa, Artificial Sequence
  Description of Artificial Sequence: Synthetic peptide
  Seed: LRMKWMMAMKYPITA
LRMKYMMNMKYPRTA

SEQ ID NO: 247992 - protein, 15 aa, Artificial Sequence
  Description of Artificial Sequence: Synthetic peptide
  Seed: LRMKWMMAMKYPITA
LRMKYMMNMKYPSTA

SEQ ID NO: 247993 - protein, 15 aa, Artificial Sequence
  Description of Artificial Sequence: Synthetic peptide
  Seed: LRMKWMMAMKYPITA
LRMKYMMNMKYPVTA

SEQ ID NO: 247994 - protein, 15 aa, Artificial Sequence
  Description of Artificial Sequence: Synthetic peptide
  Seed: LRMKWMMAMKYPITA
LRMKYMMNMKYPYTA

SEQ ID NO: 247995 - protein, 15 aa, Artificial Sequence
  Description of Artificial Sequence: Synthetic peptide
  Seed: LRMKWMMAMKYPITA
LRMKYMMNMLYPATA

SEQ ID NO: 247996 - protein, 15 aa, Artificial Sequence
  Description of Artificial Sequence: Synthetic peptide
  Seed: LRMKWMMAMKYPITA
LRMKYMMNMLYPCTA

SEQ ID NO: 247997 - protein, 15 aa, Artificial Sequence
  Description of Artificial Sequence: Synthetic peptide
  Seed: LRMKWMMAMKYPITA
LRMKYMMNMLYPFTA

SEQ ID NO: 247998 - protein, 15 aa, Artificial Sequence
  Description of Artificial Sequence: Synthetic peptide
  Seed: LRMKWMMAMKYPITA
LRMKYMMNMLYPGTA

SEQ ID NO: 247999 - protein, 15 aa, Artificial Sequence
  Description of Artificial Sequence: Synthetic peptide
  Seed: LRMKWMMAMKYPITA
LRMKYMMNMLYPITA

SEQ ID NO: 248000 - protein, 15 aa, Artificial Sequence
  Description of Artificial Sequence: Synthetic peptide
  Seed: LRMKWMMAMKYPITA
LRMKYMMNMLYPLTA

SEQ ID NO: 248001 - protein, 15 aa, Artificial Sequence
  Description of Artificial Sequence: Synthetic peptide
  Seed: LRMKWMMAMKYPITA
LRMKYMMNMLYPMTA

SEQ ID NO: 248002 - protein, 15 aa, Artificial Sequence
  Description of Artificial Sequence: Synthetic peptide
  Seed: LRMKWMMAMKYPITA
LRMKYMMNMLYPSTA

SEQ ID NO: 248003 - protein, 15 aa, Artificial Sequence
  Description of Artificial Sequence: Synthetic peptide
  Seed: LRMKWMMAMKYPITA
LRMKYMMNMLYPVTA

SEQ ID NO: 248004 - protein, 15 aa, Artificial Sequence
  Description of Artificial Sequence: Synthetic peptide
  Seed: LRMKWMMAMKYPITA
LRMKYMMNMLYPYTA

SEQ ID NO: 248005 - protein, 15 aa, Artificial Sequence
  Description of Artificial Sequence: Synthetic peptide
  Seed: LRMKWMMAMKYPITA
LRMKYMMNMMYPATA

SEQ ID NO: 248006 - protein, 15 aa, Artificial Sequence
  Description of Artificial Sequence: Synthetic peptide
  Seed: LRMKWMMAMKYPITA
LRMKYMMNMMYPCTA

SEQ ID NO: 248007 - protein, 15 aa, Artificial Sequence
  Description of Artificial Sequence: Synthetic peptide
  Seed: LRMKWMMAMKYPITA
LRMKYMMNMMYPFTA

SEQ ID NO: 248008 - protein, 15 aa, Artificial Sequence
  Description of Artificial Sequence: Synthetic peptide
  Seed: LRMKWMMAMKYPITA
LRMKYMMNMMYPGTA

SEQ ID NO: 248009 - protein, 15 aa, Artificial Sequence
  Description of Artificial Sequence: Synthetic peptide
  Seed: LRMKWMMAMKYPITA
LRMKYMMNMMYPITA

SEQ ID NO: 248010 - protein, 15 aa, Artificial Sequence
  Description of Artificial Sequence: Synthetic peptide
  Seed: LRMKWMMAMKYPITA
LRMKYMMNMMYPLTA

SEQ ID NO: 248011 - protein, 15 aa, Artificial Sequence
  Description of Artificial Sequence: Synthetic peptide
  Seed: LRMKWMMAMKYPITA
LRMKYMMNMMYPMTA

SEQ ID NO: 248012 - protein, 15 aa, Artificial Sequence
  Description of Artificial Sequence: Synthetic peptide
  Seed: LRMKWMMAMKYPITA
LRMKYMMNMMYPSTA

SEQ ID NO: 248013 - protein, 15 aa, Artificial Sequence
  Description of Artificial Sequence: Synthetic peptide
  Seed: LRMKWMMAMKYPITA
LRMKYMMNMMYPTTA

SEQ ID NO: 248014 - protein, 15 aa, Artificial Sequence
  Description of Artificial Sequence: Synthetic peptide
  Seed: LRMKWMMAMKYPITA
LRMKYMMNMMYPVTA

SEQ ID NO: 248015 - protein, 15 aa, Artificial Sequence
  Description of Artificial Sequence: Synthetic peptide
  Seed: LRMKWMMAMKYPITA
LRMKYMMNMMYPYTA

SEQ ID NO: 248016 - protein, 15 aa, Artificial Sequence
  Description of Artificial Sequence: Synthetic peptide
  Seed: LRMKWMMAMKYPITA
LRMKYMMNMNYPATA

SEQ ID NO: 248017 - protein, 15 aa, Artificial Sequence
  Description of Artificial Sequence: Synthetic peptide
  Seed: LRMKWMMAMKYPITA
LRMKYMMNMNYPCTA

SEQ ID NO: 248018 - protein, 15 aa, Artificial Sequence
  Description of Artificial Sequence: Synthetic peptide
  Seed: LRMKWMMAMKYPITA
LRMKYMMNMNYPDTA

SEQ ID NO: 248019 - protein, 15 aa, Artificial Sequence
  Description of Artificial Sequence: Synthetic peptide
  Seed: LRMKWMMAMKYPITA
LRMKYMMNMNYPFTA

SEQ ID NO: 248020 - protein, 15 aa, Artificial Sequence
  Description of Artificial Sequence: Synthetic peptide
  Seed: LRMKWMMAMKYPITA
LRMKYMMNMNYPGTA

SEQ ID NO: 248021 - protein, 15 aa, Artificial Sequence
  Description of Artificial Sequence: Synthetic peptide
  Seed: LRMKWMMAMKYPITA
LRMKYMMNMNYPITA

SEQ ID NO: 248022 - protein, 15 aa, Artificial Sequence
  Description of Artificial Sequence: Synthetic peptide
  Seed: LRMKWMMAMKYPITA
LRMKYMMNMNYPLTA

SEQ ID NO: 248023 - protein, 15 aa, Artificial Sequence
  Description of Artificial Sequence: Synthetic peptide
  Seed: LRMKWMMAMKYPITA
LRMKYMMNMNYPMTA

SEQ ID NO: 248024 - protein, 15 aa, Artificial Sequence
  Description of Artificial Sequence: Synthetic peptide
  Seed: LRMKWMMAMKYPITA
LRMKYMMNMNYPNTA

SEQ ID NO: 248025 - protein, 15 aa, Artificial Sequence
  Description of Artificial Sequence: Synthetic peptide
  Seed: LRMKWMMAMKYPITA
LRMKYMMNMNYPSTA

SEQ ID NO: 248026 - protein, 15 aa, Artificial Sequence
  Description of Artificial Sequence: Synthetic peptide
  Seed: LRMKWMMAMKYPITA
LRMKYMMNMNYPTTA

SEQ ID NO: 248027 - protein, 15 aa, Artificial Sequence
  Description of Artificial Sequence: Synthetic peptide
  Seed: LRMKWMMAMKYPITA
LRMKYMMNMNYPVTA

SEQ ID NO: 248028 - protein, 15 aa, Artificial Sequence
  Description of Artificial Sequence: Synthetic peptide
  Seed: LRMKWMMAMKYPITA
LRMKYMMNMNYPWTA

SEQ ID NO: 248029 - protein, 15 aa, Artificial Sequence
  Description of Artificial Sequence: Synthetic peptide
  Seed: LRMKWMMAMKYPITA
LRMKYMMNMNYPYTA

SEQ ID NO: 248030 - protein, 15 aa, Artificial Sequence
  Description of Artificial Sequence: Synthetic peptide
  Seed: LRMKWMMAMKYPITA
LRMKYMMNMPYPATA

SEQ ID NO: 248031 - protein, 15 aa, Artificial Sequence
  Description of Artificial Sequence: Synthetic peptide
  Seed: LRMKWMMAMKYPITA
LRMKYMMNMPYPCTA

SEQ ID NO: 248032 - protein, 15 aa, Artificial Sequence
  Description of Artificial Sequence: Synthetic peptide
  Seed: LRMKWMMAMKYPITA
LRMKYMMNMPYPDTA

SEQ ID NO: 248033 - protein, 15 aa, Artificial Sequence
  Description of Artificial Sequence: Synthetic peptide
  Seed: LRMKWMMAMKYPITA
LRMKYMMNMPYPETA

SEQ ID NO: 248034 - protein, 15 aa, Artificial Sequence
  Description of Artificial Sequence: Synthetic peptide
  Seed: LRMKWMMAMKYPITA
LRMKYMMNMPYPFTA

SEQ ID NO: 248035 - protein, 15 aa, Artificial Sequence
  Description of Artificial Sequence: Synthetic peptide
  Seed: LRMKWMMAMKYPITA
LRMKYMMNMPYPGTA

SEQ ID NO: 248036 - protein, 15 aa, Artificial Sequence
  Description of Artificial Sequence: Synthetic peptide
  Seed: LRMKWMMAMKYPITA
LRMKYMMNMPYPHTA

SEQ ID NO: 248037 - protein, 15 aa, Artificial Sequence
  Description of Artificial Sequence: Synthetic peptide
  Seed: LRMKWMMAMKYPITA
LRMKYMMNMPYPITA

SEQ ID NO: 248038 - protein, 15 aa, Artificial Sequence
  Description of Artificial Sequence: Synthetic peptide
  Seed: LRMKWMMAMKYPITA
LRMKYMMNMPYPKTA

SEQ ID NO: 248039 - protein, 15 aa, Artificial Sequence
  Description of Artificial Sequence: Synthetic peptide
  Seed: LRMKWMMAMKYPITA
LRMKYMMNMPYPLTA

SEQ ID NO: 248040 - protein, 15 aa, Artificial Sequence
  Description of Artificial Sequence: Synthetic peptide
  Seed: LRMKWMMAMKYPITA
LRMKYMMNMPYPMTA

SEQ ID NO: 248041 - protein, 15 aa, Artificial Sequence
  Description of Artificial Sequence: Synthetic peptide
  Seed: LRMKWMMAMKYPITA
LRMKYMMNMPYPNTA

SEQ ID NO: 248042 - protein, 15 aa, Artificial Sequence
  Description of Artificial Sequence: Synthetic peptide
  Seed: LRMKWMMAMKYPITA
LRMKYMMNMPYPPTA

SEQ ID NO: 248043 - protein, 15 aa, Artificial Sequence
  Description of Artificial Sequence: Synthetic peptide
  Seed: LRMKWMMAMKYPITA
LRMKYMMNMPYPQTA

SEQ ID NO: 248044 - protein, 15 aa, Artificial Sequence
  Description of Artificial Sequence: Synthetic peptide
  Seed: LRMKWMMAMKYPITA
LRMKYMMNMPYPRTA

SEQ ID NO: 248045 - protein, 15 aa, Artificial Sequence
  Description of Artificial Sequence: Synthetic peptide
  Seed: LRMKWMMAMKYPITA
LRMKYMMNMPYPSTA

SEQ ID NO: 248046 - protein, 15 aa, Artificial Sequence
  Description of Artificial Sequence: Synthetic peptide
  Seed: LRMKWMMAMKYPITA
LRMKYMMNMPYPTTA

SEQ ID NO: 248047 - protein, 15 aa, Artificial Sequence
  Description of Artificial Sequence: Synthetic peptide
  Seed: LRMKWMMAMKYPITA
LRMKYMMNMPYPVTA

SEQ ID NO: 248048 - protein, 15 aa, Artificial Sequence
  Description of Artificial Sequence: Synthetic peptide
  Seed: LRMKWMMAMKYPITA
LRMKYMMNMPYPWTA

SEQ ID NO: 248049 - protein, 15 aa, Artificial Sequence
  Description of Artificial Sequence: Synthetic peptide
  Seed: LRMKWMMAMKYPITA
LRMKYMMNMPYPYTA

SEQ ID NO: 248050 - protein, 15 aa, Artificial Sequence
  Description of Artificial Sequence: Synthetic peptide
  Seed: LRMKWMMAMKYPITA
LRMKYMMNMQYPATA

SEQ ID NO: 248051 - protein, 15 aa, Artificial Sequence
  Description of Artificial Sequence: Synthetic peptide
  Seed: LRMKWMMAMKYPITA
LRMKYMMNMQYPFTA

SEQ ID NO: 248052 - protein, 15 aa, Artificial Sequence
  Description of Artificial Sequence: Synthetic peptide
  Seed: LRMKWMMAMKYPITA
LRMKYMMNMQYPITA

SEQ ID NO: 248053 - protein, 15 aa, Artificial Sequence
  Description of Artificial Sequence: Synthetic peptide
  Seed: LRMKWMMAMKYPITA
LRMKYMMNMQYPLTA

SEQ ID NO: 248054 - protein, 15 aa, Artificial Sequence
  Description of Artificial Sequence: Synthetic peptide
  Seed: LRMKWMMAMKYPITA
LRMKYMMNMQYPMTA

SEQ ID NO: 248055 - protein, 15 aa, Artificial Sequence
  Description of Artificial Sequence: Synthetic peptide
  Seed: LRMKWMMAMKYPITA
LRMKYMMNMQYPSTA

SEQ ID NO: 248056 - protein, 15 aa, Artificial Sequence
  Description of Artificial Sequence: Synthetic peptide
  Seed: LRMKWMMAMKYPITA
LRMKYMMNMQYPVTA

SEQ ID NO: 248057 - protein, 15 aa, Artificial Sequence
  Description of Artificial Sequence: Synthetic peptide
  Seed: LRMKWMMAMKYPITA
LRMKYMMNMRYPATA

SEQ ID NO: 248058 - protein, 15 aa, Artificial Sequence
  Description of Artificial Sequence: Synthetic peptide
  Seed: LRMKWMMAMKYPITA
LRMKYMMNMRYPFTA

SEQ ID NO: 248059 - protein, 15 aa, Artificial Sequence
  Description of Artificial Sequence: Synthetic peptide
  Seed: LRMKWMMAMKYPITA
LRMKYMMNMRYPGTA

SEQ ID NO: 248060 - protein, 15 aa, Artificial Sequence
  Description of Artificial Sequence: Synthetic peptide
  Seed: LRMKWMMAMKYPITA
LRMKYMMNMRYPHTA

SEQ ID NO: 248061 - protein, 15 aa, Artificial Sequence
  Description of Artificial Sequence: Synthetic peptide
  Seed: LRMKWMMAMKYPITA
LRMKYMMNMRYPITA

SEQ ID NO: 248062 - protein, 15 aa, Artificial Sequence
  Description of Artificial Sequence: Synthetic peptide
  Seed: LRMKWMMAMKYPITA
LRMKYMMNMRYPKTA

SEQ ID NO: 248063 - protein, 15 aa, Artificial Sequence
  Description of Artificial Sequence: Synthetic peptide
  Seed: LRMKWMMAMKYPITA
LRMKYMMNMRYPLTA

SEQ ID NO: 248064 - protein, 15 aa, Artificial Sequence
  Description of Artificial Sequence: Synthetic peptide
  Seed: LRMKWMMAMKYPITA
LRMKYMMNMRYPMTA

SEQ ID NO: 248065 - protein, 15 aa, Artificial Sequence
  Description of Artificial Sequence: Synthetic peptide
  Seed: LRMKWMMAMKYPITA
LRMKYMMNMRYPQTA

SEQ ID NO: 248066 - protein, 15 aa, Artificial Sequence
  Description of Artificial Sequence: Synthetic peptide
  Seed: LRMKWMMAMKYPITA
LRMKYMMNMRYPRTA

SEQ ID NO: 248067 - protein, 15 aa, Artificial Sequence
  Description of Artificial Sequence: Synthetic peptide
  Seed: LRMKWMMAMKYPITA
LRMKYMMNMRYPSTA

SEQ ID NO: 248068 - protein, 15 aa, Artificial Sequence
  Description of Artificial Sequence: Synthetic peptide
  Seed: LRMKWMMAMKYPITA
LRMKYMMNMRYPTTA

SEQ ID NO: 248069 - protein, 15 aa, Artificial Sequence
  Description of Artificial Sequence: Synthetic peptide
  Seed: LRMKWMMAMKYPITA
LRMKYMMNMRYPVTA

SEQ ID NO: 248070 - protein, 15 aa, Artificial Sequence
  Description of Artificial Sequence: Synthetic peptide
  Seed: LRMKWMMAMKYPITA
LRMKYMMNMRYPYTA

SEQ ID NO: 248071 - protein, 15 aa, Artificial Sequence
  Description of Artificial Sequence: Synthetic peptide
  Seed: LRMKWMMAMKYPITA
LRMKYMMNMSYPATA

SEQ ID NO: 248072 - protein, 15 aa, Artificial Sequence
  Description of Artificial Sequence: Synthetic peptide
  Seed: LRMKWMMAMKYPITA
LRMKYMMNMSYPCTA

SEQ ID NO: 248073 - protein, 15 aa, Artificial Sequence
  Description of Artificial Sequence: Synthetic peptide
  Seed: LRMKWMMAMKYPITA
LRMKYMMNMSYPFTA

SEQ ID NO: 248074 - protein, 15 aa, Artificial Sequence
  Description of Artificial Sequence: Synthetic peptide
  Seed: LRMKWMMAMKYPITA
LRMKYMMNMSYPGTA

SEQ ID NO: 248075 - protein, 15 aa, Artificial Sequence
  Description of Artificial Sequence: Synthetic peptide
  Seed: LRMKWMMAMKYPITA
LRMKYMMNMSYPHTA

SEQ ID NO: 248076 - protein, 15 aa, Artificial Sequence
  Description of Artificial Sequence: Synthetic peptide
  Seed: LRMKWMMAMKYPITA
LRMKYMMNMSYPITA

SEQ ID NO: 248077 - protein, 15 aa, Artificial Sequence
  Description of Artificial Sequence: Synthetic peptide
  Seed: LRMKWMMAMKYPITA
LRMKYMMNMSYPKTA

SEQ ID NO: 248078 - protein, 15 aa, Artificial Sequence
  Description of Artificial Sequence: Synthetic peptide
  Seed: LRMKWMMAMKYPITA
LRMKYMMNMSYPLTA

SEQ ID NO: 248079 - protein, 15 aa, Artificial Sequence
  Description of Artificial Sequence: Synthetic peptide
  Seed: LRMKWMMAMKYPITA
LRMKYMMNMSYPMTA

SEQ ID NO: 248080 - protein, 15 aa, Artificial Sequence
  Description of Artificial Sequence: Synthetic peptide
  Seed: LRMKWMMAMKYPITA
LRMKYMMNMSYPNTA

SEQ ID NO: 248081 - protein, 15 aa, Artificial Sequence
  Description of Artificial Sequence: Synthetic peptide
  Seed: LRMKWMMAMKYPITA
LRMKYMMNMSYPPTA

SEQ ID NO: 248082 - protein, 15 aa, Artificial Sequence
  Description of Artificial Sequence: Synthetic peptide
  Seed: LRMKWMMAMKYPITA
LRMKYMMNMSYPQTA

SEQ ID NO: 248083 - protein, 15 aa, Artificial Sequence
  Description of Artificial Sequence: Synthetic peptide
  Seed: LRMKWMMAMKYPITA
LRMKYMMNMSYPRTA

SEQ ID NO: 248084 - protein, 15 aa, Artificial Sequence
  Description of Artificial Sequence: Synthetic peptide
  Seed: LRMKWMMAMKYPITA
LRMKYMMNMSYPSTA

SEQ ID NO: 248085 - protein, 15 aa, Artificial Sequence
  Description of Artificial Sequence: Synthetic peptide
  Seed: LRMKWMMAMKYPITA
LRMKYMMNMSYPTTA

SEQ ID NO: 248086 - protein, 15 aa, Artificial Sequence
  Description of Artificial Sequence: Synthetic peptide
  Seed: LRMKWMMAMKYPITA
LRMKYMMNMSYPVTA

SEQ ID NO: 248087 - protein, 15 aa, Artificial Sequence
  Description of Artificial Sequence: Synthetic peptide
  Seed: LRMKWMMAMKYPITA
LRMKYMMNMSYPWTA

SEQ ID NO: 248088 - protein, 15 aa, Artificial Sequence
  Description of Artificial Sequence: Synthetic peptide
  Seed: LRMKWMMAMKYPITA
LRMKYMMNMSYPYTA

SEQ ID NO: 248089 - protein, 15 aa, Artificial Sequence
  Description of Artificial Sequence: Synthetic peptide
  Seed: LRMKWMMAMKYPITA
LRMKYMMNMTYPATA

SEQ ID NO: 248090 - protein, 15 aa, Artificial Sequence
  Description of Artificial Sequence: Synthetic peptide
  Seed: LRMKWMMAMKYPITA
LRMKYMMNMTYPCTA

SEQ ID NO: 248091 - protein, 15 aa, Artificial Sequence
  Description of Artificial Sequence: Synthetic peptide
  Seed: LRMKWMMAMKYPITA
LRMKYMMNMTYPDTA

SEQ ID NO: 248092 - protein, 15 aa, Artificial Sequence
  Description of Artificial Sequence: Synthetic peptide
  Seed: LRMKWMMAMKYPITA
LRMKYMMNMTYPFTA

SEQ ID NO: 248093 - protein, 15 aa, Artificial Sequence
  Description of Artificial Sequence: Synthetic peptide
  Seed: LRMKWMMAMKYPITA
LRMKYMMNMTYPGTA

SEQ ID NO: 248094 - protein, 15 aa, Artificial Sequence
  Description of Artificial Sequence: Synthetic peptide
  Seed: LRMKWMMAMKYPITA
LRMKYMMNMTYPHTA

SEQ ID NO: 248095 - protein, 15 aa, Artificial Sequence
  Description of Artificial Sequence: Synthetic peptide
  Seed: LRMKWMMAMKYPITA
LRMKYMMNMTYPITA

SEQ ID NO: 248096 - protein, 15 aa, Artificial Sequence
  Description of Artificial Sequence: Synthetic peptide
  Seed: LRMKWMMAMKYPITA
LRMKYMMNMTYPLTA

SEQ ID NO: 248097 - protein, 15 aa, Artificial Sequence
  Description of Artificial Sequence: Synthetic peptide
  Seed: LRMKWMMAMKYPITA
LRMKYMMNMTYPMTA

SEQ ID NO: 248098 - protein, 15 aa, Artificial Sequence
  Description of Artificial Sequence: Synthetic peptide
  Seed: LRMKWMMAMKYPITA
LRMKYMMNMTYPNTA

SEQ ID NO: 248099 - protein, 15 aa, Artificial Sequence
  Description of Artificial Sequence: Synthetic peptide
  Seed: LRMKWMMAMKYPITA
LRMKYMMNMTYPQTA

SEQ ID NO: 248100 - protein, 15 aa, Artificial Sequence
  Description of Artificial Sequence: Synthetic peptide
  Seed: LRMKWMMAMKYPITA
LRMKYMMNMTYPRTA

SEQ ID NO: 248101 - protein, 15 aa, Artificial Sequence
  Description of Artificial Sequence: Synthetic peptide
  Seed: LRMKWMMAMKYPITA
LRMKYMMNMTYPSTA

SEQ ID NO: 248102 - protein, 15 aa, Artificial Sequence
  Description of Artificial Sequence: Synthetic peptide
  Seed: LRMKWMMAMKYPITA
LRMKYMMNMTYPTTA

SEQ ID NO: 248103 - protein, 15 aa, Artificial Sequence
  Description of Artificial Sequence: Synthetic peptide
  Seed: LRMKWMMAMKYPITA
LRMKYMMNMTYPVTA

SEQ ID NO: 248104 - protein, 15 aa, Artificial Sequence
  Description of Artificial Sequence: Synthetic peptide
  Seed: LRMKWMMAMKYPITA
LRMKYMMNMTYPWTA

SEQ ID NO: 248105 - protein, 15 aa, Artificial Sequence
  Description of Artificial Sequence: Synthetic peptide
  Seed: LRMKWMMAMKYPITA
LRMKYMMNMTYPYTA

SEQ ID NO: 248106 - protein, 15 aa, Artificial Sequence
  Description of Artificial Sequence: Synthetic peptide
  Seed: LRMKWMMAMKYPITA
LRMKYMMNMVYPATA

SEQ ID NO: 248107 - protein, 15 aa, Artificial Sequence
  Description of Artificial Sequence: Synthetic peptide
  Seed: LRMKWMMAMKYPITA
LRMKYMMNMVYPCTA

SEQ ID NO: 248108 - protein, 15 aa, Artificial Sequence
  Description of Artificial Sequence: Synthetic peptide
  Seed: LRMKWMMAMKYPITA
LRMKYMMNMVYPDTA

SEQ ID NO: 248109 - protein, 15 aa, Artificial Sequence
  Description of Artificial Sequence: Synthetic peptide
  Seed: LRMKWMMAMKYPITA
LRMKYMMNMVYPETA

SEQ ID NO: 248110 - protein, 15 aa, Artificial Sequence
  Description of Artificial Sequence: Synthetic peptide
  Seed: LRMKWMMAMKYPITA
LRMKYMMNMVYPFTA

SEQ ID NO: 248111 - protein, 15 aa, Artificial Sequence
  Description of Artificial Sequence: Synthetic peptide
  Seed: LRMKWMMAMKYPITA
LRMKYMMNMVYPGTA

SEQ ID NO: 248112 - protein, 15 aa, Artificial Sequence
  Description of Artificial Sequence: Synthetic peptide
  Seed: LRMKWMMAMKYPITA
LRMKYMMNMVYPHTA

SEQ ID NO: 248113 - protein, 15 aa, Artificial Sequence
  Description of Artificial Sequence: Synthetic peptide
  Seed: LRMKWMMAMKYPITA
LRMKYMMNMVYPITA

SEQ ID NO: 248114 - protein, 15 aa, Artificial Sequence
  Description of Artificial Sequence: Synthetic peptide
  Seed: LRMKWMMAMKYPITA
LRMKYMMNMVYPKTA

SEQ ID NO: 248115 - protein, 15 aa, Artificial Sequence
  Description of Artificial Sequence: Synthetic peptide
  Seed: LRMKWMMAMKYPITA
LRMKYMMNMVYPLTA

SEQ ID NO: 248116 - protein, 15 aa, Artificial Sequence
  Description of Artificial Sequence: Synthetic peptide
  Seed: LRMKWMMAMKYPITA
LRMKYMMNMVYPMTA

SEQ ID NO: 248117 - protein, 15 aa, Artificial Sequence
  Description of Artificial Sequence: Synthetic peptide
  Seed: LRMKWMMAMKYPITA
LRMKYMMNMVYPNTA

SEQ ID NO: 248118 - protein, 15 aa, Artificial Sequence
  Description of Artificial Sequence: Synthetic peptide
  Seed: LRMKWMMAMKYPITA
LRMKYMMNMVYPPTA

SEQ ID NO: 248119 - protein, 15 aa, Artificial Sequence
  Description of Artificial Sequence: Synthetic peptide
  Seed: LRMKWMMAMKYPITA
LRMKYMMNMVYPQTA

SEQ ID NO: 248120 - protein, 15 aa, Artificial Sequence
  Description of Artificial Sequence: Synthetic peptide
  Seed: LRMKWMMAMKYPITA
LRMKYMMNMVYPRTA

SEQ ID NO: 248121 - protein, 15 aa, Artificial Sequence
  Description of Artificial Sequence: Synthetic peptide
  Seed: LRMKWMMAMKYPITA
LRMKYMMNMVYPSTA

SEQ ID NO: 248122 - protein, 15 aa, Artificial Sequence
  Description of Artificial Sequence: Synthetic peptide
  Seed: LRMKWMMAMKYPITA
LRMKYMMNMVYPTTA

SEQ ID NO: 248123 - protein, 15 aa, Artificial Sequence
  Description of Artificial Sequence: Synthetic peptide
  Seed: LRMKWMMAMKYPITA
LRMKYMMNMVYPVTA

SEQ ID NO: 248124 - protein, 15 aa, Artificial Sequence
  Description of Artificial Sequence: Synthetic peptide
  Seed: LRMKWMMAMKYPITA
LRMKYMMNMVYPWTA

SEQ ID NO: 248125 - protein, 15 aa, Artificial Sequence
  Description of Artificial Sequence: Synthetic peptide
  Seed: LRMKWMMAMKYPITA
LRMKYMMNMVYPYTA

SEQ ID NO: 248126 - protein, 15 aa, Artificial Sequence
  Description of Artificial Sequence: Synthetic peptide
  Seed: LRMKWMMAMKYPITA
LRMKYMMNMWYPATA

SEQ ID NO: 248127 - protein, 15 aa, Artificial Sequence
  Description of Artificial Sequence: Synthetic peptide
  Seed: LRMKWMMAMKYPITA
LRMKYMMNMWYPITA

SEQ ID NO: 248128 - protein, 15 aa, Artificial Sequence
  Description of Artificial Sequence: Synthetic peptide
  Seed: LRMKWMMAMKYPITA
LRMKYMMNMWYPLTA

SEQ ID NO: 248129 - protein, 15 aa, Artificial Sequence
  Description of Artificial Sequence: Synthetic peptide
  Seed: LRMKWMMAMKYPITA
LRMKYMMNMWYPMTA

SEQ ID NO: 248130 - protein, 15 aa, Artificial Sequence
  Description of Artificial Sequence: Synthetic peptide
  Seed: LRMKWMMAMKYPITA
LRMKYMMNMWYPVTA

SEQ ID NO: 248131 - protein, 15 aa, Artificial Sequence
  Description of Artificial Sequence: Synthetic peptide
  Seed: LRMKWMMAMKYPITA
LRMKYMMNMYYPFTA

SEQ ID NO: 248132 - protein, 15 aa, Artificial Sequence
  Description of Artificial Sequence: Synthetic peptide
  Seed: LRMKWMMAMKYPITA
LRMKYMMNMYYPITA

SEQ ID NO: 248133 - protein, 15 aa, Artificial Sequence
  Description of Artificial Sequence: Synthetic peptide
  Seed: LRMKWMMAMKYPITA
LRMKYMMNMYYPLTA

SEQ ID NO: 248134 - protein, 15 aa, Artificial Sequence
  Description of Artificial Sequence: Synthetic peptide
  Seed: LRMKWMMAMKYPITA
LRMKYMMNMYYPVTA

SEQ ID NO: 248135 - protein, 15 aa, Artificial Sequence
  Description of Artificial Sequence: Synthetic peptide
  Seed: LRMKWMMAMKYPITA
LRMKYMMPMAYPATA

SEQ ID NO: 248136 - protein, 15 aa, Artificial Sequence
  Description of Artificial Sequence: Synthetic peptide
  Seed: LRMKWMMAMKYPITA
LRMKYMMPMAYPCTA

SEQ ID NO: 248137 - protein, 15 aa, Artificial Sequence
  Description of Artificial Sequence: Synthetic peptide
  Seed: LRMKWMMAMKYPITA
LRMKYMMPMAYPETA

SEQ ID NO: 248138 - protein, 15 aa, Artificial Sequence
  Description of Artificial Sequence: Synthetic peptide
  Seed: LRMKWMMAMKYPITA
LRMKYMMPMAYPFTA

SEQ ID NO: 248139 - protein, 15 aa, Artificial Sequence
  Description of Artificial Sequence: Synthetic peptide
  Seed: LRMKWMMAMKYPITA
LRMKYMMPMAYPGTA

SEQ ID NO: 248140 - protein, 15 aa, Artificial Sequence
  Description of Artificial Sequence: Synthetic peptide
  Seed: LRMKWMMAMKYPITA
LRMKYMMPMAYPHTA

SEQ ID NO: 248141 - protein, 15 aa, Artificial Sequence
  Description of Artificial Sequence: Synthetic peptide
  Seed: LRMKWMMAMKYPITA
LRMKYMMPMAYPITA

SEQ ID NO: 248142 - protein, 15 aa, Artificial Sequence
  Description of Artificial Sequence: Synthetic peptide
  Seed: LRMKWMMAMKYPITA
LRMKYMMPMAYPKTA

SEQ ID NO: 248143 - protein, 15 aa, Artificial Sequence
  Description of Artificial Sequence: Synthetic peptide
  Seed: LRMKWMMAMKYPITA
LRMKYMMPMAYPLTA

SEQ ID NO: 248144 - protein, 15 aa, Artificial Sequence
  Description of Artificial Sequence: Synthetic peptide
  Seed: LRMKWMMAMKYPITA
LRMKYMMPMAYPMTA

SEQ ID NO: 248145 - protein, 15 aa, Artificial Sequence
  Description of Artificial Sequence: Synthetic peptide
  Seed: LRMKWMMAMKYPITA
LRMKYMMPMAYPNTA

SEQ ID NO: 248146 - protein, 15 aa, Artificial Sequence
  Description of Artificial Sequence: Synthetic peptide
  Seed: LRMKWMMAMKYPITA
LRMKYMMPMAYPPTA

SEQ ID NO: 248147 - protein, 15 aa, Artificial Sequence
  Description of Artificial Sequence: Synthetic peptide
  Seed: LRMKWMMAMKYPITA
LRMKYMMPMAYPQTA

SEQ ID NO: 248148 - protein, 15 aa, Artificial Sequence
  Description of Artificial Sequence: Synthetic peptide
  Seed: LRMKWMMAMKYPITA
LRMKYMMPMAYPRTA

SEQ ID NO: 248149 - protein, 15 aa, Artificial Sequence
  Description of Artificial Sequence: Synthetic peptide
  Seed: LRMKWMMAMKYPITA
LRMKYMMPMAYPSTA

SEQ ID NO: 248150 - protein, 15 aa, Artificial Sequence
  Description of Artificial Sequence: Synthetic peptide
  Seed: LRMKWMMAMKYPITA
LRMKYMMPMAYPTTA

SEQ ID NO: 248151 - protein, 15 aa, Artificial Sequence
  Description of Artificial Sequence: Synthetic peptide
  Seed: LRMKWMMAMKYPITA
LRMKYMMPMAYPVTA

SEQ ID NO: 248152 - protein, 15 aa, Artificial Sequence
  Description of Artificial Sequence: Synthetic peptide
  Seed: LRMKWMMAMKYPITA
LRMKYMMPMAYPWTA

SEQ ID NO: 248153 - protein, 15 aa, Artificial Sequence
  Description of Artificial Sequence: Synthetic peptide
  Seed: LRMKWMMAMKYPITA
LRMKYMMPMAYPYTA

SEQ ID NO: 248154 - protein, 15 aa, Artificial Sequence
  Description of Artificial Sequence: Synthetic peptide
  Seed: LRMKWMMAMKYPITA
LRMKYMMPMCYPITA

SEQ ID NO: 248155 - protein, 15 aa, Artificial Sequence
  Description of Artificial Sequence: Synthetic peptide
  Seed: LRMKWMMAMKYPITA
LRMKYMMPMCYPLTA

SEQ ID NO: 248156 - protein, 15 aa, Artificial Sequence
  Description of Artificial Sequence: Synthetic peptide
  Seed: LRMKWMMAMKYPITA
LRMKYMMPMCYPVTA

SEQ ID NO: 248157 - protein, 15 aa, Artificial Sequence
  Description of Artificial Sequence: Synthetic peptide
  Seed: LRMKWMMAMKYPITA
LRMKYMMPMFYPITA

SEQ ID NO: 248158 - protein, 15 aa, Artificial Sequence
  Description of Artificial Sequence: Synthetic peptide
  Seed: LRMKWMMAMKYPITA
LRMKYMMPMFYPLTA

SEQ ID NO: 248159 - protein, 15 aa, Artificial Sequence
  Description of Artificial Sequence: Synthetic peptide
  Seed: LRMKWMMAMKYPITA
LRMKYMMPMFYPVTA

SEQ ID NO: 248160 - protein, 15 aa, Artificial Sequence
  Description of Artificial Sequence: Synthetic peptide
  Seed: LRMKWMMAMKYPITA
LRMKYMMPMGYPATA

SEQ ID NO: 248161 - protein, 15 aa, Artificial Sequence
  Description of Artificial Sequence: Synthetic peptide
  Seed: LRMKWMMAMKYPITA
LRMKYMMPMGYPFTA

SEQ ID NO: 248162 - protein, 15 aa, Artificial Sequence
  Description of Artificial Sequence: Synthetic peptide
  Seed: LRMKWMMAMKYPITA
LRMKYMMPMGYPITA

SEQ ID NO: 248163 - protein, 15 aa, Artificial Sequence
  Description of Artificial Sequence: Synthetic peptide
  Seed: LRMKWMMAMKYPITA
LRMKYMMPMGYPLTA

SEQ ID NO: 248164 - protein, 15 aa, Artificial Sequence
  Description of Artificial Sequence: Synthetic peptide
  Seed: LRMKWMMAMKYPITA
LRMKYMMPMGYPMTA

SEQ ID NO: 248165 - protein, 15 aa, Artificial Sequence
  Description of Artificial Sequence: Synthetic peptide
  Seed: LRMKWMMAMKYPITA
LRMKYMMPMGYPSTA

SEQ ID NO: 248166 - protein, 15 aa, Artificial Sequence
  Description of Artificial Sequence: Synthetic peptide
  Seed: LRMKWMMAMKYPITA
LRMKYMMPMGYPTTA

SEQ ID NO: 248167 - protein, 15 aa, Artificial Sequence
  Description of Artificial Sequence: Synthetic peptide
  Seed: LRMKWMMAMKYPITA
LRMKYMMPMGYPVTA

SEQ ID NO: 248168 - protein, 15 aa, Artificial Sequence
  Description of Artificial Sequence: Synthetic peptide
  Seed: LRMKWMMAMKYPITA
LRMKYMMPMGYPYTA

SEQ ID NO: 248169 - protein, 15 aa, Artificial Sequence
  Description of Artificial Sequence: Synthetic peptide
  Seed: LRMKWMMAMKYPITA
LRMKYMMPMHYPITA

SEQ ID NO: 248170 - protein, 15 aa, Artificial Sequence
  Description of Artificial Sequence: Synthetic peptide
  Seed: LRMKWMMAMKYPITA
LRMKYMMPMHYPLTA

SEQ ID NO: 248171 - protein, 15 aa, Artificial Sequence
  Description of Artificial Sequence: Synthetic peptide
  Seed: LRMKWMMAMKYPITA
LRMKYMMPMHYPVTA

SEQ ID NO: 248172 - protein, 15 aa, Artificial Sequence
  Description of Artificial Sequence: Synthetic peptide
  Seed: LRMKWMMAMKYPITA
LRMKYMMPMIYPATA

SEQ ID NO: 248173 - protein, 15 aa, Artificial Sequence
  Description of Artificial Sequence: Synthetic peptide
  Seed: LRMKWMMAMKYPITA
LRMKYMMPMIYPFTA

SEQ ID NO: 248174 - protein, 15 aa, Artificial Sequence
  Description of Artificial Sequence: Synthetic peptide
  Seed: LRMKWMMAMKYPITA
LRMKYMMPMIYPITA

SEQ ID NO: 248175 - protein, 15 aa, Artificial Sequence
  Description of Artificial Sequence: Synthetic peptide
  Seed: LRMKWMMAMKYPITA
LRMKYMMPMIYPLTA

SEQ ID NO: 248176 - protein, 15 aa, Artificial Sequence
  Description of Artificial Sequence: Synthetic peptide
  Seed: LRMKWMMAMKYPITA
LRMKYMMPMIYPMTA

SEQ ID NO: 248177 - protein, 15 aa, Artificial Sequence
  Description of Artificial Sequence: Synthetic peptide
  Seed: LRMKWMMAMKYPITA
LRMKYMMPMIYPNTA

SEQ ID NO: 248178 - protein, 15 aa, Artificial Sequence
  Description of Artificial Sequence: Synthetic peptide
  Seed: LRMKWMMAMKYPITA
LRMKYMMPMIYPSTA

SEQ ID NO: 248179 - protein, 15 aa, Artificial Sequence
  Description of Artificial Sequence: Synthetic peptide
  Seed: LRMKWMMAMKYPITA
LRMKYMMPMIYPTTA

SEQ ID NO: 248180 - protein, 15 aa, Artificial Sequence
  Description of Artificial Sequence: Synthetic peptide
  Seed: LRMKWMMAMKYPITA
LRMKYMMPMIYPVTA

SEQ ID NO: 248181 - protein, 15 aa, Artificial Sequence
  Description of Artificial Sequence: Synthetic peptide
  Seed: LRMKWMMAMKYPITA
LRMKYMMPMKYPITA

SEQ ID NO: 248182 - protein, 15 aa, Artificial Sequence
  Description of Artificial Sequence: Synthetic peptide
  Seed: LRMKWMMAMKYPITA
LRMKYMMPMKYPLTA

SEQ ID NO: 248183 - protein, 15 aa, Artificial Sequence
  Description of Artificial Sequence: Synthetic peptide
  Seed: LRMKWMMAMKYPITA
LRMKYMMPMLYPATA

SEQ ID NO: 248184 - protein, 15 aa, Artificial Sequence
  Description of Artificial Sequence: Synthetic peptide
  Seed: LRMKWMMAMKYPITA
LRMKYMMPMLYPITA

SEQ ID NO: 248185 - protein, 15 aa, Artificial Sequence
  Description of Artificial Sequence: Synthetic peptide
  Seed: LRMKWMMAMKYPITA
LRMKYMMPMLYPLTA

SEQ ID NO: 248186 - protein, 15 aa, Artificial Sequence
  Description of Artificial Sequence: Synthetic peptide
  Seed: LRMKWMMAMKYPITA
LRMKYMMPMLYPMTA

SEQ ID NO: 248187 - protein, 15 aa, Artificial Sequence
  Description of Artificial Sequence: Synthetic peptide
  Seed: LRMKWMMAMKYPITA
LRMKYMMPMLYPVTA

SEQ ID NO: 248188 - protein, 15 aa, Artificial Sequence
  Description of Artificial Sequence: Synthetic peptide
  Seed: LRMKWMMAMKYPITA
LRMKYMMPMMYPATA

SEQ ID NO: 248189 - protein, 15 aa, Artificial Sequence
  Description of Artificial Sequence: Synthetic peptide
  Seed: LRMKWMMAMKYPITA
LRMKYMMPMMYPGTA

SEQ ID NO: 248190 - protein, 15 aa, Artificial Sequence
  Description of Artificial Sequence: Synthetic peptide
  Seed: LRMKWMMAMKYPITA
LRMKYMMPMMYPITA

SEQ ID NO: 248191 - protein, 15 aa, Artificial Sequence
  Description of Artificial Sequence: Synthetic peptide
  Seed: LRMKWMMAMKYPITA
LRMKYMMPMMYPLTA

SEQ ID NO: 248192 - protein, 15 aa, Artificial Sequence
  Description of Artificial Sequence: Synthetic peptide
  Seed: LRMKWMMAMKYPITA
LRMKYMMPMMYPMTA

SEQ ID NO: 248193 - protein, 15 aa, Artificial Sequence
  Description of Artificial Sequence: Synthetic peptide
  Seed: LRMKWMMAMKYPITA
LRMKYMMPMMYPNTA

SEQ ID NO: 248194 - protein, 15 aa, Artificial Sequence
  Description of Artificial Sequence: Synthetic peptide
  Seed: LRMKWMMAMKYPITA
LRMKYMMPMMYPSTA

SEQ ID NO: 248195 - protein, 15 aa, Artificial Sequence
  Description of Artificial Sequence: Synthetic peptide
  Seed: LRMKWMMAMKYPITA
LRMKYMMPMMYPTTA

SEQ ID NO: 248196 - protein, 15 aa, Artificial Sequence
  Description of Artificial Sequence: Synthetic peptide
  Seed: LRMKWMMAMKYPITA
LRMKYMMPMMYPVTA

SEQ ID NO: 248197 - protein, 15 aa, Artificial Sequence
  Description of Artificial Sequence: Synthetic peptide
  Seed: LRMKWMMAMKYPITA
LRMKYMMPMNYPATA

SEQ ID NO: 248198 - protein, 15 aa, Artificial Sequence
  Description of Artificial Sequence: Synthetic peptide
  Seed: LRMKWMMAMKYPITA
LRMKYMMPMNYPFTA

SEQ ID NO: 248199 - protein, 15 aa, Artificial Sequence
  Description of Artificial Sequence: Synthetic peptide
  Seed: LRMKWMMAMKYPITA
LRMKYMMPMNYPITA

SEQ ID NO: 248200 - protein, 15 aa, Artificial Sequence
  Description of Artificial Sequence: Synthetic peptide
  Seed: LRMKWMMAMKYPITA
LRMKYMMPMNYPLTA

SEQ ID NO: 248201 - protein, 15 aa, Artificial Sequence
  Description of Artificial Sequence: Synthetic peptide
  Seed: LRMKWMMAMKYPITA
LRMKYMMPMNYPMTA

SEQ ID NO: 248202 - protein, 15 aa, Artificial Sequence
  Description of Artificial Sequence: Synthetic peptide
  Seed: LRMKWMMAMKYPITA
LRMKYMMPMNYPSTA

SEQ ID NO: 248203 - protein, 15 aa, Artificial Sequence
  Description of Artificial Sequence: Synthetic peptide
  Seed: LRMKWMMAMKYPITA
LRMKYMMPMNYPTTA

SEQ ID NO: 248204 - protein, 15 aa, Artificial Sequence
  Description of Artificial Sequence: Synthetic peptide
  Seed: LRMKWMMAMKYPITA
LRMKYMMPMNYPVTA

SEQ ID NO: 248205 - protein, 15 aa, Artificial Sequence
  Description of Artificial Sequence: Synthetic peptide
  Seed: LRMKWMMAMKYPITA
LRMKYMMPMPYPATA

SEQ ID NO: 248206 - protein, 15 aa, Artificial Sequence
  Description of Artificial Sequence: Synthetic peptide
  Seed: LRMKWMMAMKYPITA
LRMKYMMPMPYPFTA

SEQ ID NO: 248207 - protein, 15 aa, Artificial Sequence
  Description of Artificial Sequence: Synthetic peptide
  Seed: LRMKWMMAMKYPITA
LRMKYMMPMPYPITA

SEQ ID NO: 248208 - protein, 15 aa, Artificial Sequence
  Description of Artificial Sequence: Synthetic peptide
  Seed: LRMKWMMAMKYPITA
LRMKYMMPMPYPLTA

SEQ ID NO: 248209 - protein, 15 aa, Artificial Sequence
  Description of Artificial Sequence: Synthetic peptide
  Seed: LRMKWMMAMKYPITA
LRMKYMMPMPYPMTA

SEQ ID NO: 248210 - protein, 15 aa, Artificial Sequence
  Description of Artificial Sequence: Synthetic peptide
  Seed: LRMKWMMAMKYPITA
LRMKYMMPMPYPNTA

SEQ ID NO: 248211 - protein, 15 aa, Artificial Sequence
  Description of Artificial Sequence: Synthetic peptide
  Seed: LRMKWMMAMKYPITA
LRMKYMMPMPYPQTA

SEQ ID NO: 248212 - protein, 15 aa, Artificial Sequence
  Description of Artificial Sequence: Synthetic peptide
  Seed: LRMKWMMAMKYPITA
LRMKYMMPMPYPRTA

SEQ ID NO: 248213 - protein, 15 aa, Artificial Sequence
  Description of Artificial Sequence: Synthetic peptide
  Seed: LRMKWMMAMKYPITA
LRMKYMMPMPYPSTA

SEQ ID NO: 248214 - protein, 15 aa, Artificial Sequence
  Description of Artificial Sequence: Synthetic peptide
  Seed: LRMKWMMAMKYPITA
LRMKYMMPMPYPTTA

SEQ ID NO: 248215 - protein, 15 aa, Artificial Sequence
  Description of Artificial Sequence: Synthetic peptide
  Seed: LRMKWMMAMKYPITA
LRMKYMMPMPYPVTA

SEQ ID NO: 248216 - protein, 15 aa, Artificial Sequence
  Description of Artificial Sequence: Synthetic peptide
  Seed: LRMKWMMAMKYPITA
LRMKYMMPMPYPWTA

SEQ ID NO: 248217 - protein, 15 aa, Artificial Sequence
  Description of Artificial Sequence: Synthetic peptide
  Seed: LRMKWMMAMKYPITA
LRMKYMMPMPYPYTA

SEQ ID NO: 248218 - protein, 15 aa, Artificial Sequence
  Description of Artificial Sequence: Synthetic peptide
  Seed: LRMKWMMAMKYPITA
LRMKYMMPMQYPITA

SEQ ID NO: 248219 - protein, 15 aa, Artificial Sequence
  Description of Artificial Sequence: Synthetic peptide
  Seed: LRMKWMMAMKYPITA
LRMKYMMPMQYPLTA

SEQ ID NO: 248220 - protein, 15 aa, Artificial Sequence
  Description of Artificial Sequence: Synthetic peptide
  Seed: LRMKWMMAMKYPITA
LRMKYMMPMQYPMTA

SEQ ID NO: 248221 - protein, 15 aa, Artificial Sequence
  Description of Artificial Sequence: Synthetic peptide
  Seed: LRMKWMMAMKYPITA
LRMKYMMPMQYPVTA

SEQ ID NO: 248222 - protein, 15 aa, Artificial Sequence
  Description of Artificial Sequence: Synthetic peptide
  Seed: LRMKWMMAMKYPITA
LRMKYMMPMSYPATA

SEQ ID NO: 248223 - protein, 15 aa, Artificial Sequence
  Description of Artificial Sequence: Synthetic peptide
  Seed: LRMKWMMAMKYPITA
LRMKYMMPMSYPFTA

SEQ ID NO: 248224 - protein, 15 aa, Artificial Sequence
  Description of Artificial Sequence: Synthetic peptide
  Seed: LRMKWMMAMKYPITA
LRMKYMMPMSYPGTA

SEQ ID NO: 248225 - protein, 15 aa, Artificial Sequence
  Description of Artificial Sequence: Synthetic peptide
  Seed: LRMKWMMAMKYPITA
LRMKYMMPMSYPITA

SEQ ID NO: 248226 - protein, 15 aa, Artificial Sequence
  Description of Artificial Sequence: Synthetic peptide
  Seed: LRMKWMMAMKYPITA
LRMKYMMPMSYPLTA

SEQ ID NO: 248227 - protein, 15 aa, Artificial Sequence
  Description of Artificial Sequence: Synthetic peptide
  Seed: LRMKWMMAMKYPITA
LRMKYMMPMSYPMTA

SEQ ID NO: 248228 - protein, 15 aa, Artificial Sequence
  Description of Artificial Sequence: Synthetic peptide
  Seed: LRMKWMMAMKYPITA
LRMKYMMPMSYPNTA

SEQ ID NO: 248229 - protein, 15 aa, Artificial Sequence
  Description of Artificial Sequence: Synthetic peptide
  Seed: LRMKWMMAMKYPITA
LRMKYMMPMSYPSTA

SEQ ID NO: 248230 - protein, 15 aa, Artificial Sequence
  Description of Artificial Sequence: Synthetic peptide
  Seed: LRMKWMMAMKYPITA
LRMKYMMPMSYPTTA

SEQ ID NO: 248231 - protein, 15 aa, Artificial Sequence
  Description of Artificial Sequence: Synthetic peptide
  Seed: LRMKWMMAMKYPITA
LRMKYMMPMSYPVTA

SEQ ID NO: 248232 - protein, 15 aa, Artificial Sequence
  Description of Artificial Sequence: Synthetic peptide
  Seed: LRMKWMMAMKYPITA
LRMKYMMPMSYPYTA

SEQ ID NO: 248233 - protein, 15 aa, Artificial Sequence
  Description of Artificial Sequence: Synthetic peptide
  Seed: LRMKWMMAMKYPITA
LRMKYMMPMTYPATA

SEQ ID NO: 248234 - protein, 15 aa, Artificial Sequence
  Description of Artificial Sequence: Synthetic peptide
  Seed: LRMKWMMAMKYPITA
LRMKYMMPMTYPFTA

SEQ ID NO: 248235 - protein, 15 aa, Artificial Sequence
  Description of Artificial Sequence: Synthetic peptide
  Seed: LRMKWMMAMKYPITA
LRMKYMMPMTYPITA

SEQ ID NO: 248236 - protein, 15 aa, Artificial Sequence
  Description of Artificial Sequence: Synthetic peptide
  Seed: LRMKWMMAMKYPITA
LRMKYMMPMTYPLTA

SEQ ID NO: 248237 - protein, 15 aa, Artificial Sequence
  Description of Artificial Sequence: Synthetic peptide
  Seed: LRMKWMMAMKYPITA
LRMKYMMPMTYPMTA

SEQ ID NO: 248238 - protein, 15 aa, Artificial Sequence
  Description of Artificial Sequence: Synthetic peptide
  Seed: LRMKWMMAMKYPITA
LRMKYMMPMTYPSTA

SEQ ID NO: 248239 - protein, 15 aa, Artificial Sequence
  Description of Artificial Sequence: Synthetic peptide
  Seed: LRMKWMMAMKYPITA
LRMKYMMPMTYPTTA

SEQ ID NO: 248240 - protein, 15 aa, Artificial Sequence
  Description of Artificial Sequence: Synthetic peptide
  Seed: LRMKWMMAMKYPITA
LRMKYMMPMTYPVTA

SEQ ID NO: 248241 - protein, 15 aa, Artificial Sequence
  Description of Artificial Sequence: Synthetic peptide
  Seed: LRMKWMMAMKYPITA
LRMKYMMPMTYPYTA

SEQ ID NO: 248242 - protein, 15 aa, Artificial Sequence
  Description of Artificial Sequence: Synthetic peptide
  Seed: LRMKWMMAMKYPITA
LRMKYMMPMVYPATA

SEQ ID NO: 248243 - protein, 15 aa, Artificial Sequence
  Description of Artificial Sequence: Synthetic peptide
  Seed: LRMKWMMAMKYPITA
LRMKYMMPMVYPFTA

SEQ ID NO: 248244 - protein, 15 aa, Artificial Sequence
  Description of Artificial Sequence: Synthetic peptide
  Seed: LRMKWMMAMKYPITA
LRMKYMMPMVYPGTA

SEQ ID NO: 248245 - protein, 15 aa, Artificial Sequence
  Description of Artificial Sequence: Synthetic peptide
  Seed: LRMKWMMAMKYPITA
LRMKYMMPMVYPHTA

SEQ ID NO: 248246 - protein, 15 aa, Artificial Sequence
  Description of Artificial Sequence: Synthetic peptide
  Seed: LRMKWMMAMKYPITA
LRMKYMMPMVYPITA

SEQ ID NO: 248247 - protein, 15 aa, Artificial Sequence
  Description of Artificial Sequence: Synthetic peptide
  Seed: LRMKWMMAMKYPITA
LRMKYMMPMVYPLTA

SEQ ID NO: 248248 - protein, 15 aa, Artificial Sequence
  Description of Artificial Sequence: Synthetic peptide
  Seed: LRMKWMMAMKYPITA
LRMKYMMPMVYPMTA

SEQ ID NO: 248249 - protein, 15 aa, Artificial Sequence
  Description of Artificial Sequence: Synthetic peptide
  Seed: LRMKWMMAMKYPITA
LRMKYMMPMVYPNTA

SEQ ID NO: 248250 - protein, 15 aa, Artificial Sequence
  Description of Artificial Sequence: Synthetic peptide
  Seed: LRMKWMMAMKYPITA
LRMKYMMPMVYPQTA

SEQ ID NO: 248251 - protein, 15 aa, Artificial Sequence
  Description of Artificial Sequence: Synthetic peptide
  Seed: LRMKWMMAMKYPITA
LRMKYMMPMVYPSTA

SEQ ID NO: 248252 - protein, 15 aa, Artificial Sequence
  Description of Artificial Sequence: Synthetic peptide
  Seed: LRMKWMMAMKYPITA
LRMKYMMPMVYPTTA

SEQ ID NO: 248253 - protein, 15 aa, Artificial Sequence
  Description of Artificial Sequence: Synthetic peptide
  Seed: LRMKWMMAMKYPITA
LRMKYMMPMVYPVTA

SEQ ID NO: 248254 - protein, 15 aa, Artificial Sequence
  Description of Artificial Sequence: Synthetic peptide
  Seed: LRMKWMMAMKYPITA
LRMKYMMPMVYPYTA

SEQ ID NO: 248255 - protein, 15 aa, Artificial Sequence
  Description of Artificial Sequence: Synthetic peptide
  Seed: LRMKWMMAMKYPITA
LRMKYMMQMAYPATA

SEQ ID NO: 248256 - protein, 15 aa, Artificial Sequence
  Description of Artificial Sequence: Synthetic peptide
  Seed: LRMKWMMAMKYPITA
LRMKYMMQMAYPCTA

SEQ ID NO: 248257 - protein, 15 aa, Artificial Sequence
  Description of Artificial Sequence: Synthetic peptide
  Seed: LRMKWMMAMKYPITA
LRMKYMMQMAYPDTA

SEQ ID NO: 248258 - protein, 15 aa, Artificial Sequence
  Description of Artificial Sequence: Synthetic peptide
  Seed: LRMKWMMAMKYPITA
LRMKYMMQMAYPETA

SEQ ID NO: 248259 - protein, 15 aa, Artificial Sequence
  Description of Artificial Sequence: Synthetic peptide
  Seed: LRMKWMMAMKYPITA
LRMKYMMQMAYPFTA

SEQ ID NO: 248260 - protein, 15 aa, Artificial Sequence
  Description of Artificial Sequence: Synthetic peptide
  Seed: LRMKWMMAMKYPITA
LRMKYMMQMAYPGTA

SEQ ID NO: 248261 - protein, 15 aa, Artificial Sequence
  Description of Artificial Sequence: Synthetic peptide
  Seed: LRMKWMMAMKYPITA
LRMKYMMQMAYPHTA

SEQ ID NO: 248262 - protein, 15 aa, Artificial Sequence
  Description of Artificial Sequence: Synthetic peptide
  Seed: LRMKWMMAMKYPITA
LRMKYMMQMAYPITA

SEQ ID NO: 248263 - protein, 15 aa, Artificial Sequence
  Description of Artificial Sequence: Synthetic peptide
  Seed: LRMKWMMAMKYPITA
LRMKYMMQMAYPKTA

SEQ ID NO: 248264 - protein, 15 aa, Artificial Sequence
  Description of Artificial Sequence: Synthetic peptide
  Seed: LRMKWMMAMKYPITA
LRMKYMMQMAYPLTA

SEQ ID NO: 248265 - protein, 15 aa, Artificial Sequence
  Description of Artificial Sequence: Synthetic peptide
  Seed: LRMKWMMAMKYPITA
LRMKYMMQMAYPMTA

SEQ ID NO: 248266 - protein, 15 aa, Artificial Sequence
  Description of Artificial Sequence: Synthetic peptide
  Seed: LRMKWMMAMKYPITA
LRMKYMMQMAYPNTA

SEQ ID NO: 248267 - protein, 15 aa, Artificial Sequence
  Description of Artificial Sequence: Synthetic peptide
  Seed: LRMKWMMAMKYPITA
LRMKYMMQMAYPPTA

SEQ ID NO: 248268 - protein, 15 aa, Artificial Sequence
  Description of Artificial Sequence: Synthetic peptide
  Seed: LRMKWMMAMKYPITA
LRMKYMMQMAYPQTA

SEQ ID NO: 248269 - protein, 15 aa, Artificial Sequence
  Description of Artificial Sequence: Synthetic peptide
  Seed: LRMKWMMAMKYPITA
LRMKYMMQMAYPRTA

SEQ ID NO: 248270 - protein, 15 aa, Artificial Sequence
  Description of Artificial Sequence: Synthetic peptide
  Seed: LRMKWMMAMKYPITA
LRMKYMMQMAYPSTA

SEQ ID NO: 248271 - protein, 15 aa, Artificial Sequence
  Description of Artificial Sequence: Synthetic peptide
  Seed: LRMKWMMAMKYPITA
LRMKYMMQMAYPTTA

SEQ ID NO: 248272 - protein, 15 aa, Artificial Sequence
  Description of Artificial Sequence: Synthetic peptide
  Seed: LRMKWMMAMKYPITA
LRMKYMMQMAYPVTA

SEQ ID NO: 248273 - protein, 15 aa, Artificial Sequence
  Description of Artificial Sequence: Synthetic peptide
  Seed: LRMKWMMAMKYPITA
LRMKYMMQMAYPWTA

SEQ ID NO: 248274 - protein, 15 aa, Artificial Sequence
  Description of Artificial Sequence: Synthetic peptide
  Seed: LRMKWMMAMKYPITA
LRMKYMMQMAYPYTA

SEQ ID NO: 248275 - protein, 15 aa, Artificial Sequence
  Description of Artificial Sequence: Synthetic peptide
  Seed: LRMKWMMAMKYPITA
LRMKYMMQMCYPATA

SEQ ID NO: 248276 - protein, 15 aa, Artificial Sequence
  Description of Artificial Sequence: Synthetic peptide
  Seed: LRMKWMMAMKYPITA
LRMKYMMQMCYPITA

SEQ ID NO: 248277 - protein, 15 aa, Artificial Sequence
  Description of Artificial Sequence: Synthetic peptide
  Seed: LRMKWMMAMKYPITA
LRMKYMMQMCYPLTA

SEQ ID NO: 248278 - protein, 15 aa, Artificial Sequence
  Description of Artificial Sequence: Synthetic peptide
  Seed: LRMKWMMAMKYPITA
LRMKYMMQMCYPMTA

SEQ ID NO: 248279 - protein, 15 aa, Artificial Sequence
  Description of Artificial Sequence: Synthetic peptide
  Seed: LRMKWMMAMKYPITA
LRMKYMMQMCYPNTA

SEQ ID NO: 248280 - protein, 15 aa, Artificial Sequence
  Description of Artificial Sequence: Synthetic peptide
  Seed: LRMKWMMAMKYPITA
LRMKYMMQMCYPSTA

SEQ ID NO: 248281 - protein, 15 aa, Artificial Sequence
  Description of Artificial Sequence: Synthetic peptide
  Seed: LRMKWMMAMKYPITA
LRMKYMMQMCYPTTA

SEQ ID NO: 248282 - protein, 15 aa, Artificial Sequence
  Description of Artificial Sequence: Synthetic peptide
  Seed: LRMKWMMAMKYPITA
LRMKYMMQMCYPVTA

SEQ ID NO: 248283 - protein, 15 aa, Artificial Sequence
  Description of Artificial Sequence: Synthetic peptide
  Seed: LRMKWMMAMKYPITA
LRMKYMMQMDYPATA

SEQ ID NO: 248284 - protein, 15 aa, Artificial Sequence
  Description of Artificial Sequence: Synthetic peptide
  Seed: LRMKWMMAMKYPITA
LRMKYMMQMDYPITA

SEQ ID NO: 248285 - protein, 15 aa, Artificial Sequence
  Description of Artificial Sequence: Synthetic peptide
  Seed: LRMKWMMAMKYPITA
LRMKYMMQMDYPLTA

SEQ ID NO: 248286 - protein, 15 aa, Artificial Sequence
  Description of Artificial Sequence: Synthetic peptide
  Seed: LRMKWMMAMKYPITA
LRMKYMMQMDYPMTA

SEQ ID NO: 248287 - protein, 15 aa, Artificial Sequence
  Description of Artificial Sequence: Synthetic peptide
  Seed: LRMKWMMAMKYPITA
LRMKYMMQMDYPVTA

SEQ ID NO: 248288 - protein, 15 aa, Artificial Sequence
  Description of Artificial Sequence: Synthetic peptide
  Seed: LRMKWMMAMKYPITA
LRMKYMMQMEYPATA

SEQ ID NO: 248289 - protein, 15 aa, Artificial Sequence
  Description of Artificial Sequence: Synthetic peptide
  Seed: LRMKWMMAMKYPITA
LRMKYMMQMEYPITA

SEQ ID NO: 248290 - protein, 15 aa, Artificial Sequence
  Description of Artificial Sequence: Synthetic peptide
  Seed: LRMKWMMAMKYPITA
LRMKYMMQMEYPLTA

SEQ ID NO: 248291 - protein, 15 aa, Artificial Sequence
  Description of Artificial Sequence: Synthetic peptide
  Seed: LRMKWMMAMKYPITA
LRMKYMMQMEYPMTA

SEQ ID NO: 248292 - protein, 15 aa, Artificial Sequence
  Description of Artificial Sequence: Synthetic peptide
  Seed: LRMKWMMAMKYPITA
LRMKYMMQMEYPNTA

SEQ ID NO: 248293 - protein, 15 aa, Artificial Sequence
  Description of Artificial Sequence: Synthetic peptide
  Seed: LRMKWMMAMKYPITA
LRMKYMMQMEYPSTA

SEQ ID NO: 248294 - protein, 15 aa, Artificial Sequence
  Description of Artificial Sequence: Synthetic peptide
  Seed: LRMKWMMAMKYPITA
LRMKYMMQMEYPTTA

SEQ ID NO: 248295 - protein, 15 aa, Artificial Sequence
  Description of Artificial Sequence: Synthetic peptide
  Seed: LRMKWMMAMKYPITA
LRMKYMMQMEYPVTA

SEQ ID NO: 248296 - protein, 15 aa, Artificial Sequence
  Description of Artificial Sequence: Synthetic peptide
  Seed: LRMKWMMAMKYPITA
LRMKYMMQMFYPATA

SEQ ID NO: 248297 - protein, 15 aa, Artificial Sequence
  Description of Artificial Sequence: Synthetic peptide
  Seed: LRMKWMMAMKYPITA
LRMKYMMQMFYPFTA

SEQ ID NO: 248298 - protein, 15 aa, Artificial Sequence
  Description of Artificial Sequence: Synthetic peptide
  Seed: LRMKWMMAMKYPITA
LRMKYMMQMFYPITA

SEQ ID NO: 248299 - protein, 15 aa, Artificial Sequence
  Description of Artificial Sequence: Synthetic peptide
  Seed: LRMKWMMAMKYPITA
LRMKYMMQMFYPLTA

SEQ ID NO: 248300 - protein, 15 aa, Artificial Sequence
  Description of Artificial Sequence: Synthetic peptide
  Seed: LRMKWMMAMKYPITA
LRMKYMMQMFYPMTA

SEQ ID NO: 248301 - protein, 15 aa, Artificial Sequence
  Description of Artificial Sequence: Synthetic peptide
  Seed: LRMKWMMAMKYPITA
LRMKYMMQMFYPSTA

SEQ ID NO: 248302 - protein, 15 aa, Artificial Sequence
  Description of Artificial Sequence: Synthetic peptide
  Seed: LRMKWMMAMKYPITA
LRMKYMMQMFYPVTA

SEQ ID NO: 248303 - protein, 15 aa, Artificial Sequence
  Description of Artificial Sequence: Synthetic peptide
  Seed: LRMKWMMAMKYPITA
LRMKYMMQMGYPATA

SEQ ID NO: 248304 - protein, 15 aa, Artificial Sequence
  Description of Artificial Sequence: Synthetic peptide
  Seed: LRMKWMMAMKYPITA
LRMKYMMQMGYPCTA

SEQ ID NO: 248305 - protein, 15 aa, Artificial Sequence
  Description of Artificial Sequence: Synthetic peptide
  Seed: LRMKWMMAMKYPITA
LRMKYMMQMGYPDTA

SEQ ID NO: 248306 - protein, 15 aa, Artificial Sequence
  Description of Artificial Sequence: Synthetic peptide
  Seed: LRMKWMMAMKYPITA
LRMKYMMQMGYPETA

SEQ ID NO: 248307 - protein, 15 aa, Artificial Sequence
  Description of Artificial Sequence: Synthetic peptide
  Seed: LRMKWMMAMKYPITA
LRMKYMMQMGYPFTA

SEQ ID NO: 248308 - protein, 15 aa, Artificial Sequence
  Description of Artificial Sequence: Synthetic peptide
  Seed: LRMKWMMAMKYPITA
LRMKYMMQMGYPGTA

SEQ ID NO: 248309 - protein, 15 aa, Artificial Sequence
  Description of Artificial Sequence: Synthetic peptide
  Seed: LRMKWMMAMKYPITA
LRMKYMMQMGYPHTA

SEQ ID NO: 248310 - protein, 15 aa, Artificial Sequence
  Description of Artificial Sequence: Synthetic peptide
  Seed: LRMKWMMAMKYPITA
LRMKYMMQMGYPITA

SEQ ID NO: 248311 - protein, 15 aa, Artificial Sequence
  Description of Artificial Sequence: Synthetic peptide
  Seed: LRMKWMMAMKYPITA
LRMKYMMQMGYPKTA

SEQ ID NO: 248312 - protein, 15 aa, Artificial Sequence
  Description of Artificial Sequence: Synthetic peptide
  Seed: LRMKWMMAMKYPITA
LRMKYMMQMGYPLTA

SEQ ID NO: 248313 - protein, 15 aa, Artificial Sequence
  Description of Artificial Sequence: Synthetic peptide
  Seed: LRMKWMMAMKYPITA
LRMKYMMQMGYPMTA

SEQ ID NO: 248314 - protein, 15 aa, Artificial Sequence
  Description of Artificial Sequence: Synthetic peptide
  Seed: LRMKWMMAMKYPITA
LRMKYMMQMGYPNTA

SEQ ID NO: 248315 - protein, 15 aa, Artificial Sequence
  Description of Artificial Sequence: Synthetic peptide
  Seed: LRMKWMMAMKYPITA
LRMKYMMQMGYPPTA

SEQ ID NO: 248316 - protein, 15 aa, Artificial Sequence
  Description of Artificial Sequence: Synthetic peptide
  Seed: LRMKWMMAMKYPITA
LRMKYMMQMGYPQTA

SEQ ID NO: 248317 - protein, 15 aa, Artificial Sequence
  Description of Artificial Sequence: Synthetic peptide
  Seed: LRMKWMMAMKYPITA
LRMKYMMQMGYPRTA

SEQ ID NO: 248318 - protein, 15 aa, Artificial Sequence
  Description of Artificial Sequence: Synthetic peptide
  Seed: LRMKWMMAMKYPITA
LRMKYMMQMGYPSTA

SEQ ID NO: 248319 - protein, 15 aa, Artificial Sequence
  Description of Artificial Sequence: Synthetic peptide
  Seed: LRMKWMMAMKYPITA
LRMKYMMQMGYPTTA

SEQ ID NO: 248320 - protein, 15 aa, Artificial Sequence
  Description of Artificial Sequence: Synthetic peptide
  Seed: LRMKWMMAMKYPITA
LRMKYMMQMGYPVTA

SEQ ID NO: 248321 - protein, 15 aa, Artificial Sequence
  Description of Artificial Sequence: Synthetic peptide
  Seed: LRMKWMMAMKYPITA
LRMKYMMQMGYPWTA

SEQ ID NO: 248322 - protein, 15 aa, Artificial Sequence
  Description of Artificial Sequence: Synthetic peptide
  Seed: LRMKWMMAMKYPITA
LRMKYMMQMGYPYTA

SEQ ID NO: 248323 - protein, 15 aa, Artificial Sequence
  Description of Artificial Sequence: Synthetic peptide
  Seed: LRMKWMMAMKYPITA
LRMKYMMQMHYPATA

SEQ ID NO: 248324 - protein, 15 aa, Artificial Sequence
  Description of Artificial Sequence: Synthetic peptide
  Seed: LRMKWMMAMKYPITA
LRMKYMMQMHYPITA

SEQ ID NO: 248325 - protein, 15 aa, Artificial Sequence
  Description of Artificial Sequence: Synthetic peptide
  Seed: LRMKWMMAMKYPITA
LRMKYMMQMHYPLTA

SEQ ID NO: 248326 - protein, 15 aa, Artificial Sequence
  Description of Artificial Sequence: Synthetic peptide
  Seed: LRMKWMMAMKYPITA
LRMKYMMQMHYPMTA

SEQ ID NO: 248327 - protein, 15 aa, Artificial Sequence
  Description of Artificial Sequence: Synthetic peptide
  Seed: LRMKWMMAMKYPITA
LRMKYMMQMHYPSTA

SEQ ID NO: 248328 - protein, 15 aa, Artificial Sequence
  Description of Artificial Sequence: Synthetic peptide
  Seed: LRMKWMMAMKYPITA
LRMKYMMQMHYPTTA

SEQ ID NO: 248329 - protein, 15 aa, Artificial Sequence
  Description of Artificial Sequence: Synthetic peptide
  Seed: LRMKWMMAMKYPITA
LRMKYMMQMHYPVTA

SEQ ID NO: 248330 - protein, 15 aa, Artificial Sequence
  Description of Artificial Sequence: Synthetic peptide
  Seed: LRMKWMMAMKYPITA
LRMKYMMQMIYPATA

SEQ ID NO: 248331 - protein, 15 aa, Artificial Sequence
  Description of Artificial Sequence: Synthetic peptide
  Seed: LRMKWMMAMKYPITA
LRMKYMMQMIYPCTA

SEQ ID NO: 248332 - protein, 15 aa, Artificial Sequence
  Description of Artificial Sequence: Synthetic peptide
  Seed: LRMKWMMAMKYPITA
LRMKYMMQMIYPDTA

SEQ ID NO: 248333 - protein, 15 aa, Artificial Sequence
  Description of Artificial Sequence: Synthetic peptide
  Seed: LRMKWMMAMKYPITA
LRMKYMMQMIYPETA

SEQ ID NO: 248334 - protein, 15 aa, Artificial Sequence
  Description of Artificial Sequence: Synthetic peptide
  Seed: LRMKWMMAMKYPITA
LRMKYMMQMIYPFTA

SEQ ID NO: 248335 - protein, 15 aa, Artificial Sequence
  Description of Artificial Sequence: Synthetic peptide
  Seed: LRMKWMMAMKYPITA
LRMKYMMQMIYPGTA

SEQ ID NO: 248336 - protein, 15 aa, Artificial Sequence
  Description of Artificial Sequence: Synthetic peptide
  Seed: LRMKWMMAMKYPITA
LRMKYMMQMIYPHTA

SEQ ID NO: 248337 - protein, 15 aa, Artificial Sequence
  Description of Artificial Sequence: Synthetic peptide
  Seed: LRMKWMMAMKYPITA
LRMKYMMQMIYPITA

SEQ ID NO: 248338 - protein, 15 aa, Artificial Sequence
  Description of Artificial Sequence: Synthetic peptide
  Seed: LRMKWMMAMKYPITA
LRMKYMMQMIYPKTA

SEQ ID NO: 248339 - protein, 15 aa, Artificial Sequence
  Description of Artificial Sequence: Synthetic peptide
  Seed: LRMKWMMAMKYPITA
LRMKYMMQMIYPLTA

SEQ ID NO: 248340 - protein, 15 aa, Artificial Sequence
  Description of Artificial Sequence: Synthetic peptide
  Seed: LRMKWMMAMKYPITA
LRMKYMMQMIYPMTA

SEQ ID NO: 248341 - protein, 15 aa, Artificial Sequence
  Description of Artificial Sequence: Synthetic peptide
  Seed: LRMKWMMAMKYPITA
LRMKYMMQMIYPNTA

SEQ ID NO: 248342 - protein, 15 aa, Artificial Sequence
  Description of Artificial Sequence: Synthetic peptide
  Seed: LRMKWMMAMKYPITA
LRMKYMMQMIYPPTA

SEQ ID NO: 248343 - protein, 15 aa, Artificial Sequence
  Description of Artificial Sequence: Synthetic peptide
  Seed: LRMKWMMAMKYPITA
LRMKYMMQMIYPQTA

SEQ ID NO: 248344 - protein, 15 aa, Artificial Sequence
  Description of Artificial Sequence: Synthetic peptide
  Seed: LRMKWMMAMKYPITA
LRMKYMMQMIYPRTA

SEQ ID NO: 248345 - protein, 15 aa, Artificial Sequence
  Description of Artificial Sequence: Synthetic peptide
  Seed: LRMKWMMAMKYPITA
LRMKYMMQMIYPSTA

SEQ ID NO: 248346 - protein, 15 aa, Artificial Sequence
  Description of Artificial Sequence: Synthetic peptide
  Seed: LRMKWMMAMKYPITA
LRMKYMMQMIYPTTA

SEQ ID NO: 248347 - protein, 15 aa, Artificial Sequence
  Description of Artificial Sequence: Synthetic peptide
  Seed: LRMKWMMAMKYPITA
LRMKYMMQMIYPVTA

SEQ ID NO: 248348 - protein, 15 aa, Artificial Sequence
  Description of Artificial Sequence: Synthetic peptide
  Seed: LRMKWMMAMKYPITA
LRMKYMMQMIYPYTA

SEQ ID NO: 248349 - protein, 15 aa, Artificial Sequence
  Description of Artificial Sequence: Synthetic peptide
  Seed: LRMKWMMAMKYPITA
LRMKYMMQMKYPATA

SEQ ID NO: 248350 - protein, 15 aa, Artificial Sequence
  Description of Artificial Sequence: Synthetic peptide
  Seed: LRMKWMMAMKYPITA
LRMKYMMQMKYPGTA

SEQ ID NO: 248351 - protein, 15 aa, Artificial Sequence
  Description of Artificial Sequence: Synthetic peptide
  Seed: LRMKWMMAMKYPITA
LRMKYMMQMKYPHTA

SEQ ID NO: 248352 - protein, 15 aa, Artificial Sequence
  Description of Artificial Sequence: Synthetic peptide
  Seed: LRMKWMMAMKYPITA
LRMKYMMQMKYPITA

SEQ ID NO: 248353 - protein, 15 aa, Artificial Sequence
  Description of Artificial Sequence: Synthetic peptide
  Seed: LRMKWMMAMKYPITA
LRMKYMMQMKYPKTA

SEQ ID NO: 248354 - protein, 15 aa, Artificial Sequence
  Description of Artificial Sequence: Synthetic peptide
  Seed: LRMKWMMAMKYPITA
LRMKYMMQMKYPLTA

SEQ ID NO: 248355 - protein, 15 aa, Artificial Sequence
  Description of Artificial Sequence: Synthetic peptide
  Seed: LRMKWMMAMKYPITA
LRMKYMMQMKYPMTA

SEQ ID NO: 248356 - protein, 15 aa, Artificial Sequence
  Description of Artificial Sequence: Synthetic peptide
  Seed: LRMKWMMAMKYPITA
LRMKYMMQMKYPQTA

SEQ ID NO: 248357 - protein, 15 aa, Artificial Sequence
  Description of Artificial Sequence: Synthetic peptide
  Seed: LRMKWMMAMKYPITA
LRMKYMMQMKYPRTA

SEQ ID NO: 248358 - protein, 15 aa, Artificial Sequence
  Description of Artificial Sequence: Synthetic peptide
  Seed: LRMKWMMAMKYPITA
LRMKYMMQMKYPSTA

SEQ ID NO: 248359 - protein, 15 aa, Artificial Sequence
  Description of Artificial Sequence: Synthetic peptide
  Seed: LRMKWMMAMKYPITA
LRMKYMMQMKYPTTA

SEQ ID NO: 248360 - protein, 15 aa, Artificial Sequence
  Description of Artificial Sequence: Synthetic peptide
  Seed: LRMKWMMAMKYPITA
LRMKYMMQMKYPVTA

SEQ ID NO: 248361 - protein, 15 aa, Artificial Sequence
  Description of Artificial Sequence: Synthetic peptide
  Seed: LRMKWMMAMKYPITA
LRMKYMMQMKYPYTA

SEQ ID NO: 248362 - protein, 15 aa, Artificial Sequence
  Description of Artificial Sequence: Synthetic peptide
  Seed: LRMKWMMAMKYPITA
LRMKYMMQMLYPATA

SEQ ID NO: 248363 - protein, 15 aa, Artificial Sequence
  Description of Artificial Sequence: Synthetic peptide
  Seed: LRMKWMMAMKYPITA
LRMKYMMQMLYPCTA

SEQ ID NO: 248364 - protein, 15 aa, Artificial Sequence
  Description of Artificial Sequence: Synthetic peptide
  Seed: LRMKWMMAMKYPITA
LRMKYMMQMLYPDTA

SEQ ID NO: 248365 - protein, 15 aa, Artificial Sequence
  Description of Artificial Sequence: Synthetic peptide
  Seed: LRMKWMMAMKYPITA
LRMKYMMQMLYPGTA

SEQ ID NO: 248366 - protein, 15 aa, Artificial Sequence
  Description of Artificial Sequence: Synthetic peptide
  Seed: LRMKWMMAMKYPITA
LRMKYMMQMLYPITA

SEQ ID NO: 248367 - protein, 15 aa, Artificial Sequence
  Description of Artificial Sequence: Synthetic peptide
  Seed: LRMKWMMAMKYPITA
LRMKYMMQMLYPLTA

SEQ ID NO: 248368 - protein, 15 aa, Artificial Sequence
  Description of Artificial Sequence: Synthetic peptide
  Seed: LRMKWMMAMKYPITA
LRMKYMMQMLYPMTA

SEQ ID NO: 248369 - protein, 15 aa, Artificial Sequence
  Description of Artificial Sequence: Synthetic peptide
  Seed: LRMKWMMAMKYPITA
LRMKYMMQMLYPNTA

SEQ ID NO: 248370 - protein, 15 aa, Artificial Sequence
  Description of Artificial Sequence: Synthetic peptide
  Seed: LRMKWMMAMKYPITA
LRMKYMMQMLYPSTA

SEQ ID NO: 248371 - protein, 15 aa, Artificial Sequence
  Description of Artificial Sequence: Synthetic peptide
  Seed: LRMKWMMAMKYPITA
LRMKYMMQMLYPTTA

SEQ ID NO: 248372 - protein, 15 aa, Artificial Sequence
  Description of Artificial Sequence: Synthetic peptide
  Seed: LRMKWMMAMKYPITA
LRMKYMMQMLYPVTA

SEQ ID NO: 248373 - protein, 15 aa, Artificial Sequence
  Description of Artificial Sequence: Synthetic peptide
  Seed: LRMKWMMAMKYPITA
LRMKYMMQMMYPATA

SEQ ID NO: 248374 - protein, 15 aa, Artificial Sequence
  Description of Artificial Sequence: Synthetic peptide
  Seed: LRMKWMMAMKYPITA
LRMKYMMQMMYPCTA

SEQ ID NO: 248375 - protein, 15 aa, Artificial Sequence
  Description of Artificial Sequence: Synthetic peptide
  Seed: LRMKWMMAMKYPITA
LRMKYMMQMMYPDTA

SEQ ID NO: 248376 - protein, 15 aa, Artificial Sequence
  Description of Artificial Sequence: Synthetic peptide
  Seed: LRMKWMMAMKYPITA
LRMKYMMQMMYPGTA

SEQ ID NO: 248377 - protein, 15 aa, Artificial Sequence
  Description of Artificial Sequence: Synthetic peptide
  Seed: LRMKWMMAMKYPITA
LRMKYMMQMMYPITA

SEQ ID NO: 248378 - protein, 15 aa, Artificial Sequence
  Description of Artificial Sequence: Synthetic peptide
  Seed: LRMKWMMAMKYPITA
LRMKYMMQMMYPLTA

SEQ ID NO: 248379 - protein, 15 aa, Artificial Sequence
  Description of Artificial Sequence: Synthetic peptide
  Seed: LRMKWMMAMKYPITA
LRMKYMMQMMYPMTA

SEQ ID NO: 248380 - protein, 15 aa, Artificial Sequence
  Description of Artificial Sequence: Synthetic peptide
  Seed: LRMKWMMAMKYPITA
LRMKYMMQMMYPNTA

SEQ ID NO: 248381 - protein, 15 aa, Artificial Sequence
  Description of Artificial Sequence: Synthetic peptide
  Seed: LRMKWMMAMKYPITA
LRMKYMMQMMYPSTA

SEQ ID NO: 248382 - protein, 15 aa, Artificial Sequence
  Description of Artificial Sequence: Synthetic peptide
  Seed: LRMKWMMAMKYPITA
LRMKYMMQMMYPTTA

SEQ ID NO: 248383 - protein, 15 aa, Artificial Sequence
  Description of Artificial Sequence: Synthetic peptide
  Seed: LRMKWMMAMKYPITA
LRMKYMMQMMYPVTA

SEQ ID NO: 248384 - protein, 15 aa, Artificial Sequence
  Description of Artificial Sequence: Synthetic peptide
  Seed: LRMKWMMAMKYPITA
LRMKYMMQMNYPATA

SEQ ID NO: 248385 - protein, 15 aa, Artificial Sequence
  Description of Artificial Sequence: Synthetic peptide
  Seed: LRMKWMMAMKYPITA
LRMKYMMQMNYPCTA

SEQ ID NO: 248386 - protein, 15 aa, Artificial Sequence
  Description of Artificial Sequence: Synthetic peptide
  Seed: LRMKWMMAMKYPITA
LRMKYMMQMNYPDTA

SEQ ID NO: 248387 - protein, 15 aa, Artificial Sequence
  Description of Artificial Sequence: Synthetic peptide
  Seed: LRMKWMMAMKYPITA
LRMKYMMQMNYPETA

SEQ ID NO: 248388 - protein, 15 aa, Artificial Sequence
  Description of Artificial Sequence: Synthetic peptide
  Seed: LRMKWMMAMKYPITA
LRMKYMMQMNYPFTA

SEQ ID NO: 248389 - protein, 15 aa, Artificial Sequence
  Description of Artificial Sequence: Synthetic peptide
  Seed: LRMKWMMAMKYPITA
LRMKYMMQMNYPGTA

SEQ ID NO: 248390 - protein, 15 aa, Artificial Sequence
  Description of Artificial Sequence: Synthetic peptide
  Seed: LRMKWMMAMKYPITA
LRMKYMMQMNYPHTA

SEQ ID NO: 248391 - protein, 15 aa, Artificial Sequence
  Description of Artificial Sequence: Synthetic peptide
  Seed: LRMKWMMAMKYPITA
LRMKYMMQMNYPITA

SEQ ID NO: 248392 - protein, 15 aa, Artificial Sequence
  Description of Artificial Sequence: Synthetic peptide
  Seed: LRMKWMMAMKYPITA
LRMKYMMQMNYPLTA

SEQ ID NO: 248393 - protein, 15 aa, Artificial Sequence
  Description of Artificial Sequence: Synthetic peptide
  Seed: LRMKWMMAMKYPITA
LRMKYMMQMNYPMTA

SEQ ID NO: 248394 - protein, 15 aa, Artificial Sequence
  Description of Artificial Sequence: Synthetic peptide
  Seed: LRMKWMMAMKYPITA
LRMKYMMQMNYPNTA

SEQ ID NO: 248395 - protein, 15 aa, Artificial Sequence
  Description of Artificial Sequence: Synthetic peptide
  Seed: LRMKWMMAMKYPITA
LRMKYMMQMNYPPTA

SEQ ID NO: 248396 - protein, 15 aa, Artificial Sequence
  Description of Artificial Sequence: Synthetic peptide
  Seed: LRMKWMMAMKYPITA
LRMKYMMQMNYPQTA

SEQ ID NO: 248397 - protein, 15 aa, Artificial Sequence
  Description of Artificial Sequence: Synthetic peptide
  Seed: LRMKWMMAMKYPITA
LRMKYMMQMNYPRTA

SEQ ID NO: 248398 - protein, 15 aa, Artificial Sequence
  Description of Artificial Sequence: Synthetic peptide
  Seed: LRMKWMMAMKYPITA
LRMKYMMQMNYPSTA

SEQ ID NO: 248399 - protein, 15 aa, Artificial Sequence
  Description of Artificial Sequence: Synthetic peptide
  Seed: LRMKWMMAMKYPITA
LRMKYMMQMNYPTTA

SEQ ID NO: 248400 - protein, 15 aa, Artificial Sequence
  Description of Artificial Sequence: Synthetic peptide
  Seed: LRMKWMMAMKYPITA
LRMKYMMQMNYPVTA

SEQ ID NO: 248401 - protein, 15 aa, Artificial Sequence
  Description of Artificial Sequence: Synthetic peptide
  Seed: LRMKWMMAMKYPITA
LRMKYMMQMNYPWTA

SEQ ID NO: 248402 - protein, 15 aa, Artificial Sequence
  Description of Artificial Sequence: Synthetic peptide
  Seed: LRMKWMMAMKYPITA
LRMKYMMQMNYPYTA

SEQ ID NO: 248403 - protein, 15 aa, Artificial Sequence
  Description of Artificial Sequence: Synthetic peptide
  Seed: LRMKWMMAMKYPITA
LRMKYMMQMPYPATA

SEQ ID NO: 248404 - protein, 15 aa, Artificial Sequence
  Description of Artificial Sequence: Synthetic peptide
  Seed: LRMKWMMAMKYPITA
LRMKYMMQMPYPCTA

SEQ ID NO: 248405 - protein, 15 aa, Artificial Sequence
  Description of Artificial Sequence: Synthetic peptide
  Seed: LRMKWMMAMKYPITA
LRMKYMMQMPYPDTA

SEQ ID NO: 248406 - protein, 15 aa, Artificial Sequence
  Description of Artificial Sequence: Synthetic peptide
  Seed: LRMKWMMAMKYPITA
LRMKYMMQMPYPETA

SEQ ID NO: 248407 - protein, 15 aa, Artificial Sequence
  Description of Artificial Sequence: Synthetic peptide
  Seed: LRMKWMMAMKYPITA
LRMKYMMQMPYPFTA

SEQ ID NO: 248408 - protein, 15 aa, Artificial Sequence
  Description of Artificial Sequence: Synthetic peptide
  Seed: LRMKWMMAMKYPITA
LRMKYMMQMPYPGTA

SEQ ID NO: 248409 - protein, 15 aa, Artificial Sequence
  Description of Artificial Sequence: Synthetic peptide
  Seed: LRMKWMMAMKYPITA
LRMKYMMQMPYPHTA

SEQ ID NO: 248410 - protein, 15 aa, Artificial Sequence
  Description of Artificial Sequence: Synthetic peptide
  Seed: LRMKWMMAMKYPITA
LRMKYMMQMPYPITA

SEQ ID NO: 248411 - protein, 15 aa, Artificial Sequence
  Description of Artificial Sequence: Synthetic peptide
  Seed: LRMKWMMAMKYPITA
LRMKYMMQMPYPKTA

SEQ ID NO: 248412 - protein, 15 aa, Artificial Sequence
  Description of Artificial Sequence: Synthetic peptide
  Seed: LRMKWMMAMKYPITA
LRMKYMMQMPYPLTA

SEQ ID NO: 248413 - protein, 15 aa, Artificial Sequence
  Description of Artificial Sequence: Synthetic peptide
  Seed: LRMKWMMAMKYPITA
LRMKYMMQMPYPMTA

SEQ ID NO: 248414 - protein, 15 aa, Artificial Sequence
  Description of Artificial Sequence: Synthetic peptide
  Seed: LRMKWMMAMKYPITA
LRMKYMMQMPYPNTA

SEQ ID NO: 248415 - protein, 15 aa, Artificial Sequence
  Description of Artificial Sequence: Synthetic peptide
  Seed: LRMKWMMAMKYPITA
LRMKYMMQMPYPPTA

SEQ ID NO: 248416 - protein, 15 aa, Artificial Sequence
  Description of Artificial Sequence: Synthetic peptide
  Seed: LRMKWMMAMKYPITA
LRMKYMMQMPYPQTA

SEQ ID NO: 248417 - protein, 15 aa, Artificial Sequence
  Description of Artificial Sequence: Synthetic peptide
  Seed: LRMKWMMAMKYPITA
LRMKYMMQMPYPRTA

SEQ ID NO: 248418 - protein, 15 aa, Artificial Sequence
  Description of Artificial Sequence: Synthetic peptide
  Seed: LRMKWMMAMKYPITA
LRMKYMMQMPYPSTA

SEQ ID NO: 248419 - protein, 15 aa, Artificial Sequence
  Description of Artificial Sequence: Synthetic peptide
  Seed: LRMKWMMAMKYPITA
LRMKYMMQMPYPTTA

SEQ ID NO: 248420 - protein, 15 aa, Artificial Sequence
  Description of Artificial Sequence: Synthetic peptide
  Seed: LRMKWMMAMKYPITA
LRMKYMMQMPYPVTA

SEQ ID NO: 248421 - protein, 15 aa, Artificial Sequence
  Description of Artificial Sequence: Synthetic peptide
  Seed: LRMKWMMAMKYPITA
LRMKYMMQMPYPWTA

SEQ ID NO: 248422 - protein, 15 aa, Artificial Sequence
  Description of Artificial Sequence: Synthetic peptide
  Seed: LRMKWMMAMKYPITA
LRMKYMMQMPYPYTA

SEQ ID NO: 248423 - protein, 15 aa, Artificial Sequence
  Description of Artificial Sequence: Synthetic peptide
  Seed: LRMKWMMAMKYPITA
LRMKYMMQMQYPATA

SEQ ID NO: 248424 - protein, 15 aa, Artificial Sequence
  Description of Artificial Sequence: Synthetic peptide
  Seed: LRMKWMMAMKYPITA
LRMKYMMQMQYPITA

SEQ ID NO: 248425 - protein, 15 aa, Artificial Sequence
  Description of Artificial Sequence: Synthetic peptide
  Seed: LRMKWMMAMKYPITA
LRMKYMMQMQYPLTA

SEQ ID NO: 248426 - protein, 15 aa, Artificial Sequence
  Description of Artificial Sequence: Synthetic peptide
  Seed: LRMKWMMAMKYPITA
LRMKYMMQMQYPMTA

SEQ ID NO: 248427 - protein, 15 aa, Artificial Sequence
  Description of Artificial Sequence: Synthetic peptide
  Seed: LRMKWMMAMKYPITA
LRMKYMMQMQYPNTA

SEQ ID NO: 248428 - protein, 15 aa, Artificial Sequence
  Description of Artificial Sequence: Synthetic peptide
  Seed: LRMKWMMAMKYPITA
LRMKYMMQMQYPSTA

SEQ ID NO: 248429 - protein, 15 aa, Artificial Sequence
  Description of Artificial Sequence: Synthetic peptide
  Seed: LRMKWMMAMKYPITA
LRMKYMMQMQYPTTA

SEQ ID NO: 248430 - protein, 15 aa, Artificial Sequence
  Description of Artificial Sequence: Synthetic peptide
  Seed: LRMKWMMAMKYPITA
LRMKYMMQMQYPVTA

SEQ ID NO: 248431 - protein, 15 aa, Artificial Sequence
  Description of Artificial Sequence: Synthetic peptide
  Seed: LRMKWMMAMKYPITA
LRMKYMMQMRYPATA

SEQ ID NO: 248432 - protein, 15 aa, Artificial Sequence
  Description of Artificial Sequence: Synthetic peptide
  Seed: LRMKWMMAMKYPITA
LRMKYMMQMRYPFTA

SEQ ID NO: 248433 - protein, 15 aa, Artificial Sequence
  Description of Artificial Sequence: Synthetic peptide
  Seed: LRMKWMMAMKYPITA
LRMKYMMQMRYPGTA

SEQ ID NO: 248434 - protein, 15 aa, Artificial Sequence
  Description of Artificial Sequence: Synthetic peptide
  Seed: LRMKWMMAMKYPITA
LRMKYMMQMRYPHTA

SEQ ID NO: 248435 - protein, 15 aa, Artificial Sequence
  Description of Artificial Sequence: Synthetic peptide
  Seed: LRMKWMMAMKYPITA
LRMKYMMQMRYPITA

SEQ ID NO: 248436 - protein, 15 aa, Artificial Sequence
  Description of Artificial Sequence: Synthetic peptide
  Seed: LRMKWMMAMKYPITA
LRMKYMMQMRYPKTA

SEQ ID NO: 248437 - protein, 15 aa, Artificial Sequence
  Description of Artificial Sequence: Synthetic peptide
  Seed: LRMKWMMAMKYPITA
LRMKYMMQMRYPLTA

SEQ ID NO: 248438 - protein, 15 aa, Artificial Sequence
  Description of Artificial Sequence: Synthetic peptide
  Seed: LRMKWMMAMKYPITA
LRMKYMMQMRYPMTA

SEQ ID NO: 248439 - protein, 15 aa, Artificial Sequence
  Description of Artificial Sequence: Synthetic peptide
  Seed: LRMKWMMAMKYPITA
LRMKYMMQMRYPNTA

SEQ ID NO: 248440 - protein, 15 aa, Artificial Sequence
  Description of Artificial Sequence: Synthetic peptide
  Seed: LRMKWMMAMKYPITA
LRMKYMMQMRYPPTA

SEQ ID NO: 248441 - protein, 15 aa, Artificial Sequence
  Description of Artificial Sequence: Synthetic peptide
  Seed: LRMKWMMAMKYPITA
LRMKYMMQMRYPQTA

SEQ ID NO: 248442 - protein, 15 aa, Artificial Sequence
  Description of Artificial Sequence: Synthetic peptide
  Seed: LRMKWMMAMKYPITA
LRMKYMMQMRYPRTA

SEQ ID NO: 248443 - protein, 15 aa, Artificial Sequence
  Description of Artificial Sequence: Synthetic peptide
  Seed: LRMKWMMAMKYPITA
LRMKYMMQMRYPSTA

SEQ ID NO: 248444 - protein, 15 aa, Artificial Sequence
  Description of Artificial Sequence: Synthetic peptide
  Seed: LRMKWMMAMKYPITA
LRMKYMMQMRYPTTA

SEQ ID NO: 248445 - protein, 15 aa, Artificial Sequence
  Description of Artificial Sequence: Synthetic peptide
  Seed: LRMKWMMAMKYPITA
LRMKYMMQMRYPVTA

SEQ ID NO: 248446 - protein, 15 aa, Artificial Sequence
  Description of Artificial Sequence: Synthetic peptide
  Seed: LRMKWMMAMKYPITA
LRMKYMMQMRYPWTA

SEQ ID NO: 248447 - protein, 15 aa, Artificial Sequence
  Description of Artificial Sequence: Synthetic peptide
  Seed: LRMKWMMAMKYPITA
LRMKYMMQMRYPYTA

SEQ ID NO: 248448 - protein, 15 aa, Artificial Sequence
  Description of Artificial Sequence: Synthetic peptide
  Seed: LRMKWMMAMKYPITA
LRMKYMMQMSYPATA

SEQ ID NO: 248449 - protein, 15 aa, Artificial Sequence
  Description of Artificial Sequence: Synthetic peptide
  Seed: LRMKWMMAMKYPITA
LRMKYMMQMSYPCTA

SEQ ID NO: 248450 - protein, 15 aa, Artificial Sequence
  Description of Artificial Sequence: Synthetic peptide
  Seed: LRMKWMMAMKYPITA
LRMKYMMQMSYPDTA

SEQ ID NO: 248451 - protein, 15 aa, Artificial Sequence
  Description of Artificial Sequence: Synthetic peptide
  Seed: LRMKWMMAMKYPITA
LRMKYMMQMSYPETA

SEQ ID NO: 248452 - protein, 15 aa, Artificial Sequence
  Description of Artificial Sequence: Synthetic peptide
  Seed: LRMKWMMAMKYPITA
LRMKYMMQMSYPFTA

SEQ ID NO: 248453 - protein, 15 aa, Artificial Sequence
  Description of Artificial Sequence: Synthetic peptide
  Seed: LRMKWMMAMKYPITA
LRMKYMMQMSYPGTA

SEQ ID NO: 248454 - protein, 15 aa, Artificial Sequence
  Description of Artificial Sequence: Synthetic peptide
  Seed: LRMKWMMAMKYPITA
LRMKYMMQMSYPHTA

SEQ ID NO: 248455 - protein, 15 aa, Artificial Sequence
  Description of Artificial Sequence: Synthetic peptide
  Seed: LRMKWMMAMKYPITA
LRMKYMMQMSYPITA

SEQ ID NO: 248456 - protein, 15 aa, Artificial Sequence
  Description of Artificial Sequence: Synthetic peptide
  Seed: LRMKWMMAMKYPITA
LRMKYMMQMSYPKTA

SEQ ID NO: 248457 - protein, 15 aa, Artificial Sequence
  Description of Artificial Sequence: Synthetic peptide
  Seed: LRMKWMMAMKYPITA
LRMKYMMQMSYPLTA

SEQ ID NO: 248458 - protein, 15 aa, Artificial Sequence
  Description of Artificial Sequence: Synthetic peptide
  Seed: LRMKWMMAMKYPITA
LRMKYMMQMSYPMTA

SEQ ID NO: 248459 - protein, 15 aa, Artificial Sequence
  Description of Artificial Sequence: Synthetic peptide
  Seed: LRMKWMMAMKYPITA
LRMKYMMQMSYPNTA

SEQ ID NO: 248460 - protein, 15 aa, Artificial Sequence
  Description of Artificial Sequence: Synthetic peptide
  Seed: LRMKWMMAMKYPITA
LRMKYMMQMSYPPTA

SEQ ID NO: 248461 - protein, 15 aa, Artificial Sequence
  Description of Artificial Sequence: Synthetic peptide
  Seed: LRMKWMMAMKYPITA
LRMKYMMQMSYPQTA

SEQ ID NO: 248462 - protein, 15 aa, Artificial Sequence
  Description of Artificial Sequence: Synthetic peptide
  Seed: LRMKWMMAMKYPITA
LRMKYMMQMSYPRTA

SEQ ID NO: 248463 - protein, 15 aa, Artificial Sequence
  Description of Artificial Sequence: Synthetic peptide
  Seed: LRMKWMMAMKYPITA
LRMKYMMQMSYPSTA

SEQ ID NO: 248464 - protein, 15 aa, Artificial Sequence
  Description of Artificial Sequence: Synthetic peptide
  Seed: LRMKWMMAMKYPITA
LRMKYMMQMSYPTTA

SEQ ID NO: 248465 - protein, 15 aa, Artificial Sequence
  Description of Artificial Sequence: Synthetic peptide
  Seed: LRMKWMMAMKYPITA
LRMKYMMQMSYPVTA

SEQ ID NO: 248466 - protein, 15 aa, Artificial Sequence
  Description of Artificial Sequence: Synthetic peptide
  Seed: LRMKWMMAMKYPITA
LRMKYMMQMSYPWTA

SEQ ID NO: 248467 - protein, 15 aa, Artificial Sequence
  Description of Artificial Sequence: Synthetic peptide
  Seed: LRMKWMMAMKYPITA
LRMKYMMQMSYPYTA

SEQ ID NO: 248468 - protein, 15 aa, Artificial Sequence
  Description of Artificial Sequence: Synthetic peptide
  Seed: LRMKWMMAMKYPITA
LRMKYMMQMTYPATA

SEQ ID NO: 248469 - protein, 15 aa, Artificial Sequence
  Description of Artificial Sequence: Synthetic peptide
  Seed: LRMKWMMAMKYPITA
LRMKYMMQMTYPCTA

SEQ ID NO: 248470 - protein, 15 aa, Artificial Sequence
  Description of Artificial Sequence: Synthetic peptide
  Seed: LRMKWMMAMKYPITA
LRMKYMMQMTYPDTA

SEQ ID NO: 248471 - protein, 15 aa, Artificial Sequence
  Description of Artificial Sequence: Synthetic peptide
  Seed: LRMKWMMAMKYPITA
LRMKYMMQMTYPETA

SEQ ID NO: 248472 - protein, 15 aa, Artificial Sequence
  Description of Artificial Sequence: Synthetic peptide
  Seed: LRMKWMMAMKYPITA
LRMKYMMQMTYPFTA

SEQ ID NO: 248473 - protein, 15 aa, Artificial Sequence
  Description of Artificial Sequence: Synthetic peptide
  Seed: LRMKWMMAMKYPITA
LRMKYMMQMTYPGTA

SEQ ID NO: 248474 - protein, 15 aa, Artificial Sequence
  Description of Artificial Sequence: Synthetic peptide
  Seed: LRMKWMMAMKYPITA
LRMKYMMQMTYPHTA

SEQ ID NO: 248475 - protein, 15 aa, Artificial Sequence
  Description of Artificial Sequence: Synthetic peptide
  Seed: LRMKWMMAMKYPITA
LRMKYMMQMTYPITA

SEQ ID NO: 248476 - protein, 15 aa, Artificial Sequence
  Description of Artificial Sequence: Synthetic peptide
  Seed: LRMKWMMAMKYPITA
LRMKYMMQMTYPKTA

SEQ ID NO: 248477 - protein, 15 aa, Artificial Sequence
  Description of Artificial Sequence: Synthetic peptide
  Seed: LRMKWMMAMKYPITA
LRMKYMMQMTYPLTA

SEQ ID NO: 248478 - protein, 15 aa, Artificial Sequence
  Description of Artificial Sequence: Synthetic peptide
  Seed: LRMKWMMAMKYPITA
LRMKYMMQMTYPMTA

SEQ ID NO: 248479 - protein, 15 aa, Artificial Sequence
  Description of Artificial Sequence: Synthetic peptide
  Seed: LRMKWMMAMKYPITA
LRMKYMMQMTYPNTA

SEQ ID NO: 248480 - protein, 15 aa, Artificial Sequence
  Description of Artificial Sequence: Synthetic peptide
  Seed: LRMKWMMAMKYPITA
LRMKYMMQMTYPPTA

SEQ ID NO: 248481 - protein, 15 aa, Artificial Sequence
  Description of Artificial Sequence: Synthetic peptide
  Seed: LRMKWMMAMKYPITA
LRMKYMMQMTYPQTA

SEQ ID NO: 248482 - protein, 15 aa, Artificial Sequence
  Description of Artificial Sequence: Synthetic peptide
  Seed: LRMKWMMAMKYPITA
LRMKYMMQMTYPRTA

SEQ ID NO: 248483 - protein, 15 aa, Artificial Sequence
  Description of Artificial Sequence: Synthetic peptide
  Seed: LRMKWMMAMKYPITA
LRMKYMMQMTYPSTA

SEQ ID NO: 248484 - protein, 15 aa, Artificial Sequence
  Description of Artificial Sequence: Synthetic peptide
  Seed: LRMKWMMAMKYPITA
LRMKYMMQMTYPTTA

SEQ ID NO: 248485 - protein, 15 aa, Artificial Sequence
  Description of Artificial Sequence: Synthetic peptide
  Seed: LRMKWMMAMKYPITA
LRMKYMMQMTYPVTA

SEQ ID NO: 248486 - protein, 15 aa, Artificial Sequence
  Description of Artificial Sequence: Synthetic peptide
  Seed: LRMKWMMAMKYPITA
LRMKYMMQMTYPWTA

SEQ ID NO: 248487 - protein, 15 aa, Artificial Sequence
  Description of Artificial Sequence: Synthetic peptide
  Seed: LRMKWMMAMKYPITA
LRMKYMMQMTYPYTA

SEQ ID NO: 248488 - protein, 15 aa, Artificial Sequence
  Description of Artificial Sequence: Synthetic peptide
  Seed: LRMKWMMAMKYPITA
LRMKYMMQMVYPATA

SEQ ID NO: 248489 - protein, 15 aa, Artificial Sequence
  Description of Artificial Sequence: Synthetic peptide
  Seed: LRMKWMMAMKYPITA
LRMKYMMQMVYPCTA

SEQ ID NO: 248490 - protein, 15 aa, Artificial Sequence
  Description of Artificial Sequence: Synthetic peptide
  Seed: LRMKWMMAMKYPITA
LRMKYMMQMVYPDTA

SEQ ID NO: 248491 - protein, 15 aa, Artificial Sequence
  Description of Artificial Sequence: Synthetic peptide
  Seed: LRMKWMMAMKYPITA
LRMKYMMQMVYPETA

SEQ ID NO: 248492 - protein, 15 aa, Artificial Sequence
  Description of Artificial Sequence: Synthetic peptide
  Seed: LRMKWMMAMKYPITA
LRMKYMMQMVYPFTA

SEQ ID NO: 248493 - protein, 15 aa, Artificial Sequence
  Description of Artificial Sequence: Synthetic peptide
  Seed: LRMKWMMAMKYPITA
LRMKYMMQMVYPGTA

SEQ ID NO: 248494 - protein, 15 aa, Artificial Sequence
  Description of Artificial Sequence: Synthetic peptide
  Seed: LRMKWMMAMKYPITA
LRMKYMMQMVYPHTA

SEQ ID NO: 248495 - protein, 15 aa, Artificial Sequence
  Description of Artificial Sequence: Synthetic peptide
  Seed: LRMKWMMAMKYPITA
LRMKYMMQMVYPITA

SEQ ID NO: 248496 - protein, 15 aa, Artificial Sequence
  Description of Artificial Sequence: Synthetic peptide
  Seed: LRMKWMMAMKYPITA
LRMKYMMQMVYPKTA

SEQ ID NO: 248497 - protein, 15 aa, Artificial Sequence
  Description of Artificial Sequence: Synthetic peptide
  Seed: LRMKWMMAMKYPITA
LRMKYMMQMVYPLTA

SEQ ID NO: 248498 - protein, 15 aa, Artificial Sequence
  Description of Artificial Sequence: Synthetic peptide
  Seed: LRMKWMMAMKYPITA
LRMKYMMQMVYPMTA

SEQ ID NO: 248499 - protein, 15 aa, Artificial Sequence
  Description of Artificial Sequence: Synthetic peptide
  Seed: LRMKWMMAMKYPITA
LRMKYMMQMVYPNTA

SEQ ID NO: 248500 - protein, 15 aa, Artificial Sequence
  Description of Artificial Sequence: Synthetic peptide
  Seed: LRMKWMMAMKYPITA
LRMKYMMQMVYPPTA

SEQ ID NO: 248501 - protein, 15 aa, Artificial Sequence
  Description of Artificial Sequence: Synthetic peptide
  Seed: LRMKWMMAMKYPITA
LRMKYMMQMVYPQTA

SEQ ID NO: 248502 - protein, 15 aa, Artificial Sequence
  Description of Artificial Sequence: Synthetic peptide
  Seed: LRMKWMMAMKYPITA
LRMKYMMQMVYPRTA

SEQ ID NO: 248503 - protein, 15 aa, Artificial Sequence
  Description of Artificial Sequence: Synthetic peptide
  Seed: LRMKWMMAMKYPITA
LRMKYMMQMVYPSTA

SEQ ID NO: 248504 - protein, 15 aa, Artificial Sequence
  Description of Artificial Sequence: Synthetic peptide
  Seed: LRMKWMMAMKYPITA
LRMKYMMQMVYPTTA

SEQ ID NO: 248505 - protein, 15 aa, Artificial Sequence
  Description of Artificial Sequence: Synthetic peptide
  Seed: LRMKWMMAMKYPITA
LRMKYMMQMVYPVTA

SEQ ID NO: 248506 - protein, 15 aa, Artificial Sequence
  Description of Artificial Sequence: Synthetic peptide
  Seed: LRMKWMMAMKYPITA
LRMKYMMQMVYPWTA

SEQ ID NO: 248507 - protein, 15 aa, Artificial Sequence
  Description of Artificial Sequence: Synthetic peptide
  Seed: LRMKWMMAMKYPITA
LRMKYMMQMVYPYTA

SEQ ID NO: 248508 - protein, 15 aa, Artificial Sequence
  Description of Artificial Sequence: Synthetic peptide
  Seed: LRMKWMMAMKYPITA
LRMKYMMQMWYPATA

SEQ ID NO: 248509 - protein, 15 aa, Artificial Sequence
  Description of Artificial Sequence: Synthetic peptide
  Seed: LRMKWMMAMKYPITA
LRMKYMMQMWYPITA

SEQ ID NO: 248510 - protein, 15 aa, Artificial Sequence
  Description of Artificial Sequence: Synthetic peptide
  Seed: LRMKWMMAMKYPITA
LRMKYMMQMWYPLTA

SEQ ID NO: 248511 - protein, 15 aa, Artificial Sequence
  Description of Artificial Sequence: Synthetic peptide
  Seed: LRMKWMMAMKYPITA
LRMKYMMQMWYPMTA

SEQ ID NO: 248512 - protein, 15 aa, Artificial Sequence
  Description of Artificial Sequence: Synthetic peptide
  Seed: LRMKWMMAMKYPITA
LRMKYMMQMWYPVTA

SEQ ID NO: 248513 - protein, 15 aa, Artificial Sequence
  Description of Artificial Sequence: Synthetic peptide
  Seed: LRMKWMMAMKYPITA
LRMKYMMQMYYPATA

SEQ ID NO: 248514 - protein, 15 aa, Artificial Sequence
  Description of Artificial Sequence: Synthetic peptide
  Seed: LRMKWMMAMKYPITA
LRMKYMMQMYYPITA

SEQ ID NO: 248515 - protein, 15 aa, Artificial Sequence
  Description of Artificial Sequence: Synthetic peptide
  Seed: LRMKWMMAMKYPITA
LRMKYMMQMYYPLTA

SEQ ID NO: 248516 - protein, 15 aa, Artificial Sequence
  Description of Artificial Sequence: Synthetic peptide
  Seed: LRMKWMMAMKYPITA
LRMKYMMQMYYPVTA

SEQ ID NO: 248517 - protein, 15 aa, Artificial Sequence
  Description of Artificial Sequence: Synthetic peptide
  Seed: LRMKWMMAMKYPITA
LRMKYMMRMAYPATA

SEQ ID NO: 248518 - protein, 15 aa, Artificial Sequence
  Description of Artificial Sequence: Synthetic peptide
  Seed: LRMKWMMAMKYPITA
LRMKYMMRMAYPCTA

SEQ ID NO: 248519 - protein, 15 aa, Artificial Sequence
  Description of Artificial Sequence: Synthetic peptide
  Seed: LRMKWMMAMKYPITA
LRMKYMMRMAYPFTA

SEQ ID NO: 248520 - protein, 15 aa, Artificial Sequence
  Description of Artificial Sequence: Synthetic peptide
  Seed: LRMKWMMAMKYPITA
LRMKYMMRMAYPGTA

SEQ ID NO: 248521 - protein, 15 aa, Artificial Sequence
  Description of Artificial Sequence: Synthetic peptide
  Seed: LRMKWMMAMKYPITA
LRMKYMMRMAYPITA

SEQ ID NO: 248522 - protein, 15 aa, Artificial Sequence
  Description of Artificial Sequence: Synthetic peptide
  Seed: LRMKWMMAMKYPITA
LRMKYMMRMAYPLTA

SEQ ID NO: 248523 - protein, 15 aa, Artificial Sequence
  Description of Artificial Sequence: Synthetic peptide
  Seed: LRMKWMMAMKYPITA
LRMKYMMRMAYPMTA

SEQ ID NO: 248524 - protein, 15 aa, Artificial Sequence
  Description of Artificial Sequence: Synthetic peptide
  Seed: LRMKWMMAMKYPITA
LRMKYMMRMAYPNTA

SEQ ID NO: 248525 - protein, 15 aa, Artificial Sequence
  Description of Artificial Sequence: Synthetic peptide
  Seed: LRMKWMMAMKYPITA
LRMKYMMRMAYPPTA

SEQ ID NO: 248526 - protein, 15 aa, Artificial Sequence
  Description of Artificial Sequence: Synthetic peptide
  Seed: LRMKWMMAMKYPITA
LRMKYMMRMAYPQTA

SEQ ID NO: 248527 - protein, 15 aa, Artificial Sequence
  Description of Artificial Sequence: Synthetic peptide
  Seed: LRMKWMMAMKYPITA
LRMKYMMRMAYPRTA

SEQ ID NO: 248528 - protein, 15 aa, Artificial Sequence
  Description of Artificial Sequence: Synthetic peptide
  Seed: LRMKWMMAMKYPITA
LRMKYMMRMAYPSTA

SEQ ID NO: 248529 - protein, 15 aa, Artificial Sequence
  Description of Artificial Sequence: Synthetic peptide
  Seed: LRMKWMMAMKYPITA
LRMKYMMRMAYPTTA

SEQ ID NO: 248530 - protein, 15 aa, Artificial Sequence
  Description of Artificial Sequence: Synthetic peptide
  Seed: LRMKWMMAMKYPITA
LRMKYMMRMAYPVTA

SEQ ID NO: 248531 - protein, 15 aa, Artificial Sequence
  Description of Artificial Sequence: Synthetic peptide
  Seed: LRMKWMMAMKYPITA
LRMKYMMRMAYPYTA

SEQ ID NO: 248532 - protein, 15 aa, Artificial Sequence
  Description of Artificial Sequence: Synthetic peptide
  Seed: LRMKWMMAMKYPITA
LRMKYMMRMCYPLTA

SEQ ID NO: 248533 - protein, 15 aa, Artificial Sequence
  Description of Artificial Sequence: Synthetic peptide
  Seed: LRMKWMMAMKYPITA
LRMKYMMRMGYPATA

SEQ ID NO: 248534 - protein, 15 aa, Artificial Sequence
  Description of Artificial Sequence: Synthetic peptide
  Seed: LRMKWMMAMKYPITA
LRMKYMMRMGYPFTA

SEQ ID NO: 248535 - protein, 15 aa, Artificial Sequence
  Description of Artificial Sequence: Synthetic peptide
  Seed: LRMKWMMAMKYPITA
LRMKYMMRMGYPITA

SEQ ID NO: 248536 - protein, 15 aa, Artificial Sequence
  Description of Artificial Sequence: Synthetic peptide
  Seed: LRMKWMMAMKYPITA
LRMKYMMRMGYPLTA

SEQ ID NO: 248537 - protein, 15 aa, Artificial Sequence
  Description of Artificial Sequence: Synthetic peptide
  Seed: LRMKWMMAMKYPITA
LRMKYMMRMGYPMTA

SEQ ID NO: 248538 - protein, 15 aa, Artificial Sequence
  Description of Artificial Sequence: Synthetic peptide
  Seed: LRMKWMMAMKYPITA
LRMKYMMRMGYPSTA

SEQ ID NO: 248539 - protein, 15 aa, Artificial Sequence
  Description of Artificial Sequence: Synthetic peptide
  Seed: LRMKWMMAMKYPITA
LRMKYMMRMGYPTTA

SEQ ID NO: 248540 - protein, 15 aa, Artificial Sequence
  Description of Artificial Sequence: Synthetic peptide
  Seed: LRMKWMMAMKYPITA
LRMKYMMRMGYPVTA

SEQ ID NO: 248541 - protein, 15 aa, Artificial Sequence
  Description of Artificial Sequence: Synthetic peptide
  Seed: LRMKWMMAMKYPITA
LRMKYMMRMHYPATA

SEQ ID NO: 248542 - protein, 15 aa, Artificial Sequence
  Description of Artificial Sequence: Synthetic peptide
  Seed: LRMKWMMAMKYPITA
LRMKYMMRMHYPSTA

SEQ ID NO: 248543 - protein, 15 aa, Artificial Sequence
  Description of Artificial Sequence: Synthetic peptide
  Seed: LRMKWMMAMKYPITA
LRMKYMMRMKYPATA

SEQ ID NO: 248544 - protein, 15 aa, Artificial Sequence
  Description of Artificial Sequence: Synthetic peptide
  Seed: LRMKWMMAMKYPITA
LRMKYMMRMKYPGTA

SEQ ID NO: 248545 - protein, 15 aa, Artificial Sequence
  Description of Artificial Sequence: Synthetic peptide
  Seed: LRMKWMMAMKYPITA
LRMKYMMRMKYPHTA

SEQ ID NO: 248546 - protein, 15 aa, Artificial Sequence
  Description of Artificial Sequence: Synthetic peptide
  Seed: LRMKWMMAMKYPITA
LRMKYMMRMKYPITA

SEQ ID NO: 248547 - protein, 15 aa, Artificial Sequence
  Description of Artificial Sequence: Synthetic peptide
  Seed: LRMKWMMAMKYPITA
LRMKYMMRMKYPLTA

SEQ ID NO: 248548 - protein, 15 aa, Artificial Sequence
  Description of Artificial Sequence: Synthetic peptide
  Seed: LRMKWMMAMKYPITA
LRMKYMMRMKYPMTA

SEQ ID NO: 248549 - protein, 15 aa, Artificial Sequence
  Description of Artificial Sequence: Synthetic peptide
  Seed: LRMKWMMAMKYPITA
LRMKYMMRMKYPNTA

SEQ ID NO: 248550 - protein, 15 aa, Artificial Sequence
  Description of Artificial Sequence: Synthetic peptide
  Seed: LRMKWMMAMKYPITA
LRMKYMMRMKYPPTA

SEQ ID NO: 248551 - protein, 15 aa, Artificial Sequence
  Description of Artificial Sequence: Synthetic peptide
  Seed: LRMKWMMAMKYPITA
LRMKYMMRMKYPQTA

SEQ ID NO: 248552 - protein, 15 aa, Artificial Sequence
  Description of Artificial Sequence: Synthetic peptide
  Seed: LRMKWMMAMKYPITA
LRMKYMMRMKYPSTA

SEQ ID NO: 248553 - protein, 15 aa, Artificial Sequence
  Description of Artificial Sequence: Synthetic peptide
  Seed: LRMKWMMAMKYPITA
LRMKYMMRMKYPTTA

SEQ ID NO: 248554 - protein, 15 aa, Artificial Sequence
  Description of Artificial Sequence: Synthetic peptide
  Seed: LRMKWMMAMKYPITA
LRMKYMMRMKYPVTA

SEQ ID NO: 248555 - protein, 15 aa, Artificial Sequence
  Description of Artificial Sequence: Synthetic peptide
  Seed: LRMKWMMAMKYPITA
LRMKYMMRMKYPYTA

SEQ ID NO: 248556 - protein, 15 aa, Artificial Sequence
  Description of Artificial Sequence: Synthetic peptide
  Seed: LRMKWMMAMKYPITA
LRMKYMMRMNYPATA

SEQ ID NO: 248557 - protein, 15 aa, Artificial Sequence
  Description of Artificial Sequence: Synthetic peptide
  Seed: LRMKWMMAMKYPITA
LRMKYMMRMNYPITA

SEQ ID NO: 248558 - protein, 15 aa, Artificial Sequence
  Description of Artificial Sequence: Synthetic peptide
  Seed: LRMKWMMAMKYPITA
LRMKYMMRMNYPLTA

SEQ ID NO: 248559 - protein, 15 aa, Artificial Sequence
  Description of Artificial Sequence: Synthetic peptide
  Seed: LRMKWMMAMKYPITA
LRMKYMMRMNYPMTA

SEQ ID NO: 248560 - protein, 15 aa, Artificial Sequence
  Description of Artificial Sequence: Synthetic peptide
  Seed: LRMKWMMAMKYPITA
LRMKYMMRMNYPVTA

SEQ ID NO: 248561 - protein, 15 aa, Artificial Sequence
  Description of Artificial Sequence: Synthetic peptide
  Seed: LRMKWMMAMKYPITA
LRMKYMMRMPYPATA

SEQ ID NO: 248562 - protein, 15 aa, Artificial Sequence
  Description of Artificial Sequence: Synthetic peptide
  Seed: LRMKWMMAMKYPITA
LRMKYMMRMPYPITA

SEQ ID NO: 248563 - protein, 15 aa, Artificial Sequence
  Description of Artificial Sequence: Synthetic peptide
  Seed: LRMKWMMAMKYPITA
LRMKYMMRMPYPLTA

SEQ ID NO: 248564 - protein, 15 aa, Artificial Sequence
  Description of Artificial Sequence: Synthetic peptide
  Seed: LRMKWMMAMKYPITA
LRMKYMMRMPYPMTA

SEQ ID NO: 248565 - protein, 15 aa, Artificial Sequence
  Description of Artificial Sequence: Synthetic peptide
  Seed: LRMKWMMAMKYPITA
LRMKYMMRMPYPVTA

SEQ ID NO: 248566 - protein, 15 aa, Artificial Sequence
  Description of Artificial Sequence: Synthetic peptide
  Seed: LRMKWMMAMKYPITA
LRMKYMMRMRYPATA

SEQ ID NO: 248567 - protein, 15 aa, Artificial Sequence
  Description of Artificial Sequence: Synthetic peptide
  Seed: LRMKWMMAMKYPITA
LRMKYMMRMRYPCTA

SEQ ID NO: 248568 - protein, 15 aa, Artificial Sequence
  Description of Artificial Sequence: Synthetic peptide
  Seed: LRMKWMMAMKYPITA
LRMKYMMRMRYPDTA

SEQ ID NO: 248569 - protein, 15 aa, Artificial Sequence
  Description of Artificial Sequence: Synthetic peptide
  Seed: LRMKWMMAMKYPITA
LRMKYMMRMRYPETA

SEQ ID NO: 248570 - protein, 15 aa, Artificial Sequence
  Description of Artificial Sequence: Synthetic peptide
  Seed: LRMKWMMAMKYPITA
LRMKYMMRMRYPGTA

SEQ ID NO: 248571 - protein, 15 aa, Artificial Sequence
  Description of Artificial Sequence: Synthetic peptide
  Seed: LRMKWMMAMKYPITA
LRMKYMMRMRYPHTA

SEQ ID NO: 248572 - protein, 15 aa, Artificial Sequence
  Description of Artificial Sequence: Synthetic peptide
  Seed: LRMKWMMAMKYPITA
LRMKYMMRMRYPITA

SEQ ID NO: 248573 - protein, 15 aa, Artificial Sequence
  Description of Artificial Sequence: Synthetic peptide
  Seed: LRMKWMMAMKYPITA
LRMKYMMRMRYPLTA

SEQ ID NO: 248574 - protein, 15 aa, Artificial Sequence
  Description of Artificial Sequence: Synthetic peptide
  Seed: LRMKWMMAMKYPITA
LRMKYMMRMRYPMTA

SEQ ID NO: 248575 - protein, 15 aa, Artificial Sequence
  Description of Artificial Sequence: Synthetic peptide
  Seed: LRMKWMMAMKYPITA
LRMKYMMRMRYPNTA

SEQ ID NO: 248576 - protein, 15 aa, Artificial Sequence
  Description of Artificial Sequence: Synthetic peptide
  Seed: LRMKWMMAMKYPITA
LRMKYMMRMRYPQTA

SEQ ID NO: 248577 - protein, 15 aa, Artificial Sequence
  Description of Artificial Sequence: Synthetic peptide
  Seed: LRMKWMMAMKYPITA
LRMKYMMRMRYPSTA

SEQ ID NO: 248578 - protein, 15 aa, Artificial Sequence
  Description of Artificial Sequence: Synthetic peptide
  Seed: LRMKWMMAMKYPITA
LRMKYMMRMRYPTTA

SEQ ID NO: 248579 - protein, 15 aa, Artificial Sequence
  Description of Artificial Sequence: Synthetic peptide
  Seed: LRMKWMMAMKYPITA
LRMKYMMRMRYPVTA

SEQ ID NO: 248580 - protein, 15 aa, Artificial Sequence
  Description of Artificial Sequence: Synthetic peptide
  Seed: LRMKWMMAMKYPITA
LRMKYMMRMSYPATA

SEQ ID NO: 248581 - protein, 15 aa, Artificial Sequence
  Description of Artificial Sequence: Synthetic peptide
  Seed: LRMKWMMAMKYPITA
LRMKYMMRMSYPCTA

SEQ ID NO: 248582 - protein, 15 aa, Artificial Sequence
  Description of Artificial Sequence: Synthetic peptide
  Seed: LRMKWMMAMKYPITA
LRMKYMMRMSYPFTA

SEQ ID NO: 248583 - protein, 15 aa, Artificial Sequence
  Description of Artificial Sequence: Synthetic peptide
  Seed: LRMKWMMAMKYPITA
LRMKYMMRMSYPITA

SEQ ID NO: 248584 - protein, 15 aa, Artificial Sequence
  Description of Artificial Sequence: Synthetic peptide
  Seed: LRMKWMMAMKYPITA
LRMKYMMRMSYPLTA

SEQ ID NO: 248585 - protein, 15 aa, Artificial Sequence
  Description of Artificial Sequence: Synthetic peptide
  Seed: LRMKWMMAMKYPITA
LRMKYMMRMSYPMTA

SEQ ID NO: 248586 - protein, 15 aa, Artificial Sequence
  Description of Artificial Sequence: Synthetic peptide
  Seed: LRMKWMMAMKYPITA
LRMKYMMRMSYPSTA

SEQ ID NO: 248587 - protein, 15 aa, Artificial Sequence
  Description of Artificial Sequence: Synthetic peptide
  Seed: LRMKWMMAMKYPITA
LRMKYMMRMSYPTTA

SEQ ID NO: 248588 - protein, 15 aa, Artificial Sequence
  Description of Artificial Sequence: Synthetic peptide
  Seed: LRMKWMMAMKYPITA
LRMKYMMRMSYPVTA

SEQ ID NO: 248589 - protein, 15 aa, Artificial Sequence
  Description of Artificial Sequence: Synthetic peptide
  Seed: LRMKWMMAMKYPITA
LRMKYMMRMSYPWTA

SEQ ID NO: 248590 - protein, 15 aa, Artificial Sequence
  Description of Artificial Sequence: Synthetic peptide
  Seed: LRMKWMMAMKYPITA
LRMKYMMRMSYPYTA

SEQ ID NO: 248591 - protein, 15 aa, Artificial Sequence
  Description of Artificial Sequence: Synthetic peptide
  Seed: LRMKWMMAMKYPITA
LRMKYMMRMTYPATA

SEQ ID NO: 248592 - protein, 15 aa, Artificial Sequence
  Description of Artificial Sequence: Synthetic peptide
  Seed: LRMKWMMAMKYPITA
LRMKYMMRMTYPFTA

SEQ ID NO: 248593 - protein, 15 aa, Artificial Sequence
  Description of Artificial Sequence: Synthetic peptide
  Seed: LRMKWMMAMKYPITA
LRMKYMMRMTYPITA

SEQ ID NO: 248594 - protein, 15 aa, Artificial Sequence
  Description of Artificial Sequence: Synthetic peptide
  Seed: LRMKWMMAMKYPITA
LRMKYMMRMTYPLTA

SEQ ID NO: 248595 - protein, 15 aa, Artificial Sequence
  Description of Artificial Sequence: Synthetic peptide
  Seed: LRMKWMMAMKYPITA
LRMKYMMRMTYPMTA

SEQ ID NO: 248596 - protein, 15 aa, Artificial Sequence
  Description of Artificial Sequence: Synthetic peptide
  Seed: LRMKWMMAMKYPITA
LRMKYMMRMTYPRTA

SEQ ID NO: 248597 - protein, 15 aa, Artificial Sequence
  Description of Artificial Sequence: Synthetic peptide
  Seed: LRMKWMMAMKYPITA
LRMKYMMRMTYPSTA

SEQ ID NO: 248598 - protein, 15 aa, Artificial Sequence
  Description of Artificial Sequence: Synthetic peptide
  Seed: LRMKWMMAMKYPITA
LRMKYMMRMTYPTTA

SEQ ID NO: 248599 - protein, 15 aa, Artificial Sequence
  Description of Artificial Sequence: Synthetic peptide
  Seed: LRMKWMMAMKYPITA
LRMKYMMRMTYPVTA

SEQ ID NO: 248600 - protein, 15 aa, Artificial Sequence
  Description of Artificial Sequence: Synthetic peptide
  Seed: LRMKWMMAMKYPITA
LRMKYMMRMTYPYTA

SEQ ID NO: 248601 - protein, 15 aa, Artificial Sequence
  Description of Artificial Sequence: Synthetic peptide
  Seed: LRMKWMMAMKYPITA
LRMKYMMRMVYPATA

SEQ ID NO: 248602 - protein, 15 aa, Artificial Sequence
  Description of Artificial Sequence: Synthetic peptide
  Seed: LRMKWMMAMKYPITA
LRMKYMMRMVYPITA

SEQ ID NO: 248603 - protein, 15 aa, Artificial Sequence
  Description of Artificial Sequence: Synthetic peptide
  Seed: LRMKWMMAMKYPITA
LRMKYMMRMVYPLTA

SEQ ID NO: 248604 - protein, 15 aa, Artificial Sequence
  Description of Artificial Sequence: Synthetic peptide
  Seed: LRMKWMMAMKYPITA
LRMKYMMRMVYPMTA

SEQ ID NO: 248605 - protein, 15 aa, Artificial Sequence
  Description of Artificial Sequence: Synthetic peptide
  Seed: LRMKWMMAMKYPITA
LRMKYMMRMVYPNTA

SEQ ID NO: 248606 - protein, 15 aa, Artificial Sequence
  Description of Artificial Sequence: Synthetic peptide
  Seed: LRMKWMMAMKYPITA
LRMKYMMRMVYPSTA

SEQ ID NO: 248607 - protein, 15 aa, Artificial Sequence
  Description of Artificial Sequence: Synthetic peptide
  Seed: LRMKWMMAMKYPITA
LRMKYMMRMVYPTTA

SEQ ID NO: 248608 - protein, 15 aa, Artificial Sequence
  Description of Artificial Sequence: Synthetic peptide
  Seed: LRMKWMMAMKYPITA
LRMKYMMRMVYPVTA

SEQ ID NO: 248609 - protein, 15 aa, Artificial Sequence
  Description of Artificial Sequence: Synthetic peptide
  Seed: LRMKWMMAMKYPITA
LRMKYMMSMAYPATA

SEQ ID NO: 248610 - protein, 15 aa, Artificial Sequence
  Description of Artificial Sequence: Synthetic peptide
  Seed: LRMKWMMAMKYPITA
LRMKYMMSMAYPCTA

SEQ ID NO: 248611 - protein, 15 aa, Artificial Sequence
  Description of Artificial Sequence: Synthetic peptide
  Seed: LRMKWMMAMKYPITA
LRMKYMMSMAYPDTA

SEQ ID NO: 248612 - protein, 15 aa, Artificial Sequence
  Description of Artificial Sequence: Synthetic peptide
  Seed: LRMKWMMAMKYPITA
LRMKYMMSMAYPETA

SEQ ID NO: 248613 - protein, 15 aa, Artificial Sequence
  Description of Artificial Sequence: Synthetic peptide
  Seed: LRMKWMMAMKYPITA
LRMKYMMSMAYPFTA

SEQ ID NO: 248614 - protein, 15 aa, Artificial Sequence
  Description of Artificial Sequence: Synthetic peptide
  Seed: LRMKWMMAMKYPITA
LRMKYMMSMAYPGTA

SEQ ID NO: 248615 - protein, 15 aa, Artificial Sequence
  Description of Artificial Sequence: Synthetic peptide
  Seed: LRMKWMMAMKYPITA
LRMKYMMSMAYPHTA

SEQ ID NO: 248616 - protein, 15 aa, Artificial Sequence
  Description of Artificial Sequence: Synthetic peptide
  Seed: LRMKWMMAMKYPITA
LRMKYMMSMAYPITA

SEQ ID NO: 248617 - protein, 15 aa, Artificial Sequence
  Description of Artificial Sequence: Synthetic peptide
  Seed: LRMKWMMAMKYPITA
LRMKYMMSMAYPKTA

SEQ ID NO: 248618 - protein, 15 aa, Artificial Sequence
  Description of Artificial Sequence: Synthetic peptide
  Seed: LRMKWMMAMKYPITA
LRMKYMMSMAYPLTA

SEQ ID NO: 248619 - protein, 15 aa, Artificial Sequence
  Description of Artificial Sequence: Synthetic peptide
  Seed: LRMKWMMAMKYPITA
LRMKYMMSMAYPMTA

SEQ ID NO: 248620 - protein, 15 aa, Artificial Sequence
  Description of Artificial Sequence: Synthetic peptide
  Seed: LRMKWMMAMKYPITA
LRMKYMMSMAYPNTA

SEQ ID NO: 248621 - protein, 15 aa, Artificial Sequence
  Description of Artificial Sequence: Synthetic peptide
  Seed: LRMKWMMAMKYPITA
LRMKYMMSMAYPPTA

SEQ ID NO: 248622 - protein, 15 aa, Artificial Sequence
  Description of Artificial Sequence: Synthetic peptide
  Seed: LRMKWMMAMKYPITA
LRMKYMMSMAYPQTA

SEQ ID NO: 248623 - protein, 15 aa, Artificial Sequence
  Description of Artificial Sequence: Synthetic peptide
  Seed: LRMKWMMAMKYPITA
LRMKYMMSMAYPRTA

SEQ ID NO: 248624 - protein, 15 aa, Artificial Sequence
  Description of Artificial Sequence: Synthetic peptide
  Seed: LRMKWMMAMKYPITA
LRMKYMMSMAYPSTA

SEQ ID NO: 248625 - protein, 15 aa, Artificial Sequence
  Description of Artificial Sequence: Synthetic peptide
  Seed: LRMKWMMAMKYPITA
LRMKYMMSMAYPTTA

SEQ ID NO: 248626 - protein, 15 aa, Artificial Sequence
  Description of Artificial Sequence: Synthetic peptide
  Seed: LRMKWMMAMKYPITA
LRMKYMMSMAYPVTA

SEQ ID NO: 248627 - protein, 15 aa, Artificial Sequence
  Description of Artificial Sequence: Synthetic peptide
  Seed: LRMKWMMAMKYPITA
LRMKYMMSMAYPWTA

SEQ ID NO: 248628 - protein, 15 aa, Artificial Sequence
  Description of Artificial Sequence: Synthetic peptide
  Seed: LRMKWMMAMKYPITA
LRMKYMMSMAYPYTA

SEQ ID NO: 248629 - protein, 15 aa, Artificial Sequence
  Description of Artificial Sequence: Synthetic peptide
  Seed: LRMKWMMAMKYPITA
LRMKYMMSMCYPATA

SEQ ID NO: 248630 - protein, 15 aa, Artificial Sequence
  Description of Artificial Sequence: Synthetic peptide
  Seed: LRMKWMMAMKYPITA
LRMKYMMSMCYPFTA

SEQ ID NO: 248631 - protein, 15 aa, Artificial Sequence
  Description of Artificial Sequence: Synthetic peptide
  Seed: LRMKWMMAMKYPITA
LRMKYMMSMCYPGTA

SEQ ID NO: 248632 - protein, 15 aa, Artificial Sequence
  Description of Artificial Sequence: Synthetic peptide
  Seed: LRMKWMMAMKYPITA
LRMKYMMSMCYPHTA

SEQ ID NO: 248633 - protein, 15 aa, Artificial Sequence
  Description of Artificial Sequence: Synthetic peptide
  Seed: LRMKWMMAMKYPITA
LRMKYMMSMCYPITA

SEQ ID NO: 248634 - protein, 15 aa, Artificial Sequence
  Description of Artificial Sequence: Synthetic peptide
  Seed: LRMKWMMAMKYPITA
LRMKYMMSMCYPKTA

SEQ ID NO: 248635 - protein, 15 aa, Artificial Sequence
  Description of Artificial Sequence: Synthetic peptide
  Seed: LRMKWMMAMKYPITA
LRMKYMMSMCYPLTA

SEQ ID NO: 248636 - protein, 15 aa, Artificial Sequence
  Description of Artificial Sequence: Synthetic peptide
  Seed: LRMKWMMAMKYPITA
LRMKYMMSMCYPMTA

SEQ ID NO: 248637 - protein, 15 aa, Artificial Sequence
  Description of Artificial Sequence: Synthetic peptide
  Seed: LRMKWMMAMKYPITA
LRMKYMMSMCYPNTA

SEQ ID NO: 248638 - protein, 15 aa, Artificial Sequence
  Description of Artificial Sequence: Synthetic peptide
  Seed: LRMKWMMAMKYPITA
LRMKYMMSMCYPQTA

SEQ ID NO: 248639 - protein, 15 aa, Artificial Sequence
  Description of Artificial Sequence: Synthetic peptide
  Seed: LRMKWMMAMKYPITA
LRMKYMMSMCYPRTA

SEQ ID NO: 248640 - protein, 15 aa, Artificial Sequence
  Description of Artificial Sequence: Synthetic peptide
  Seed: LRMKWMMAMKYPITA
LRMKYMMSMCYPSTA

SEQ ID NO: 248641 - protein, 15 aa, Artificial Sequence
  Description of Artificial Sequence: Synthetic peptide
  Seed: LRMKWMMAMKYPITA
LRMKYMMSMCYPTTA

SEQ ID NO: 248642 - protein, 15 aa, Artificial Sequence
  Description of Artificial Sequence: Synthetic peptide
  Seed: LRMKWMMAMKYPITA
LRMKYMMSMCYPVTA

SEQ ID NO: 248643 - protein, 15 aa, Artificial Sequence
  Description of Artificial Sequence: Synthetic peptide
  Seed: LRMKWMMAMKYPITA
LRMKYMMSMCYPYTA

SEQ ID NO: 248644 - protein, 15 aa, Artificial Sequence
  Description of Artificial Sequence: Synthetic peptide
  Seed: LRMKWMMAMKYPITA
LRMKYMMSMDYPATA

SEQ ID NO: 248645 - protein, 15 aa, Artificial Sequence
  Description of Artificial Sequence: Synthetic peptide
  Seed: LRMKWMMAMKYPITA
LRMKYMMSMDYPFTA

SEQ ID NO: 248646 - protein, 15 aa, Artificial Sequence
  Description of Artificial Sequence: Synthetic peptide
  Seed: LRMKWMMAMKYPITA
LRMKYMMSMDYPITA

SEQ ID NO: 248647 - protein, 15 aa, Artificial Sequence
  Description of Artificial Sequence: Synthetic peptide
  Seed: LRMKWMMAMKYPITA
LRMKYMMSMDYPLTA

SEQ ID NO: 248648 - protein, 15 aa, Artificial Sequence
  Description of Artificial Sequence: Synthetic peptide
  Seed: LRMKWMMAMKYPITA
LRMKYMMSMDYPMTA

SEQ ID NO: 248649 - protein, 15 aa, Artificial Sequence
  Description of Artificial Sequence: Synthetic peptide
  Seed: LRMKWMMAMKYPITA
LRMKYMMSMDYPNTA

SEQ ID NO: 248650 - protein, 15 aa, Artificial Sequence
  Description of Artificial Sequence: Synthetic peptide
  Seed: LRMKWMMAMKYPITA
LRMKYMMSMDYPSTA

SEQ ID NO: 248651 - protein, 15 aa, Artificial Sequence
  Description of Artificial Sequence: Synthetic peptide
  Seed: LRMKWMMAMKYPITA
LRMKYMMSMDYPTTA

SEQ ID NO: 248652 - protein, 15 aa, Artificial Sequence
  Description of Artificial Sequence: Synthetic peptide
  Seed: LRMKWMMAMKYPITA
LRMKYMMSMDYPVTA

SEQ ID NO: 248653 - protein, 15 aa, Artificial Sequence
  Description of Artificial Sequence: Synthetic peptide
  Seed: LRMKWMMAMKYPITA
LRMKYMMSMEYPATA

SEQ ID NO: 248654 - protein, 15 aa, Artificial Sequence
  Description of Artificial Sequence: Synthetic peptide
  Seed: LRMKWMMAMKYPITA
LRMKYMMSMEYPFTA

SEQ ID NO: 248655 - protein, 15 aa, Artificial Sequence
  Description of Artificial Sequence: Synthetic peptide
  Seed: LRMKWMMAMKYPITA
LRMKYMMSMEYPITA

SEQ ID NO: 248656 - protein, 15 aa, Artificial Sequence
  Description of Artificial Sequence: Synthetic peptide
  Seed: LRMKWMMAMKYPITA
LRMKYMMSMEYPLTA

SEQ ID NO: 248657 - protein, 15 aa, Artificial Sequence
  Description of Artificial Sequence: Synthetic peptide
  Seed: LRMKWMMAMKYPITA
LRMKYMMSMEYPMTA

SEQ ID NO: 248658 - protein, 15 aa, Artificial Sequence
  Description of Artificial Sequence: Synthetic peptide
  Seed: LRMKWMMAMKYPITA
LRMKYMMSMEYPNTA

SEQ ID NO: 248659 - protein, 15 aa, Artificial Sequence
  Description of Artificial Sequence: Synthetic peptide
  Seed: LRMKWMMAMKYPITA
LRMKYMMSMEYPSTA

SEQ ID NO: 248660 - protein, 15 aa, Artificial Sequence
  Description of Artificial Sequence: Synthetic peptide
  Seed: LRMKWMMAMKYPITA
LRMKYMMSMEYPTTA

SEQ ID NO: 248661 - protein, 15 aa, Artificial Sequence
  Description of Artificial Sequence: Synthetic peptide
  Seed: LRMKWMMAMKYPITA
LRMKYMMSMEYPVTA

SEQ ID NO: 248662 - protein, 15 aa, Artificial Sequence
  Description of Artificial Sequence: Synthetic peptide
  Seed: LRMKWMMAMKYPITA
LRMKYMMSMFYPATA

SEQ ID NO: 248663 - protein, 15 aa, Artificial Sequence
  Description of Artificial Sequence: Synthetic peptide
  Seed: LRMKWMMAMKYPITA
LRMKYMMSMFYPDTA

SEQ ID NO: 248664 - protein, 15 aa, Artificial Sequence
  Description of Artificial Sequence: Synthetic peptide
  Seed: LRMKWMMAMKYPITA
LRMKYMMSMFYPETA

SEQ ID NO: 248665 - protein, 15 aa, Artificial Sequence
  Description of Artificial Sequence: Synthetic peptide
  Seed: LRMKWMMAMKYPITA
LRMKYMMSMFYPFTA

SEQ ID NO: 248666 - protein, 15 aa, Artificial Sequence
  Description of Artificial Sequence: Synthetic peptide
  Seed: LRMKWMMAMKYPITA
LRMKYMMSMFYPITA

SEQ ID NO: 248667 - protein, 15 aa, Artificial Sequence
  Description of Artificial Sequence: Synthetic peptide
  Seed: LRMKWMMAMKYPITA
LRMKYMMSMFYPLTA

SEQ ID NO: 248668 - protein, 15 aa, Artificial Sequence
  Description of Artificial Sequence: Synthetic peptide
  Seed: LRMKWMMAMKYPITA
LRMKYMMSMFYPMTA

SEQ ID NO: 248669 - protein, 15 aa, Artificial Sequence
  Description of Artificial Sequence: Synthetic peptide
  Seed: LRMKWMMAMKYPITA
LRMKYMMSMFYPNTA

SEQ ID NO: 248670 - protein, 15 aa, Artificial Sequence
  Description of Artificial Sequence: Synthetic peptide
  Seed: LRMKWMMAMKYPITA
LRMKYMMSMFYPSTA

SEQ ID NO: 248671 - protein, 15 aa, Artificial Sequence
  Description of Artificial Sequence: Synthetic peptide
  Seed: LRMKWMMAMKYPITA
LRMKYMMSMFYPTTA

SEQ ID NO: 248672 - protein, 15 aa, Artificial Sequence
  Description of Artificial Sequence: Synthetic peptide
  Seed: LRMKWMMAMKYPITA
LRMKYMMSMFYPVTA

SEQ ID NO: 248673 - protein, 15 aa, Artificial Sequence
  Description of Artificial Sequence: Synthetic peptide
  Seed: LRMKWMMAMKYPITA
LRMKYMMSMFYPYTA

SEQ ID NO: 248674 - protein, 15 aa, Artificial Sequence
  Description of Artificial Sequence: Synthetic peptide
  Seed: LRMKWMMAMKYPITA
LRMKYMMSMGYPATA

SEQ ID NO: 248675 - protein, 15 aa, Artificial Sequence
  Description of Artificial Sequence: Synthetic peptide
  Seed: LRMKWMMAMKYPITA
LRMKYMMSMGYPCTA

SEQ ID NO: 248676 - protein, 15 aa, Artificial Sequence
  Description of Artificial Sequence: Synthetic peptide
  Seed: LRMKWMMAMKYPITA
LRMKYMMSMGYPDTA

SEQ ID NO: 248677 - protein, 15 aa, Artificial Sequence
  Description of Artificial Sequence: Synthetic peptide
  Seed: LRMKWMMAMKYPITA
LRMKYMMSMGYPETA

SEQ ID NO: 248678 - protein, 15 aa, Artificial Sequence
  Description of Artificial Sequence: Synthetic peptide
  Seed: LRMKWMMAMKYPITA
LRMKYMMSMGYPFTA

SEQ ID NO: 248679 - protein, 15 aa, Artificial Sequence
  Description of Artificial Sequence: Synthetic peptide
  Seed: LRMKWMMAMKYPITA
LRMKYMMSMGYPGTA

SEQ ID NO: 248680 - protein, 15 aa, Artificial Sequence
  Description of Artificial Sequence: Synthetic peptide
  Seed: LRMKWMMAMKYPITA
LRMKYMMSMGYPHTA

SEQ ID NO: 248681 - protein, 15 aa, Artificial Sequence
  Description of Artificial Sequence: Synthetic peptide
  Seed: LRMKWMMAMKYPITA
LRMKYMMSMGYPITA

SEQ ID NO: 248682 - protein, 15 aa, Artificial Sequence
  Description of Artificial Sequence: Synthetic peptide
  Seed: LRMKWMMAMKYPITA
LRMKYMMSMGYPKTA

SEQ ID NO: 248683 - protein, 15 aa, Artificial Sequence
  Description of Artificial Sequence: Synthetic peptide
  Seed: LRMKWMMAMKYPITA
LRMKYMMSMGYPLTA

SEQ ID NO: 248684 - protein, 15 aa, Artificial Sequence
  Description of Artificial Sequence: Synthetic peptide
  Seed: LRMKWMMAMKYPITA
LRMKYMMSMGYPMTA

SEQ ID NO: 248685 - protein, 15 aa, Artificial Sequence
  Description of Artificial Sequence: Synthetic peptide
  Seed: LRMKWMMAMKYPITA
LRMKYMMSMGYPNTA

SEQ ID NO: 248686 - protein, 15 aa, Artificial Sequence
  Description of Artificial Sequence: Synthetic peptide
  Seed: LRMKWMMAMKYPITA
LRMKYMMSMGYPPTA

SEQ ID NO: 248687 - protein, 15 aa, Artificial Sequence
  Description of Artificial Sequence: Synthetic peptide
  Seed: LRMKWMMAMKYPITA
LRMKYMMSMGYPQTA

SEQ ID NO: 248688 - protein, 15 aa, Artificial Sequence
  Description of Artificial Sequence: Synthetic peptide
  Seed: LRMKWMMAMKYPITA
LRMKYMMSMGYPRTA

SEQ ID NO: 248689 - protein, 15 aa, Artificial Sequence
  Description of Artificial Sequence: Synthetic peptide
  Seed: LRMKWMMAMKYPITA
LRMKYMMSMGYPSTA

SEQ ID NO: 248690 - protein, 15 aa, Artificial Sequence
  Description of Artificial Sequence: Synthetic peptide
  Seed: LRMKWMMAMKYPITA
LRMKYMMSMGYPTTA

SEQ ID NO: 248691 - protein, 15 aa, Artificial Sequence
  Description of Artificial Sequence: Synthetic peptide
  Seed: LRMKWMMAMKYPITA
LRMKYMMSMGYPVTA

SEQ ID NO: 248692 - protein, 15 aa, Artificial Sequence
  Description of Artificial Sequence: Synthetic peptide
  Seed: LRMKWMMAMKYPITA
LRMKYMMSMGYPWTA

SEQ ID NO: 248693 - protein, 15 aa, Artificial Sequence
  Description of Artificial Sequence: Synthetic peptide
  Seed: LRMKWMMAMKYPITA
LRMKYMMSMGYPYTA

SEQ ID NO: 248694 - protein, 15 aa, Artificial Sequence
  Description of Artificial Sequence: Synthetic peptide
  Seed: LRMKWMMAMKYPITA
LRMKYMMSMHYPATA

SEQ ID NO: 248695 - protein, 15 aa, Artificial Sequence
  Description of Artificial Sequence: Synthetic peptide
  Seed: LRMKWMMAMKYPITA
LRMKYMMSMHYPCTA

SEQ ID NO: 248696 - protein, 15 aa, Artificial Sequence
  Description of Artificial Sequence: Synthetic peptide
  Seed: LRMKWMMAMKYPITA
LRMKYMMSMHYPFTA

SEQ ID NO: 248697 - protein, 15 aa, Artificial Sequence
  Description of Artificial Sequence: Synthetic peptide
  Seed: LRMKWMMAMKYPITA
LRMKYMMSMHYPGTA

SEQ ID NO: 248698 - protein, 15 aa, Artificial Sequence
  Description of Artificial Sequence: Synthetic peptide
  Seed: LRMKWMMAMKYPITA
LRMKYMMSMHYPITA

SEQ ID NO: 248699 - protein, 15 aa, Artificial Sequence
  Description of Artificial Sequence: Synthetic peptide
  Seed: LRMKWMMAMKYPITA
LRMKYMMSMHYPLTA

SEQ ID NO: 248700 - protein, 15 aa, Artificial Sequence
  Description of Artificial Sequence: Synthetic peptide
  Seed: LRMKWMMAMKYPITA
LRMKYMMSMHYPMTA

SEQ ID NO: 248701 - protein, 15 aa, Artificial Sequence
  Description of Artificial Sequence: Synthetic peptide
  Seed: LRMKWMMAMKYPITA
LRMKYMMSMHYPNTA

SEQ ID NO: 248702 - protein, 15 aa, Artificial Sequence
  Description of Artificial Sequence: Synthetic peptide
  Seed: LRMKWMMAMKYPITA
LRMKYMMSMHYPPTA

SEQ ID NO: 248703 - protein, 15 aa, Artificial Sequence
  Description of Artificial Sequence: Synthetic peptide
  Seed: LRMKWMMAMKYPITA
LRMKYMMSMHYPQTA

SEQ ID NO: 248704 - protein, 15 aa, Artificial Sequence
  Description of Artificial Sequence: Synthetic peptide
  Seed: LRMKWMMAMKYPITA
LRMKYMMSMHYPRTA

SEQ ID NO: 248705 - protein, 15 aa, Artificial Sequence
  Description of Artificial Sequence: Synthetic peptide
  Seed: LRMKWMMAMKYPITA
LRMKYMMSMHYPSTA

SEQ ID NO: 248706 - protein, 15 aa, Artificial Sequence
  Description of Artificial Sequence: Synthetic peptide
  Seed: LRMKWMMAMKYPITA
LRMKYMMSMHYPTTA

SEQ ID NO: 248707 - protein, 15 aa, Artificial Sequence
  Description of Artificial Sequence: Synthetic peptide
  Seed: LRMKWMMAMKYPITA
LRMKYMMSMHYPVTA

SEQ ID NO: 248708 - protein, 15 aa, Artificial Sequence
  Description of Artificial Sequence: Synthetic peptide
  Seed: LRMKWMMAMKYPITA
LRMKYMMSMHYPWTA

SEQ ID NO: 248709 - protein, 15 aa, Artificial Sequence
  Description of Artificial Sequence: Synthetic peptide
  Seed: LRMKWMMAMKYPITA
LRMKYMMSMHYPYTA

SEQ ID NO: 248710 - protein, 15 aa, Artificial Sequence
  Description of Artificial Sequence: Synthetic peptide
  Seed: LRMKWMMAMKYPITA
LRMKYMMSMIYPATA

SEQ ID NO: 248711 - protein, 15 aa, Artificial Sequence
  Description of Artificial Sequence: Synthetic peptide
  Seed: LRMKWMMAMKYPITA
LRMKYMMSMIYPCTA

SEQ ID NO: 248712 - protein, 15 aa, Artificial Sequence
  Description of Artificial Sequence: Synthetic peptide
  Seed: LRMKWMMAMKYPITA
LRMKYMMSMIYPDTA

SEQ ID NO: 248713 - protein, 15 aa, Artificial Sequence
  Description of Artificial Sequence: Synthetic peptide
  Seed: LRMKWMMAMKYPITA
LRMKYMMSMIYPETA

SEQ ID NO: 248714 - protein, 15 aa, Artificial Sequence
  Description of Artificial Sequence: Synthetic peptide
  Seed: LRMKWMMAMKYPITA
LRMKYMMSMIYPFTA

SEQ ID NO: 248715 - protein, 15 aa, Artificial Sequence
  Description of Artificial Sequence: Synthetic peptide
  Seed: LRMKWMMAMKYPITA
LRMKYMMSMIYPGTA

SEQ ID NO: 248716 - protein, 15 aa, Artificial Sequence
  Description of Artificial Sequence: Synthetic peptide
  Seed: LRMKWMMAMKYPITA
LRMKYMMSMIYPHTA

SEQ ID NO: 248717 - protein, 15 aa, Artificial Sequence
  Description of Artificial Sequence: Synthetic peptide
  Seed: LRMKWMMAMKYPITA
LRMKYMMSMIYPITA

SEQ ID NO: 248718 - protein, 15 aa, Artificial Sequence
  Description of Artificial Sequence: Synthetic peptide
  Seed: LRMKWMMAMKYPITA
LRMKYMMSMIYPKTA

SEQ ID NO: 248719 - protein, 15 aa, Artificial Sequence
  Description of Artificial Sequence: Synthetic peptide
  Seed: LRMKWMMAMKYPITA
LRMKYMMSMIYPLTA

SEQ ID NO: 248720 - protein, 15 aa, Artificial Sequence
  Description of Artificial Sequence: Synthetic peptide
  Seed: LRMKWMMAMKYPITA
LRMKYMMSMIYPMTA

SEQ ID NO: 248721 - protein, 15 aa, Artificial Sequence
  Description of Artificial Sequence: Synthetic peptide
  Seed: LRMKWMMAMKYPITA
LRMKYMMSMIYPNTA

SEQ ID NO: 248722 - protein, 15 aa, Artificial Sequence
  Description of Artificial Sequence: Synthetic peptide
  Seed: LRMKWMMAMKYPITA
LRMKYMMSMIYPPTA

SEQ ID NO: 248723 - protein, 15 aa, Artificial Sequence
  Description of Artificial Sequence: Synthetic peptide
  Seed: LRMKWMMAMKYPITA
LRMKYMMSMIYPQTA

SEQ ID NO: 248724 - protein, 15 aa, Artificial Sequence
  Description of Artificial Sequence: Synthetic peptide
  Seed: LRMKWMMAMKYPITA
LRMKYMMSMIYPRTA

SEQ ID NO: 248725 - protein, 15 aa, Artificial Sequence
  Description of Artificial Sequence: Synthetic peptide
  Seed: LRMKWMMAMKYPITA
LRMKYMMSMIYPSTA

SEQ ID NO: 248726 - protein, 15 aa, Artificial Sequence
  Description of Artificial Sequence: Synthetic peptide
  Seed: LRMKWMMAMKYPITA
LRMKYMMSMIYPTTA

SEQ ID NO: 248727 - protein, 15 aa, Artificial Sequence
  Description of Artificial Sequence: Synthetic peptide
  Seed: LRMKWMMAMKYPITA
LRMKYMMSMIYPVTA

SEQ ID NO: 248728 - protein, 15 aa, Artificial Sequence
  Description of Artificial Sequence: Synthetic peptide
  Seed: LRMKWMMAMKYPITA
LRMKYMMSMIYPWTA

SEQ ID NO: 248729 - protein, 15 aa, Artificial Sequence
  Description of Artificial Sequence: Synthetic peptide
  Seed: LRMKWMMAMKYPITA
LRMKYMMSMIYPYTA

SEQ ID NO: 248730 - protein, 15 aa, Artificial Sequence
  Description of Artificial Sequence: Synthetic peptide
  Seed: LRMKWMMAMKYPITA
LRMKYMMSMKYPATA

SEQ ID NO: 248731 - protein, 15 aa, Artificial Sequence
  Description of Artificial Sequence: Synthetic peptide
  Seed: LRMKWMMAMKYPITA
LRMKYMMSMKYPFTA

SEQ ID NO: 248732 - protein, 15 aa, Artificial Sequence
  Description of Artificial Sequence: Synthetic peptide
  Seed: LRMKWMMAMKYPITA
LRMKYMMSMKYPGTA

SEQ ID NO: 248733 - protein, 15 aa, Artificial Sequence
  Description of Artificial Sequence: Synthetic peptide
  Seed: LRMKWMMAMKYPITA
LRMKYMMSMKYPHTA

SEQ ID NO: 248734 - protein, 15 aa, Artificial Sequence
  Description of Artificial Sequence: Synthetic peptide
  Seed: LRMKWMMAMKYPITA
LRMKYMMSMKYPITA

SEQ ID NO: 248735 - protein, 15 aa, Artificial Sequence
  Description of Artificial Sequence: Synthetic peptide
  Seed: LRMKWMMAMKYPITA
LRMKYMMSMKYPKTA

SEQ ID NO: 248736 - protein, 15 aa, Artificial Sequence
  Description of Artificial Sequence: Synthetic peptide
  Seed: LRMKWMMAMKYPITA
LRMKYMMSMKYPLTA

SEQ ID NO: 248737 - protein, 15 aa, Artificial Sequence
  Description of Artificial Sequence: Synthetic peptide
  Seed: LRMKWMMAMKYPITA
LRMKYMMSMKYPMTA

SEQ ID NO: 248738 - protein, 15 aa, Artificial Sequence
  Description of Artificial Sequence: Synthetic peptide
  Seed: LRMKWMMAMKYPITA
LRMKYMMSMKYPNTA

SEQ ID NO: 248739 - protein, 15 aa, Artificial Sequence
  Description of Artificial Sequence: Synthetic peptide
  Seed: LRMKWMMAMKYPITA
LRMKYMMSMKYPPTA

SEQ ID NO: 248740 - protein, 15 aa, Artificial Sequence
  Description of Artificial Sequence: Synthetic peptide
  Seed: LRMKWMMAMKYPITA
LRMKYMMSMKYPQTA

SEQ ID NO: 248741 - protein, 15 aa, Artificial Sequence
  Description of Artificial Sequence: Synthetic peptide
  Seed: LRMKWMMAMKYPITA
LRMKYMMSMKYPRTA

SEQ ID NO: 248742 - protein, 15 aa, Artificial Sequence
  Description of Artificial Sequence: Synthetic peptide
  Seed: LRMKWMMAMKYPITA
LRMKYMMSMKYPSTA

SEQ ID NO: 248743 - protein, 15 aa, Artificial Sequence
  Description of Artificial Sequence: Synthetic peptide
  Seed: LRMKWMMAMKYPITA
LRMKYMMSMKYPTTA

SEQ ID NO: 248744 - protein, 15 aa, Artificial Sequence
  Description of Artificial Sequence: Synthetic peptide
  Seed: LRMKWMMAMKYPITA
LRMKYMMSMKYPVTA

SEQ ID NO: 248745 - protein, 15 aa, Artificial Sequence
  Description of Artificial Sequence: Synthetic peptide
  Seed: LRMKWMMAMKYPITA
LRMKYMMSMKYPWTA

SEQ ID NO: 248746 - protein, 15 aa, Artificial Sequence
  Description of Artificial Sequence: Synthetic peptide
  Seed: LRMKWMMAMKYPITA
LRMKYMMSMKYPYTA

SEQ ID NO: 248747 - protein, 15 aa, Artificial Sequence
  Description of Artificial Sequence: Synthetic peptide
  Seed: LRMKWMMAMKYPITA
LRMKYMMSMLYPATA

SEQ ID NO: 248748 - protein, 15 aa, Artificial Sequence
  Description of Artificial Sequence: Synthetic peptide
  Seed: LRMKWMMAMKYPITA
LRMKYMMSMLYPCTA

SEQ ID NO: 248749 - protein, 15 aa, Artificial Sequence
  Description of Artificial Sequence: Synthetic peptide
  Seed: LRMKWMMAMKYPITA
LRMKYMMSMLYPDTA

SEQ ID NO: 248750 - protein, 15 aa, Artificial Sequence
  Description of Artificial Sequence: Synthetic peptide
  Seed: LRMKWMMAMKYPITA
LRMKYMMSMLYPFTA

SEQ ID NO: 248751 - protein, 15 aa, Artificial Sequence
  Description of Artificial Sequence: Synthetic peptide
  Seed: LRMKWMMAMKYPITA
LRMKYMMSMLYPGTA

SEQ ID NO: 248752 - protein, 15 aa, Artificial Sequence
  Description of Artificial Sequence: Synthetic peptide
  Seed: LRMKWMMAMKYPITA
LRMKYMMSMLYPITA

SEQ ID NO: 248753 - protein, 15 aa, Artificial Sequence
  Description of Artificial Sequence: Synthetic peptide
  Seed: LRMKWMMAMKYPITA
LRMKYMMSMLYPLTA

SEQ ID NO: 248754 - protein, 15 aa, Artificial Sequence
  Description of Artificial Sequence: Synthetic peptide
  Seed: LRMKWMMAMKYPITA
LRMKYMMSMLYPMTA

SEQ ID NO: 248755 - protein, 15 aa, Artificial Sequence
  Description of Artificial Sequence: Synthetic peptide
  Seed: LRMKWMMAMKYPITA
LRMKYMMSMLYPNTA

SEQ ID NO: 248756 - protein, 15 aa, Artificial Sequence
  Description of Artificial Sequence: Synthetic peptide
  Seed: LRMKWMMAMKYPITA
LRMKYMMSMLYPSTA

SEQ ID NO: 248757 - protein, 15 aa, Artificial Sequence
  Description of Artificial Sequence: Synthetic peptide
  Seed: LRMKWMMAMKYPITA
LRMKYMMSMLYPTTA

SEQ ID NO: 248758 - protein, 15 aa, Artificial Sequence
  Description of Artificial Sequence: Synthetic peptide
  Seed: LRMKWMMAMKYPITA
LRMKYMMSMLYPVTA

SEQ ID NO: 248759 - protein, 15 aa, Artificial Sequence
  Description of Artificial Sequence: Synthetic peptide
  Seed: LRMKWMMAMKYPITA
LRMKYMMSMMYPATA

SEQ ID NO: 248760 - protein, 15 aa, Artificial Sequence
  Description of Artificial Sequence: Synthetic peptide
  Seed: LRMKWMMAMKYPITA
LRMKYMMSMMYPCTA

SEQ ID NO: 248761 - protein, 15 aa, Artificial Sequence
  Description of Artificial Sequence: Synthetic peptide
  Seed: LRMKWMMAMKYPITA
LRMKYMMSMMYPDTA

SEQ ID NO: 248762 - protein, 15 aa, Artificial Sequence
  Description of Artificial Sequence: Synthetic peptide
  Seed: LRMKWMMAMKYPITA
LRMKYMMSMMYPFTA

SEQ ID NO: 248763 - protein, 15 aa, Artificial Sequence
  Description of Artificial Sequence: Synthetic peptide
  Seed: LRMKWMMAMKYPITA
LRMKYMMSMMYPGTA

SEQ ID NO: 248764 - protein, 15 aa, Artificial Sequence
  Description of Artificial Sequence: Synthetic peptide
  Seed: LRMKWMMAMKYPITA
LRMKYMMSMMYPITA

SEQ ID NO: 248765 - protein, 15 aa, Artificial Sequence
  Description of Artificial Sequence: Synthetic peptide
  Seed: LRMKWMMAMKYPITA
LRMKYMMSMMYPLTA

SEQ ID NO: 248766 - protein, 15 aa, Artificial Sequence
  Description of Artificial Sequence: Synthetic peptide
  Seed: LRMKWMMAMKYPITA
LRMKYMMSMMYPMTA

SEQ ID NO: 248767 - protein, 15 aa, Artificial Sequence
  Description of Artificial Sequence: Synthetic peptide
  Seed: LRMKWMMAMKYPITA
LRMKYMMSMMYPNTA

SEQ ID NO: 248768 - protein, 15 aa, Artificial Sequence
  Description of Artificial Sequence: Synthetic peptide
  Seed: LRMKWMMAMKYPITA
LRMKYMMSMMYPSTA

SEQ ID NO: 248769 - protein, 15 aa, Artificial Sequence
  Description of Artificial Sequence: Synthetic peptide
  Seed: LRMKWMMAMKYPITA
LRMKYMMSMMYPTTA

SEQ ID NO: 248770 - protein, 15 aa, Artificial Sequence
  Description of Artificial Sequence: Synthetic peptide
  Seed: LRMKWMMAMKYPITA
LRMKYMMSMMYPVTA

SEQ ID NO: 248771 - protein, 15 aa, Artificial Sequence
  Description of Artificial Sequence: Synthetic peptide
  Seed: LRMKWMMAMKYPITA
LRMKYMMSMMYPYTA

SEQ ID NO: 248772 - protein, 15 aa, Artificial Sequence
  Description of Artificial Sequence: Synthetic peptide
  Seed: LRMKWMMAMKYPITA
LRMKYMMSMNYPATA

SEQ ID NO: 248773 - protein, 15 aa, Artificial Sequence
  Description of Artificial Sequence: Synthetic peptide
  Seed: LRMKWMMAMKYPITA
LRMKYMMSMNYPCTA

SEQ ID NO: 248774 - protein, 15 aa, Artificial Sequence
  Description of Artificial Sequence: Synthetic peptide
  Seed: LRMKWMMAMKYPITA
LRMKYMMSMNYPDTA

SEQ ID NO: 248775 - protein, 15 aa, Artificial Sequence
  Description of Artificial Sequence: Synthetic peptide
  Seed: LRMKWMMAMKYPITA
LRMKYMMSMNYPETA

SEQ ID NO: 248776 - protein, 15 aa, Artificial Sequence
  Description of Artificial Sequence: Synthetic peptide
  Seed: LRMKWMMAMKYPITA
LRMKYMMSMNYPFTA

SEQ ID NO: 248777 - protein, 15 aa, Artificial Sequence
  Description of Artificial Sequence: Synthetic peptide
  Seed: LRMKWMMAMKYPITA
LRMKYMMSMNYPGTA

SEQ ID NO: 248778 - protein, 15 aa, Artificial Sequence
  Description of Artificial Sequence: Synthetic peptide
  Seed: LRMKWMMAMKYPITA
LRMKYMMSMNYPHTA

SEQ ID NO: 248779 - protein, 15 aa, Artificial Sequence
  Description of Artificial Sequence: Synthetic peptide
  Seed: LRMKWMMAMKYPITA
LRMKYMMSMNYPITA

SEQ ID NO: 248780 - protein, 15 aa, Artificial Sequence
  Description of Artificial Sequence: Synthetic peptide
  Seed: LRMKWMMAMKYPITA
LRMKYMMSMNYPKTA

SEQ ID NO: 248781 - protein, 15 aa, Artificial Sequence
  Description of Artificial Sequence: Synthetic peptide
  Seed: LRMKWMMAMKYPITA
LRMKYMMSMNYPLTA

SEQ ID NO: 248782 - protein, 15 aa, Artificial Sequence
  Description of Artificial Sequence: Synthetic peptide
  Seed: LRMKWMMAMKYPITA
LRMKYMMSMNYPMTA

SEQ ID NO: 248783 - protein, 15 aa, Artificial Sequence
  Description of Artificial Sequence: Synthetic peptide
  Seed: LRMKWMMAMKYPITA
LRMKYMMSMNYPNTA

SEQ ID NO: 248784 - protein, 15 aa, Artificial Sequence
  Description of Artificial Sequence: Synthetic peptide
  Seed: LRMKWMMAMKYPITA
LRMKYMMSMNYPPTA

SEQ ID NO: 248785 - protein, 15 aa, Artificial Sequence
  Description of Artificial Sequence: Synthetic peptide
  Seed: LRMKWMMAMKYPITA
LRMKYMMSMNYPQTA

SEQ ID NO: 248786 - protein, 15 aa, Artificial Sequence
  Description of Artificial Sequence: Synthetic peptide
  Seed: LRMKWMMAMKYPITA
LRMKYMMSMNYPRTA

SEQ ID NO: 248787 - protein, 15 aa, Artificial Sequence
  Description of Artificial Sequence: Synthetic peptide
  Seed: LRMKWMMAMKYPITA
LRMKYMMSMNYPSTA

SEQ ID NO: 248788 - protein, 15 aa, Artificial Sequence
  Description of Artificial Sequence: Synthetic peptide
  Seed: LRMKWMMAMKYPITA
LRMKYMMSMNYPTTA

SEQ ID NO: 248789 - protein, 15 aa, Artificial Sequence
  Description of Artificial Sequence: Synthetic peptide
  Seed: LRMKWMMAMKYPITA
LRMKYMMSMNYPVTA

SEQ ID NO: 248790 - protein, 15 aa, Artificial Sequence
  Description of Artificial Sequence: Synthetic peptide
  Seed: LRMKWMMAMKYPITA
LRMKYMMSMNYPWTA

SEQ ID NO: 248791 - protein, 15 aa, Artificial Sequence
  Description of Artificial Sequence: Synthetic peptide
  Seed: LRMKWMMAMKYPITA
LRMKYMMSMNYPYTA

SEQ ID NO: 248792 - protein, 15 aa, Artificial Sequence
  Description of Artificial Sequence: Synthetic peptide
  Seed: LRMKWMMAMKYPITA
LRMKYMMSMPYPATA

SEQ ID NO: 248793 - protein, 15 aa, Artificial Sequence
  Description of Artificial Sequence: Synthetic peptide
  Seed: LRMKWMMAMKYPITA
LRMKYMMSMPYPCTA

SEQ ID NO: 248794 - protein, 15 aa, Artificial Sequence
  Description of Artificial Sequence: Synthetic peptide
  Seed: LRMKWMMAMKYPITA
LRMKYMMSMPYPDTA

SEQ ID NO: 248795 - protein, 15 aa, Artificial Sequence
  Description of Artificial Sequence: Synthetic peptide
  Seed: LRMKWMMAMKYPITA
LRMKYMMSMPYPETA

SEQ ID NO: 248796 - protein, 15 aa, Artificial Sequence
  Description of Artificial Sequence: Synthetic peptide
  Seed: LRMKWMMAMKYPITA
LRMKYMMSMPYPFTA

SEQ ID NO: 248797 - protein, 15 aa, Artificial Sequence
  Description of Artificial Sequence: Synthetic peptide
  Seed: LRMKWMMAMKYPITA
LRMKYMMSMPYPGTA

SEQ ID NO: 248798 - protein, 15 aa, Artificial Sequence
  Description of Artificial Sequence: Synthetic peptide
  Seed: LRMKWMMAMKYPITA
LRMKYMMSMPYPHTA

SEQ ID NO: 248799 - protein, 15 aa, Artificial Sequence
  Description of Artificial Sequence: Synthetic peptide
  Seed: LRMKWMMAMKYPITA
LRMKYMMSMPYPITA

SEQ ID NO: 248800 - protein, 15 aa, Artificial Sequence
  Description of Artificial Sequence: Synthetic peptide
  Seed: LRMKWMMAMKYPITA
LRMKYMMSMPYPKTA

SEQ ID NO: 248801 - protein, 15 aa, Artificial Sequence
  Description of Artificial Sequence: Synthetic peptide
  Seed: LRMKWMMAMKYPITA
LRMKYMMSMPYPLTA

SEQ ID NO: 248802 - protein, 15 aa, Artificial Sequence
  Description of Artificial Sequence: Synthetic peptide
  Seed: LRMKWMMAMKYPITA
LRMKYMMSMPYPMTA

SEQ ID NO: 248803 - protein, 15 aa, Artificial Sequence
  Description of Artificial Sequence: Synthetic peptide
  Seed: LRMKWMMAMKYPITA
LRMKYMMSMPYPNTA

SEQ ID NO: 248804 - protein, 15 aa, Artificial Sequence
  Description of Artificial Sequence: Synthetic peptide
  Seed: LRMKWMMAMKYPITA
LRMKYMMSMPYPPTA

SEQ ID NO: 248805 - protein, 15 aa, Artificial Sequence
  Description of Artificial Sequence: Synthetic peptide
  Seed: LRMKWMMAMKYPITA
LRMKYMMSMPYPQTA

SEQ ID NO: 248806 - protein, 15 aa, Artificial Sequence
  Description of Artificial Sequence: Synthetic peptide
  Seed: LRMKWMMAMKYPITA
LRMKYMMSMPYPRTA

SEQ ID NO: 248807 - protein, 15 aa, Artificial Sequence
  Description of Artificial Sequence: Synthetic peptide
  Seed: LRMKWMMAMKYPITA
LRMKYMMSMPYPSTA

SEQ ID NO: 248808 - protein, 15 aa, Artificial Sequence
  Description of Artificial Sequence: Synthetic peptide
  Seed: LRMKWMMAMKYPITA
LRMKYMMSMPYPTTA

SEQ ID NO: 248809 - protein, 15 aa, Artificial Sequence
  Description of Artificial Sequence: Synthetic peptide
  Seed: LRMKWMMAMKYPITA
LRMKYMMSMPYPVTA

SEQ ID NO: 248810 - protein, 15 aa, Artificial Sequence
  Description of Artificial Sequence: Synthetic peptide
  Seed: LRMKWMMAMKYPITA
LRMKYMMSMPYPWTA

SEQ ID NO: 248811 - protein, 15 aa, Artificial Sequence
  Description of Artificial Sequence: Synthetic peptide
  Seed: LRMKWMMAMKYPITA
LRMKYMMSMPYPYTA

SEQ ID NO: 248812 - protein, 15 aa, Artificial Sequence
  Description of Artificial Sequence: Synthetic peptide
  Seed: LRMKWMMAMKYPITA
LRMKYMMSMQYPATA

SEQ ID NO: 248813 - protein, 15 aa, Artificial Sequence
  Description of Artificial Sequence: Synthetic peptide
  Seed: LRMKWMMAMKYPITA
LRMKYMMSMQYPCTA

SEQ ID NO: 248814 - protein, 15 aa, Artificial Sequence
  Description of Artificial Sequence: Synthetic peptide
  Seed: LRMKWMMAMKYPITA
LRMKYMMSMQYPFTA

SEQ ID NO: 248815 - protein, 15 aa, Artificial Sequence
  Description of Artificial Sequence: Synthetic peptide
  Seed: LRMKWMMAMKYPITA
LRMKYMMSMQYPGTA

SEQ ID NO: 248816 - protein, 15 aa, Artificial Sequence
  Description of Artificial Sequence: Synthetic peptide
  Seed: LRMKWMMAMKYPITA
LRMKYMMSMQYPHTA

SEQ ID NO: 248817 - protein, 15 aa, Artificial Sequence
  Description of Artificial Sequence: Synthetic peptide
  Seed: LRMKWMMAMKYPITA
LRMKYMMSMQYPITA

SEQ ID NO: 248818 - protein, 15 aa, Artificial Sequence
  Description of Artificial Sequence: Synthetic peptide
  Seed: LRMKWMMAMKYPITA
LRMKYMMSMQYPLTA

SEQ ID NO: 248819 - protein, 15 aa, Artificial Sequence
  Description of Artificial Sequence: Synthetic peptide
  Seed: LRMKWMMAMKYPITA
LRMKYMMSMQYPMTA

SEQ ID NO: 248820 - protein, 15 aa, Artificial Sequence
  Description of Artificial Sequence: Synthetic peptide
  Seed: LRMKWMMAMKYPITA
LRMKYMMSMQYPNTA

SEQ ID NO: 248821 - protein, 15 aa, Artificial Sequence
  Description of Artificial Sequence: Synthetic peptide
  Seed: LRMKWMMAMKYPITA
LRMKYMMSMQYPPTA

SEQ ID NO: 248822 - protein, 15 aa, Artificial Sequence
  Description of Artificial Sequence: Synthetic peptide
  Seed: LRMKWMMAMKYPITA
LRMKYMMSMQYPQTA

SEQ ID NO: 248823 - protein, 15 aa, Artificial Sequence
  Description of Artificial Sequence: Synthetic peptide
  Seed: LRMKWMMAMKYPITA
LRMKYMMSMQYPRTA

SEQ ID NO: 248824 - protein, 15 aa, Artificial Sequence
  Description of Artificial Sequence: Synthetic peptide
  Seed: LRMKWMMAMKYPITA
LRMKYMMSMQYPSTA

SEQ ID NO: 248825 - protein, 15 aa, Artificial Sequence
  Description of Artificial Sequence: Synthetic peptide
  Seed: LRMKWMMAMKYPITA
LRMKYMMSMQYPTTA

SEQ ID NO: 248826 - protein, 15 aa, Artificial Sequence
  Description of Artificial Sequence: Synthetic peptide
  Seed: LRMKWMMAMKYPITA
LRMKYMMSMQYPVTA

SEQ ID NO: 248827 - protein, 15 aa, Artificial Sequence
  Description of Artificial Sequence: Synthetic peptide
  Seed: LRMKWMMAMKYPITA
LRMKYMMSMQYPWTA

SEQ ID NO: 248828 - protein, 15 aa, Artificial Sequence
  Description of Artificial Sequence: Synthetic peptide
  Seed: LRMKWMMAMKYPITA
LRMKYMMSMQYPYTA

SEQ ID NO: 248829 - protein, 15 aa, Artificial Sequence
  Description of Artificial Sequence: Synthetic peptide
  Seed: LRMKWMMAMKYPITA
LRMKYMMSMRYPATA

SEQ ID NO: 248830 - protein, 15 aa, Artificial Sequence
  Description of Artificial Sequence: Synthetic peptide
  Seed: LRMKWMMAMKYPITA
LRMKYMMSMRYPCTA

SEQ ID NO: 248831 - protein, 15 aa, Artificial Sequence
  Description of Artificial Sequence: Synthetic peptide
  Seed: LRMKWMMAMKYPITA
LRMKYMMSMRYPDTA

SEQ ID NO: 248832 - protein, 15 aa, Artificial Sequence
  Description of Artificial Sequence: Synthetic peptide
  Seed: LRMKWMMAMKYPITA
LRMKYMMSMRYPETA

SEQ ID NO: 248833 - protein, 15 aa, Artificial Sequence
  Description of Artificial Sequence: Synthetic peptide
  Seed: LRMKWMMAMKYPITA
LRMKYMMSMRYPFTA

SEQ ID NO: 248834 - protein, 15 aa, Artificial Sequence
  Description of Artificial Sequence: Synthetic peptide
  Seed: LRMKWMMAMKYPITA
LRMKYMMSMRYPGTA

SEQ ID NO: 248835 - protein, 15 aa, Artificial Sequence
  Description of Artificial Sequence: Synthetic peptide
  Seed: LRMKWMMAMKYPITA
LRMKYMMSMRYPHTA

SEQ ID NO: 248836 - protein, 15 aa, Artificial Sequence
  Description of Artificial Sequence: Synthetic peptide
  Seed: LRMKWMMAMKYPITA
LRMKYMMSMRYPITA

SEQ ID NO: 248837 - protein, 15 aa, Artificial Sequence
  Description of Artificial Sequence: Synthetic peptide
  Seed: LRMKWMMAMKYPITA
LRMKYMMSMRYPKTA

SEQ ID NO: 248838 - protein, 15 aa, Artificial Sequence
  Description of Artificial Sequence: Synthetic peptide
  Seed: LRMKWMMAMKYPITA
LRMKYMMSMRYPLTA

SEQ ID NO: 248839 - protein, 15 aa, Artificial Sequence
  Description of Artificial Sequence: Synthetic peptide
  Seed: LRMKWMMAMKYPITA
LRMKYMMSMRYPMTA

SEQ ID NO: 248840 - protein, 15 aa, Artificial Sequence
  Description of Artificial Sequence: Synthetic peptide
  Seed: LRMKWMMAMKYPITA
LRMKYMMSMRYPNTA

SEQ ID NO: 248841 - protein, 15 aa, Artificial Sequence
  Description of Artificial Sequence: Synthetic peptide
  Seed: LRMKWMMAMKYPITA
LRMKYMMSMRYPPTA

SEQ ID NO: 248842 - protein, 15 aa, Artificial Sequence
  Description of Artificial Sequence: Synthetic peptide
  Seed: LRMKWMMAMKYPITA
LRMKYMMSMRYPQTA

SEQ ID NO: 248843 - protein, 15 aa, Artificial Sequence
  Description of Artificial Sequence: Synthetic peptide
  Seed: LRMKWMMAMKYPITA
LRMKYMMSMRYPRTA

SEQ ID NO: 248844 - protein, 15 aa, Artificial Sequence
  Description of Artificial Sequence: Synthetic peptide
  Seed: LRMKWMMAMKYPITA
LRMKYMMSMRYPSTA

SEQ ID NO: 248845 - protein, 15 aa, Artificial Sequence
  Description of Artificial Sequence: Synthetic peptide
  Seed: LRMKWMMAMKYPITA
LRMKYMMSMRYPTTA

SEQ ID NO: 248846 - protein, 15 aa, Artificial Sequence
  Description of Artificial Sequence: Synthetic peptide
  Seed: LRMKWMMAMKYPITA
LRMKYMMSMRYPVTA

SEQ ID NO: 248847 - protein, 15 aa, Artificial Sequence
  Description of Artificial Sequence: Synthetic peptide
  Seed: LRMKWMMAMKYPITA
LRMKYMMSMRYPWTA

SEQ ID NO: 248848 - protein, 15 aa, Artificial Sequence
  Description of Artificial Sequence: Synthetic peptide
  Seed: LRMKWMMAMKYPITA
LRMKYMMSMRYPYTA

SEQ ID NO: 248849 - protein, 15 aa, Artificial Sequence
  Description of Artificial Sequence: Synthetic peptide
  Seed: LRMKWMMAMKYPITA
LRMKYMMSMSYPATA

SEQ ID NO: 248850 - protein, 15 aa, Artificial Sequence
  Description of Artificial Sequence: Synthetic peptide
  Seed: LRMKWMMAMKYPITA
LRMKYMMSMSYPCTA

SEQ ID NO: 248851 - protein, 15 aa, Artificial Sequence
  Description of Artificial Sequence: Synthetic peptide
  Seed: LRMKWMMAMKYPITA
LRMKYMMSMSYPDTA

SEQ ID NO: 248852 - protein, 15 aa, Artificial Sequence
  Description of Artificial Sequence: Synthetic peptide
  Seed: LRMKWMMAMKYPITA
LRMKYMMSMSYPETA

SEQ ID NO: 248853 - protein, 15 aa, Artificial Sequence
  Description of Artificial Sequence: Synthetic peptide
  Seed: LRMKWMMAMKYPITA
LRMKYMMSMSYPFTA

SEQ ID NO: 248854 - protein, 15 aa, Artificial Sequence
  Description of Artificial Sequence: Synthetic peptide
  Seed: LRMKWMMAMKYPITA
LRMKYMMSMSYPGTA

SEQ ID NO: 248855 - protein, 15 aa, Artificial Sequence
  Description of Artificial Sequence: Synthetic peptide
  Seed: LRMKWMMAMKYPITA
LRMKYMMSMSYPHTA

SEQ ID NO: 248856 - protein, 15 aa, Artificial Sequence
  Description of Artificial Sequence: Synthetic peptide
  Seed: LRMKWMMAMKYPITA
LRMKYMMSMSYPITA

SEQ ID NO: 248857 - protein, 15 aa, Artificial Sequence
  Description of Artificial Sequence: Synthetic peptide
  Seed: LRMKWMMAMKYPITA
LRMKYMMSMSYPKTA

SEQ ID NO: 248858 - protein, 15 aa, Artificial Sequence
  Description of Artificial Sequence: Synthetic peptide
  Seed: LRMKWMMAMKYPITA
LRMKYMMSMSYPLTA

SEQ ID NO: 248859 - protein, 15 aa, Artificial Sequence
  Description of Artificial Sequence: Synthetic peptide
  Seed: LRMKWMMAMKYPITA
LRMKYMMSMSYPMTA

SEQ ID NO: 248860 - protein, 15 aa, Artificial Sequence
  Description of Artificial Sequence: Synthetic peptide
  Seed: LRMKWMMAMKYPITA
LRMKYMMSMSYPNTA

SEQ ID NO: 248861 - protein, 15 aa, Artificial Sequence
  Description of Artificial Sequence: Synthetic peptide
  Seed: LRMKWMMAMKYPITA
LRMKYMMSMSYPPTA

SEQ ID NO: 248862 - protein, 15 aa, Artificial Sequence
  Description of Artificial Sequence: Synthetic peptide
  Seed: LRMKWMMAMKYPITA
LRMKYMMSMSYPQTA

SEQ ID NO: 248863 - protein, 15 aa, Artificial Sequence
  Description of Artificial Sequence: Synthetic peptide
  Seed: LRMKWMMAMKYPITA
LRMKYMMSMSYPRTA

SEQ ID NO: 248864 - protein, 15 aa, Artificial Sequence
  Description of Artificial Sequence: Synthetic peptide
  Seed: LRMKWMMAMKYPITA
LRMKYMMSMSYPSTA

SEQ ID NO: 248865 - protein, 15 aa, Artificial Sequence
  Description of Artificial Sequence: Synthetic peptide
  Seed: LRMKWMMAMKYPITA
LRMKYMMSMSYPTTA

SEQ ID NO: 248866 - protein, 15 aa, Artificial Sequence
  Description of Artificial Sequence: Synthetic peptide
  Seed: LRMKWMMAMKYPITA
LRMKYMMSMSYPVTA

SEQ ID NO: 248867 - protein, 15 aa, Artificial Sequence
  Description of Artificial Sequence: Synthetic peptide
  Seed: LRMKWMMAMKYPITA
LRMKYMMSMSYPWTA

SEQ ID NO: 248868 - protein, 15 aa, Artificial Sequence
  Description of Artificial Sequence: Synthetic peptide
  Seed: LRMKWMMAMKYPITA
LRMKYMMSMSYPYTA

SEQ ID NO: 248869 - protein, 15 aa, Artificial Sequence
  Description of Artificial Sequence: Synthetic peptide
  Seed: LRMKWMMAMKYPITA
LRMKYMMSMTYPATA

SEQ ID NO: 248870 - protein, 15 aa, Artificial Sequence
  Description of Artificial Sequence: Synthetic peptide
  Seed: LRMKWMMAMKYPITA
LRMKYMMSMTYPCTA

SEQ ID NO: 248871 - protein, 15 aa, Artificial Sequence
  Description of Artificial Sequence: Synthetic peptide
  Seed: LRMKWMMAMKYPITA
LRMKYMMSMTYPDTA

SEQ ID NO: 248872 - protein, 15 aa, Artificial Sequence
  Description of Artificial Sequence: Synthetic peptide
  Seed: LRMKWMMAMKYPITA
LRMKYMMSMTYPETA

SEQ ID NO: 248873 - protein, 15 aa, Artificial Sequence
  Description of Artificial Sequence: Synthetic peptide
  Seed: LRMKWMMAMKYPITA
LRMKYMMSMTYPFTA

SEQ ID NO: 248874 - protein, 15 aa, Artificial Sequence
  Description of Artificial Sequence: Synthetic peptide
  Seed: LRMKWMMAMKYPITA
LRMKYMMSMTYPGTA

SEQ ID NO: 248875 - protein, 15 aa, Artificial Sequence
  Description of Artificial Sequence: Synthetic peptide
  Seed: LRMKWMMAMKYPITA
LRMKYMMSMTYPHTA

SEQ ID NO: 248876 - protein, 15 aa, Artificial Sequence
  Description of Artificial Sequence: Synthetic peptide
  Seed: LRMKWMMAMKYPITA
LRMKYMMSMTYPITA

SEQ ID NO: 248877 - protein, 15 aa, Artificial Sequence
  Description of Artificial Sequence: Synthetic peptide
  Seed: LRMKWMMAMKYPITA
LRMKYMMSMTYPKTA

SEQ ID NO: 248878 - protein, 15 aa, Artificial Sequence
  Description of Artificial Sequence: Synthetic peptide
  Seed: LRMKWMMAMKYPITA
LRMKYMMSMTYPLTA

SEQ ID NO: 248879 - protein, 15 aa, Artificial Sequence
  Description of Artificial Sequence: Synthetic peptide
  Seed: LRMKWMMAMKYPITA
LRMKYMMSMTYPMTA

SEQ ID NO: 248880 - protein, 15 aa, Artificial Sequence
  Description of Artificial Sequence: Synthetic peptide
  Seed: LRMKWMMAMKYPITA
LRMKYMMSMTYPNTA

SEQ ID NO: 248881 - protein, 15 aa, Artificial Sequence
  Description of Artificial Sequence: Synthetic peptide
  Seed: LRMKWMMAMKYPITA
LRMKYMMSMTYPPTA

SEQ ID NO: 248882 - protein, 15 aa, Artificial Sequence
  Description of Artificial Sequence: Synthetic peptide
  Seed: LRMKWMMAMKYPITA
LRMKYMMSMTYPQTA

SEQ ID NO: 248883 - protein, 15 aa, Artificial Sequence
  Description of Artificial Sequence: Synthetic peptide
  Seed: LRMKWMMAMKYPITA
LRMKYMMSMTYPRTA

SEQ ID NO: 248884 - protein, 15 aa, Artificial Sequence
  Description of Artificial Sequence: Synthetic peptide
  Seed: LRMKWMMAMKYPITA
LRMKYMMSMTYPSTA

SEQ ID NO: 248885 - protein, 15 aa, Artificial Sequence
  Description of Artificial Sequence: Synthetic peptide
  Seed: LRMKWMMAMKYPITA
LRMKYMMSMTYPTTA

SEQ ID NO: 248886 - protein, 15 aa, Artificial Sequence
  Description of Artificial Sequence: Synthetic peptide
  Seed: LRMKWMMAMKYPITA
LRMKYMMSMTYPVTA

SEQ ID NO: 248887 - protein, 15 aa, Artificial Sequence
  Description of Artificial Sequence: Synthetic peptide
  Seed: LRMKWMMAMKYPITA
LRMKYMMSMTYPWTA

SEQ ID NO: 248888 - protein, 15 aa, Artificial Sequence
  Description of Artificial Sequence: Synthetic peptide
  Seed: LRMKWMMAMKYPITA
LRMKYMMSMTYPYTA

SEQ ID NO: 248889 - protein, 15 aa, Artificial Sequence
  Description of Artificial Sequence: Synthetic peptide
  Seed: LRMKWMMAMKYPITA
LRMKYMMSMVYPATA

SEQ ID NO: 248890 - protein, 15 aa, Artificial Sequence
  Description of Artificial Sequence: Synthetic peptide
  Seed: LRMKWMMAMKYPITA
LRMKYMMSMVYPCTA

SEQ ID NO: 248891 - protein, 15 aa, Artificial Sequence
  Description of Artificial Sequence: Synthetic peptide
  Seed: LRMKWMMAMKYPITA
LRMKYMMSMVYPDTA

SEQ ID NO: 248892 - protein, 15 aa, Artificial Sequence
  Description of Artificial Sequence: Synthetic peptide
  Seed: LRMKWMMAMKYPITA
LRMKYMMSMVYPETA

SEQ ID NO: 248893 - protein, 15 aa, Artificial Sequence
  Description of Artificial Sequence: Synthetic peptide
  Seed: LRMKWMMAMKYPITA
LRMKYMMSMVYPFTA

SEQ ID NO: 248894 - protein, 15 aa, Artificial Sequence
  Description of Artificial Sequence: Synthetic peptide
  Seed: LRMKWMMAMKYPITA
LRMKYMMSMVYPGTA

SEQ ID NO: 248895 - protein, 15 aa, Artificial Sequence
  Description of Artificial Sequence: Synthetic peptide
  Seed: LRMKWMMAMKYPITA
LRMKYMMSMVYPHTA

SEQ ID NO: 248896 - protein, 15 aa, Artificial Sequence
  Description of Artificial Sequence: Synthetic peptide
  Seed: LRMKWMMAMKYPITA
LRMKYMMSMVYPITA

SEQ ID NO: 248897 - protein, 15 aa, Artificial Sequence
  Description of Artificial Sequence: Synthetic peptide
  Seed: LRMKWMMAMKYPITA
LRMKYMMSMVYPKTA

SEQ ID NO: 248898 - protein, 15 aa, Artificial Sequence
  Description of Artificial Sequence: Synthetic peptide
  Seed: LRMKWMMAMKYPITA
LRMKYMMSMVYPLTA

SEQ ID NO: 248899 - protein, 15 aa, Artificial Sequence
  Description of Artificial Sequence: Synthetic peptide
  Seed: LRMKWMMAMKYPITA
LRMKYMMSMVYPMTA

SEQ ID NO: 248900 - protein, 15 aa, Artificial Sequence
  Description of Artificial Sequence: Synthetic peptide
  Seed: LRMKWMMAMKYPITA
LRMKYMMSMVYPNTA

SEQ ID NO: 248901 - protein, 15 aa, Artificial Sequence
  Description of Artificial Sequence: Synthetic peptide
  Seed: LRMKWMMAMKYPITA
LRMKYMMSMVYPPTA

SEQ ID NO: 248902 - protein, 15 aa, Artificial Sequence
  Description of Artificial Sequence: Synthetic peptide
  Seed: LRMKWMMAMKYPITA
LRMKYMMSMVYPQTA

SEQ ID NO: 248903 - protein, 15 aa, Artificial Sequence
  Description of Artificial Sequence: Synthetic peptide
  Seed: LRMKWMMAMKYPITA
LRMKYMMSMVYPRTA

SEQ ID NO: 248904 - protein, 15 aa, Artificial Sequence
  Description of Artificial Sequence: Synthetic peptide
  Seed: LRMKWMMAMKYPITA
LRMKYMMSMVYPSTA

SEQ ID NO: 248905 - protein, 15 aa, Artificial Sequence
  Description of Artificial Sequence: Synthetic peptide
  Seed: LRMKWMMAMKYPITA
LRMKYMMSMVYPTTA

SEQ ID NO: 248906 - protein, 15 aa, Artificial Sequence
  Description of Artificial Sequence: Synthetic peptide
  Seed: LRMKWMMAMKYPITA
LRMKYMMSMVYPVTA

SEQ ID NO: 248907 - protein, 15 aa, Artificial Sequence
  Description of Artificial Sequence: Synthetic peptide
  Seed: LRMKWMMAMKYPITA
LRMKYMMSMVYPWTA

SEQ ID NO: 248908 - protein, 15 aa, Artificial Sequence
  Description of Artificial Sequence: Synthetic peptide
  Seed: LRMKWMMAMKYPITA
LRMKYMMSMVYPYTA

SEQ ID NO: 248909 - protein, 15 aa, Artificial Sequence
  Description of Artificial Sequence: Synthetic peptide
  Seed: LRMKWMMAMKYPITA
LRMKYMMSMWYPATA

SEQ ID NO: 248910 - protein, 15 aa, Artificial Sequence
  Description of Artificial Sequence: Synthetic peptide
  Seed: LRMKWMMAMKYPITA
LRMKYMMSMWYPFTA

SEQ ID NO: 248911 - protein, 15 aa, Artificial Sequence
  Description of Artificial Sequence: Synthetic peptide
  Seed: LRMKWMMAMKYPITA
LRMKYMMSMWYPITA

SEQ ID NO: 248912 - protein, 15 aa, Artificial Sequence
  Description of Artificial Sequence: Synthetic peptide
  Seed: LRMKWMMAMKYPITA
LRMKYMMSMWYPLTA

SEQ ID NO: 248913 - protein, 15 aa, Artificial Sequence
  Description of Artificial Sequence: Synthetic peptide
  Seed: LRMKWMMAMKYPITA
LRMKYMMSMWYPMTA

SEQ ID NO: 248914 - protein, 15 aa, Artificial Sequence
  Description of Artificial Sequence: Synthetic peptide
  Seed: LRMKWMMAMKYPITA
LRMKYMMSMWYPSTA

SEQ ID NO: 248915 - protein, 15 aa, Artificial Sequence
  Description of Artificial Sequence: Synthetic peptide
  Seed: LRMKWMMAMKYPITA
LRMKYMMSMWYPTTA

SEQ ID NO: 248916 - protein, 15 aa, Artificial Sequence
  Description of Artificial Sequence: Synthetic peptide
  Seed: LRMKWMMAMKYPITA
LRMKYMMSMWYPVTA

SEQ ID NO: 248917 - protein, 15 aa, Artificial Sequence
  Description of Artificial Sequence: Synthetic peptide
  Seed: LRMKWMMAMKYPITA
LRMKYMMSMYYPATA

SEQ ID NO: 248918 - protein, 15 aa, Artificial Sequence
  Description of Artificial Sequence: Synthetic peptide
  Seed: LRMKWMMAMKYPITA
LRMKYMMSMYYPFTA

SEQ ID NO: 248919 - protein, 15 aa, Artificial Sequence
  Description of Artificial Sequence: Synthetic peptide
  Seed: LRMKWMMAMKYPITA
LRMKYMMSMYYPITA

SEQ ID NO: 248920 - protein, 15 aa, Artificial Sequence
  Description of Artificial Sequence: Synthetic peptide
  Seed: LRMKWMMAMKYPITA
LRMKYMMSMYYPLTA

SEQ ID NO: 248921 - protein, 15 aa, Artificial Sequence
  Description of Artificial Sequence: Synthetic peptide
  Seed: LRMKWMMAMKYPITA
LRMKYMMSMYYPMTA

SEQ ID NO: 248922 - protein, 15 aa, Artificial Sequence
  Description of Artificial Sequence: Synthetic peptide
  Seed: LRMKWMMAMKYPITA
LRMKYMMSMYYPNTA

SEQ ID NO: 248923 - protein, 15 aa, Artificial Sequence
  Description of Artificial Sequence: Synthetic peptide
  Seed: LRMKWMMAMKYPITA
LRMKYMMSMYYPSTA

SEQ ID NO: 248924 - protein, 15 aa, Artificial Sequence
  Description of Artificial Sequence: Synthetic peptide
  Seed: LRMKWMMAMKYPITA
LRMKYMMSMYYPTTA

SEQ ID NO: 248925 - protein, 15 aa, Artificial Sequence
  Description of Artificial Sequence: Synthetic peptide
  Seed: LRMKWMMAMKYPITA
LRMKYMMSMYYPVTA

SEQ ID NO: 248926 - protein, 15 aa, Artificial Sequence
  Description of Artificial Sequence: Synthetic peptide
  Seed: LRMKWMMAMKYPITA
LRMKYMMTMAYPATA

SEQ ID NO: 248927 - protein, 15 aa, Artificial Sequence
  Description of Artificial Sequence: Synthetic peptide
  Seed: LRMKWMMAMKYPITA
LRMKYMMTMAYPCTA

SEQ ID NO: 248928 - protein, 15 aa, Artificial Sequence
  Description of Artificial Sequence: Synthetic peptide
  Seed: LRMKWMMAMKYPITA
LRMKYMMTMAYPDTA

SEQ ID NO: 248929 - protein, 15 aa, Artificial Sequence
  Description of Artificial Sequence: Synthetic peptide
  Seed: LRMKWMMAMKYPITA
LRMKYMMTMAYPETA

SEQ ID NO: 248930 - protein, 15 aa, Artificial Sequence
  Description of Artificial Sequence: Synthetic peptide
  Seed: LRMKWMMAMKYPITA
LRMKYMMTMAYPFTA

SEQ ID NO: 248931 - protein, 15 aa, Artificial Sequence
  Description of Artificial Sequence: Synthetic peptide
  Seed: LRMKWMMAMKYPITA
LRMKYMMTMAYPGTA

SEQ ID NO: 248932 - protein, 15 aa, Artificial Sequence
  Description of Artificial Sequence: Synthetic peptide
  Seed: LRMKWMMAMKYPITA
LRMKYMMTMAYPHTA

SEQ ID NO: 248933 - protein, 15 aa, Artificial Sequence
  Description of Artificial Sequence: Synthetic peptide
  Seed: LRMKWMMAMKYPITA
LRMKYMMTMAYPITA

SEQ ID NO: 248934 - protein, 15 aa, Artificial Sequence
  Description of Artificial Sequence: Synthetic peptide
  Seed: LRMKWMMAMKYPITA
LRMKYMMTMAYPKTA

SEQ ID NO: 248935 - protein, 15 aa, Artificial Sequence
  Description of Artificial Sequence: Synthetic peptide
  Seed: LRMKWMMAMKYPITA
LRMKYMMTMAYPLTA

SEQ ID NO: 248936 - protein, 15 aa, Artificial Sequence
  Description of Artificial Sequence: Synthetic peptide
  Seed: LRMKWMMAMKYPITA
LRMKYMMTMAYPMTA

SEQ ID NO: 248937 - protein, 15 aa, Artificial Sequence
  Description of Artificial Sequence: Synthetic peptide
  Seed: LRMKWMMAMKYPITA
LRMKYMMTMAYPNTA

SEQ ID NO: 248938 - protein, 15 aa, Artificial Sequence
  Description of Artificial Sequence: Synthetic peptide
  Seed: LRMKWMMAMKYPITA
LRMKYMMTMAYPPTA

SEQ ID NO: 248939 - protein, 15 aa, Artificial Sequence
  Description of Artificial Sequence: Synthetic peptide
  Seed: LRMKWMMAMKYPITA
LRMKYMMTMAYPQTA

SEQ ID NO: 248940 - protein, 15 aa, Artificial Sequence
  Description of Artificial Sequence: Synthetic peptide
  Seed: LRMKWMMAMKYPITA
LRMKYMMTMAYPRTA

SEQ ID NO: 248941 - protein, 15 aa, Artificial Sequence
  Description of Artificial Sequence: Synthetic peptide
  Seed: LRMKWMMAMKYPITA
LRMKYMMTMAYPSTA

SEQ ID NO: 248942 - protein, 15 aa, Artificial Sequence
  Description of Artificial Sequence: Synthetic peptide
  Seed: LRMKWMMAMKYPITA
LRMKYMMTMAYPTTA

SEQ ID NO: 248943 - protein, 15 aa, Artificial Sequence
  Description of Artificial Sequence: Synthetic peptide
  Seed: LRMKWMMAMKYPITA
LRMKYMMTMAYPVTA

SEQ ID NO: 248944 - protein, 15 aa, Artificial Sequence
  Description of Artificial Sequence: Synthetic peptide
  Seed: LRMKWMMAMKYPITA
LRMKYMMTMAYPWTA

SEQ ID NO: 248945 - protein, 15 aa, Artificial Sequence
  Description of Artificial Sequence: Synthetic peptide
  Seed: LRMKWMMAMKYPITA
LRMKYMMTMAYPYTA

SEQ ID NO: 248946 - protein, 15 aa, Artificial Sequence
  Description of Artificial Sequence: Synthetic peptide
  Seed: LRMKWMMAMKYPITA
LRMKYMMTMCYPATA

SEQ ID NO: 248947 - protein, 15 aa, Artificial Sequence
  Description of Artificial Sequence: Synthetic peptide
  Seed: LRMKWMMAMKYPITA
LRMKYMMTMCYPFTA

SEQ ID NO: 248948 - protein, 15 aa, Artificial Sequence
  Description of Artificial Sequence: Synthetic peptide
  Seed: LRMKWMMAMKYPITA
LRMKYMMTMCYPGTA

SEQ ID NO: 248949 - protein, 15 aa, Artificial Sequence
  Description of Artificial Sequence: Synthetic peptide
  Seed: LRMKWMMAMKYPITA
LRMKYMMTMCYPHTA

SEQ ID NO: 248950 - protein, 15 aa, Artificial Sequence
  Description of Artificial Sequence: Synthetic peptide
  Seed: LRMKWMMAMKYPITA
LRMKYMMTMCYPITA

SEQ ID NO: 248951 - protein, 15 aa, Artificial Sequence
  Description of Artificial Sequence: Synthetic peptide
  Seed: LRMKWMMAMKYPITA
LRMKYMMTMCYPLTA

SEQ ID NO: 248952 - protein, 15 aa, Artificial Sequence
  Description of Artificial Sequence: Synthetic peptide
  Seed: LRMKWMMAMKYPITA
LRMKYMMTMCYPMTA

SEQ ID NO: 248953 - protein, 15 aa, Artificial Sequence
  Description of Artificial Sequence: Synthetic peptide
  Seed: LRMKWMMAMKYPITA
LRMKYMMTMCYPNTA

SEQ ID NO: 248954 - protein, 15 aa, Artificial Sequence
  Description of Artificial Sequence: Synthetic peptide
  Seed: LRMKWMMAMKYPITA
LRMKYMMTMCYPSTA

SEQ ID NO: 248955 - protein, 15 aa, Artificial Sequence
  Description of Artificial Sequence: Synthetic peptide
  Seed: LRMKWMMAMKYPITA
LRMKYMMTMCYPTTA

SEQ ID NO: 248956 - protein, 15 aa, Artificial Sequence
  Description of Artificial Sequence: Synthetic peptide
  Seed: LRMKWMMAMKYPITA
LRMKYMMTMCYPVTA

SEQ ID NO: 248957 - protein, 15 aa, Artificial Sequence
  Description of Artificial Sequence: Synthetic peptide
  Seed: LRMKWMMAMKYPITA
LRMKYMMTMDYPATA

SEQ ID NO: 248958 - protein, 15 aa, Artificial Sequence
  Description of Artificial Sequence: Synthetic peptide
  Seed: LRMKWMMAMKYPITA
LRMKYMMTMDYPITA

SEQ ID NO: 248959 - protein, 15 aa, Artificial Sequence
  Description of Artificial Sequence: Synthetic peptide
  Seed: LRMKWMMAMKYPITA
LRMKYMMTMDYPLTA

SEQ ID NO: 248960 - protein, 15 aa, Artificial Sequence
  Description of Artificial Sequence: Synthetic peptide
  Seed: LRMKWMMAMKYPITA
LRMKYMMTMDYPMTA

SEQ ID NO: 248961 - protein, 15 aa, Artificial Sequence
  Description of Artificial Sequence: Synthetic peptide
  Seed: LRMKWMMAMKYPITA
LRMKYMMTMDYPSTA

SEQ ID NO: 248962 - protein, 15 aa, Artificial Sequence
  Description of Artificial Sequence: Synthetic peptide
  Seed: LRMKWMMAMKYPITA
LRMKYMMTMDYPVTA

SEQ ID NO: 248963 - protein, 15 aa, Artificial Sequence
  Description of Artificial Sequence: Synthetic peptide
  Seed: LRMKWMMAMKYPITA
LRMKYMMTMEYPATA

SEQ ID NO: 248964 - protein, 15 aa, Artificial Sequence
  Description of Artificial Sequence: Synthetic peptide
  Seed: LRMKWMMAMKYPITA
LRMKYMMTMEYPFTA

SEQ ID NO: 248965 - protein, 15 aa, Artificial Sequence
  Description of Artificial Sequence: Synthetic peptide
  Seed: LRMKWMMAMKYPITA
LRMKYMMTMEYPITA

SEQ ID NO: 248966 - protein, 15 aa, Artificial Sequence
  Description of Artificial Sequence: Synthetic peptide
  Seed: LRMKWMMAMKYPITA
LRMKYMMTMEYPLTA

SEQ ID NO: 248967 - protein, 15 aa, Artificial Sequence
  Description of Artificial Sequence: Synthetic peptide
  Seed: LRMKWMMAMKYPITA
LRMKYMMTMEYPMTA

SEQ ID NO: 248968 - protein, 15 aa, Artificial Sequence
  Description of Artificial Sequence: Synthetic peptide
  Seed: LRMKWMMAMKYPITA
LRMKYMMTMEYPNTA

SEQ ID NO: 248969 - protein, 15 aa, Artificial Sequence
  Description of Artificial Sequence: Synthetic peptide
  Seed: LRMKWMMAMKYPITA
LRMKYMMTMEYPSTA

SEQ ID NO: 248970 - protein, 15 aa, Artificial Sequence
  Description of Artificial Sequence: Synthetic peptide
  Seed: LRMKWMMAMKYPITA
LRMKYMMTMEYPTTA

SEQ ID NO: 248971 - protein, 15 aa, Artificial Sequence
  Description of Artificial Sequence: Synthetic peptide
  Seed: LRMKWMMAMKYPITA
LRMKYMMTMEYPVTA

SEQ ID NO: 248972 - protein, 15 aa, Artificial Sequence
  Description of Artificial Sequence: Synthetic peptide
  Seed: LRMKWMMAMKYPITA
LRMKYMMTMFYPATA

SEQ ID NO: 248973 - protein, 15 aa, Artificial Sequence
  Description of Artificial Sequence: Synthetic peptide
  Seed: LRMKWMMAMKYPITA
LRMKYMMTMFYPDTA

SEQ ID NO: 248974 - protein, 15 aa, Artificial Sequence
  Description of Artificial Sequence: Synthetic peptide
  Seed: LRMKWMMAMKYPITA
LRMKYMMTMFYPETA

SEQ ID NO: 248975 - protein, 15 aa, Artificial Sequence
  Description of Artificial Sequence: Synthetic peptide
  Seed: LRMKWMMAMKYPITA
LRMKYMMTMFYPFTA

SEQ ID NO: 248976 - protein, 15 aa, Artificial Sequence
  Description of Artificial Sequence: Synthetic peptide
  Seed: LRMKWMMAMKYPITA
LRMKYMMTMFYPITA

SEQ ID NO: 248977 - protein, 15 aa, Artificial Sequence
  Description of Artificial Sequence: Synthetic peptide
  Seed: LRMKWMMAMKYPITA
LRMKYMMTMFYPLTA

SEQ ID NO: 248978 - protein, 15 aa, Artificial Sequence
  Description of Artificial Sequence: Synthetic peptide
  Seed: LRMKWMMAMKYPITA
LRMKYMMTMFYPMTA

SEQ ID NO: 248979 - protein, 15 aa, Artificial Sequence
  Description of Artificial Sequence: Synthetic peptide
  Seed: LRMKWMMAMKYPITA
LRMKYMMTMFYPNTA

SEQ ID NO: 248980 - protein, 15 aa, Artificial Sequence
  Description of Artificial Sequence: Synthetic peptide
  Seed: LRMKWMMAMKYPITA
LRMKYMMTMFYPPTA

SEQ ID NO: 248981 - protein, 15 aa, Artificial Sequence
  Description of Artificial Sequence: Synthetic peptide
  Seed: LRMKWMMAMKYPITA
LRMKYMMTMFYPSTA

SEQ ID NO: 248982 - protein, 15 aa, Artificial Sequence
  Description of Artificial Sequence: Synthetic peptide
  Seed: LRMKWMMAMKYPITA
LRMKYMMTMFYPTTA

SEQ ID NO: 248983 - protein, 15 aa, Artificial Sequence
  Description of Artificial Sequence: Synthetic peptide
  Seed: LRMKWMMAMKYPITA
LRMKYMMTMFYPVTA

SEQ ID NO: 248984 - protein, 15 aa, Artificial Sequence
  Description of Artificial Sequence: Synthetic peptide
  Seed: LRMKWMMAMKYPITA
LRMKYMMTMFYPYTA

SEQ ID NO: 248985 - protein, 15 aa, Artificial Sequence
  Description of Artificial Sequence: Synthetic peptide
  Seed: LRMKWMMAMKYPITA
LRMKYMMTMGYPATA

SEQ ID NO: 248986 - protein, 15 aa, Artificial Sequence
  Description of Artificial Sequence: Synthetic peptide
  Seed: LRMKWMMAMKYPITA
LRMKYMMTMGYPCTA

SEQ ID NO: 248987 - protein, 15 aa, Artificial Sequence
  Description of Artificial Sequence: Synthetic peptide
  Seed: LRMKWMMAMKYPITA
LRMKYMMTMGYPDTA

SEQ ID NO: 248988 - protein, 15 aa, Artificial Sequence
  Description of Artificial Sequence: Synthetic peptide
  Seed: LRMKWMMAMKYPITA
LRMKYMMTMGYPETA

SEQ ID NO: 248989 - protein, 15 aa, Artificial Sequence
  Description of Artificial Sequence: Synthetic peptide
  Seed: LRMKWMMAMKYPITA
LRMKYMMTMGYPFTA

SEQ ID NO: 248990 - protein, 15 aa, Artificial Sequence
  Description of Artificial Sequence: Synthetic peptide
  Seed: LRMKWMMAMKYPITA
LRMKYMMTMGYPGTA

SEQ ID NO: 248991 - protein, 15 aa, Artificial Sequence
  Description of Artificial Sequence: Synthetic peptide
  Seed: LRMKWMMAMKYPITA
LRMKYMMTMGYPHTA

SEQ ID NO: 248992 - protein, 15 aa, Artificial Sequence
  Description of Artificial Sequence: Synthetic peptide
  Seed: LRMKWMMAMKYPITA
LRMKYMMTMGYPITA

SEQ ID NO: 248993 - protein, 15 aa, Artificial Sequence
  Description of Artificial Sequence: Synthetic peptide
  Seed: LRMKWMMAMKYPITA
LRMKYMMTMGYPKTA

SEQ ID NO: 248994 - protein, 15 aa, Artificial Sequence
  Description of Artificial Sequence: Synthetic peptide
  Seed: LRMKWMMAMKYPITA
LRMKYMMTMGYPLTA

SEQ ID NO: 248995 - protein, 15 aa, Artificial Sequence
  Description of Artificial Sequence: Synthetic peptide
  Seed: LRMKWMMAMKYPITA
LRMKYMMTMGYPMTA

SEQ ID NO: 248996 - protein, 15 aa, Artificial Sequence
  Description of Artificial Sequence: Synthetic peptide
  Seed: LRMKWMMAMKYPITA
LRMKYMMTMGYPNTA

SEQ ID NO: 248997 - protein, 15 aa, Artificial Sequence
  Description of Artificial Sequence: Synthetic peptide
  Seed: LRMKWMMAMKYPITA
LRMKYMMTMGYPPTA

SEQ ID NO: 248998 - protein, 15 aa, Artificial Sequence
  Description of Artificial Sequence: Synthetic peptide
  Seed: LRMKWMMAMKYPITA
LRMKYMMTMGYPQTA

SEQ ID NO: 248999 - protein, 15 aa, Artificial Sequence
  Description of Artificial Sequence: Synthetic peptide
  Seed: LRMKWMMAMKYPITA
LRMKYMMTMGYPRTA

SEQ ID NO: 249000 - protein, 15 aa, Artificial Sequence
  Description of Artificial Sequence: Synthetic peptide
  Seed: LRMKWMMAMKYPITA
LRMKYMMTMGYPSTA

SEQ ID NO: 249001 - protein, 15 aa, Artificial Sequence
  Description of Artificial Sequence: Synthetic peptide
  Seed: LRMKWMMAMKYPITA
LRMKYMMTMGYPTTA

SEQ ID NO: 249002 - protein, 15 aa, Artificial Sequence
  Description of Artificial Sequence: Synthetic peptide
  Seed: LRMKWMMAMKYPITA
LRMKYMMTMGYPVTA

SEQ ID NO: 249003 - protein, 15 aa, Artificial Sequence
  Description of Artificial Sequence: Synthetic peptide
  Seed: LRMKWMMAMKYPITA
LRMKYMMTMGYPWTA

SEQ ID NO: 249004 - protein, 15 aa, Artificial Sequence
  Description of Artificial Sequence: Synthetic peptide
  Seed: LRMKWMMAMKYPITA
LRMKYMMTMGYPYTA

SEQ ID NO: 249005 - protein, 15 aa, Artificial Sequence
  Description of Artificial Sequence: Synthetic peptide
  Seed: LRMKWMMAMKYPITA
LRMKYMMTMHYPATA

SEQ ID NO: 249006 - protein, 15 aa, Artificial Sequence
  Description of Artificial Sequence: Synthetic peptide
  Seed: LRMKWMMAMKYPITA
LRMKYMMTMHYPFTA

SEQ ID NO: 249007 - protein, 15 aa, Artificial Sequence
  Description of Artificial Sequence: Synthetic peptide
  Seed: LRMKWMMAMKYPITA
LRMKYMMTMHYPGTA

SEQ ID NO: 249008 - protein, 15 aa, Artificial Sequence
  Description of Artificial Sequence: Synthetic peptide
  Seed: LRMKWMMAMKYPITA
LRMKYMMTMHYPITA

SEQ ID NO: 249009 - protein, 15 aa, Artificial Sequence
  Description of Artificial Sequence: Synthetic peptide
  Seed: LRMKWMMAMKYPITA
LRMKYMMTMHYPLTA

SEQ ID NO: 249010 - protein, 15 aa, Artificial Sequence
  Description of Artificial Sequence: Synthetic peptide
  Seed: LRMKWMMAMKYPITA
LRMKYMMTMHYPMTA

SEQ ID NO: 249011 - protein, 15 aa, Artificial Sequence
  Description of Artificial Sequence: Synthetic peptide
  Seed: LRMKWMMAMKYPITA
LRMKYMMTMHYPNTA

SEQ ID NO: 249012 - protein, 15 aa, Artificial Sequence
  Description of Artificial Sequence: Synthetic peptide
  Seed: LRMKWMMAMKYPITA
LRMKYMMTMHYPQTA

SEQ ID NO: 249013 - protein, 15 aa, Artificial Sequence
  Description of Artificial Sequence: Synthetic peptide
  Seed: LRMKWMMAMKYPITA
LRMKYMMTMHYPRTA

SEQ ID NO: 249014 - protein, 15 aa, Artificial Sequence
  Description of Artificial Sequence: Synthetic peptide
  Seed: LRMKWMMAMKYPITA
LRMKYMMTMHYPSTA

SEQ ID NO: 249015 - protein, 15 aa, Artificial Sequence
  Description of Artificial Sequence: Synthetic peptide
  Seed: LRMKWMMAMKYPITA
LRMKYMMTMHYPTTA

SEQ ID NO: 249016 - protein, 15 aa, Artificial Sequence
  Description of Artificial Sequence: Synthetic peptide
  Seed: LRMKWMMAMKYPITA
LRMKYMMTMHYPVTA

SEQ ID NO: 249017 - protein, 15 aa, Artificial Sequence
  Description of Artificial Sequence: Synthetic peptide
  Seed: LRMKWMMAMKYPITA
LRMKYMMTMHYPYTA

SEQ ID NO: 249018 - protein, 15 aa, Artificial Sequence
  Description of Artificial Sequence: Synthetic peptide
  Seed: LRMKWMMAMKYPITA
LRMKYMMTMIYPATA

SEQ ID NO: 249019 - protein, 15 aa, Artificial Sequence
  Description of Artificial Sequence: Synthetic peptide
  Seed: LRMKWMMAMKYPITA
LRMKYMMTMIYPCTA

SEQ ID NO: 249020 - protein, 15 aa, Artificial Sequence
  Description of Artificial Sequence: Synthetic peptide
  Seed: LRMKWMMAMKYPITA
LRMKYMMTMIYPDTA

SEQ ID NO: 249021 - protein, 15 aa, Artificial Sequence
  Description of Artificial Sequence: Synthetic peptide
  Seed: LRMKWMMAMKYPITA
LRMKYMMTMIYPETA

SEQ ID NO: 249022 - protein, 15 aa, Artificial Sequence
  Description of Artificial Sequence: Synthetic peptide
  Seed: LRMKWMMAMKYPITA
LRMKYMMTMIYPFTA

SEQ ID NO: 249023 - protein, 15 aa, Artificial Sequence
  Description of Artificial Sequence: Synthetic peptide
  Seed: LRMKWMMAMKYPITA
LRMKYMMTMIYPGTA

SEQ ID NO: 249024 - protein, 15 aa, Artificial Sequence
  Description of Artificial Sequence: Synthetic peptide
  Seed: LRMKWMMAMKYPITA
LRMKYMMTMIYPHTA

SEQ ID NO: 249025 - protein, 15 aa, Artificial Sequence
  Description of Artificial Sequence: Synthetic peptide
  Seed: LRMKWMMAMKYPITA
LRMKYMMTMIYPITA

SEQ ID NO: 249026 - protein, 15 aa, Artificial Sequence
  Description of Artificial Sequence: Synthetic peptide
  Seed: LRMKWMMAMKYPITA
LRMKYMMTMIYPKTA

SEQ ID NO: 249027 - protein, 15 aa, Artificial Sequence
  Description of Artificial Sequence: Synthetic peptide
  Seed: LRMKWMMAMKYPITA
LRMKYMMTMIYPLTA

SEQ ID NO: 249028 - protein, 15 aa, Artificial Sequence
  Description of Artificial Sequence: Synthetic peptide
  Seed: LRMKWMMAMKYPITA
LRMKYMMTMIYPMTA

SEQ ID NO: 249029 - protein, 15 aa, Artificial Sequence
  Description of Artificial Sequence: Synthetic peptide
  Seed: LRMKWMMAMKYPITA
LRMKYMMTMIYPNTA

SEQ ID NO: 249030 - protein, 15 aa, Artificial Sequence
  Description of Artificial Sequence: Synthetic peptide
  Seed: LRMKWMMAMKYPITA
LRMKYMMTMIYPPTA

SEQ ID NO: 249031 - protein, 15 aa, Artificial Sequence
  Description of Artificial Sequence: Synthetic peptide
  Seed: LRMKWMMAMKYPITA
LRMKYMMTMIYPQTA

SEQ ID NO: 249032 - protein, 15 aa, Artificial Sequence
  Description of Artificial Sequence: Synthetic peptide
  Seed: LRMKWMMAMKYPITA
LRMKYMMTMIYPRTA

SEQ ID NO: 249033 - protein, 15 aa, Artificial Sequence
  Description of Artificial Sequence: Synthetic peptide
  Seed: LRMKWMMAMKYPITA
LRMKYMMTMIYPSTA

SEQ ID NO: 249034 - protein, 15 aa, Artificial Sequence
  Description of Artificial Sequence: Synthetic peptide
  Seed: LRMKWMMAMKYPITA
LRMKYMMTMIYPTTA

SEQ ID NO: 249035 - protein, 15 aa, Artificial Sequence
  Description of Artificial Sequence: Synthetic peptide
  Seed: LRMKWMMAMKYPITA
LRMKYMMTMIYPVTA

SEQ ID NO: 249036 - protein, 15 aa, Artificial Sequence
  Description of Artificial Sequence: Synthetic peptide
  Seed: LRMKWMMAMKYPITA
LRMKYMMTMIYPYTA

SEQ ID NO: 249037 - protein, 15 aa, Artificial Sequence
  Description of Artificial Sequence: Synthetic peptide
  Seed: LRMKWMMAMKYPITA
LRMKYMMTMKYPATA

SEQ ID NO: 249038 - protein, 15 aa, Artificial Sequence
  Description of Artificial Sequence: Synthetic peptide
  Seed: LRMKWMMAMKYPITA
LRMKYMMTMKYPFTA

SEQ ID NO: 249039 - protein, 15 aa, Artificial Sequence
  Description of Artificial Sequence: Synthetic peptide
  Seed: LRMKWMMAMKYPITA
LRMKYMMTMKYPGTA

SEQ ID NO: 249040 - protein, 15 aa, Artificial Sequence
  Description of Artificial Sequence: Synthetic peptide
  Seed: LRMKWMMAMKYPITA
LRMKYMMTMKYPHTA

SEQ ID NO: 249041 - protein, 15 aa, Artificial Sequence
  Description of Artificial Sequence: Synthetic peptide
  Seed: LRMKWMMAMKYPITA
LRMKYMMTMKYPITA

SEQ ID NO: 249042 - protein, 15 aa, Artificial Sequence
  Description of Artificial Sequence: Synthetic peptide
  Seed: LRMKWMMAMKYPITA
LRMKYMMTMKYPKTA

SEQ ID NO: 249043 - protein, 15 aa, Artificial Sequence
  Description of Artificial Sequence: Synthetic peptide
  Seed: LRMKWMMAMKYPITA
LRMKYMMTMKYPLTA

SEQ ID NO: 249044 - protein, 15 aa, Artificial Sequence
  Description of Artificial Sequence: Synthetic peptide
  Seed: LRMKWMMAMKYPITA
LRMKYMMTMKYPMTA

SEQ ID NO: 249045 - protein, 15 aa, Artificial Sequence
  Description of Artificial Sequence: Synthetic peptide
  Seed: LRMKWMMAMKYPITA
LRMKYMMTMKYPNTA

SEQ ID NO: 249046 - protein, 15 aa, Artificial Sequence
  Description of Artificial Sequence: Synthetic peptide
  Seed: LRMKWMMAMKYPITA
LRMKYMMTMKYPPTA

SEQ ID NO: 249047 - protein, 15 aa, Artificial Sequence
  Description of Artificial Sequence: Synthetic peptide
  Seed: LRMKWMMAMKYPITA
LRMKYMMTMKYPQTA

SEQ ID NO: 249048 - protein, 15 aa, Artificial Sequence
  Description of Artificial Sequence: Synthetic peptide
  Seed: LRMKWMMAMKYPITA
LRMKYMMTMKYPRTA

SEQ ID NO: 249049 - protein, 15 aa, Artificial Sequence
  Description of Artificial Sequence: Synthetic peptide
  Seed: LRMKWMMAMKYPITA
LRMKYMMTMKYPSTA

SEQ ID NO: 249050 - protein, 15 aa, Artificial Sequence
  Description of Artificial Sequence: Synthetic peptide
  Seed: LRMKWMMAMKYPITA
LRMKYMMTMKYPTTA

SEQ ID NO: 249051 - protein, 15 aa, Artificial Sequence
  Description of Artificial Sequence: Synthetic peptide
  Seed: LRMKWMMAMKYPITA
LRMKYMMTMKYPVTA

SEQ ID NO: 249052 - protein, 15 aa, Artificial Sequence
  Description of Artificial Sequence: Synthetic peptide
  Seed: LRMKWMMAMKYPITA
LRMKYMMTMKYPWTA

SEQ ID NO: 249053 - protein, 15 aa, Artificial Sequence
  Description of Artificial Sequence: Synthetic peptide
  Seed: LRMKWMMAMKYPITA
LRMKYMMTMKYPYTA

SEQ ID NO: 249054 - protein, 15 aa, Artificial Sequence
  Description of Artificial Sequence: Synthetic peptide
  Seed: LRMKWMMAMKYPITA
LRMKYMMTMLYPATA

SEQ ID NO: 249055 - protein, 15 aa, Artificial Sequence
  Description of Artificial Sequence: Synthetic peptide
  Seed: LRMKWMMAMKYPITA
LRMKYMMTMLYPCTA

SEQ ID NO: 249056 - protein, 15 aa, Artificial Sequence
  Description of Artificial Sequence: Synthetic peptide
  Seed: LRMKWMMAMKYPITA
LRMKYMMTMLYPDTA

SEQ ID NO: 249057 - protein, 15 aa, Artificial Sequence
  Description of Artificial Sequence: Synthetic peptide
  Seed: LRMKWMMAMKYPITA
LRMKYMMTMLYPFTA

SEQ ID NO: 249058 - protein, 15 aa, Artificial Sequence
  Description of Artificial Sequence: Synthetic peptide
  Seed: LRMKWMMAMKYPITA
LRMKYMMTMLYPGTA

SEQ ID NO: 249059 - protein, 15 aa, Artificial Sequence
  Description of Artificial Sequence: Synthetic peptide
  Seed: LRMKWMMAMKYPITA
LRMKYMMTMLYPITA

SEQ ID NO: 249060 - protein, 15 aa, Artificial Sequence
  Description of Artificial Sequence: Synthetic peptide
  Seed: LRMKWMMAMKYPITA
LRMKYMMTMLYPLTA

SEQ ID NO: 249061 - protein, 15 aa, Artificial Sequence
  Description of Artificial Sequence: Synthetic peptide
  Seed: LRMKWMMAMKYPITA
LRMKYMMTMLYPMTA

SEQ ID NO: 249062 - protein, 15 aa, Artificial Sequence
  Description of Artificial Sequence: Synthetic peptide
  Seed: LRMKWMMAMKYPITA
LRMKYMMTMLYPSTA

SEQ ID NO: 249063 - protein, 15 aa, Artificial Sequence
  Description of Artificial Sequence: Synthetic peptide
  Seed: LRMKWMMAMKYPITA
LRMKYMMTMLYPTTA

SEQ ID NO: 249064 - protein, 15 aa, Artificial Sequence
  Description of Artificial Sequence: Synthetic peptide
  Seed: LRMKWMMAMKYPITA
LRMKYMMTMLYPVTA

SEQ ID NO: 249065 - protein, 15 aa, Artificial Sequence
  Description of Artificial Sequence: Synthetic peptide
  Seed: LRMKWMMAMKYPITA
LRMKYMMTMMYPATA

SEQ ID NO: 249066 - protein, 15 aa, Artificial Sequence
  Description of Artificial Sequence: Synthetic peptide
  Seed: LRMKWMMAMKYPITA
LRMKYMMTMMYPCTA

SEQ ID NO: 249067 - protein, 15 aa, Artificial Sequence
  Description of Artificial Sequence: Synthetic peptide
  Seed: LRMKWMMAMKYPITA
LRMKYMMTMMYPDTA

SEQ ID NO: 249068 - protein, 15 aa, Artificial Sequence
  Description of Artificial Sequence: Synthetic peptide
  Seed: LRMKWMMAMKYPITA
LRMKYMMTMMYPFTA

SEQ ID NO: 249069 - protein, 15 aa, Artificial Sequence
  Description of Artificial Sequence: Synthetic peptide
  Seed: LRMKWMMAMKYPITA
LRMKYMMTMMYPGTA

SEQ ID NO: 249070 - protein, 15 aa, Artificial Sequence
  Description of Artificial Sequence: Synthetic peptide
  Seed: LRMKWMMAMKYPITA
LRMKYMMTMMYPITA

SEQ ID NO: 249071 - protein, 15 aa, Artificial Sequence
  Description of Artificial Sequence: Synthetic peptide
  Seed: LRMKWMMAMKYPITA
LRMKYMMTMMYPLTA

SEQ ID NO: 249072 - protein, 15 aa, Artificial Sequence
  Description of Artificial Sequence: Synthetic peptide
  Seed: LRMKWMMAMKYPITA
LRMKYMMTMMYPMTA

SEQ ID NO: 249073 - protein, 15 aa, Artificial Sequence
  Description of Artificial Sequence: Synthetic peptide
  Seed: LRMKWMMAMKYPITA
LRMKYMMTMMYPSTA

SEQ ID NO: 249074 - protein, 15 aa, Artificial Sequence
  Description of Artificial Sequence: Synthetic peptide
  Seed: LRMKWMMAMKYPITA
LRMKYMMTMMYPTTA

SEQ ID NO: 249075 - protein, 15 aa, Artificial Sequence
  Description of Artificial Sequence: Synthetic peptide
  Seed: LRMKWMMAMKYPITA
LRMKYMMTMMYPVTA

SEQ ID NO: 249076 - protein, 15 aa, Artificial Sequence
  Description of Artificial Sequence: Synthetic peptide
  Seed: LRMKWMMAMKYPITA
LRMKYMMTMMYPYTA

SEQ ID NO: 249077 - protein, 15 aa, Artificial Sequence
  Description of Artificial Sequence: Synthetic peptide
  Seed: LRMKWMMAMKYPITA
LRMKYMMTMNYPATA

SEQ ID NO: 249078 - protein, 15 aa, Artificial Sequence
  Description of Artificial Sequence: Synthetic peptide
  Seed: LRMKWMMAMKYPITA
LRMKYMMTMNYPCTA

SEQ ID NO: 249079 - protein, 15 aa, Artificial Sequence
  Description of Artificial Sequence: Synthetic peptide
  Seed: LRMKWMMAMKYPITA
LRMKYMMTMNYPDTA

SEQ ID NO: 249080 - protein, 15 aa, Artificial Sequence
  Description of Artificial Sequence: Synthetic peptide
  Seed: LRMKWMMAMKYPITA
LRMKYMMTMNYPETA

SEQ ID NO: 249081 - protein, 15 aa, Artificial Sequence
  Description of Artificial Sequence: Synthetic peptide
  Seed: LRMKWMMAMKYPITA
LRMKYMMTMNYPFTA

SEQ ID NO: 249082 - protein, 15 aa, Artificial Sequence
  Description of Artificial Sequence: Synthetic peptide
  Seed: LRMKWMMAMKYPITA
LRMKYMMTMNYPGTA

SEQ ID NO: 249083 - protein, 15 aa, Artificial Sequence
  Description of Artificial Sequence: Synthetic peptide
  Seed: LRMKWMMAMKYPITA
LRMKYMMTMNYPHTA

SEQ ID NO: 249084 - protein, 15 aa, Artificial Sequence
  Description of Artificial Sequence: Synthetic peptide
  Seed: LRMKWMMAMKYPITA
LRMKYMMTMNYPITA

SEQ ID NO: 249085 - protein, 15 aa, Artificial Sequence
  Description of Artificial Sequence: Synthetic peptide
  Seed: LRMKWMMAMKYPITA
LRMKYMMTMNYPLTA

SEQ ID NO: 249086 - protein, 15 aa, Artificial Sequence
  Description of Artificial Sequence: Synthetic peptide
  Seed: LRMKWMMAMKYPITA
LRMKYMMTMNYPMTA

SEQ ID NO: 249087 - protein, 15 aa, Artificial Sequence
  Description of Artificial Sequence: Synthetic peptide
  Seed: LRMKWMMAMKYPITA
LRMKYMMTMNYPNTA

SEQ ID NO: 249088 - protein, 15 aa, Artificial Sequence
  Description of Artificial Sequence: Synthetic peptide
  Seed: LRMKWMMAMKYPITA
LRMKYMMTMNYPPTA

SEQ ID NO: 249089 - protein, 15 aa, Artificial Sequence
  Description of Artificial Sequence: Synthetic peptide
  Seed: LRMKWMMAMKYPITA
LRMKYMMTMNYPQTA

SEQ ID NO: 249090 - protein, 15 aa, Artificial Sequence
  Description of Artificial Sequence: Synthetic peptide
  Seed: LRMKWMMAMKYPITA
LRMKYMMTMNYPRTA

SEQ ID NO: 249091 - protein, 15 aa, Artificial Sequence
  Description of Artificial Sequence: Synthetic peptide
  Seed: LRMKWMMAMKYPITA
LRMKYMMTMNYPSTA

SEQ ID NO: 249092 - protein, 15 aa, Artificial Sequence
  Description of Artificial Sequence: Synthetic peptide
  Seed: LRMKWMMAMKYPITA
LRMKYMMTMNYPTTA

SEQ ID NO: 249093 - protein, 15 aa, Artificial Sequence
  Description of Artificial Sequence: Synthetic peptide
  Seed: LRMKWMMAMKYPITA
LRMKYMMTMNYPVTA

SEQ ID NO: 249094 - protein, 15 aa, Artificial Sequence
  Description of Artificial Sequence: Synthetic peptide
  Seed: LRMKWMMAMKYPITA
LRMKYMMTMNYPWTA

SEQ ID NO: 249095 - protein, 15 aa, Artificial Sequence
  Description of Artificial Sequence: Synthetic peptide
  Seed: LRMKWMMAMKYPITA
LRMKYMMTMNYPYTA

SEQ ID NO: 249096 - protein, 15 aa, Artificial Sequence
  Description of Artificial Sequence: Synthetic peptide
  Seed: LRMKWMMAMKYPITA
LRMKYMMTMPYPATA

SEQ ID NO: 249097 - protein, 15 aa, Artificial Sequence
  Description of Artificial Sequence: Synthetic peptide
  Seed: LRMKWMMAMKYPITA
LRMKYMMTMPYPCTA

SEQ ID NO: 249098 - protein, 15 aa, Artificial Sequence
  Description of Artificial Sequence: Synthetic peptide
  Seed: LRMKWMMAMKYPITA
LRMKYMMTMPYPDTA

SEQ ID NO: 249099 - protein, 15 aa, Artificial Sequence
  Description of Artificial Sequence: Synthetic peptide
  Seed: LRMKWMMAMKYPITA
LRMKYMMTMPYPETA

SEQ ID NO: 249100 - protein, 15 aa, Artificial Sequence
  Description of Artificial Sequence: Synthetic peptide
  Seed: LRMKWMMAMKYPITA
LRMKYMMTMPYPFTA

SEQ ID NO: 249101 - protein, 15 aa, Artificial Sequence
  Description of Artificial Sequence: Synthetic peptide
  Seed: LRMKWMMAMKYPITA
LRMKYMMTMPYPGTA

SEQ ID NO: 249102 - protein, 15 aa, Artificial Sequence
  Description of Artificial Sequence: Synthetic peptide
  Seed: LRMKWMMAMKYPITA
LRMKYMMTMPYPHTA

SEQ ID NO: 249103 - protein, 15 aa, Artificial Sequence
  Description of Artificial Sequence: Synthetic peptide
  Seed: LRMKWMMAMKYPITA
LRMKYMMTMPYPITA

SEQ ID NO: 249104 - protein, 15 aa, Artificial Sequence
  Description of Artificial Sequence: Synthetic peptide
  Seed: LRMKWMMAMKYPITA
LRMKYMMTMPYPKTA

SEQ ID NO: 249105 - protein, 15 aa, Artificial Sequence
  Description of Artificial Sequence: Synthetic peptide
  Seed: LRMKWMMAMKYPITA
LRMKYMMTMPYPLTA

SEQ ID NO: 249106 - protein, 15 aa, Artificial Sequence
  Description of Artificial Sequence: Synthetic peptide
  Seed: LRMKWMMAMKYPITA
LRMKYMMTMPYPMTA

SEQ ID NO: 249107 - protein, 15 aa, Artificial Sequence
  Description of Artificial Sequence: Synthetic peptide
  Seed: LRMKWMMAMKYPITA
LRMKYMMTMPYPNTA

SEQ ID NO: 249108 - protein, 15 aa, Artificial Sequence
  Description of Artificial Sequence: Synthetic peptide
  Seed: LRMKWMMAMKYPITA
LRMKYMMTMPYPPTA

SEQ ID NO: 249109 - protein, 15 aa, Artificial Sequence
  Description of Artificial Sequence: Synthetic peptide
  Seed: LRMKWMMAMKYPITA
LRMKYMMTMPYPQTA

SEQ ID NO: 249110 - protein, 15 aa, Artificial Sequence
  Description of Artificial Sequence: Synthetic peptide
  Seed: LRMKWMMAMKYPITA
LRMKYMMTMPYPRTA

SEQ ID NO: 249111 - protein, 15 aa, Artificial Sequence
  Description of Artificial Sequence: Synthetic peptide
  Seed: LRMKWMMAMKYPITA
LRMKYMMTMPYPSTA

SEQ ID NO: 249112 - protein, 15 aa, Artificial Sequence
  Description of Artificial Sequence: Synthetic peptide
  Seed: LRMKWMMAMKYPITA
LRMKYMMTMPYPTTA

SEQ ID NO: 249113 - protein, 15 aa, Artificial Sequence
  Description of Artificial Sequence: Synthetic peptide
  Seed: LRMKWMMAMKYPITA
LRMKYMMTMPYPVTA

SEQ ID NO: 249114 - protein, 15 aa, Artificial Sequence
  Description of Artificial Sequence: Synthetic peptide
  Seed: LRMKWMMAMKYPITA
LRMKYMMTMPYPWTA

SEQ ID NO: 249115 - protein, 15 aa, Artificial Sequence
  Description of Artificial Sequence: Synthetic peptide
  Seed: LRMKWMMAMKYPITA
LRMKYMMTMPYPYTA

SEQ ID NO: 249116 - protein, 15 aa, Artificial Sequence
  Description of Artificial Sequence: Synthetic peptide
  Seed: LRMKWMMAMKYPITA
LRMKYMMTMQYPATA

SEQ ID NO: 249117 - protein, 15 aa, Artificial Sequence
  Description of Artificial Sequence: Synthetic peptide
  Seed: LRMKWMMAMKYPITA
LRMKYMMTMQYPCTA

SEQ ID NO: 249118 - protein, 15 aa, Artificial Sequence
  Description of Artificial Sequence: Synthetic peptide
  Seed: LRMKWMMAMKYPITA
LRMKYMMTMQYPFTA

SEQ ID NO: 249119 - protein, 15 aa, Artificial Sequence
  Description of Artificial Sequence: Synthetic peptide
  Seed: LRMKWMMAMKYPITA
LRMKYMMTMQYPGTA

SEQ ID NO: 249120 - protein, 15 aa, Artificial Sequence
  Description of Artificial Sequence: Synthetic peptide
  Seed: LRMKWMMAMKYPITA
LRMKYMMTMQYPHTA

SEQ ID NO: 249121 - protein, 15 aa, Artificial Sequence
  Description of Artificial Sequence: Synthetic peptide
  Seed: LRMKWMMAMKYPITA
LRMKYMMTMQYPITA

SEQ ID NO: 249122 - protein, 15 aa, Artificial Sequence
  Description of Artificial Sequence: Synthetic peptide
  Seed: LRMKWMMAMKYPITA
LRMKYMMTMQYPLTA

SEQ ID NO: 249123 - protein, 15 aa, Artificial Sequence
  Description of Artificial Sequence: Synthetic peptide
  Seed: LRMKWMMAMKYPITA
LRMKYMMTMQYPMTA

SEQ ID NO: 249124 - protein, 15 aa, Artificial Sequence
  Description of Artificial Sequence: Synthetic peptide
  Seed: LRMKWMMAMKYPITA
LRMKYMMTMQYPNTA

SEQ ID NO: 249125 - protein, 15 aa, Artificial Sequence
  Description of Artificial Sequence: Synthetic peptide
  Seed: LRMKWMMAMKYPITA
LRMKYMMTMQYPQTA

SEQ ID NO: 249126 - protein, 15 aa, Artificial Sequence
  Description of Artificial Sequence: Synthetic peptide
  Seed: LRMKWMMAMKYPITA
LRMKYMMTMQYPSTA

SEQ ID NO: 249127 - protein, 15 aa, Artificial Sequence
  Description of Artificial Sequence: Synthetic peptide
  Seed: LRMKWMMAMKYPITA
LRMKYMMTMQYPTTA

SEQ ID NO: 249128 - protein, 15 aa, Artificial Sequence
  Description of Artificial Sequence: Synthetic peptide
  Seed: LRMKWMMAMKYPITA
LRMKYMMTMQYPVTA

SEQ ID NO: 249129 - protein, 15 aa, Artificial Sequence
  Description of Artificial Sequence: Synthetic peptide
  Seed: LRMKWMMAMKYPITA
LRMKYMMTMRYPATA

SEQ ID NO: 249130 - protein, 15 aa, Artificial Sequence
  Description of Artificial Sequence: Synthetic peptide
  Seed: LRMKWMMAMKYPITA
LRMKYMMTMRYPCTA

SEQ ID NO: 249131 - protein, 15 aa, Artificial Sequence
  Description of Artificial Sequence: Synthetic peptide
  Seed: LRMKWMMAMKYPITA
LRMKYMMTMRYPETA

SEQ ID NO: 249132 - protein, 15 aa, Artificial Sequence
  Description of Artificial Sequence: Synthetic peptide
  Seed: LRMKWMMAMKYPITA
LRMKYMMTMRYPFTA

SEQ ID NO: 249133 - protein, 15 aa, Artificial Sequence
  Description of Artificial Sequence: Synthetic peptide
  Seed: LRMKWMMAMKYPITA
LRMKYMMTMRYPGTA

SEQ ID NO: 249134 - protein, 15 aa, Artificial Sequence
  Description of Artificial Sequence: Synthetic peptide
  Seed: LRMKWMMAMKYPITA
LRMKYMMTMRYPHTA

SEQ ID NO: 249135 - protein, 15 aa, Artificial Sequence
  Description of Artificial Sequence: Synthetic peptide
  Seed: LRMKWMMAMKYPITA
LRMKYMMTMRYPITA

SEQ ID NO: 249136 - protein, 15 aa, Artificial Sequence
  Description of Artificial Sequence: Synthetic peptide
  Seed: LRMKWMMAMKYPITA
LRMKYMMTMRYPKTA

SEQ ID NO: 249137 - protein, 15 aa, Artificial Sequence
  Description of Artificial Sequence: Synthetic peptide
  Seed: LRMKWMMAMKYPITA
LRMKYMMTMRYPLTA

SEQ ID NO: 249138 - protein, 15 aa, Artificial Sequence
  Description of Artificial Sequence: Synthetic peptide
  Seed: LRMKWMMAMKYPITA
LRMKYMMTMRYPMTA

SEQ ID NO: 249139 - protein, 15 aa, Artificial Sequence
  Description of Artificial Sequence: Synthetic peptide
  Seed: LRMKWMMAMKYPITA
LRMKYMMTMRYPNTA

SEQ ID NO: 249140 - protein, 15 aa, Artificial Sequence
  Description of Artificial Sequence: Synthetic peptide
  Seed: LRMKWMMAMKYPITA
LRMKYMMTMRYPPTA

SEQ ID NO: 249141 - protein, 15 aa, Artificial Sequence
  Description of Artificial Sequence: Synthetic peptide
  Seed: LRMKWMMAMKYPITA
LRMKYMMTMRYPQTA

SEQ ID NO: 249142 - protein, 15 aa, Artificial Sequence
  Description of Artificial Sequence: Synthetic peptide
  Seed: LRMKWMMAMKYPITA
LRMKYMMTMRYPRTA

SEQ ID NO: 249143 - protein, 15 aa, Artificial Sequence
  Description of Artificial Sequence: Synthetic peptide
  Seed: LRMKWMMAMKYPITA
LRMKYMMTMRYPSTA

SEQ ID NO: 249144 - protein, 15 aa, Artificial Sequence
  Description of Artificial Sequence: Synthetic peptide
  Seed: LRMKWMMAMKYPITA
LRMKYMMTMRYPTTA

SEQ ID NO: 249145 - protein, 15 aa, Artificial Sequence
  Description of Artificial Sequence: Synthetic peptide
  Seed: LRMKWMMAMKYPITA
LRMKYMMTMRYPVTA

SEQ ID NO: 249146 - protein, 15 aa, Artificial Sequence
  Description of Artificial Sequence: Synthetic peptide
  Seed: LRMKWMMAMKYPITA
LRMKYMMTMRYPWTA

SEQ ID NO: 249147 - protein, 15 aa, Artificial Sequence
  Description of Artificial Sequence: Synthetic peptide
  Seed: LRMKWMMAMKYPITA
LRMKYMMTMRYPYTA

SEQ ID NO: 249148 - protein, 15 aa, Artificial Sequence
  Description of Artificial Sequence: Synthetic peptide
  Seed: LRMKWMMAMKYPITA
LRMKYMMTMSYPATA

SEQ ID NO: 249149 - protein, 15 aa, Artificial Sequence
  Description of Artificial Sequence: Synthetic peptide
  Seed: LRMKWMMAMKYPITA
LRMKYMMTMSYPCTA

SEQ ID NO: 249150 - protein, 15 aa, Artificial Sequence
  Description of Artificial Sequence: Synthetic peptide
  Seed: LRMKWMMAMKYPITA
LRMKYMMTMSYPDTA

SEQ ID NO: 249151 - protein, 15 aa, Artificial Sequence
  Description of Artificial Sequence: Synthetic peptide
  Seed: LRMKWMMAMKYPITA
LRMKYMMTMSYPETA

SEQ ID NO: 249152 - protein, 15 aa, Artificial Sequence
  Description of Artificial Sequence: Synthetic peptide
  Seed: LRMKWMMAMKYPITA
LRMKYMMTMSYPFTA

SEQ ID NO: 249153 - protein, 15 aa, Artificial Sequence
  Description of Artificial Sequence: Synthetic peptide
  Seed: LRMKWMMAMKYPITA
LRMKYMMTMSYPGTA

SEQ ID NO: 249154 - protein, 15 aa, Artificial Sequence
  Description of Artificial Sequence: Synthetic peptide
  Seed: LRMKWMMAMKYPITA
LRMKYMMTMSYPHTA

SEQ ID NO: 249155 - protein, 15 aa, Artificial Sequence
  Description of Artificial Sequence: Synthetic peptide
  Seed: LRMKWMMAMKYPITA
LRMKYMMTMSYPITA

SEQ ID NO: 249156 - protein, 15 aa, Artificial Sequence
  Description of Artificial Sequence: Synthetic peptide
  Seed: LRMKWMMAMKYPITA
LRMKYMMTMSYPKTA

SEQ ID NO: 249157 - protein, 15 aa, Artificial Sequence
  Description of Artificial Sequence: Synthetic peptide
  Seed: LRMKWMMAMKYPITA
LRMKYMMTMSYPLTA

SEQ ID NO: 249158 - protein, 15 aa, Artificial Sequence
  Description of Artificial Sequence: Synthetic peptide
  Seed: LRMKWMMAMKYPITA
LRMKYMMTMSYPMTA

SEQ ID NO: 249159 - protein, 15 aa, Artificial Sequence
  Description of Artificial Sequence: Synthetic peptide
  Seed: LRMKWMMAMKYPITA
LRMKYMMTMSYPNTA

SEQ ID NO: 249160 - protein, 15 aa, Artificial Sequence
  Description of Artificial Sequence: Synthetic peptide
  Seed: LRMKWMMAMKYPITA
LRMKYMMTMSYPPTA

SEQ ID NO: 249161 - protein, 15 aa, Artificial Sequence
  Description of Artificial Sequence: Synthetic peptide
  Seed: LRMKWMMAMKYPITA
LRMKYMMTMSYPQTA

SEQ ID NO: 249162 - protein, 15 aa, Artificial Sequence
  Description of Artificial Sequence: Synthetic peptide
  Seed: LRMKWMMAMKYPITA
LRMKYMMTMSYPRTA

SEQ ID NO: 249163 - protein, 15 aa, Artificial Sequence
  Description of Artificial Sequence: Synthetic peptide
  Seed: LRMKWMMAMKYPITA
LRMKYMMTMSYPSTA

SEQ ID NO: 249164 - protein, 15 aa, Artificial Sequence
  Description of Artificial Sequence: Synthetic peptide
  Seed: LRMKWMMAMKYPITA
LRMKYMMTMSYPTTA

SEQ ID NO: 249165 - protein, 15 aa, Artificial Sequence
  Description of Artificial Sequence: Synthetic peptide
  Seed: LRMKWMMAMKYPITA
LRMKYMMTMSYPVTA

SEQ ID NO: 249166 - protein, 15 aa, Artificial Sequence
  Description of Artificial Sequence: Synthetic peptide
  Seed: LRMKWMMAMKYPITA
LRMKYMMTMSYPWTA

SEQ ID NO: 249167 - protein, 15 aa, Artificial Sequence
  Description of Artificial Sequence: Synthetic peptide
  Seed: LRMKWMMAMKYPITA
LRMKYMMTMSYPYTA

SEQ ID NO: 249168 - protein, 15 aa, Artificial Sequence
  Description of Artificial Sequence: Synthetic peptide
  Seed: LRMKWMMAMKYPITA
LRMKYMMTMTYPATA

SEQ ID NO: 249169 - protein, 15 aa, Artificial Sequence
  Description of Artificial Sequence: Synthetic peptide
  Seed: LRMKWMMAMKYPITA
LRMKYMMTMTYPCTA

SEQ ID NO: 249170 - protein, 15 aa, Artificial Sequence
  Description of Artificial Sequence: Synthetic peptide
  Seed: LRMKWMMAMKYPITA
LRMKYMMTMTYPDTA

SEQ ID NO: 249171 - protein, 15 aa, Artificial Sequence
  Description of Artificial Sequence: Synthetic peptide
  Seed: LRMKWMMAMKYPITA
LRMKYMMTMTYPETA

SEQ ID NO: 249172 - protein, 15 aa, Artificial Sequence
  Description of Artificial Sequence: Synthetic peptide
  Seed: LRMKWMMAMKYPITA
LRMKYMMTMTYPFTA

SEQ ID NO: 249173 - protein, 15 aa, Artificial Sequence
  Description of Artificial Sequence: Synthetic peptide
  Seed: LRMKWMMAMKYPITA
LRMKYMMTMTYPGTA

SEQ ID NO: 249174 - protein, 15 aa, Artificial Sequence
  Description of Artificial Sequence: Synthetic peptide
  Seed: LRMKWMMAMKYPITA
LRMKYMMTMTYPHTA

SEQ ID NO: 249175 - protein, 15 aa, Artificial Sequence
  Description of Artificial Sequence: Synthetic peptide
  Seed: LRMKWMMAMKYPITA
LRMKYMMTMTYPITA

SEQ ID NO: 249176 - protein, 15 aa, Artificial Sequence
  Description of Artificial Sequence: Synthetic peptide
  Seed: LRMKWMMAMKYPITA
LRMKYMMTMTYPKTA

SEQ ID NO: 249177 - protein, 15 aa, Artificial Sequence
  Description of Artificial Sequence: Synthetic peptide
  Seed: LRMKWMMAMKYPITA
LRMKYMMTMTYPLTA

SEQ ID NO: 249178 - protein, 15 aa, Artificial Sequence
  Description of Artificial Sequence: Synthetic peptide
  Seed: LRMKWMMAMKYPITA
LRMKYMMTMTYPMTA

SEQ ID NO: 249179 - protein, 15 aa, Artificial Sequence
  Description of Artificial Sequence: Synthetic peptide
  Seed: LRMKWMMAMKYPITA
LRMKYMMTMTYPNTA

SEQ ID NO: 249180 - protein, 15 aa, Artificial Sequence
  Description of Artificial Sequence: Synthetic peptide
  Seed: LRMKWMMAMKYPITA
LRMKYMMTMTYPPTA

SEQ ID NO: 249181 - protein, 15 aa, Artificial Sequence
  Description of Artificial Sequence: Synthetic peptide
  Seed: LRMKWMMAMKYPITA
LRMKYMMTMTYPQTA

SEQ ID NO: 249182 - protein, 15 aa, Artificial Sequence
  Description of Artificial Sequence: Synthetic peptide
  Seed: LRMKWMMAMKYPITA
LRMKYMMTMTYPRTA

SEQ ID NO: 249183 - protein, 15 aa, Artificial Sequence
  Description of Artificial Sequence: Synthetic peptide
  Seed: LRMKWMMAMKYPITA
LRMKYMMTMTYPSTA

SEQ ID NO: 249184 - protein, 15 aa, Artificial Sequence
  Description of Artificial Sequence: Synthetic peptide
  Seed: LRMKWMMAMKYPITA
LRMKYMMTMTYPTTA

SEQ ID NO: 249185 - protein, 15 aa, Artificial Sequence
  Description of Artificial Sequence: Synthetic peptide
  Seed: LRMKWMMAMKYPITA
LRMKYMMTMTYPVTA

SEQ ID NO: 249186 - protein, 15 aa, Artificial Sequence
  Description of Artificial Sequence: Synthetic peptide
  Seed: LRMKWMMAMKYPITA
LRMKYMMTMTYPWTA

SEQ ID NO: 249187 - protein, 15 aa, Artificial Sequence
  Description of Artificial Sequence: Synthetic peptide
  Seed: LRMKWMMAMKYPITA
LRMKYMMTMTYPYTA

SEQ ID NO: 249188 - protein, 15 aa, Artificial Sequence
  Description of Artificial Sequence: Synthetic peptide
  Seed: LRMKWMMAMKYPITA
LRMKYMMTMVYPATA

SEQ ID NO: 249189 - protein, 15 aa, Artificial Sequence
  Description of Artificial Sequence: Synthetic peptide
  Seed: LRMKWMMAMKYPITA
LRMKYMMTMVYPCTA

SEQ ID NO: 249190 - protein, 15 aa, Artificial Sequence
  Description of Artificial Sequence: Synthetic peptide
  Seed: LRMKWMMAMKYPITA
LRMKYMMTMVYPDTA

SEQ ID NO: 249191 - protein, 15 aa, Artificial Sequence
  Description of Artificial Sequence: Synthetic peptide
  Seed: LRMKWMMAMKYPITA
LRMKYMMTMVYPETA

SEQ ID NO: 249192 - protein, 15 aa, Artificial Sequence
  Description of Artificial Sequence: Synthetic peptide
  Seed: LRMKWMMAMKYPITA
LRMKYMMTMVYPFTA

SEQ ID NO: 249193 - protein, 15 aa, Artificial Sequence
  Description of Artificial Sequence: Synthetic peptide
  Seed: LRMKWMMAMKYPITA
LRMKYMMTMVYPGTA

SEQ ID NO: 249194 - protein, 15 aa, Artificial Sequence
  Description of Artificial Sequence: Synthetic peptide
  Seed: LRMKWMMAMKYPITA
LRMKYMMTMVYPHTA

SEQ ID NO: 249195 - protein, 15 aa, Artificial Sequence
  Description of Artificial Sequence: Synthetic peptide
  Seed: LRMKWMMAMKYPITA
LRMKYMMTMVYPITA

SEQ ID NO: 249196 - protein, 15 aa, Artificial Sequence
  Description of Artificial Sequence: Synthetic peptide
  Seed: LRMKWMMAMKYPITA
LRMKYMMTMVYPKTA

SEQ ID NO: 249197 - protein, 15 aa, Artificial Sequence
  Description of Artificial Sequence: Synthetic peptide
  Seed: LRMKWMMAMKYPITA
LRMKYMMTMVYPLTA

SEQ ID NO: 249198 - protein, 15 aa, Artificial Sequence
  Description of Artificial Sequence: Synthetic peptide
  Seed: LRMKWMMAMKYPITA
LRMKYMMTMVYPMTA

SEQ ID NO: 249199 - protein, 15 aa, Artificial Sequence
  Description of Artificial Sequence: Synthetic peptide
  Seed: LRMKWMMAMKYPITA
LRMKYMMTMVYPNTA

SEQ ID NO: 249200 - protein, 15 aa, Artificial Sequence
  Description of Artificial Sequence: Synthetic peptide
  Seed: LRMKWMMAMKYPITA
LRMKYMMTMVYPPTA

SEQ ID NO: 249201 - protein, 15 aa, Artificial Sequence
  Description of Artificial Sequence: Synthetic peptide
  Seed: LRMKWMMAMKYPITA
LRMKYMMTMVYPQTA

SEQ ID NO: 249202 - protein, 15 aa, Artificial Sequence
  Description of Artificial Sequence: Synthetic peptide
  Seed: LRMKWMMAMKYPITA
LRMKYMMTMVYPRTA

SEQ ID NO: 249203 - protein, 15 aa, Artificial Sequence
  Description of Artificial Sequence: Synthetic peptide
  Seed: LRMKWMMAMKYPITA
LRMKYMMTMVYPSTA

SEQ ID NO: 249204 - protein, 15 aa, Artificial Sequence
  Description of Artificial Sequence: Synthetic peptide
  Seed: LRMKWMMAMKYPITA
LRMKYMMTMVYPTTA

SEQ ID NO: 249205 - protein, 15 aa, Artificial Sequence
  Description of Artificial Sequence: Synthetic peptide
  Seed: LRMKWMMAMKYPITA
LRMKYMMTMVYPVTA

SEQ ID NO: 249206 - protein, 15 aa, Artificial Sequence
  Description of Artificial Sequence: Synthetic peptide
  Seed: LRMKWMMAMKYPITA
LRMKYMMTMVYPWTA

SEQ ID NO: 249207 - protein, 15 aa, Artificial Sequence
  Description of Artificial Sequence: Synthetic peptide
  Seed: LRMKWMMAMKYPITA
LRMKYMMTMVYPYTA

SEQ ID NO: 249208 - protein, 15 aa, Artificial Sequence
  Description of Artificial Sequence: Synthetic peptide
  Seed: LRMKWMMAMKYPITA
LRMKYMMTMWYPATA

SEQ ID NO: 249209 - protein, 15 aa, Artificial Sequence
  Description of Artificial Sequence: Synthetic peptide
  Seed: LRMKWMMAMKYPITA
LRMKYMMTMWYPITA

SEQ ID NO: 249210 - protein, 15 aa, Artificial Sequence
  Description of Artificial Sequence: Synthetic peptide
  Seed: LRMKWMMAMKYPITA
LRMKYMMTMWYPLTA

SEQ ID NO: 249211 - protein, 15 aa, Artificial Sequence
  Description of Artificial Sequence: Synthetic peptide
  Seed: LRMKWMMAMKYPITA
LRMKYMMTMWYPMTA

SEQ ID NO: 249212 - protein, 15 aa, Artificial Sequence
  Description of Artificial Sequence: Synthetic peptide
  Seed: LRMKWMMAMKYPITA
LRMKYMMTMWYPSTA

SEQ ID NO: 249213 - protein, 15 aa, Artificial Sequence
  Description of Artificial Sequence: Synthetic peptide
  Seed: LRMKWMMAMKYPITA
LRMKYMMTMWYPVTA

SEQ ID NO: 249214 - protein, 15 aa, Artificial Sequence
  Description of Artificial Sequence: Synthetic peptide
  Seed: LRMKWMMAMKYPITA
LRMKYMMTMYYPATA

SEQ ID NO: 249215 - protein, 15 aa, Artificial Sequence
  Description of Artificial Sequence: Synthetic peptide
  Seed: LRMKWMMAMKYPITA
LRMKYMMTMYYPFTA

SEQ ID NO: 249216 - protein, 15 aa, Artificial Sequence
  Description of Artificial Sequence: Synthetic peptide
  Seed: LRMKWMMAMKYPITA
LRMKYMMTMYYPITA

SEQ ID NO: 249217 - protein, 15 aa, Artificial Sequence
  Description of Artificial Sequence: Synthetic peptide
  Seed: LRMKWMMAMKYPITA
LRMKYMMTMYYPLTA

SEQ ID NO: 249218 - protein, 15 aa, Artificial Sequence
  Description of Artificial Sequence: Synthetic peptide
  Seed: LRMKWMMAMKYPITA
LRMKYMMTMYYPMTA

SEQ ID NO: 249219 - protein, 15 aa, Artificial Sequence
  Description of Artificial Sequence: Synthetic peptide
  Seed: LRMKWMMAMKYPITA
LRMKYMMTMYYPSTA

SEQ ID NO: 249220 - protein, 15 aa, Artificial Sequence
  Description of Artificial Sequence: Synthetic peptide
  Seed: LRMKWMMAMKYPITA
LRMKYMMTMYYPVTA

SEQ ID NO: 249221 - protein, 15 aa, Artificial Sequence
  Description of Artificial Sequence: Synthetic peptide
  Seed: LRMKWMMAMKYPITA
LRMKYMMVMAYPATA

SEQ ID NO: 249222 - protein, 15 aa, Artificial Sequence
  Description of Artificial Sequence: Synthetic peptide
  Seed: LRMKWMMAMKYPITA
LRMKYMMVMAYPCTA

SEQ ID NO: 249223 - protein, 15 aa, Artificial Sequence
  Description of Artificial Sequence: Synthetic peptide
  Seed: LRMKWMMAMKYPITA
LRMKYMMVMAYPDTA

SEQ ID NO: 249224 - protein, 15 aa, Artificial Sequence
  Description of Artificial Sequence: Synthetic peptide
  Seed: LRMKWMMAMKYPITA
LRMKYMMVMAYPETA

SEQ ID NO: 249225 - protein, 15 aa, Artificial Sequence
  Description of Artificial Sequence: Synthetic peptide
  Seed: LRMKWMMAMKYPITA
LRMKYMMVMAYPFTA

SEQ ID NO: 249226 - protein, 15 aa, Artificial Sequence
  Description of Artificial Sequence: Synthetic peptide
  Seed: LRMKWMMAMKYPITA
LRMKYMMVMAYPGTA

SEQ ID NO: 249227 - protein, 15 aa, Artificial Sequence
  Description of Artificial Sequence: Synthetic peptide
  Seed: LRMKWMMAMKYPITA
LRMKYMMVMAYPHTA

SEQ ID NO: 249228 - protein, 15 aa, Artificial Sequence
  Description of Artificial Sequence: Synthetic peptide
  Seed: LRMKWMMAMKYPITA
LRMKYMMVMAYPITA

SEQ ID NO: 249229 - protein, 15 aa, Artificial Sequence
  Description of Artificial Sequence: Synthetic peptide
  Seed: LRMKWMMAMKYPITA
LRMKYMMVMAYPKTA

SEQ ID NO: 249230 - protein, 15 aa, Artificial Sequence
  Description of Artificial Sequence: Synthetic peptide
  Seed: LRMKWMMAMKYPITA
LRMKYMMVMAYPLTA

SEQ ID NO: 249231 - protein, 15 aa, Artificial Sequence
  Description of Artificial Sequence: Synthetic peptide
  Seed: LRMKWMMAMKYPITA
LRMKYMMVMAYPMTA

SEQ ID NO: 249232 - protein, 15 aa, Artificial Sequence
  Description of Artificial Sequence: Synthetic peptide
  Seed: LRMKWMMAMKYPITA
LRMKYMMVMAYPNTA

SEQ ID NO: 249233 - protein, 15 aa, Artificial Sequence
  Description of Artificial Sequence: Synthetic peptide
  Seed: LRMKWMMAMKYPITA
LRMKYMMVMAYPPTA

SEQ ID NO: 249234 - protein, 15 aa, Artificial Sequence
  Description of Artificial Sequence: Synthetic peptide
  Seed: LRMKWMMAMKYPITA
LRMKYMMVMAYPQTA

SEQ ID NO: 249235 - protein, 15 aa, Artificial Sequence
  Description of Artificial Sequence: Synthetic peptide
  Seed: LRMKWMMAMKYPITA
LRMKYMMVMAYPRTA

SEQ ID NO: 249236 - protein, 15 aa, Artificial Sequence
  Description of Artificial Sequence: Synthetic peptide
  Seed: LRMKWMMAMKYPITA
LRMKYMMVMAYPSTA

SEQ ID NO: 249237 - protein, 15 aa, Artificial Sequence
  Description of Artificial Sequence: Synthetic peptide
  Seed: LRMKWMMAMKYPITA
LRMKYMMVMAYPTTA

SEQ ID NO: 249238 - protein, 15 aa, Artificial Sequence
  Description of Artificial Sequence: Synthetic peptide
  Seed: LRMKWMMAMKYPITA
LRMKYMMVMAYPVTA

SEQ ID NO: 249239 - protein, 15 aa, Artificial Sequence
  Description of Artificial Sequence: Synthetic peptide
  Seed: LRMKWMMAMKYPITA
LRMKYMMVMAYPWTA

SEQ ID NO: 249240 - protein, 15 aa, Artificial Sequence
  Description of Artificial Sequence: Synthetic peptide
  Seed: LRMKWMMAMKYPITA
LRMKYMMVMAYPYTA

SEQ ID NO: 249241 - protein, 15 aa, Artificial Sequence
  Description of Artificial Sequence: Synthetic peptide
  Seed: LRMKWMMAMKYPITA
LRMKYMMVMCYPATA

SEQ ID NO: 249242 - protein, 15 aa, Artificial Sequence
  Description of Artificial Sequence: Synthetic peptide
  Seed: LRMKWMMAMKYPITA
LRMKYMMVMCYPGTA

SEQ ID NO: 249243 - protein, 15 aa, Artificial Sequence
  Description of Artificial Sequence: Synthetic peptide
  Seed: LRMKWMMAMKYPITA
LRMKYMMVMCYPHTA

SEQ ID NO: 249244 - protein, 15 aa, Artificial Sequence
  Description of Artificial Sequence: Synthetic peptide
  Seed: LRMKWMMAMKYPITA
LRMKYMMVMCYPITA

SEQ ID NO: 249245 - protein, 15 aa, Artificial Sequence
  Description of Artificial Sequence: Synthetic peptide
  Seed: LRMKWMMAMKYPITA
LRMKYMMVMCYPLTA

SEQ ID NO: 249246 - protein, 15 aa, Artificial Sequence
  Description of Artificial Sequence: Synthetic peptide
  Seed: LRMKWMMAMKYPITA
LRMKYMMVMCYPMTA

SEQ ID NO: 249247 - protein, 15 aa, Artificial Sequence
  Description of Artificial Sequence: Synthetic peptide
  Seed: LRMKWMMAMKYPITA
LRMKYMMVMCYPNTA

SEQ ID NO: 249248 - protein, 15 aa, Artificial Sequence
  Description of Artificial Sequence: Synthetic peptide
  Seed: LRMKWMMAMKYPITA
LRMKYMMVMCYPPTA

SEQ ID NO: 249249 - protein, 15 aa, Artificial Sequence
  Description of Artificial Sequence: Synthetic peptide
  Seed: LRMKWMMAMKYPITA
LRMKYMMVMCYPQTA

SEQ ID NO: 249250 - protein, 15 aa, Artificial Sequence
  Description of Artificial Sequence: Synthetic peptide
  Seed: LRMKWMMAMKYPITA
LRMKYMMVMCYPSTA

SEQ ID NO: 249251 - protein, 15 aa, Artificial Sequence
  Description of Artificial Sequence: Synthetic peptide
  Seed: LRMKWMMAMKYPITA
LRMKYMMVMCYPTTA

SEQ ID NO: 249252 - protein, 15 aa, Artificial Sequence
  Description of Artificial Sequence: Synthetic peptide
  Seed: LRMKWMMAMKYPITA
LRMKYMMVMCYPVTA

SEQ ID NO: 249253 - protein, 15 aa, Artificial Sequence
  Description of Artificial Sequence: Synthetic peptide
  Seed: LRMKWMMAMKYPITA
LRMKYMMVMDYPATA

SEQ ID NO: 249254 - protein, 15 aa, Artificial Sequence
  Description of Artificial Sequence: Synthetic peptide
  Seed: LRMKWMMAMKYPITA
LRMKYMMVMDYPDTA

SEQ ID NO: 249255 - protein, 15 aa, Artificial Sequence
  Description of Artificial Sequence: Synthetic peptide
  Seed: LRMKWMMAMKYPITA
LRMKYMMVMDYPETA

SEQ ID NO: 249256 - protein, 15 aa, Artificial Sequence
  Description of Artificial Sequence: Synthetic peptide
  Seed: LRMKWMMAMKYPITA
LRMKYMMVMDYPITA

SEQ ID NO: 249257 - protein, 15 aa, Artificial Sequence
  Description of Artificial Sequence: Synthetic peptide
  Seed: LRMKWMMAMKYPITA
LRMKYMMVMDYPLTA

SEQ ID NO: 249258 - protein, 15 aa, Artificial Sequence
  Description of Artificial Sequence: Synthetic peptide
  Seed: LRMKWMMAMKYPITA
LRMKYMMVMDYPMTA

SEQ ID NO: 249259 - protein, 15 aa, Artificial Sequence
  Description of Artificial Sequence: Synthetic peptide
  Seed: LRMKWMMAMKYPITA
LRMKYMMVMDYPNTA

SEQ ID NO: 249260 - protein, 15 aa, Artificial Sequence
  Description of Artificial Sequence: Synthetic peptide
  Seed: LRMKWMMAMKYPITA
LRMKYMMVMDYPSTA

SEQ ID NO: 249261 - protein, 15 aa, Artificial Sequence
  Description of Artificial Sequence: Synthetic peptide
  Seed: LRMKWMMAMKYPITA
LRMKYMMVMDYPTTA

SEQ ID NO: 249262 - protein, 15 aa, Artificial Sequence
  Description of Artificial Sequence: Synthetic peptide
  Seed: LRMKWMMAMKYPITA
LRMKYMMVMDYPVTA

SEQ ID NO: 249263 - protein, 15 aa, Artificial Sequence
  Description of Artificial Sequence: Synthetic peptide
  Seed: LRMKWMMAMKYPITA
LRMKYMMVMEYPATA

SEQ ID NO: 249264 - protein, 15 aa, Artificial Sequence
  Description of Artificial Sequence: Synthetic peptide
  Seed: LRMKWMMAMKYPITA
LRMKYMMVMEYPFTA

SEQ ID NO: 249265 - protein, 15 aa, Artificial Sequence
  Description of Artificial Sequence: Synthetic peptide
  Seed: LRMKWMMAMKYPITA
LRMKYMMVMEYPGTA

SEQ ID NO: 249266 - protein, 15 aa, Artificial Sequence
  Description of Artificial Sequence: Synthetic peptide
  Seed: LRMKWMMAMKYPITA
LRMKYMMVMEYPHTA

SEQ ID NO: 249267 - protein, 15 aa, Artificial Sequence
  Description of Artificial Sequence: Synthetic peptide
  Seed: LRMKWMMAMKYPITA
LRMKYMMVMEYPITA

SEQ ID NO: 249268 - protein, 15 aa, Artificial Sequence
  Description of Artificial Sequence: Synthetic peptide
  Seed: LRMKWMMAMKYPITA
LRMKYMMVMEYPLTA

SEQ ID NO: 249269 - protein, 15 aa, Artificial Sequence
  Description of Artificial Sequence: Synthetic peptide
  Seed: LRMKWMMAMKYPITA
LRMKYMMVMEYPMTA

SEQ ID NO: 249270 - protein, 15 aa, Artificial Sequence
  Description of Artificial Sequence: Synthetic peptide
  Seed: LRMKWMMAMKYPITA
LRMKYMMVMEYPNTA

SEQ ID NO: 249271 - protein, 15 aa, Artificial Sequence
  Description of Artificial Sequence: Synthetic peptide
  Seed: LRMKWMMAMKYPITA
LRMKYMMVMEYPPTA

SEQ ID NO: 249272 - protein, 15 aa, Artificial Sequence
  Description of Artificial Sequence: Synthetic peptide
  Seed: LRMKWMMAMKYPITA
LRMKYMMVMEYPQTA

SEQ ID NO: 249273 - protein, 15 aa, Artificial Sequence
  Description of Artificial Sequence: Synthetic peptide
  Seed: LRMKWMMAMKYPITA
LRMKYMMVMEYPRTA

SEQ ID NO: 249274 - protein, 15 aa, Artificial Sequence
  Description of Artificial Sequence: Synthetic peptide
  Seed: LRMKWMMAMKYPITA
LRMKYMMVMEYPSTA

SEQ ID NO: 249275 - protein, 15 aa, Artificial Sequence
  Description of Artificial Sequence: Synthetic peptide
  Seed: LRMKWMMAMKYPITA
LRMKYMMVMEYPTTA

SEQ ID NO: 249276 - protein, 15 aa, Artificial Sequence
  Description of Artificial Sequence: Synthetic peptide
  Seed: LRMKWMMAMKYPITA
LRMKYMMVMEYPVTA

SEQ ID NO: 249277 - protein, 15 aa, Artificial Sequence
  Description of Artificial Sequence: Synthetic peptide
  Seed: LRMKWMMAMKYPITA
LRMKYMMVMFYPATA

SEQ ID NO: 249278 - protein, 15 aa, Artificial Sequence
  Description of Artificial Sequence: Synthetic peptide
  Seed: LRMKWMMAMKYPITA
LRMKYMMVMFYPITA

SEQ ID NO: 249279 - protein, 15 aa, Artificial Sequence
  Description of Artificial Sequence: Synthetic peptide
  Seed: LRMKWMMAMKYPITA
LRMKYMMVMFYPLTA

SEQ ID NO: 249280 - protein, 15 aa, Artificial Sequence
  Description of Artificial Sequence: Synthetic peptide
  Seed: LRMKWMMAMKYPITA
LRMKYMMVMFYPNTA

SEQ ID NO: 249281 - protein, 15 aa, Artificial Sequence
  Description of Artificial Sequence: Synthetic peptide
  Seed: LRMKWMMAMKYPITA
LRMKYMMVMFYPSTA

SEQ ID NO: 249282 - protein, 15 aa, Artificial Sequence
  Description of Artificial Sequence: Synthetic peptide
  Seed: LRMKWMMAMKYPITA
LRMKYMMVMFYPVTA

SEQ ID NO: 249283 - protein, 15 aa, Artificial Sequence
  Description of Artificial Sequence: Synthetic peptide
  Seed: LRMKWMMAMKYPITA
LRMKYMMVMGYPATA

SEQ ID NO: 249284 - protein, 15 aa, Artificial Sequence
  Description of Artificial Sequence: Synthetic peptide
  Seed: LRMKWMMAMKYPITA
LRMKYMMVMGYPCTA

SEQ ID NO: 249285 - protein, 15 aa, Artificial Sequence
  Description of Artificial Sequence: Synthetic peptide
  Seed: LRMKWMMAMKYPITA
LRMKYMMVMGYPDTA

SEQ ID NO: 249286 - protein, 15 aa, Artificial Sequence
  Description of Artificial Sequence: Synthetic peptide
  Seed: LRMKWMMAMKYPITA
LRMKYMMVMGYPETA

SEQ ID NO: 249287 - protein, 15 aa, Artificial Sequence
  Description of Artificial Sequence: Synthetic peptide
  Seed: LRMKWMMAMKYPITA
LRMKYMMVMGYPFTA

SEQ ID NO: 249288 - protein, 15 aa, Artificial Sequence
  Description of Artificial Sequence: Synthetic peptide
  Seed: LRMKWMMAMKYPITA
LRMKYMMVMGYPGTA

SEQ ID NO: 249289 - protein, 15 aa, Artificial Sequence
  Description of Artificial Sequence: Synthetic peptide
  Seed: LRMKWMMAMKYPITA
LRMKYMMVMGYPHTA

SEQ ID NO: 249290 - protein, 15 aa, Artificial Sequence
  Description of Artificial Sequence: Synthetic peptide
  Seed: LRMKWMMAMKYPITA
LRMKYMMVMGYPITA

SEQ ID NO: 249291 - protein, 15 aa, Artificial Sequence
  Description of Artificial Sequence: Synthetic peptide
  Seed: LRMKWMMAMKYPITA
LRMKYMMVMGYPKTA

SEQ ID NO: 249292 - protein, 15 aa, Artificial Sequence
  Description of Artificial Sequence: Synthetic peptide
  Seed: LRMKWMMAMKYPITA
LRMKYMMVMGYPLTA

SEQ ID NO: 249293 - protein, 15 aa, Artificial Sequence
  Description of Artificial Sequence: Synthetic peptide
  Seed: LRMKWMMAMKYPITA
LRMKYMMVMGYPMTA

SEQ ID NO: 249294 - protein, 15 aa, Artificial Sequence
  Description of Artificial Sequence: Synthetic peptide
  Seed: LRMKWMMAMKYPITA
LRMKYMMVMGYPNTA

SEQ ID NO: 249295 - protein, 15 aa, Artificial Sequence
  Description of Artificial Sequence: Synthetic peptide
  Seed: LRMKWMMAMKYPITA
LRMKYMMVMGYPPTA

SEQ ID NO: 249296 - protein, 15 aa, Artificial Sequence
  Description of Artificial Sequence: Synthetic peptide
  Seed: LRMKWMMAMKYPITA
LRMKYMMVMGYPQTA

SEQ ID NO: 249297 - protein, 15 aa, Artificial Sequence
  Description of Artificial Sequence: Synthetic peptide
  Seed: LRMKWMMAMKYPITA
LRMKYMMVMGYPRTA

SEQ ID NO: 249298 - protein, 15 aa, Artificial Sequence
  Description of Artificial Sequence: Synthetic peptide
  Seed: LRMKWMMAMKYPITA
LRMKYMMVMGYPSTA

SEQ ID NO: 249299 - protein, 15 aa, Artificial Sequence
  Description of Artificial Sequence: Synthetic peptide
  Seed: LRMKWMMAMKYPITA
LRMKYMMVMGYPTTA

SEQ ID NO: 249300 - protein, 15 aa, Artificial Sequence
  Description of Artificial Sequence: Synthetic peptide
  Seed: LRMKWMMAMKYPITA
LRMKYMMVMGYPVTA

SEQ ID NO: 249301 - protein, 15 aa, Artificial Sequence
  Description of Artificial Sequence: Synthetic peptide
  Seed: LRMKWMMAMKYPITA
LRMKYMMVMGYPWTA

SEQ ID NO: 249302 - protein, 15 aa, Artificial Sequence
  Description of Artificial Sequence: Synthetic peptide
  Seed: LRMKWMMAMKYPITA
LRMKYMMVMGYPYTA

SEQ ID NO: 249303 - protein, 15 aa, Artificial Sequence
  Description of Artificial Sequence: Synthetic peptide
  Seed: LRMKWMMAMKYPITA
LRMKYMMVMHYPATA

SEQ ID NO: 249304 - protein, 15 aa, Artificial Sequence
  Description of Artificial Sequence: Synthetic peptide
  Seed: LRMKWMMAMKYPITA
LRMKYMMVMHYPCTA

SEQ ID NO: 249305 - protein, 15 aa, Artificial Sequence
  Description of Artificial Sequence: Synthetic peptide
  Seed: LRMKWMMAMKYPITA
LRMKYMMVMHYPDTA

SEQ ID NO: 249306 - protein, 15 aa, Artificial Sequence
  Description of Artificial Sequence: Synthetic peptide
  Seed: LRMKWMMAMKYPITA
LRMKYMMVMHYPETA

SEQ ID NO: 249307 - protein, 15 aa, Artificial Sequence
  Description of Artificial Sequence: Synthetic peptide
  Seed: LRMKWMMAMKYPITA
LRMKYMMVMHYPFTA

SEQ ID NO: 249308 - protein, 15 aa, Artificial Sequence
  Description of Artificial Sequence: Synthetic peptide
  Seed: LRMKWMMAMKYPITA
LRMKYMMVMHYPGTA

SEQ ID NO: 249309 - protein, 15 aa, Artificial Sequence
  Description of Artificial Sequence: Synthetic peptide
  Seed: LRMKWMMAMKYPITA
LRMKYMMVMHYPHTA

SEQ ID NO: 249310 - protein, 15 aa, Artificial Sequence
  Description of Artificial Sequence: Synthetic peptide
  Seed: LRMKWMMAMKYPITA
LRMKYMMVMHYPITA

SEQ ID NO: 249311 - protein, 15 aa, Artificial Sequence
  Description of Artificial Sequence: Synthetic peptide
  Seed: LRMKWMMAMKYPITA
LRMKYMMVMHYPKTA

SEQ ID NO: 249312 - protein, 15 aa, Artificial Sequence
  Description of Artificial Sequence: Synthetic peptide
  Seed: LRMKWMMAMKYPITA
LRMKYMMVMHYPLTA

SEQ ID NO: 249313 - protein, 15 aa, Artificial Sequence
  Description of Artificial Sequence: Synthetic peptide
  Seed: LRMKWMMAMKYPITA
LRMKYMMVMHYPMTA

SEQ ID NO: 249314 - protein, 15 aa, Artificial Sequence
  Description of Artificial Sequence: Synthetic peptide
  Seed: LRMKWMMAMKYPITA
LRMKYMMVMHYPNTA

SEQ ID NO: 249315 - protein, 15 aa, Artificial Sequence
  Description of Artificial Sequence: Synthetic peptide
  Seed: LRMKWMMAMKYPITA
LRMKYMMVMHYPPTA

SEQ ID NO: 249316 - protein, 15 aa, Artificial Sequence
  Description of Artificial Sequence: Synthetic peptide
  Seed: LRMKWMMAMKYPITA
LRMKYMMVMHYPQTA

SEQ ID NO: 249317 - protein, 15 aa, Artificial Sequence
  Description of Artificial Sequence: Synthetic peptide
  Seed: LRMKWMMAMKYPITA
LRMKYMMVMHYPRTA

SEQ ID NO: 249318 - protein, 15 aa, Artificial Sequence
  Description of Artificial Sequence: Synthetic peptide
  Seed: LRMKWMMAMKYPITA
LRMKYMMVMHYPSTA

SEQ ID NO: 249319 - protein, 15 aa, Artificial Sequence
  Description of Artificial Sequence: Synthetic peptide
  Seed: LRMKWMMAMKYPITA
LRMKYMMVMHYPTTA

SEQ ID NO: 249320 - protein, 15 aa, Artificial Sequence
  Description of Artificial Sequence: Synthetic peptide
  Seed: LRMKWMMAMKYPITA
LRMKYMMVMHYPVTA

SEQ ID NO: 249321 - protein, 15 aa, Artificial Sequence
  Description of Artificial Sequence: Synthetic peptide
  Seed: LRMKWMMAMKYPITA
LRMKYMMVMHYPYTA

SEQ ID NO: 249322 - protein, 15 aa, Artificial Sequence
  Description of Artificial Sequence: Synthetic peptide
  Seed: LRMKWMMAMKYPITA
LRMKYMMVMIYPATA

SEQ ID NO: 249323 - protein, 15 aa, Artificial Sequence
  Description of Artificial Sequence: Synthetic peptide
  Seed: LRMKWMMAMKYPITA
LRMKYMMVMIYPCTA

SEQ ID NO: 249324 - protein, 15 aa, Artificial Sequence
  Description of Artificial Sequence: Synthetic peptide
  Seed: LRMKWMMAMKYPITA
LRMKYMMVMIYPDTA

SEQ ID NO: 249325 - protein, 15 aa, Artificial Sequence
  Description of Artificial Sequence: Synthetic peptide
  Seed: LRMKWMMAMKYPITA
LRMKYMMVMIYPETA

SEQ ID NO: 249326 - protein, 15 aa, Artificial Sequence
  Description of Artificial Sequence: Synthetic peptide
  Seed: LRMKWMMAMKYPITA
LRMKYMMVMIYPGTA

SEQ ID NO: 249327 - protein, 15 aa, Artificial Sequence
  Description of Artificial Sequence: Synthetic peptide
  Seed: LRMKWMMAMKYPITA
LRMKYMMVMIYPHTA

SEQ ID NO: 249328 - protein, 15 aa, Artificial Sequence
  Description of Artificial Sequence: Synthetic peptide
  Seed: LRMKWMMAMKYPITA
LRMKYMMVMIYPITA

SEQ ID NO: 249329 - protein, 15 aa, Artificial Sequence
  Description of Artificial Sequence: Synthetic peptide
  Seed: LRMKWMMAMKYPITA
LRMKYMMVMIYPLTA

SEQ ID NO: 249330 - protein, 15 aa, Artificial Sequence
  Description of Artificial Sequence: Synthetic peptide
  Seed: LRMKWMMAMKYPITA
LRMKYMMVMIYPMTA

SEQ ID NO: 249331 - protein, 15 aa, Artificial Sequence
  Description of Artificial Sequence: Synthetic peptide
  Seed: LRMKWMMAMKYPITA
LRMKYMMVMIYPNTA

SEQ ID NO: 249332 - protein, 15 aa, Artificial Sequence
  Description of Artificial Sequence: Synthetic peptide
  Seed: LRMKWMMAMKYPITA
LRMKYMMVMIYPPTA

SEQ ID NO: 249333 - protein, 15 aa, Artificial Sequence
  Description of Artificial Sequence: Synthetic peptide
  Seed: LRMKWMMAMKYPITA
LRMKYMMVMIYPQTA

SEQ ID NO: 249334 - protein, 15 aa, Artificial Sequence
  Description of Artificial Sequence: Synthetic peptide
  Seed: LRMKWMMAMKYPITA
LRMKYMMVMIYPRTA

SEQ ID NO: 249335 - protein, 15 aa, Artificial Sequence
  Description of Artificial Sequence: Synthetic peptide
  Seed: LRMKWMMAMKYPITA
LRMKYMMVMIYPSTA

SEQ ID NO: 249336 - protein, 15 aa, Artificial Sequence
  Description of Artificial Sequence: Synthetic peptide
  Seed: LRMKWMMAMKYPITA
LRMKYMMVMIYPTTA

SEQ ID NO: 249337 - protein, 15 aa, Artificial Sequence
  Description of Artificial Sequence: Synthetic peptide
  Seed: LRMKWMMAMKYPITA
LRMKYMMVMIYPVTA

SEQ ID NO: 249338 - protein, 15 aa, Artificial Sequence
  Description of Artificial Sequence: Synthetic peptide
  Seed: LRMKWMMAMKYPITA
LRMKYMMVMIYPYTA

SEQ ID NO: 249339 - protein, 15 aa, Artificial Sequence
  Description of Artificial Sequence: Synthetic peptide
  Seed: LRMKWMMAMKYPITA
LRMKYMMVMKYPATA

SEQ ID NO: 249340 - protein, 15 aa, Artificial Sequence
  Description of Artificial Sequence: Synthetic peptide
  Seed: LRMKWMMAMKYPITA
LRMKYMMVMKYPCTA

SEQ ID NO: 249341 - protein, 15 aa, Artificial Sequence
  Description of Artificial Sequence: Synthetic peptide
  Seed: LRMKWMMAMKYPITA
LRMKYMMVMKYPETA

SEQ ID NO: 249342 - protein, 15 aa, Artificial Sequence
  Description of Artificial Sequence: Synthetic peptide
  Seed: LRMKWMMAMKYPITA
LRMKYMMVMKYPFTA

SEQ ID NO: 249343 - protein, 15 aa, Artificial Sequence
  Description of Artificial Sequence: Synthetic peptide
  Seed: LRMKWMMAMKYPITA
LRMKYMMVMKYPGTA

SEQ ID NO: 249344 - protein, 15 aa, Artificial Sequence
  Description of Artificial Sequence: Synthetic peptide
  Seed: LRMKWMMAMKYPITA
LRMKYMMVMKYPHTA

SEQ ID NO: 249345 - protein, 15 aa, Artificial Sequence
  Description of Artificial Sequence: Synthetic peptide
  Seed: LRMKWMMAMKYPITA
LRMKYMMVMKYPITA

SEQ ID NO: 249346 - protein, 15 aa, Artificial Sequence
  Description of Artificial Sequence: Synthetic peptide
  Seed: LRMKWMMAMKYPITA
LRMKYMMVMKYPKTA

SEQ ID NO: 249347 - protein, 15 aa, Artificial Sequence
  Description of Artificial Sequence: Synthetic peptide
  Seed: LRMKWMMAMKYPITA
LRMKYMMVMKYPLTA

SEQ ID NO: 249348 - protein, 15 aa, Artificial Sequence
  Description of Artificial Sequence: Synthetic peptide
  Seed: LRMKWMMAMKYPITA
LRMKYMMVMKYPMTA

SEQ ID NO: 249349 - protein, 15 aa, Artificial Sequence
  Description of Artificial Sequence: Synthetic peptide
  Seed: LRMKWMMAMKYPITA
LRMKYMMVMKYPNTA

SEQ ID NO: 249350 - protein, 15 aa, Artificial Sequence
  Description of Artificial Sequence: Synthetic peptide
  Seed: LRMKWMMAMKYPITA
LRMKYMMVMKYPPTA

SEQ ID NO: 249351 - protein, 15 aa, Artificial Sequence
  Description of Artificial Sequence: Synthetic peptide
  Seed: LRMKWMMAMKYPITA
LRMKYMMVMKYPQTA

SEQ ID NO: 249352 - protein, 15 aa, Artificial Sequence
  Description of Artificial Sequence: Synthetic peptide
  Seed: LRMKWMMAMKYPITA
LRMKYMMVMKYPRTA

SEQ ID NO: 249353 - protein, 15 aa, Artificial Sequence
  Description of Artificial Sequence: Synthetic peptide
  Seed: LRMKWMMAMKYPITA
LRMKYMMVMKYPSTA

SEQ ID NO: 249354 - protein, 15 aa, Artificial Sequence
  Description of Artificial Sequence: Synthetic peptide
  Seed: LRMKWMMAMKYPITA
LRMKYMMVMKYPTTA

SEQ ID NO: 249355 - protein, 15 aa, Artificial Sequence
  Description of Artificial Sequence: Synthetic peptide
  Seed: LRMKWMMAMKYPITA
LRMKYMMVMKYPVTA

SEQ ID NO: 249356 - protein, 15 aa, Artificial Sequence
  Description of Artificial Sequence: Synthetic peptide
  Seed: LRMKWMMAMKYPITA
LRMKYMMVMKYPWTA

SEQ ID NO: 249357 - protein, 15 aa, Artificial Sequence
  Description of Artificial Sequence: Synthetic peptide
  Seed: LRMKWMMAMKYPITA
LRMKYMMVMKYPYTA

SEQ ID NO: 249358 - protein, 15 aa, Artificial Sequence
  Description of Artificial Sequence: Synthetic peptide
  Seed: LRMKWMMAMKYPITA
LRMKYMMVMLYPCTA

SEQ ID NO: 249359 - protein, 15 aa, Artificial Sequence
  Description of Artificial Sequence: Synthetic peptide
  Seed: LRMKWMMAMKYPITA
LRMKYMMVMLYPDTA

SEQ ID NO: 249360 - protein, 15 aa, Artificial Sequence
  Description of Artificial Sequence: Synthetic peptide
  Seed: LRMKWMMAMKYPITA
LRMKYMMVMLYPGTA

SEQ ID NO: 249361 - protein, 15 aa, Artificial Sequence
  Description of Artificial Sequence: Synthetic peptide
  Seed: LRMKWMMAMKYPITA
LRMKYMMVMLYPMTA

SEQ ID NO: 249362 - protein, 15 aa, Artificial Sequence
  Description of Artificial Sequence: Synthetic peptide
  Seed: LRMKWMMAMKYPITA
LRMKYMMVMLYPSTA

SEQ ID NO: 249363 - protein, 15 aa, Artificial Sequence
  Description of Artificial Sequence: Synthetic peptide
  Seed: LRMKWMMAMKYPITA
LRMKYMMVMMYPATA

SEQ ID NO: 249364 - protein, 15 aa, Artificial Sequence
  Description of Artificial Sequence: Synthetic peptide
  Seed: LRMKWMMAMKYPITA
LRMKYMMVMMYPCTA

SEQ ID NO: 249365 - protein, 15 aa, Artificial Sequence
  Description of Artificial Sequence: Synthetic peptide
  Seed: LRMKWMMAMKYPITA
LRMKYMMVMMYPDTA

SEQ ID NO: 249366 - protein, 15 aa, Artificial Sequence
  Description of Artificial Sequence: Synthetic peptide
  Seed: LRMKWMMAMKYPITA
LRMKYMMVMMYPGTA

SEQ ID NO: 249367 - protein, 15 aa, Artificial Sequence
  Description of Artificial Sequence: Synthetic peptide
  Seed: LRMKWMMAMKYPITA
LRMKYMMVMMYPITA

SEQ ID NO: 249368 - protein, 15 aa, Artificial Sequence
  Description of Artificial Sequence: Synthetic peptide
  Seed: LRMKWMMAMKYPITA
LRMKYMMVMMYPLTA

SEQ ID NO: 249369 - protein, 15 aa, Artificial Sequence
  Description of Artificial Sequence: Synthetic peptide
  Seed: LRMKWMMAMKYPITA
LRMKYMMVMMYPMTA

SEQ ID NO: 249370 - protein, 15 aa, Artificial Sequence
  Description of Artificial Sequence: Synthetic peptide
  Seed: LRMKWMMAMKYPITA
LRMKYMMVMMYPRTA

SEQ ID NO: 249371 - protein, 15 aa, Artificial Sequence
  Description of Artificial Sequence: Synthetic peptide
  Seed: LRMKWMMAMKYPITA
LRMKYMMVMMYPSTA

SEQ ID NO: 249372 - protein, 15 aa, Artificial Sequence
  Description of Artificial Sequence: Synthetic peptide
  Seed: LRMKWMMAMKYPITA
LRMKYMMVMMYPVTA

SEQ ID NO: 249373 - protein, 15 aa, Artificial Sequence
  Description of Artificial Sequence: Synthetic peptide
  Seed: LRMKWMMAMKYPITA
LRMKYMMVMNYPATA

SEQ ID NO: 249374 - protein, 15 aa, Artificial Sequence
  Description of Artificial Sequence: Synthetic peptide
  Seed: LRMKWMMAMKYPITA
LRMKYMMVMNYPCTA

SEQ ID NO: 249375 - protein, 15 aa, Artificial Sequence
  Description of Artificial Sequence: Synthetic peptide
  Seed: LRMKWMMAMKYPITA
LRMKYMMVMNYPDTA

SEQ ID NO: 249376 - protein, 15 aa, Artificial Sequence
  Description of Artificial Sequence: Synthetic peptide
  Seed: LRMKWMMAMKYPITA
LRMKYMMVMNYPETA

SEQ ID NO: 249377 - protein, 15 aa, Artificial Sequence
  Description of Artificial Sequence: Synthetic peptide
  Seed: LRMKWMMAMKYPITA
LRMKYMMVMNYPFTA

SEQ ID NO: 249378 - protein, 15 aa, Artificial Sequence
  Description of Artificial Sequence: Synthetic peptide
  Seed: LRMKWMMAMKYPITA
LRMKYMMVMNYPGTA

SEQ ID NO: 249379 - protein, 15 aa, Artificial Sequence
  Description of Artificial Sequence: Synthetic peptide
  Seed: LRMKWMMAMKYPITA
LRMKYMMVMNYPHTA

SEQ ID NO: 249380 - protein, 15 aa, Artificial Sequence
  Description of Artificial Sequence: Synthetic peptide
  Seed: LRMKWMMAMKYPITA
LRMKYMMVMNYPITA

SEQ ID NO: 249381 - protein, 15 aa, Artificial Sequence
  Description of Artificial Sequence: Synthetic peptide
  Seed: LRMKWMMAMKYPITA
LRMKYMMVMNYPKTA

SEQ ID NO: 249382 - protein, 15 aa, Artificial Sequence
  Description of Artificial Sequence: Synthetic peptide
  Seed: LRMKWMMAMKYPITA
LRMKYMMVMNYPLTA

SEQ ID NO: 249383 - protein, 15 aa, Artificial Sequence
  Description of Artificial Sequence: Synthetic peptide
  Seed: LRMKWMMAMKYPITA
LRMKYMMVMNYPMTA

SEQ ID NO: 249384 - protein, 15 aa, Artificial Sequence
  Description of Artificial Sequence: Synthetic peptide
  Seed: LRMKWMMAMKYPITA
LRMKYMMVMNYPNTA

SEQ ID NO: 249385 - protein, 15 aa, Artificial Sequence
  Description of Artificial Sequence: Synthetic peptide
  Seed: LRMKWMMAMKYPITA
LRMKYMMVMNYPPTA

SEQ ID NO: 249386 - protein, 15 aa, Artificial Sequence
  Description of Artificial Sequence: Synthetic peptide
  Seed: LRMKWMMAMKYPITA
LRMKYMMVMNYPQTA

SEQ ID NO: 249387 - protein, 15 aa, Artificial Sequence
  Description of Artificial Sequence: Synthetic peptide
  Seed: LRMKWMMAMKYPITA
LRMKYMMVMNYPRTA

SEQ ID NO: 249388 - protein, 15 aa, Artificial Sequence
  Description of Artificial Sequence: Synthetic peptide
  Seed: LRMKWMMAMKYPITA
LRMKYMMVMNYPSTA

SEQ ID NO: 249389 - protein, 15 aa, Artificial Sequence
  Description of Artificial Sequence: Synthetic peptide
  Seed: LRMKWMMAMKYPITA
LRMKYMMVMNYPTTA

SEQ ID NO: 249390 - protein, 15 aa, Artificial Sequence
  Description of Artificial Sequence: Synthetic peptide
  Seed: LRMKWMMAMKYPITA
LRMKYMMVMNYPVTA

SEQ ID NO: 249391 - protein, 15 aa, Artificial Sequence
  Description of Artificial Sequence: Synthetic peptide
  Seed: LRMKWMMAMKYPITA
LRMKYMMVMNYPWTA

SEQ ID NO: 249392 - protein, 15 aa, Artificial Sequence
  Description of Artificial Sequence: Synthetic peptide
  Seed: LRMKWMMAMKYPITA
LRMKYMMVMNYPYTA

SEQ ID NO: 249393 - protein, 15 aa, Artificial Sequence
  Description of Artificial Sequence: Synthetic peptide
  Seed: LRMKWMMAMKYPITA
LRMKYMMVMPYPATA

SEQ ID NO: 249394 - protein, 15 aa, Artificial Sequence
  Description of Artificial Sequence: Synthetic peptide
  Seed: LRMKWMMAMKYPITA
LRMKYMMVMPYPCTA

SEQ ID NO: 249395 - protein, 15 aa, Artificial Sequence
  Description of Artificial Sequence: Synthetic peptide
  Seed: LRMKWMMAMKYPITA
LRMKYMMVMPYPDTA

SEQ ID NO: 249396 - protein, 15 aa, Artificial Sequence
  Description of Artificial Sequence: Synthetic peptide
  Seed: LRMKWMMAMKYPITA
LRMKYMMVMPYPETA

SEQ ID NO: 249397 - protein, 15 aa, Artificial Sequence
  Description of Artificial Sequence: Synthetic peptide
  Seed: LRMKWMMAMKYPITA
LRMKYMMVMPYPFTA

SEQ ID NO: 249398 - protein, 15 aa, Artificial Sequence
  Description of Artificial Sequence: Synthetic peptide
  Seed: LRMKWMMAMKYPITA
LRMKYMMVMPYPGTA

SEQ ID NO: 249399 - protein, 15 aa, Artificial Sequence
  Description of Artificial Sequence: Synthetic peptide
  Seed: LRMKWMMAMKYPITA
LRMKYMMVMPYPHTA

SEQ ID NO: 249400 - protein, 15 aa, Artificial Sequence
  Description of Artificial Sequence: Synthetic peptide
  Seed: LRMKWMMAMKYPITA
LRMKYMMVMPYPITA

SEQ ID NO: 249401 - protein, 15 aa, Artificial Sequence
  Description of Artificial Sequence: Synthetic peptide
  Seed: LRMKWMMAMKYPITA
LRMKYMMVMPYPKTA

SEQ ID NO: 249402 - protein, 15 aa, Artificial Sequence
  Description of Artificial Sequence: Synthetic peptide
  Seed: LRMKWMMAMKYPITA
LRMKYMMVMPYPLTA

SEQ ID NO: 249403 - protein, 15 aa, Artificial Sequence
  Description of Artificial Sequence: Synthetic peptide
  Seed: LRMKWMMAMKYPITA
LRMKYMMVMPYPMTA

SEQ ID NO: 249404 - protein, 15 aa, Artificial Sequence
  Description of Artificial Sequence: Synthetic peptide
  Seed: LRMKWMMAMKYPITA
LRMKYMMVMPYPNTA

SEQ ID NO: 249405 - protein, 15 aa, Artificial Sequence
  Description of Artificial Sequence: Synthetic peptide
  Seed: LRMKWMMAMKYPITA
LRMKYMMVMPYPPTA

SEQ ID NO: 249406 - protein, 15 aa, Artificial Sequence
  Description of Artificial Sequence: Synthetic peptide
  Seed: LRMKWMMAMKYPITA
LRMKYMMVMPYPQTA

SEQ ID NO: 249407 - protein, 15 aa, Artificial Sequence
  Description of Artificial Sequence: Synthetic peptide
  Seed: LRMKWMMAMKYPITA
LRMKYMMVMPYPRTA

SEQ ID NO: 249408 - protein, 15 aa, Artificial Sequence
  Description of Artificial Sequence: Synthetic peptide
  Seed: LRMKWMMAMKYPITA
LRMKYMMVMPYPSTA

SEQ ID NO: 249409 - protein, 15 aa, Artificial Sequence
  Description of Artificial Sequence: Synthetic peptide
  Seed: LRMKWMMAMKYPITA
LRMKYMMVMPYPTTA

SEQ ID NO: 249410 - protein, 15 aa, Artificial Sequence
  Description of Artificial Sequence: Synthetic peptide
  Seed: LRMKWMMAMKYPITA
LRMKYMMVMPYPVTA

SEQ ID NO: 249411 - protein, 15 aa, Artificial Sequence
  Description of Artificial Sequence: Synthetic peptide
  Seed: LRMKWMMAMKYPITA
LRMKYMMVMPYPWTA

SEQ ID NO: 249412 - protein, 15 aa, Artificial Sequence
  Description of Artificial Sequence: Synthetic peptide
  Seed: LRMKWMMAMKYPITA
LRMKYMMVMPYPYTA

SEQ ID NO: 249413 - protein, 15 aa, Artificial Sequence
  Description of Artificial Sequence: Synthetic peptide
  Seed: LRMKWMMAMKYPITA
LRMKYMMVMQYPATA

SEQ ID NO: 249414 - protein, 15 aa, Artificial Sequence
  Description of Artificial Sequence: Synthetic peptide
  Seed: LRMKWMMAMKYPITA
LRMKYMMVMQYPCTA

SEQ ID NO: 249415 - protein, 15 aa, Artificial Sequence
  Description of Artificial Sequence: Synthetic peptide
  Seed: LRMKWMMAMKYPITA
LRMKYMMVMQYPDTA

SEQ ID NO: 249416 - protein, 15 aa, Artificial Sequence
  Description of Artificial Sequence: Synthetic peptide
  Seed: LRMKWMMAMKYPITA
LRMKYMMVMQYPETA

SEQ ID NO: 249417 - protein, 15 aa, Artificial Sequence
  Description of Artificial Sequence: Synthetic peptide
  Seed: LRMKWMMAMKYPITA
LRMKYMMVMQYPFTA

SEQ ID NO: 249418 - protein, 15 aa, Artificial Sequence
  Description of Artificial Sequence: Synthetic peptide
  Seed: LRMKWMMAMKYPITA
LRMKYMMVMQYPGTA

SEQ ID NO: 249419 - protein, 15 aa, Artificial Sequence
  Description of Artificial Sequence: Synthetic peptide
  Seed: LRMKWMMAMKYPITA
LRMKYMMVMQYPITA

SEQ ID NO: 249420 - protein, 15 aa, Artificial Sequence
  Description of Artificial Sequence: Synthetic peptide
  Seed: LRMKWMMAMKYPITA
LRMKYMMVMQYPKTA

SEQ ID NO: 249421 - protein, 15 aa, Artificial Sequence
  Description of Artificial Sequence: Synthetic peptide
  Seed: LRMKWMMAMKYPITA
LRMKYMMVMQYPLTA

SEQ ID NO: 249422 - protein, 15 aa, Artificial Sequence
  Description of Artificial Sequence: Synthetic peptide
  Seed: LRMKWMMAMKYPITA
LRMKYMMVMQYPMTA

SEQ ID NO: 249423 - protein, 15 aa, Artificial Sequence
  Description of Artificial Sequence: Synthetic peptide
  Seed: LRMKWMMAMKYPITA
LRMKYMMVMQYPNTA

SEQ ID NO: 249424 - protein, 15 aa, Artificial Sequence
  Description of Artificial Sequence: Synthetic peptide
  Seed: LRMKWMMAMKYPITA
LRMKYMMVMQYPPTA

SEQ ID NO: 249425 - protein, 15 aa, Artificial Sequence
  Description of Artificial Sequence: Synthetic peptide
  Seed: LRMKWMMAMKYPITA
LRMKYMMVMQYPQTA

SEQ ID NO: 249426 - protein, 15 aa, Artificial Sequence
  Description of Artificial Sequence: Synthetic peptide
  Seed: LRMKWMMAMKYPITA
LRMKYMMVMQYPRTA

SEQ ID NO: 249427 - protein, 15 aa, Artificial Sequence
  Description of Artificial Sequence: Synthetic peptide
  Seed: LRMKWMMAMKYPITA
LRMKYMMVMQYPSTA

SEQ ID NO: 249428 - protein, 15 aa, Artificial Sequence
  Description of Artificial Sequence: Synthetic peptide
  Seed: LRMKWMMAMKYPITA
LRMKYMMVMQYPTTA

SEQ ID NO: 249429 - protein, 15 aa, Artificial Sequence
  Description of Artificial Sequence: Synthetic peptide
  Seed: LRMKWMMAMKYPITA
LRMKYMMVMQYPVTA

SEQ ID NO: 249430 - protein, 15 aa, Artificial Sequence
  Description of Artificial Sequence: Synthetic peptide
  Seed: LRMKWMMAMKYPITA
LRMKYMMVMQYPYTA

SEQ ID NO: 249431 - protein, 15 aa, Artificial Sequence
  Description of Artificial Sequence: Synthetic peptide
  Seed: LRMKWMMAMKYPITA
LRMKYMMVMRYPATA

SEQ ID NO: 249432 - protein, 15 aa, Artificial Sequence
  Description of Artificial Sequence: Synthetic peptide
  Seed: LRMKWMMAMKYPITA
LRMKYMMVMRYPCTA

SEQ ID NO: 249433 - protein, 15 aa, Artificial Sequence
  Description of Artificial Sequence: Synthetic peptide
  Seed: LRMKWMMAMKYPITA
LRMKYMMVMRYPDTA

SEQ ID NO: 249434 - protein, 15 aa, Artificial Sequence
  Description of Artificial Sequence: Synthetic peptide
  Seed: LRMKWMMAMKYPITA
LRMKYMMVMRYPETA

SEQ ID NO: 249435 - protein, 15 aa, Artificial Sequence
  Description of Artificial Sequence: Synthetic peptide
  Seed: LRMKWMMAMKYPITA
LRMKYMMVMRYPFTA

SEQ ID NO: 249436 - protein, 15 aa, Artificial Sequence
  Description of Artificial Sequence: Synthetic peptide
  Seed: LRMKWMMAMKYPITA
LRMKYMMVMRYPGTA

SEQ ID NO: 249437 - protein, 15 aa, Artificial Sequence
  Description of Artificial Sequence: Synthetic peptide
  Seed: LRMKWMMAMKYPITA
LRMKYMMVMRYPHTA

SEQ ID NO: 249438 - protein, 15 aa, Artificial Sequence
  Description of Artificial Sequence: Synthetic peptide
  Seed: LRMKWMMAMKYPITA
LRMKYMMVMRYPITA

SEQ ID NO: 249439 - protein, 15 aa, Artificial Sequence
  Description of Artificial Sequence: Synthetic peptide
  Seed: LRMKWMMAMKYPITA
LRMKYMMVMRYPKTA

SEQ ID NO: 249440 - protein, 15 aa, Artificial Sequence
  Description of Artificial Sequence: Synthetic peptide
  Seed: LRMKWMMAMKYPITA
LRMKYMMVMRYPLTA

SEQ ID NO: 249441 - protein, 15 aa, Artificial Sequence
  Description of Artificial Sequence: Synthetic peptide
  Seed: LRMKWMMAMKYPITA
LRMKYMMVMRYPMTA

SEQ ID NO: 249442 - protein, 15 aa, Artificial Sequence
  Description of Artificial Sequence: Synthetic peptide
  Seed: LRMKWMMAMKYPITA
LRMKYMMVMRYPNTA

SEQ ID NO: 249443 - protein, 15 aa, Artificial Sequence
  Description of Artificial Sequence: Synthetic peptide
  Seed: LRMKWMMAMKYPITA
LRMKYMMVMRYPPTA

SEQ ID NO: 249444 - protein, 15 aa, Artificial Sequence
  Description of Artificial Sequence: Synthetic peptide
  Seed: LRMKWMMAMKYPITA
LRMKYMMVMRYPQTA

SEQ ID NO: 249445 - protein, 15 aa, Artificial Sequence
  Description of Artificial Sequence: Synthetic peptide
  Seed: LRMKWMMAMKYPITA
LRMKYMMVMRYPRTA

SEQ ID NO: 249446 - protein, 15 aa, Artificial Sequence
  Description of Artificial Sequence: Synthetic peptide
  Seed: LRMKWMMAMKYPITA
LRMKYMMVMRYPSTA

SEQ ID NO: 249447 - protein, 15 aa, Artificial Sequence
  Description of Artificial Sequence: Synthetic peptide
  Seed: LRMKWMMAMKYPITA
LRMKYMMVMRYPTTA

SEQ ID NO: 249448 - protein, 15 aa, Artificial Sequence
  Description of Artificial Sequence: Synthetic peptide
  Seed: LRMKWMMAMKYPITA
LRMKYMMVMRYPVTA

SEQ ID NO: 249449 - protein, 15 aa, Artificial Sequence
  Description of Artificial Sequence: Synthetic peptide
  Seed: LRMKWMMAMKYPITA
LRMKYMMVMRYPWTA

SEQ ID NO: 249450 - protein, 15 aa, Artificial Sequence
  Description of Artificial Sequence: Synthetic peptide
  Seed: LRMKWMMAMKYPITA
LRMKYMMVMRYPYTA

SEQ ID NO: 249451 - protein, 15 aa, Artificial Sequence
  Description of Artificial Sequence: Synthetic peptide
  Seed: LRMKWMMAMKYPITA
LRMKYMMVMSYPATA

SEQ ID NO: 249452 - protein, 15 aa, Artificial Sequence
  Description of Artificial Sequence: Synthetic peptide
  Seed: LRMKWMMAMKYPITA
LRMKYMMVMSYPCTA

SEQ ID NO: 249453 - protein, 15 aa, Artificial Sequence
  Description of Artificial Sequence: Synthetic peptide
  Seed: LRMKWMMAMKYPITA
LRMKYMMVMSYPDTA

SEQ ID NO: 249454 - protein, 15 aa, Artificial Sequence
  Description of Artificial Sequence: Synthetic peptide
  Seed: LRMKWMMAMKYPITA
LRMKYMMVMSYPETA

SEQ ID NO: 249455 - protein, 15 aa, Artificial Sequence
  Description of Artificial Sequence: Synthetic peptide
  Seed: LRMKWMMAMKYPITA
LRMKYMMVMSYPFTA

SEQ ID NO: 249456 - protein, 15 aa, Artificial Sequence
  Description of Artificial Sequence: Synthetic peptide
  Seed: LRMKWMMAMKYPITA
LRMKYMMVMSYPGTA

SEQ ID NO: 249457 - protein, 15 aa, Artificial Sequence
  Description of Artificial Sequence: Synthetic peptide
  Seed: LRMKWMMAMKYPITA
LRMKYMMVMSYPHTA

SEQ ID NO: 249458 - protein, 15 aa, Artificial Sequence
  Description of Artificial Sequence: Synthetic peptide
  Seed: LRMKWMMAMKYPITA
LRMKYMMVMSYPITA

SEQ ID NO: 249459 - protein, 15 aa, Artificial Sequence
  Description of Artificial Sequence: Synthetic peptide
  Seed: LRMKWMMAMKYPITA
LRMKYMMVMSYPKTA

SEQ ID NO: 249460 - protein, 15 aa, Artificial Sequence
  Description of Artificial Sequence: Synthetic peptide
  Seed: LRMKWMMAMKYPITA
LRMKYMMVMSYPLTA

SEQ ID NO: 249461 - protein, 15 aa, Artificial Sequence
  Description of Artificial Sequence: Synthetic peptide
  Seed: LRMKWMMAMKYPITA
LRMKYMMVMSYPMTA

SEQ ID NO: 249462 - protein, 15 aa, Artificial Sequence
  Description of Artificial Sequence: Synthetic peptide
  Seed: LRMKWMMAMKYPITA
LRMKYMMVMSYPNTA

SEQ ID NO: 249463 - protein, 15 aa, Artificial Sequence
  Description of Artificial Sequence: Synthetic peptide
  Seed: LRMKWMMAMKYPITA
LRMKYMMVMSYPPTA

SEQ ID NO: 249464 - protein, 15 aa, Artificial Sequence
  Description of Artificial Sequence: Synthetic peptide
  Seed: LRMKWMMAMKYPITA
LRMKYMMVMSYPQTA

SEQ ID NO: 249465 - protein, 15 aa, Artificial Sequence
  Description of Artificial Sequence: Synthetic peptide
  Seed: LRMKWMMAMKYPITA
LRMKYMMVMSYPRTA

SEQ ID NO: 249466 - protein, 15 aa, Artificial Sequence
  Description of Artificial Sequence: Synthetic peptide
  Seed: LRMKWMMAMKYPITA
LRMKYMMVMSYPSTA

SEQ ID NO: 249467 - protein, 15 aa, Artificial Sequence
  Description of Artificial Sequence: Synthetic peptide
  Seed: LRMKWMMAMKYPITA
LRMKYMMVMSYPTTA

SEQ ID NO: 249468 - protein, 15 aa, Artificial Sequence
  Description of Artificial Sequence: Synthetic peptide
  Seed: LRMKWMMAMKYPITA
LRMKYMMVMSYPVTA

SEQ ID NO: 249469 - protein, 15 aa, Artificial Sequence
  Description of Artificial Sequence: Synthetic peptide
  Seed: LRMKWMMAMKYPITA
LRMKYMMVMSYPWTA

SEQ ID NO: 249470 - protein, 15 aa, Artificial Sequence
  Description of Artificial Sequence: Synthetic peptide
  Seed: LRMKWMMAMKYPITA
LRMKYMMVMSYPYTA

SEQ ID NO: 249471 - protein, 15 aa, Artificial Sequence
  Description of Artificial Sequence: Synthetic peptide
  Seed: LRMKWMMAMKYPITA
LRMKYMMVMTYPATA

SEQ ID NO: 249472 - protein, 15 aa, Artificial Sequence
  Description of Artificial Sequence: Synthetic peptide
  Seed: LRMKWMMAMKYPITA
LRMKYMMVMTYPCTA

SEQ ID NO: 249473 - protein, 15 aa, Artificial Sequence
  Description of Artificial Sequence: Synthetic peptide
  Seed: LRMKWMMAMKYPITA
LRMKYMMVMTYPDTA

SEQ ID NO: 249474 - protein, 15 aa, Artificial Sequence
  Description of Artificial Sequence: Synthetic peptide
  Seed: LRMKWMMAMKYPITA
LRMKYMMVMTYPETA

SEQ ID NO: 249475 - protein, 15 aa, Artificial Sequence
  Description of Artificial Sequence: Synthetic peptide
  Seed: LRMKWMMAMKYPITA
LRMKYMMVMTYPFTA

SEQ ID NO: 249476 - protein, 15 aa, Artificial Sequence
  Description of Artificial Sequence: Synthetic peptide
  Seed: LRMKWMMAMKYPITA
LRMKYMMVMTYPGTA

SEQ ID NO: 249477 - protein, 15 aa, Artificial Sequence
  Description of Artificial Sequence: Synthetic peptide
  Seed: LRMKWMMAMKYPITA
LRMKYMMVMTYPHTA

SEQ ID NO: 249478 - protein, 15 aa, Artificial Sequence
  Description of Artificial Sequence: Synthetic peptide
  Seed: LRMKWMMAMKYPITA
LRMKYMMVMTYPITA

SEQ ID NO: 249479 - protein, 15 aa, Artificial Sequence
  Description of Artificial Sequence: Synthetic peptide
  Seed: LRMKWMMAMKYPITA
LRMKYMMVMTYPKTA

SEQ ID NO: 249480 - protein, 15 aa, Artificial Sequence
  Description of Artificial Sequence: Synthetic peptide
  Seed: LRMKWMMAMKYPITA
LRMKYMMVMTYPLTA

SEQ ID NO: 249481 - protein, 15 aa, Artificial Sequence
  Description of Artificial Sequence: Synthetic peptide
  Seed: LRMKWMMAMKYPITA
LRMKYMMVMTYPMTA

SEQ ID NO: 249482 - protein, 15 aa, Artificial Sequence
  Description of Artificial Sequence: Synthetic peptide
  Seed: LRMKWMMAMKYPITA
LRMKYMMVMTYPNTA

SEQ ID NO: 249483 - protein, 15 aa, Artificial Sequence
  Description of Artificial Sequence: Synthetic peptide
  Seed: LRMKWMMAMKYPITA
LRMKYMMVMTYPPTA

SEQ ID NO: 249484 - protein, 15 aa, Artificial Sequence
  Description of Artificial Sequence: Synthetic peptide
  Seed: LRMKWMMAMKYPITA
LRMKYMMVMTYPQTA

SEQ ID NO: 249485 - protein, 15 aa, Artificial Sequence
  Description of Artificial Sequence: Synthetic peptide
  Seed: LRMKWMMAMKYPITA
LRMKYMMVMTYPRTA

SEQ ID NO: 249486 - protein, 15 aa, Artificial Sequence
  Description of Artificial Sequence: Synthetic peptide
  Seed: LRMKWMMAMKYPITA
LRMKYMMVMTYPSTA

SEQ ID NO: 249487 - protein, 15 aa, Artificial Sequence
  Description of Artificial Sequence: Synthetic peptide
  Seed: LRMKWMMAMKYPITA
LRMKYMMVMTYPTTA

SEQ ID NO: 249488 - protein, 15 aa, Artificial Sequence
  Description of Artificial Sequence: Synthetic peptide
  Seed: LRMKWMMAMKYPITA
LRMKYMMVMTYPVTA

SEQ ID NO: 249489 - protein, 15 aa, Artificial Sequence
  Description of Artificial Sequence: Synthetic peptide
  Seed: LRMKWMMAMKYPITA
LRMKYMMVMTYPWTA

SEQ ID NO: 249490 - protein, 15 aa, Artificial Sequence
  Description of Artificial Sequence: Synthetic peptide
  Seed: LRMKWMMAMKYPITA
LRMKYMMVMTYPYTA

SEQ ID NO: 249491 - protein, 15 aa, Artificial Sequence
  Description of Artificial Sequence: Synthetic peptide
  Seed: LRMKWMMAMKYPITA
LRMKYMMVMVYPATA

SEQ ID NO: 249492 - protein, 15 aa, Artificial Sequence
  Description of Artificial Sequence: Synthetic peptide
  Seed: LRMKWMMAMKYPITA
LRMKYMMVMVYPCTA

SEQ ID NO: 249493 - protein, 15 aa, Artificial Sequence
  Description of Artificial Sequence: Synthetic peptide
  Seed: LRMKWMMAMKYPITA
LRMKYMMVMVYPDTA

SEQ ID NO: 249494 - protein, 15 aa, Artificial Sequence
  Description of Artificial Sequence: Synthetic peptide
  Seed: LRMKWMMAMKYPITA
LRMKYMMVMVYPETA

SEQ ID NO: 249495 - protein, 15 aa, Artificial Sequence
  Description of Artificial Sequence: Synthetic peptide
  Seed: LRMKWMMAMKYPITA
LRMKYMMVMVYPFTA

SEQ ID NO: 249496 - protein, 15 aa, Artificial Sequence
  Description of Artificial Sequence: Synthetic peptide
  Seed: LRMKWMMAMKYPITA
LRMKYMMVMVYPGTA

SEQ ID NO: 249497 - protein, 15 aa, Artificial Sequence
  Description of Artificial Sequence: Synthetic peptide
  Seed: LRMKWMMAMKYPITA
LRMKYMMVMVYPHTA

SEQ ID NO: 249498 - protein, 15 aa, Artificial Sequence
  Description of Artificial Sequence: Synthetic peptide
  Seed: LRMKWMMAMKYPITA
LRMKYMMVMVYPITA

SEQ ID NO: 249499 - protein, 15 aa, Artificial Sequence
  Description of Artificial Sequence: Synthetic peptide
  Seed: LRMKWMMAMKYPITA
LRMKYMMVMVYPKTA

SEQ ID NO: 249500 - protein, 15 aa, Artificial Sequence
  Description of Artificial Sequence: Synthetic peptide
  Seed: LRMKWMMAMKYPITA
LRMKYMMVMVYPLTA

SEQ ID NO: 249501 - protein, 15 aa, Artificial Sequence
  Description of Artificial Sequence: Synthetic peptide
  Seed: LRMKWMMAMKYPITA
LRMKYMMVMVYPMTA

SEQ ID NO: 249502 - protein, 15 aa, Artificial Sequence
  Description of Artificial Sequence: Synthetic peptide
  Seed: LRMKWMMAMKYPITA
LRMKYMMVMVYPNTA

SEQ ID NO: 249503 - protein, 15 aa, Artificial Sequence
  Description of Artificial Sequence: Synthetic peptide
  Seed: LRMKWMMAMKYPITA
LRMKYMMVMVYPPTA

SEQ ID NO: 249504 - protein, 15 aa, Artificial Sequence
  Description of Artificial Sequence: Synthetic peptide
  Seed: LRMKWMMAMKYPITA
LRMKYMMVMVYPQTA

SEQ ID NO: 249505 - protein, 15 aa, Artificial Sequence
  Description of Artificial Sequence: Synthetic peptide
  Seed: LRMKWMMAMKYPITA
LRMKYMMVMVYPRTA

SEQ ID NO: 249506 - protein, 15 aa, Artificial Sequence
  Description of Artificial Sequence: Synthetic peptide
  Seed: LRMKWMMAMKYPITA
LRMKYMMVMVYPSTA

SEQ ID NO: 249507 - protein, 15 aa, Artificial Sequence
  Description of Artificial Sequence: Synthetic peptide
  Seed: LRMKWMMAMKYPITA
LRMKYMMVMVYPTTA

SEQ ID NO: 249508 - protein, 15 aa, Artificial Sequence
  Description of Artificial Sequence: Synthetic peptide
  Seed: LRMKWMMAMKYPITA
LRMKYMMVMVYPVTA

SEQ ID NO: 249509 - protein, 15 aa, Artificial Sequence
  Description of Artificial Sequence: Synthetic peptide
  Seed: LRMKWMMAMKYPITA
LRMKYMMVMVYPYTA

SEQ ID NO: 249510 - protein, 15 aa, Artificial Sequence
  Description of Artificial Sequence: Synthetic peptide
  Seed: LRMKWMMAMKYPITA
LRMKYMMVMWYPATA

SEQ ID NO: 249511 - protein, 15 aa, Artificial Sequence
  Description of Artificial Sequence: Synthetic peptide
  Seed: LRMKWMMAMKYPITA
LRMKYMMVMWYPITA

SEQ ID NO: 249512 - protein, 15 aa, Artificial Sequence
  Description of Artificial Sequence: Synthetic peptide
  Seed: LRMKWMMAMKYPITA
LRMKYMMVMWYPLTA

SEQ ID NO: 249513 - protein, 15 aa, Artificial Sequence
  Description of Artificial Sequence: Synthetic peptide
  Seed: LRMKWMMAMKYPITA
LRMKYMMVMWYPMTA

SEQ ID NO: 249514 - protein, 15 aa, Artificial Sequence
  Description of Artificial Sequence: Synthetic peptide
  Seed: LRMKWMMAMKYPITA
LRMKYMMVMWYPNTA

SEQ ID NO: 249515 - protein, 15 aa, Artificial Sequence
  Description of Artificial Sequence: Synthetic peptide
  Seed: LRMKWMMAMKYPITA
LRMKYMMVMWYPSTA

SEQ ID NO: 249516 - protein, 15 aa, Artificial Sequence
  Description of Artificial Sequence: Synthetic peptide
  Seed: LRMKWMMAMKYPITA
LRMKYMMVMWYPVTA

SEQ ID NO: 249517 - protein, 15 aa, Artificial Sequence
  Description of Artificial Sequence: Synthetic peptide
  Seed: LRMKWMMAMKYPITA
LRMKYMMVMYYPATA

SEQ ID NO: 249518 - protein, 15 aa, Artificial Sequence
  Description of Artificial Sequence: Synthetic peptide
  Seed: LRMKWMMAMKYPITA
LRMKYMMVMYYPITA

SEQ ID NO: 249519 - protein, 15 aa, Artificial Sequence
  Description of Artificial Sequence: Synthetic peptide
  Seed: LRMKWMMAMKYPITA
LRMKYMMVMYYPLTA

SEQ ID NO: 249520 - protein, 15 aa, Artificial Sequence
  Description of Artificial Sequence: Synthetic peptide
  Seed: LRMKWMMAMKYPITA
LRMKYMMVMYYPMTA

SEQ ID NO: 249521 - protein, 15 aa, Artificial Sequence
  Description of Artificial Sequence: Synthetic peptide
  Seed: LRMKWMMAMKYPITA
LRMKYMMVMYYPNTA

SEQ ID NO: 249522 - protein, 15 aa, Artificial Sequence
  Description of Artificial Sequence: Synthetic peptide
  Seed: LRMKWMMAMKYPITA
LRMKYMMVMYYPQTA

SEQ ID NO: 249523 - protein, 15 aa, Artificial Sequence
  Description of Artificial Sequence: Synthetic peptide
  Seed: LRMKWMMAMKYPITA
LRMKYMMVMYYPSTA

SEQ ID NO: 249524 - protein, 15 aa, Artificial Sequence
  Description of Artificial Sequence: Synthetic peptide
  Seed: LRMKWMMAMKYPITA
LRMKYMMVMYYPTTA

SEQ ID NO: 249525 - protein, 15 aa, Artificial Sequence
  Description of Artificial Sequence: Synthetic peptide
  Seed: LRMKWMMAMKYPITA
LRMKYMMVMYYPVTA

SEQ ID NO: 249526 - protein, 15 aa, Artificial Sequence
  Description of Artificial Sequence: Synthetic peptide
  Seed: LRMKWMMAMKYPITA
LRMKYMMWMAYPATA

SEQ ID NO: 249527 - protein, 15 aa, Artificial Sequence
  Description of Artificial Sequence: Synthetic peptide
  Seed: LRMKWMMAMKYPITA
LRMKYMMWMAYPCTA

SEQ ID NO: 249528 - protein, 15 aa, Artificial Sequence
  Description of Artificial Sequence: Synthetic peptide
  Seed: LRMKWMMAMKYPITA
LRMKYMMWMAYPETA

SEQ ID NO: 249529 - protein, 15 aa, Artificial Sequence
  Description of Artificial Sequence: Synthetic peptide
  Seed: LRMKWMMAMKYPITA
LRMKYMMWMAYPFTA

SEQ ID NO: 249530 - protein, 15 aa, Artificial Sequence
  Description of Artificial Sequence: Synthetic peptide
  Seed: LRMKWMMAMKYPITA
LRMKYMMWMAYPGTA

SEQ ID NO: 249531 - protein, 15 aa, Artificial Sequence
  Description of Artificial Sequence: Synthetic peptide
  Seed: LRMKWMMAMKYPITA
LRMKYMMWMAYPHTA

SEQ ID NO: 249532 - protein, 15 aa, Artificial Sequence
  Description of Artificial Sequence: Synthetic peptide
  Seed: LRMKWMMAMKYPITA
LRMKYMMWMAYPITA

SEQ ID NO: 249533 - protein, 15 aa, Artificial Sequence
  Description of Artificial Sequence: Synthetic peptide
  Seed: LRMKWMMAMKYPITA
LRMKYMMWMAYPKTA

SEQ ID NO: 249534 - protein, 15 aa, Artificial Sequence
  Description of Artificial Sequence: Synthetic peptide
  Seed: LRMKWMMAMKYPITA
LRMKYMMWMAYPLTA

SEQ ID NO: 249535 - protein, 15 aa, Artificial Sequence
  Description of Artificial Sequence: Synthetic peptide
  Seed: LRMKWMMAMKYPITA
LRMKYMMWMAYPMTA

SEQ ID NO: 249536 - protein, 15 aa, Artificial Sequence
  Description of Artificial Sequence: Synthetic peptide
  Seed: LRMKWMMAMKYPITA
LRMKYMMWMAYPNTA

SEQ ID NO: 249537 - protein, 15 aa, Artificial Sequence
  Description of Artificial Sequence: Synthetic peptide
  Seed: LRMKWMMAMKYPITA
LRMKYMMWMAYPPTA

SEQ ID NO: 249538 - protein, 15 aa, Artificial Sequence
  Description of Artificial Sequence: Synthetic peptide
  Seed: LRMKWMMAMKYPITA
LRMKYMMWMAYPQTA

SEQ ID NO: 249539 - protein, 15 aa, Artificial Sequence
  Description of Artificial Sequence: Synthetic peptide
  Seed: LRMKWMMAMKYPITA
LRMKYMMWMAYPRTA

SEQ ID NO: 249540 - protein, 15 aa, Artificial Sequence
  Description of Artificial Sequence: Synthetic peptide
  Seed: LRMKWMMAMKYPITA
LRMKYMMWMAYPSTA

SEQ ID NO: 249541 - protein, 15 aa, Artificial Sequence
  Description of Artificial Sequence: Synthetic peptide
  Seed: LRMKWMMAMKYPITA
LRMKYMMWMAYPTTA

SEQ ID NO: 249542 - protein, 15 aa, Artificial Sequence
  Description of Artificial Sequence: Synthetic peptide
  Seed: LRMKWMMAMKYPITA
LRMKYMMWMAYPVTA

SEQ ID NO: 249543 - protein, 15 aa, Artificial Sequence
  Description of Artificial Sequence: Synthetic peptide
  Seed: LRMKWMMAMKYPITA
LRMKYMMWMAYPYTA

SEQ ID NO: 249544 - protein, 15 aa, Artificial Sequence
  Description of Artificial Sequence: Synthetic peptide
  Seed: LRMKWMMAMKYPITA
LRMKYMMWMGYPATA

SEQ ID NO: 249545 - protein, 15 aa, Artificial Sequence
  Description of Artificial Sequence: Synthetic peptide
  Seed: LRMKWMMAMKYPITA
LRMKYMMWMGYPITA

SEQ ID NO: 249546 - protein, 15 aa, Artificial Sequence
  Description of Artificial Sequence: Synthetic peptide
  Seed: LRMKWMMAMKYPITA
LRMKYMMWMGYPLTA

SEQ ID NO: 249547 - protein, 15 aa, Artificial Sequence
  Description of Artificial Sequence: Synthetic peptide
  Seed: LRMKWMMAMKYPITA
LRMKYMMWMGYPMTA

SEQ ID NO: 249548 - protein, 15 aa, Artificial Sequence
  Description of Artificial Sequence: Synthetic peptide
  Seed: LRMKWMMAMKYPITA
LRMKYMMWMGYPSTA

SEQ ID NO: 249549 - protein, 15 aa, Artificial Sequence
  Description of Artificial Sequence: Synthetic peptide
  Seed: LRMKWMMAMKYPITA
LRMKYMMWMGYPTTA

SEQ ID NO: 249550 - protein, 15 aa, Artificial Sequence
  Description of Artificial Sequence: Synthetic peptide
  Seed: LRMKWMMAMKYPITA
LRMKYMMWMGYPVTA

SEQ ID NO: 249551 - protein, 15 aa, Artificial Sequence
  Description of Artificial Sequence: Synthetic peptide
  Seed: LRMKWMMAMKYPITA
LRMKYMMWMIYPATA

SEQ ID NO: 249552 - protein, 15 aa, Artificial Sequence
  Description of Artificial Sequence: Synthetic peptide
  Seed: LRMKWMMAMKYPITA
LRMKYMMWMIYPITA

SEQ ID NO: 249553 - protein, 15 aa, Artificial Sequence
  Description of Artificial Sequence: Synthetic peptide
  Seed: LRMKWMMAMKYPITA
LRMKYMMWMIYPLTA

SEQ ID NO: 249554 - protein, 15 aa, Artificial Sequence
  Description of Artificial Sequence: Synthetic peptide
  Seed: LRMKWMMAMKYPITA
LRMKYMMWMIYPMTA

SEQ ID NO: 249555 - protein, 15 aa, Artificial Sequence
  Description of Artificial Sequence: Synthetic peptide
  Seed: LRMKWMMAMKYPITA
LRMKYMMWMIYPNTA

SEQ ID NO: 249556 - protein, 15 aa, Artificial Sequence
  Description of Artificial Sequence: Synthetic peptide
  Seed: LRMKWMMAMKYPITA
LRMKYMMWMIYPSTA

SEQ ID NO: 249557 - protein, 15 aa, Artificial Sequence
  Description of Artificial Sequence: Synthetic peptide
  Seed: LRMKWMMAMKYPITA
LRMKYMMWMIYPTTA

SEQ ID NO: 249558 - protein, 15 aa, Artificial Sequence
  Description of Artificial Sequence: Synthetic peptide
  Seed: LRMKWMMAMKYPITA
LRMKYMMWMIYPVTA

SEQ ID NO: 249559 - protein, 15 aa, Artificial Sequence
  Description of Artificial Sequence: Synthetic peptide
  Seed: LRMKWMMAMKYPITA
LRMKYMMWMKYPATA

SEQ ID NO: 249560 - protein, 15 aa, Artificial Sequence
  Description of Artificial Sequence: Synthetic peptide
  Seed: LRMKWMMAMKYPITA
LRMKYMMWMKYPGTA

SEQ ID NO: 249561 - protein, 15 aa, Artificial Sequence
  Description of Artificial Sequence: Synthetic peptide
  Seed: LRMKWMMAMKYPITA
LRMKYMMWMKYPHTA

SEQ ID NO: 249562 - protein, 15 aa, Artificial Sequence
  Description of Artificial Sequence: Synthetic peptide
  Seed: LRMKWMMAMKYPITA
LRMKYMMWMKYPKTA

SEQ ID NO: 249563 - protein, 15 aa, Artificial Sequence
  Description of Artificial Sequence: Synthetic peptide
  Seed: LRMKWMMAMKYPITA
LRMKYMMWMKYPMTA

SEQ ID NO: 249564 - protein, 15 aa, Artificial Sequence
  Description of Artificial Sequence: Synthetic peptide
  Seed: LRMKWMMAMKYPITA
LRMKYMMWMKYPQTA

SEQ ID NO: 249565 - protein, 15 aa, Artificial Sequence
  Description of Artificial Sequence: Synthetic peptide
  Seed: LRMKWMMAMKYPITA
LRMKYMMWMKYPRTA

SEQ ID NO: 249566 - protein, 15 aa, Artificial Sequence
  Description of Artificial Sequence: Synthetic peptide
  Seed: LRMKWMMAMKYPITA
LRMKYMMWMKYPSTA

SEQ ID NO: 249567 - protein, 15 aa, Artificial Sequence
  Description of Artificial Sequence: Synthetic peptide
  Seed: LRMKWMMAMKYPITA
LRMKYMMWMMYPATA

SEQ ID NO: 249568 - protein, 15 aa, Artificial Sequence
  Description of Artificial Sequence: Synthetic peptide
  Seed: LRMKWMMAMKYPITA
LRMKYMMWMMYPVTA

SEQ ID NO: 249569 - protein, 15 aa, Artificial Sequence
  Description of Artificial Sequence: Synthetic peptide
  Seed: LRMKWMMAMKYPITA
LRMKYMMWMNYPATA

SEQ ID NO: 249570 - protein, 15 aa, Artificial Sequence
  Description of Artificial Sequence: Synthetic peptide
  Seed: LRMKWMMAMKYPITA
LRMKYMMWMNYPITA

SEQ ID NO: 249571 - protein, 15 aa, Artificial Sequence
  Description of Artificial Sequence: Synthetic peptide
  Seed: LRMKWMMAMKYPITA
LRMKYMMWMNYPLTA

SEQ ID NO: 249572 - protein, 15 aa, Artificial Sequence
  Description of Artificial Sequence: Synthetic peptide
  Seed: LRMKWMMAMKYPITA
LRMKYMMWMNYPMTA

SEQ ID NO: 249573 - protein, 15 aa, Artificial Sequence
  Description of Artificial Sequence: Synthetic peptide
  Seed: LRMKWMMAMKYPITA
LRMKYMMWMNYPVTA

SEQ ID NO: 249574 - protein, 15 aa, Artificial Sequence
  Description of Artificial Sequence: Synthetic peptide
  Seed: LRMKWMMAMKYPITA
LRMKYMMWMPYPATA

SEQ ID NO: 249575 - protein, 15 aa, Artificial Sequence
  Description of Artificial Sequence: Synthetic peptide
  Seed: LRMKWMMAMKYPITA
LRMKYMMWMPYPFTA

SEQ ID NO: 249576 - protein, 15 aa, Artificial Sequence
  Description of Artificial Sequence: Synthetic peptide
  Seed: LRMKWMMAMKYPITA
LRMKYMMWMPYPITA

SEQ ID NO: 249577 - protein, 15 aa, Artificial Sequence
  Description of Artificial Sequence: Synthetic peptide
  Seed: LRMKWMMAMKYPITA
LRMKYMMWMPYPLTA

SEQ ID NO: 249578 - protein, 15 aa, Artificial Sequence
  Description of Artificial Sequence: Synthetic peptide
  Seed: LRMKWMMAMKYPITA
LRMKYMMWMPYPMTA

SEQ ID NO: 249579 - protein, 15 aa, Artificial Sequence
  Description of Artificial Sequence: Synthetic peptide
  Seed: LRMKWMMAMKYPITA
LRMKYMMWMPYPNTA

SEQ ID NO: 249580 - protein, 15 aa, Artificial Sequence
  Description of Artificial Sequence: Synthetic peptide
  Seed: LRMKWMMAMKYPITA
LRMKYMMWMPYPSTA

SEQ ID NO: 249581 - protein, 15 aa, Artificial Sequence
  Description of Artificial Sequence: Synthetic peptide
  Seed: LRMKWMMAMKYPITA
LRMKYMMWMPYPTTA

SEQ ID NO: 249582 - protein, 15 aa, Artificial Sequence
  Description of Artificial Sequence: Synthetic peptide
  Seed: LRMKWMMAMKYPITA
LRMKYMMWMPYPVTA

SEQ ID NO: 249583 - protein, 15 aa, Artificial Sequence
  Description of Artificial Sequence: Synthetic peptide
  Seed: LRMKWMMAMKYPITA
LRMKYMMWMRYPATA

SEQ ID NO: 249584 - protein, 15 aa, Artificial Sequence
  Description of Artificial Sequence: Synthetic peptide
  Seed: LRMKWMMAMKYPITA
LRMKYMMWMRYPFTA

SEQ ID NO: 249585 - protein, 15 aa, Artificial Sequence
  Description of Artificial Sequence: Synthetic peptide
  Seed: LRMKWMMAMKYPITA
LRMKYMMWMRYPGTA

SEQ ID NO: 249586 - protein, 15 aa, Artificial Sequence
  Description of Artificial Sequence: Synthetic peptide
  Seed: LRMKWMMAMKYPITA
LRMKYMMWMRYPHTA

SEQ ID NO: 249587 - protein, 15 aa, Artificial Sequence
  Description of Artificial Sequence: Synthetic peptide
  Seed: LRMKWMMAMKYPITA
LRMKYMMWMRYPKTA

SEQ ID NO: 249588 - protein, 15 aa, Artificial Sequence
  Description of Artificial Sequence: Synthetic peptide
  Seed: LRMKWMMAMKYPITA
LRMKYMMWMRYPLTA

SEQ ID NO: 249589 - protein, 15 aa, Artificial Sequence
  Description of Artificial Sequence: Synthetic peptide
  Seed: LRMKWMMAMKYPITA
LRMKYMMWMRYPMTA

SEQ ID NO: 249590 - protein, 15 aa, Artificial Sequence
  Description of Artificial Sequence: Synthetic peptide
  Seed: LRMKWMMAMKYPITA
LRMKYMMWMRYPQTA

SEQ ID NO: 249591 - protein, 15 aa, Artificial Sequence
  Description of Artificial Sequence: Synthetic peptide
  Seed: LRMKWMMAMKYPITA
LRMKYMMWMRYPRTA

SEQ ID NO: 249592 - protein, 15 aa, Artificial Sequence
  Description of Artificial Sequence: Synthetic peptide
  Seed: LRMKWMMAMKYPITA
LRMKYMMWMRYPSTA

SEQ ID NO: 249593 - protein, 15 aa, Artificial Sequence
  Description of Artificial Sequence: Synthetic peptide
  Seed: LRMKWMMAMKYPITA
LRMKYMMWMRYPTTA

SEQ ID NO: 249594 - protein, 15 aa, Artificial Sequence
  Description of Artificial Sequence: Synthetic peptide
  Seed: LRMKWMMAMKYPITA
LRMKYMMWMRYPVTA

SEQ ID NO: 249595 - protein, 15 aa, Artificial Sequence
  Description of Artificial Sequence: Synthetic peptide
  Seed: LRMKWMMAMKYPITA
LRMKYMMWMRYPYTA

SEQ ID NO: 249596 - protein, 15 aa, Artificial Sequence
  Description of Artificial Sequence: Synthetic peptide
  Seed: LRMKWMMAMKYPITA
LRMKYMMWMSYPATA

SEQ ID NO: 249597 - protein, 15 aa, Artificial Sequence
  Description of Artificial Sequence: Synthetic peptide
  Seed: LRMKWMMAMKYPITA
LRMKYMMWMSYPFTA

SEQ ID NO: 249598 - protein, 15 aa, Artificial Sequence
  Description of Artificial Sequence: Synthetic peptide
  Seed: LRMKWMMAMKYPITA
LRMKYMMWMSYPITA

SEQ ID NO: 249599 - protein, 15 aa, Artificial Sequence
  Description of Artificial Sequence: Synthetic peptide
  Seed: LRMKWMMAMKYPITA
LRMKYMMWMSYPKTA

SEQ ID NO: 249600 - protein, 15 aa, Artificial Sequence
  Description of Artificial Sequence: Synthetic peptide
  Seed: LRMKWMMAMKYPITA
LRMKYMMWMSYPLTA

SEQ ID NO: 249601 - protein, 15 aa, Artificial Sequence
  Description of Artificial Sequence: Synthetic peptide
  Seed: LRMKWMMAMKYPITA
LRMKYMMWMSYPMTA

SEQ ID NO: 249602 - protein, 15 aa, Artificial Sequence
  Description of Artificial Sequence: Synthetic peptide
  Seed: LRMKWMMAMKYPITA
LRMKYMMWMSYPNTA

SEQ ID NO: 249603 - protein, 15 aa, Artificial Sequence
  Description of Artificial Sequence: Synthetic peptide
  Seed: LRMKWMMAMKYPITA
LRMKYMMWMSYPRTA

SEQ ID NO: 249604 - protein, 15 aa, Artificial Sequence
  Description of Artificial Sequence: Synthetic peptide
  Seed: LRMKWMMAMKYPITA
LRMKYMMWMSYPSTA

SEQ ID NO: 249605 - protein, 15 aa, Artificial Sequence
  Description of Artificial Sequence: Synthetic peptide
  Seed: LRMKWMMAMKYPITA
LRMKYMMWMSYPTTA

SEQ ID NO: 249606 - protein, 15 aa, Artificial Sequence
  Description of Artificial Sequence: Synthetic peptide
  Seed: LRMKWMMAMKYPITA
LRMKYMMWMSYPVTA

SEQ ID NO: 249607 - protein, 15 aa, Artificial Sequence
  Description of Artificial Sequence: Synthetic peptide
  Seed: LRMKWMMAMKYPITA
LRMKYMMWMTYPATA

SEQ ID NO: 249608 - protein, 15 aa, Artificial Sequence
  Description of Artificial Sequence: Synthetic peptide
  Seed: LRMKWMMAMKYPITA
LRMKYMMWMTYPHTA

SEQ ID NO: 249609 - protein, 15 aa, Artificial Sequence
  Description of Artificial Sequence: Synthetic peptide
  Seed: LRMKWMMAMKYPITA
LRMKYMMWMTYPITA

SEQ ID NO: 249610 - protein, 15 aa, Artificial Sequence
  Description of Artificial Sequence: Synthetic peptide
  Seed: LRMKWMMAMKYPITA
LRMKYMMWMTYPLTA

SEQ ID NO: 249611 - protein, 15 aa, Artificial Sequence
  Description of Artificial Sequence: Synthetic peptide
  Seed: LRMKWMMAMKYPITA
LRMKYMMWMTYPMTA

SEQ ID NO: 249612 - protein, 15 aa, Artificial Sequence
  Description of Artificial Sequence: Synthetic peptide
  Seed: LRMKWMMAMKYPITA
LRMKYMMWMTYPNTA

SEQ ID NO: 249613 - protein, 15 aa, Artificial Sequence
  Description of Artificial Sequence: Synthetic peptide
  Seed: LRMKWMMAMKYPITA
LRMKYMMWMTYPSTA

SEQ ID NO: 249614 - protein, 15 aa, Artificial Sequence
  Description of Artificial Sequence: Synthetic peptide
  Seed: LRMKWMMAMKYPITA
LRMKYMMWMTYPTTA

SEQ ID NO: 249615 - protein, 15 aa, Artificial Sequence
  Description of Artificial Sequence: Synthetic peptide
  Seed: LRMKWMMAMKYPITA
LRMKYMMWMTYPVTA

SEQ ID NO: 249616 - protein, 15 aa, Artificial Sequence
  Description of Artificial Sequence: Synthetic peptide
  Seed: LRMKWMMAMKYPITA
LRMKYMMWMVYPATA

SEQ ID NO: 249617 - protein, 15 aa, Artificial Sequence
  Description of Artificial Sequence: Synthetic peptide
  Seed: LRMKWMMAMKYPITA
LRMKYMMWMVYPGTA

SEQ ID NO: 249618 - protein, 15 aa, Artificial Sequence
  Description of Artificial Sequence: Synthetic peptide
  Seed: LRMKWMMAMKYPITA
LRMKYMMWMVYPHTA

SEQ ID NO: 249619 - protein, 15 aa, Artificial Sequence
  Description of Artificial Sequence: Synthetic peptide
  Seed: LRMKWMMAMKYPITA
LRMKYMMWMVYPITA

SEQ ID NO: 249620 - protein, 15 aa, Artificial Sequence
  Description of Artificial Sequence: Synthetic peptide
  Seed: LRMKWMMAMKYPITA
LRMKYMMWMVYPLTA

SEQ ID NO: 249621 - protein, 15 aa, Artificial Sequence
  Description of Artificial Sequence: Synthetic peptide
  Seed: LRMKWMMAMKYPITA
LRMKYMMWMVYPMTA

SEQ ID NO: 249622 - protein, 15 aa, Artificial Sequence
  Description of Artificial Sequence: Synthetic peptide
  Seed: LRMKWMMAMKYPITA
LRMKYMMWMVYPNTA

SEQ ID NO: 249623 - protein, 15 aa, Artificial Sequence
  Description of Artificial Sequence: Synthetic peptide
  Seed: LRMKWMMAMKYPITA
LRMKYMMWMVYPQTA

SEQ ID NO: 249624 - protein, 15 aa, Artificial Sequence
  Description of Artificial Sequence: Synthetic peptide
  Seed: LRMKWMMAMKYPITA
LRMKYMMWMVYPSTA

SEQ ID NO: 249625 - protein, 15 aa, Artificial Sequence
  Description of Artificial Sequence: Synthetic peptide
  Seed: LRMKWMMAMKYPITA
LRMKYMMWMVYPTTA

SEQ ID NO: 249626 - protein, 15 aa, Artificial Sequence
  Description of Artificial Sequence: Synthetic peptide
  Seed: LRMKWMMAMKYPITA
LRMKYMMWMVYPVTA

SEQ ID NO: 249627 - protein, 15 aa, Artificial Sequence
  Description of Artificial Sequence: Synthetic peptide
  Seed: LRMKWMMAMKYPITA
LRMKYMMYMAYPATA

SEQ ID NO: 249628 - protein, 15 aa, Artificial Sequence
  Description of Artificial Sequence: Synthetic peptide
  Seed: LRMKWMMAMKYPITA
LRMKYMMYMAYPCTA

SEQ ID NO: 249629 - protein, 15 aa, Artificial Sequence
  Description of Artificial Sequence: Synthetic peptide
  Seed: LRMKWMMAMKYPITA
LRMKYMMYMAYPFTA

SEQ ID NO: 249630 - protein, 15 aa, Artificial Sequence
  Description of Artificial Sequence: Synthetic peptide
  Seed: LRMKWMMAMKYPITA
LRMKYMMYMAYPGTA

SEQ ID NO: 249631 - protein, 15 aa, Artificial Sequence
  Description of Artificial Sequence: Synthetic peptide
  Seed: LRMKWMMAMKYPITA
LRMKYMMYMAYPHTA

SEQ ID NO: 249632 - protein, 15 aa, Artificial Sequence
  Description of Artificial Sequence: Synthetic peptide
  Seed: LRMKWMMAMKYPITA
LRMKYMMYMAYPITA

SEQ ID NO: 249633 - protein, 15 aa, Artificial Sequence
  Description of Artificial Sequence: Synthetic peptide
  Seed: LRMKWMMAMKYPITA
LRMKYMMYMAYPKTA

SEQ ID NO: 249634 - protein, 15 aa, Artificial Sequence
  Description of Artificial Sequence: Synthetic peptide
  Seed: LRMKWMMAMKYPITA
LRMKYMMYMAYPLTA

SEQ ID NO: 249635 - protein, 15 aa, Artificial Sequence
  Description of Artificial Sequence: Synthetic peptide
  Seed: LRMKWMMAMKYPITA
LRMKYMMYMAYPMTA

SEQ ID NO: 249636 - protein, 15 aa, Artificial Sequence
  Description of Artificial Sequence: Synthetic peptide
  Seed: LRMKWMMAMKYPITA
LRMKYMMYMAYPNTA

SEQ ID NO: 249637 - protein, 15 aa, Artificial Sequence
  Description of Artificial Sequence: Synthetic peptide
  Seed: LRMKWMMAMKYPITA
LRMKYMMYMAYPPTA

SEQ ID NO: 249638 - protein, 15 aa, Artificial Sequence
  Description of Artificial Sequence: Synthetic peptide
  Seed: LRMKWMMAMKYPITA
LRMKYMMYMAYPQTA

SEQ ID NO: 249639 - protein, 15 aa, Artificial Sequence
  Description of Artificial Sequence: Synthetic peptide
  Seed: LRMKWMMAMKYPITA
LRMKYMMYMAYPRTA

SEQ ID NO: 249640 - protein, 15 aa, Artificial Sequence
  Description of Artificial Sequence: Synthetic peptide
  Seed: LRMKWMMAMKYPITA
LRMKYMMYMAYPSTA

SEQ ID NO: 249641 - protein, 15 aa, Artificial Sequence
  Description of Artificial Sequence: Synthetic peptide
  Seed: LRMKWMMAMKYPITA
LRMKYMMYMAYPTTA

SEQ ID NO: 249642 - protein, 15 aa, Artificial Sequence
  Description of Artificial Sequence: Synthetic peptide
  Seed: LRMKWMMAMKYPITA
LRMKYMMYMAYPVTA

SEQ ID NO: 249643 - protein, 15 aa, Artificial Sequence
  Description of Artificial Sequence: Synthetic peptide
  Seed: LRMKWMMAMKYPITA
LRMKYMMYMAYPYTA

SEQ ID NO: 249644 - protein, 15 aa, Artificial Sequence
  Description of Artificial Sequence: Synthetic peptide
  Seed: LRMKWMMAMKYPITA
LRMKYMMYMGYPATA

SEQ ID NO: 249645 - protein, 15 aa, Artificial Sequence
  Description of Artificial Sequence: Synthetic peptide
  Seed: LRMKWMMAMKYPITA
LRMKYMMYMGYPITA

SEQ ID NO: 249646 - protein, 15 aa, Artificial Sequence
  Description of Artificial Sequence: Synthetic peptide
  Seed: LRMKWMMAMKYPITA
LRMKYMMYMGYPKTA

SEQ ID NO: 249647 - protein, 15 aa, Artificial Sequence
  Description of Artificial Sequence: Synthetic peptide
  Seed: LRMKWMMAMKYPITA
LRMKYMMYMGYPLTA

SEQ ID NO: 249648 - protein, 15 aa, Artificial Sequence
  Description of Artificial Sequence: Synthetic peptide
  Seed: LRMKWMMAMKYPITA
LRMKYMMYMGYPMTA

SEQ ID NO: 249649 - protein, 15 aa, Artificial Sequence
  Description of Artificial Sequence: Synthetic peptide
  Seed: LRMKWMMAMKYPITA
LRMKYMMYMGYPRTA

SEQ ID NO: 249650 - protein, 15 aa, Artificial Sequence
  Description of Artificial Sequence: Synthetic peptide
  Seed: LRMKWMMAMKYPITA
LRMKYMMYMGYPSTA

SEQ ID NO: 249651 - protein, 15 aa, Artificial Sequence
  Description of Artificial Sequence: Synthetic peptide
  Seed: LRMKWMMAMKYPITA
LRMKYMMYMGYPTTA

SEQ ID NO: 249652 - protein, 15 aa, Artificial Sequence
  Description of Artificial Sequence: Synthetic peptide
  Seed: LRMKWMMAMKYPITA
LRMKYMMYMGYPVTA

SEQ ID NO: 249653 - protein, 15 aa, Artificial Sequence
  Description of Artificial Sequence: Synthetic peptide
  Seed: LRMKWMMAMKYPITA
LRMKYMMYMIYPATA

SEQ ID NO: 249654 - protein, 15 aa, Artificial Sequence
  Description of Artificial Sequence: Synthetic peptide
  Seed: LRMKWMMAMKYPITA
LRMKYMMYMIYPGTA

SEQ ID NO: 249655 - protein, 15 aa, Artificial Sequence
  Description of Artificial Sequence: Synthetic peptide
  Seed: LRMKWMMAMKYPITA
LRMKYMMYMIYPITA

SEQ ID NO: 249656 - protein, 15 aa, Artificial Sequence
  Description of Artificial Sequence: Synthetic peptide
  Seed: LRMKWMMAMKYPITA
LRMKYMMYMIYPVTA

SEQ ID NO: 249657 - protein, 15 aa, Artificial Sequence
  Description of Artificial Sequence: Synthetic peptide
  Seed: LRMKWMMAMKYPITA
LRMKYMMYMKYPATA

SEQ ID NO: 249658 - protein, 15 aa, Artificial Sequence
  Description of Artificial Sequence: Synthetic peptide
  Seed: LRMKWMMAMKYPITA
LRMKYMMYMKYPRTA

SEQ ID NO: 249659 - protein, 15 aa, Artificial Sequence
  Description of Artificial Sequence: Synthetic peptide
  Seed: LRMKWMMAMKYPITA
LRMKYMMYMKYPSTA

SEQ ID NO: 249660 - protein, 15 aa, Artificial Sequence
  Description of Artificial Sequence: Synthetic peptide
  Seed: LRMKWMMAMKYPITA
LRMKYMMYMNYPATA

SEQ ID NO: 249661 - protein, 15 aa, Artificial Sequence
  Description of Artificial Sequence: Synthetic peptide
  Seed: LRMKWMMAMKYPITA
LRMKYMMYMNYPFTA

SEQ ID NO: 249662 - protein, 15 aa, Artificial Sequence
  Description of Artificial Sequence: Synthetic peptide
  Seed: LRMKWMMAMKYPITA
LRMKYMMYMNYPITA

SEQ ID NO: 249663 - protein, 15 aa, Artificial Sequence
  Description of Artificial Sequence: Synthetic peptide
  Seed: LRMKWMMAMKYPITA
LRMKYMMYMNYPLTA

SEQ ID NO: 249664 - protein, 15 aa, Artificial Sequence
  Description of Artificial Sequence: Synthetic peptide
  Seed: LRMKWMMAMKYPITA
LRMKYMMYMNYPMTA

SEQ ID NO: 249665 - protein, 15 aa, Artificial Sequence
  Description of Artificial Sequence: Synthetic peptide
  Seed: LRMKWMMAMKYPITA
LRMKYMMYMNYPSTA

SEQ ID NO: 249666 - protein, 15 aa, Artificial Sequence
  Description of Artificial Sequence: Synthetic peptide
  Seed: LRMKWMMAMKYPITA
LRMKYMMYMNYPTTA

SEQ ID NO: 249667 - protein, 15 aa, Artificial Sequence
  Description of Artificial Sequence: Synthetic peptide
  Seed: LRMKWMMAMKYPITA
LRMKYMMYMNYPVTA

SEQ ID NO: 249668 - protein, 15 aa, Artificial Sequence
  Description of Artificial Sequence: Synthetic peptide
  Seed: LRMKWMMAMKYPITA
LRMKYMMYMPYPATA

SEQ ID NO: 249669 - protein, 15 aa, Artificial Sequence
  Description of Artificial Sequence: Synthetic peptide
  Seed: LRMKWMMAMKYPITA
LRMKYMMYMPYPITA

SEQ ID NO: 249670 - protein, 15 aa, Artificial Sequence
  Description of Artificial Sequence: Synthetic peptide
  Seed: LRMKWMMAMKYPITA
LRMKYMMYMPYPLTA

SEQ ID NO: 249671 - protein, 15 aa, Artificial Sequence
  Description of Artificial Sequence: Synthetic peptide
  Seed: LRMKWMMAMKYPITA
LRMKYMMYMPYPMTA

SEQ ID NO: 249672 - protein, 15 aa, Artificial Sequence
  Description of Artificial Sequence: Synthetic peptide
  Seed: LRMKWMMAMKYPITA
LRMKYMMYMPYPNTA

SEQ ID NO: 249673 - protein, 15 aa, Artificial Sequence
  Description of Artificial Sequence: Synthetic peptide
  Seed: LRMKWMMAMKYPITA
LRMKYMMYMPYPSTA

SEQ ID NO: 249674 - protein, 15 aa, Artificial Sequence
  Description of Artificial Sequence: Synthetic peptide
  Seed: LRMKWMMAMKYPITA
LRMKYMMYMPYPTTA

SEQ ID NO: 249675 - protein, 15 aa, Artificial Sequence
  Description of Artificial Sequence: Synthetic peptide
  Seed: LRMKWMMAMKYPITA
LRMKYMMYMPYPVTA

SEQ ID NO: 249676 - protein, 15 aa, Artificial Sequence
  Description of Artificial Sequence: Synthetic peptide
  Seed: LRMKWMMAMKYPITA
LRMKYMMYMQYPITA

SEQ ID NO: 249677 - protein, 15 aa, Artificial Sequence
  Description of Artificial Sequence: Synthetic peptide
  Seed: LRMKWMMAMKYPITA
LRMKYMMYMQYPLTA

SEQ ID NO: 249678 - protein, 15 aa, Artificial Sequence
  Description of Artificial Sequence: Synthetic peptide
  Seed: LRMKWMMAMKYPITA
LRMKYMMYMQYPVTA

SEQ ID NO: 249679 - protein, 15 aa, Artificial Sequence
  Description of Artificial Sequence: Synthetic peptide
  Seed: LRMKWMMAMKYPITA
LRMKYMMYMRYPATA

SEQ ID NO: 249680 - protein, 15 aa, Artificial Sequence
  Description of Artificial Sequence: Synthetic peptide
  Seed: LRMKWMMAMKYPITA
LRMKYMMYMRYPFTA

SEQ ID NO: 249681 - protein, 15 aa, Artificial Sequence
  Description of Artificial Sequence: Synthetic peptide
  Seed: LRMKWMMAMKYPITA
LRMKYMMYMRYPGTA

SEQ ID NO: 249682 - protein, 15 aa, Artificial Sequence
  Description of Artificial Sequence: Synthetic peptide
  Seed: LRMKWMMAMKYPITA
LRMKYMMYMRYPHTA

SEQ ID NO: 249683 - protein, 15 aa, Artificial Sequence
  Description of Artificial Sequence: Synthetic peptide
  Seed: LRMKWMMAMKYPITA
LRMKYMMYMRYPKTA

SEQ ID NO: 249684 - protein, 15 aa, Artificial Sequence
  Description of Artificial Sequence: Synthetic peptide
  Seed: LRMKWMMAMKYPITA
LRMKYMMYMRYPLTA

SEQ ID NO: 249685 - protein, 15 aa, Artificial Sequence
  Description of Artificial Sequence: Synthetic peptide
  Seed: LRMKWMMAMKYPITA
LRMKYMMYMRYPMTA

SEQ ID NO: 249686 - protein, 15 aa, Artificial Sequence
  Description of Artificial Sequence: Synthetic peptide
  Seed: LRMKWMMAMKYPITA
LRMKYMMYMRYPQTA

SEQ ID NO: 249687 - protein, 15 aa, Artificial Sequence
  Description of Artificial Sequence: Synthetic peptide
  Seed: LRMKWMMAMKYPITA
LRMKYMMYMRYPRTA

SEQ ID NO: 249688 - protein, 15 aa, Artificial Sequence
  Description of Artificial Sequence: Synthetic peptide
  Seed: LRMKWMMAMKYPITA
LRMKYMMYMRYPSTA

SEQ ID NO: 249689 - protein, 15 aa, Artificial Sequence
  Description of Artificial Sequence: Synthetic peptide
  Seed: LRMKWMMAMKYPITA
LRMKYMMYMRYPVTA

SEQ ID NO: 249690 - protein, 15 aa, Artificial Sequence
  Description of Artificial Sequence: Synthetic peptide
  Seed: LRMKWMMAMKYPITA
LRMKYMMYMRYPYTA

SEQ ID NO: 249691 - protein, 15 aa, Artificial Sequence
  Description of Artificial Sequence: Synthetic peptide
  Seed: LRMKWMMAMKYPITA
LRMKYMMYMSYPATA

SEQ ID NO: 249692 - protein, 15 aa, Artificial Sequence
  Description of Artificial Sequence: Synthetic peptide
  Seed: LRMKWMMAMKYPITA
LRMKYMMYMSYPFTA

SEQ ID NO: 249693 - protein, 15 aa, Artificial Sequence
  Description of Artificial Sequence: Synthetic peptide
  Seed: LRMKWMMAMKYPITA
LRMKYMMYMSYPGTA

SEQ ID NO: 249694 - protein, 15 aa, Artificial Sequence
  Description of Artificial Sequence: Synthetic peptide
  Seed: LRMKWMMAMKYPITA
LRMKYMMYMSYPHTA

SEQ ID NO: 249695 - protein, 15 aa, Artificial Sequence
  Description of Artificial Sequence: Synthetic peptide
  Seed: LRMKWMMAMKYPITA
LRMKYMMYMSYPITA

SEQ ID NO: 249696 - protein, 15 aa, Artificial Sequence
  Description of Artificial Sequence: Synthetic peptide
  Seed: LRMKWMMAMKYPITA
LRMKYMMYMSYPKTA

SEQ ID NO: 249697 - protein, 15 aa, Artificial Sequence
  Description of Artificial Sequence: Synthetic peptide
  Seed: LRMKWMMAMKYPITA
LRMKYMMYMSYPLTA

SEQ ID NO: 249698 - protein, 15 aa, Artificial Sequence
  Description of Artificial Sequence: Synthetic peptide
  Seed: LRMKWMMAMKYPITA
LRMKYMMYMSYPMTA

SEQ ID NO: 249699 - protein, 15 aa, Artificial Sequence
  Description of Artificial Sequence: Synthetic peptide
  Seed: LRMKWMMAMKYPITA
LRMKYMMYMSYPNTA

SEQ ID NO: 249700 - protein, 15 aa, Artificial Sequence
  Description of Artificial Sequence: Synthetic peptide
  Seed: LRMKWMMAMKYPITA
LRMKYMMYMSYPQTA

SEQ ID NO: 249701 - protein, 15 aa, Artificial Sequence
  Description of Artificial Sequence: Synthetic peptide
  Seed: LRMKWMMAMKYPITA
LRMKYMMYMSYPRTA

SEQ ID NO: 249702 - protein, 15 aa, Artificial Sequence
  Description of Artificial Sequence: Synthetic peptide
  Seed: LRMKWMMAMKYPITA
LRMKYMMYMSYPSTA

SEQ ID NO: 249703 - protein, 15 aa, Artificial Sequence
  Description of Artificial Sequence: Synthetic peptide
  Seed: LRMKWMMAMKYPITA
LRMKYMMYMSYPTTA

SEQ ID NO: 249704 - protein, 15 aa, Artificial Sequence
  Description of Artificial Sequence: Synthetic peptide
  Seed: LRMKWMMAMKYPITA
LRMKYMMYMSYPVTA

SEQ ID NO: 249705 - protein, 15 aa, Artificial Sequence
  Description of Artificial Sequence: Synthetic peptide
  Seed: LRMKWMMAMKYPITA
LRMKYMMYMSYPYTA

SEQ ID NO: 249706 - protein, 15 aa, Artificial Sequence
  Description of Artificial Sequence: Synthetic peptide
  Seed: LRMKWMMAMKYPITA
LRMKYMMYMTYPATA

SEQ ID NO: 249707 - protein, 15 aa, Artificial Sequence
  Description of Artificial Sequence: Synthetic peptide
  Seed: LRMKWMMAMKYPITA
LRMKYMMYMTYPHTA

SEQ ID NO: 249708 - protein, 15 aa, Artificial Sequence
  Description of Artificial Sequence: Synthetic peptide
  Seed: LRMKWMMAMKYPITA
LRMKYMMYMTYPITA

SEQ ID NO: 249709 - protein, 15 aa, Artificial Sequence
  Description of Artificial Sequence: Synthetic peptide
  Seed: LRMKWMMAMKYPITA
LRMKYMMYMTYPKTA

SEQ ID NO: 249710 - protein, 15 aa, Artificial Sequence
  Description of Artificial Sequence: Synthetic peptide
  Seed: LRMKWMMAMKYPITA
LRMKYMMYMTYPLTA

SEQ ID NO: 249711 - protein, 15 aa, Artificial Sequence
  Description of Artificial Sequence: Synthetic peptide
  Seed: LRMKWMMAMKYPITA
LRMKYMMYMTYPMTA

SEQ ID NO: 249712 - protein, 15 aa, Artificial Sequence
  Description of Artificial Sequence: Synthetic peptide
  Seed: LRMKWMMAMKYPITA
LRMKYMMYMTYPNTA

SEQ ID NO: 249713 - protein, 15 aa, Artificial Sequence
  Description of Artificial Sequence: Synthetic peptide
  Seed: LRMKWMMAMKYPITA
LRMKYMMYMTYPQTA

SEQ ID NO: 249714 - protein, 15 aa, Artificial Sequence
  Description of Artificial Sequence: Synthetic peptide
  Seed: LRMKWMMAMKYPITA
LRMKYMMYMTYPRTA

SEQ ID NO: 249715 - protein, 15 aa, Artificial Sequence
  Description of Artificial Sequence: Synthetic peptide
  Seed: LRMKWMMAMKYPITA
LRMKYMMYMTYPSTA

SEQ ID NO: 249716 - protein, 15 aa, Artificial Sequence
  Description of Artificial Sequence: Synthetic peptide
  Seed: LRMKWMMAMKYPITA
LRMKYMMYMTYPTTA

SEQ ID NO: 249717 - protein, 15 aa, Artificial Sequence
  Description of Artificial Sequence: Synthetic peptide
  Seed: LRMKWMMAMKYPITA
LRMKYMMYMTYPVTA

SEQ ID NO: 249718 - protein, 15 aa, Artificial Sequence
  Description of Artificial Sequence: Synthetic peptide
  Seed: LRMKWMMAMKYPITA
LRMKYMMYMVYPATA

SEQ ID NO: 249719 - protein, 15 aa, Artificial Sequence
  Description of Artificial Sequence: Synthetic peptide
  Seed: LRMKWMMAMKYPITA
LRMKYMMYMVYPITA

SEQ ID NO: 249720 - protein, 15 aa, Artificial Sequence
  Description of Artificial Sequence: Synthetic peptide
  Seed: LRMKWMMAMKYPITA
LRMKYMMYMVYPLTA

SEQ ID NO: 249721 - protein, 15 aa, Artificial Sequence
  Description of Artificial Sequence: Synthetic peptide
  Seed: LRMKWMMAMKYPITA
LRMKYMMYMVYPNTA

SEQ ID NO: 249722 - protein, 15 aa, Artificial Sequence
  Description of Artificial Sequence: Synthetic peptide
  Seed: LRMKWMMAMKYPITA
LRMKYMMYMVYPSTA

SEQ ID NO: 249723 - protein, 15 aa, Artificial Sequence
  Description of Artificial Sequence: Synthetic peptide
  Seed: LRMKWMMAMKYPITA
LRMKYMMYMVYPTTA

SEQ ID NO: 249724 - protein, 15 aa, Artificial Sequence
  Description of Artificial Sequence: Synthetic peptide
  Seed: LRMKWMMAMKYPITA
LRMKYMMYMVYPVTA

SEQ ID NO: 249725 - protein, 15 aa, Artificial Sequence
  Description of Artificial Sequence: Synthetic peptide
  Seed: LRMKWMMAMKYPITA
LRMKGMMHMRYPITA

SEQ ID NO: 249726 - protein, 15 aa, Artificial Sequence
  Description of Artificial Sequence: Synthetic peptide
  Seed: LRMKWMMAMKYPITA
LRMKSMMTMSYPFTA

SEQ ID NO: 249727 - protein, 15 aa, Artificial Sequence
  Description of Artificial Sequence: Synthetic peptide
  Seed: LRMKWMMAMKYPITA
LRMKKMMIMKYPFTA

SEQ ID NO: 249728 - protein, 15 aa, Artificial Sequence
  Description of Artificial Sequence: Synthetic peptide
  Seed: LRMKWMMAMKYPITA
LRMKTMMVMKYPRTA

SEQ ID NO: 249729 - protein, 15 aa, Artificial Sequence
  Description of Artificial Sequence: Synthetic peptide
  Seed: LRMKWMMAMKYPITA
LRMKSMMLMKYPHTA

SEQ ID NO: 249730 - protein, 15 aa, Artificial Sequence
  Description of Artificial Sequence: Synthetic peptide
  Seed: LRMKWMMAMKYPITA
LRMKWIMAMKFPIPA

SEQ ID NO: 249731 - protein, 15 aa, Artificial Sequence
  Description of Artificial Sequence: Synthetic peptide
  Seed: LRMKWMMAMKYPITA
LRMKKMMIMKYPYTA

SEQ ID NO: 249732 - protein, 15 aa, Artificial Sequence
  Description of Artificial Sequence: Synthetic peptide
  Seed: LRMKWMMAMKYPITA
LRMKWLMAFKMPIFA

SEQ ID NO: 249733 - protein, 15 aa, Artificial Sequence
  Description of Artificial Sequence: Synthetic peptide
  Seed: LRMKWMMAMKYPITA
LRMKWFMALKEPILA

SEQ ID NO: 249734 - protein, 15 aa, Artificial Sequence
  Description of Artificial Sequence: Synthetic peptide
  Seed: LRMKWMMAMKYPITA
LRMKNMMIMKYPRTA

SEQ ID NO: 249735 - protein, 15 aa, Artificial Sequence
  Description of Artificial Sequence: Synthetic peptide
  Seed: LRMKWMMAMKYPITA
LRMKWYMSMKNPITA

SEQ ID NO: 249736 - protein, 15 aa, Artificial Sequence
  Description of Artificial Sequence: Synthetic peptide
  Seed: LRMKWMMAMKYPITA
LRMKWLMAMKFPIPA

SEQ ID NO: 249737 - protein, 15 aa, Artificial Sequence
  Description of Artificial Sequence: Synthetic peptide
  Seed: LRMKWMMAMKYPITA
LRMKWFMALKWPIPA

SEQ ID NO: 249738 - protein, 15 aa, Artificial Sequence
  Description of Artificial Sequence: Synthetic peptide
  Seed: LRMKWMMAMKYPITA
LRMKWFMAFKNPILA

SEQ ID NO: 249739 - protein, 15 aa, Artificial Sequence
  Description of Artificial Sequence: Synthetic peptide
  Seed: LRMKWMMAMKYPITA
LRMKWFMALKWPIWA

SEQ ID NO: 249740 - protein, 15 aa, Artificial Sequence
  Description of Artificial Sequence: Synthetic peptide
  Seed: LRMKWMMAMKYPITA
LRIKWRMSMKFPITA

SEQ ID NO: 249741 - protein, 15 aa, Artificial Sequence
  Description of Artificial Sequence: Synthetic peptide
  Seed: LRMKWMMAMKYPITA
LRMKWFMMMKAPITA

SEQ ID NO: 249742 - protein, 15 aa, Artificial Sequence
  Description of Artificial Sequence: Synthetic peptide
  Seed: LRMKWMMAMKYPITA
LRMKWFMAFKEPILA

SEQ ID NO: 249743 - protein, 15 aa, Artificial Sequence
  Description of Artificial Sequence: Synthetic peptide
  Seed: LRMKWMMAMKYPITA
LRMKWVMAVKLPIVA

SEQ ID NO: 249744 - protein, 15 aa, Artificial Sequence
  Description of Artificial Sequence: Synthetic peptide
  Seed: LRMKWMMAMKYPITA
LRMKWFMAAKFPIHA

SEQ ID NO: 249745 - protein, 15 aa, Artificial Sequence
  Description of Artificial Sequence: Synthetic peptide
  Seed: LRMKWMMAMKYPITA
LRMKWMMAEKLPILA

SEQ ID NO: 249746 - protein, 15 aa, Artificial Sequence
  Description of Artificial Sequence: Synthetic peptide
  Seed: LRMKWMMAMKYPITA
LRMKWIMTMKLPITA

SEQ ID NO: 249747 - protein, 15 aa, Artificial Sequence
  Description of Artificial Sequence: Synthetic peptide
  Seed: LRMKWMMAMKYPITA
LRMKWFMAFKRPILA

SEQ ID NO: 249748 - protein, 15 aa, Artificial Sequence
  Description of Artificial Sequence: Synthetic peptide
  Seed: LRMKWMMAMKYPITA
LRNKWFMLMKLPITA

SEQ ID NO: 249749 - protein, 15 aa, Artificial Sequence
  Description of Artificial Sequence: Synthetic peptide
  Seed: LRMKWMMAMKYPITA
LRMKWIMAMKFPIWA

SEQ ID NO: 249750 - protein, 15 aa, Artificial Sequence
  Description of Artificial Sequence: Synthetic peptide
  Seed: LRMKWMMAMKYPITA
LRMKWFMALKAPILA

SEQ ID NO: 249751 - protein, 15 aa, Artificial Sequence
  Description of Artificial Sequence: Synthetic peptide
  Seed: LRMKWMMAMKYPITA
LRMKWFMALKAPIIA

SEQ ID NO: 249752 - protein, 15 aa, Artificial Sequence
  Description of Artificial Sequence: Synthetic peptide
  Seed: LRMKWMMAMKYPITA
LRPKWLMAMKLPITA

SEQ ID NO: 249753 - protein, 15 aa, Artificial Sequence
  Description of Artificial Sequence: Synthetic peptide
  Seed: LRMKWMMAMKYPITA
LRMKTMMHMRYPETA

SEQ ID NO: 249754 - protein, 15 aa, Artificial Sequence
  Description of Artificial Sequence: Synthetic peptide
  Seed: LRMKWMMAMKYPITA
LRMKWVMAMKYPIYA

SEQ ID NO: 249755 - protein, 15 aa, Artificial Sequence
  Description of Artificial Sequence: Synthetic peptide
  Seed: LRMKWMMAMKYPITA
LRCKWTMFMKLPITA

SEQ ID NO: 249756 - protein, 15 aa, Artificial Sequence
  Description of Artificial Sequence: Synthetic peptide
  Seed: LRMKWMMAMKYPITA
LRMKQMMLMGYPPTA

SEQ ID NO: 249757 - protein, 15 aa, Artificial Sequence
  Description of Artificial Sequence: Synthetic peptide
  Seed: LRMKWMMAMKYPITA
LRMKWFMALKLPIYA

SEQ ID NO: 249758 - protein, 15 aa, Artificial Sequence
  Description of Artificial Sequence: Synthetic peptide
  Seed: LRMKWMMAMKYPITA
LRMKSMMLMRYPTTA

SEQ ID NO: 249759 - protein, 15 aa, Artificial Sequence
  Description of Artificial Sequence: Synthetic peptide
  Seed: LRMKWMMAMKYPITA
LRMKNMMFMRYPHTA

SEQ ID NO: 249760 - protein, 15 aa, Artificial Sequence
  Description of Artificial Sequence: Synthetic peptide
  Seed: LRMKWMMAMKYPITA
LRMKWFMASKFPIRA

SEQ ID NO: 249761 - protein, 15 aa, Artificial Sequence
  Description of Artificial Sequence: Synthetic peptide
  Seed: LRMKWMMAMKYPITA
LRMKWFMALKAPIVA

SEQ ID NO: 249762 - protein, 15 aa, Artificial Sequence
  Description of Artificial Sequence: Synthetic peptide
  Seed: LRMKWMMAMKYPITA
LRMKWFMAHKFPIHA

SEQ ID NO: 249763 - protein, 15 aa, Artificial Sequence
  Description of Artificial Sequence: Synthetic peptide
  Seed: LRMKWMMAMKYPITA
LRMKWFMAAKFPIKA

SEQ ID NO: 249764 - protein, 15 aa, Artificial Sequence
  Description of Artificial Sequence: Synthetic peptide
  Seed: LRMKWMMAMKYPITA
LRMKWLMAVKIPILA

SEQ ID NO: 249765 - protein, 15 aa, Artificial Sequence
  Description of Artificial Sequence: Synthetic peptide
  Seed: LRMKWMMAMKYPITA
LRCKWSMFMKLPITA

SEQ ID NO: 249766 - protein, 15 aa, Artificial Sequence
  Description of Artificial Sequence: Synthetic peptide
  Seed: LRMKWMMAMKYPITA
LRMKWFMAIKAPIIA

SEQ ID NO: 249767 - protein, 15 aa, Artificial Sequence
  Description of Artificial Sequence: Synthetic peptide
  Seed: LRMKWMMAMKYPITA
LRMKGMMLMPYPNTA

SEQ ID NO: 249768 - protein, 15 aa, Artificial Sequence
  Description of Artificial Sequence: Synthetic peptide
  Seed: LRMKWMMAMKYPITA
LRMKWFMAMKYPITA

SEQ ID NO: 249769 - protein, 15 aa, Artificial Sequence
  Description of Artificial Sequence: Synthetic peptide
  Seed: LRMKWMMAMKYPITA
LRMKWMRAMAYAITM

SEQ ID NO: 249770 - protein, 15 aa, Artificial Sequence
  Description of Artificial Sequence: Synthetic peptide
  Seed: LRMKWMMAMKYPITA
LRMKWFMAYKWPIFA

SEQ ID NO: 249771 - protein, 15 aa, Artificial Sequence
  Description of Artificial Sequence: Synthetic peptide
  Seed: LRMKWMMAMKYPITA
LRRKWTMIMKLPITA

SEQ ID NO: 249772 - protein, 15 aa, Artificial Sequence
  Description of Artificial Sequence: Synthetic peptide
  Seed: LRMKWMMAMKYPITA
LRMKWYMAFKYPIFA

SEQ ID NO: 249773 - protein, 15 aa, Artificial Sequence
  Description of Artificial Sequence: Synthetic peptide
  Seed: LRMKWMMAMKYPITA
LRMKWFMAFKWPITA

SEQ ID NO: 249774 - protein, 15 aa, Artificial Sequence
  Description of Artificial Sequence: Synthetic peptide
  Seed: LRMKWMMAMKYPITA
LRFKWTMAMKLPITA

SEQ ID NO: 249775 - protein, 15 aa, Artificial Sequence
  Description of Artificial Sequence: Synthetic peptide
  Seed: LRMKWMMAMKYPITA
LRMKWFMARKFPIYA

SEQ ID NO: 249776 - protein, 15 aa, Artificial Sequence
  Description of Artificial Sequence: Synthetic peptide
  Seed: LRMKWMMAMKYPITA
LRMKWFMALKVPIRA

SEQ ID NO: 249777 - protein, 15 aa, Artificial Sequence
  Description of Artificial Sequence: Synthetic peptide
  Seed: LRMKWMMAMKYPITA
LRMKWRMFMKLPITA

SEQ ID NO: 249778 - protein, 15 aa, Artificial Sequence
  Description of Artificial Sequence: Synthetic peptide
  Seed: LRMKWMMAMKYPITA
LRMKWFMAVKYPIRA

SEQ ID NO: 249779 - protein, 15 aa, Artificial Sequence
  Description of Artificial Sequence: Synthetic peptide
  Seed: LRMKWMMAMKYPITA
LRMKWFMAVKAPILA

SEQ ID NO: 249780 - protein, 15 aa, Artificial Sequence
  Description of Artificial Sequence: Synthetic peptide
  Seed: LRMKWMMAMKYPITA
LRMKWFMAIKMPITA

SEQ ID NO: 249781 - protein, 15 aa, Artificial Sequence
  Description of Artificial Sequence: Synthetic peptide
  Seed: LRMKWMMAMKYPITA
LRMKWFMALKYPIRA

SEQ ID NO: 249782 - protein, 15 aa, Artificial Sequence
  Description of Artificial Sequence: Synthetic peptide
  Seed: LRMKWMMAMKYPITA
LRRKWTMIMKIPITA

SEQ ID NO: 249783 - protein, 15 aa, Artificial Sequence
  Description of Artificial Sequence: Synthetic peptide
  Seed: LRMKWMMAMKYPITA
LRCKWEMFMKLPITA

SEQ ID NO: 249784 - protein, 15 aa, Artificial Sequence
  Description of Artificial Sequence: Synthetic peptide
  Seed: LRMKWMMAMKYPITA
LRMKWFMALKYPICA

SEQ ID NO: 249785 - protein, 15 aa, Artificial Sequence
  Description of Artificial Sequence: Synthetic peptide
  Seed: LRMKWMMAMKYPITA
LRMKWYMAMKFPIRA

SEQ ID NO: 249786 - protein, 15 aa, Artificial Sequence
  Description of Artificial Sequence: Synthetic peptide
  Seed: LRMKWMMAMKYPITA
LRMKWFMAVKYPIPA

SEQ ID NO: 249787 - protein, 15 aa, Artificial Sequence
  Description of Artificial Sequence: Synthetic peptide
  Seed: LRMKWMMAMKYPITA
LRRKWLMAMKLPITA

SEQ ID NO: 249788 - protein, 15 aa, Artificial Sequence
  Description of Artificial Sequence: Synthetic peptide
  Seed: LRMKWMMAMKYPITA
LRMKWFMATKWPITA

SEQ ID NO: 249789 - protein, 15 aa, Artificial Sequence
  Description of Artificial Sequence: Synthetic peptide
  Seed: LRMKWMMAMKYPITA
LRMKWFMALKYPIPA

SEQ ID NO: 249790 - protein, 15 aa, Artificial Sequence
  Description of Artificial Sequence: Synthetic peptide
  Seed: LRMKWMMAMKYPITA
LRMKWFMAMKWPIMA

SEQ ID NO: 249791 - protein, 15 aa, Artificial Sequence
  Description of Artificial Sequence: Synthetic peptide
  Seed: LRMKWMMAMKYPITA
LRMKSMMYMRYPQTA

SEQ ID NO: 249792 - protein, 15 aa, Artificial Sequence
  Description of Artificial Sequence: Synthetic peptide
  Seed: LRMKWMMAMKYPITA
LRVKWIMTMKLPITA

SEQ ID NO: 249793 - protein, 15 aa, Artificial Sequence
  Description of Artificial Sequence: Synthetic peptide
  Seed: LRMKWMMAMKYPITA
LRFKWRMFMKLPITA

SEQ ID NO: 249794 - protein, 15 aa, Artificial Sequence
  Description of Artificial Sequence: Synthetic peptide
  Seed: LRMKWMMAMKYPITA
LRMKWFMAIKWPIRA

SEQ ID NO: 249795 - protein, 15 aa, Artificial Sequence
  Description of Artificial Sequence: Synthetic peptide
  Seed: LRMKWMMAMKYPITA
LRMKWLMTMKIPITA

SEQ ID NO: 249796 - protein, 15 aa, Artificial Sequence
  Description of Artificial Sequence: Synthetic peptide
  Seed: LRMKWMMAMKYPITA
LRMKWYMALKYPIMA

SEQ ID NO: 249797 - protein, 15 aa, Artificial Sequence
  Description of Artificial Sequence: Synthetic peptide
  Seed: LRMKWMMAMKYPITA
LRMKWFMAHKFPIKA

SEQ ID NO: 249798 - protein, 15 aa, Artificial Sequence
  Description of Artificial Sequence: Synthetic peptide
  Seed: LRMKWMMAMKYPITA
LRFKWLMYMKFPITA

SEQ ID NO: 249799 - protein, 15 aa, Artificial Sequence
  Description of Artificial Sequence: Synthetic peptide
  Seed: LRMKWMMAMKYPITA
LRMKWFMAFKYPIRA

SEQ ID NO: 249800 - protein, 15 aa, Artificial Sequence
  Description of Artificial Sequence: Synthetic peptide
  Seed: LRMKWMMAMKYPITA
LRMKWFMAYKWPIMA

SEQ ID NO: 249801 - protein, 15 aa, Artificial Sequence
  Description of Artificial Sequence: Synthetic peptide
  Seed: LRMKWMMAMKYPITA
LRMKWFMALKYPIHA

SEQ ID NO: 249802 - protein, 15 aa, Artificial Sequence
  Description of Artificial Sequence: Synthetic peptide
  Seed: LRMKWMMAMKYPITA
LRMKWFMARKFPIAA

SEQ ID NO: 249803 - protein, 15 aa, Artificial Sequence
  Description of Artificial Sequence: Synthetic peptide
  Seed: LRMKWMMAMKYPITA
LRMKWFMAMKYPIAA

SEQ ID NO: 249804 - protein, 15 aa, Artificial Sequence
  Description of Artificial Sequence: Synthetic peptide
  Seed: LRMKWMMAMKYPITA
LRMKGMMAMMYPATA

SEQ ID NO: 249805 - protein, 15 aa, Artificial Sequence
  Description of Artificial Sequence: Synthetic peptide
  Seed: LRMKWMMAMKYPITA
LRMKWFMALKYPIGA

SEQ ID NO: 249806 - protein, 15 aa, Artificial Sequence
  Description of Artificial Sequence: Synthetic peptide
  Seed: LRMKWMMAMKYPITA
LRMKWFMAKKFPIEA

SEQ ID NO: 249807 - protein, 15 aa, Artificial Sequence
  Description of Artificial Sequence: Synthetic peptide
  Seed: LRMKWMMAMKYPITA
LRMKWYMATKWPILA

SEQ ID NO: 249808 - protein, 15 aa, Artificial Sequence
  Description of Artificial Sequence: Synthetic peptide
  Seed: LRMKWMMAMKYPITA
LRRKWTMLMKVPITA

SEQ ID NO: 249809 - protein, 15 aa, Artificial Sequence
  Description of Artificial Sequence: Synthetic peptide
  Seed: LRMKWMMAMKYPITA
LRMKWFMAYKFPIKA

SEQ ID NO: 249810 - protein, 15 aa, Artificial Sequence
  Description of Artificial Sequence: Synthetic peptide
  Seed: LRMKWMMAMKYPITA
LRMKWHMFMKFPITA

SEQ ID NO: 249811 - protein, 15 aa, Artificial Sequence
  Description of Artificial Sequence: Synthetic peptide
  Seed: LRMKWMMAMKYPITA
LRMKWFMAHKLPIAA

SEQ ID NO: 249812 - protein, 15 aa, Artificial Sequence
  Description of Artificial Sequence: Synthetic peptide
  Seed: LRMKWMMAMKYPITA
LRFKWHMWMKLPITA

SEQ ID NO: 249813 - protein, 15 aa, Artificial Sequence
  Description of Artificial Sequence: Synthetic peptide
  Seed: LRMKWMMAMKYPITA
LRRKWIMVMKLPITA

SEQ ID NO: 249814 - protein, 15 aa, Artificial Sequence
  Description of Artificial Sequence: Synthetic peptide
  Seed: LRMKWMMAMKYPITA
LRMKWWMALKFPIRA

SEQ ID NO: 249815 - protein, 15 aa, Artificial Sequence
  Description of Artificial Sequence: Synthetic peptide
  Seed: LRMKWMMAMKYPITA
LRMKWFMMMKMPITA

SEQ ID NO: 249816 - protein, 15 aa, Artificial Sequence
  Description of Artificial Sequence: Synthetic peptide
  Seed: LRMKWMMAMKYPITA
LRMKWLMAMKFPIRA

SEQ ID NO: 249817 - protein, 15 aa, Artificial Sequence
  Description of Artificial Sequence: Synthetic peptide
  Seed: LRMKWMMAMKYPITA
LRFKWRMFMKVPITA

SEQ ID NO: 249818 - protein, 15 aa, Artificial Sequence
  Description of Artificial Sequence: Synthetic peptide
  Seed: LRMKWMMAMKYPITA
LRMKWFMAEKYPIWA

SEQ ID NO: 249819 - protein, 15 aa, Artificial Sequence
  Description of Artificial Sequence: Synthetic peptide
  Seed: LRMKWMMAMKYPITA
LRRKWAMLMKLPITA

SEQ ID NO: 249820 - protein, 15 aa, Artificial Sequence
  Description of Artificial Sequence: Synthetic peptide
  Seed: LRMKWMMAMKYPITA
LRRKWTMLMKLPITA

SEQ ID NO: 249821 - protein, 15 aa, Artificial Sequence
  Description of Artificial Sequence: Synthetic peptide
  Seed: LRMKWMMAMKYPITA
LRMKTMMLMRYPPTA

SEQ ID NO: 249822 - protein, 15 aa, Artificial Sequence
  Description of Artificial Sequence: Synthetic peptide
  Seed: LRMKWMMAMKYPITA
LRIKWHMFMKAPITA

SEQ ID NO: 249823 - protein, 15 aa, Artificial Sequence
  Description of Artificial Sequence: Synthetic peptide
  Seed: LRMKWMMAMKYPITA
LRMKWFMASKFPIKA

SEQ ID NO: 249824 - protein, 15 aa, Artificial Sequence
  Description of Artificial Sequence: Synthetic peptide
  Seed: LRMKWMMAMKYPITA
LRFKWFMFMKEPITA

SEQ ID NO: 249825 - protein, 15 aa, Artificial Sequence
  Description of Artificial Sequence: Synthetic peptide
  Seed: LRMKWMMAMKYPITA
LRMKWFMANKYPIFA

SEQ ID NO: 249826 - protein, 15 aa, Artificial Sequence
  Description of Artificial Sequence: Synthetic peptide
  Seed: LRMKWMMAMKYPITA
LRMKWFMAMKLPIYA

SEQ ID NO: 249827 - protein, 15 aa, Artificial Sequence
  Description of Artificial Sequence: Synthetic peptide
  Seed: LRMKWMMAMKYPITA
LRFKWSMIMKNPITA

SEQ ID NO: 249828 - protein, 15 aa, Artificial Sequence
  Description of Artificial Sequence: Synthetic peptide
  Seed: LRMKWMMAMKYPITA
LRMKMMMPMRYPATA

SEQ ID NO: 249829 - protein, 15 aa, Artificial Sequence
  Description of Artificial Sequence: Synthetic peptide
  Seed: LRMKWMMAMKYPITA
LRCKWTMFMKIPITA

SEQ ID NO: 249830 - protein, 15 aa, Artificial Sequence
  Description of Artificial Sequence: Synthetic peptide
  Seed: LRMKWMMAMKYPITA
LRMKWFMAAKVPIIA

SEQ ID NO: 249831 - protein, 15 aa, Artificial Sequence
  Description of Artificial Sequence: Synthetic peptide
  Seed: LRMKWMMAMKYPITA
LRRKWSMLMKIPITA

SEQ ID NO: 249832 - protein, 15 aa, Artificial Sequence
  Description of Artificial Sequence: Synthetic peptide
  Seed: LRMKWMMAMKYPITA
LRMKWIMAHKFPITA

SEQ ID NO: 249833 - protein, 15 aa, Artificial Sequence
  Description of Artificial Sequence: Synthetic peptide
  Seed: LRMKWMMAMKYPITA
LRFKWRMFMKFPITA

SEQ ID NO: 249834 - protein, 15 aa, Artificial Sequence
  Description of Artificial Sequence: Synthetic peptide
  Seed: LRMKWMMAMKYPITA
LRFKWRMFMKIPITA

SEQ ID NO: 249835 - protein, 15 aa, Artificial Sequence
  Description of Artificial Sequence: Synthetic peptide
  Seed: LRMKWMMAMKYPITA
LRMKWFMASKWPITA

SEQ ID NO: 249836 - protein, 15 aa, Artificial Sequence
  Description of Artificial Sequence: Synthetic peptide
  Seed: LRMKWMMAMKYPITA
LRMKWMNAMAYAITA

SEQ ID NO: 249837 - protein, 15 aa, Artificial Sequence
  Description of Artificial Sequence: Synthetic peptide
  Seed: LRMKWMMAMKYPITA
LRFKWHMAMKLPITA

SEQ ID NO: 249838 - protein, 15 aa, Artificial Sequence
  Description of Artificial Sequence: Synthetic peptide
  Seed: LRMKWMMAMKYPITA
LRFKWKMFMKIPITA

SEQ ID NO: 249839 - protein, 15 aa, Artificial Sequence
  Description of Artificial Sequence: Synthetic peptide
  Seed: LRMKWMMAMKYPITA
LRMKWCMATKFPIIA

SEQ ID NO: 249840 - protein, 15 aa, Artificial Sequence
  Description of Artificial Sequence: Synthetic peptide
  Seed: LRMKWMMAMKYPITA
LRHKWTMFMKLPITA

SEQ ID NO: 249841 - protein, 15 aa, Artificial Sequence
  Description of Artificial Sequence: Synthetic peptide
  Seed: LRMKWMMAMKYPITA
LRFKWFMYMKLPITA

SEQ ID NO: 249842 - protein, 15 aa, Artificial Sequence
  Description of Artificial Sequence: Synthetic peptide
  Seed: LRMKWMMAMKYPITA
LRLKWSMYMKFPITA

SEQ ID NO: 249843 - protein, 15 aa, Artificial Sequence
  Description of Artificial Sequence: Synthetic peptide
  Seed: LRMKWMMAMKYPITA
LRCKWSMFMKVPITA

SEQ ID NO: 249844 - protein, 15 aa, Artificial Sequence
  Description of Artificial Sequence: Synthetic peptide
  Seed: LRMKWMMAMKYPITA
LRMKWLMKMKYPITA

SEQ ID NO: 249845 - protein, 15 aa, Artificial Sequence
  Description of Artificial Sequence: Synthetic peptide
  Seed: LRMKWMMAMKYPITA
LRFKWIMFMKIPITA

SEQ ID NO: 249846 - protein, 15 aa, Artificial Sequence
  Description of Artificial Sequence: Synthetic peptide
  Seed: LRMKWMMAMKYPITA
LRRKWSMLMKVPITA

SEQ ID NO: 249847 - protein, 15 aa, Artificial Sequence
  Description of Artificial Sequence: Synthetic peptide
  Seed: LRMKWMMAMKYPITA
LRRKWAMFMKVPITA

SEQ ID NO: 249848 - protein, 15 aa, Artificial Sequence
  Description of Artificial Sequence: Synthetic peptide
  Seed: LRMKWMMAMKYPITA
LRFKWTMMMKNPITA

SEQ ID NO: 249849 - protein, 15 aa, Artificial Sequence
  Description of Artificial Sequence: Synthetic peptide
  Seed: LRMKWMMAMKYPITA
LRMKWFMAKKWPIVA

SEQ ID NO: 249850 - protein, 15 aa, Artificial Sequence
  Description of Artificial Sequence: Synthetic peptide
  Seed: LRMKWMMAMKYPITA
LRMKWFMAVKLPIEA

SEQ ID NO: 249851 - protein, 15 aa, Artificial Sequence
  Description of Artificial Sequence: Synthetic peptide
  Seed: LRMKWMMAMKYPITA
LRFKWFMYMKIPITA

SEQ ID NO: 249852 - protein, 15 aa, Artificial Sequence
  Description of Artificial Sequence: Synthetic peptide
  Seed: LRMKWMMAMKYPITA
LRFKWAMIMKNPITA

SEQ ID NO: 249853 - protein, 15 aa, Artificial Sequence
  Description of Artificial Sequence: Synthetic peptide
  Seed: LRMKWMMAMKYPITA
LRIKWWMTMKHPITA

SEQ ID NO: 249854 - protein, 15 aa, Artificial Sequence
  Description of Artificial Sequence: Synthetic peptide
  Seed: LRMKWMMAMKYPITA
LRFKWSMMMKNPITA

SEQ ID NO: 249855 - protein, 15 aa, Artificial Sequence
  Description of Artificial Sequence: Synthetic peptide
  Seed: LRMKWMMAMKYPITA
LRIKWQMTMKLPITA

SEQ ID NO: 249856 - protein, 15 aa, Artificial Sequence
  Description of Artificial Sequence: Synthetic peptide
  Seed: LRMKWMMAMKYPITA
LRFKWFMAMKLPITA

SEQ ID NO: 249857 - protein, 15 aa, Artificial Sequence
  Description of Artificial Sequence: Synthetic peptide
  Seed: LRMKWMMAMKYPITA
LRFKWFMYMKVPITA

SEQ ID NO: 249858 - protein, 15 aa, Artificial Sequence
  Description of Artificial Sequence: Synthetic peptide
  Seed: LRMKWMMAMKYPITA
LRFKWFMMMKVPITA

SEQ ID NO: 249859 - protein, 15 aa, Artificial Sequence
  Description of Artificial Sequence: Synthetic peptide
  Seed: LRMKWMMAMKYPITA
LRRKWIMIMKEPITA

SEQ ID NO: 249860 - protein, 15 aa, Artificial Sequence
  Description of Artificial Sequence: Synthetic peptide
  Seed: LRMKWMMAMKYPITA
LRMKWFMARKWPILA

SEQ ID NO: 249861 - protein, 15 aa, Artificial Sequence
  Description of Artificial Sequence: Synthetic peptide
  Seed: LRMKWMMAMKYPITA
LRFKWHMAMKIPITA

SEQ ID NO: 249862 - protein, 15 aa, Artificial Sequence
  Description of Artificial Sequence: Synthetic peptide
  Seed: LRMKWMMAMKYPITA
LRRKWTMFMKMPITA

SEQ ID NO: 249863 - protein, 15 aa, Artificial Sequence
  Description of Artificial Sequence: Synthetic peptide
  Seed: LRMKWMMAMKYPITA
LRRKWAMFMKIPITA

SEQ ID NO: 249864 - protein, 15 aa, Artificial Sequence
  Description of Artificial Sequence: Synthetic peptide
  Seed: LRMKWMMAMKYPITA
LRFKWQMWMKFPITA

SEQ ID NO: 249865 - protein, 15 aa, Artificial Sequence
  Description of Artificial Sequence: Synthetic peptide
  Seed: LRMKWMMAMKYPITA
LRFKWTMVMKNPITA

SEQ ID NO: 249866 - protein, 15 aa, Artificial Sequence
  Description of Artificial Sequence: Synthetic peptide
  Seed: LRMKWMMAMKYPITA
LRLKWHMIMKLPITA

SEQ ID NO: 249867 - protein, 15 aa, Artificial Sequence
  Description of Artificial Sequence: Synthetic peptide
  Seed: LRMKWMMAMKYPITA
LRMKWMMAKKFPILA

SEQ ID NO: 249868 - protein, 15 aa, Artificial Sequence
  Description of Artificial Sequence: Synthetic peptide
  Seed: LRMKWMMAMKYPITA
LRLKWVMSMKLPITA

SEQ ID NO: 249869 - protein, 15 aa, Artificial Sequence
  Description of Artificial Sequence: Synthetic peptide
  Seed: LRMKWMMAMKYPITA
LRMKWYMAKKFPIMA

SEQ ID NO: 249870 - protein, 15 aa, Artificial Sequence
  Description of Artificial Sequence: Synthetic peptide
  Seed: LRMKWMMAMKYPITA
LRRKWLMAMKFPITA

SEQ ID NO: 249871 - protein, 15 aa, Artificial Sequence
  Description of Artificial Sequence: Synthetic peptide
  Seed: LRMKWMMAMKYPITA
LRFKWFMMMKMPITA

SEQ ID NO: 249872 - protein, 15 aa, Artificial Sequence
  Description of Artificial Sequence: Synthetic peptide
  Seed: LRMKWMMAMKYPITA
LRRKWAMFMKLPITA

SEQ ID NO: 249873 - protein, 15 aa, Artificial Sequence
  Description of Artificial Sequence: Synthetic peptide
  Seed: LRMKWMMAMKYPITA
LRRKWHMIMKLPITA

SEQ ID NO: 249874 - protein, 15 aa, Artificial Sequence
  Description of Artificial Sequence: Synthetic peptide
  Seed: LRMKWMMAMKYPITA
LRRKWTMFMKFPITA

SEQ ID NO: 249875 - protein, 15 aa, Artificial Sequence
  Description of Artificial Sequence: Synthetic peptide
  Seed: LRMKWMMAMKYPITA
LRFKWIMYMKLPITA

SEQ ID NO: 249876 - protein, 15 aa, Artificial Sequence
  Description of Artificial Sequence: Synthetic peptide
  Seed: LRMKWMMAMKYPITA
LRMKWIMTMKIPITA

SEQ ID NO: 249877 - protein, 15 aa, Artificial Sequence
  Description of Artificial Sequence: Synthetic peptide
  Seed: LRMKWMMAMKYPITA
LRVKWVMFMKEPITA

SEQ ID NO: 249878 - protein, 15 aa, Artificial Sequence
  Description of Artificial Sequence: Synthetic peptide
  Seed: LRMKWMMAMKYPITA
LRFKWSMAMKFPITA

SEQ ID NO: 249879 - protein, 15 aa, Artificial Sequence
  Description of Artificial Sequence: Synthetic peptide
  Seed: LRMKWMMAMKYPITA
LRMKAMMLMHYPRTA

SEQ ID NO: 249880 - protein, 15 aa, Artificial Sequence
  Description of Artificial Sequence: Synthetic peptide
  Seed: LRMKWMMAMKYPITA
LRVKWLMTMKLPITA

SEQ ID NO: 249881 - protein, 15 aa, Artificial Sequence
  Description of Artificial Sequence: Synthetic peptide
  Seed: LRMKWMMAMKYPITA
LRFKWTMAMKMPITA

SEQ ID NO: 249882 - protein, 15 aa, Artificial Sequence
  Description of Artificial Sequence: Synthetic peptide
  Seed: LRMKWMMAMKYPITA
LRYKWVMFMKLPITA

SEQ ID NO: 249883 - protein, 15 aa, Artificial Sequence
  Description of Artificial Sequence: Synthetic peptide
  Seed: LRMKWMMAMKYPITA
LRMKWHMFMKAPITA

SEQ ID NO: 249884 - protein, 15 aa, Artificial Sequence
  Description of Artificial Sequence: Synthetic peptide
  Seed: LRMKWMMAMKYPITA
LRLKWEMMMKFPITA

SEQ ID NO: 249885 - protein, 15 aa, Artificial Sequence
  Description of Artificial Sequence: Synthetic peptide
  Seed: LRMKWMMAMKYPITA
LRRKWTMMMKLPITA

SEQ ID NO: 249886 - protein, 15 aa, Artificial Sequence
  Description of Artificial Sequence: Synthetic peptide
  Seed: LRMKWMMAMKYPITA
LRWKWHMFMKFPITA

SEQ ID NO: 249887 - protein, 15 aa, Artificial Sequence
  Description of Artificial Sequence: Synthetic peptide
  Seed: LRMKWMMAMKYPITA
LRTKWTMFMKLPITA

SEQ ID NO: 249888 - protein, 15 aa, Artificial Sequence
  Description of Artificial Sequence: Synthetic peptide
  Seed: LRMKWMMAMKYPITA
LRFKWSMAMKMPITA

SEQ ID NO: 249889 - protein, 15 aa, Artificial Sequence
  Description of Artificial Sequence: Synthetic peptide
  Seed: LRMKWMMAMKYPITA
LRYKWTMWMKLPITA

SEQ ID NO: 249890 - protein, 15 aa, Artificial Sequence
  Description of Artificial Sequence: Synthetic peptide
  Seed: LRMKWMMAMKYPITA
LRIKWVMTMKLPITA

SEQ ID NO: 249891 - protein, 15 aa, Artificial Sequence
  Description of Artificial Sequence: Synthetic peptide
  Seed: LRMKWMMAMKYPITA
LRFKWHMAMKVPITA

SEQ ID NO: 249892 - protein, 15 aa, Artificial Sequence
  Description of Artificial Sequence: Synthetic peptide
  Seed: LRMKWMMAMKYPITA
LRFKWMMYMKLPITA

SEQ ID NO: 249893 - protein, 15 aa, Artificial Sequence
  Description of Artificial Sequence: Synthetic peptide
  Seed: LRMKWMMAMKYPITA
LRFKWVMAMKLPITA

SEQ ID NO: 249894 - protein, 15 aa, Artificial Sequence
  Description of Artificial Sequence: Synthetic peptide
  Seed: LRMKWMMAMKYPITA
LRFKWSMVMKNPITA

SEQ ID NO: 249895 - protein, 15 aa, Artificial Sequence
  Description of Artificial Sequence: Synthetic peptide
  Seed: LRMKWMMAMKYPITA
LRLKWSMWMKIPITA

SEQ ID NO: 249896 - protein, 15 aa, Artificial Sequence
  Description of Artificial Sequence: Synthetic peptide
  Seed: LRMKWMMAMKYPITA
LRMKRMMTMFYPITA

SEQ ID NO: 249897 - protein, 15 aa, Artificial Sequence
  Description of Artificial Sequence: Synthetic peptide
  Seed: LRMKWMMAMKYPITA
LRMKWFMDMKAPITA

SEQ ID NO: 249898 - protein, 15 aa, Artificial Sequence
  Description of Artificial Sequence: Synthetic peptide
  Seed: LRMKWMMAMKYPITA
LRFKWEMAMKLPITA

SEQ ID NO: 249899 - protein, 15 aa, Artificial Sequence
  Description of Artificial Sequence: Synthetic peptide
  Seed: LRMKWMMAMKYPITA
LRMKWMMAKKFPIIA

SEQ ID NO: 249900 - protein, 15 aa, Artificial Sequence
  Description of Artificial Sequence: Synthetic peptide
  Seed: LRMKWMMAMKYPITA
LRYKWTMAMKLPITA

SEQ ID NO: 249901 - protein, 15 aa, Artificial Sequence
  Description of Artificial Sequence: Synthetic peptide
  Seed: LRMKWMMAMKYPITA
LRMKRMMSMFYPVTA

SEQ ID NO: 249902 - protein, 15 aa, Artificial Sequence
  Description of Artificial Sequence: Synthetic peptide
  Seed: LRMKWMMAMKYPITA
LRRKWTMFMKAPITA

SEQ ID NO: 249903 - protein, 15 aa, Artificial Sequence
  Description of Artificial Sequence: Synthetic peptide
  Seed: LRMKWMMAMKYPITA
LRLKWQMFMKAPITA

SEQ ID NO: 249904 - protein, 15 aa, Artificial Sequence
  Description of Artificial Sequence: Synthetic peptide
  Seed: LRMKWMMAMKYPITA
LRIKWFMHMKLPITA

SEQ ID NO: 249905 - protein, 15 aa, Artificial Sequence
  Description of Artificial Sequence: Synthetic peptide
  Seed: LRMKWMMAMKYPITA
LRFKWSMIMKAPITA

SEQ ID NO: 249906 - protein, 15 aa, Artificial Sequence
  Description of Artificial Sequence: Synthetic peptide
  Seed: LRMKWMMAMKYPITA
LRMKWFMAFKYPIKA

SEQ ID NO: 249907 - protein, 15 aa, Artificial Sequence
  Description of Artificial Sequence: Synthetic peptide
  Seed: LRMKWMMAMKYPITA
LRCKWSMFMKIPITA

SEQ ID NO: 249908 - protein, 15 aa, Artificial Sequence
  Description of Artificial Sequence: Synthetic peptide
  Seed: LRMKWMMAMKYPITA
LRFKWIMAMKFPITA

SEQ ID NO: 249909 - protein, 15 aa, Artificial Sequence
  Description of Artificial Sequence: Synthetic peptide
  Seed: LRMKWMMAMKYPITA
LRLKWLMQMKYPITA

SEQ ID NO: 249910 - protein, 15 aa, Artificial Sequence
  Description of Artificial Sequence: Synthetic peptide
  Seed: LRMKWMMAMKYPITA
LRMKTMMVMKYPQTA

SEQ ID NO: 249911 - protein, 15 aa, Artificial Sequence
  Description of Artificial Sequence: Synthetic peptide
  Seed: LRMKWMMAMKYPITA
LRIKWMMSMKFPITA

SEQ ID NO: 249912 - protein, 15 aa, Artificial Sequence
  Description of Artificial Sequence: Synthetic peptide
  Seed: LRMKWMMAMKYPITA
LRFKWAMVMKNPITA

SEQ ID NO: 249913 - protein, 15 aa, Artificial Sequence
  Description of Artificial Sequence: Synthetic peptide
  Seed: LRMKWMMAMKYPITA
LRIKWHMLMKFPITA

SEQ ID NO: 249914 - protein, 15 aa, Artificial Sequence
  Description of Artificial Sequence: Synthetic peptide
  Seed: LRMKWMMAMKYPITA
LRFKWHMAMKFPITA

SEQ ID NO: 249915 - protein, 15 aa, Artificial Sequence
  Description of Artificial Sequence: Synthetic peptide
  Seed: LRMKWMMAMKYPITA
LRCKWEMFMKVPITA

SEQ ID NO: 249916 - protein, 15 aa, Artificial Sequence
  Description of Artificial Sequence: Synthetic peptide
  Seed: LRMKWMMAMKYPITA
LRFKWFMIMKVPITA

SEQ ID NO: 249917 - protein, 15 aa, Artificial Sequence
  Description of Artificial Sequence: Synthetic peptide
  Seed: LRMKWMMAMKYPITA
LRMKAMMAMPYPFTA

SEQ ID NO: 249918 - protein, 15 aa, Artificial Sequence
  Description of Artificial Sequence: Synthetic peptide
  Seed: LRMKWMMAMKYPITA
LRFKWNMIMKLPITA

SEQ ID NO: 249919 - protein, 15 aa, Artificial Sequence
  Description of Artificial Sequence: Synthetic peptide
  Seed: LRMKWMMAMKYPITA
LRYKWFMAMKLPITA

SEQ ID NO: 249920 - protein, 15 aa, Artificial Sequence
  Description of Artificial Sequence: Synthetic peptide
  Seed: LRMKWMMAMKYPITA
LRMKWFMMMKVPITA

SEQ ID NO: 249921 - protein, 15 aa, Artificial Sequence
  Description of Artificial Sequence: Synthetic peptide
  Seed: LRMKWMMAMKYPITA
LRIKWFMMMKMPITA

SEQ ID NO: 249922 - protein, 15 aa, Artificial Sequence
  Description of Artificial Sequence: Synthetic peptide
  Seed: LRMKWMMAMKYPITA
LRYKWTMAMKIPITA

SEQ ID NO: 249923 - protein, 15 aa, Artificial Sequence
  Description of Artificial Sequence: Synthetic peptide
  Seed: LRMKWMMAMKYPITA
LRMKSMMAMPYPATA

SEQ ID NO: 249924 - protein, 15 aa, Artificial Sequence
  Description of Artificial Sequence: Synthetic peptide
  Seed: LRMKWMMAMKYPITA
LRFKWTMWMKYPITA

SEQ ID NO: 249925 - protein, 15 aa, Artificial Sequence
  Description of Artificial Sequence: Synthetic peptide
  Seed: LRMKWMMAMKYPITA
LRLKWQMSMKAPITA

SEQ ID NO: 249926 - protein, 15 aa, Artificial Sequence
  Description of Artificial Sequence: Synthetic peptide
  Seed: LRMKWMMAMKYPITA
LRMKPMMAMMYPATA

SEQ ID NO: 249927 - protein, 15 aa, Artificial Sequence
  Description of Artificial Sequence: Synthetic peptide
  Seed: LRMKWMMAMKYPITA
LRFKWHMFMKRPITA

SEQ ID NO: 249928 - protein, 15 aa, Artificial Sequence
  Description of Artificial Sequence: Synthetic peptide
  Seed: LRMKWMMAMKYPITA
LRHKWSMFMKVPITA

SEQ ID NO: 249929 - protein, 15 aa, Artificial Sequence
  Description of Artificial Sequence: Synthetic peptide
  Seed: LRMKWMMAMKYPITA
LRFKWSMFMKRPITA

SEQ ID NO: 249930 - protein, 15 aa, Artificial Sequence
  Description of Artificial Sequence: Synthetic peptide
  Seed: LRMKWMMAMKYPITA
LRIKWLMSMKFPITA

SEQ ID NO: 249931 - protein, 15 aa, Artificial Sequence
  Description of Artificial Sequence: Synthetic peptide
  Seed: LRMKWMMAMKYPITA
LRIKWHMMMKLPITA

SEQ ID NO: 249932 - protein, 15 aa, Artificial Sequence
  Description of Artificial Sequence: Synthetic peptide
  Seed: LRMKWMMAMKYPITA
LRRKWHMAMKIPITA

SEQ ID NO: 249933 - protein, 15 aa, Artificial Sequence
  Description of Artificial Sequence: Synthetic peptide
  Seed: LRMKWMMAMKYPITA
LRFKWTMWMKNPITA

SEQ ID NO: 249934 - protein, 15 aa, Artificial Sequence
  Description of Artificial Sequence: Synthetic peptide
  Seed: LRMKWMMAMKYPITA
LRIKWIMSMKFPITA

SEQ ID NO: 249935 - protein, 15 aa, Artificial Sequence
  Description of Artificial Sequence: Synthetic peptide
  Seed: LRMKWMMAMKYPITA
LRFKWNMIMKVPITA

SEQ ID NO: 249936 - protein, 15 aa, Artificial Sequence
  Description of Artificial Sequence: Synthetic peptide
  Seed: LRMKWMMAMKYPITA
LRFKWHMFMKWPITA

SEQ ID NO: 249937 - protein, 15 aa, Artificial Sequence
  Description of Artificial Sequence: Synthetic peptide
  Seed: LRMKWMMAMKYPITA
LRFKWTMAMKAPITA

SEQ ID NO: 249938 - protein, 15 aa, Artificial Sequence
  Description of Artificial Sequence: Synthetic peptide
  Seed: LRMKWMMAMKYPITA
LRFKWSMVMKMPITA

SEQ ID NO: 249939 - protein, 15 aa, Artificial Sequence
  Description of Artificial Sequence: Synthetic peptide
  Seed: LRMKWMMAMKYPITA
LRMKWWMMMKVPITA

SEQ ID NO: 249940 - protein, 15 aa, Artificial Sequence
  Description of Artificial Sequence: Synthetic peptide
  Seed: LRMKWMMAMKYPITA
LRRKWVMVMKDPITA

SEQ ID NO: 249941 - protein, 15 aa, Artificial Sequence
  Description of Artificial Sequence: Synthetic peptide
  Seed: LRMKWMMAMKYPITA
LRFKWAMAMKNPITA

SEQ ID NO: 249942 - protein, 15 aa, Artificial Sequence
  Description of Artificial Sequence: Synthetic peptide
  Seed: LRMKWMMAMKYPITA
LRFKWYMMMKLPITA

SEQ ID NO: 249943 - protein, 15 aa, Artificial Sequence
  Description of Artificial Sequence: Synthetic peptide
  Seed: LRMKWMMAMKYPITA
LRFKWFMPMKIPITA

SEQ ID NO: 249944 - protein, 15 aa, Artificial Sequence
  Description of Artificial Sequence: Synthetic peptide
  Seed: LRMKWMMAMKYPITA
LRFKWFMPMKLPITA

SEQ ID NO: 249945 - protein, 15 aa, Artificial Sequence
  Description of Artificial Sequence: Synthetic peptide
  Seed: LRMKWMMAMKYPITA
LRIKWNMYMKLPITA

SEQ ID NO: 249946 - protein, 15 aa, Artificial Sequence
  Description of Artificial Sequence: Synthetic peptide
  Seed: LRMKWMMAMKYPITA
LRFKWTMSMKLPITA

SEQ ID NO: 249947 - protein, 15 aa, Artificial Sequence
  Description of Artificial Sequence: Synthetic peptide
  Seed: LRMKWMMAMKYPITA
LRMKGMMNMSYPFTA

SEQ ID NO: 249948 - protein, 15 aa, Artificial Sequence
  Description of Artificial Sequence: Synthetic peptide
  Seed: LRMKWMMAMKYPITA
LRMKSMMAMSYPMTA

SEQ ID NO: 249949 - protein, 15 aa, Artificial Sequence
  Description of Artificial Sequence: Synthetic peptide
  Seed: LRMKWMMAMKYPITA
LRFKWVMPMKLPITA

SEQ ID NO: 249950 - protein, 15 aa, Artificial Sequence
  Description of Artificial Sequence: Synthetic peptide
  Seed: LRMKWMMAMKYPITA
LRMKTMMLMRYPFTA

SEQ ID NO: 249951 - protein, 15 aa, Artificial Sequence
  Description of Artificial Sequence: Synthetic peptide
  Seed: LRMKWMMAMKYPITA
LRLKWHMFMKEPITA

SEQ ID NO: 249952 - protein, 15 aa, Artificial Sequence
  Description of Artificial Sequence: Synthetic peptide
  Seed: LRMKWMMAMKYPITA
LRMKFMMHMLYPMTA

SEQ ID NO: 249953 - protein, 15 aa, Artificial Sequence
  Description of Artificial Sequence: Synthetic peptide
  Seed: LRMKWMMAMKYPITA
LRMKTMMIMKYPLTA

SEQ ID NO: 249954 - protein, 15 aa, Artificial Sequence
  Description of Artificial Sequence: Synthetic peptide
  Seed: LRMKWMMAMKYPITA
LRVKWLMSMKFPITA

SEQ ID NO: 249955 - protein, 15 aa, Artificial Sequence
  Description of Artificial Sequence: Synthetic peptide
  Seed: ANQRLNPMHQLLRHF
ANQRFNPMHILLRHF

SEQ ID NO: 249956 - protein, 15 aa, Artificial Sequence
  Description of Artificial Sequence: Synthetic peptide
  Seed: LRMKWMMAMKYPITA
LRLKWLMAMKFPITA

SEQ ID NO: 249957 - protein, 15 aa, Artificial Sequence
  Description of Artificial Sequence: Synthetic peptide
  Seed: LRMKWMMAMKYPITA
LRFKWHMWMKMPITA

SEQ ID NO: 249958 - protein, 15 aa, Artificial Sequence
  Description of Artificial Sequence: Synthetic peptide
  Seed: LRMKWMMAMKYPITA
LRVKWIMSMKYPITA

SEQ ID NO: 249959 - protein, 15 aa, Artificial Sequence
  Description of Artificial Sequence: Synthetic peptide
  Seed: LRMKWMMAMKYPITA
LRWKWFMAMKLPITA

SEQ ID NO: 249960 - protein, 15 aa, Artificial Sequence
  Description of Artificial Sequence: Synthetic peptide
  Seed: ANQRLNPMHQLLRHF
ANQRFNPIHVLLRHF

SEQ ID NO: 249961 - protein, 15 aa, Artificial Sequence
  Description of Artificial Sequence: Synthetic peptide
  Seed: ANQRLNPMHQLLRHF
ANQRFNPLHILLRHF

SEQ ID NO: 249962 - protein, 15 aa, Artificial Sequence
  Description of Artificial Sequence: Synthetic peptide
  Seed: LRMKWMMAMKYPITA
LRRKWWMAMKVPITA

SEQ ID NO: 249963 - protein, 15 aa, Artificial Sequence
  Description of Artificial Sequence: Synthetic peptide
  Seed: LRMKWMMAMKYPITA
LRYKWGMFMKLPITA

SEQ ID NO: 249964 - protein, 15 aa, Artificial Sequence
  Description of Artificial Sequence: Synthetic peptide
  Seed: LRMKWMMAMKYPITA
LRYKWVMFMKYPITA

SEQ ID NO: 249965 - protein, 15 aa, Artificial Sequence
  Description of Artificial Sequence: Synthetic peptide
  Seed: ANQRLNPMHQLLRHF
ANQRFNPMHVLLRHF

SEQ ID NO: 249966 - protein, 15 aa, Artificial Sequence
  Description of Artificial Sequence: Synthetic peptide
  Seed: LRMKWMMAMKYPITA
LRKKWSMFMKIPITA

SEQ ID NO: 249967 - protein, 15 aa, Artificial Sequence
  Description of Artificial Sequence: Synthetic peptide
  Seed: LRMKWMMAMKYPITA
LRIKWHMIMKLPITA

SEQ ID NO: 249968 - protein, 15 aa, Artificial Sequence
  Description of Artificial Sequence: Synthetic peptide
  Seed: LRMKWMMAMKYPITA
LRMKTMMIMKYPTTA

SEQ ID NO: 249969 - protein, 15 aa, Artificial Sequence
  Description of Artificial Sequence: Synthetic peptide
  Seed: ANQRLNPMHQLLRHF
ANQRFNPLHVLLRHF

SEQ ID NO: 249970 - protein, 15 aa, Artificial Sequence
  Description of Artificial Sequence: Synthetic peptide
  Seed: LRMKWMMAMKYPITA
LRFKWKMFMKEPITA

SEQ ID NO: 249971 - protein, 15 aa, Artificial Sequence
  Description of Artificial Sequence: Synthetic peptide
  Seed: LRMKWMMAMKYPITA
LRFKWFMVMKVPITA

SEQ ID NO: 249972 - protein, 15 aa, Artificial Sequence
  Description of Artificial Sequence: Synthetic peptide
  Seed: LRMKWMMAMKYPITA
LRFKWNMMMKLPITA

SEQ ID NO: 249973 - protein, 15 aa, Artificial Sequence
  Description of Artificial Sequence: Synthetic peptide
  Seed: ANQRLNPMHQLLRHF
ANQRINPMHILLLHF

SEQ ID NO: 249974 - protein, 15 aa, Artificial Sequence
  Description of Artificial Sequence: Synthetic peptide
  Seed: LRMKWMMAMKYPITA
LRFKWAMPMKIPITA

SEQ ID NO: 249975 - protein, 15 aa, Artificial Sequence
  Description of Artificial Sequence: Synthetic peptide
  Seed: LRMKWMMAMKYPITA
LRYKWHMIMKLPITA

SEQ ID NO: 249976 - protein, 15 aa, Artificial Sequence
  Description of Artificial Sequence: Synthetic peptide
  Seed: LRMKWMMAMKYPITA
LRFKWSMPMKIPITA

SEQ ID NO: 249977 - protein, 15 aa, Artificial Sequence
  Description of Artificial Sequence: Synthetic peptide
  Seed: LRMKWMMAMKYPITA
LRIKWWMIMKAPITA

SEQ ID NO: 249978 - protein, 15 aa, Artificial Sequence
  Description of Artificial Sequence: Synthetic peptide
  Seed: LRMKWMMAMKYPITA
LRFKWEMAMKVPITA

SEQ ID NO: 249979 - protein, 15 aa, Artificial Sequence
  Description of Artificial Sequence: Synthetic peptide
  Seed: ANQRLNPMHQLLRHF
ANQRINPIHALLFHF

SEQ ID NO: 249980 - protein, 15 aa, Artificial Sequence
  Description of Artificial Sequence: Synthetic peptide
  Seed: LRMKWMMAMKYPITA
LRMKFMMNMFYPSTA

SEQ ID NO: 249981 - protein, 15 aa, Artificial Sequence
  Description of Artificial Sequence: Synthetic peptide
  Seed: LRMKWMMAMKYPITA
LRFKWHMFMKHPITA

SEQ ID NO: 249982 - protein, 15 aa, Artificial Sequence
  Description of Artificial Sequence: Synthetic peptide
  Seed: LRMKWMMAMKYPITA
LRFKWTMAMKSPITA

SEQ ID NO: 249983 - protein, 15 aa, Artificial Sequence
  Description of Artificial Sequence: Synthetic peptide
  Seed: ANQRLNPMHQLLRHF
ANQRINPIHILLVHF

SEQ ID NO: 249984 - protein, 15 aa, Artificial Sequence
  Description of Artificial Sequence: Synthetic peptide
  Seed: LRMKWMMAMKYPITA
LRMKRMMAMFYPLTA

SEQ ID NO: 249985 - protein, 15 aa, Artificial Sequence
  Description of Artificial Sequence: Synthetic peptide
  Seed: ANQRLNPMHQLLRHF
ANQRFNPIHLLLRHF

SEQ ID NO: 249986 - protein, 15 aa, Artificial Sequence
  Description of Artificial Sequence: Synthetic peptide
  Seed: ANQRLNPMHQLLRHF
ANQRFNPFHALLRHF

SEQ ID NO: 249987 - protein, 15 aa, Artificial Sequence
  Description of Artificial Sequence: Synthetic peptide
  Seed: LRMKWMMAMKYPITA
LRFKWTMLMKRPITA

SEQ ID NO: 249988 - protein, 15 aa, Artificial Sequence
  Description of Artificial Sequence: Synthetic peptide
  Seed: LRMKWMMAMKYPITA
LRFKWAMIMKDPITA

SEQ ID NO: 249989 - protein, 15 aa, Artificial Sequence
  Description of Artificial Sequence: Synthetic peptide
  Seed: LRMKWMMAMKYPITA
LRMKAMMLMKYPLTA

SEQ ID NO: 249990 - protein, 15 aa, Artificial Sequence
  Description of Artificial Sequence: Synthetic peptide
  Seed: LRMKWMMAMKYPITA
LRMKMMMRMTYPHTA

SEQ ID NO: 249991 - protein, 15 aa, Artificial Sequence
  Description of Artificial Sequence: Synthetic peptide
  Seed: LRMKWMMAMKYPITA
LRLKWMMSMKYPITA

SEQ ID NO: 249992 - protein, 15 aa, Artificial Sequence
  Description of Artificial Sequence: Synthetic peptide
  Seed: LRMKWMMAMKYPITA
LRFKWTMIMKRPITA

SEQ ID NO: 249993 - protein, 15 aa, Artificial Sequence
  Description of Artificial Sequence: Synthetic peptide
  Seed: LRMKWMMAMKYPITA
LRLKWHMAMKLPITA

SEQ ID NO: 249994 - protein, 15 aa, Artificial Sequence
  Description of Artificial Sequence: Synthetic peptide
  Seed: LRMKWMMAMKYPITA
LRMKRMMTMFYPMTA

SEQ ID NO: 249995 - protein, 15 aa, Artificial Sequence
  Description of Artificial Sequence: Synthetic peptide
  Seed: LRMKWMMAMKYPITA
LRFKWNMYMKIPITA

SEQ ID NO: 249996 - protein, 15 aa, Artificial Sequence
  Description of Artificial Sequence: Synthetic peptide
  Seed: LRMKWMMAMKYPITA
LRFKWMMTMKLPITA

SEQ ID NO: 249997 - protein, 15 aa, Artificial Sequence
  Description of Artificial Sequence: Synthetic peptide
  Seed: ANQRLNPMHQLLRHF
ANQRLNPLHALLRHF

SEQ ID NO: 249998 - protein, 15 aa, Artificial Sequence
  Description of Artificial Sequence: Synthetic peptide
  Seed: LRMKWMMAMKYPITA
LRLKWMMTMKYPITA

SEQ ID NO: 249999 - protein, 15 aa, Artificial Sequence
  Description of Artificial Sequence: Synthetic peptide
  Seed: LRMKWMMAMKYPITA
LRFKWIMSMKLPITA

SEQ ID NO: 250000 - protein, 15 aa, Artificial Sequence
  Description of Artificial Sequence: Synthetic peptide
  Seed: LRMKWMMAMKYPITA
LRLKWHMIMKVPITA

SEQ ID NO: 250001 - protein, 15 aa, Artificial Sequence
  Description of Artificial Sequence: Synthetic peptide
  Seed: LRMKWMMAMKYPITA
LRFKWSMSMKIPITA

SEQ ID NO: 250002 - protein, 15 aa, Artificial Sequence
  Description of Artificial Sequence: Synthetic peptide
  Seed: ANQRLNPMHQLLRHF
ANQRINPLHILLLHF

SEQ ID NO: 250003 - protein, 15 aa, Artificial Sequence
  Description of Artificial Sequence: Synthetic peptide
  Seed: LRMKWMMAMKYPITA
LRMKWLMSMKYPITA

SEQ ID NO: 250004 - protein, 15 aa, Artificial Sequence
  Description of Artificial Sequence: Synthetic peptide
  Seed: LRMKWMMAMKYPITA
LRFKWSMMMKTPITA

SEQ ID NO: 250005 - protein, 15 aa, Artificial Sequence
  Description of Artificial Sequence: Synthetic peptide
  Seed: LRMKWMMAMKYPITA
LRRKWMMFMKLPITA

SEQ ID NO: 250006 - protein, 15 aa, Artificial Sequence
  Description of Artificial Sequence: Synthetic peptide
  Seed: LRMKWMMAMKYPITA
LRMKWLMTMKMPITA

SEQ ID NO: 250007 - protein, 15 aa, Artificial Sequence
  Description of Artificial Sequence: Synthetic peptide
  Seed: LRMKWMMAMKYPITA
LRMKWMMTMKMPITA

SEQ ID NO: 250008 - protein, 15 aa, Artificial Sequence
  Description of Artificial Sequence: Synthetic peptide
  Seed: ANQRLNPMHQLLRHF
ANQRINPMHHLLLHF

SEQ ID NO: 250009 - protein, 15 aa, Artificial Sequence
  Description of Artificial Sequence: Synthetic peptide
  Seed: ANQRLNPMHQLLRHF
ANQRFNPIHTLLRHF

SEQ ID NO: 250010 - protein, 15 aa, Artificial Sequence
  Description of Artificial Sequence: Synthetic peptide
  Seed: LRMKWMMAMKYPITA
LRFKWIMAMKYPITA

SEQ ID NO: 250011 - protein, 15 aa, Artificial Sequence
  Description of Artificial Sequence: Synthetic peptide
  Seed: LRMKWMMAMKYPITA
LRFKWSMAMKSPITA

SEQ ID NO: 250012 - protein, 15 aa, Artificial Sequence
  Description of Artificial Sequence: Synthetic peptide
  Seed: ANQRLNPMHQLLRHF
ANQRINPIHILLLHF

SEQ ID NO: 250013 - protein, 15 aa, Artificial Sequence
  Description of Artificial Sequence: Synthetic peptide
  Seed: LRMKWMMAMKYPITA
LRHKWEMFMKIPITA

SEQ ID NO: 250014 - protein, 15 aa, Artificial Sequence
  Description of Artificial Sequence: Synthetic peptide
  Seed: LRMKWMMAMKYPITA
LRFKWMMAMKFPITA

SEQ ID NO: 250015 - protein, 15 aa, Artificial Sequence
  Description of Artificial Sequence: Synthetic peptide
  Seed: ANQRLNPMHQLLRHF
ANQRINPLHILLIHF

SEQ ID NO: 250016 - protein, 15 aa, Artificial Sequence
  Description of Artificial Sequence: Synthetic peptide
  Seed: LRMKWMMAMKYPITA
LRMKSMMAMSYPATA

SEQ ID NO: 250017 - protein, 15 aa, Artificial Sequence
  Description of Artificial Sequence: Synthetic peptide
  Seed: ANQRLNPMHQLLRHF
ANQRINPIHVLLIHF

SEQ ID NO: 250018 - protein, 15 aa, Artificial Sequence
  Description of Artificial Sequence: Synthetic peptide
  Seed: LRMKWMMAMKYPITA
LRFKWFMFMKYPITA

SEQ ID NO: 250019 - protein, 15 aa, Artificial Sequence
  Description of Artificial Sequence: Synthetic peptide
  Seed: LRMKWMMAMKYPITA
LRMKKMMTMFYPLTA

SEQ ID NO: 250020 - protein, 15 aa, Artificial Sequence
  Description of Artificial Sequence: Synthetic peptide
  Seed: LRMKWMMAMKYPITA
LRMKKMMTMFYPVTA

SEQ ID NO: 250021 - protein, 15 aa, Artificial Sequence
  Description of Artificial Sequence: Synthetic peptide
  Seed: LRMKWMMAMKYPITA
LRMKMMMHMFYPLTA

SEQ ID NO: 250022 - protein, 15 aa, Artificial Sequence
  Description of Artificial Sequence: Synthetic peptide
  Seed: LRMKWMMAMKYPITA
LRMKFMMHMMYPFTA

SEQ ID NO: 250023 - protein, 15 aa, Artificial Sequence
  Description of Artificial Sequence: Synthetic peptide
  Seed: LRMKWMMAMKYPITA
LRVKWLMAMKFPITA

SEQ ID NO: 250024 - protein, 15 aa, Artificial Sequence
  Description of Artificial Sequence: Synthetic peptide
  Seed: LRMKWMMAMKYPITA
LRFKWSMIMKRPITA

SEQ ID NO: 250025 - protein, 15 aa, Artificial Sequence
  Description of Artificial Sequence: Synthetic peptide
  Seed: LRMKWMMAMKYPITA
LRMKMMMRMQYPQTA

SEQ ID NO: 250026 - protein, 15 aa, Artificial Sequence
  Description of Artificial Sequence: Synthetic peptide
  Seed: LRMKWMMAMKYPITA
LRYKWHMMMKLPITA

SEQ ID NO: 250027 - protein, 15 aa, Artificial Sequence
  Description of Artificial Sequence: Synthetic peptide
  Seed: ANQRLNPMHQLLRHF
ANQRFNPFHVLLRHF

SEQ ID NO: 250028 - protein, 15 aa, Artificial Sequence
  Description of Artificial Sequence: Synthetic peptide
  Seed: LRMKWMMAMKYPITA
LRMKCMMSMFYPLTA

SEQ ID NO: 250029 - protein, 15 aa, Artificial Sequence
  Description of Artificial Sequence: Synthetic peptide
  Seed: ANQRLNPMHQLLRHF
ANQRLNPFHALLRHF

SEQ ID NO: 250030 - protein, 15 aa, Artificial Sequence
  Description of Artificial Sequence: Synthetic peptide
  Seed: LRMKWMMAMKYPITA
LRMKRMMAMFYPVTA

SEQ ID NO: 250031 - protein, 15 aa, Artificial Sequence
  Description of Artificial Sequence: Synthetic peptide
  Seed: LRMKWMMAMKYPITA
LRMKYMMHMLYPLTA

SEQ ID NO: 250032 - protein, 15 aa, Artificial Sequence
  Description of Artificial Sequence: Synthetic peptide
  Seed: LRMKWMMAMKYPITA
LRMKFMMHMYYPMTA

SEQ ID NO: 250033 - protein, 15 aa, Artificial Sequence
  Description of Artificial Sequence: Synthetic peptide
  Seed: ANQRLNPMHQLLRHF
ANQRFNPFHILLRHF

SEQ ID NO: 250034 - protein, 15 aa, Artificial Sequence
  Description of Artificial Sequence: Synthetic peptide
  Seed: ANQRLNPMHQLLRHF
ANQRINPFHALLFHF

SEQ ID NO: 250035 - protein, 15 aa, Artificial Sequence
  Description of Artificial Sequence: Synthetic peptide
  Seed: LRMKWMMAMKYPITA
LRMKSMMGMIYPATA

SEQ ID NO: 250036 - protein, 15 aa, Artificial Sequence
  Description of Artificial Sequence: Synthetic peptide
  Seed: LRMKWMMAMKYPITA
LRVKWLMSMKYPITA

SEQ ID NO: 250037 - protein, 15 aa, Artificial Sequence
  Description of Artificial Sequence: Synthetic peptide
  Seed: LRMKWMMAMKYPITA
LRFKWTMQMKLPITA

SEQ ID NO: 250038 - protein, 15 aa, Artificial Sequence
  Description of Artificial Sequence: Synthetic peptide
  Seed: LRMKWMMAMKYPITA
LRMKRMMSMLYPLTA

SEQ ID NO: 250039 - protein, 15 aa, Artificial Sequence
  Description of Artificial Sequence: Synthetic peptide
  Seed: ANQRLNPMHQLLRHF
ANQRINPIHSLLYHF

SEQ ID NO: 250040 - protein, 15 aa, Artificial Sequence
  Description of Artificial Sequence: Synthetic peptide
  Seed: LRMKWMMAMKYPITA
LRMKRMMTMFYPFTA

SEQ ID NO: 250041 - protein, 15 aa, Artificial Sequence
  Description of Artificial Sequence: Synthetic peptide
  Seed: LRMKWMMAMKYPITA
LRMKFMMTMLYPNTA

SEQ ID NO: 250042 - protein, 15 aa, Artificial Sequence
  Description of Artificial Sequence: Synthetic peptide
  Seed: LRMKWMMAMKYPITA
LRIKWQMAMKFPITA

SEQ ID NO: 250043 - protein, 15 aa, Artificial Sequence
  Description of Artificial Sequence: Synthetic peptide
  Seed: ANQRLNPMHQLLRHF
ANQRINPMHHLLVHF

SEQ ID NO: 250044 - protein, 15 aa, Artificial Sequence
  Description of Artificial Sequence: Synthetic peptide
  Seed: LRMKWMMAMKYPITA
LRMKFMMTMFYPKTA

SEQ ID NO: 250045 - protein, 15 aa, Artificial Sequence
  Description of Artificial Sequence: Synthetic peptide
  Seed: LRMKWMMAMKYPITA
LRFKWTMTMKVPITA

SEQ ID NO: 250046 - protein, 15 aa, Artificial Sequence
  Description of Artificial Sequence: Synthetic peptide
  Seed: LRMKWMMAMKYPITA
LRMKKMMSMFYPLTA

SEQ ID NO: 250047 - protein, 13 aa, Artificial Sequence
  Description of Artificial Sequence: Synthetic peptide
  Seed: ERELVRKTRFLPV
ERELFRKTRWLPI

SEQ ID NO: 250048 - protein, 15 aa, Artificial Sequence
  Description of Artificial Sequence: Synthetic peptide
  Seed: LRMKWMMAMKYPITA
LRIKWWMMMKAPITA

SEQ ID NO: 250049 - protein, 15 aa, Artificial Sequence
  Description of Artificial Sequence: Synthetic peptide
  Seed: LRMKWMMAMKYPITA
LRMKFMMAMFYPRTA

SEQ ID NO: 250050 - protein, 15 aa, Artificial Sequence
  Description of Artificial Sequence: Synthetic peptide
  Seed: LRMKWMMAMKYPITA
LRMKCMMSMFYPITA

SEQ ID NO: 250051 - protein, 15 aa, Artificial Sequence
  Description of Artificial Sequence: Synthetic peptide
  Seed: LRMKWMMAMKYPITA
LRIKWSMAMKFPITA

SEQ ID NO: 250052 - protein, 15 aa, Artificial Sequence
  Description of Artificial Sequence: Synthetic peptide
  Seed: LRMKWMMAMKYPITA
LRMKFMMTMIYPRTA

SEQ ID NO: 250053 - protein, 15 aa, Artificial Sequence
  Description of Artificial Sequence: Synthetic peptide
  Seed: LRMKWMMAMKYPITA
LRMKFMMRMFYPLTA

SEQ ID NO: 250054 - protein, 15 aa, Artificial Sequence
  Description of Artificial Sequence: Synthetic peptide
  Seed: ANQRLNPMHQLLRHF
ANQRLNPIHVLLRHF

SEQ ID NO: 250055 - protein, 15 aa, Artificial Sequence
  Description of Artificial Sequence: Synthetic peptide
  Seed: LRMKWMMAMKYPITA
LRMKMMMHMFYPITA

SEQ ID NO: 250056 - protein, 15 aa, Artificial Sequence
  Description of Artificial Sequence: Synthetic peptide
  Seed: ANQRLNPMHQLLRHF
ANQRFNPFHALLFHF

SEQ ID NO: 250057 - protein, 15 aa, Artificial Sequence
  Description of Artificial Sequence: Synthetic peptide
  Seed: LRMKWMMAMKYPITA
LRMKVMMHMFYPLTA

SEQ ID NO: 250058 - protein, 15 aa, Artificial Sequence
  Description of Artificial Sequence: Synthetic peptide
  Seed: LRMKWMMAMKYPITA
LRMKAMMVMRYPETA

SEQ ID NO: 250059 - protein, 15 aa, Artificial Sequence
  Description of Artificial Sequence: Synthetic peptide
  Seed: LRMKWMMAMKYPITA
LRLKWHMMMKIPITA

SEQ ID NO: 250060 - protein, 15 aa, Artificial Sequence
  Description of Artificial Sequence: Synthetic peptide
  Seed: ANQRLNPMHQLLRHF
ANQRFNPLHILLYHF

SEQ ID NO: 250061 - protein, 15 aa, Artificial Sequence
  Description of Artificial Sequence: Synthetic peptide
  Seed: LRMKWMMAMKYPITA
LRFKWSMTMKIPITA

SEQ ID NO: 250062 - protein, 15 aa, Artificial Sequence
  Description of Artificial Sequence: Synthetic peptide
  Seed: LRMKWMMAMKYPITA
LRFKWNMLMKMPITA

SEQ ID NO: 250063 - protein, 15 aa, Artificial Sequence
  Description of Artificial Sequence: Synthetic peptide
  Seed: ANQRLNPMHQLLRHF
ANQRFNPVHKLLLHF

SEQ ID NO: 250064 - protein, 15 aa, Artificial Sequence
  Description of Artificial Sequence: Synthetic peptide
  Seed: LRMKWMMAMKYPITA
LRFKWHMLMKYPITA

SEQ ID NO: 250065 - protein, 15 aa, Artificial Sequence
  Description of Artificial Sequence: Synthetic peptide
  Seed: LRMKWMMAMKYPITA
LRMKWVMIMKAPITA

SEQ ID NO: 250066 - protein, 15 aa, Artificial Sequence
  Description of Artificial Sequence: Synthetic peptide
  Seed: ANQRLNPMHQLLRHF
ANQRINPIHLLLVHF

SEQ ID NO: 250067 - protein, 15 aa, Artificial Sequence
  Description of Artificial Sequence: Synthetic peptide
  Seed: LRMKWMMAMKYPITA
LRMKFMMSMFYPKTA

SEQ ID NO: 250068 - protein, 15 aa, Artificial Sequence
  Description of Artificial Sequence: Synthetic peptide
  Seed: ANQRLNPMHQLLRHF
ANQRINPIHILLMHF

SEQ ID NO: 250069 - protein, 15 aa, Artificial Sequence
  Description of Artificial Sequence: Synthetic peptide
  Seed: ANQRLNPMHQLLRHF
ANQRINPIHVLLMHF

SEQ ID NO: 250070 - protein, 15 aa, Artificial Sequence
  Description of Artificial Sequence: Synthetic peptide
  Seed: LRMKWMMAMKYPITA
LRMKKMMSMFYPVTA

SEQ ID NO: 250071 - protein, 15 aa, Artificial Sequence
  Description of Artificial Sequence: Synthetic peptide
  Seed: LRMKWMMAMKYPITA
LRMKTMMSMSYPATA

SEQ ID NO: 250072 - protein, 15 aa, Artificial Sequence
  Description of Artificial Sequence: Synthetic peptide
  Seed: LRMKWMMAMKYPITA
LRMKIMMHMFYPMTA

SEQ ID NO: 250073 - protein, 15 aa, Artificial Sequence
  Description of Artificial Sequence: Synthetic peptide
  Seed: LRMKWMMAMKYPITA
LRMKHMMTMFYPLTA

SEQ ID NO: 250074 - protein, 15 aa, Artificial Sequence
  Description of Artificial Sequence: Synthetic peptide
  Seed: LRMKWMMAMKYPITA
LRMKFMMSMWYPYTA

SEQ ID NO: 250075 - protein, 15 aa, Artificial Sequence
  Description of Artificial Sequence: Synthetic peptide
  Seed: ANQRLNPMHQLLRHF
ANQRINPIHHLLVHF

SEQ ID NO: 250076 - protein, 15 aa, Artificial Sequence
  Description of Artificial Sequence: Synthetic peptide
  Seed: LRMKWMMAMKYPITA
LRIKWSMIMKAPITA

SEQ ID NO: 250077 - protein, 15 aa, Artificial Sequence
  Description of Artificial Sequence: Synthetic peptide
  Seed: LRMKWMMAMKYPITA
LRMKRMMSMFYPFTA

SEQ ID NO: 250078 - protein, 15 aa, Artificial Sequence
  Description of Artificial Sequence: Synthetic peptide
  Seed: LRMKWMMAMKYPITA
LRLKWLMSMKYPITA

SEQ ID NO: 250079 - protein, 15 aa, Artificial Sequence
  Description of Artificial Sequence: Synthetic peptide
  Seed: ANQRLNPMHQLLRHF
ANQRLNPLHALLYHF

SEQ ID NO: 250080 - protein, 15 aa, Artificial Sequence
  Description of Artificial Sequence: Synthetic peptide
  Seed: LRMKWMMAMKYPITA
LRMKKMMSMFYPITA

SEQ ID NO: 250081 - protein, 15 aa, Artificial Sequence
  Description of Artificial Sequence: Synthetic peptide
  Seed: ANQRLNPMHQLLRHF
ANQRFNPMHFLLRHF

SEQ ID NO: 250082 - protein, 15 aa, Artificial Sequence
  Description of Artificial Sequence: Synthetic peptide
  Seed: LRMKWMMAMKYPITA
LRMKFMMHMLYPATA

SEQ ID NO: 250083 - protein, 15 aa, Artificial Sequence
  Description of Artificial Sequence: Synthetic peptide
  Seed: LRMKWMMAMKYPITA
LRMKRMMTMLYPLTA

SEQ ID NO: 250084 - protein, 15 aa, Artificial Sequence
  Description of Artificial Sequence: Synthetic peptide
  Seed: ANQRLNPMHQLLRHF
ANQRLNPFHILLRHF

SEQ ID NO: 250085 - protein, 15 aa, Artificial Sequence
  Description of Artificial Sequence: Synthetic peptide
  Seed: LRMKWMMAMKYPITA
LRLKWNMFMKAPITA

SEQ ID NO: 250086 - protein, 15 aa, Artificial Sequence
  Description of Artificial Sequence: Synthetic peptide
  Seed: LRMKWMMAMKYPITA
LRMKLMMSMLYPLTA

SEQ ID NO: 250087 - protein, 15 aa, Artificial Sequence
  Description of Artificial Sequence: Synthetic peptide
  Seed: LRMKWMMAMKYPITA
LRFKWAMFMKKPITA

SEQ ID NO: 250088 - protein, 15 aa, Artificial Sequence
  Description of Artificial Sequence: Synthetic peptide
  Seed: LRMKWMMAMKYPITA
LRLKWTMFMKRPITA

SEQ ID NO: 250089 - protein, 15 aa, Artificial Sequence
  Description of Artificial Sequence: Synthetic peptide
  Seed: LRMKWMMAMKYPITA
LRMKLMMHMFYPMTA

SEQ ID NO: 250090 - protein, 15 aa, Artificial Sequence
  Description of Artificial Sequence: Synthetic peptide
  Seed: LRMKWMMAMKYPITA
LRMKRMMAMVYPLTA

SEQ ID NO: 250091 - protein, 15 aa, Artificial Sequence
  Description of Artificial Sequence: Synthetic peptide
  Seed: LRMKWMMAMKYPITA
LRIKWMMTMKYPITA

SEQ ID NO: 250092 - protein, 15 aa, Artificial Sequence
  Description of Artificial Sequence: Synthetic peptide
  Seed: ANQRLNPMHQLLRHF
ANQRINPMHILLYHF

SEQ ID NO: 250093 - protein, 15 aa, Artificial Sequence
  Description of Artificial Sequence: Synthetic peptide
  Seed: LRMKWMMAMKYPITA
LRMKRMMEMFYPLTA

SEQ ID NO: 250094 - protein, 15 aa, Artificial Sequence
  Description of Artificial Sequence: Synthetic peptide
  Seed: LRMKWMMAMKYPITA
LRFKWQMSMKLPITA

SEQ ID NO: 250095 - protein, 15 aa, Artificial Sequence
  Description of Artificial Sequence: Synthetic peptide
  Seed: LRMKWMMAMKYPITA
LRMKFMMHMWYPMTA

SEQ ID NO: 250096 - protein, 15 aa, Artificial Sequence
  Description of Artificial Sequence: Synthetic peptide
  Seed: LRMKWMMAMKYPITA
LRFKWTMFMKGPITA

SEQ ID NO: 250097 - protein, 15 aa, Artificial Sequence
  Description of Artificial Sequence: Synthetic peptide
  Seed: LRMKWMMAMKYPITA
LRMKFMMTMLYPRTA

SEQ ID NO: 250098 - protein, 15 aa, Artificial Sequence
  Description of Artificial Sequence: Synthetic peptide
  Seed: LRMKWMMAMKYPITA
LRMKIMMSMFYPNTA

SEQ ID NO: 250099 - protein, 15 aa, Artificial Sequence
  Description of Artificial Sequence: Synthetic peptide
  Seed: ANQRLNPMHQLLRHF
ANQRFNPFHVLLVHF

SEQ ID NO: 250100 - protein, 15 aa, Artificial Sequence
  Description of Artificial Sequence: Synthetic peptide
  Seed: LRMKWMMAMKYPITA
LRIKWNMFMKAPITA

SEQ ID NO: 250101 - protein, 15 aa, Artificial Sequence
  Description of Artificial Sequence: Synthetic peptide
  Seed: LRMKWMMAMKYPITA
LRLKWNMFMKMPITA

SEQ ID NO: 250102 - protein, 15 aa, Artificial Sequence
  Description of Artificial Sequence: Synthetic peptide
  Seed: LRMKWMMAMKYPITA
LRMKRMMVMFYPLTA

SEQ ID NO: 250103 - protein, 15 aa, Artificial Sequence
  Description of Artificial Sequence: Synthetic peptide
  Seed: LRMKWMMAMKYPITA
LRIKWLMGMKFPITA

SEQ ID NO: 250104 - protein, 15 aa, Artificial Sequence
  Description of Artificial Sequence: Synthetic peptide
  Seed: LRMKWMMAMKYPITA
LRIKWHMVMKLPITA

SEQ ID NO: 250105 - protein, 15 aa, Artificial Sequence
  Description of Artificial Sequence: Synthetic peptide
  Seed: LRMKWMMAMKYPITA
LRFKWLMAMKFPITA

SEQ ID NO: 250106 - protein, 15 aa, Artificial Sequence
  Description of Artificial Sequence: Synthetic peptide
  Seed: LRMKWMMAMKYPITA
LRMKAMMFMSYPLTA

SEQ ID NO: 250107 - protein, 15 aa, Artificial Sequence
  Description of Artificial Sequence: Synthetic peptide
  Seed: ANQRLNPMHQLLRHF
ANQRFNPFHSLLRHF

SEQ ID NO: 250108 - protein, 15 aa, Artificial Sequence
  Description of Artificial Sequence: Synthetic peptide
  Seed: ANQRLNPMHQLLRHF
ANQRFNPIHKLLFHF

SEQ ID NO: 250109 - protein, 15 aa, Artificial Sequence
  Description of Artificial Sequence: Synthetic peptide
  Seed: LRMKWMMAMKYPITA
LRMKFMMRMFYPVTA

SEQ ID NO: 250110 - protein, 15 aa, Artificial Sequence
  Description of Artificial Sequence: Synthetic peptide
  Seed: LRMKWMMAMKYPITA
LRMKRMMSMVYPLTA

SEQ ID NO: 250111 - protein, 15 aa, Artificial Sequence
  Description of Artificial Sequence: Synthetic peptide
  Seed: LRMKWMMAMKYPITA
LRMKNMMAMVYPLTA

SEQ ID NO: 250112 - protein, 15 aa, Artificial Sequence
  Description of Artificial Sequence: Synthetic peptide
  Seed: LRMKWMMAMKYPITA
LRMKTMMIMRYPETA

SEQ ID NO: 250113 - protein, 15 aa, Artificial Sequence
  Description of Artificial Sequence: Synthetic peptide
  Seed: LRMKWMMAMKYPITA
LRMKIMMHMFYPFTA

SEQ ID NO: 250114 - protein, 15 aa, Artificial Sequence
  Description of Artificial Sequence: Synthetic peptide
  Seed: LRMKWMMAMKYPITA
LRMKRMMSMIYPLTA

SEQ ID NO: 250115 - protein, 15 aa, Artificial Sequence
  Description of Artificial Sequence: Synthetic peptide
  Seed: ANQRLNPMHQLLRHF
ANQRINPMHVLLYHF

SEQ ID NO: 250116 - protein, 15 aa, Artificial Sequence
  Description of Artificial Sequence: Synthetic peptide
  Seed: ANQRLNPMHQLLRHF
ANQRFNPVHSLLRHF

SEQ ID NO: 250117 - protein, 15 aa, Artificial Sequence
  Description of Artificial Sequence: Synthetic peptide
  Seed: LRMKWMMAMKYPITA
LRMKWLMAMKYPITA

SEQ ID NO: 250118 - protein, 15 aa, Artificial Sequence
  Description of Artificial Sequence: Synthetic peptide
  Seed: ANQRLNPMHQLLRHF
ANQRLNPLHALLKHF

SEQ ID NO: 250119 - protein, 15 aa, Artificial Sequence
  Description of Artificial Sequence: Synthetic peptide
  Seed: LRMKWMMAMKYPITA
LRFKWMMAMKYPITA

SEQ ID NO: 250120 - protein, 15 aa, Artificial Sequence
  Description of Artificial Sequence: Synthetic peptide
  Seed: LRMKWMMAMKYPITA
LRMKFMMHMFYPWTA

SEQ ID NO: 250121 - protein, 15 aa, Artificial Sequence
  Description of Artificial Sequence: Synthetic peptide
  Seed: LRMKWMMAMKYPITA
LRMKFMMAMYYPYTA

SEQ ID NO: 250122 - protein, 15 aa, Artificial Sequence
  Description of Artificial Sequence: Synthetic peptide
  Seed: ANQRLNPMHQLLRHF
ANQRINPLHMLLLHF

SEQ ID NO: 250123 - protein, 15 aa, Artificial Sequence
  Description of Artificial Sequence: Synthetic peptide
  Seed: LRMKWMMAMKYPITA
LRMKSMMIMSYPMTA

SEQ ID NO: 250124 - protein, 15 aa, Artificial Sequence
  Description of Artificial Sequence: Synthetic peptide
  Seed: LRMKWMMAMKYPITA
LRMKMMMTMYYPLTA

SEQ ID NO: 250125 - protein, 15 aa, Artificial Sequence
  Description of Artificial Sequence: Synthetic peptide
  Seed: LRMKWMMAMKYPITA
LRMKFMMAMLYPYTA

SEQ ID NO: 250126 - protein, 15 aa, Artificial Sequence
  Description of Artificial Sequence: Synthetic peptide
  Seed: LRMKWMMAMKYPITA
LRMKRMMTMVYPLTA

SEQ ID NO: 250127 - protein, 15 aa, Artificial Sequence
  Description of Artificial Sequence: Synthetic peptide
  Seed: LRMKWMMAMKYPITA
LRMKYMMHMLYPVTA

SEQ ID NO: 250128 - protein, 15 aa, Artificial Sequence
  Description of Artificial Sequence: Synthetic peptide
  Seed: LRMKWMMAMKYPITA
LRMKLMMSMFYPNTA

SEQ ID NO: 250129 - protein, 15 aa, Artificial Sequence
  Description of Artificial Sequence: Synthetic peptide
  Seed: LRMKWMMAMKYPITA
LRMKLMMTMWYPLTA

SEQ ID NO: 250130 - protein, 15 aa, Artificial Sequence
  Description of Artificial Sequence: Synthetic peptide
  Seed: LRMKWMMAMKYPITA
LRMKYMMTMFYPRTA

SEQ ID NO: 250131 - protein, 15 aa, Artificial Sequence
  Description of Artificial Sequence: Synthetic peptide
  Seed: LRMKWMMAMKYPITA
LRMKFMMSMFYPGTA

SEQ ID NO: 250132 - protein, 15 aa, Artificial Sequence
  Description of Artificial Sequence: Synthetic peptide
  Seed: LRMKWMMAMKYPITA
LRMKTMMIMTYPLTA

SEQ ID NO: 250133 - protein, 15 aa, Artificial Sequence
  Description of Artificial Sequence: Synthetic peptide
  Seed: LRMKWMMAMKYPITA
LRMKLMMTMWYPVTA

SEQ ID NO: 250134 - protein, 15 aa, Artificial Sequence
  Description of Artificial Sequence: Synthetic peptide
  Seed: LRMKWMMAMKYPITA
LRMKWMMAMKAPITA

SEQ ID NO: 250135 - protein, 15 aa, Artificial Sequence
  Description of Artificial Sequence: Synthetic peptide
  Seed: ANQRLNPMHQLLRHF
ANQRINPIHSLLHHF

SEQ ID NO: 250136 - protein, 15 aa, Artificial Sequence
  Description of Artificial Sequence: Synthetic peptide
  Seed: LRMKWMMAMKYPITA
LRMKHMMTMFYPITA

SEQ ID NO: 250137 - protein, 15 aa, Artificial Sequence
  Description of Artificial Sequence: Synthetic peptide
  Seed: ANQRLNPMHQLLRHF
ANQRLNPMHHLLLHF

SEQ ID NO: 250138 - protein, 15 aa, Artificial Sequence
  Description of Artificial Sequence: Synthetic peptide
  Seed: LRMKWMMAMKYPITA
LRIKWFMAMKNPITA

SEQ ID NO: 250139 - protein, 15 aa, Artificial Sequence
  Description of Artificial Sequence: Synthetic peptide
  Seed: LRMKWMMAMKYPITA
LRMKIMMSMLYPMTA

SEQ ID NO: 250140 - protein, 15 aa, Artificial Sequence
  Description of Artificial Sequence: Synthetic peptide
  Seed: ANQRLNPMHQLLRHF
ANQRFNPFHVLLLHF

SEQ ID NO: 250141 - protein, 13 aa, Artificial Sequence
  Description of Artificial Sequence: Synthetic peptide
  Seed: ERELVRKTRFLPV
ERELFRKERFLPA

SEQ ID NO: 250142 - protein, 13 aa, Artificial Sequence
  Description of Artificial Sequence: Synthetic peptide
  Seed: ERELVRKTRFLPV
ERELFRKSRWLPL

SEQ ID NO: 250143 - protein, 15 aa, Artificial Sequence
  Description of Artificial Sequence: Synthetic peptide
  Seed: LRMKWMMAMKYPITA
LRMKWFMAMKSPITA

SEQ ID NO: 250144 - protein, 15 aa, Artificial Sequence
  Description of Artificial Sequence: Synthetic peptide
  Seed: LRMKWMMAMKYPITA
LRFKWHMSMKLPITA

SEQ ID NO: 250145 - protein, 15 aa, Artificial Sequence
  Description of Artificial Sequence: Synthetic peptide
  Seed: LRMKWMMAMKYPITA
LRMKRMMHMFYPLTA

SEQ ID NO: 250146 - protein, 15 aa, Artificial Sequence
  Description of Artificial Sequence: Synthetic peptide
  Seed: LRMKWMMAMKYPITA
LRMKMMMAMSYPWTA

SEQ ID NO: 250147 - protein, 15 aa, Artificial Sequence
  Description of Artificial Sequence: Synthetic peptide
  Seed: LRMKWMMAMKYPITA
LRMKFMMTMMYPNTA

SEQ ID NO: 250148 - protein, 15 aa, Artificial Sequence
  Description of Artificial Sequence: Synthetic peptide
  Seed: LRMKWMMAMKYPITA
LRMKIMMSMYYPMTA

SEQ ID NO: 250149 - protein, 15 aa, Artificial Sequence
  Description of Artificial Sequence: Synthetic peptide
  Seed: ANQRLNPMHQLLRHF
ANQRFNPFHTLLRHF

SEQ ID NO: 250150 - protein, 15 aa, Artificial Sequence
  Description of Artificial Sequence: Synthetic peptide
  Seed: ANQRLNPMHQLLRHF
ANQRLNPLHSLLFHF

SEQ ID NO: 250151 - protein, 15 aa, Artificial Sequence
  Description of Artificial Sequence: Synthetic peptide
  Seed: LRMKWMMAMKYPITA
LRMKIMMTMWYPITA

SEQ ID NO: 250152 - protein, 15 aa, Artificial Sequence
  Description of Artificial Sequence: Synthetic peptide
  Seed: LRMKWMMAMKYPITA
LRMKFMMAMFYPKTA

SEQ ID NO: 250153 - protein, 15 aa, Artificial Sequence
  Description of Artificial Sequence: Synthetic peptide
  Seed: LRMKWMMAMKYPITA
LRMKFMMHMFYPRTA

SEQ ID NO: 250154 - protein, 15 aa, Artificial Sequence
  Description of Artificial Sequence: Synthetic peptide
  Seed: ANQRLNPMHQLLRHF
ANQRLNPFHALLFHF

SEQ ID NO: 250155 - protein, 13 aa, Artificial Sequence
  Description of Artificial Sequence: Synthetic peptide
  Seed: ERELVRKTRFLPV
ERELWRKTRFLPF

SEQ ID NO: 250156 - protein, 15 aa, Artificial Sequence
  Description of Artificial Sequence: Synthetic peptide
  Seed: LRMKWMMAMKYPITA
LRMKHMMTMFYPVTA

SEQ ID NO: 250157 - protein, 15 aa, Artificial Sequence
  Description of Artificial Sequence: Synthetic peptide
  Seed: LRMKWMMAMKYPITA
LRMKRMMIMFYPLTA

SEQ ID NO: 250158 - protein, 15 aa, Artificial Sequence
  Description of Artificial Sequence: Synthetic peptide
  Seed: LRMKWMMAMKYPITA
LRMKYMMHMYYPLTA

SEQ ID NO: 250159 - protein, 15 aa, Artificial Sequence
  Description of Artificial Sequence: Synthetic peptide
  Seed: ANQRLNPMHQLLRHF
ANQRINPVHTLLMHF

SEQ ID NO: 250160 - protein, 15 aa, Artificial Sequence
  Description of Artificial Sequence: Synthetic peptide
  Seed: LRMKWMMAMKYPITA
LRFKWDMAMKLPITA

SEQ ID NO: 250161 - protein, 15 aa, Artificial Sequence
  Description of Artificial Sequence: Synthetic peptide
  Seed: LRMKWMMAMKYPITA
LRMKFMMRMFYPITA

SEQ ID NO: 250162 - protein, 15 aa, Artificial Sequence
  Description of Artificial Sequence: Synthetic peptide
  Seed: ANQRLNPMHQLLRHF
ANQRLNPIHSLLFHF

SEQ ID NO: 250163 - protein, 15 aa, Artificial Sequence
  Description of Artificial Sequence: Synthetic peptide
  Seed: LRMKWMMAMKYPITA
LRMKRMMAMIYPLTA

SEQ ID NO: 250164 - protein, 15 aa, Artificial Sequence
  Description of Artificial Sequence: Synthetic peptide
  Seed: LRMKWMMAMKYPITA
LRMKAMMAMPYPATA

SEQ ID NO: 250165 - protein, 15 aa, Artificial Sequence
  Description of Artificial Sequence: Synthetic peptide
  Seed: LRMKWMMAMKYPITA
LRMKWFMLMKSPITA

SEQ ID NO: 250166 - protein, 15 aa, Artificial Sequence
  Description of Artificial Sequence: Synthetic peptide
  Seed: LRMKWMMAMKYPITA
LRMKLMMTMWYPITA

SEQ ID NO: 250167 - protein, 15 aa, Artificial Sequence
  Description of Artificial Sequence: Synthetic peptide
  Seed: ANQRLNPMHQLLRHF
ANQRINPFHILLLHF

SEQ ID NO: 250168 - protein, 15 aa, Artificial Sequence
  Description of Artificial Sequence: Synthetic peptide
  Seed: LRMKWMMAMKYPITA
LRMKWMMHMFYPFTA

SEQ ID NO: 250169 - protein, 13 aa, Artificial Sequence
  Description of Artificial Sequence: Synthetic peptide
  Seed: ERELVRKTRFLPV
ERELFRKCRFLPV

SEQ ID NO: 250170 - protein, 15 aa, Artificial Sequence
  Description of Artificial Sequence: Synthetic peptide
  Seed: LRMKWMMAMKYPITA
LRMKYMMTMFYPHTA

SEQ ID NO: 250171 - protein, 15 aa, Artificial Sequence
  Description of Artificial Sequence: Synthetic peptide
  Seed: LRMKWMMAMKYPITA
LRMKMMMSMYYPLTA

SEQ ID NO: 250172 - protein, 15 aa, Artificial Sequence
  Description of Artificial Sequence: Synthetic peptide
  Seed: LRMKWMMAMKYPITA
LRMKFMMHMMYPATA

SEQ ID NO: 250173 - protein, 15 aa, Artificial Sequence
  Description of Artificial Sequence: Synthetic peptide
  Seed: LRMKWMMAMKYPITA
LRFKWFMAMKKPITA

SEQ ID NO: 250174 - protein, 15 aa, Artificial Sequence
  Description of Artificial Sequence: Synthetic peptide
  Seed: LRMKWMMAMKYPITA
LRMKMMMSMLYPLTA

SEQ ID NO: 250175 - protein, 15 aa, Artificial Sequence
  Description of Artificial Sequence: Synthetic peptide
  Seed: ANQRLNPMHQLLRHF
ANQRMNPLHALLRHF

SEQ ID NO: 250176 - protein, 15 aa, Artificial Sequence
  Description of Artificial Sequence: Synthetic peptide
  Seed: LRMKWMMAMKYPITA
LRMKLMMTMLYPVTA

SEQ ID NO: 250177 - protein, 15 aa, Artificial Sequence
  Description of Artificial Sequence: Synthetic peptide
  Seed: LRMKWMMAMKYPITA
LRMKLMMSMLYPMTA

SEQ ID NO: 250178 - protein, 13 aa, Artificial Sequence
  Description of Artificial Sequence: Synthetic peptide
  Seed: ERELVRKTRFLPV
ERELFRKARFLPW

SEQ ID NO: 250179 - protein, 15 aa, Artificial Sequence
  Description of Artificial Sequence: Synthetic peptide
  Seed: LRMKWMMAMKYPITA
LRMKLMMSMYYPMTA

SEQ ID NO: 250180 - protein, 15 aa, Artificial Sequence
  Description of Artificial Sequence: Synthetic peptide
  Seed: LRMKWMMAMKYPITA
LRMKIMMTMLYPVTA

SEQ ID NO: 250181 - protein, 15 aa, Artificial Sequence
  Description of Artificial Sequence: Synthetic peptide
  Seed: LRMKWMMAMKYPITA
LRMKWMMVMKVPITA

SEQ ID NO: 250182 - protein, 15 aa, Artificial Sequence
  Description of Artificial Sequence: Synthetic peptide
  Seed: LRMKWMMAMKYPITA
LRMKWMMHMLYPLTA

SEQ ID NO: 250183 - protein, 15 aa, Artificial Sequence
  Description of Artificial Sequence: Synthetic peptide
  Seed: LRMKWMMAMKYPITA
LRMKLMMTMLYPLTA

SEQ ID NO: 250184 - protein, 15 aa, Artificial Sequence
  Description of Artificial Sequence: Synthetic peptide
  Seed: LRMKWMMAMKYPITA
LRMKMMMAMMYPQTA

SEQ ID NO: 250185 - protein, 15 aa, Artificial Sequence
  Description of Artificial Sequence: Synthetic peptide
  Seed: LRMKWMMAMKYPITA
LRMKRMMIMFYPVTA

SEQ ID NO: 250186 - protein, 15 aa, Artificial Sequence
  Description of Artificial Sequence: Synthetic peptide
  Seed: LRMKWMMAMKYPITA
LRMKYMMHMYYPITA

SEQ ID NO: 250187 - protein, 15 aa, Artificial Sequence
  Description of Artificial Sequence: Synthetic peptide
  Seed: LRMKWMMAMKYPITA
LRMKFMMHMFYPHTA

SEQ ID NO: 250188 - protein, 15 aa, Artificial Sequence
  Description of Artificial Sequence: Synthetic peptide
  Seed: LRMKWMMAMKYPITA
LRMKFMMKMLYPLTA

SEQ ID NO: 250189 - protein, 15 aa, Artificial Sequence
  Description of Artificial Sequence: Synthetic peptide
  Seed: LRMKWMMAMKYPITA
LRMKIMMHMYYPLTA

SEQ ID NO: 250190 - protein, 15 aa, Artificial Sequence
  Description of Artificial Sequence: Synthetic peptide
  Seed: LRMKWMMAMKYPITA
LRMKRMMVMFYPITA

SEQ ID NO: 250191 - protein, 13 aa, Artificial Sequence
  Description of Artificial Sequence: Synthetic peptide
  Seed: ERELVRKTRFLPV
ERELFRKTRFLPN

SEQ ID NO: 250192 - protein, 15 aa, Artificial Sequence
  Description of Artificial Sequence: Synthetic peptide
  Seed: LRMKWMMAMKYPITA
LRMKMMMVMNYPHTA

SEQ ID NO: 250193 - protein, 15 aa, Artificial Sequence
  Description of Artificial Sequence: Synthetic peptide
  Seed: LRMKWMMAMKYPITA
LRMKFMMRMFYPMTA

SEQ ID NO: 250194 - protein, 15 aa, Artificial Sequence
  Description of Artificial Sequence: Synthetic peptide
  Seed: LRMKWMMAMKYPITA
LRMKFMMTMLYPHTA

SEQ ID NO: 250195 - protein, 15 aa, Artificial Sequence
  Description of Artificial Sequence: Synthetic peptide
  Seed: LRMKWMMAMKYPITA
LRMKIMMSMLYPATA

SEQ ID NO: 250196 - protein, 15 aa, Artificial Sequence
  Description of Artificial Sequence: Synthetic peptide
  Seed: LRMKWMMAMKYPITA
LRMKCMMMMKYPITA

SEQ ID NO: 250197 - protein, 15 aa, Artificial Sequence
  Description of Artificial Sequence: Synthetic peptide
  Seed: LRMKWMMAMKYPITA
LRMKFMMSMLYPHTA

SEQ ID NO: 250198 - protein, 15 aa, Artificial Sequence
  Description of Artificial Sequence: Synthetic peptide
  Seed: ANQRLNPMHQLLRHF
ANQRFNPFHSLLFHF

SEQ ID NO: 250199 - protein, 15 aa, Artificial Sequence
  Description of Artificial Sequence: Synthetic peptide
  Seed: ANQRLNPMHQLLRHF
ANQRFNPMHWLLAHF

SEQ ID NO: 250200 - protein, 13 aa, Artificial Sequence
  Description of Artificial Sequence: Synthetic peptide
  Seed: ERELVRKTRFLPV
ERELIRKSRFLPF

SEQ ID NO: 250201 - protein, 13 aa, Artificial Sequence
  Description of Artificial Sequence: Synthetic peptide
  Seed: ERELVRKTRFLPV
ERELFRKNRFLPF

SEQ ID NO: 250202 - protein, 15 aa, Artificial Sequence
  Description of Artificial Sequence: Synthetic peptide
  Seed: LRMKWMMAMKYPITA
LRMKYMMSMFYPRTA

SEQ ID NO: 250203 - protein, 15 aa, Artificial Sequence
  Description of Artificial Sequence: Synthetic peptide
  Seed: LRMKWMMAMKYPITA
LRMKYMMHMWYPLTA

SEQ ID NO: 250204 - protein, 15 aa, Artificial Sequence
  Description of Artificial Sequence: Synthetic peptide
  Seed: LRMKWMMAMKYPITA
LRMKFMMSMLYPETA

SEQ ID NO: 250205 - protein, 15 aa, Artificial Sequence
  Description of Artificial Sequence: Synthetic peptide
  Seed: LRMKWMMAMKYPITA
LRMKLMMIMNYPPTA

SEQ ID NO: 250206 - protein, 15 aa, Artificial Sequence
  Description of Artificial Sequence: Synthetic peptide
  Seed: LRMKWMMAMKYPITA
LRIKWTMAMKYPITA

SEQ ID NO: 250207 - protein, 15 aa, Artificial Sequence
  Description of Artificial Sequence: Synthetic peptide
  Seed: ANQRLNPMHQLLRHF
ANQRFNPIHYLLAHF

SEQ ID NO: 250208 - protein, 15 aa, Artificial Sequence
  Description of Artificial Sequence: Synthetic peptide
  Seed: LRMKWMMAMKYPITA
LRLKWIMAMKYPITA

SEQ ID NO: 250209 - protein, 15 aa, Artificial Sequence
  Description of Artificial Sequence: Synthetic peptide
  Seed: LRMKWMMAMKYPITA
LRMKLMMPMFYPLTA

SEQ ID NO: 250210 - protein, 15 aa, Artificial Sequence
  Description of Artificial Sequence: Synthetic peptide
  Seed: LRMKWMMAMKYPITA
LRMKYMMHMWYPITA

SEQ ID NO: 250211 - protein, 15 aa, Artificial Sequence
  Description of Artificial Sequence: Synthetic peptide
  Seed: ANQRLNPMHQLLRHF
ANQRINPLHNLLFHF

SEQ ID NO: 250212 - protein, 15 aa, Artificial Sequence
  Description of Artificial Sequence: Synthetic peptide
  Seed: LRMKWMMAMKYPITA
LRMKMMMSMFYPTTA

SEQ ID NO: 250213 - protein, 15 aa, Artificial Sequence
  Description of Artificial Sequence: Synthetic peptide
  Seed: LRMKWMMAMKYPITA
LRMKFMMAMLYPHTA

SEQ ID NO: 250214 - protein, 15 aa, Artificial Sequence
  Description of Artificial Sequence: Synthetic peptide
  Seed: LRMKWMMAMKYPITA
LRMKLMMSMYYPFTA

SEQ ID NO: 250215 - protein, 15 aa, Artificial Sequence
  Description of Artificial Sequence: Synthetic peptide
  Seed: LRMKWMMAMKYPITA
LRMKIMMSMWYPMTA

SEQ ID NO: 250216 - protein, 15 aa, Artificial Sequence
  Description of Artificial Sequence: Synthetic peptide
  Seed: LRMKWMMAMKYPITA
LRMKWMMNMFYPMTA

SEQ ID NO: 250217 - protein, 15 aa, Artificial Sequence
  Description of Artificial Sequence: Synthetic peptide
  Seed: ANQRLNPMHQLLRHF
ANQRLNPMHVLLKHF

SEQ ID NO: 250218 - protein, 15 aa, Artificial Sequence
  Description of Artificial Sequence: Synthetic peptide
  Seed: ANQRLNPMHQLLRHF
ANQRINPVHSLLFHF

SEQ ID NO: 250219 - protein, 15 aa, Artificial Sequence
  Description of Artificial Sequence: Synthetic peptide
  Seed: LRMKWMMAMKYPITA
LRMKRMMAMFYPMTA

SEQ ID NO: 250220 - protein, 15 aa, Artificial Sequence
  Description of Artificial Sequence: Synthetic peptide
  Seed: ANQRLNPMHQLLRHF
ANQRINPLHLLLYHF

SEQ ID NO: 250221 - protein, 15 aa, Artificial Sequence
  Description of Artificial Sequence: Synthetic peptide
  Seed: LRMKWMMAMKYPITA
LRMKFMMAMMYPFTA

SEQ ID NO: 250222 - protein, 13 aa, Artificial Sequence
  Description of Artificial Sequence: Synthetic peptide
  Seed: ERELVRKTRFLPV
ERELFRKVRFLPN

SEQ ID NO: 250223 - protein, 15 aa, Artificial Sequence
  Description of Artificial Sequence: Synthetic peptide
  Seed: LRMKWMMAMKYPITA
LRMKYMMHMYYPVTA

SEQ ID NO: 250224 - protein, 13 aa, Artificial Sequence
  Description of Artificial Sequence: Synthetic peptide
  Seed: ERELVRKTRFLPV
ERELFRKMRFLPT

SEQ ID NO: 250225 - protein, 15 aa, Artificial Sequence
  Description of Artificial Sequence: Synthetic peptide
  Seed: LRMKWMMAMKYPITA
LRMKIMMSMYYPFTA

SEQ ID NO: 250226 - protein, 15 aa, Artificial Sequence
  Description of Artificial Sequence: Synthetic peptide
  Seed: LRMKWMMAMKYPITA
LRMKWMMTMYYPMTA

SEQ ID NO: 250227 - protein, 15 aa, Artificial Sequence
  Description of Artificial Sequence: Synthetic peptide
  Seed: ANQRLNPMHQLLRHF
ANQRLNPAHILLLHF

SEQ ID NO: 250228 - protein, 15 aa, Artificial Sequence
  Description of Artificial Sequence: Synthetic peptide
  Seed: LRMKWMMAMKYPITA
LRMKRMMSMIYPITA

SEQ ID NO: 250229 - protein, 15 aa, Artificial Sequence
  Description of Artificial Sequence: Synthetic peptide
  Seed: LRMKWMMAMKYPITA
LRMKRMMHMFYPITA

SEQ ID NO: 250230 - protein, 15 aa, Artificial Sequence
  Description of Artificial Sequence: Synthetic peptide
  Seed: LRMKWMMAMKYPITA
LRMKIMMSMFYPRTA

SEQ ID NO: 250231 - protein, 15 aa, Artificial Sequence
  Description of Artificial Sequence: Synthetic peptide
  Seed: LRMKWMMAMKYPITA
LRMKFMMTMLYPETA

SEQ ID NO: 250232 - protein, 15 aa, Artificial Sequence
  Description of Artificial Sequence: Synthetic peptide
  Seed: LRMKWMMAMKYPITA
LRFKWMMAMKRPITA

SEQ ID NO: 250233 - protein, 15 aa, Artificial Sequence
  Description of Artificial Sequence: Synthetic peptide
  Seed: LRMKWMMAMKYPITA
LRMKFMMTMLYPKTA

SEQ ID NO: 250234 - protein, 15 aa, Artificial Sequence
  Description of Artificial Sequence: Synthetic peptide
  Seed: LRMKWMMAMKYPITA
LRMKIMMHMWYPITA

SEQ ID NO: 250235 - protein, 15 aa, Artificial Sequence
  Description of Artificial Sequence: Synthetic peptide
  Seed: LRMKWMMAMKYPITA
LRMKMMMSMFYPYTA

SEQ ID NO: 250236 - protein, 15 aa, Artificial Sequence
  Description of Artificial Sequence: Synthetic peptide
  Seed: LRMKWMMAMKYPITA
LRMKCMMTMFYPMTA

SEQ ID NO: 250237 - protein, 15 aa, Artificial Sequence
  Description of Artificial Sequence: Synthetic peptide
  Seed: ANQRLNPMHQLLRHF
ANQRINPIHTLLHHF

SEQ ID NO: 250238 - protein, 15 aa, Artificial Sequence
  Description of Artificial Sequence: Synthetic peptide
  Seed: LRMKWMMAMKYPITA
LRMKRMMTMYYPLTA

SEQ ID NO: 250239 - protein, 15 aa, Artificial Sequence
  Description of Artificial Sequence: Synthetic peptide
  Seed: LRMKWMMAMKYPITA
LRMKWMMHMLYPITA

SEQ ID NO: 250240 - protein, 15 aa, Artificial Sequence
  Description of Artificial Sequence: Synthetic peptide
  Seed: LRMKWMMAMKYPITA
LRMKFMMAMLYPETA

SEQ ID NO: 250241 - protein, 15 aa, Artificial Sequence
  Description of Artificial Sequence: Synthetic peptide
  Seed: LRMKWMMAMKYPITA
LRMKFMMKMFYPATA

SEQ ID NO: 250242 - protein, 15 aa, Artificial Sequence
  Description of Artificial Sequence: Synthetic peptide
  Seed: LRMKWMMAMKYPITA
LRIKWLMAMKRPITA

SEQ ID NO: 250243 - protein, 15 aa, Artificial Sequence
  Description of Artificial Sequence: Synthetic peptide
  Seed: LRMKWMMAMKYPITA
LRLKWIMNMKYPITA

SEQ ID NO: 250244 - protein, 15 aa, Artificial Sequence
  Description of Artificial Sequence: Synthetic peptide
  Seed: LRMKWMMAMKYPITA
LRMKFMMHMYYPATA

SEQ ID NO: 250245 - protein, 15 aa, Artificial Sequence
  Description of Artificial Sequence: Synthetic peptide
  Seed: LRMKWMMAMKYPITA
LRMKIMMHMFYPATA

SEQ ID NO: 250246 - protein, 15 aa, Artificial Sequence
  Description of Artificial Sequence: Synthetic peptide
  Seed: LRMKWMMAMKYPITA
LRMKFMMYMPYPFTA

SEQ ID NO: 250247 - protein, 15 aa, Artificial Sequence
  Description of Artificial Sequence: Synthetic peptide
  Seed: LRMKWMMAMKYPITA
LRFKWMMIMKHPITA

SEQ ID NO: 250248 - protein, 15 aa, Artificial Sequence
  Description of Artificial Sequence: Synthetic peptide
  Seed: LRMKWMMAMKYPITA
LRMKFMMIMFYPRTA

SEQ ID NO: 250249 - protein, 15 aa, Artificial Sequence
  Description of Artificial Sequence: Synthetic peptide
  Seed: LRMKWMMAMKYPITA
LRMKMMMHMFYPMTA

SEQ ID NO: 250250 - protein, 15 aa, Artificial Sequence
  Description of Artificial Sequence: Synthetic peptide
  Seed: LRMKWMMAMKYPITA
LRIKWVMAMKYPITA

SEQ ID NO: 250251 - protein, 15 aa, Artificial Sequence
  Description of Artificial Sequence: Synthetic peptide
  Seed: LRMKWMMAMKYPITA
LRMKFMMPMFYPATA

SEQ ID NO: 250252 - protein, 15 aa, Artificial Sequence
  Description of Artificial Sequence: Synthetic peptide
  Seed: LRMKWMMAMKYPITA
LRMKIMMTMFYPRTA

SEQ ID NO: 250253 - protein, 13 aa, Artificial Sequence
  Description of Artificial Sequence: Synthetic peptide
  Seed: ERELVRKTRFLPV
ERELWRKIRFLPF

SEQ ID NO: 250254 - protein, 15 aa, Artificial Sequence
  Description of Artificial Sequence: Synthetic peptide
  Seed: LRMKWMMAMKYPITA
LRMKEMMTMFYPLTA

SEQ ID NO: 250255 - protein, 15 aa, Artificial Sequence
  Description of Artificial Sequence: Synthetic peptide
  Seed: LRMKWMMAMKYPITA
LRMKFMMAMMYPHTA

SEQ ID NO: 250256 - protein, 13 aa, Artificial Sequence
  Description of Artificial Sequence: Synthetic peptide
  Seed: ERELVRKTRFLPV
ERELFRKARFLPS

SEQ ID NO: 250257 - protein, 15 aa, Artificial Sequence
  Description of Artificial Sequence: Synthetic peptide
  Seed: LRMKWMMAMKYPITA
LRMKMMMAMFYPMTA

SEQ ID NO: 250258 - protein, 15 aa, Artificial Sequence
  Description of Artificial Sequence: Synthetic peptide
  Seed: LRMKWMMAMKYPITA
LRMKIMMSMYYPATA

SEQ ID NO: 250259 - protein, 15 aa, Artificial Sequence
  Description of Artificial Sequence: Synthetic peptide
  Seed: LRMKWMMAMKYPITA
LRMKWIMAMKYPITA

SEQ ID NO: 250260 - protein, 15 aa, Artificial Sequence
  Description of Artificial Sequence: Synthetic peptide
  Seed: LRMKWMMAMKYPITA
LRMKFMMSMWYPRTA

SEQ ID NO: 250261 - protein, 15 aa, Artificial Sequence
  Description of Artificial Sequence: Synthetic peptide
  Seed: LRMKWMMAMKYPITA
LRMKFMMHMFYPCTA

SEQ ID NO: 250262 - protein, 15 aa, Artificial Sequence
  Description of Artificial Sequence: Synthetic peptide
  Seed: LRMKWMMAMKYPITA
LRMKFMMQMYYPMTA

SEQ ID NO: 250263 - protein, 15 aa, Artificial Sequence
  Description of Artificial Sequence: Synthetic peptide
  Seed: ANQRLNPMHQLLRHF
ANQRINPFHHLLAHF

SEQ ID NO: 250264 - protein, 15 aa, Artificial Sequence
  Description of Artificial Sequence: Synthetic peptide
  Seed: LRMKWMMAMKYPITA
LRMKIMMSMLYPFTA

SEQ ID NO: 250265 - protein, 15 aa, Artificial Sequence
  Description of Artificial Sequence: Synthetic peptide
  Seed: LRMKWMMAMKYPITA
LRMKFMMAMLYPFTA

SEQ ID NO: 250266 - protein, 15 aa, Artificial Sequence
  Description of Artificial Sequence: Synthetic peptide
  Seed: LRMKWMMAMKYPITA
LRMKLMMTMFYPRTA

SEQ ID NO: 250267 - protein, 15 aa, Artificial Sequence
  Description of Artificial Sequence: Synthetic peptide
  Seed: LRMKWMMAMKYPITA
LRMKIMMTMLYPMTA

SEQ ID NO: 250268 - protein, 15 aa, Artificial Sequence
  Description of Artificial Sequence: Synthetic peptide
  Seed: LRMKWMMAMKYPITA
LRMKFMMHMFYPQTA

SEQ ID NO: 250269 - protein, 13 aa, Artificial Sequence
  Description of Artificial Sequence: Synthetic peptide
  Seed: ERELVRKTRFLPV
ERELFRKSRLLPI

SEQ ID NO: 250270 - protein, 15 aa, Artificial Sequence
  Description of Artificial Sequence: Synthetic peptide
  Seed: LRMKWMMAMKYPITA
LRMKRMMSMIYPVTA

SEQ ID NO: 250271 - protein, 15 aa, Artificial Sequence
  Description of Artificial Sequence: Synthetic peptide
  Seed: LRMKWMMAMKYPITA
LRMKLMMSMLYPATA

SEQ ID NO: 250272 - protein, 15 aa, Artificial Sequence
  Description of Artificial Sequence: Synthetic peptide
  Seed: LRMKWMMAMKYPITA
LRMKIMMSMFYPHTA

SEQ ID NO: 250273 - protein, 15 aa, Artificial Sequence
  Description of Artificial Sequence: Synthetic peptide
  Seed: LRMKWMMAMKYPITA
LRMKMMMTMLYPVTA

SEQ ID NO: 250274 - protein, 15 aa, Artificial Sequence
  Description of Artificial Sequence: Synthetic peptide
  Seed: LRMKWMMAMKYPITA
LRMKFMMNMFYPQTA

SEQ ID NO: 250275 - protein, 15 aa, Artificial Sequence
  Description of Artificial Sequence: Synthetic peptide
  Seed: LRMKWMMAMKYPITA
LRMKMMMTMLYPLTA

SEQ ID NO: 250276 - protein, 15 aa, Artificial Sequence
  Description of Artificial Sequence: Synthetic peptide
  Seed: LRMKWMMAMKYPITA
LRMKLMMTMLYPMTA

SEQ ID NO: 250277 - protein, 15 aa, Artificial Sequence
  Description of Artificial Sequence: Synthetic peptide
  Seed: LRMKWMMAMKYPITA
LRMKLMMSMWYPMTA

SEQ ID NO: 250278 - protein, 15 aa, Artificial Sequence
  Description of Artificial Sequence: Synthetic peptide
  Seed: LRMKWMMAMKYPITA
LRMKVMMSMLYPVTA

SEQ ID NO: 250279 - protein, 15 aa, Artificial Sequence
  Description of Artificial Sequence: Synthetic peptide
  Seed: LRMKWMMAMKYPITA
LRMKIMMTMFYPHTA

SEQ ID NO: 250280 - protein, 15 aa, Artificial Sequence
  Description of Artificial Sequence: Synthetic peptide
  Seed: LRMKWMMAMKYPITA
LRMKLMMPMFYPITA

SEQ ID NO: 250281 - protein, 15 aa, Artificial Sequence
  Description of Artificial Sequence: Synthetic peptide
  Seed: LRMKWMMAMKYPITA
LRMKYMMNMFYPTTA

SEQ ID NO: 250282 - protein, 15 aa, Artificial Sequence
  Description of Artificial Sequence: Synthetic peptide
  Seed: LRMKWMMAMKYPITA
LRMKFMMKMWYPLTA

SEQ ID NO: 250283 - protein, 15 aa, Artificial Sequence
  Description of Artificial Sequence: Synthetic peptide
  Seed: LRMKWMMAMKYPITA
LRMKIMMSMMYPATA

SEQ ID NO: 250284 - protein, 15 aa, Artificial Sequence
  Description of Artificial Sequence: Synthetic peptide
  Seed: ANQRLNPMHQLLRHF
ANQRFNPSHMLLIHF

SEQ ID NO: 250285 - protein, 15 aa, Artificial Sequence
  Description of Artificial Sequence: Synthetic peptide
  Seed: LRMKWMMAMKYPITA
LRMKIMMVMNYPPTA

SEQ ID NO: 250286 - protein, 15 aa, Artificial Sequence
  Description of Artificial Sequence: Synthetic peptide
  Seed: LRMKWMMAMKYPITA
LRMKLMMTMIYPYTA

SEQ ID NO: 250287 - protein, 15 aa, Artificial Sequence
  Description of Artificial Sequence: Synthetic peptide
  Seed: LRMKWMMAMKYPITA
LRMKFMMHMIYPHTA

SEQ ID NO: 250288 - protein, 15 aa, Artificial Sequence
  Description of Artificial Sequence: Synthetic peptide
  Seed: LRMKWMMAMKYPITA
LRMKIMMTMYYPFTA

SEQ ID NO: 250289 - protein, 15 aa, Artificial Sequence
  Description of Artificial Sequence: Synthetic peptide
  Seed: LRMKWMMAMKYPITA
LRMKFMMTMWYPRTA

SEQ ID NO: 250290 - protein, 15 aa, Artificial Sequence
  Description of Artificial Sequence: Synthetic peptide
  Seed: LRMKWMMAMKYPITA
LRMKLMMSMNYPPTA

SEQ ID NO: 250291 - protein, 15 aa, Artificial Sequence
  Description of Artificial Sequence: Synthetic peptide
  Seed: LRMKWMMAMKYPITA
LRMKWMMIMRYPWTA

SEQ ID NO: 250292 - protein, 15 aa, Artificial Sequence
  Description of Artificial Sequence: Synthetic peptide
  Seed: LRMKWMMAMKYPITA
LRMKIMMSMLYPSTA

SEQ ID NO: 250293 - protein, 15 aa, Artificial Sequence
  Description of Artificial Sequence: Synthetic peptide
  Seed: LRMKWMMAMKYPITA
LRMKMMMSMFYPSTA

SEQ ID NO: 250294 - protein, 15 aa, Artificial Sequence
  Description of Artificial Sequence: Synthetic peptide
  Seed: ANQRLNPMHQLLRHF
ANQRINPAHILLYHF

SEQ ID NO: 250295 - protein, 15 aa, Artificial Sequence
  Description of Artificial Sequence: Synthetic peptide
  Seed: LRMKWMMAMKYPITA
LRMKFMMTMWYPHTA

SEQ ID NO: 250296 - protein, 15 aa, Artificial Sequence
  Description of Artificial Sequence: Synthetic peptide
  Seed: LRMKWMMAMKYPITA
LRMKVMMSMLYPLTA

SEQ ID NO: 250297 - protein, 15 aa, Artificial Sequence
  Description of Artificial Sequence: Synthetic peptide
  Seed: LRMKWMMAMKYPITA
LRMKFMMAMHYPWTA

SEQ ID NO: 250298 - protein, 15 aa, Artificial Sequence
  Description of Artificial Sequence: Synthetic peptide
  Seed: LRMKWMMAMKYPITA
LRMKLMMSMLYPFTA

SEQ ID NO: 250299 - protein, 15 aa, Artificial Sequence
  Description of Artificial Sequence: Synthetic peptide
  Seed: LRMKWMMAMKYPITA
LRMKFMMTMYYPRTA

SEQ ID NO: 250300 - protein, 15 aa, Artificial Sequence
  Description of Artificial Sequence: Synthetic peptide
  Seed: LRMKWMMAMKYPITA
LRMKFMMAMMYPETA

SEQ ID NO: 250301 - protein, 15 aa, Artificial Sequence
  Description of Artificial Sequence: Synthetic peptide
  Seed: LRMKWMMAMKYPITA
LRMKFMMKMYYPVTA

SEQ ID NO: 250302 - protein, 15 aa, Artificial Sequence
  Description of Artificial Sequence: Synthetic peptide
  Seed: LRMKWMMAMKYPITA
LRLKWLMVMKYPITA

SEQ ID NO: 250303 - protein, 15 aa, Artificial Sequence
  Description of Artificial Sequence: Synthetic peptide
  Seed: LRMKWMMAMKYPITA
LRMKYMMTMFYPQTA

SEQ ID NO: 250304 - protein, 15 aa, Artificial Sequence
  Description of Artificial Sequence: Synthetic peptide
  Seed: LRMKWMMAMKYPITA
LRMKIMMSMWYPFTA

SEQ ID NO: 250305 - protein, 15 aa, Artificial Sequence
  Description of Artificial Sequence: Synthetic peptide
  Seed: LRMKWMMAMKYPITA
LRMKWMMHMYYPLTA

SEQ ID NO: 250306 - protein, 13 aa, Artificial Sequence
  Description of Artificial Sequence: Synthetic peptide
  Seed: ERELVRKTRFLPV
ERELFRKERFLPY

SEQ ID NO: 250307 - protein, 15 aa, Artificial Sequence
  Description of Artificial Sequence: Synthetic peptide
  Seed: LRMKWMMAMKYPITA
LRMKFMMSMMYPKTA

SEQ ID NO: 250308 - protein, 15 aa, Artificial Sequence
  Description of Artificial Sequence: Synthetic peptide
  Seed: LRMKWMMAMKYPITA
LRMKWMMAMRYPETA

SEQ ID NO: 250309 - protein, 15 aa, Artificial Sequence
  Description of Artificial Sequence: Synthetic peptide
  Seed: LRMKWMMAMKYPITA
LRMKFMMKMWYPVTA

SEQ ID NO: 250310 - protein, 13 aa, Artificial Sequence
  Description of Artificial Sequence: Synthetic peptide
  Seed: ERELVRKTRFLPV
ERELFRKLRFLPS

SEQ ID NO: 250311 - protein, 15 aa, Artificial Sequence
  Description of Artificial Sequence: Synthetic peptide
  Seed: LRMKWMMAMKYPITA
LRMKFMMHMMYPSTA

SEQ ID NO: 250312 - protein, 15 aa, Artificial Sequence
  Description of Artificial Sequence: Synthetic peptide
  Seed: LRMKWMMAMKYPITA
LRMKFMMSMMYPETA

SEQ ID NO: 250313 - protein, 15 aa, Artificial Sequence
  Description of Artificial Sequence: Synthetic peptide
  Seed: LRMKWMMAMKYPITA
LRMKYMMRMFYPLTA

SEQ ID NO: 250314 - protein, 15 aa, Artificial Sequence
  Description of Artificial Sequence: Synthetic peptide
  Seed: LRMKWMMAMKYPITA
LRMKIMMHMFYPYTA

SEQ ID NO: 250315 - protein, 15 aa, Artificial Sequence
  Description of Artificial Sequence: Synthetic peptide
  Seed: LRMKWMMAMKYPITA
LRMKIMMTMMYPMTA

SEQ ID NO: 250316 - protein, 15 aa, Artificial Sequence
  Description of Artificial Sequence: Synthetic peptide
  Seed: LRMKWMMAMKYPITA
LRMKWMMPMFYPITA

SEQ ID NO: 250317 - protein, 15 aa, Artificial Sequence
  Description of Artificial Sequence: Synthetic peptide
  Seed: LRMKWMMAMKYPITA
LRMKNMMWMVYPATA

SEQ ID NO: 250318 - protein, 15 aa, Artificial Sequence
  Description of Artificial Sequence: Synthetic peptide
  Seed: LRMKWMMAMKYPITA
LRMKVMMSMWYPITA

SEQ ID NO: 250319 - protein, 15 aa, Artificial Sequence
  Description of Artificial Sequence: Synthetic peptide
  Seed: LRMKWMMAMKYPITA
LRMKFMMSMYYPDTA

SEQ ID NO: 250320 - protein, 15 aa, Artificial Sequence
  Description of Artificial Sequence: Synthetic peptide
  Seed: LRMKWMMAMKYPITA
LRMKMMMAMIYPQTA

SEQ ID NO: 250321 - protein, 15 aa, Artificial Sequence
  Description of Artificial Sequence: Synthetic peptide
  Seed: LRMKWMMAMKYPITA
LRMKFMMPMWYPLTA

SEQ ID NO: 250322 - protein, 15 aa, Artificial Sequence
  Description of Artificial Sequence: Synthetic peptide
  Seed: LRMKWMMAMKYPITA
LRMKYMMNMFYPYTA

SEQ ID NO: 250323 - protein, 15 aa, Artificial Sequence
  Description of Artificial Sequence: Synthetic peptide
  Seed: LRMKWMMAMKYPITA
LRMKFMMTMMYPHTA

SEQ ID NO: 250324 - protein, 15 aa, Artificial Sequence
  Description of Artificial Sequence: Synthetic peptide
  Seed: LRMKWMMAMKYPITA
LRMKFMMHMIYPQTA

SEQ ID NO: 250325 - protein, 15 aa, Artificial Sequence
  Description of Artificial Sequence: Synthetic peptide
  Seed: LRMKWMMAMKYPITA
LRMKFMMVMLYPRTA

SEQ ID NO: 250326 - protein, 15 aa, Artificial Sequence
  Description of Artificial Sequence: Synthetic peptide
  Seed: LRMKWMMAMKYPITA
LRMKYMMAMLYPRTA

SEQ ID NO: 250327 - protein, 15 aa, Artificial Sequence
  Description of Artificial Sequence: Synthetic peptide
  Seed: LRMKWMMAMKYPITA
LRMKYMMTMFYPKTA

SEQ ID NO: 250328 - protein, 15 aa, Artificial Sequence
  Description of Artificial Sequence: Synthetic peptide
  Seed: LRMKWMMAMKYPITA
LRMKFMMYMIYPMTA

SEQ ID NO: 250329 - protein, 15 aa, Artificial Sequence
  Description of Artificial Sequence: Synthetic peptide
  Seed: LRMKWMMAMKYPITA
LRMKIMMTMYYPATA

SEQ ID NO: 250330 - protein, 15 aa, Artificial Sequence
  Description of Artificial Sequence: Synthetic peptide
  Seed: ANQRLNPMHQLLRHF
ANQRFNPSHRLLIHF

SEQ ID NO: 250331 - protein, 15 aa, Artificial Sequence
  Description of Artificial Sequence: Synthetic peptide
  Seed: LRMKWMMAMKYPITA
LRMKWMMVMRYPWTA

SEQ ID NO: 250332 - protein, 15 aa, Artificial Sequence
  Description of Artificial Sequence: Synthetic peptide
  Seed: LRMKWMMAMKYPITA
LRMKFMMKMFYPNTA

SEQ ID NO: 250333 - protein, 15 aa, Artificial Sequence
  Description of Artificial Sequence: Synthetic peptide
  Seed: ANQRLNPMHQLLRHF
ANQRINPSHWLLIHF

SEQ ID NO: 250334 - protein, 15 aa, Artificial Sequence
  Description of Artificial Sequence: Synthetic peptide
  Seed: LRMKWMMAMKYPITA
LRFKWFMPMKFPITA

SEQ ID NO: 250335 - protein, 15 aa, Artificial Sequence
  Description of Artificial Sequence: Synthetic peptide
  Seed: LRMKWMMAMKYPITA
LRMKMMMNMFYPMTA

SEQ ID NO: 250336 - protein, 15 aa, Artificial Sequence
  Description of Artificial Sequence: Synthetic peptide
  Seed: LRMKWMMAMKYPITA
LRMKFMMMMFYPRTA

SEQ ID NO: 250337 - protein, 15 aa, Artificial Sequence
  Description of Artificial Sequence: Synthetic peptide
  Seed: LRMKWMMAMKYPITA
LRMKFMMSMWYPETA

SEQ ID NO: 250338 - protein, 15 aa, Artificial Sequence
  Description of Artificial Sequence: Synthetic peptide
  Seed: LRMKWMMAMKYPITA
LRMKMMMIMHYPETA

SEQ ID NO: 250339 - protein, 15 aa, Artificial Sequence
  Description of Artificial Sequence: Synthetic peptide
  Seed: LRMKWMMAMKYPITA
LRMKFMMSMMYPQTA

SEQ ID NO: 250340 - protein, 15 aa, Artificial Sequence
  Description of Artificial Sequence: Synthetic peptide
  Seed: LRMKWMMAMKYPITA
LRMKRMMAMIYPMTA

SEQ ID NO: 250341 - protein, 15 aa, Artificial Sequence
  Description of Artificial Sequence: Synthetic peptide
  Seed: LRMKWMMAMKYPITA
LRMKFMMYMVYPYTA

SEQ ID NO: 250342 - protein, 13 aa, Artificial Sequence
  Description of Artificial Sequence: Synthetic peptide
  Seed: ERELVRKTRFLPV
ERELFRKTRFLPE

SEQ ID NO: 250343 - protein, 15 aa, Artificial Sequence
  Description of Artificial Sequence: Synthetic peptide
  Seed: LRMKWMMAMKYPITA
LRMKLMMHMFYPYTA

SEQ ID NO: 250344 - protein, 15 aa, Artificial Sequence
  Description of Artificial Sequence: Synthetic peptide
  Seed: LRMKWMMAMKYPITA
LRMKFMMFMMYPRTA

SEQ ID NO: 250345 - protein, 15 aa, Artificial Sequence
  Description of Artificial Sequence: Synthetic peptide
  Seed: ANQRLNPMHQLLRHF
ANQRFNPFHILLSHF

SEQ ID NO: 250346 - protein, 15 aa, Artificial Sequence
  Description of Artificial Sequence: Synthetic peptide
  Seed: LRMKWMMAMKYPITA
LRIKWMMVMKYPITA

SEQ ID NO: 250347 - protein, 15 aa, Artificial Sequence
  Description of Artificial Sequence: Synthetic peptide
  Seed: ANQRLNPMHQLLRHF
ANQRINPSHLLLLHF

SEQ ID NO: 250348 - protein, 15 aa, Artificial Sequence
  Description of Artificial Sequence: Synthetic peptide
  Seed: LRMKWMMAMKYPITA
LRMKIMMAMFYPATA

SEQ ID NO: 250349 - protein, 15 aa, Artificial Sequence
  Description of Artificial Sequence: Synthetic peptide
  Seed: LRMKWMMAMKYPITA
LRVKWLMAMKYPITA

SEQ ID NO: 250350 - protein, 15 aa, Artificial Sequence
  Description of Artificial Sequence: Synthetic peptide
  Seed: LRMKWMMAMKYPITA
LRMKFMMNMFYPCTA

SEQ ID NO: 250351 - protein, 15 aa, Artificial Sequence
  Description of Artificial Sequence: Synthetic peptide
  Seed: LRMKWMMAMKYPITA
LRFKWFMPMKYPITA

SEQ ID NO: 250352 - protein, 15 aa, Artificial Sequence
  Description of Artificial Sequence: Synthetic peptide
  Seed: LRMKWMMAMKYPITA
LRMKLMMSMYYPATA

SEQ ID NO: 250353 - protein, 15 aa, Artificial Sequence
  Description of Artificial Sequence: Synthetic peptide
  Seed: LRMKWMMAMKYPITA
LRMKFMMQMLYPFTA

SEQ ID NO: 250354 - protein, 15 aa, Artificial Sequence
  Description of Artificial Sequence: Synthetic peptide
  Seed: LRMKWMMAMKYPITA
LRMKFMMPMFYPNTA

SEQ ID NO: 250355 - protein, 15 aa, Artificial Sequence
  Description of Artificial Sequence: Synthetic peptide
  Seed: LRMKWMMAMKYPITA
LRMKFMMWMHYPVTA

SEQ ID NO: 250356 - protein, 15 aa, Artificial Sequence
  Description of Artificial Sequence: Synthetic peptide
  Seed: LRMKWMMAMKYPITA
LRMKLMMAMMYPVTA

SEQ ID NO: 250357 - protein, 15 aa, Artificial Sequence
  Description of Artificial Sequence: Synthetic peptide
  Seed: ANQRLNPMHQLLRHF
ANQRFNPVHLLLTHF

SEQ ID NO: 250358 - protein, 15 aa, Artificial Sequence
  Description of Artificial Sequence: Synthetic peptide
  Seed: ANQRLNPMHQLLRHF
ANQRLNPAHVLLRHF

SEQ ID NO: 250359 - protein, 15 aa, Artificial Sequence
  Description of Artificial Sequence: Synthetic peptide
  Seed: LRMKWMMAMKYPITA
LRMKFMMTMMYPKTA

SEQ ID NO: 250360 - protein, 15 aa, Artificial Sequence
  Description of Artificial Sequence: Synthetic peptide
  Seed: ANQRLNPMHQLLRHF
ANQRINPFHTLLHHF

SEQ ID NO: 250361 - protein, 15 aa, Artificial Sequence
  Description of Artificial Sequence: Synthetic peptide
  Seed: ANQRLNPMHQLLRHF
ANQRINPSHWLLVHF

SEQ ID NO: 250362 - protein, 15 aa, Artificial Sequence
  Description of Artificial Sequence: Synthetic peptide
  Seed: LRMKWMMAMKYPITA
LRMKLMMSMMYPFTA

SEQ ID NO: 250363 - protein, 15 aa, Artificial Sequence
  Description of Artificial Sequence: Synthetic peptide
  Seed: LRMKWMMAMKYPITA
LRMKTMMFMPYPATA

SEQ ID NO: 250364 - protein, 15 aa, Artificial Sequence
  Description of Artificial Sequence: Synthetic peptide
  Seed: LRMKWMMAMKYPITA
LRMKIMMHMFYPTTA

SEQ ID NO: 250365 - protein, 15 aa, Artificial Sequence
  Description of Artificial Sequence: Synthetic peptide
  Seed: LRMKWMMAMKYPITA
LRMKLMMTMYYPATA

SEQ ID NO: 250366 - protein, 15 aa, Artificial Sequence
  Description of Artificial Sequence: Synthetic peptide
  Seed: LRMKWMMAMKYPITA
LRMKFMMYMHYPITA

SEQ ID NO: 250367 - protein, 15 aa, Artificial Sequence
  Description of Artificial Sequence: Synthetic peptide
  Seed: LRMKWMMAMKYPITA
LRMKFMMYMVYPHTA

SEQ ID NO: 250368 - protein, 15 aa, Artificial Sequence
  Description of Artificial Sequence: Synthetic peptide
  Seed: LRMKWMMAMKYPITA
LRMKLMMSMMYPATA

SEQ ID NO: 250369 - protein, 15 aa, Artificial Sequence
  Description of Artificial Sequence: Synthetic peptide
  Seed: LRMKWMMAMKYPITA
LRMKIMMIMVYPPTA

SEQ ID NO: 250370 - protein, 15 aa, Artificial Sequence
  Description of Artificial Sequence: Synthetic peptide
  Seed: LRMKWMMAMKYPITA
LRMKFMMYMHYPMTA

SEQ ID NO: 250371 - protein, 15 aa, Artificial Sequence
  Description of Artificial Sequence: Synthetic peptide
  Seed: LRMKWMMAMKYPITA
LRMKFMMYMIYPYTA

SEQ ID NO: 250372 - protein, 15 aa, Artificial Sequence
  Description of Artificial Sequence: Synthetic peptide
  Seed: LRMKWMMAMKYPITA
LRIKWLMTMKRPITA

SEQ ID NO: 250373 - protein, 15 aa, Artificial Sequence
  Description of Artificial Sequence: Synthetic peptide
  Seed: LRMKWMMAMKYPITA
LRMKIMMAMFYPRTA

SEQ ID NO: 250374 - protein, 15 aa, Artificial Sequence
  Description of Artificial Sequence: Synthetic peptide
  Seed: LRMKWMMAMKYPITA
LRMKFMMVMIYPKTA

SEQ ID NO: 250375 - protein, 15 aa, Artificial Sequence
  Description of Artificial Sequence: Synthetic peptide
  Seed: ANQRLNPMHQLLRHF
ANQRVNPIHALLYHF

SEQ ID NO: 250376 - protein, 15 aa, Artificial Sequence
  Description of Artificial Sequence: Synthetic peptide
  Seed: LRMKWMMAMKYPITA
LRMKYMMAMMYPKTA

SEQ ID NO: 250377 - protein, 13 aa, Artificial Sequence
  Description of Artificial Sequence: Synthetic peptide
  Seed: ERELVRKTRFLPV
ERELFRKERFLPS

SEQ ID NO: 250378 - protein, 15 aa, Artificial Sequence
  Description of Artificial Sequence: Synthetic peptide
  Seed: LRMKWMMAMKYPITA
LRMKFMMTMMYPETA

SEQ ID NO: 250379 - protein, 15 aa, Artificial Sequence
  Description of Artificial Sequence: Synthetic peptide
  Seed: LRMKWMMAMKYPITA
LRMKFMMWMIYPRTA

SEQ ID NO: 250380 - protein, 15 aa, Artificial Sequence
  Description of Artificial Sequence: Synthetic peptide
  Seed: LRMKWMMAMKYPITA
LRMKMMMTMFYPETA

SEQ ID NO: 250381 - protein, 15 aa, Artificial Sequence
  Description of Artificial Sequence: Synthetic peptide
  Seed: LRMKWMMAMKYPITA
LRMKMMMWMTYPLTA

SEQ ID NO: 250382 - protein, 15 aa, Artificial Sequence
  Description of Artificial Sequence: Synthetic peptide
  Seed: LRMKWMMAMKYPITA
LRMKWMMNMYYPLTA

SEQ ID NO: 250383 - protein, 15 aa, Artificial Sequence
  Description of Artificial Sequence: Synthetic peptide
  Seed: LRMKWMMAMKYPITA
LRMKFMMHMWYPYTA

SEQ ID NO: 250384 - protein, 15 aa, Artificial Sequence
  Description of Artificial Sequence: Synthetic peptide
  Seed: LRMKWMMAMKYPITA
LRMKLMMSMLYPSTA

SEQ ID NO: 250385 - protein, 15 aa, Artificial Sequence
  Description of Artificial Sequence: Synthetic peptide
  Seed: LRMKWMMAMKYPITA
LRMKIMMAMFYPNTA

SEQ ID NO: 250386 - protein, 15 aa, Artificial Sequence
  Description of Artificial Sequence: Synthetic peptide
  Seed: LRMKWMMAMKYPITA
LRLKWNMYMKIPITA

SEQ ID NO: 250387 - protein, 15 aa, Artificial Sequence
  Description of Artificial Sequence: Synthetic peptide
  Seed: LRMKWMMAMKYPITA
LRMKFMMYMMYPRTA

SEQ ID NO: 250388 - protein, 15 aa, Artificial Sequence
  Description of Artificial Sequence: Synthetic peptide
  Seed: LRMKWMMAMKYPITA
LRMKHMMYMSYPLTA

SEQ ID NO: 250389 - protein, 15 aa, Artificial Sequence
  Description of Artificial Sequence: Synthetic peptide
  Seed: LRMKWMMAMKYPITA
LRMKLMMWMTYPLTA

SEQ ID NO: 250390 - protein, 15 aa, Artificial Sequence
  Description of Artificial Sequence: Synthetic peptide
  Seed: LRMKWMMAMKYPITA
LRMKYMMVMFYPETA

SEQ ID NO: 250391 - protein, 15 aa, Artificial Sequence
  Description of Artificial Sequence: Synthetic peptide
  Seed: LRMKWMMAMKYPITA
LRMKNMMYMVYPATA

SEQ ID NO: 250392 - protein, 15 aa, Artificial Sequence
  Description of Artificial Sequence: Synthetic peptide
  Seed: LRMKWMMAMKYPITA
LRMKIMMHMFYPSTA

SEQ ID NO: 250393 - protein, 15 aa, Artificial Sequence
  Description of Artificial Sequence: Synthetic peptide
  Seed: LRMKWMMAMKYPITA
LRMKMMMAMMYPVTA

SEQ ID NO: 250394 - protein, 15 aa, Artificial Sequence
  Description of Artificial Sequence: Synthetic peptide
  Seed: LRMKWMMAMKYPITA
LRMKAMMYMSYPLTA

SEQ ID NO: 250395 - protein, 15 aa, Artificial Sequence
  Description of Artificial Sequence: Synthetic peptide
  Seed: LRMKWMMAMKYPITA
LRMKMMMAMQYPATA

SEQ ID NO: 250396 - protein, 15 aa, Artificial Sequence
  Description of Artificial Sequence: Synthetic peptide
  Seed: ANQRLNPMHQLLRHF
ANQRLNPSHRLLLHF

SEQ ID NO: 250397 - protein, 15 aa, Artificial Sequence
  Description of Artificial Sequence: Synthetic peptide
  Seed: LRMKWMMAMKYPITA
LRMKIMMTMNYPPTA

SEQ ID NO: 250398 - protein, 13 aa, Artificial Sequence
  Description of Artificial Sequence: Synthetic peptide
  Seed: ERELVRKTRFLPV
ERELYRKQRFLPL

SEQ ID NO: 250399 - protein, 15 aa, Artificial Sequence
  Description of Artificial Sequence: Synthetic peptide
  Seed: LRMKWMMAMKYPITA
LRMKFMMHMLYPKTA

SEQ ID NO: 250400 - protein, 15 aa, Artificial Sequence
  Description of Artificial Sequence: Synthetic peptide
  Seed: LRMKWMMAMKYPITA
LRMKMMMFMHYPLTA

SEQ ID NO: 250401 - protein, 15 aa, Artificial Sequence
  Description of Artificial Sequence: Synthetic peptide
  Seed: LRMKWMMAMKYPITA
LRMKCMMFMNYPLTA

SEQ ID NO: 250402 - protein, 15 aa, Artificial Sequence
  Description of Artificial Sequence: Synthetic peptide
  Seed: ANQRLNPMHQLLRHF
ANQRFNPAHWLLAHF

SEQ ID NO: 250403 - protein, 15 aa, Artificial Sequence
  Description of Artificial Sequence: Synthetic peptide
  Seed: LRMKWMMAMKYPITA
LRMKIMMSMFYPKTA

SEQ ID NO: 250404 - protein, 15 aa, Artificial Sequence
  Description of Artificial Sequence: Synthetic peptide
  Seed: LRMKWMMAMKYPITA
LRMKFMMYMIYPHTA

SEQ ID NO: 250405 - protein, 15 aa, Artificial Sequence
  Description of Artificial Sequence: Synthetic peptide
  Seed: LRMKWMMAMKYPITA
LRMKFMMHMFYPKTA

SEQ ID NO: 250406 - protein, 15 aa, Artificial Sequence
  Description of Artificial Sequence: Synthetic peptide
  Seed: LRMKWMMAMKYPITA
LRVKWMMAMKYPITA

SEQ ID NO: 250407 - protein, 15 aa, Artificial Sequence
  Description of Artificial Sequence: Synthetic peptide
  Seed: LRMKWMMAMKYPITA
LRMKIMMTMLYPATA

SEQ ID NO: 250408 - protein, 13 aa, Artificial Sequence
  Description of Artificial Sequence: Synthetic peptide
  Seed: ERELVRKTRFLPV
ERELFRKDRFLPF

SEQ ID NO: 250409 - protein, 15 aa, Artificial Sequence
  Description of Artificial Sequence: Synthetic peptide
  Seed: LRMKWMMAMKYPITA
LRMKWMMTMWYPMTA

SEQ ID NO: 250410 - protein, 15 aa, Artificial Sequence
  Description of Artificial Sequence: Synthetic peptide
  Seed: LRMKWMMAMKYPITA
LRMKMMMAMIYPHTA

SEQ ID NO: 250411 - protein, 15 aa, Artificial Sequence
  Description of Artificial Sequence: Synthetic peptide
  Seed: LRMKWMMAMKYPITA
LRMKLMMAMFYPRTA

SEQ ID NO: 250412 - protein, 15 aa, Artificial Sequence
  Description of Artificial Sequence: Synthetic peptide
  Seed: LRMKWMMAMKYPITA
LRMKFMMKMFYPSTA

SEQ ID NO: 250413 - protein, 15 aa, Artificial Sequence
  Description of Artificial Sequence: Synthetic peptide
  Seed: LRMKWMMAMKYPITA
LRMKSMMAMPYPVTA

SEQ ID NO: 250414 - protein, 13 aa, Artificial Sequence
  Description of Artificial Sequence: Synthetic peptide
  Seed: ERELVRKTRFLPV
ERELFRKVRFLPC

SEQ ID NO: 250415 - protein, 15 aa, Artificial Sequence
  Description of Artificial Sequence: Synthetic peptide
  Seed: LRMKWMMAMKYPITA
LRMKFMMFMLYPRTA

SEQ ID NO: 250416 - protein, 15 aa, Artificial Sequence
  Description of Artificial Sequence: Synthetic peptide
  Seed: LRMKWMMAMKYPITA
LRMKVMMAMVYPKTA

SEQ ID NO: 250417 - protein, 15 aa, Artificial Sequence
  Description of Artificial Sequence: Synthetic peptide
  Seed: LRMKWMMAMKYPITA
LRMKWMMFMKYPLTA

SEQ ID NO: 250418 - protein, 15 aa, Artificial Sequence
  Description of Artificial Sequence: Synthetic peptide
  Seed: LRMKWMMAMKYPITA
LRMKWMMHMYYPITA

SEQ ID NO: 250419 - protein, 15 aa, Artificial Sequence
  Description of Artificial Sequence: Synthetic peptide
  Seed: LRMKWMMAMKYPITA
LRMKFMMTMWYPDTA

SEQ ID NO: 250420 - protein, 15 aa, Artificial Sequence
  Description of Artificial Sequence: Synthetic peptide
  Seed: LRMKWMMAMKYPITA
LRMKIMMAMLYPYTA

SEQ ID NO: 250421 - protein, 15 aa, Artificial Sequence
  Description of Artificial Sequence: Synthetic peptide
  Seed: LRMKWMMAMKYPITA
LRMKFMMIMLYPHTA

SEQ ID NO: 250422 - protein, 15 aa, Artificial Sequence
  Description of Artificial Sequence: Synthetic peptide
  Seed: LRMKWMMAMKYPITA
LRMKFMMSMWYPDTA

SEQ ID NO: 250423 - protein, 13 aa, Artificial Sequence
  Description of Artificial Sequence: Synthetic peptide
  Seed: ERELVRKTRFLPV
ERELVRKERFLPL

SEQ ID NO: 250424 - protein, 15 aa, Artificial Sequence
  Description of Artificial Sequence: Synthetic peptide
  Seed: LRMKWMMAMKYPITA
LRMKFMMFMIYPYTA

SEQ ID NO: 250425 - protein, 15 aa, Artificial Sequence
  Description of Artificial Sequence: Synthetic peptide
  Seed: ANQRLNPMHQLLRHF
ANQRINPAHALLKHF

SEQ ID NO: 250426 - protein, 15 aa, Artificial Sequence
  Description of Artificial Sequence: Synthetic peptide
  Seed: LRMKWMMAMKYPITA
LRMKMMMAMVYPFTA

SEQ ID NO: 250427 - protein, 15 aa, Artificial Sequence
  Description of Artificial Sequence: Synthetic peptide
  Seed: LRMKWMMAMKYPITA
LRMKLMMAMLYPLTA

SEQ ID NO: 250428 - protein, 15 aa, Artificial Sequence
  Description of Artificial Sequence: Synthetic peptide
  Seed: LRMKWMMAMKYPITA
LRMKLMMSMIYPHTA

SEQ ID NO: 250429 - protein, 15 aa, Artificial Sequence
  Description of Artificial Sequence: Synthetic peptide
  Seed: LRMKWMMAMKYPITA
LRMKIMMAMLYPATA

SEQ ID NO: 250430 - protein, 15 aa, Artificial Sequence
  Description of Artificial Sequence: Synthetic peptide
  Seed: LRMKWMMAMKYPITA
LRMKLMMSMIYPQTA

SEQ ID NO: 250431 - protein, 13 aa, Artificial Sequence
  Description of Artificial Sequence: Synthetic peptide
  Seed: ERELVRKTRFLPV
ERELYRKERFLPF

SEQ ID NO: 250432 - protein, 15 aa, Artificial Sequence
  Description of Artificial Sequence: Synthetic peptide
  Seed: LRMKWMMAMKYPITA
LRMKIMMSMMYPSTA

SEQ ID NO: 250433 - protein, 15 aa, Artificial Sequence
  Description of Artificial Sequence: Synthetic peptide
  Seed: LRMKWMMAMKYPITA
LRMKVMMAMNYPQTA

SEQ ID NO: 250434 - protein, 15 aa, Artificial Sequence
  Description of Artificial Sequence: Synthetic peptide
  Seed: LRMKWMMAMKYPITA
LRMKFMMVMYYPRTA

SEQ ID NO: 250435 - protein, 15 aa, Artificial Sequence
  Description of Artificial Sequence: Synthetic peptide
  Seed: ANQRLNPMHQLLRHF
ANQRFNPNHFLLIHF

SEQ ID NO: 250436 - protein, 15 aa, Artificial Sequence
  Description of Artificial Sequence: Synthetic peptide
  Seed: LRMKWMMAMKYPITA
LRMKLMMSMDYPLTA

SEQ ID NO: 250437 - protein, 15 aa, Artificial Sequence
  Description of Artificial Sequence: Synthetic peptide
  Seed: LRMKWMMAMKYPITA
LRMKLMMSMNYPQTA

SEQ ID NO: 250438 - protein, 15 aa, Artificial Sequence
  Description of Artificial Sequence: Synthetic peptide
  Seed: LRMKWMMAMKYPITA
LRMKLMMHMFYPTTA

SEQ ID NO: 250439 - protein, 15 aa, Artificial Sequence
  Description of Artificial Sequence: Synthetic peptide
  Seed: LRMKWMMAMKYPITA
LRMKFMMWMHYPMTA

SEQ ID NO: 250440 - protein, 15 aa, Artificial Sequence
  Description of Artificial Sequence: Synthetic peptide
  Seed: ANQRLNPMHQLLRHF
ANQRINPVHNLLFHF

SEQ ID NO: 250441 - protein, 15 aa, Artificial Sequence
  Description of Artificial Sequence: Synthetic peptide
  Seed: LRMKWMMAMKYPITA
LRMKVMMSMFYPSTA

SEQ ID NO: 250442 - protein, 15 aa, Artificial Sequence
  Description of Artificial Sequence: Synthetic peptide
  Seed: LRMKWMMAMKYPITA
LRMKFMMTMMYPQTA

SEQ ID NO: 250443 - protein, 15 aa, Artificial Sequence
  Description of Artificial Sequence: Synthetic peptide
  Seed: LRMKWMMAMKYPITA
LRMKMMMHMYYPLTA

SEQ ID NO: 250444 - protein, 15 aa, Artificial Sequence
  Description of Artificial Sequence: Synthetic peptide
  Seed: LRMKWMMAMKYPITA
LRMKFMMYMIYPLTA

SEQ ID NO: 250445 - protein, 15 aa, Artificial Sequence
  Description of Artificial Sequence: Synthetic peptide
  Seed: LRMKWMMAMKYPITA
LRMKWMMAMKYPWTA

SEQ ID NO: 250446 - protein, 15 aa, Artificial Sequence
  Description of Artificial Sequence: Synthetic peptide
  Seed: LRMKWMMAMKYPITA
LRMKLMMAMMYPATA

SEQ ID NO: 250447 - protein, 15 aa, Artificial Sequence
  Description of Artificial Sequence: Synthetic peptide
  Seed: LRMKWMMAMKYPITA
LRMKWMMNMFYPYTA

SEQ ID NO: 250448 - protein, 15 aa, Artificial Sequence
  Description of Artificial Sequence: Synthetic peptide
  Seed: LRMKWMMAMKYPITA
LRMKMMMSMLYPATA

SEQ ID NO: 250449 - protein, 15 aa, Artificial Sequence
  Description of Artificial Sequence: Synthetic peptide
  Seed: LRMKWMMAMKYPITA
LRMKFMMEMFYPRTA

SEQ ID NO: 250450 - protein, 15 aa, Artificial Sequence
  Description of Artificial Sequence: Synthetic peptide
  Seed: LRMKWMMAMKYPITA
LRMKMMMVMQYPATA

SEQ ID NO: 250451 - protein, 15 aa, Artificial Sequence
  Description of Artificial Sequence: Synthetic peptide
  Seed: LRMKWMMAMKYPITA
LRMKLMMAMLYPATA

SEQ ID NO: 250452 - protein, 15 aa, Artificial Sequence
  Description of Artificial Sequence: Synthetic peptide
  Seed: LRMKWMMAMKYPITA
LRMKFMMFMHYPFTA

SEQ ID NO: 250453 - protein, 15 aa, Artificial Sequence
  Description of Artificial Sequence: Synthetic peptide
  Seed: LRMKWMMAMKYPITA
LRMKIMMLMHYPPTA

SEQ ID NO: 250454 - protein, 15 aa, Artificial Sequence
  Description of Artificial Sequence: Synthetic peptide
  Seed: LRMKWMMAMKYPITA
LRMKFMMVMYYPETA

SEQ ID NO: 250455 - protein, 15 aa, Artificial Sequence
  Description of Artificial Sequence: Synthetic peptide
  Seed: LRMKWMMAMKYPITA
LRMKYMMIMFYPRTA

SEQ ID NO: 250456 - protein, 15 aa, Artificial Sequence
  Description of Artificial Sequence: Synthetic peptide
  Seed: LRMKWMMAMKYPITA
LRMKYMMFMIYPRTA

SEQ ID NO: 250457 - protein, 15 aa, Artificial Sequence
  Description of Artificial Sequence: Synthetic peptide
  Seed: LRMKWMMAMKYPITA
LRMKMMMYMTYPMTA

SEQ ID NO: 250458 - protein, 15 aa, Artificial Sequence
  Description of Artificial Sequence: Synthetic peptide
  Seed: LRMKWMMAMKYPITA
LRMKFMMDMLYPMTA

SEQ ID NO: 250459 - protein, 15 aa, Artificial Sequence
  Description of Artificial Sequence: Synthetic peptide
  Seed: LRMKWMMAMKYPITA
LRMKFMMDMLYPFTA

SEQ ID NO: 250460 - protein, 15 aa, Artificial Sequence
  Description of Artificial Sequence: Synthetic peptide
  Seed: LRMKWMMAMKYPITA
LRMKFMMWMVYPYTA

SEQ ID NO: 250461 - protein, 13 aa, Artificial Sequence
  Description of Artificial Sequence: Synthetic peptide
  Seed: ERELVRKTRFLPV
ERELYRKQRFLPI

SEQ ID NO: 250462 - protein, 15 aa, Artificial Sequence
  Description of Artificial Sequence: Synthetic peptide
  Seed: LRMKWMMAMKYPITA
LRMKVMMVMTYPHTA

SEQ ID NO: 250463 - protein, 15 aa, Artificial Sequence
  Description of Artificial Sequence: Synthetic peptide
  Seed: LRMKWMMAMKYPITA
LRMKLMMAMFYPSTA

SEQ ID NO: 250464 - protein, 15 aa, Artificial Sequence
  Description of Artificial Sequence: Synthetic peptide
  Seed: LRMKWMMAMKYPITA
LRMKMMMRMTYPMTA

SEQ ID NO: 250465 - protein, 15 aa, Artificial Sequence
  Description of Artificial Sequence: Synthetic peptide
  Seed: LRMKWMMAMKYPITA
LRMKIMMSMIYPETA

SEQ ID NO: 250466 - protein, 15 aa, Artificial Sequence
  Description of Artificial Sequence: Synthetic peptide
  Seed: LRMKWMMAMKYPITA
LRMKYMMIMLYPRTA

SEQ ID NO: 250467 - protein, 15 aa, Artificial Sequence
  Description of Artificial Sequence: Synthetic peptide
  Seed: LRMKWMMAMKYPITA
LRMKFMMIMMYPETA

SEQ ID NO: 250468 - protein, 15 aa, Artificial Sequence
  Description of Artificial Sequence: Synthetic peptide
  Seed: LRMKWMMAMKYPITA
LRMKLMMFMHYPLTA

SEQ ID NO: 250469 - protein, 15 aa, Artificial Sequence
  Description of Artificial Sequence: Synthetic peptide
  Seed: LRMKWMMAMKYPITA
LRMKFMMKMFYPETA

SEQ ID NO: 250470 - protein, 15 aa, Artificial Sequence
  Description of Artificial Sequence: Synthetic peptide
  Seed: LRMKWMMAMKYPITA
LRMKLMMFMIYPRTA

SEQ ID NO: 250471 - protein, 15 aa, Artificial Sequence
  Description of Artificial Sequence: Synthetic peptide
  Seed: LRMKWMMAMKYPITA
LRMKFMMWMIYPYTA

SEQ ID NO: 250472 - protein, 15 aa, Artificial Sequence
  Description of Artificial Sequence: Synthetic peptide
  Seed: LRMKWMMAMKYPITA
LRIKWMMNMKYPITA

SEQ ID NO: 250473 - protein, 15 aa, Artificial Sequence
  Description of Artificial Sequence: Synthetic peptide
  Seed: ANQRLNPMHQLLRHF
ANQRINPSHILLYHF

SEQ ID NO: 250474 - protein, 15 aa, Artificial Sequence
  Description of Artificial Sequence: Synthetic peptide
  Seed: LRMKWMMAMKYPITA
LRMKMMMAMTYPWTA

SEQ ID NO: 250475 - protein, 15 aa, Artificial Sequence
  Description of Artificial Sequence: Synthetic peptide
  Seed: LRMKWMMAMKYPITA
LRMKVMMVMSYPHTA

SEQ ID NO: 250476 - protein, 15 aa, Artificial Sequence
  Description of Artificial Sequence: Synthetic peptide
  Seed: LRMKWMMAMKYPITA
LRMKFMMIMYYPRTA

SEQ ID NO: 250477 - protein, 15 aa, Artificial Sequence
  Description of Artificial Sequence: Synthetic peptide
  Seed: LRMKWMMAMKYPITA
LRMKYMMTMMYPRTA

SEQ ID NO: 250478 - protein, 15 aa, Artificial Sequence
  Description of Artificial Sequence: Synthetic peptide
  Seed: LRMKWMMAMKYPITA
LRMKFMMIMLYPETA

SEQ ID NO: 250479 - protein, 15 aa, Artificial Sequence
  Description of Artificial Sequence: Synthetic peptide
  Seed: LRMKWMMAMKYPITA
LRMKYMMAMLYPFTA

SEQ ID NO: 250480 - protein, 15 aa, Artificial Sequence
  Description of Artificial Sequence: Synthetic peptide
  Seed: LRMKWMMAMKYPITA
LRMKIMMSMYYPSTA

SEQ ID NO: 250481 - protein, 15 aa, Artificial Sequence
  Description of Artificial Sequence: Synthetic peptide
  Seed: LRMKWMMAMKYPITA
LRMKFMMDMYYPMTA

SEQ ID NO: 250482 - protein, 15 aa, Artificial Sequence
  Description of Artificial Sequence: Synthetic peptide
  Seed: LRMKWMMAMKYPITA
LRMKFMMPMFYPETA

SEQ ID NO: 250483 - protein, 15 aa, Artificial Sequence
  Description of Artificial Sequence: Synthetic peptide
  Seed: LRMKWMMAMKYPITA
LRMKWMMFMRYPVTA

SEQ ID NO: 250484 - protein, 15 aa, Artificial Sequence
  Description of Artificial Sequence: Synthetic peptide
  Seed: LRMKWMMAMKYPITA
LRMKIMMYMVYPATA

SEQ ID NO: 250485 - protein, 13 aa, Artificial Sequence
  Description of Artificial Sequence: Synthetic peptide
  Seed: ERELVRKTRFLPV
ERELFRKERWLPL

SEQ ID NO: 250486 - protein, 15 aa, Artificial Sequence
  Description of Artificial Sequence: Synthetic peptide
  Seed: LRMKWMMAMKYPITA
LRMKMMMSMNYPQTA

SEQ ID NO: 250487 - protein, 15 aa, Artificial Sequence
  Description of Artificial Sequence: Synthetic peptide
  Seed: LRMKWMMAMKYPITA
LRMKFMMFMIYPKTA

SEQ ID NO: 250488 - protein, 15 aa, Artificial Sequence
  Description of Artificial Sequence: Synthetic peptide
  Seed: LRMKWMMAMKYPITA
LRMKMMMFMHYPATA

SEQ ID NO: 250489 - protein, 15 aa, Artificial Sequence
  Description of Artificial Sequence: Synthetic peptide
  Seed: LRMKWMMAMKYPITA
LRMKWMMFMSYPYTA

SEQ ID NO: 250490 - protein, 15 aa, Artificial Sequence
  Description of Artificial Sequence: Synthetic peptide
  Seed: LRMKWMMAMKYPITA
LRMKFMMLMLYPRTA

SEQ ID NO: 250491 - protein, 15 aa, Artificial Sequence
  Description of Artificial Sequence: Synthetic peptide
  Seed: LRMKWMMAMKYPITA
LRMKFMMRMIYPVTA

SEQ ID NO: 250492 - protein, 15 aa, Artificial Sequence
  Description of Artificial Sequence: Synthetic peptide
  Seed: LRMKWMMAMKYPITA
LRMKFMMYMIYPKTA

SEQ ID NO: 250493 - protein, 15 aa, Artificial Sequence
  Description of Artificial Sequence: Synthetic peptide
  Seed: LRMKWMMAMKYPITA
LRMKIMMTMYYPSTA

SEQ ID NO: 250494 - protein, 15 aa, Artificial Sequence
  Description of Artificial Sequence: Synthetic peptide
  Seed: LRMKWMMAMKYPITA
LRMKFMMVMLYPETA

SEQ ID NO: 250495 - protein, 15 aa, Artificial Sequence
  Description of Artificial Sequence: Synthetic peptide
  Seed: LRMKWMMAMKYPITA
LRMKIMMQMLYPLTA

SEQ ID NO: 250496 - protein, 15 aa, Artificial Sequence
  Description of Artificial Sequence: Synthetic peptide
  Seed: LRMKWMMAMKYPITA
LRMKIMMYMVYPMTA

SEQ ID NO: 250497 - protein, 15 aa, Artificial Sequence
  Description of Artificial Sequence: Synthetic peptide
  Seed: LRMKWMMAMKYPITA
LRMKYMMYMHYPLTA

SEQ ID NO: 250498 - protein, 15 aa, Artificial Sequence
  Description of Artificial Sequence: Synthetic peptide
  Seed: LRMKWMMAMKYPITA
LRMKLMMYMTYPHTA

SEQ ID NO: 250499 - protein, 15 aa, Artificial Sequence
  Description of Artificial Sequence: Synthetic peptide
  Seed: LRMKWMMAMKYPITA
LRMKLMMAMIYPFTA

SEQ ID NO: 250500 - protein, 15 aa, Artificial Sequence
  Description of Artificial Sequence: Synthetic peptide
  Seed: LRMKWMMAMKYPITA
LRMKIMMTMMYPATA

SEQ ID NO: 250501 - protein, 15 aa, Artificial Sequence
  Description of Artificial Sequence: Synthetic peptide
  Seed: LRMKWMMAMKYPITA
LRMKFMMYMMYPYTA

SEQ ID NO: 250502 - protein, 15 aa, Artificial Sequence
  Description of Artificial Sequence: Synthetic peptide
  Seed: LRMKWMMAMKYPITA
LRMKMMMWMPYPMTA

SEQ ID NO: 250503 - protein, 15 aa, Artificial Sequence
  Description of Artificial Sequence: Synthetic peptide
  Seed: LRMKWMMAMKYPITA
LRMKCMMFMNYPVTA

SEQ ID NO: 250504 - protein, 15 aa, Artificial Sequence
  Description of Artificial Sequence: Synthetic peptide
  Seed: LRMKWMMAMKYPITA
LRMKFMMFMHYPHTA

SEQ ID NO: 250505 - protein, 15 aa, Artificial Sequence
  Description of Artificial Sequence: Synthetic peptide
  Seed: ANQRLNPMHQLLRHF
ANQRFNPLHWLLNHF

SEQ ID NO: 250506 - protein, 15 aa, Artificial Sequence
  Description of Artificial Sequence: Synthetic peptide
  Seed: LRMKWMMAMKYPITA
LRMKFMMYMIYPITA

SEQ ID NO: 250507 - protein, 15 aa, Artificial Sequence
  Description of Artificial Sequence: Synthetic peptide
  Seed: LRMKWMMAMKYPITA
LRMKMMMIMDYPLTA

SEQ ID NO: 250508 - protein, 15 aa, Artificial Sequence
  Description of Artificial Sequence: Synthetic peptide
  Seed: LRMKWMMAMKYPITA
LRMKMMMYMVYPATA

SEQ ID NO: 250509 - protein, 15 aa, Artificial Sequence
  Description of Artificial Sequence: Synthetic peptide
  Seed: LRMKWMMAMKYPITA
LRMKHMMFMAYPITA

SEQ ID NO: 250510 - protein, 13 aa, Artificial Sequence
  Description of Artificial Sequence: Synthetic peptide
  Seed: ERELVRKTRFLPV
ERELVRKERFLPV

SEQ ID NO: 250511 - protein, 15 aa, Artificial Sequence
  Description of Artificial Sequence: Synthetic peptide
  Seed: LRMKWMMAMKYPITA
LRMKLMMAMHYPETA

SEQ ID NO: 250512 - protein, 15 aa, Artificial Sequence
  Description of Artificial Sequence: Synthetic peptide
  Seed: LRMKWMMAMKYPITA
LRMKWMMFMPYPYTA

SEQ ID NO: 250513 - protein, 13 aa, Artificial Sequence
  Description of Artificial Sequence: Synthetic peptide
  Seed: ERELVRKTRFLPV
ERELLRKERFLPF

SEQ ID NO: 250514 - protein, 15 aa, Artificial Sequence
  Description of Artificial Sequence: Synthetic peptide
  Seed: LRMKWMMAMKYPITA
LRMKFMMWMMYPRTA

SEQ ID NO: 250515 - protein, 15 aa, Artificial Sequence
  Description of Artificial Sequence: Synthetic peptide
  Seed: LRMKWMMAMKYPITA
LRMKIMMHMWYPMTA

SEQ ID NO: 250516 - protein, 15 aa, Artificial Sequence
  Description of Artificial Sequence: Synthetic peptide
  Seed: LRMKWMMAMKYPITA
LRMKVMMVMNYPHTA

SEQ ID NO: 250517 - protein, 15 aa, Artificial Sequence
  Description of Artificial Sequence: Synthetic peptide
  Seed: LRMKWMMAMKYPITA
LRMKFMMWMIYPHTA

SEQ ID NO: 250518 - protein, 15 aa, Artificial Sequence
  Description of Artificial Sequence: Synthetic peptide
  Seed: LRMKWMMAMKYPITA
LRMKVMMWMPYPITA

SEQ ID NO: 250519 - protein, 15 aa, Artificial Sequence
  Description of Artificial Sequence: Synthetic peptide
  Seed: LRMKWMMAMKYPITA
LRMKIMMFMMYPRTA

SEQ ID NO: 250520 - protein, 15 aa, Artificial Sequence
  Description of Artificial Sequence: Synthetic peptide
  Seed: LRMKWMMAMKYPITA
LRMKYMMSMMYPRTA

SEQ ID NO: 250521 - protein, 15 aa, Artificial Sequence
  Description of Artificial Sequence: Synthetic peptide
  Seed: LRMKWMMAMKYPITA
LRMKIMMAMMYPQTA

SEQ ID NO: 250522 - protein, 15 aa, Artificial Sequence
  Description of Artificial Sequence: Synthetic peptide
  Seed: LRMKWMMAMKYPITA
LRMKIMMTMIYPHTA

SEQ ID NO: 250523 - protein, 15 aa, Artificial Sequence
  Description of Artificial Sequence: Synthetic peptide
  Seed: LRMKWMMAMKYPITA
LRMKMMMYMIYPATA

SEQ ID NO: 250524 - protein, 15 aa, Artificial Sequence
  Description of Artificial Sequence: Synthetic peptide
  Seed: LRMKWMMAMKYPITA
LRMKIMMSMWYPSTA

SEQ ID NO: 250525 - protein, 15 aa, Artificial Sequence
  Description of Artificial Sequence: Synthetic peptide
  Seed: LRMKWMMAMKYPITA
LRMKIMMAMMYPSTA

SEQ ID NO: 250526 - protein, 15 aa, Artificial Sequence
  Description of Artificial Sequence: Synthetic peptide
  Seed: LRMKWMMAMKYPITA
LRMKIMMQMYYPVTA

SEQ ID NO: 250527 - protein, 15 aa, Artificial Sequence
  Description of Artificial Sequence: Synthetic peptide
  Seed: LRMKWMMAMKYPITA
LRMKYMMFMMYPRTA

SEQ ID NO: 250528 - protein, 15 aa, Artificial Sequence
  Description of Artificial Sequence: Synthetic peptide
  Seed: LRMKWMMAMKYPITA
LRMKVMMAMTYPKTA

SEQ ID NO: 250529 - protein, 15 aa, Artificial Sequence
  Description of Artificial Sequence: Synthetic peptide
  Seed: LRMKWMMAMKYPITA
LRMKIMMFMTYPPTA

SEQ ID NO: 250530 - protein, 15 aa, Artificial Sequence
  Description of Artificial Sequence: Synthetic peptide
  Seed: LRMKWMMAMKYPITA
LRMKNMMFMAYPLTA

SEQ ID NO: 250531 - protein, 15 aa, Artificial Sequence
  Description of Artificial Sequence: Synthetic peptide
  Seed: LRMKWMMAMKYPITA
LRMKFMMIMMYPHTA

SEQ ID NO: 250532 - protein, 15 aa, Artificial Sequence
  Description of Artificial Sequence: Synthetic peptide
  Seed: LRMKWMMAMKYPITA
LRMKMMMYMSYPHTA

SEQ ID NO: 250533 - protein, 15 aa, Artificial Sequence
  Description of Artificial Sequence: Synthetic peptide
  Seed: LRMKWMMAMKYPITA
LRMKVMMSMNYPHTA

SEQ ID NO: 250534 - protein, 15 aa, Artificial Sequence
  Description of Artificial Sequence: Synthetic peptide
  Seed: LRMKWMMAMKYPITA
LRMKFMMFMDYPFTA

SEQ ID NO: 250535 - protein, 15 aa, Artificial Sequence
  Description of Artificial Sequence: Synthetic peptide
  Seed: LRMKWMMAMKYPITA
LRMKNMMAMMYPITA

SEQ ID NO: 250536 - protein, 15 aa, Artificial Sequence
  Description of Artificial Sequence: Synthetic peptide
  Seed: LRMKWMMAMKYPITA
LRMKVMMTMVYPYTA

SEQ ID NO: 250537 - protein, 15 aa, Artificial Sequence
  Description of Artificial Sequence: Synthetic peptide
  Seed: LRMKWMMAMKYPITA
LRMKVMMAMIYPQTA

SEQ ID NO: 250538 - protein, 15 aa, Artificial Sequence
  Description of Artificial Sequence: Synthetic peptide
  Seed: LRMKWMMAMKYPITA
LRMKWMMFMHYPLTA

SEQ ID NO: 250539 - protein, 15 aa, Artificial Sequence
  Description of Artificial Sequence: Synthetic peptide
  Seed: LRMKWMMAMKYPITA
LRMKFMMNMLYPETA

SEQ ID NO: 250540 - protein, 15 aa, Artificial Sequence
  Description of Artificial Sequence: Synthetic peptide
  Seed: LRMKWMMAMKYPITA
LRMKIMMAMLYPHTA

SEQ ID NO: 250541 - protein, 15 aa, Artificial Sequence
  Description of Artificial Sequence: Synthetic peptide
  Seed: LRMKWMMAMKYPITA
LRMKYMMMMLYPRTA

SEQ ID NO: 250542 - protein, 15 aa, Artificial Sequence
  Description of Artificial Sequence: Synthetic peptide
  Seed: LRMKWMMAMKYPITA
LRMKFMMYMMYPVTA

SEQ ID NO: 250543 - protein, 15 aa, Artificial Sequence
  Description of Artificial Sequence: Synthetic peptide
  Seed: ANQRLNPMHQLLRHF
ANQRVNPIHNLLMHF

SEQ ID NO: 250544 - protein, 15 aa, Artificial Sequence
  Description of Artificial Sequence: Synthetic peptide
  Seed: LRMKWMMAMKYPITA
LRMKVMMAMDYPITA

SEQ ID NO: 250545 - protein, 15 aa, Artificial Sequence
  Description of Artificial Sequence: Synthetic peptide
  Seed: LRMKWMMAMKYPITA
LRMKYMMLMKYPWTA

SEQ ID NO: 250546 - protein, 15 aa, Artificial Sequence
  Description of Artificial Sequence: Synthetic peptide
  Seed: LRMKWMMAMKYPITA
LRMKIMMYMIYPHTA

SEQ ID NO: 250547 - protein, 15 aa, Artificial Sequence
  Description of Artificial Sequence: Synthetic peptide
  Seed: LRMKWMMAMKYPITA
LRMKWMMYMPYPMTA

SEQ ID NO: 250548 - protein, 13 aa, Artificial Sequence
  Description of Artificial Sequence: Synthetic peptide
  Seed: ERELVRKTRFLPV
ERELFRKFRVLPL

SEQ ID NO: 250549 - protein, 15 aa, Artificial Sequence
  Description of Artificial Sequence: Synthetic peptide
  Seed: LRMKWMMAMKYPITA
LRMKMMMVMNYPQTA

SEQ ID NO: 250550 - protein, 15 aa, Artificial Sequence
  Description of Artificial Sequence: Synthetic peptide
  Seed: LRMKWMMAMKYPITA
LRMKMMMYMVYPHTA

SEQ ID NO: 250551 - protein, 15 aa, Artificial Sequence
  Description of Artificial Sequence: Synthetic peptide
  Seed: LRMKWMMAMKYPITA
LRMKWMMVMYYPVTA

SEQ ID NO: 250552 - protein, 15 aa, Artificial Sequence
  Description of Artificial Sequence: Synthetic peptide
  Seed: LRMKWMMAMKYPITA
LRMKFMMMMYYPRTA

SEQ ID NO: 250553 - protein, 15 aa, Artificial Sequence
  Description of Artificial Sequence: Synthetic peptide
  Seed: LRMKWMMAMKYPITA
LRMKMMMFMAYPHTA

SEQ ID NO: 250554 - protein, 15 aa, Artificial Sequence
  Description of Artificial Sequence: Synthetic peptide
  Seed: LRMKWMMAMKYPITA
LRMKYMMIMMYPKTA

SEQ ID NO: 250555 - protein, 13 aa, Artificial Sequence
  Description of Artificial Sequence: Synthetic peptide
  Seed: ERELVRKTRFLPV
ERELFRKWRFLPF

SEQ ID NO: 250556 - protein, 15 aa, Artificial Sequence
  Description of Artificial Sequence: Synthetic peptide
  Seed: LRMKWMMAMKYPITA
LRMKFMMYMIYPSTA

SEQ ID NO: 250557 - protein, 15 aa, Artificial Sequence
  Description of Artificial Sequence: Synthetic peptide
  Seed: LRMKWMMAMKYPITA
LRMKYMMWMVYPRTA

SEQ ID NO: 250558 - protein, 15 aa, Artificial Sequence
  Description of Artificial Sequence: Synthetic peptide
  Seed: LRMKWMMAMKYPITA
LRMKVMMTMIYPATA

SEQ ID NO: 250559 - protein, 15 aa, Artificial Sequence
  Description of Artificial Sequence: Synthetic peptide
  Seed: LRMKWMMAMKYPITA
LRMKFMMDMMYPFTA

SEQ ID NO: 250560 - protein, 15 aa, Artificial Sequence
  Description of Artificial Sequence: Synthetic peptide
  Seed: LRMKWMMAMKYPITA
LRMKWMMYMAYPYTA

SEQ ID NO: 250561 - protein, 15 aa, Artificial Sequence
  Description of Artificial Sequence: Synthetic peptide
  Seed: LRMKWMMAMKYPITA
LRMKWMMVMYYPLTA

SEQ ID NO: 250562 - protein, 15 aa, Artificial Sequence
  Description of Artificial Sequence: Synthetic peptide
  Seed: LRMKWMMAMKYPITA
LRMKVMMRMVYPQTA

SEQ ID NO: 250563 - protein, 15 aa, Artificial Sequence
  Description of Artificial Sequence: Synthetic peptide
  Seed: LRMKWMMAMKYPITA
LRMKMMMWMTYPITA

SEQ ID NO: 250564 - protein, 15 aa, Artificial Sequence
  Description of Artificial Sequence: Synthetic peptide
  Seed: LRMKWMMAMKYPITA
LRMKFMMMMLYPKTA

SEQ ID NO: 250565 - protein, 15 aa, Artificial Sequence
  Description of Artificial Sequence: Synthetic peptide
  Seed: LRMKWMMAMKYPITA
LRMKMMMIMQYPATA

SEQ ID NO: 250566 - protein, 15 aa, Artificial Sequence
  Description of Artificial Sequence: Synthetic peptide
  Seed: LRMKWMMAMKYPITA
LRMKLMMWMTYPITA

SEQ ID NO: 250567 - protein, 15 aa, Artificial Sequence
  Description of Artificial Sequence: Synthetic peptide
  Seed: LRMKWMMAMKYPITA
LRMKLMMTMIYPQTA

SEQ ID NO: 250568 - protein, 15 aa, Artificial Sequence
  Description of Artificial Sequence: Synthetic peptide
  Seed: LRMKWMMAMKYPITA
LRMKFMMMMMYPYTA

SEQ ID NO: 250569 - protein, 15 aa, Artificial Sequence
  Description of Artificial Sequence: Synthetic peptide
  Seed: LRMKWMMAMKYPITA
LRMKFMMFMLYPHTA

SEQ ID NO: 250570 - protein, 15 aa, Artificial Sequence
  Description of Artificial Sequence: Synthetic peptide
  Seed: LRMKWMMAMKYPITA
LRMKHMMAMIYPITA

SEQ ID NO: 250571 - protein, 15 aa, Artificial Sequence
  Description of Artificial Sequence: Synthetic peptide
  Seed: LRMKWMMAMKYPITA
LRMKFMMYMTYPPTA

SEQ ID NO: 250572 - protein, 15 aa, Artificial Sequence
  Description of Artificial Sequence: Synthetic peptide
  Seed: LRMKWMMAMKYPITA
LRMKYMMTMFYPGTA

SEQ ID NO: 250573 - protein, 15 aa, Artificial Sequence
  Description of Artificial Sequence: Synthetic peptide
  Seed: LRMKWMMAMKYPITA
LRMKIMMFMSYPPTA

SEQ ID NO: 250574 - protein, 15 aa, Artificial Sequence
  Description of Artificial Sequence: Synthetic peptide
  Seed: LRMKWMMAMKYPITA
LRMKFMMWMLYPRTA

SEQ ID NO: 250575 - protein, 15 aa, Artificial Sequence
  Description of Artificial Sequence: Synthetic peptide
  Seed: LRMKWMMAMKYPITA
LRMKMMMSMHYPFTA

SEQ ID NO: 250576 - protein, 15 aa, Artificial Sequence
  Description of Artificial Sequence: Synthetic peptide
  Seed: LRMKWMMAMKYPITA
LRMKLMMAMQYPQTA

SEQ ID NO: 250577 - protein, 15 aa, Artificial Sequence
  Description of Artificial Sequence: Synthetic peptide
  Seed: LRMKWMMAMKYPITA
LRMKVMMSMSYPQTA

SEQ ID NO: 250578 - protein, 15 aa, Artificial Sequence
  Description of Artificial Sequence: Synthetic peptide
  Seed: LRMKWMMAMKYPITA
LRMKIMMAMTYPWTA

SEQ ID NO: 250579 - protein, 15 aa, Artificial Sequence
  Description of Artificial Sequence: Synthetic peptide
  Seed: LRMKWMMAMKYPITA
LRMKVMMSMLYPATA

SEQ ID NO: 250580 - protein, 15 aa, Artificial Sequence
  Description of Artificial Sequence: Synthetic peptide
  Seed: LRMKWMMAMKYPITA
LRMKIMMYMIYPATA

SEQ ID NO: 250581 - protein, 15 aa, Artificial Sequence
  Description of Artificial Sequence: Synthetic peptide
  Seed: LRMKWMMAMKYPITA
LRMKWMMFMIYPRTA

SEQ ID NO: 250582 - protein, 15 aa, Artificial Sequence
  Description of Artificial Sequence: Synthetic peptide
  Seed: LRMKWMMAMKYPITA
LRMKLMMYMVYPATA

SEQ ID NO: 250583 - protein, 15 aa, Artificial Sequence
  Description of Artificial Sequence: Synthetic peptide
  Seed: LRMKWMMAMKYPITA
LRMKFMMVMYYPDTA

SEQ ID NO: 250584 - protein, 15 aa, Artificial Sequence
  Description of Artificial Sequence: Synthetic peptide
  Seed: LRMKWMMAMKYPITA
LRMKFMMYMAYPETA

SEQ ID NO: 250585 - protein, 15 aa, Artificial Sequence
  Description of Artificial Sequence: Synthetic peptide
  Seed: LRMKWMMAMKYPITA
LRMKFMMDMLYPYTA

SEQ ID NO: 250586 - protein, 15 aa, Artificial Sequence
  Description of Artificial Sequence: Synthetic peptide
  Seed: LRMKWMMAMKYPITA
LRMKWMMFMKYPITA

SEQ ID NO: 250587 - protein, 15 aa, Artificial Sequence
  Description of Artificial Sequence: Synthetic peptide
  Seed: LRMKWMMAMKYPITA
LRMKVMMSMNYPQTA

SEQ ID NO: 250588 - protein, 15 aa, Artificial Sequence
  Description of Artificial Sequence: Synthetic peptide
  Seed: LRMKWMMAMKYPITA
LRMKIMMSMDYPMTA

SEQ ID NO: 250589 - protein, 15 aa, Artificial Sequence
  Description of Artificial Sequence: Synthetic peptide
  Seed: LRMKWMMAMKYPITA
LRMKIMMYMIYPMTA

SEQ ID NO: 250590 - protein, 15 aa, Artificial Sequence
  Description of Artificial Sequence: Synthetic peptide
  Seed: LRMKWMMAMKYPITA
LRMKVMMSMTYPQTA

SEQ ID NO: 250591 - protein, 15 aa, Artificial Sequence
  Description of Artificial Sequence: Synthetic peptide
  Seed: LRMKWMMAMKYPITA
LRMKVMMSMTYPHTA

SEQ ID NO: 250592 - protein, 15 aa, Artificial Sequence
  Description of Artificial Sequence: Synthetic peptide
  Seed: LRMKWMMAMKYPITA
LRMKCMMMMHYPMTA

SEQ ID NO: 250593 - protein, 15 aa, Artificial Sequence
  Description of Artificial Sequence: Synthetic peptide
  Seed: LRMKWMMAMKYPITA
LRMKFMMLMYYPRTA

SEQ ID NO: 250594 - protein, 15 aa, Artificial Sequence
  Description of Artificial Sequence: Synthetic peptide
  Seed: ANQRLNPMHQLLRHF
ANQRFNPNHFLLFHF

SEQ ID NO: 250595 - protein, 15 aa, Artificial Sequence
  Description of Artificial Sequence: Synthetic peptide
  Seed: LRMKWMMAMKYPITA
LRMKMMMYMVYPLTA

SEQ ID NO: 250596 - protein, 15 aa, Artificial Sequence
  Description of Artificial Sequence: Synthetic peptide
  Seed: LRMKWMMAMKYPITA
LRMKLMMFMDYPLTA

SEQ ID NO: 250597 - protein, 15 aa, Artificial Sequence
  Description of Artificial Sequence: Synthetic peptide
  Seed: LRMKWMMAMKYPITA
LRMKFMMYMMYPATA

SEQ ID NO: 250598 - protein, 15 aa, Artificial Sequence
  Description of Artificial Sequence: Synthetic peptide
  Seed: LRMKWMMAMKYPITA
LRMKYMMTMMYPNTA

SEQ ID NO: 250599 - protein, 15 aa, Artificial Sequence
  Description of Artificial Sequence: Synthetic peptide
  Seed: LRMKWMMAMKYPITA
LRMKMMMFMNYPFTA

SEQ ID NO: 250600 - protein, 15 aa, Artificial Sequence
  Description of Artificial Sequence: Synthetic peptide
  Seed: LRMKWMMAMKYPITA
LRMKMMMFMNYPHTA

SEQ ID NO: 250601 - protein, 15 aa, Artificial Sequence
  Description of Artificial Sequence: Synthetic peptide
  Seed: LRMKWMMAMKYPITA
LRMKCMMYMAYPLTA

SEQ ID NO: 250602 - protein, 15 aa, Artificial Sequence
  Description of Artificial Sequence: Synthetic peptide
  Seed: LRMKWMMAMKYPITA
LRMKIMMFMNYPPTA

SEQ ID NO: 250603 - protein, 15 aa, Artificial Sequence
  Description of Artificial Sequence: Synthetic peptide
  Seed: LRMKWMMAMKYPITA
LRMKFMMDMMYPMTA

SEQ ID NO: 250604 - protein, 15 aa, Artificial Sequence
  Description of Artificial Sequence: Synthetic peptide
  Seed: LRMKWMMAMKYPITA
LRMKFMMEMYYPYTA

SEQ ID NO: 250605 - protein, 15 aa, Artificial Sequence
  Description of Artificial Sequence: Synthetic peptide
  Seed: LRMKWMMAMKYPITA
LRMKNMMAMTYPITA

SEQ ID NO: 250606 - protein, 15 aa, Artificial Sequence
  Description of Artificial Sequence: Synthetic peptide
  Seed: LRMKWMMAMKYPITA
LRMKMMMFMSYPYTA

SEQ ID NO: 250607 - protein, 15 aa, Artificial Sequence
  Description of Artificial Sequence: Synthetic peptide
  Seed: LRMKWMMAMKYPITA
LRMKLMMTMIYPHTA

SEQ ID NO: 250608 - protein, 15 aa, Artificial Sequence
  Description of Artificial Sequence: Synthetic peptide
  Seed: LRMKWMMAMKYPITA
LRMKLMMYMVYPMTA

SEQ ID NO: 250609 - protein, 15 aa, Artificial Sequence
  Description of Artificial Sequence: Synthetic peptide
  Seed: LRMKWMMAMKYPITA
LRMKNMMGMAYPMTA

SEQ ID NO: 250610 - protein, 13 aa, Artificial Sequence
  Description of Artificial Sequence: Synthetic peptide
  Seed: ERELVRKTRFLPV
ERELLRKIRFLPT

SEQ ID NO: 250611 - protein, 15 aa, Artificial Sequence
  Description of Artificial Sequence: Synthetic peptide
  Seed: LRMKWMMAMKYPITA
LRMKFMMYMEYPLTA

SEQ ID NO: 250612 - protein, 15 aa, Artificial Sequence
  Description of Artificial Sequence: Synthetic peptide
  Seed: LRMKWMMAMKYPITA
LRMKFMMYMNYPPTA

SEQ ID NO: 250613 - protein, 15 aa, Artificial Sequence
  Description of Artificial Sequence: Synthetic peptide
  Seed: LRMKWMMAMKYPITA
LRMKVMMAMVYPFTA

SEQ ID NO: 250614 - protein, 15 aa, Artificial Sequence
  Description of Artificial Sequence: Synthetic peptide
  Seed: LRMKWMMAMKYPITA
LRMKVMMTMIYPYTA

SEQ ID NO: 250615 - protein, 15 aa, Artificial Sequence
  Description of Artificial Sequence: Synthetic peptide
  Seed: LRMKWMMAMKYPITA
LRMKLMMAMLYPSTA

SEQ ID NO: 250616 - protein, 15 aa, Artificial Sequence
  Description of Artificial Sequence: Synthetic peptide
  Seed: LRMKWMMAMKYPITA
LRMKFMMWMVYPKTA

SEQ ID NO: 250617 - protein, 15 aa, Artificial Sequence
  Description of Artificial Sequence: Synthetic peptide
  Seed: LRMKWMMAMKYPITA
LRMKFMMQMYYPYTA

SEQ ID NO: 250618 - protein, 15 aa, Artificial Sequence
  Description of Artificial Sequence: Synthetic peptide
  Seed: LRMKWMMAMKYPITA
LRMKFMMRMIYPATA

SEQ ID NO: 250619 - protein, 15 aa, Artificial Sequence
  Description of Artificial Sequence: Synthetic peptide
  Seed: LRMKWMMAMKYPITA
LRMKAMMAMPYPITA

SEQ ID NO: 250620 - protein, 15 aa, Artificial Sequence
  Description of Artificial Sequence: Synthetic peptide
  Seed: LRMKWMMAMKYPITA
LRMKWMMIMLYPRTA

SEQ ID NO: 250621 - protein, 15 aa, Artificial Sequence
  Description of Artificial Sequence: Synthetic peptide
  Seed: LRMKWMMAMKYPITA
LRMKFMMYMQYPMTA

SEQ ID NO: 250622 - protein, 15 aa, Artificial Sequence
  Description of Artificial Sequence: Synthetic peptide
  Seed: LRMKWMMAMKYPITA
LRMKIMMAMDYPFTA

SEQ ID NO: 250623 - protein, 15 aa, Artificial Sequence
  Description of Artificial Sequence: Synthetic peptide
  Seed: LRMKWMMAMKYPITA
LRMKMMMYMVYPMTA

SEQ ID NO: 250624 - protein, 15 aa, Artificial Sequence
  Description of Artificial Sequence: Synthetic peptide
  Seed: LRMKWMMAMKYPITA
LRMKFMMVMLYPATA

SEQ ID NO: 250625 - protein, 13 aa, Artificial Sequence
  Description of Artificial Sequence: Synthetic peptide
  Seed: ERELVRKTRFLPV
ERELFRKPRFLPL

SEQ ID NO: 250626 - protein, 15 aa, Artificial Sequence
  Description of Artificial Sequence: Synthetic peptide
  Seed: LRMKWMMAMKYPITA
LRMKYMMYMHYPVTA

SEQ ID NO: 250627 - protein, 15 aa, Artificial Sequence
  Description of Artificial Sequence: Synthetic peptide
  Seed: LRMKWMMAMKYPITA
LRMKFMMMMLYPYTA

SEQ ID NO: 250628 - protein, 13 aa, Artificial Sequence
  Description of Artificial Sequence: Synthetic peptide
  Seed: ERELVRKTRFLPV
ERELMRKERFLPI

SEQ ID NO: 250629 - protein, 15 aa, Artificial Sequence
  Description of Artificial Sequence: Synthetic peptide
  Seed: LRMKWMMAMKYPITA
LRMKWMMAMKYPETA

SEQ ID NO: 250630 - protein, 15 aa, Artificial Sequence
  Description of Artificial Sequence: Synthetic peptide
  Seed: LRMKWMMAMKYPITA
LRMKYMMYMPYPFTA

SEQ ID NO: 250631 - protein, 15 aa, Artificial Sequence
  Description of Artificial Sequence: Synthetic peptide
  Seed: LRMKWMMAMKYPITA
LRMKWMMFMNYPYTA

SEQ ID NO: 250632 - protein, 15 aa, Artificial Sequence
  Description of Artificial Sequence: Synthetic peptide
  Seed: LRMKWMMAMKYPITA
LRMKFMMMMWYPRTA

SEQ ID NO: 250633 - protein, 15 aa, Artificial Sequence
  Description of Artificial Sequence: Synthetic peptide
  Seed: LRMKWMMAMKYPITA
LRMKMMMYMVYPVTA

SEQ ID NO: 250634 - protein, 15 aa, Artificial Sequence
  Description of Artificial Sequence: Synthetic peptide
  Seed: LRMKWMMAMKYPITA
LRMKYMMWMMYPRTA

SEQ ID NO: 250635 - protein, 15 aa, Artificial Sequence
  Description of Artificial Sequence: Synthetic peptide
  Seed: LRMKWMMAMKYPITA
LRIKWWMIMKNPITA

SEQ ID NO: 250636 - protein, 15 aa, Artificial Sequence
  Description of Artificial Sequence: Synthetic peptide
  Seed: LRMKWMMAMKYPITA
LRMKVMMIMDYPLTA

SEQ ID NO: 250637 - protein, 15 aa, Artificial Sequence
  Description of Artificial Sequence: Synthetic peptide
  Seed: LRMKWMMAMKYPITA
LRMKMMMSMMYPATA

SEQ ID NO: 250638 - protein, 15 aa, Artificial Sequence
  Description of Artificial Sequence: Synthetic peptide
  Seed: LRMKWMMAMKYPITA
LRMKMMMWMNYPMTA

SEQ ID NO: 250639 - protein, 15 aa, Artificial Sequence
  Description of Artificial Sequence: Synthetic peptide
  Seed: LRMKWMMAMKYPITA
LRMKWMMSMFYPPTA

SEQ ID NO: 250640 - protein, 15 aa, Artificial Sequence
  Description of Artificial Sequence: Synthetic peptide
  Seed: LRMKWMMAMKYPITA
LRMKFMMIMMYPQTA

SEQ ID NO: 250641 - protein, 15 aa, Artificial Sequence
  Description of Artificial Sequence: Synthetic peptide
  Seed: LRMKWMMAMKYPITA
LRMKIMMWMVYPVTA

SEQ ID NO: 250642 - protein, 15 aa, Artificial Sequence
  Description of Artificial Sequence: Synthetic peptide
  Seed: LRMKWMMAMKYPITA
LRMKMMMIMNYPFTA

SEQ ID NO: 250643 - protein, 15 aa, Artificial Sequence
  Description of Artificial Sequence: Synthetic peptide
  Seed: LRMKWMMAMKYPITA
LRMKYMMHMMYPATA

SEQ ID NO: 250644 - protein, 15 aa, Artificial Sequence
  Description of Artificial Sequence: Synthetic peptide
  Seed: LRMKWMMAMKYPITA
LRMKFMMKMLYPATA

SEQ ID NO: 250645 - protein, 15 aa, Artificial Sequence
  Description of Artificial Sequence: Synthetic peptide
  Seed: LRMKWMMAMKYPITA
LRMKCMMYMNYPLTA

SEQ ID NO: 250646 - protein, 15 aa, Artificial Sequence
  Description of Artificial Sequence: Synthetic peptide
  Seed: ANQRLNPMHQLLRHF
ANQRFNPIHHLLNHF

SEQ ID NO: 250647 - protein, 15 aa, Artificial Sequence
  Description of Artificial Sequence: Synthetic peptide
  Seed: LRMKWMMAMKYPITA
LRMKMMMSMDYPLTA

SEQ ID NO: 250648 - protein, 15 aa, Artificial Sequence
  Description of Artificial Sequence: Synthetic peptide
  Seed: LRMKWMMAMKYPITA
LRMKIMMYMLYPRTA

SEQ ID NO: 250649 - protein, 15 aa, Artificial Sequence
  Description of Artificial Sequence: Synthetic peptide
  Seed: LRMKWMMAMKYPITA
LRMKVMMFMNYPHTA

SEQ ID NO: 250650 - protein, 15 aa, Artificial Sequence
  Description of Artificial Sequence: Synthetic peptide
  Seed: LRMKWMMAMKYPITA
LRMKFMMEMFYPKTA

SEQ ID NO: 250651 - protein, 15 aa, Artificial Sequence
  Description of Artificial Sequence: Synthetic peptide
  Seed: LRMKWMMAMKYPITA
LRMKHMMYMAYPLTA

SEQ ID NO: 250652 - protein, 15 aa, Artificial Sequence
  Description of Artificial Sequence: Synthetic peptide
  Seed: LRMKWMMAMKYPITA
LRMKFMMYMVYPFTA

SEQ ID NO: 250653 - protein, 15 aa, Artificial Sequence
  Description of Artificial Sequence: Synthetic peptide
  Seed: LRMKWMMAMKYPITA
LRMKMMMYMVYPKTA

SEQ ID NO: 250654 - protein, 15 aa, Artificial Sequence
  Description of Artificial Sequence: Synthetic peptide
  Seed: LRMKWMMAMKYPITA
LRMKIMMFMLYPRTA

SEQ ID NO: 250655 - protein, 13 aa, Artificial Sequence
  Description of Artificial Sequence: Synthetic peptide
  Seed: ERELVRKTRFLPV
ERELWRKERFLPF

SEQ ID NO: 250656 - protein, 15 aa, Artificial Sequence
  Description of Artificial Sequence: Synthetic peptide
  Seed: LRMKWMMAMKYPITA
LRMKMMMWMNYPATA

SEQ ID NO: 250657 - protein, 15 aa, Artificial Sequence
  Description of Artificial Sequence: Synthetic peptide
  Seed: LRMKWMMAMKYPITA
LRMKFMMFMDYPYTA

SEQ ID NO: 250658 - protein, 15 aa, Artificial Sequence
  Description of Artificial Sequence: Synthetic peptide
  Seed: LRMKWMMAMKYPITA
LRMKVMMFMAYPHTA

SEQ ID NO: 250659 - protein, 15 aa, Artificial Sequence
  Description of Artificial Sequence: Synthetic peptide
  Seed: LRMKWMMAMKYPITA
LRMKWMMIMKYPETA

SEQ ID NO: 250660 - protein, 15 aa, Artificial Sequence
  Description of Artificial Sequence: Synthetic peptide
  Seed: LRMKWMMAMKYPITA
LRMKYMMVMIYPKTA

SEQ ID NO: 250661 - protein, 15 aa, Artificial Sequence
  Description of Artificial Sequence: Synthetic peptide
  Seed: LRMKWMMAMKYPITA
LRMKFMMWMDYPLTA

SEQ ID NO: 250662 - protein, 15 aa, Artificial Sequence
  Description of Artificial Sequence: Synthetic peptide
  Seed: LRMKWMMAMKYPITA
LRMKMMMYMMYPATA

SEQ ID NO: 250663 - protein, 15 aa, Artificial Sequence
  Description of Artificial Sequence: Synthetic peptide
  Seed: LRMKWMMAMKYPITA
LRMKFMMFMMYPKTA

SEQ ID NO: 250664 - protein, 15 aa, Artificial Sequence
  Description of Artificial Sequence: Synthetic peptide
  Seed: LRMKWMMAMKYPITA
LRMKFMMFMHYPETA

SEQ ID NO: 250665 - protein, 15 aa, Artificial Sequence
  Description of Artificial Sequence: Synthetic peptide
  Seed: LRMKWMMAMKYPITA
LRMKMMMWMIYPMTA

SEQ ID NO: 250666 - protein, 15 aa, Artificial Sequence
  Description of Artificial Sequence: Synthetic peptide
  Seed: LRMKWMMAMKYPITA
LRMKFMMYMMYPITA

SEQ ID NO: 250667 - protein, 15 aa, Artificial Sequence
  Description of Artificial Sequence: Synthetic peptide
  Seed: LRMKWMMAMKYPITA
LRMKFMMEMYYPSTA

SEQ ID NO: 250668 - protein, 15 aa, Artificial Sequence
  Description of Artificial Sequence: Synthetic peptide
  Seed: LRMKWMMAMKYPITA
LRMKLMMYMVYPLTA

SEQ ID NO: 250669 - protein, 15 aa, Artificial Sequence
  Description of Artificial Sequence: Synthetic peptide
  Seed: LRMKWMMAMKYPITA
LRMKYMMYMTYPYTA

SEQ ID NO: 250670 - protein, 15 aa, Artificial Sequence
  Description of Artificial Sequence: Synthetic peptide
  Seed: LRMKWMMAMKYPITA
LRMKIMMTMMYPSTA

SEQ ID NO: 250671 - protein, 15 aa, Artificial Sequence
  Description of Artificial Sequence: Synthetic peptide
  Seed: LRMKWMMAMKYPITA
LRMKIMMFMEYPLTA

SEQ ID NO: 250672 - protein, 15 aa, Artificial Sequence
  Description of Artificial Sequence: Synthetic peptide
  Seed: LRMKWMMAMKYPITA
LRMKVMMHMIYPATA

SEQ ID NO: 250673 - protein, 15 aa, Artificial Sequence
  Description of Artificial Sequence: Synthetic peptide
  Seed: LRMKWMMAMKYPITA
LRMKLMMSMDYPATA

SEQ ID NO: 250674 - protein, 15 aa, Artificial Sequence
  Description of Artificial Sequence: Synthetic peptide
  Seed: LRMKWMMAMKYPITA
LRMKWMMVMFYPLTA

SEQ ID NO: 250675 - protein, 15 aa, Artificial Sequence
  Description of Artificial Sequence: Synthetic peptide
  Seed: LRMKWMMAMKYPITA
LRMKWMMVMMYPRTA

SEQ ID NO: 250676 - protein, 15 aa, Artificial Sequence
  Description of Artificial Sequence: Synthetic peptide
  Seed: LRMKWMMAMKYPITA
LRMKVMMSMIYPQTA

SEQ ID NO: 250677 - protein, 15 aa, Artificial Sequence
  Description of Artificial Sequence: Synthetic peptide
  Seed: LRMKWMMAMKYPITA
LRMKMMMMMMYPHTA

SEQ ID NO: 250678 - protein, 15 aa, Artificial Sequence
  Description of Artificial Sequence: Synthetic peptide
  Seed: LRMKWMMAMKYPITA
LRMKLMMQMVYPFTA

SEQ ID NO: 250679 - protein, 15 aa, Artificial Sequence
  Description of Artificial Sequence: Synthetic peptide
  Seed: LRMKWMMAMKYPITA
LRMKWMMWMVYPRTA

SEQ ID NO: 250680 - protein, 15 aa, Artificial Sequence
  Description of Artificial Sequence: Synthetic peptide
  Seed: LRMKWMMAMKYPITA
LRMKVMMYMTYPHTA

SEQ ID NO: 250681 - protein, 15 aa, Artificial Sequence
  Description of Artificial Sequence: Synthetic peptide
  Seed: LRMKWMMAMKYPITA
LRMKCMMFMSYPRTA

SEQ ID NO: 250682 - protein, 15 aa, Artificial Sequence
  Description of Artificial Sequence: Synthetic peptide
  Seed: LRMKWMMAMKYPITA
LRMKCMMYMSYPITA

SEQ ID NO: 250683 - protein, 15 aa, Artificial Sequence
  Description of Artificial Sequence: Synthetic peptide
  Seed: LRMKWMMAMKYPITA
LRMKCMMYMAYPITA

SEQ ID NO: 250684 - protein, 15 aa, Artificial Sequence
  Description of Artificial Sequence: Synthetic peptide
  Seed: LRMKWMMAMKYPITA
LRMKIMMFMDYPFTA

SEQ ID NO: 250685 - protein, 15 aa, Artificial Sequence
  Description of Artificial Sequence: Synthetic peptide
  Seed: LRMKWMMAMKYPITA
LRMKIMMYMVYPITA

SEQ ID NO: 250686 - protein, 15 aa, Artificial Sequence
  Description of Artificial Sequence: Synthetic peptide
  Seed: LRMKWMMAMKYPITA
LRMKMMMFMTYPFTA

SEQ ID NO: 250687 - protein, 15 aa, Artificial Sequence
  Description of Artificial Sequence: Synthetic peptide
  Seed: LRMKWMMAMKYPITA
LRMKFMMWMIYPFTA

SEQ ID NO: 250688 - protein, 15 aa, Artificial Sequence
  Description of Artificial Sequence: Synthetic peptide
  Seed: LRMKWMMAMKYPITA
LRMKYMMYMLYPRTA

SEQ ID NO: 250689 - protein, 15 aa, Artificial Sequence
  Description of Artificial Sequence: Synthetic peptide
  Seed: LRMKWMMAMKYPITA
LRMKWMMFMNYPFTA

SEQ ID NO: 250690 - protein, 15 aa, Artificial Sequence
  Description of Artificial Sequence: Synthetic peptide
  Seed: LRMKWMMAMKYPITA
LRMKLMMYMIYPATA

SEQ ID NO: 250691 - protein, 15 aa, Artificial Sequence
  Description of Artificial Sequence: Synthetic peptide
  Seed: LRMKWMMAMKYPITA
LRMKCMMYMSYPVTA

SEQ ID NO: 250692 - protein, 15 aa, Artificial Sequence
  Description of Artificial Sequence: Synthetic peptide
  Seed: LRMKWMMAMKYPITA
LRMKYMMVMFYPFTA

SEQ ID NO: 250693 - protein, 15 aa, Artificial Sequence
  Description of Artificial Sequence: Synthetic peptide
  Seed: LRMKWMMAMKYPITA
LRMKFMMVMQYPHTA

SEQ ID NO: 250694 - protein, 15 aa, Artificial Sequence
  Description of Artificial Sequence: Synthetic peptide
  Seed: LRMKWMMAMKYPITA
LRMKFMMFMHYPTTA

SEQ ID NO: 250695 - protein, 15 aa, Artificial Sequence
  Description of Artificial Sequence: Synthetic peptide
  Seed: LRMKWMMAMKYPITA
LRMKLMMVMHYPFTA

SEQ ID NO: 250696 - protein, 15 aa, Artificial Sequence
  Description of Artificial Sequence: Synthetic peptide
  Seed: LRMKWMMAMKYPITA
LRMKFMMYMLYPKTA

SEQ ID NO: 250697 - protein, 15 aa, Artificial Sequence
  Description of Artificial Sequence: Synthetic peptide
  Seed: LRMKWMMAMKYPITA
LRMKLMMFMIYPHTA

SEQ ID NO: 250698 - protein, 15 aa, Artificial Sequence
  Description of Artificial Sequence: Synthetic peptide
  Seed: LRMKWMMAMKYPITA
LRMKFMMFMHYPQTA

SEQ ID NO: 250699 - protein, 15 aa, Artificial Sequence
  Description of Artificial Sequence: Synthetic peptide
  Seed: LRMKWMMAMKYPITA
LRMKMMMIMDYPITA

SEQ ID NO: 250700 - protein, 15 aa, Artificial Sequence
  Description of Artificial Sequence: Synthetic peptide
  Seed: LRMKWMMAMKYPITA
LRMKMMMVMQYPITA

SEQ ID NO: 250701 - protein, 15 aa, Artificial Sequence
  Description of Artificial Sequence: Synthetic peptide
  Seed: LRMKWMMAMKYPITA
LRMKFMMEMYYPNTA

SEQ ID NO: 250702 - protein, 15 aa, Artificial Sequence
  Description of Artificial Sequence: Synthetic peptide
  Seed: LRMKWMMAMKYPITA
LRMKWMMYMSYPYTA

SEQ ID NO: 250703 - protein, 15 aa, Artificial Sequence
  Description of Artificial Sequence: Synthetic peptide
  Seed: LRMKWMMAMKYPITA
LRMKFMMYMIYPTTA

SEQ ID NO: 250704 - protein, 15 aa, Artificial Sequence
  Description of Artificial Sequence: Synthetic peptide
  Seed: LRMKWMMAMKYPITA
LRMKMMMFMAYPQTA

SEQ ID NO: 250705 - protein, 15 aa, Artificial Sequence
  Description of Artificial Sequence: Synthetic peptide
  Seed: LRMKWMMAMKYPITA
LRMKMMMIMIYPHTA

SEQ ID NO: 250706 - protein, 15 aa, Artificial Sequence
  Description of Artificial Sequence: Synthetic peptide
  Seed: LRMKWMMAMKYPITA
LRMKFMMNMLYPKTA

SEQ ID NO: 250707 - protein, 15 aa, Artificial Sequence
  Description of Artificial Sequence: Synthetic peptide
  Seed: LRMKWMMAMKYPITA
LRMKIMMEMFYPSTA

SEQ ID NO: 250708 - protein, 15 aa, Artificial Sequence
  Description of Artificial Sequence: Synthetic peptide
  Seed: LRMKWMMAMKYPITA
LRMKFMMYMHYPQTA

SEQ ID NO: 250709 - protein, 15 aa, Artificial Sequence
  Description of Artificial Sequence: Synthetic peptide
  Seed: LRMKWMMAMKYPITA
LRMKWMMSMNYPRTA

SEQ ID NO: 250710 - protein, 15 aa, Artificial Sequence
  Description of Artificial Sequence: Synthetic peptide
  Seed: LRMKWMMAMKYPITA
LRMKIMMWMVYPHTA

SEQ ID NO: 250711 - protein, 15 aa, Artificial Sequence
  Description of Artificial Sequence: Synthetic peptide
  Seed: LRMKWMMAMKYPITA
LRMKFMMIMDYPYTA

SEQ ID NO: 250712 - protein, 15 aa, Artificial Sequence
  Description of Artificial Sequence: Synthetic peptide
  Seed: LRMKWMMAMKYPITA
LRMKLMMQMIYPYTA

SEQ ID NO: 250713 - protein, 15 aa, Artificial Sequence
  Description of Artificial Sequence: Synthetic peptide
  Seed: LRMKWMMAMKYPITA
LRMKWMMIMFYPVTA

SEQ ID NO: 250714 - protein, 15 aa, Artificial Sequence
  Description of Artificial Sequence: Synthetic peptide
  Seed: LRMKWMMAMKYPITA
LRMKIMMYMIYPVTA

SEQ ID NO: 250715 - protein, 15 aa, Artificial Sequence
  Description of Artificial Sequence: Synthetic peptide
  Seed: LRMKWMMAMKYPITA
LRMKVMMSMMYPATA

SEQ ID NO: 250716 - protein, 15 aa, Artificial Sequence
  Description of Artificial Sequence: Synthetic peptide
  Seed: LRMKWMMAMKYPITA
LRMKLMMYMTYPFTA

SEQ ID NO: 250717 - protein, 15 aa, Artificial Sequence
  Description of Artificial Sequence: Synthetic peptide
  Seed: LRMKWMMAMKYPITA
LRMKLMMVMFYPRTA

SEQ ID NO: 250718 - protein, 15 aa, Artificial Sequence
  Description of Artificial Sequence: Synthetic peptide
  Seed: LRMKWMMAMKYPITA
LRMKLMMWMIYPVTA

SEQ ID NO: 250719 - protein, 15 aa, Artificial Sequence
  Description of Artificial Sequence: Synthetic peptide
  Seed: LRMKWMMAMKYPITA
LRMKIMMWMVYPYTA

SEQ ID NO: 250720 - protein, 15 aa, Artificial Sequence
  Description of Artificial Sequence: Synthetic peptide
  Seed: LRMKWMMAMKYPITA
LRMKLMMRMTYPPTA

SEQ ID NO: 250721 - protein, 15 aa, Artificial Sequence
  Description of Artificial Sequence: Synthetic peptide
  Seed: LRMKWMMAMKYPITA
LRMKMMMYMVYPITA

SEQ ID NO: 250722 - protein, 15 aa, Artificial Sequence
  Description of Artificial Sequence: Synthetic peptide
  Seed: LRMKWMMAMKYPITA
LRMKVMMSMSYPHTA

SEQ ID NO: 250723 - protein, 15 aa, Artificial Sequence
  Description of Artificial Sequence: Synthetic peptide
  Seed: LRMKWMMAMKYPITA
LRMKIMMFMPYPETA

SEQ ID NO: 250724 - protein, 15 aa, Artificial Sequence
  Description of Artificial Sequence: Synthetic peptide
  Seed: LRMKWMMAMKYPITA
LRMKYMMVMMYPKTA

SEQ ID NO: 250725 - protein, 15 aa, Artificial Sequence
  Description of Artificial Sequence: Synthetic peptide
  Seed: LRMKWMMAMKYPITA
LRMKYMMYMVYPHTA

SEQ ID NO: 250726 - protein, 15 aa, Artificial Sequence
  Description of Artificial Sequence: Synthetic peptide
  Seed: LRMKWMMAMKYPITA
LRMKWMMEMFYPNTA

SEQ ID NO: 250727 - protein, 15 aa, Artificial Sequence
  Description of Artificial Sequence: Synthetic peptide
  Seed: LRMKWMMAMKYPITA
LRMKFMMYMDYPFTA

SEQ ID NO: 250728 - protein, 15 aa, Artificial Sequence
  Description of Artificial Sequence: Synthetic peptide
  Seed: LRMKWMMAMKYPITA
LRMKWMMVMFYPMTA

SEQ ID NO: 250729 - protein, 15 aa, Artificial Sequence
  Description of Artificial Sequence: Synthetic peptide
  Seed: LRMKWMMAMKYPITA
LRMKVMMVMVYPHTA

SEQ ID NO: 250730 - protein, 15 aa, Artificial Sequence
  Description of Artificial Sequence: Synthetic peptide
  Seed: LRMKWMMAMKYPITA
LRMKVMMFMDYPLTA

SEQ ID NO: 250731 - protein, 15 aa, Artificial Sequence
  Description of Artificial Sequence: Synthetic peptide
  Seed: LRMKWMMAMKYPITA
LRMKIMMWMIYPYTA

SEQ ID NO: 250732 - protein, 15 aa, Artificial Sequence
  Description of Artificial Sequence: Synthetic peptide
  Seed: LRMKWMMAMKYPITA
LRMKHMMMMRYPCTA

SEQ ID NO: 250733 - protein, 15 aa, Artificial Sequence
  Description of Artificial Sequence: Synthetic peptide
  Seed: LRMKWMMAMKYPITA
LRMKNMMSMVYPLTA

SEQ ID NO: 250734 - protein, 15 aa, Artificial Sequence
  Description of Artificial Sequence: Synthetic peptide
  Seed: LRMKWMMAMKYPITA
LRMKLMMFMDYPMTA

SEQ ID NO: 250735 - protein, 15 aa, Artificial Sequence
  Description of Artificial Sequence: Synthetic peptide
  Seed: LRMKWMMAMKYPITA
LRMKYMMIMMYPQTA

SEQ ID NO: 250736 - protein, 15 aa, Artificial Sequence
  Description of Artificial Sequence: Synthetic peptide
  Seed: LRMKWMMAMKYPITA
LRMKIMMWMTYPFTA

SEQ ID NO: 250737 - protein, 15 aa, Artificial Sequence
  Description of Artificial Sequence: Synthetic peptide
  Seed: LRMKWMMAMKYPITA
LRMKYMMSMMYPETA

SEQ ID NO: 250738 - protein, 15 aa, Artificial Sequence
  Description of Artificial Sequence: Synthetic peptide
  Seed: ANQRLNPMHQLLRHF
ANQRINPHHSLLAHF

SEQ ID NO: 250739 - protein, 15 aa, Artificial Sequence
  Description of Artificial Sequence: Synthetic peptide
  Seed: LRMKWMMAMKYPITA
LRMKFMMFMQYPYTA

SEQ ID NO: 250740 - protein, 15 aa, Artificial Sequence
  Description of Artificial Sequence: Synthetic peptide
  Seed: LRMKWMMAMKYPITA
LRMKFMMHMDYPMTA

SEQ ID NO: 250741 - protein, 15 aa, Artificial Sequence
  Description of Artificial Sequence: Synthetic peptide
  Seed: LRMKWMMAMKYPITA
LRMKFMMDMHYPLTA

SEQ ID NO: 250742 - protein, 15 aa, Artificial Sequence
  Description of Artificial Sequence: Synthetic peptide
  Seed: LRMKWMMAMKYPITA
LRMKMMMVMDYPATA

SEQ ID NO: 250743 - protein, 15 aa, Artificial Sequence
  Description of Artificial Sequence: Synthetic peptide
  Seed: LRMKWMMAMKYPITA
LRMKYMMYMNYPYTA

SEQ ID NO: 250744 - protein, 15 aa, Artificial Sequence
  Description of Artificial Sequence: Synthetic peptide
  Seed: LRMKWMMAMKYPITA
LRMKIMMFMVYPVTA

SEQ ID NO: 250745 - protein, 15 aa, Artificial Sequence
  Description of Artificial Sequence: Synthetic peptide
  Seed: LRMKWMMAMKYPITA
LRMKFMMFMEYPFTA

SEQ ID NO: 250746 - protein, 15 aa, Artificial Sequence
  Description of Artificial Sequence: Synthetic peptide
  Seed: LRMKWMMAMKYPITA
LRMKVMMWMSYPATA

SEQ ID NO: 250747 - protein, 15 aa, Artificial Sequence
  Description of Artificial Sequence: Synthetic peptide
  Seed: LRMKWMMAMKYPITA
LRMKIMMAMWYPYTA

SEQ ID NO: 250748 - protein, 15 aa, Artificial Sequence
  Description of Artificial Sequence: Synthetic peptide
  Seed: LRMKWMMAMKYPITA
LRMKLMMEMFYPNTA

SEQ ID NO: 250749 - protein, 15 aa, Artificial Sequence
  Description of Artificial Sequence: Synthetic peptide
  Seed: LRMKWMMAMKYPITA
LRMKIMMYMAYPETA

SEQ ID NO: 250750 - protein, 15 aa, Artificial Sequence
  Description of Artificial Sequence: Synthetic peptide
  Seed: LRMKWMMAMKYPITA
LRMKVMMTMNYPTTA

SEQ ID NO: 250751 - protein, 15 aa, Artificial Sequence
  Description of Artificial Sequence: Synthetic peptide
  Seed: LRMKWMMAMKYPITA
LRMKFMMWMQYPVTA

SEQ ID NO: 250752 - protein, 15 aa, Artificial Sequence
  Description of Artificial Sequence: Synthetic peptide
  Seed: LRMKWMMAMKYPITA
LRMKVMMSMQYPMTA

SEQ ID NO: 250753 - protein, 15 aa, Artificial Sequence
  Description of Artificial Sequence: Synthetic peptide
  Seed: LRMKWMMAMKYPITA
LRMKMMMYMIYPVTA

SEQ ID NO: 250754 - protein, 15 aa, Artificial Sequence
  Description of Artificial Sequence: Synthetic peptide
  Seed: LRMKWMMAMKYPITA
LRMKMMMYMNYPFTA

SEQ ID NO: 250755 - protein, 15 aa, Artificial Sequence
  Description of Artificial Sequence: Synthetic peptide
  Seed: LRMKWMMAMKYPITA
LRMKFMMFMWYPRTA

SEQ ID NO: 250756 - protein, 15 aa, Artificial Sequence
  Description of Artificial Sequence: Synthetic peptide
  Seed: LRMKWMMAMKYPITA
LRMKYMMYMSYPPTA

SEQ ID NO: 250757 - protein, 15 aa, Artificial Sequence
  Description of Artificial Sequence: Synthetic peptide
  Seed: LRMKWMMAMKYPITA
LRMKMMMFMDYPVTA

SEQ ID NO: 250758 - protein, 15 aa, Artificial Sequence
  Description of Artificial Sequence: Synthetic peptide
  Seed: LRMKWMMAMKYPITA
LRMKIMMWMIYPITA

SEQ ID NO: 250759 - protein, 15 aa, Artificial Sequence
  Description of Artificial Sequence: Synthetic peptide
  Seed: LRMKWMMAMKYPITA
LRMKMMMMMNYPKTA

SEQ ID NO: 250760 - protein, 15 aa, Artificial Sequence
  Description of Artificial Sequence: Synthetic peptide
  Seed: LRMKWMMAMKYPITA
LRMKVMMTMSYPQTA

SEQ ID NO: 250761 - protein, 15 aa, Artificial Sequence
  Description of Artificial Sequence: Synthetic peptide
  Seed: LRMKWMMAMKYPITA
LRMKVMMIMVYPHTA

SEQ ID NO: 250762 - protein, 15 aa, Artificial Sequence
  Description of Artificial Sequence: Synthetic peptide
  Seed: LRMKWMMAMKYPITA
LRMKLMMTMNYPQTA

SEQ ID NO: 250763 - protein, 15 aa, Artificial Sequence
  Description of Artificial Sequence: Synthetic peptide
  Seed: LRMKWMMAMKYPITA
LRMKIMMEMVYPYTA

SEQ ID NO: 250764 - protein, 15 aa, Artificial Sequence
  Description of Artificial Sequence: Synthetic peptide
  Seed: LRMKWMMAMKYPITA
LRMKLMMVMDYPVTA

SEQ ID NO: 250765 - protein, 15 aa, Artificial Sequence
  Description of Artificial Sequence: Synthetic peptide
  Seed: LRMKWMMAMKYPITA
LRMKIMMMMLYPHTA

SEQ ID NO: 250766 - protein, 15 aa, Artificial Sequence
  Description of Artificial Sequence: Synthetic peptide
  Seed: LRMKWMMAMKYPITA
LRMKYMMFMDYPMTA

SEQ ID NO: 250767 - protein, 15 aa, Artificial Sequence
  Description of Artificial Sequence: Synthetic peptide
  Seed: LRMKWMMAMKYPITA
LRMKRMMIMAYPATA

SEQ ID NO: 250768 - protein, 15 aa, Artificial Sequence
  Description of Artificial Sequence: Synthetic peptide
  Seed: LRMKWMMAMKYPITA
LRMKLMMVMIYPATA

SEQ ID NO: 250769 - protein, 15 aa, Artificial Sequence
  Description of Artificial Sequence: Synthetic peptide
  Seed: LRMKWMMAMKYPITA
LRMKFMMWMNYPHTA

SEQ ID NO: 250770 - protein, 15 aa, Artificial Sequence
  Description of Artificial Sequence: Synthetic peptide
  Seed: LRMKWMMAMKYPITA
LRMKIMMMMFYPRTA

SEQ ID NO: 250771 - protein, 15 aa, Artificial Sequence
  Description of Artificial Sequence: Synthetic peptide
  Seed: LRMKWMMAMKYPITA
LRMKFMMWMHYPHTA

SEQ ID NO: 250772 - protein, 15 aa, Artificial Sequence
  Description of Artificial Sequence: Synthetic peptide
  Seed: LRMKWMMAMKYPITA
LRMKIMMSMHYPWTA

SEQ ID NO: 250773 - protein, 15 aa, Artificial Sequence
  Description of Artificial Sequence: Synthetic peptide
  Seed: LRMKWMMAMKYPITA
LRMKWMMFMRYPTTA

SEQ ID NO: 250774 - protein, 15 aa, Artificial Sequence
  Description of Artificial Sequence: Synthetic peptide
  Seed: LRMKWMMAMKYPITA
LRMKWMMWMSYPFTA

SEQ ID NO: 250775 - protein, 15 aa, Artificial Sequence
  Description of Artificial Sequence: Synthetic peptide
  Seed: LRMKWMMAMKYPITA
LRMKWMMYMNYPYTA

SEQ ID NO: 250776 - protein, 15 aa, Artificial Sequence
  Description of Artificial Sequence: Synthetic peptide
  Seed: LRMKWMMAMKYPITA
LRMKLMMYMSYPQTA

SEQ ID NO: 250777 - protein, 15 aa, Artificial Sequence
  Description of Artificial Sequence: Synthetic peptide
  Seed: LRMKWMMAMKYPITA
LRMKMMMFMDYPITA

SEQ ID NO: 250778 - protein, 15 aa, Artificial Sequence
  Description of Artificial Sequence: Synthetic peptide
  Seed: LRMKWMMAMKYPITA
LRMKVMMFMSYPFTA

SEQ ID NO: 250779 - protein, 15 aa, Artificial Sequence
  Description of Artificial Sequence: Synthetic peptide
  Seed: LRMKWMMAMKYPITA
LRMKMMMMMLYPHTA

SEQ ID NO: 250780 - protein, 15 aa, Artificial Sequence
  Description of Artificial Sequence: Synthetic peptide
  Seed: LRMKWMMAMKYPITA
LRMKMMMVMDYPVTA

SEQ ID NO: 250781 - protein, 15 aa, Artificial Sequence
  Description of Artificial Sequence: Synthetic peptide
  Seed: LRMKWMMAMKYPITA
LRMKMMMVMAYPHTA

SEQ ID NO: 250782 - protein, 15 aa, Artificial Sequence
  Description of Artificial Sequence: Synthetic peptide
  Seed: LRMKWMMAMKYPITA
LRMKVMMIMQYPLTA

SEQ ID NO: 250783 - protein, 15 aa, Artificial Sequence
  Description of Artificial Sequence: Synthetic peptide
  Seed: LRMKWMMAMKYPITA
LRMKFMMWMNYPPTA

SEQ ID NO: 250784 - protein, 15 aa, Artificial Sequence
  Description of Artificial Sequence: Synthetic peptide
  Seed: LRMKWMMAMKYPITA
LRMKLMMWMTYPHTA

SEQ ID NO: 250785 - protein, 15 aa, Artificial Sequence
  Description of Artificial Sequence: Synthetic peptide
  Seed: LRMKWMMAMKYPITA
LRMKWMMYMNYPFTA

SEQ ID NO: 250786 - protein, 15 aa, Artificial Sequence
  Description of Artificial Sequence: Synthetic peptide
  Seed: LRMKWMMAMKYPITA
LRMKVMMTMNYPQTA

SEQ ID NO: 250787 - protein, 15 aa, Artificial Sequence
  Description of Artificial Sequence: Synthetic peptide
  Seed: LRMKWMMAMKYPITA
LRMKLMMYMAYPQTA

SEQ ID NO: 250788 - protein, 15 aa, Artificial Sequence
  Description of Artificial Sequence: Synthetic peptide
  Seed: LRMKWMMAMKYPITA
LRMKLMMWMVYPYTA

SEQ ID NO: 250789 - protein, 15 aa, Artificial Sequence
  Description of Artificial Sequence: Synthetic peptide
  Seed: LRMKWMMAMKYPITA
LRMKIMMYMNYPPTA

SEQ ID NO: 250790 - protein, 15 aa, Artificial Sequence
  Description of Artificial Sequence: Synthetic peptide
  Seed: LRMKWMMAMKYPITA
LRMKIMMWMAYPQTA

SEQ ID NO: 250791 - protein, 15 aa, Artificial Sequence
  Description of Artificial Sequence: Synthetic peptide
  Seed: LRMKWMMAMKYPITA
LRMKVMMYMSYPHTA

SEQ ID NO: 250792 - protein, 15 aa, Artificial Sequence
  Description of Artificial Sequence: Synthetic peptide
  Seed: LRMKWMMAMKYPITA
LRMKLMMWMNYPHTA

SEQ ID NO: 250793 - protein, 13 aa, Artificial Sequence
  Description of Artificial Sequence: Synthetic peptide
  Seed: ERELVRKTRFLPV
ERELFRKHRFLPY

SEQ ID NO: 250794 - protein, 15 aa, Artificial Sequence
  Description of Artificial Sequence: Synthetic peptide
  Seed: LRMKWMMAMKYPITA
LRMKLMMWMIYPHTA

SEQ ID NO: 250795 - protein, 15 aa, Artificial Sequence
  Description of Artificial Sequence: Synthetic peptide
  Seed: LRMKWMMAMKYPITA
LRMKFMMHMNYPWTA

SEQ ID NO: 250796 - protein, 15 aa, Artificial Sequence
  Description of Artificial Sequence: Synthetic peptide
  Seed: LRMKWMMAMKYPITA
LRMKWMMFMDYPLTA

SEQ ID NO: 250797 - protein, 15 aa, Artificial Sequence
  Description of Artificial Sequence: Synthetic peptide
  Seed: LRMKWMMAMKYPITA
LRMKMMMWMNYPFTA

SEQ ID NO: 250798 - protein, 15 aa, Artificial Sequence
  Description of Artificial Sequence: Synthetic peptide
  Seed: LRMKWMMAMKYPITA
LRMKYMMYMNYPRTA

SEQ ID NO: 250799 - protein, 15 aa, Artificial Sequence
  Description of Artificial Sequence: Synthetic peptide
  Seed: LRMKWMMAMKYPITA
LRMKWMMHMVYPKTA

SEQ ID NO: 250800 - protein, 15 aa, Artificial Sequence
  Description of Artificial Sequence: Synthetic peptide
  Seed: LRMKWMMAMKYPITA
LRMKIMMIMDYPFTA

SEQ ID NO: 250801 - protein, 15 aa, Artificial Sequence
  Description of Artificial Sequence: Synthetic peptide
  Seed: LRMKWMMAMKYPITA
LRMKHMMLMRYPCTA

SEQ ID NO: 250802 - protein, 15 aa, Artificial Sequence
  Description of Artificial Sequence: Synthetic peptide
  Seed: LRMKWMMAMKYPITA
LRMKLMMFMVYPVTA

SEQ ID NO: 250803 - protein, 15 aa, Artificial Sequence
  Description of Artificial Sequence: Synthetic peptide
  Seed: LRMKWMMAMKYPITA
LRMKFMMVMEYPRTA

SEQ ID NO: 250804 - protein, 15 aa, Artificial Sequence
  Description of Artificial Sequence: Synthetic peptide
  Seed: LRMKWMMAMKYPITA
LRMKVMMWMTYPATA

SEQ ID NO: 250805 - protein, 15 aa, Artificial Sequence
  Description of Artificial Sequence: Synthetic peptide
  Seed: LRMKWMMAMKYPITA
LRMKVMMIMDYPITA

SEQ ID NO: 250806 - protein, 15 aa, Artificial Sequence
  Description of Artificial Sequence: Synthetic peptide
  Seed: LRMKWMMAMKYPITA
LRMKVMMLMLYPRTA

SEQ ID NO: 250807 - protein, 15 aa, Artificial Sequence
  Description of Artificial Sequence: Synthetic peptide
  Seed: LRMKWMMAMKYPITA
LRMKVMMVMDYPITA

SEQ ID NO: 250808 - protein, 15 aa, Artificial Sequence
  Description of Artificial Sequence: Synthetic peptide
  Seed: LRMKWMMAMKYPITA
LRMKIMMYMDYPFTA

SEQ ID NO: 250809 - protein, 15 aa, Artificial Sequence
  Description of Artificial Sequence: Synthetic peptide
  Seed: LRMKWMMAMKYPITA
LRMKYMMHMVYPKTA

SEQ ID NO: 250810 - protein, 15 aa, Artificial Sequence
  Description of Artificial Sequence: Synthetic peptide
  Seed: LRMKWMMAMKYPITA
LRMKIMMYMQYPLTA

SEQ ID NO: 250811 - protein, 15 aa, Artificial Sequence
  Description of Artificial Sequence: Synthetic peptide
  Seed: LRMKWMMAMKYPITA
LRMKIMMSMDYPSTA

SEQ ID NO: 250812 - protein, 15 aa, Artificial Sequence
  Description of Artificial Sequence: Synthetic peptide
  Seed: LRMKWMMAMKYPITA
LRMKFMMTMKYPETA

SEQ ID NO: 250813 - protein, 15 aa, Artificial Sequence
  Description of Artificial Sequence: Synthetic peptide
  Seed: LRMKWMMAMKYPITA
LRMKLMMDMIYPATA

SEQ ID NO: 250814 - protein, 15 aa, Artificial Sequence
  Description of Artificial Sequence: Synthetic peptide
  Seed: LRMKWMMAMKYPITA
LRMKIMMVMHYPETA

SEQ ID NO: 250815 - protein, 15 aa, Artificial Sequence
  Description of Artificial Sequence: Synthetic peptide
  Seed: LRMKWMMAMKYPITA
LRMKLMMTMEYPLTA

SEQ ID NO: 250816 - protein, 15 aa, Artificial Sequence
  Description of Artificial Sequence: Synthetic peptide
  Seed: LRMKWMMAMKYPITA
LRMKFMMYMQYPRTA

SEQ ID NO: 250817 - protein, 15 aa, Artificial Sequence
  Description of Artificial Sequence: Synthetic peptide
  Seed: LRMKWMMAMKYPITA
LRMKIMMLMFYPRTA

SEQ ID NO: 250818 - protein, 15 aa, Artificial Sequence
  Description of Artificial Sequence: Synthetic peptide
  Seed: LRMKWMMAMKYPITA
LRMKLMMMMFYPRTA

SEQ ID NO: 250819 - protein, 15 aa, Artificial Sequence
  Description of Artificial Sequence: Synthetic peptide
  Seed: LRMKWMMAMKYPITA
LRMKWMMYMTYPHTA

SEQ ID NO: 250820 - protein, 15 aa, Artificial Sequence
  Description of Artificial Sequence: Synthetic peptide
  Seed: LRMKWMMAMKYPITA
LRMKYMMFMRYPETA

SEQ ID NO: 250821 - protein, 15 aa, Artificial Sequence
  Description of Artificial Sequence: Synthetic peptide
  Seed: LRMKWMMAMKYPITA
LRMKIMMTMDYPFTA

SEQ ID NO: 250822 - protein, 15 aa, Artificial Sequence
  Description of Artificial Sequence: Synthetic peptide
  Seed: LRMKWMMAMKYPITA
LRMKVMMWMNYPFTA

SEQ ID NO: 250823 - protein, 15 aa, Artificial Sequence
  Description of Artificial Sequence: Synthetic peptide
  Seed: LRMKWMMAMKYPITA
LRMKYMMFMKYPETA

SEQ ID NO: 250824 - protein, 15 aa, Artificial Sequence
  Description of Artificial Sequence: Synthetic peptide
  Seed: LRMKWMMAMKYPITA
LRMKVMMSMNYPGTA

SEQ ID NO: 250825 - protein, 15 aa, Artificial Sequence
  Description of Artificial Sequence: Synthetic peptide
  Seed: LRMKWMMAMKYPITA
LRMKWMMYMTYPFTA

SEQ ID NO: 250826 - protein, 15 aa, Artificial Sequence
  Description of Artificial Sequence: Synthetic peptide
  Seed: LRMKWMMAMKYPITA
LRMKVMMHMIYPSTA

SEQ ID NO: 250827 - protein, 15 aa, Artificial Sequence
  Description of Artificial Sequence: Synthetic peptide
  Seed: LRMKWMMAMKYPITA
LRMKWMMFMNYPKTA

SEQ ID NO: 250828 - protein, 15 aa, Artificial Sequence
  Description of Artificial Sequence: Synthetic peptide
  Seed: LRMKWMMAMKYPITA
LRMKIMMWMTYPKTA

SEQ ID NO: 250829 - protein, 15 aa, Artificial Sequence
  Description of Artificial Sequence: Synthetic peptide
  Seed: LRMKWMMAMKYPITA
LRMKVMMYMNYPYTA

SEQ ID NO: 250830 - protein, 15 aa, Artificial Sequence
  Description of Artificial Sequence: Synthetic peptide
  Seed: LRMKWMMAMKYPITA
LRMKIMMYMNYPNTA

SEQ ID NO: 250831 - protein, 15 aa, Artificial Sequence
  Description of Artificial Sequence: Synthetic peptide
  Seed: LRMKWMMAMKYPITA
LRMKWMMHMNYPFTA

SEQ ID NO: 250832 - protein, 15 aa, Artificial Sequence
  Description of Artificial Sequence: Synthetic peptide
  Seed: LRMKWMMAMKYPITA
LRMKFMMYMNYPETA

SEQ ID NO: 250833 - protein, 15 aa, Artificial Sequence
  Description of Artificial Sequence: Synthetic peptide
  Seed: LRMKWMMAMKYPITA
LRMKIMMYMNYPQTA

SEQ ID NO: 250834 - protein, 15 aa, Artificial Sequence
  Description of Artificial Sequence: Synthetic peptide
  Seed: LRMKWMMAMKYPITA
LRMKLMMIMQYPITA

SEQ ID NO: 250835 - protein, 15 aa, Artificial Sequence
  Description of Artificial Sequence: Synthetic peptide
  Seed: LRMKWMMAMKYPITA
LRMKLMMYMPYPQTA

SEQ ID NO: 250836 - protein, 15 aa, Artificial Sequence
  Description of Artificial Sequence: Synthetic peptide
  Seed: LRMKWMMAMKYPITA
LRMKFMMKMIYPHTA

SEQ ID NO: 250837 - protein, 15 aa, Artificial Sequence
  Description of Artificial Sequence: Synthetic peptide
  Seed: LRMKWMMAMKYPITA
LRMKYMMYMDYPLTA

SEQ ID NO: 250838 - protein, 15 aa, Artificial Sequence
  Description of Artificial Sequence: Synthetic peptide
  Seed: LRMKWMMAMKYPITA
LRMKIMMYMSYPETA

SEQ ID NO: 250839 - protein, 15 aa, Artificial Sequence
  Description of Artificial Sequence: Synthetic peptide
  Seed: LRMKWMMAMKYPITA
LRMKMMMWMSYPSTA

SEQ ID NO: 250840 - protein, 15 aa, Artificial Sequence
  Description of Artificial Sequence: Synthetic peptide
  Seed: LRMKWMMAMKYPITA
LRMKVMMVMAYPHTA

SEQ ID NO: 250841 - protein, 15 aa, Artificial Sequence
  Description of Artificial Sequence: Synthetic peptide
  Seed: LRMKWMMAMKYPITA
LRMKFMMFMDYPRTA

SEQ ID NO: 250842 - protein, 15 aa, Artificial Sequence
  Description of Artificial Sequence: Synthetic peptide
  Seed: LRMKWMMAMKYPITA
LRMKMMMYMDYPLTA

SEQ ID NO: 250843 - protein, 15 aa, Artificial Sequence
  Description of Artificial Sequence: Synthetic peptide
  Seed: LRMKWMMAMKYPITA
LRMKYMMDMVYPFTA

SEQ ID NO: 250844 - protein, 15 aa, Artificial Sequence
  Description of Artificial Sequence: Synthetic peptide
  Seed: LRMKWMMAMKYPITA
LRMKNMMVMPYPATA

SEQ ID NO: 250845 - protein, 15 aa, Artificial Sequence
  Description of Artificial Sequence: Synthetic peptide
  Seed: LRMKWMMAMKYPITA
LRMKMMMWMAYPHTA

SEQ ID NO: 250846 - protein, 15 aa, Artificial Sequence
  Description of Artificial Sequence: Synthetic peptide
  Seed: LRMKWMMAMKYPITA
LRMKWMMTMTYPRTA

SEQ ID NO: 250847 - protein, 13 aa, Artificial Sequence
  Description of Artificial Sequence: Synthetic peptide
  Seed: ERELVRKTRFLPV
ERELFRKKRFLPF

SEQ ID NO: 250848 - protein, 15 aa, Artificial Sequence
  Description of Artificial Sequence: Synthetic peptide
  Seed: LRMKWMMAMKYPITA
LRMKVMMRMNYPATA

SEQ ID NO: 250849 - protein, 15 aa, Artificial Sequence
  Description of Artificial Sequence: Synthetic peptide
  Seed: LRMKWMMAMKYPITA
LRMKFMMKMIYPETA

SEQ ID NO: 250850 - protein, 15 aa, Artificial Sequence
  Description of Artificial Sequence: Synthetic peptide
  Seed: LRMKWMMAMKYPITA
LRMKFMMYMEYPYTA

SEQ ID NO: 250851 - protein, 15 aa, Artificial Sequence
  Description of Artificial Sequence: Synthetic peptide
  Seed: LRMKWMMAMKYPITA
LRMKVMMYMNYPHTA

SEQ ID NO: 250852 - protein, 15 aa, Artificial Sequence
  Description of Artificial Sequence: Synthetic peptide
  Seed: LRMKWMMAMKYPITA
LRMKLMMYMSYPNTA

SEQ ID NO: 250853 - protein, 15 aa, Artificial Sequence
  Description of Artificial Sequence: Synthetic peptide
  Seed: LRMKWMMAMKYPITA
LRMKMMMRMNYPMTA

SEQ ID NO: 250854 - protein, 15 aa, Artificial Sequence
  Description of Artificial Sequence: Synthetic peptide
  Seed: LRMKWMMAMKYPITA
LRMKFMMKMIYPQTA

SEQ ID NO: 250855 - protein, 15 aa, Artificial Sequence
  Description of Artificial Sequence: Synthetic peptide
  Seed: LRMKWMMAMKYPITA
LRMKMMMWMTYPSTA

SEQ ID NO: 250856 - protein, 15 aa, Artificial Sequence
  Description of Artificial Sequence: Synthetic peptide
  Seed: LRMKWMMAMKYPITA
LRMKIMMIMMYPHTA

SEQ ID NO: 250857 - protein, 15 aa, Artificial Sequence
  Description of Artificial Sequence: Synthetic peptide
  Seed: LRMKWMMAMKYPITA
LRMKMMMQMTYPHTA

SEQ ID NO: 250858 - protein, 13 aa, Artificial Sequence
  Description of Artificial Sequence: Synthetic peptide
  Seed: ERELVRKTRFLPV
ERELYRKHRFLPF

SEQ ID NO: 250859 - protein, 15 aa, Artificial Sequence
  Description of Artificial Sequence: Synthetic peptide
  Seed: LRMKWMMAMKYPITA
LRMKMMMLMYYPRTA

SEQ ID NO: 250860 - protein, 15 aa, Artificial Sequence
  Description of Artificial Sequence: Synthetic peptide
  Seed: LRMKWMMAMKYPITA
LRMKIMMYMEYPLTA

SEQ ID NO: 250861 - protein, 15 aa, Artificial Sequence
  Description of Artificial Sequence: Synthetic peptide
  Seed: LRMKWMMAMKYPITA
LRMKWMMVMRYPDTA

SEQ ID NO: 250862 - protein, 15 aa, Artificial Sequence
  Description of Artificial Sequence: Synthetic peptide
  Seed: LRMKWMMAMKYPITA
LRMKMMMWMSYPTTA

SEQ ID NO: 250863 - protein, 15 aa, Artificial Sequence
  Description of Artificial Sequence: Synthetic peptide
  Seed: LRMKWMMAMKYPITA
LRMKVMMYMDYPLTA

SEQ ID NO: 250864 - protein, 15 aa, Artificial Sequence
  Description of Artificial Sequence: Synthetic peptide
  Seed: LRMKWMMAMKYPITA
LRMKMMMGMVYPRTA

SEQ ID NO: 250865 - protein, 15 aa, Artificial Sequence
  Description of Artificial Sequence: Synthetic peptide
  Seed: LRMKWMMAMKYPITA
LRMKIMMWMSYPQTA

SEQ ID NO: 250866 - protein, 15 aa, Artificial Sequence
  Description of Artificial Sequence: Synthetic peptide
  Seed: LRMKWMMAMKYPITA
LRMKFMMHMNYPQTA

SEQ ID NO: 250867 - protein, 15 aa, Artificial Sequence
  Description of Artificial Sequence: Synthetic peptide
  Seed: LRMKWMMAMKYPITA
LRMKFMMDMQYPLTA

SEQ ID NO: 250868 - protein, 15 aa, Artificial Sequence
  Description of Artificial Sequence: Synthetic peptide
  Seed: LRMKWMMAMKYPITA
LRMKFMMDMLYPRTA

SEQ ID NO: 250869 - protein, 15 aa, Artificial Sequence
  Description of Artificial Sequence: Synthetic peptide
  Seed: LRMKWMMAMKYPITA
LRMKVMMIMLYPRTA

SEQ ID NO: 250870 - protein, 15 aa, Artificial Sequence
  Description of Artificial Sequence: Synthetic peptide
  Seed: LRMKWMMAMKYPITA
LRMKWMMFMDYPMTA

SEQ ID NO: 250871 - protein, 15 aa, Artificial Sequence
  Description of Artificial Sequence: Synthetic peptide
  Seed: LRMKWMMAMKYPITA
LRMKYMMFMDYPFTA

SEQ ID NO: 250872 - protein, 15 aa, Artificial Sequence
  Description of Artificial Sequence: Synthetic peptide
  Seed: LRMKWMMAMKYPITA
LRMKWMMYMAYPNTA

SEQ ID NO: 250873 - protein, 15 aa, Artificial Sequence
  Description of Artificial Sequence: Synthetic peptide
  Seed: LRMKWMMAMKYPITA
LRMKWMMYMNYPRTA

SEQ ID NO: 250874 - protein, 15 aa, Artificial Sequence
  Description of Artificial Sequence: Synthetic peptide
  Seed: LRMKWMMAMKYPITA
LRMKFMMWMDYPFTA

SEQ ID NO: 250875 - protein, 15 aa, Artificial Sequence
  Description of Artificial Sequence: Synthetic peptide
  Seed: LRMKWMMAMKYPITA
LRMKMMMNMHYPQTA

SEQ ID NO: 250876 - protein, 15 aa, Artificial Sequence
  Description of Artificial Sequence: Synthetic peptide
  Seed: LRMKWMMAMKYPITA
LRMKVMMWMSYPFTA

SEQ ID NO: 250877 - protein, 15 aa, Artificial Sequence
  Description of Artificial Sequence: Synthetic peptide
  Seed: LRMKWMMAMKYPITA
LRMKLMMWMAYPQTA

SEQ ID NO: 250878 - protein, 15 aa, Artificial Sequence
  Description of Artificial Sequence: Synthetic peptide
  Seed: LRMKWMMAMKYPITA
LRMKWMMIMFYPDTA

SEQ ID NO: 250879 - protein, 15 aa, Artificial Sequence
  Description of Artificial Sequence: Synthetic peptide
  Seed: LRMKWMMAMKYPITA
LRMKLMMWMNYPSTA

SEQ ID NO: 250880 - protein, 15 aa, Artificial Sequence
  Description of Artificial Sequence: Synthetic peptide
  Seed: LRMKWMMAMKYPITA
LRMKFMMKMLYPQTA

SEQ ID NO: 250881 - protein, 15 aa, Artificial Sequence
  Description of Artificial Sequence: Synthetic peptide
  Seed: LRMKWMMAMKYPITA
LRMKYMMYMDYPITA

SEQ ID NO: 250882 - protein, 15 aa, Artificial Sequence
  Description of Artificial Sequence: Synthetic peptide
  Seed: LRMKWMMAMKYPITA
LRMKWMMDMIYPFTA

SEQ ID NO: 250883 - protein, 15 aa, Artificial Sequence
  Description of Artificial Sequence: Synthetic peptide
  Seed: LRMKWMMAMKYPITA
LRMKMMMGMVYPYTA

SEQ ID NO: 250884 - protein, 15 aa, Artificial Sequence
  Description of Artificial Sequence: Synthetic peptide
  Seed: LRMKWMMAMKYPITA
LRMKLMMWMNYPTTA

SEQ ID NO: 250885 - protein, 15 aa, Artificial Sequence
  Description of Artificial Sequence: Synthetic peptide
  Seed: LRMKWMMAMKYPITA
LRMKFMMRMTYPQTA

SEQ ID NO: 250886 - protein, 15 aa, Artificial Sequence
  Description of Artificial Sequence: Synthetic peptide
  Seed: LRMKWMMAMKYPITA
LRMKWMMFMDYPATA

SEQ ID NO: 250887 - protein, 15 aa, Artificial Sequence
  Description of Artificial Sequence: Synthetic peptide
  Seed: LRMKWMMAMKYPITA
LRMKMMMGMSYPYTA

SEQ ID NO: 250888 - protein, 15 aa, Artificial Sequence
  Description of Artificial Sequence: Synthetic peptide
  Seed: LRMKWMMAMKYPITA
LRMKWMMFMSYPETA

SEQ ID NO: 250889 - protein, 15 aa, Artificial Sequence
  Description of Artificial Sequence: Synthetic peptide
  Seed: LRMKWMMAMKYPITA
LRMKMMMDMRYPKTA

SEQ ID NO: 250890 - protein, 15 aa, Artificial Sequence
  Description of Artificial Sequence: Synthetic peptide
  Seed: LRMKWMMAMKYPITA
LRIKWLMGMKYPITA

SEQ ID NO: 250891 - protein, 15 aa, Artificial Sequence
  Description of Artificial Sequence: Synthetic peptide
  Seed: LRMKWMMAMKYPITA
LRMKMMMWMAYPQTA

SEQ ID NO: 250892 - protein, 15 aa, Artificial Sequence
  Description of Artificial Sequence: Synthetic peptide
  Seed: LRMKWMMAMKYPITA
LRMKIMMDMIYPSTA

SEQ ID NO: 250893 - protein, 15 aa, Artificial Sequence
  Description of Artificial Sequence: Synthetic peptide
  Seed: LRMKWMMAMKYPITA
LRMKNMMTMIYPITA

SEQ ID NO: 250894 - protein, 15 aa, Artificial Sequence
  Description of Artificial Sequence: Synthetic peptide
  Seed: LRMKWMMAMKYPITA
LRMKCMMFMAYPRTA

SEQ ID NO: 250895 - protein, 15 aa, Artificial Sequence
  Description of Artificial Sequence: Synthetic peptide
  Seed: LRMKWMMAMKYPITA
LRMKIMMFMGYPFTA

SEQ ID NO: 250896 - protein, 15 aa, Artificial Sequence
  Description of Artificial Sequence: Synthetic peptide
  Seed: LRMKWMMAMKYPITA
LRMKIMMWMTYPTTA

SEQ ID NO: 250897 - protein, 15 aa, Artificial Sequence
  Description of Artificial Sequence: Synthetic peptide
  Seed: LRMKWMMAMKYPITA
LRMKWMMTMTYPKTA

SEQ ID NO: 250898 - protein, 15 aa, Artificial Sequence
  Description of Artificial Sequence: Synthetic peptide
  Seed: LRMKWMMAMKYPITA
LRMKFMMYMDYPYTA

SEQ ID NO: 250899 - protein, 15 aa, Artificial Sequence
  Description of Artificial Sequence: Synthetic peptide
  Seed: LRMKWMMAMKYPITA
LRMKWMMDMAYPYTA

SEQ ID NO: 250900 - protein, 15 aa, Artificial Sequence
  Description of Artificial Sequence: Synthetic peptide
  Seed: ANQRLNPMHQLLRHF
ANQRINPNHALLRHF

SEQ ID NO: 250901 - protein, 15 aa, Artificial Sequence
  Description of Artificial Sequence: Synthetic peptide
  Seed: LRMKWMMAMKYPITA
LRMKWMMWMNYPRTA

SEQ ID NO: 250902 - protein, 15 aa, Artificial Sequence
  Description of Artificial Sequence: Synthetic peptide
  Seed: LRMKWMMAMKYPITA
LRMKFMMDMIYPETA

SEQ ID NO: 250903 - protein, 15 aa, Artificial Sequence
  Description of Artificial Sequence: Synthetic peptide
  Seed: LRMKWMMAMKYPITA
LRMKWMMFMKYPNTA

SEQ ID NO: 250904 - protein, 15 aa, Artificial Sequence
  Description of Artificial Sequence: Synthetic peptide
  Seed: LRMKWMMAMKYPITA
LRMKVMMSMIYPGTA

SEQ ID NO: 250905 - protein, 15 aa, Artificial Sequence
  Description of Artificial Sequence: Synthetic peptide
  Seed: LRMKWMMAMKYPITA
LRMKNMMAMVYPCTA

SEQ ID NO: 250906 - protein, 15 aa, Artificial Sequence
  Description of Artificial Sequence: Synthetic peptide
  Seed: LRMKWMMAMKYPITA
LRMKVMMWMAYPHTA

SEQ ID NO: 250907 - protein, 15 aa, Artificial Sequence
  Description of Artificial Sequence: Synthetic peptide
  Seed: LRMKWMMAMKYPITA
LRMKFMMRMIYPHTA

SEQ ID NO: 250908 - protein, 15 aa, Artificial Sequence
  Description of Artificial Sequence: Synthetic peptide
  Seed: LRMKWMMAMKYPITA
LRMKFMMTMHYPDTA

SEQ ID NO: 250909 - protein, 15 aa, Artificial Sequence
  Description of Artificial Sequence: Synthetic peptide
  Seed: LRMKWMMAMKYPITA
LRMKFMMYMNYPWTA

SEQ ID NO: 250910 - protein, 15 aa, Artificial Sequence
  Description of Artificial Sequence: Synthetic peptide
  Seed: LRMKWMMAMKYPITA
LRMKYMMYMDYPVTA

SEQ ID NO: 250911 - protein, 15 aa, Artificial Sequence
  Description of Artificial Sequence: Synthetic peptide
  Seed: LRMKWMMAMKYPITA
LRMKVMMSMNYPWTA

SEQ ID NO: 250912 - protein, 15 aa, Artificial Sequence
  Description of Artificial Sequence: Synthetic peptide
  Seed: LRMKWMMAMKYPITA
LRMKLMMFMGYPYTA

SEQ ID NO: 250913 - protein, 15 aa, Artificial Sequence
  Description of Artificial Sequence: Synthetic peptide
  Seed: LRMKWMMAMKYPITA
LRMKMMMTMDYPITA

SEQ ID NO: 250914 - protein, 15 aa, Artificial Sequence
  Description of Artificial Sequence: Synthetic peptide
  Seed: LRMKWMMAMKYPITA
LRMKVMMWMPYPSTA

SEQ ID NO: 250915 - protein, 15 aa, Artificial Sequence
  Description of Artificial Sequence: Synthetic peptide
  Seed: LRMKWMMAMKYPITA
LRMKFMMRMNYPQTA

SEQ ID NO: 250916 - protein, 15 aa, Artificial Sequence
  Description of Artificial Sequence: Synthetic peptide
  Seed: LRMKWMMAMKYPITA
LRMKFMMYMEYPRTA

SEQ ID NO: 250917 - protein, 15 aa, Artificial Sequence
  Description of Artificial Sequence: Synthetic peptide
  Seed: LRMKWMMAMKYPITA
LRMKIMMVMMYPHTA

SEQ ID NO: 250918 - protein, 15 aa, Artificial Sequence
  Description of Artificial Sequence: Synthetic peptide
  Seed: LRMKWMMAMKYPITA
LRMKFMMEMYYPETA

SEQ ID NO: 250919 - protein, 15 aa, Artificial Sequence
  Description of Artificial Sequence: Synthetic peptide
  Seed: LRMKWMMAMKYPITA
LRMKLMMDMIYPSTA

SEQ ID NO: 250920 - protein, 15 aa, Artificial Sequence
  Description of Artificial Sequence: Synthetic peptide
  Seed: LRMKWMMAMKYPITA
LRMKFMMDMHYPMTA

SEQ ID NO: 250921 - protein, 15 aa, Artificial Sequence
  Description of Artificial Sequence: Synthetic peptide
  Seed: LRMKWMMAMKYPITA
LRMKIMMAMQYPGTA

SEQ ID NO: 250922 - protein, 15 aa, Artificial Sequence
  Description of Artificial Sequence: Synthetic peptide
  Seed: LRMKWMMAMKYPITA
LRMKLMMTMDYPFTA

SEQ ID NO: 250923 - protein, 15 aa, Artificial Sequence
  Description of Artificial Sequence: Synthetic peptide
  Seed: LRMKWMMAMKYPITA
LRMKIMMGMVYPHTA

SEQ ID NO: 250924 - protein, 15 aa, Artificial Sequence
  Description of Artificial Sequence: Synthetic peptide
  Seed: ANQRLNPMHQLLRHF
ANQRINPHHNLLAHF

SEQ ID NO: 250925 - protein, 15 aa, Artificial Sequence
  Description of Artificial Sequence: Synthetic peptide
  Seed: LRMKWMMAMKYPITA
LRMKMMMIMCYPRTA

SEQ ID NO: 250926 - protein, 15 aa, Artificial Sequence
  Description of Artificial Sequence: Synthetic peptide
  Seed: LRMKWMMAMKYPITA
LRMKFMMRMAYPETA

SEQ ID NO: 250927 - protein, 15 aa, Artificial Sequence
  Description of Artificial Sequence: Synthetic peptide
  Seed: LRMKWMMAMKYPITA
LRMKWMMYMPYPKTA

SEQ ID NO: 250928 - protein, 15 aa, Artificial Sequence
  Description of Artificial Sequence: Synthetic peptide
  Seed: LRMKWMMAMKYPITA
LRMKVMMTMSYPGTA

SEQ ID NO: 250929 - protein, 15 aa, Artificial Sequence
  Description of Artificial Sequence: Synthetic peptide
  Seed: LRMKWMMAMKYPITA
LRMKIMMRMVYPQTA

SEQ ID NO: 250930 - protein, 15 aa, Artificial Sequence
  Description of Artificial Sequence: Synthetic peptide
  Seed: LRMKWMMAMKYPITA
LRMKMMMNMVYPETA

SEQ ID NO: 250931 - protein, 15 aa, Artificial Sequence
  Description of Artificial Sequence: Synthetic peptide
  Seed: LRMKWMMAMKYPITA
LRMKLMMYMGYPFTA

SEQ ID NO: 250932 - protein, 15 aa, Artificial Sequence
  Description of Artificial Sequence: Synthetic peptide
  Seed: LRMKWMMAMKYPITA
LRMKMMMNMTYPHTA

SEQ ID NO: 250933 - protein, 15 aa, Artificial Sequence
  Description of Artificial Sequence: Synthetic peptide
  Seed: LRMKWMMAMKYPITA
LRMKIMMMMWYPHTA

SEQ ID NO: 250934 - protein, 15 aa, Artificial Sequence
  Description of Artificial Sequence: Synthetic peptide
  Seed: LRMKWMMAMKYPITA
LRMKMMMQMMYPRTA

SEQ ID NO: 250935 - protein, 15 aa, Artificial Sequence
  Description of Artificial Sequence: Synthetic peptide
  Seed: LRMKWMMAMKYPITA
LRMKNMMTMVYPITA

SEQ ID NO: 250936 - protein, 15 aa, Artificial Sequence
  Description of Artificial Sequence: Synthetic peptide
  Seed: LRMKWMMAMKYPITA
LRMKYMMNMRYPWTA

SEQ ID NO: 250937 - protein, 15 aa, Artificial Sequence
  Description of Artificial Sequence: Synthetic peptide
  Seed: LRMKWMMAMKYPITA
LRMKFMMTMKYPDTA

SEQ ID NO: 250938 - protein, 15 aa, Artificial Sequence
  Description of Artificial Sequence: Synthetic peptide
  Seed: LRMKWMMAMKYPITA
LRMKVMMWMIYPSTA

SEQ ID NO: 250939 - protein, 15 aa, Artificial Sequence
  Description of Artificial Sequence: Synthetic peptide
  Seed: LRMKWMMAMKYPITA
LRMKIMMIMQYPTTA

SEQ ID NO: 250940 - protein, 15 aa, Artificial Sequence
  Description of Artificial Sequence: Synthetic peptide
  Seed: LRMKWMMAMKYPITA
LRMKFMMTMQYPHTA

SEQ ID NO: 250941 - protein, 15 aa, Artificial Sequence
  Description of Artificial Sequence: Synthetic peptide
  Seed: LRMKWMMAMKYPITA
LRMKYMMHMSYPKTA

SEQ ID NO: 250942 - protein, 15 aa, Artificial Sequence
  Description of Artificial Sequence: Synthetic peptide
  Seed: LRMKWMMAMKYPITA
LRMKVMMSMSYPETA

SEQ ID NO: 250943 - protein, 15 aa, Artificial Sequence
  Description of Artificial Sequence: Synthetic peptide
  Seed: LRMKWMMAMKYPITA
LRMKMMMDMIYPATA

SEQ ID NO: 250944 - protein, 15 aa, Artificial Sequence
  Description of Artificial Sequence: Synthetic peptide
  Seed: LRMKWMMAMKYPITA
LRMKMMMTMSYPKTA

SEQ ID NO: 250945 - protein, 13 aa, Artificial Sequence
  Description of Artificial Sequence: Synthetic peptide
  Seed: ERELVRKTRFLPV
ERELFRKRRFLPV

SEQ ID NO: 250946 - protein, 15 aa, Artificial Sequence
  Description of Artificial Sequence: Synthetic peptide
  Seed: LRMKWMMAMKYPITA
LRMKYMMYMAYPDTA

SEQ ID NO: 250947 - protein, 15 aa, Artificial Sequence
  Description of Artificial Sequence: Synthetic peptide
  Seed: LRMKWMMAMKYPITA
LRMKWMMKMTYPFTA

SEQ ID NO: 250948 - protein, 15 aa, Artificial Sequence
  Description of Artificial Sequence: Synthetic peptide
  Seed: LRMKWMMAMKYPITA
LRMKYMMEMRYPITA

SEQ ID NO: 250949 - protein, 15 aa, Artificial Sequence
  Description of Artificial Sequence: Synthetic peptide
  Seed: LRMKWMMAMKYPITA
LRMKWMMNMIYPDTA

SEQ ID NO: 250950 - protein, 15 aa, Artificial Sequence
  Description of Artificial Sequence: Synthetic peptide
  Seed: LRMKWMMAMKYPITA
LRMKFMMNMHYPNTA

SEQ ID NO: 250951 - protein, 15 aa, Artificial Sequence
  Description of Artificial Sequence: Synthetic peptide
  Seed: LRMKWMMAMKYPITA
LRMKLMMYMGYPYTA

SEQ ID NO: 250952 - protein, 15 aa, Artificial Sequence
  Description of Artificial Sequence: Synthetic peptide
  Seed: LRMKWMMAMKYPITA
LRMKVMMVMNYPGTA

SEQ ID NO: 250953 - protein, 15 aa, Artificial Sequence
  Description of Artificial Sequence: Synthetic peptide
  Seed: LRMKWMMAMKYPITA
LRMKMMMDMVYPATA

SEQ ID NO: 250954 - protein, 15 aa, Artificial Sequence
  Description of Artificial Sequence: Synthetic peptide
  Seed: LRMKWMMAMKYPITA
LRMKVMMAMCYPRTA

SEQ ID NO: 250955 - protein, 15 aa, Artificial Sequence
  Description of Artificial Sequence: Synthetic peptide
  Seed: LRMKWMMAMKYPITA
LRMKFMMDMIYPPTA

SEQ ID NO: 250956 - protein, 15 aa, Artificial Sequence
  Description of Artificial Sequence: Synthetic peptide
  Seed: LRMKWMMAMKYPITA
LRMKIMMDMVYPTTA

SEQ ID NO: 250957 - protein, 15 aa, Artificial Sequence
  Description of Artificial Sequence: Synthetic peptide
  Seed: LRMKWMMAMKYPITA
LRMKFMMDMRYPATA

SEQ ID NO: 250958 - protein, 15 aa, Artificial Sequence
  Description of Artificial Sequence: Synthetic peptide
  Seed: LRMKWMMAMKYPITA
LRMKFMMFMDYPGTA

SEQ ID NO: 250959 - protein, 15 aa, Artificial Sequence
  Description of Artificial Sequence: Synthetic peptide
  Seed: LRMKWMMAMKYPITA
LRMKFMMHMDYPSTA

SEQ ID NO: 250960 - protein, 15 aa, Artificial Sequence
  Description of Artificial Sequence: Synthetic peptide
  Seed: LRMKWMMAMKYPITA
LRMKIMMWMSYPGTA

SEQ ID NO: 250961 - protein, 15 aa, Artificial Sequence
  Description of Artificial Sequence: Synthetic peptide
  Seed: LRMKWMMAMKYPITA
LRMKVMMFMGYPYTA

SEQ ID NO: 250962 - protein, 15 aa, Artificial Sequence
  Description of Artificial Sequence: Synthetic peptide
  Seed: LRMKWMMAMKYPITA
LRMKIMMDMAYPWTA

SEQ ID NO: 250963 - protein, 15 aa, Artificial Sequence
  Description of Artificial Sequence: Synthetic peptide
  Seed: LRMKWMMAMKYPITA
LRMKFMMRMIYPDTA

SEQ ID NO: 250964 - protein, 15 aa, Artificial Sequence
  Description of Artificial Sequence: Synthetic peptide
  Seed: LRMKWMMAMKYPITA
LRMKFMMYMDYPTTA

SEQ ID NO: 250965 - protein, 15 aa, Artificial Sequence
  Description of Artificial Sequence: Synthetic peptide
  Seed: LRMKWMMAMKYPITA
LRMKYMMSMKYPCTA

SEQ ID NO: 250966 - protein, 15 aa, Artificial Sequence
  Description of Artificial Sequence: Synthetic peptide
  Seed: LRMKWMMAMKYPITA
LRMKIMMDMIYPQTA

SEQ ID NO: 250967 - protein, 15 aa, Artificial Sequence
  Description of Artificial Sequence: Synthetic peptide
  Seed: LRMKWMMAMKYPITA
LRMKLMMYMNYPGTA

SEQ ID NO: 250968 - protein, 15 aa, Artificial Sequence
  Description of Artificial Sequence: Synthetic peptide
  Seed: LRMKWMMAMKYPITA
LRMKFMMNMHYPHTA

SEQ ID NO: 250969 - protein, 15 aa, Artificial Sequence
  Description of Artificial Sequence: Synthetic peptide
  Seed: ANQRLNPMHQLLRHF
ANQRLNPNHRLLAHF

SEQ ID NO: 250970 - protein, 15 aa, Artificial Sequence
  Description of Artificial Sequence: Synthetic peptide
  Seed: LRMKWMMAMKYPITA
LRMKFMMKMNYPWTA

SEQ ID NO: 250971 - protein, 15 aa, Artificial Sequence
  Description of Artificial Sequence: Synthetic peptide
  Seed: LRMKWMMAMKYPITA
LRMKIMMWMGYPSTA

SEQ ID NO: 250972 - protein, 15 aa, Artificial Sequence
  Description of Artificial Sequence: Synthetic peptide
  Seed: LRMKWMMAMKYPITA
LRMKIMMIMCYPRTA

SEQ ID NO: 250973 - protein, 15 aa, Artificial Sequence
  Description of Artificial Sequence: Synthetic peptide
  Seed: LRMKWMMAMKYPITA
LRMKLMMDMVYPTTA

SEQ ID NO: 250974 - protein, 15 aa, Artificial Sequence
  Description of Artificial Sequence: Synthetic peptide
  Seed: LRMKWMMAMKYPITA
LRMKVMMDMVYPATA

SEQ ID NO: 250975 - protein, 15 aa, Artificial Sequence
  Description of Artificial Sequence: Synthetic peptide
  Seed: LRMKWMMAMKYPITA
LRMKFMMNMKYPETA

SEQ ID NO: 250976 - protein, 15 aa, Artificial Sequence
  Description of Artificial Sequence: Synthetic peptide
  Seed: LRMKWMMAMKYPITA
LRMKFMMKMNYPNTA

SEQ ID NO: 250977 - protein, 15 aa, Artificial Sequence
  Description of Artificial Sequence: Synthetic peptide
  Seed: LRMKWMMAMKYPITA
LRMKFMMKMSYPKTA

SEQ ID NO: 250978 - protein, 15 aa, Artificial Sequence
  Description of Artificial Sequence: Synthetic peptide
  Seed: LRMKWMMAMKYPITA
LRMKVMMRMAYPATA

SEQ ID NO: 250979 - protein, 15 aa, Artificial Sequence
  Description of Artificial Sequence: Synthetic peptide
  Seed: LRMKWMMAMKYPITA
LRMKLMMDMIYPQTA

SEQ ID NO: 250980 - protein, 15 aa, Artificial Sequence
  Description of Artificial Sequence: Synthetic peptide
  Seed: LRMKWMMAMKYPITA
LRMKFMMQMRYPDTA

SEQ ID NO: 250981 - protein, 15 aa, Artificial Sequence
  Description of Artificial Sequence: Synthetic peptide
  Seed: LRMKWMMAMKYPITA
LRMKVMMNMTYPQTA

SEQ ID NO: 250982 - protein, 15 aa, Artificial Sequence
  Description of Artificial Sequence: Synthetic peptide
  Seed: LRMKWMMAMKYPITA
LRMKIMMWMTYPGTA

SEQ ID NO: 250983 - protein, 15 aa, Artificial Sequence
  Description of Artificial Sequence: Synthetic peptide
  Seed: LRMKWMMAMKYPITA
LRMKLMMSMQYPGTA

SEQ ID NO: 250984 - protein, 15 aa, Artificial Sequence
  Description of Artificial Sequence: Synthetic peptide
  Seed: LRMKWMMAMKYPITA
LRMKFMMDMKYPATA

SEQ ID NO: 250985 - protein, 15 aa, Artificial Sequence
  Description of Artificial Sequence: Synthetic peptide
  Seed: LRMKWMMAMKYPITA
LRMKFMMDMRYPSTA

SEQ ID NO: 250986 - protein, 15 aa, Artificial Sequence
  Description of Artificial Sequence: Synthetic peptide
  Seed: LRMKWMMAMKYPITA
LRMKMMMNMTYPETA

SEQ ID NO: 250987 - protein, 15 aa, Artificial Sequence
  Description of Artificial Sequence: Synthetic peptide
  Seed: LRMKWMMAMKYPITA
LRMKFMMDMVYPPTA

SEQ ID NO: 250988 - protein, 15 aa, Artificial Sequence
  Description of Artificial Sequence: Synthetic peptide
  Seed: LRMKWMMAMKYPITA
LRMKYMMHMSYPETA

SEQ ID NO: 250989 - protein, 15 aa, Artificial Sequence
  Description of Artificial Sequence: Synthetic peptide
  Seed: LRMKWMMAMKYPITA
LRMKFMMDMDYPFTA

SEQ ID NO: 250990 - protein, 15 aa, Artificial Sequence
  Description of Artificial Sequence: Synthetic peptide
  Seed: LRMKWMMAMKYPITA
LRMKIMMEMTYPHTA

SEQ ID NO: 250991 - protein, 15 aa, Artificial Sequence
  Description of Artificial Sequence: Synthetic peptide
  Seed: LRMKWMMAMKYPITA
LRMKWMMNMPYPRTA

SEQ ID NO: 250992 - protein, 15 aa, Artificial Sequence
  Description of Artificial Sequence: Synthetic peptide
  Seed: LRMKWMMAMKYPITA
LRMKMMMNMDYPATA

SEQ ID NO: 250993 - protein, 15 aa, Artificial Sequence
  Description of Artificial Sequence: Synthetic peptide
  Seed: LRMKWMMAMKYPITA
LRMKLMMDMAYPQTA

SEQ ID NO: 250994 - protein, 15 aa, Artificial Sequence
  Description of Artificial Sequence: Synthetic peptide
  Seed: LRMKWMMAMKYPITA
LRMKVMMYMGYPKTA

SEQ ID NO: 250995 - protein, 15 aa, Artificial Sequence
  Description of Artificial Sequence: Synthetic peptide
  Seed: LRMKWMMAMKYPITA
LRMKMMMDMVYPSTA

SEQ ID NO: 250996 - protein, 15 aa, Artificial Sequence
  Description of Artificial Sequence: Synthetic peptide
  Seed: LRMKWMMAMKYPITA
LRMKFMMNMKYPDTA

SEQ ID NO: 250997 - protein, 15 aa, Artificial Sequence
  Description of Artificial Sequence: Synthetic peptide
  Seed: LRMKWMMAMKYPITA
LRMKIMMKMVYPNTA

SEQ ID NO: 250998 - protein, 15 aa, Artificial Sequence
  Description of Artificial Sequence: Synthetic peptide
  Seed: LRMKWMMAMKYPITA
LRMKVMMNMIYPCTA

SEQ ID NO: 250999 - protein, 15 aa, Artificial Sequence
  Description of Artificial Sequence: Synthetic peptide
  Seed: LRMKWMMAMKYPITA
LRMKYMMRMNYPYTA

SEQ ID NO: 251000 - protein, 15 aa, Artificial Sequence
  Description of Artificial Sequence: Synthetic peptide
  Seed: LRMKWMMAMKYPITA
LRMKVMMMMHYPDTA

SEQ ID NO: 251001 - protein, 15 aa, Artificial Sequence
  Description of Artificial Sequence: Synthetic peptide
  Seed: LRMKWMMAMKYPITA
LRMKFMMDMRYPTTA

SEQ ID NO: 251002 - protein, 15 aa, Artificial Sequence
  Description of Artificial Sequence: Synthetic peptide
  Seed: LRMKWMMAMKYPITA
LRMKWMMKMVYPETA

SEQ ID NO: 251003 - protein, 15 aa, Artificial Sequence
  Description of Artificial Sequence: Synthetic peptide
  Seed: LRMKWMMAMKYPITA
LRMKIMMDMIYPGTA

SEQ ID NO: 251004 - protein, 15 aa, Artificial Sequence
  Description of Artificial Sequence: Synthetic peptide
  Seed: LRMKWMMAMKYPITA
LRMKMMMQMPYPRTA

SEQ ID NO: 251005 - protein, 15 aa, Artificial Sequence
  Description of Artificial Sequence: Synthetic peptide
  Seed: LRMKWMMAMKYPITA
LRMKYMMRMAYPETA

SEQ ID NO: 251006 - protein, 15 aa, Artificial Sequence
  Description of Artificial Sequence: Synthetic peptide
  Seed: LRMKWMMAMKYPITA
LRMKIMMEMNYPHTA

SEQ ID NO: 251007 - protein, 15 aa, Artificial Sequence
  Description of Artificial Sequence: Synthetic peptide
  Seed: LRMKWMMAMKYPITA
LRMKFMMDMKYPSTA

SEQ ID NO: 251008 - protein, 15 aa, Artificial Sequence
  Description of Artificial Sequence: Synthetic peptide
  Seed: LRMKWMMAMKYPITA
LRMKMMMKMNYPMTA

SEQ ID NO: 251009 - protein, 15 aa, Artificial Sequence
  Description of Artificial Sequence: Synthetic peptide
  Seed: LRMKWMMAMKYPITA
LRMKIMMNMDYPQTA

SEQ ID NO: 251010 - protein, 15 aa, Artificial Sequence
  Description of Artificial Sequence: Synthetic peptide
  Seed: LRMKWMMAMKYPITA
LRMKFMMKMCYPRTA

SEQ ID NO: 251011 - protein, 15 aa, Artificial Sequence
  Description of Artificial Sequence: Synthetic peptide
  Seed: LRMKWMMAMKYPITA
LRMKFMMQMKYPDTA

SEQ ID NO: 251012 - protein, 15 aa, Artificial Sequence
  Description of Artificial Sequence: Synthetic peptide
  Seed: LRMKWMMAMKYPITA
LRMKLMMNMDYPSTA

SEQ ID NO: 251013 - protein, 15 aa, Artificial Sequence
  Description of Artificial Sequence: Synthetic peptide
  Seed: LRMKWMMAMKYPITA
LRMKFMMDMPYPHTA

SEQ ID NO: 251014 - protein, 15 aa, Artificial Sequence
  Description of Artificial Sequence: Synthetic peptide
  Seed: LRMKWMMAMKYPITA
LRMKFMMKMTYPDTA

SEQ ID NO: 251015 - protein, 15 aa, Artificial Sequence
  Description of Artificial Sequence: Synthetic peptide
  Seed: LRMKWMMAMKYPITA
LRMKIMMEMNYPQTA

SEQ ID NO: 251016 - protein, 15 aa, Artificial Sequence
  Description of Artificial Sequence: Synthetic peptide
  Seed: LRMKWMMAMKYPITA
LRMKLMMNMTYPDTA

SEQ ID NO: 251017 - protein, 15 aa, Artificial Sequence
  Description of Artificial Sequence: Synthetic peptide
  Seed: LRMKWMMAMKYPITA
LRMKIMMEMTYPQTA

SEQ ID NO: 251018 - protein, 15 aa, Artificial Sequence
  Description of Artificial Sequence: Synthetic peptide
  Seed: LRMKWMMAMKYPITA
LRMKLMMRMSYPCTA

SEQ ID NO: 251019 - protein, 15 aa, Artificial Sequence
  Description of Artificial Sequence: Synthetic peptide
  Seed: LRMKWMMAMKYPITA
LRMKLMMKMVYPDTA

SEQ ID NO: 251020 - protein, 15 aa, Artificial Sequence
  Description of Artificial Sequence: Synthetic peptide
  Seed: LRMKWMMAMKYPITA
LRMKIMMKMSYPNTA

SEQ ID NO: 251021 - protein, 15 aa, Artificial Sequence
  Description of Artificial Sequence: Synthetic peptide
  Seed: LRMKWMMAMKYPITA
LRMKLMMEMNYPQTA

SEQ ID NO: 251022 - protein, 15 aa, Artificial Sequence
  Description of Artificial Sequence: Synthetic peptide
  Seed: LRMKWMMAMKYPITA
LRMKIMMKMNYPWTA

SEQ ID NO: 251023 - protein, 15 aa, Artificial Sequence
  Description of Artificial Sequence: Synthetic peptide
  Seed: LRMKWMMAMKYPITA
LRMKFMMDMNYPKTA

SEQ ID NO: 251024 - protein, 15 aa, Artificial Sequence
  Description of Artificial Sequence: Synthetic peptide
  Seed: LRMKWMMAMKYPITA
LRMKFMMDMPYPETA

SEQ ID NO: 251025 - protein, 15 aa, Artificial Sequence
  Description of Artificial Sequence: Synthetic peptide
  Seed: LRMKWMMAMKYPITA
LRMKFMMDMRYPGTA

SEQ ID NO: 251026 - protein, 15 aa, Artificial Sequence
  Description of Artificial Sequence: Synthetic peptide
  Seed: LRMKWMMAMKYPITA
LRMKFMMDMRYPETA

SEQ ID NO: 251027 - protein, 15 aa, Artificial Sequence
  Description of Artificial Sequence: Synthetic peptide
  Seed: LRMKWMMAMKYPITA
LRMKYMMDMSYPWTA

SEQ ID NO: 251028 - protein, 15 aa, Artificial Sequence
  Description of Artificial Sequence: Synthetic peptide
  Seed: LRMKWMMAMKYPITA
LRMKLMMDMSYPNTA

SEQ ID NO: 251029 - protein, 15 aa, Artificial Sequence
  Description of Artificial Sequence: Synthetic peptide
  Seed: LRMKWMMAMKYPITA
LRMKIMMKMNYPNTA

SEQ ID NO: 251030 - protein, 15 aa, Artificial Sequence
  Description of Artificial Sequence: Synthetic peptide
  Seed: LRMKWMMAMKYPITA
LRMKFMMDMRYPDTA

SEQ ID NO: 251031 - protein, 15 aa, Artificial Sequence
  Description of Artificial Sequence: Synthetic peptide
  Seed: LRMKWMMAMKYPITA
LRMKMMMDMNYPTTA

SEQ ID NO: 251032 - protein, 15 aa, Artificial Sequence
  Description of Artificial Sequence: Synthetic peptide
  Seed: LRMKWMMAMKYPITA
LRMKFMMDMGYPETA

SEQ ID NO: 251033 - protein, 15 aa, Artificial Sequence
  Description of Artificial Sequence: Synthetic peptide
  Seed: DPWVLLNASWFNSFL
DPWVFLNASFFNAFL

SEQ ID NO: 251034 - protein, 15 aa, Artificial Sequence
  Description of Artificial Sequence: Synthetic peptide
  Seed: DPWVLLNASWFNSFL
DPWVFLNASFFNEFL

SEQ ID NO: 251035 - protein, 15 aa, Artificial Sequence
  Description of Artificial Sequence: Synthetic peptide
  Seed: DPWVLLNASWFNSFL
DPWVFLNASFFNHFL

SEQ ID NO: 251036 - protein, 15 aa, Artificial Sequence
  Description of Artificial Sequence: Synthetic peptide
  Seed: DPWVLLNASWFNSFL
DPWVFLNASFFNIFL

SEQ ID NO: 251037 - protein, 15 aa, Artificial Sequence
  Description of Artificial Sequence: Synthetic peptide
  Seed: DPWVLLNASWFNSFL
DPWVFLNASFFNLFL

SEQ ID NO: 251038 - protein, 15 aa, Artificial Sequence
  Description of Artificial Sequence: Synthetic peptide
  Seed: DPWVLLNASWFNSFL
DPWVFLNASFFNMFL

SEQ ID NO: 251039 - protein, 15 aa, Artificial Sequence
  Description of Artificial Sequence: Synthetic peptide
  Seed: DPWVLLNASWFNSFL
DPWVFLNASFFNNFL

SEQ ID NO: 251040 - protein, 15 aa, Artificial Sequence
  Description of Artificial Sequence: Synthetic peptide
  Seed: DPWVLLNASWFNSFL
DPWVFLNASFFNPFL

SEQ ID NO: 251041 - protein, 15 aa, Artificial Sequence
  Description of Artificial Sequence: Synthetic peptide
  Seed: DPWVLLNASWFNSFL
DPWVFLNASFFNRFL

SEQ ID NO: 251042 - protein, 15 aa, Artificial Sequence
  Description of Artificial Sequence: Synthetic peptide
  Seed: DPWVLLNASWFNSFL
DPWVFLNASFFNSFL

SEQ ID NO: 251043 - protein, 15 aa, Artificial Sequence
  Description of Artificial Sequence: Synthetic peptide
  Seed: DPWVLLNASWFNSFL
DPWVFLNASFFNTFL

SEQ ID NO: 251044 - protein, 15 aa, Artificial Sequence
  Description of Artificial Sequence: Synthetic peptide
  Seed: DPWVLLNASWFNSFL
DPWVFLNASFFNVFL

SEQ ID NO: 251045 - protein, 15 aa, Artificial Sequence
  Description of Artificial Sequence: Synthetic peptide
  Seed: DPWVLLNASWFNSFL
DPWVFLNASYFNAFL

SEQ ID NO: 251046 - protein, 15 aa, Artificial Sequence
  Description of Artificial Sequence: Synthetic peptide
  Seed: DPWVLLNASWFNSFL
DPWVFLNASYFNIFL

SEQ ID NO: 251047 - protein, 15 aa, Artificial Sequence
  Description of Artificial Sequence: Synthetic peptide
  Seed: DPWVLLNASWFNSFL
DPWVFLNASYFNLFL

SEQ ID NO: 251048 - protein, 15 aa, Artificial Sequence
  Description of Artificial Sequence: Synthetic peptide
  Seed: DPWVLLNASWFNSFL
DPWVFLNASYFNMFL

SEQ ID NO: 251049 - protein, 15 aa, Artificial Sequence
  Description of Artificial Sequence: Synthetic peptide
  Seed: DPWVLLNASWFNSFL
DPWVFLNASYFNSFL

SEQ ID NO: 251050 - protein, 15 aa, Artificial Sequence
  Description of Artificial Sequence: Synthetic peptide
  Seed: DPWVLLNASWFNSFL
DPWVFLNASYFNVFL

SEQ ID NO: 251051 - protein, 15 aa, Artificial Sequence
  Description of Artificial Sequence: Synthetic peptide
  Seed: DPWVLLNASWFNSFL
DPWVFLNESFFNAFL

SEQ ID NO: 251052 - protein, 15 aa, Artificial Sequence
  Description of Artificial Sequence: Synthetic peptide
  Seed: DPWVLLNASWFNSFL
DPWVFLNESFFNIFL

SEQ ID NO: 251053 - protein, 15 aa, Artificial Sequence
  Description of Artificial Sequence: Synthetic peptide
  Seed: DPWVLLNASWFNSFL
DPWVFLNESFFNLFL

SEQ ID NO: 251054 - protein, 15 aa, Artificial Sequence
  Description of Artificial Sequence: Synthetic peptide
  Seed: DPWVLLNASWFNSFL
DPWVFLNESFFNTFL

SEQ ID NO: 251055 - protein, 15 aa, Artificial Sequence
  Description of Artificial Sequence: Synthetic peptide
  Seed: DPWVLLNASWFNSFL
DPWVFLNESFFNVFL

SEQ ID NO: 251056 - protein, 15 aa, Artificial Sequence
  Description of Artificial Sequence: Synthetic peptide
  Seed: DPWVLLNASWFNSFL
DPWVFLNESYFNVFL

SEQ ID NO: 251057 - protein, 15 aa, Artificial Sequence
  Description of Artificial Sequence: Synthetic peptide
  Seed: DPWVLLNASWFNSFL
DPWVFLNHSFFNAFL

SEQ ID NO: 251058 - protein, 15 aa, Artificial Sequence
  Description of Artificial Sequence: Synthetic peptide
  Seed: DPWVLLNASWFNSFL
DPWVFLNHSFFNDFL

SEQ ID NO: 251059 - protein, 15 aa, Artificial Sequence
  Description of Artificial Sequence: Synthetic peptide
  Seed: DPWVLLNASWFNSFL
DPWVFLNHSFFNEFL

SEQ ID NO: 251060 - protein, 15 aa, Artificial Sequence
  Description of Artificial Sequence: Synthetic peptide
  Seed: DPWVLLNASWFNSFL
DPWVFLNHSFFNFFL

SEQ ID NO: 251061 - protein, 15 aa, Artificial Sequence
  Description of Artificial Sequence: Synthetic peptide
  Seed: DPWVLLNASWFNSFL
DPWVFLNHSFFNHFL

SEQ ID NO: 251062 - protein, 15 aa, Artificial Sequence
  Description of Artificial Sequence: Synthetic peptide
  Seed: DPWVLLNASWFNSFL
DPWVFLNHSFFNIFL

SEQ ID NO: 251063 - protein, 15 aa, Artificial Sequence
  Description of Artificial Sequence: Synthetic peptide
  Seed: DPWVLLNASWFNSFL
DPWVFLNHSFFNKFL

SEQ ID NO: 251064 - protein, 15 aa, Artificial Sequence
  Description of Artificial Sequence: Synthetic peptide
  Seed: DPWVLLNASWFNSFL
DPWVFLNHSFFNLFL

SEQ ID NO: 251065 - protein, 15 aa, Artificial Sequence
  Description of Artificial Sequence: Synthetic peptide
  Seed: DPWVLLNASWFNSFL
DPWVFLNHSFFNMFL

SEQ ID NO: 251066 - protein, 15 aa, Artificial Sequence
  Description of Artificial Sequence: Synthetic peptide
  Seed: DPWVLLNASWFNSFL
DPWVFLNHSFFNNFL

SEQ ID NO: 251067 - protein, 15 aa, Artificial Sequence
  Description of Artificial Sequence: Synthetic peptide
  Seed: DPWVLLNASWFNSFL
DPWVFLNHSFFNPFL

SEQ ID NO: 251068 - protein, 15 aa, Artificial Sequence
  Description of Artificial Sequence: Synthetic peptide
  Seed: DPWVLLNASWFNSFL
DPWVFLNHSFFNQFL

SEQ ID NO: 251069 - protein, 15 aa, Artificial Sequence
  Description of Artificial Sequence: Synthetic peptide
  Seed: DPWVLLNASWFNSFL
DPWVFLNHSFFNRFL

SEQ ID NO: 251070 - protein, 15 aa, Artificial Sequence
  Description of Artificial Sequence: Synthetic peptide
  Seed: DPWVLLNASWFNSFL
DPWVFLNHSFFNSFL

SEQ ID NO: 251071 - protein, 15 aa, Artificial Sequence
  Description of Artificial Sequence: Synthetic peptide
  Seed: DPWVLLNASWFNSFL
DPWVFLNHSFFNTFL

SEQ ID NO: 251072 - protein, 15 aa, Artificial Sequence
  Description of Artificial Sequence: Synthetic peptide
  Seed: DPWVLLNASWFNSFL
DPWVFLNHSFFNVFL

SEQ ID NO: 251073 - protein, 15 aa, Artificial Sequence
  Description of Artificial Sequence: Synthetic peptide
  Seed: DPWVLLNASWFNSFL
DPWVFLNHSFFNYFL

SEQ ID NO: 251074 - protein, 15 aa, Artificial Sequence
  Description of Artificial Sequence: Synthetic peptide
  Seed: DPWVLLNASWFNSFL
DPWVFLNHSLFNAFL

SEQ ID NO: 251075 - protein, 15 aa, Artificial Sequence
  Description of Artificial Sequence: Synthetic peptide
  Seed: DPWVLLNASWFNSFL
DPWVFLNHSLFNIFL

SEQ ID NO: 251076 - protein, 15 aa, Artificial Sequence
  Description of Artificial Sequence: Synthetic peptide
  Seed: DPWVLLNASWFNSFL
DPWVFLNHSLFNLFL

SEQ ID NO: 251077 - protein, 15 aa, Artificial Sequence
  Description of Artificial Sequence: Synthetic peptide
  Seed: DPWVLLNASWFNSFL
DPWVFLNHSLFNMFL

SEQ ID NO: 251078 - protein, 15 aa, Artificial Sequence
  Description of Artificial Sequence: Synthetic peptide
  Seed: DPWVLLNASWFNSFL
DPWVFLNHSLFNSFL

SEQ ID NO: 251079 - protein, 15 aa, Artificial Sequence
  Description of Artificial Sequence: Synthetic peptide
  Seed: DPWVLLNASWFNSFL
DPWVFLNHSLFNTFL

SEQ ID NO: 251080 - protein, 15 aa, Artificial Sequence
  Description of Artificial Sequence: Synthetic peptide
  Seed: DPWVLLNASWFNSFL
DPWVFLNHSLFNVFL

SEQ ID NO: 251081 - protein, 15 aa, Artificial Sequence
  Description of Artificial Sequence: Synthetic peptide
  Seed: DPWVLLNASWFNSFL
DPWVFLNHSMFNAFL

SEQ ID NO: 251082 - protein, 15 aa, Artificial Sequence
  Description of Artificial Sequence: Synthetic peptide
  Seed: DPWVLLNASWFNSFL
DPWVFLNHSMFNIFL

SEQ ID NO: 251083 - protein, 15 aa, Artificial Sequence
  Description of Artificial Sequence: Synthetic peptide
  Seed: DPWVLLNASWFNSFL
DPWVFLNHSMFNLFL

SEQ ID NO: 251084 - protein, 15 aa, Artificial Sequence
  Description of Artificial Sequence: Synthetic peptide
  Seed: DPWVLLNASWFNSFL
DPWVFLNHSMFNMFL

SEQ ID NO: 251085 - protein, 15 aa, Artificial Sequence
  Description of Artificial Sequence: Synthetic peptide
  Seed: DPWVLLNASWFNSFL
DPWVFLNHSMFNSFL

SEQ ID NO: 251086 - protein, 15 aa, Artificial Sequence
  Description of Artificial Sequence: Synthetic peptide
  Seed: DPWVLLNASWFNSFL
DPWVFLNHSMFNVFL

SEQ ID NO: 251087 - protein, 15 aa, Artificial Sequence
  Description of Artificial Sequence: Synthetic peptide
  Seed: DPWVLLNASWFNSFL
DPWVFLNHSWFNIFL

SEQ ID NO: 251088 - protein, 15 aa, Artificial Sequence
  Description of Artificial Sequence: Synthetic peptide
  Seed: DPWVLLNASWFNSFL
DPWVFLNHSWFNLFL

SEQ ID NO: 251089 - protein, 15 aa, Artificial Sequence
  Description of Artificial Sequence: Synthetic peptide
  Seed: DPWVLLNASWFNSFL
DPWVFLNHSWFNVFL

SEQ ID NO: 251090 - protein, 15 aa, Artificial Sequence
  Description of Artificial Sequence: Synthetic peptide
  Seed: DPWVLLNASWFNSFL
DPWVFLNHSYFNAFL

SEQ ID NO: 251091 - protein, 15 aa, Artificial Sequence
  Description of Artificial Sequence: Synthetic peptide
  Seed: DPWVLLNASWFNSFL
DPWVFLNHSYFNIFL

SEQ ID NO: 251092 - protein, 15 aa, Artificial Sequence
  Description of Artificial Sequence: Synthetic peptide
  Seed: DPWVLLNASWFNSFL
DPWVFLNHSYFNLFL

SEQ ID NO: 251093 - protein, 15 aa, Artificial Sequence
  Description of Artificial Sequence: Synthetic peptide
  Seed: DPWVLLNASWFNSFL
DPWVFLNHSYFNMFL

SEQ ID NO: 251094 - protein, 15 aa, Artificial Sequence
  Description of Artificial Sequence: Synthetic peptide
  Seed: DPWVLLNASWFNSFL
DPWVFLNHSYFNSFL

SEQ ID NO: 251095 - protein, 15 aa, Artificial Sequence
  Description of Artificial Sequence: Synthetic peptide
  Seed: DPWVLLNASWFNSFL
DPWVFLNHSYFNTFL

SEQ ID NO: 251096 - protein, 15 aa, Artificial Sequence
  Description of Artificial Sequence: Synthetic peptide
  Seed: DPWVLLNASWFNSFL
DPWVFLNHSYFNVFL

SEQ ID NO: 251097 - protein, 15 aa, Artificial Sequence
  Description of Artificial Sequence: Synthetic peptide
  Seed: DPWVLLNASWFNSFL
DPWVFLNKSFFNAFL

SEQ ID NO: 251098 - protein, 15 aa, Artificial Sequence
  Description of Artificial Sequence: Synthetic peptide
  Seed: DPWVLLNASWFNSFL
DPWVFLNKSFFNIFL

SEQ ID NO: 251099 - protein, 15 aa, Artificial Sequence
  Description of Artificial Sequence: Synthetic peptide
  Seed: DPWVLLNASWFNSFL
DPWVFLNKSFFNLFL

SEQ ID NO: 251100 - protein, 15 aa, Artificial Sequence
  Description of Artificial Sequence: Synthetic peptide
  Seed: DPWVLLNASWFNSFL
DPWVFLNKSFFNMFL

SEQ ID NO: 251101 - protein, 15 aa, Artificial Sequence
  Description of Artificial Sequence: Synthetic peptide
  Seed: DPWVLLNASWFNSFL
DPWVFLNKSFFNNFL

SEQ ID NO: 251102 - protein, 15 aa, Artificial Sequence
  Description of Artificial Sequence: Synthetic peptide
  Seed: DPWVLLNASWFNSFL
DPWVFLNKSFFNSFL

SEQ ID NO: 251103 - protein, 15 aa, Artificial Sequence
  Description of Artificial Sequence: Synthetic peptide
  Seed: DPWVLLNASWFNSFL
DPWVFLNKSFFNTFL

SEQ ID NO: 251104 - protein, 15 aa, Artificial Sequence
  Description of Artificial Sequence: Synthetic peptide
  Seed: DPWVLLNASWFNSFL
DPWVFLNKSFFNVFL

SEQ ID NO: 251105 - protein, 15 aa, Artificial Sequence
  Description of Artificial Sequence: Synthetic peptide
  Seed: DPWVLLNASWFNSFL
DPWVFLNNSFFNAFL

SEQ ID NO: 251106 - protein, 15 aa, Artificial Sequence
  Description of Artificial Sequence: Synthetic peptide
  Seed: DPWVLLNASWFNSFL
DPWVFLNNSFFNIFL

SEQ ID NO: 251107 - protein, 15 aa, Artificial Sequence
  Description of Artificial Sequence: Synthetic peptide
  Seed: DPWVLLNASWFNSFL
DPWVFLNNSFFNLFL

SEQ ID NO: 251108 - protein, 15 aa, Artificial Sequence
  Description of Artificial Sequence: Synthetic peptide
  Seed: DPWVLLNASWFNSFL
DPWVFLNNSFFNMFL

SEQ ID NO: 251109 - protein, 15 aa, Artificial Sequence
  Description of Artificial Sequence: Synthetic peptide
  Seed: DPWVLLNASWFNSFL
DPWVFLNNSFFNSFL

SEQ ID NO: 251110 - protein, 15 aa, Artificial Sequence
  Description of Artificial Sequence: Synthetic peptide
  Seed: DPWVLLNASWFNSFL
DPWVFLNNSFFNTFL

SEQ ID NO: 251111 - protein, 15 aa, Artificial Sequence
  Description of Artificial Sequence: Synthetic peptide
  Seed: DPWVLLNASWFNSFL
DPWVFLNNSFFNVFL

SEQ ID NO: 251112 - protein, 15 aa, Artificial Sequence
  Description of Artificial Sequence: Synthetic peptide
  Seed: DPWVLLNASWFNSFL
DPWVFLNPSFFNVFL

SEQ ID NO: 251113 - protein, 15 aa, Artificial Sequence
  Description of Artificial Sequence: Synthetic peptide
  Seed: DPWVLLNASWFNSFL
DPWVFLNQSFFNIFL

SEQ ID NO: 251114 - protein, 15 aa, Artificial Sequence
  Description of Artificial Sequence: Synthetic peptide
  Seed: DPWVLLNASWFNSFL
DPWVFLNQSFFNVFL

SEQ ID NO: 251115 - protein, 15 aa, Artificial Sequence
  Description of Artificial Sequence: Synthetic peptide
  Seed: DPWVLLNASWFNSFL
DPWVFLNSSFFNAFL

SEQ ID NO: 251116 - protein, 15 aa, Artificial Sequence
  Description of Artificial Sequence: Synthetic peptide
  Seed: DPWVLLNASWFNSFL
DPWVFLNSSFFNEFL

SEQ ID NO: 251117 - protein, 15 aa, Artificial Sequence
  Description of Artificial Sequence: Synthetic peptide
  Seed: DPWVLLNASWFNSFL
DPWVFLNSSFFNHFL

SEQ ID NO: 251118 - protein, 15 aa, Artificial Sequence
  Description of Artificial Sequence: Synthetic peptide
  Seed: DPWVLLNASWFNSFL
DPWVFLNSSFFNIFL

SEQ ID NO: 251119 - protein, 15 aa, Artificial Sequence
  Description of Artificial Sequence: Synthetic peptide
  Seed: DPWVLLNASWFNSFL
DPWVFLNSSFFNKFL

SEQ ID NO: 251120 - protein, 15 aa, Artificial Sequence
  Description of Artificial Sequence: Synthetic peptide
  Seed: DPWVLLNASWFNSFL
DPWVFLNSSFFNLFL

SEQ ID NO: 251121 - protein, 15 aa, Artificial Sequence
  Description of Artificial Sequence: Synthetic peptide
  Seed: DPWVLLNASWFNSFL
DPWVFLNSSFFNMFL

SEQ ID NO: 251122 - protein, 15 aa, Artificial Sequence
  Description of Artificial Sequence: Synthetic peptide
  Seed: DPWVLLNASWFNSFL
DPWVFLNSSFFNNFL

SEQ ID NO: 251123 - protein, 15 aa, Artificial Sequence
  Description of Artificial Sequence: Synthetic peptide
  Seed: DPWVLLNASWFNSFL
DPWVFLNSSFFNPFL

SEQ ID NO: 251124 - protein, 15 aa, Artificial Sequence
  Description of Artificial Sequence: Synthetic peptide
  Seed: DPWVLLNASWFNSFL
DPWVFLNSSFFNQFL

SEQ ID NO: 251125 - protein, 15 aa, Artificial Sequence
  Description of Artificial Sequence: Synthetic peptide
  Seed: DPWVLLNASWFNSFL
DPWVFLNSSFFNRFL

SEQ ID NO: 251126 - protein, 15 aa, Artificial Sequence
  Description of Artificial Sequence: Synthetic peptide
  Seed: DPWVLLNASWFNSFL
DPWVFLNSSFFNSFL

SEQ ID NO: 251127 - protein, 15 aa, Artificial Sequence
  Description of Artificial Sequence: Synthetic peptide
  Seed: DPWVLLNASWFNSFL
DPWVFLNSSFFNTFL

SEQ ID NO: 251128 - protein, 15 aa, Artificial Sequence
  Description of Artificial Sequence: Synthetic peptide
  Seed: DPWVLLNASWFNSFL
DPWVFLNSSFFNVFL

SEQ ID NO: 251129 - protein, 15 aa, Artificial Sequence
  Description of Artificial Sequence: Synthetic peptide
  Seed: DPWVLLNASWFNSFL
DPWVFLNSSFFNYFL

SEQ ID NO: 251130 - protein, 15 aa, Artificial Sequence
  Description of Artificial Sequence: Synthetic peptide
  Seed: DPWVLLNASWFNSFL
DPWVFLNSSYFNAFL

SEQ ID NO: 251131 - protein, 15 aa, Artificial Sequence
  Description of Artificial Sequence: Synthetic peptide
  Seed: DPWVLLNASWFNSFL
DPWVFLNSSYFNIFL

SEQ ID NO: 251132 - protein, 15 aa, Artificial Sequence
  Description of Artificial Sequence: Synthetic peptide
  Seed: DPWVLLNASWFNSFL
DPWVFLNSSYFNLFL

SEQ ID NO: 251133 - protein, 15 aa, Artificial Sequence
  Description of Artificial Sequence: Synthetic peptide
  Seed: DPWVLLNASWFNSFL
DPWVFLNSSYFNMFL

SEQ ID NO: 251134 - protein, 15 aa, Artificial Sequence
  Description of Artificial Sequence: Synthetic peptide
  Seed: DPWVLLNASWFNSFL
DPWVFLNSSYFNSFL

SEQ ID NO: 251135 - protein, 15 aa, Artificial Sequence
  Description of Artificial Sequence: Synthetic peptide
  Seed: DPWVLLNASWFNSFL
DPWVFLNSSYFNTFL

SEQ ID NO: 251136 - protein, 15 aa, Artificial Sequence
  Description of Artificial Sequence: Synthetic peptide
  Seed: DPWVLLNASWFNSFL
DPWVFLNSSYFNVFL

SEQ ID NO: 251137 - protein, 15 aa, Artificial Sequence
  Description of Artificial Sequence: Synthetic peptide
  Seed: DPWVLLNASWFNSFL
DPWVFLNTSFFNAFL

SEQ ID NO: 251138 - protein, 15 aa, Artificial Sequence
  Description of Artificial Sequence: Synthetic peptide
  Seed: DPWVLLNASWFNSFL
DPWVFLNTSFFNDFL

SEQ ID NO: 251139 - protein, 15 aa, Artificial Sequence
  Description of Artificial Sequence: Synthetic peptide
  Seed: DPWVLLNASWFNSFL
DPWVFLNTSFFNEFL

SEQ ID NO: 251140 - protein, 15 aa, Artificial Sequence
  Description of Artificial Sequence: Synthetic peptide
  Seed: DPWVLLNASWFNSFL
DPWVFLNTSFFNHFL

SEQ ID NO: 251141 - protein, 15 aa, Artificial Sequence
  Description of Artificial Sequence: Synthetic peptide
  Seed: DPWVLLNASWFNSFL
DPWVFLNTSFFNIFL

SEQ ID NO: 251142 - protein, 15 aa, Artificial Sequence
  Description of Artificial Sequence: Synthetic peptide
  Seed: DPWVLLNASWFNSFL
DPWVFLNTSFFNKFL

SEQ ID NO: 251143 - protein, 15 aa, Artificial Sequence
  Description of Artificial Sequence: Synthetic peptide
  Seed: DPWVLLNASWFNSFL
DPWVFLNTSFFNLFL

SEQ ID NO: 251144 - protein, 15 aa, Artificial Sequence
  Description of Artificial Sequence: Synthetic peptide
  Seed: DPWVLLNASWFNSFL
DPWVFLNTSFFNMFL

SEQ ID NO: 251145 - protein, 15 aa, Artificial Sequence
  Description of Artificial Sequence: Synthetic peptide
  Seed: DPWVLLNASWFNSFL
DPWVFLNTSFFNNFL

SEQ ID NO: 251146 - protein, 15 aa, Artificial Sequence
  Description of Artificial Sequence: Synthetic peptide
  Seed: DPWVLLNASWFNSFL
DPWVFLNTSFFNPFL

SEQ ID NO: 251147 - protein, 15 aa, Artificial Sequence
  Description of Artificial Sequence: Synthetic peptide
  Seed: DPWVLLNASWFNSFL
DPWVFLNTSFFNRFL

SEQ ID NO: 251148 - protein, 15 aa, Artificial Sequence
  Description of Artificial Sequence: Synthetic peptide
  Seed: DPWVLLNASWFNSFL
DPWVFLNTSFFNSFL

SEQ ID NO: 251149 - protein, 15 aa, Artificial Sequence
  Description of Artificial Sequence: Synthetic peptide
  Seed: DPWVLLNASWFNSFL
DPWVFLNTSFFNTFL

SEQ ID NO: 251150 - protein, 15 aa, Artificial Sequence
  Description of Artificial Sequence: Synthetic peptide
  Seed: DPWVLLNASWFNSFL
DPWVFLNTSFFNVFL

SEQ ID NO: 251151 - protein, 15 aa, Artificial Sequence
  Description of Artificial Sequence: Synthetic peptide
  Seed: DPWVLLNASWFNSFL
DPWVFLNTSFFNYFL

SEQ ID NO: 251152 - protein, 15 aa, Artificial Sequence
  Description of Artificial Sequence: Synthetic peptide
  Seed: DPWVLLNASWFNSFL
DPWVFLNTSYFNAFL

SEQ ID NO: 251153 - protein, 15 aa, Artificial Sequence
  Description of Artificial Sequence: Synthetic peptide
  Seed: DPWVLLNASWFNSFL
DPWVFLNTSYFNIFL

SEQ ID NO: 251154 - protein, 15 aa, Artificial Sequence
  Description of Artificial Sequence: Synthetic peptide
  Seed: DPWVLLNASWFNSFL
DPWVFLNTSYFNLFL

SEQ ID NO: 251155 - protein, 15 aa, Artificial Sequence
  Description of Artificial Sequence: Synthetic peptide
  Seed: DPWVLLNASWFNSFL
DPWVFLNTSYFNMFL

SEQ ID NO: 251156 - protein, 15 aa, Artificial Sequence
  Description of Artificial Sequence: Synthetic peptide
  Seed: DPWVLLNASWFNSFL
DPWVFLNTSYFNSFL

SEQ ID NO: 251157 - protein, 15 aa, Artificial Sequence
  Description of Artificial Sequence: Synthetic peptide
  Seed: DPWVLLNASWFNSFL
DPWVFLNTSYFNTFL

SEQ ID NO: 251158 - protein, 15 aa, Artificial Sequence
  Description of Artificial Sequence: Synthetic peptide
  Seed: DPWVLLNASWFNSFL
DPWVFLNTSYFNVFL

SEQ ID NO: 251159 - protein, 15 aa, Artificial Sequence
  Description of Artificial Sequence: Synthetic peptide
  Seed: DPWVLLNASWFNSFL
DPWVILNHSFFNIFL

SEQ ID NO: 251160 - protein, 15 aa, Artificial Sequence
  Description of Artificial Sequence: Synthetic peptide
  Seed: DPWVLLNASWFNSFL
DPWVILNHSFFNLFL

SEQ ID NO: 251161 - protein, 15 aa, Artificial Sequence
  Description of Artificial Sequence: Synthetic peptide
  Seed: DPWVLLNASWFNSFL
DPWVILNHSFFNVFL

SEQ ID NO: 251162 - protein, 15 aa, Artificial Sequence
  Description of Artificial Sequence: Synthetic peptide
  Seed: DPWVLLNASWFNSFL
DPWVLLNHSFFNAFL

SEQ ID NO: 251163 - protein, 15 aa, Artificial Sequence
  Description of Artificial Sequence: Synthetic peptide
  Seed: DPWVLLNASWFNSFL
DPWVLLNHSFFNIFL

SEQ ID NO: 251164 - protein, 15 aa, Artificial Sequence
  Description of Artificial Sequence: Synthetic peptide
  Seed: DPWVLLNASWFNSFL
DPWVLLNHSFFNLFL

SEQ ID NO: 251165 - protein, 15 aa, Artificial Sequence
  Description of Artificial Sequence: Synthetic peptide
  Seed: DPWVLLNASWFNSFL
DPWVLLNHSFFNSFL

SEQ ID NO: 251166 - protein, 15 aa, Artificial Sequence
  Description of Artificial Sequence: Synthetic peptide
  Seed: DPWVLLNASWFNSFL
DPWVLLNHSFFNVFL

SEQ ID NO: 251167 - protein, 15 aa, Artificial Sequence
  Description of Artificial Sequence: Synthetic peptide
  Seed: DPWVLLNASWFNSFL
DPWVLLNSSFFNVFL

SEQ ID NO: 251168 - protein, 15 aa, Artificial Sequence
  Description of Artificial Sequence: Synthetic peptide
  Seed: DPWVLLNASWFNSFL
DPWVMLNHSFFNVFL

SEQ ID NO: 251169 - protein, 15 aa, Artificial Sequence
  Description of Artificial Sequence: Synthetic peptide
  Seed: DPWVLLNASWFNSFL
DPWVVLNHSFFNLFL

SEQ ID NO: 251170 - protein, 15 aa, Artificial Sequence
  Description of Artificial Sequence: Synthetic peptide
  Seed: DPWVLLNASWFNSFL
DPWVVLNHSFFNVFL

SEQ ID NO: 251171 - protein, 15 aa, Artificial Sequence
  Description of Artificial Sequence: Synthetic peptide
  Seed: DPWVLLNASWFNSFL
DPWVWLNHSFFNIFL

SEQ ID NO: 251172 - protein, 15 aa, Artificial Sequence
  Description of Artificial Sequence: Synthetic peptide
  Seed: DPWVLLNASWFNSFL
DPWVWLNHSFFNLFL

SEQ ID NO: 251173 - protein, 15 aa, Artificial Sequence
  Description of Artificial Sequence: Synthetic peptide
  Seed: DPWVLLNASWFNSFL
DPWVWLNHSFFNMFL

SEQ ID NO: 251174 - protein, 15 aa, Artificial Sequence
  Description of Artificial Sequence: Synthetic peptide
  Seed: DPWVLLNASWFNSFL
DPWVWLNHSFFNVFL

SEQ ID NO: 251175 - protein, 15 aa, Artificial Sequence
  Description of Artificial Sequence: Synthetic peptide
  Seed: DPWVLLNASWFNSFL
DPWVYLNASFFNAFL

SEQ ID NO: 251176 - protein, 15 aa, Artificial Sequence
  Description of Artificial Sequence: Synthetic peptide
  Seed: DPWVLLNASWFNSFL
DPWVYLNASFFNEFL

SEQ ID NO: 251177 - protein, 15 aa, Artificial Sequence
  Description of Artificial Sequence: Synthetic peptide
  Seed: DPWVLLNASWFNSFL
DPWVYLNASFFNIFL

SEQ ID NO: 251178 - protein, 15 aa, Artificial Sequence
  Description of Artificial Sequence: Synthetic peptide
  Seed: DPWVLLNASWFNSFL
DPWVYLNASFFNLFL

SEQ ID NO: 251179 - protein, 15 aa, Artificial Sequence
  Description of Artificial Sequence: Synthetic peptide
  Seed: DPWVLLNASWFNSFL
DPWVYLNASFFNMFL

SEQ ID NO: 251180 - protein, 15 aa, Artificial Sequence
  Description of Artificial Sequence: Synthetic peptide
  Seed: DPWVLLNASWFNSFL
DPWVYLNASFFNSFL

SEQ ID NO: 251181 - protein, 15 aa, Artificial Sequence
  Description of Artificial Sequence: Synthetic peptide
  Seed: DPWVLLNASWFNSFL
DPWVYLNASFFNTFL

SEQ ID NO: 251182 - protein, 15 aa, Artificial Sequence
  Description of Artificial Sequence: Synthetic peptide
  Seed: DPWVLLNASWFNSFL
DPWVYLNASFFNVFL

SEQ ID NO: 251183 - protein, 15 aa, Artificial Sequence
  Description of Artificial Sequence: Synthetic peptide
  Seed: DPWVLLNASWFNSFL
DPWVYLNASYFNAFL

SEQ ID NO: 251184 - protein, 15 aa, Artificial Sequence
  Description of Artificial Sequence: Synthetic peptide
  Seed: DPWVLLNASWFNSFL
DPWVYLNASYFNLFL

SEQ ID NO: 251185 - protein, 15 aa, Artificial Sequence
  Description of Artificial Sequence: Synthetic peptide
  Seed: DPWVLLNASWFNSFL
DPWVYLNASYFNVFL

SEQ ID NO: 251186 - protein, 15 aa, Artificial Sequence
  Description of Artificial Sequence: Synthetic peptide
  Seed: DPWVLLNASWFNSFL
DPWVYLNESFFNIFL

SEQ ID NO: 251187 - protein, 15 aa, Artificial Sequence
  Description of Artificial Sequence: Synthetic peptide
  Seed: DPWVLLNASWFNSFL
DPWVYLNESFFNVFL

SEQ ID NO: 251188 - protein, 15 aa, Artificial Sequence
  Description of Artificial Sequence: Synthetic peptide
  Seed: DPWVLLNASWFNSFL
DPWVYLNHSFFNAFL

SEQ ID NO: 251189 - protein, 15 aa, Artificial Sequence
  Description of Artificial Sequence: Synthetic peptide
  Seed: DPWVLLNASWFNSFL
DPWVYLNHSFFNEFL

SEQ ID NO: 251190 - protein, 15 aa, Artificial Sequence
  Description of Artificial Sequence: Synthetic peptide
  Seed: DPWVLLNASWFNSFL
DPWVYLNHSFFNIFL

SEQ ID NO: 251191 - protein, 15 aa, Artificial Sequence
  Description of Artificial Sequence: Synthetic peptide
  Seed: DPWVLLNASWFNSFL
DPWVYLNHSFFNKFL

SEQ ID NO: 251192 - protein, 15 aa, Artificial Sequence
  Description of Artificial Sequence: Synthetic peptide
  Seed: DPWVLLNASWFNSFL
DPWVYLNHSFFNLFL

SEQ ID NO: 251193 - protein, 15 aa, Artificial Sequence
  Description of Artificial Sequence: Synthetic peptide
  Seed: DPWVLLNASWFNSFL
DPWVYLNHSFFNMFL

SEQ ID NO: 251194 - protein, 15 aa, Artificial Sequence
  Description of Artificial Sequence: Synthetic peptide
  Seed: DPWVLLNASWFNSFL
DPWVYLNHSFFNNFL

SEQ ID NO: 251195 - protein, 15 aa, Artificial Sequence
  Description of Artificial Sequence: Synthetic peptide
  Seed: DPWVLLNASWFNSFL
DPWVYLNHSFFNPFL

SEQ ID NO: 251196 - protein, 15 aa, Artificial Sequence
  Description of Artificial Sequence: Synthetic peptide
  Seed: DPWVLLNASWFNSFL
DPWVYLNHSFFNRFL

SEQ ID NO: 251197 - protein, 15 aa, Artificial Sequence
  Description of Artificial Sequence: Synthetic peptide
  Seed: DPWVLLNASWFNSFL
DPWVYLNHSFFNSFL

SEQ ID NO: 251198 - protein, 15 aa, Artificial Sequence
  Description of Artificial Sequence: Synthetic peptide
  Seed: DPWVLLNASWFNSFL
DPWVYLNHSFFNTFL

SEQ ID NO: 251199 - protein, 15 aa, Artificial Sequence
  Description of Artificial Sequence: Synthetic peptide
  Seed: DPWVLLNASWFNSFL
DPWVYLNHSFFNVFL

SEQ ID NO: 251200 - protein, 15 aa, Artificial Sequence
  Description of Artificial Sequence: Synthetic peptide
  Seed: DPWVLLNASWFNSFL
DPWVYLNHSFFNYFL

SEQ ID NO: 251201 - protein, 15 aa, Artificial Sequence
  Description of Artificial Sequence: Synthetic peptide
  Seed: DPWVLLNASWFNSFL
DPWVYLNHSLFNAFL

SEQ ID NO: 251202 - protein, 15 aa, Artificial Sequence
  Description of Artificial Sequence: Synthetic peptide
  Seed: DPWVLLNASWFNSFL
DPWVYLNHSLFNLFL

SEQ ID NO: 251203 - protein, 15 aa, Artificial Sequence
  Description of Artificial Sequence: Synthetic peptide
  Seed: DPWVLLNASWFNSFL
DPWVYLNHSLFNMFL

SEQ ID NO: 251204 - protein, 15 aa, Artificial Sequence
  Description of Artificial Sequence: Synthetic peptide
  Seed: DPWVLLNASWFNSFL
DPWVYLNHSLFNSFL

SEQ ID NO: 251205 - protein, 15 aa, Artificial Sequence
  Description of Artificial Sequence: Synthetic peptide
  Seed: DPWVLLNASWFNSFL
DPWVYLNHSLFNTFL

SEQ ID NO: 251206 - protein, 15 aa, Artificial Sequence
  Description of Artificial Sequence: Synthetic peptide
  Seed: DPWVLLNASWFNSFL
DPWVYLNHSLFNVFL

SEQ ID NO: 251207 - protein, 15 aa, Artificial Sequence
  Description of Artificial Sequence: Synthetic peptide
  Seed: DPWVLLNASWFNSFL
DPWVYLNHSMFNMFL

SEQ ID NO: 251208 - protein, 15 aa, Artificial Sequence
  Description of Artificial Sequence: Synthetic peptide
  Seed: DPWVLLNASWFNSFL
DPWVYLNHSMFNSFL

SEQ ID NO: 251209 - protein, 15 aa, Artificial Sequence
  Description of Artificial Sequence: Synthetic peptide
  Seed: DPWVLLNASWFNSFL
DPWVYLNHSMFNVFL

SEQ ID NO: 251210 - protein, 15 aa, Artificial Sequence
  Description of Artificial Sequence: Synthetic peptide
  Seed: DPWVLLNASWFNSFL
DPWVYLNHSYFNIFL

SEQ ID NO: 251211 - protein, 15 aa, Artificial Sequence
  Description of Artificial Sequence: Synthetic peptide
  Seed: DPWVLLNASWFNSFL
DPWVYLNHSYFNLFL

SEQ ID NO: 251212 - protein, 15 aa, Artificial Sequence
  Description of Artificial Sequence: Synthetic peptide
  Seed: DPWVLLNASWFNSFL
DPWVYLNHSYFNMFL

SEQ ID NO: 251213 - protein, 15 aa, Artificial Sequence
  Description of Artificial Sequence: Synthetic peptide
  Seed: DPWVLLNASWFNSFL
DPWVYLNHSYFNVFL

SEQ ID NO: 251214 - protein, 15 aa, Artificial Sequence
  Description of Artificial Sequence: Synthetic peptide
  Seed: DPWVLLNASWFNSFL
DPWVYLNKSFFNLFL

SEQ ID NO: 251215 - protein, 15 aa, Artificial Sequence
  Description of Artificial Sequence: Synthetic peptide
  Seed: DPWVLLNASWFNSFL
DPWVYLNKSFFNVFL

SEQ ID NO: 251216 - protein, 15 aa, Artificial Sequence
  Description of Artificial Sequence: Synthetic peptide
  Seed: DPWVLLNASWFNSFL
DPWVYLNNSFFNIFL

SEQ ID NO: 251217 - protein, 15 aa, Artificial Sequence
  Description of Artificial Sequence: Synthetic peptide
  Seed: DPWVLLNASWFNSFL
DPWVYLNNSFFNLFL

SEQ ID NO: 251218 - protein, 15 aa, Artificial Sequence
  Description of Artificial Sequence: Synthetic peptide
  Seed: DPWVLLNASWFNSFL
DPWVYLNNSFFNVFL

SEQ ID NO: 251219 - protein, 15 aa, Artificial Sequence
  Description of Artificial Sequence: Synthetic peptide
  Seed: DPWVLLNASWFNSFL
DPWVYLNSSFFNAFL

SEQ ID NO: 251220 - protein, 15 aa, Artificial Sequence
  Description of Artificial Sequence: Synthetic peptide
  Seed: DPWVLLNASWFNSFL
DPWVYLNSSFFNEFL

SEQ ID NO: 251221 - protein, 15 aa, Artificial Sequence
  Description of Artificial Sequence: Synthetic peptide
  Seed: DPWVLLNASWFNSFL
DPWVYLNSSFFNIFL

SEQ ID NO: 251222 - protein, 15 aa, Artificial Sequence
  Description of Artificial Sequence: Synthetic peptide
  Seed: DPWVLLNASWFNSFL
DPWVYLNSSFFNKFL

SEQ ID NO: 251223 - protein, 15 aa, Artificial Sequence
  Description of Artificial Sequence: Synthetic peptide
  Seed: DPWVLLNASWFNSFL
DPWVYLNSSFFNLFL

SEQ ID NO: 251224 - protein, 15 aa, Artificial Sequence
  Description of Artificial Sequence: Synthetic peptide
  Seed: DPWVLLNASWFNSFL
DPWVYLNSSFFNMFL

SEQ ID NO: 251225 - protein, 15 aa, Artificial Sequence
  Description of Artificial Sequence: Synthetic peptide
  Seed: DPWVLLNASWFNSFL
DPWVYLNSSFFNNFL

SEQ ID NO: 251226 - protein, 15 aa, Artificial Sequence
  Description of Artificial Sequence: Synthetic peptide
  Seed: DPWVLLNASWFNSFL
DPWVYLNSSFFNPFL

SEQ ID NO: 251227 - protein, 15 aa, Artificial Sequence
  Description of Artificial Sequence: Synthetic peptide
  Seed: DPWVLLNASWFNSFL
DPWVYLNSSFFNRFL

SEQ ID NO: 251228 - protein, 15 aa, Artificial Sequence
  Description of Artificial Sequence: Synthetic peptide
  Seed: DPWVLLNASWFNSFL
DPWVYLNSSFFNSFL

SEQ ID NO: 251229 - protein, 15 aa, Artificial Sequence
  Description of Artificial Sequence: Synthetic peptide
  Seed: DPWVLLNASWFNSFL
DPWVYLNSSFFNTFL

SEQ ID NO: 251230 - protein, 15 aa, Artificial Sequence
  Description of Artificial Sequence: Synthetic peptide
  Seed: DPWVLLNASWFNSFL
DPWVYLNSSFFNVFL

SEQ ID NO: 251231 - protein, 15 aa, Artificial Sequence
  Description of Artificial Sequence: Synthetic peptide
  Seed: DPWVLLNASWFNSFL
DPWVYLNSSYFNAFL

SEQ ID NO: 251232 - protein, 15 aa, Artificial Sequence
  Description of Artificial Sequence: Synthetic peptide
  Seed: DPWVLLNASWFNSFL
DPWVYLNSSYFNIFL

SEQ ID NO: 251233 - protein, 15 aa, Artificial Sequence
  Description of Artificial Sequence: Synthetic peptide
  Seed: DPWVLLNASWFNSFL
DPWVYLNSSYFNLFL

SEQ ID NO: 251234 - protein, 15 aa, Artificial Sequence
  Description of Artificial Sequence: Synthetic peptide
  Seed: DPWVLLNASWFNSFL
DPWVYLNSSYFNMFL

SEQ ID NO: 251235 - protein, 15 aa, Artificial Sequence
  Description of Artificial Sequence: Synthetic peptide
  Seed: DPWVLLNASWFNSFL
DPWVYLNSSYFNVFL

SEQ ID NO: 251236 - protein, 15 aa, Artificial Sequence
  Description of Artificial Sequence: Synthetic peptide
  Seed: DPWVLLNASWFNSFL
DPWVYLNTSFFNAFL

SEQ ID NO: 251237 - protein, 15 aa, Artificial Sequence
  Description of Artificial Sequence: Synthetic peptide
  Seed: DPWVLLNASWFNSFL
DPWVYLNTSFFNIFL

SEQ ID NO: 251238 - protein, 15 aa, Artificial Sequence
  Description of Artificial Sequence: Synthetic peptide
  Seed: DPWVLLNASWFNSFL
DPWVYLNTSFFNKFL

SEQ ID NO: 251239 - protein, 15 aa, Artificial Sequence
  Description of Artificial Sequence: Synthetic peptide
  Seed: DPWVLLNASWFNSFL
DPWVYLNTSFFNLFL

SEQ ID NO: 251240 - protein, 15 aa, Artificial Sequence
  Description of Artificial Sequence: Synthetic peptide
  Seed: DPWVLLNASWFNSFL
DPWVYLNTSFFNMFL

SEQ ID NO: 251241 - protein, 15 aa, Artificial Sequence
  Description of Artificial Sequence: Synthetic peptide
  Seed: DPWVLLNASWFNSFL
DPWVYLNTSFFNNFL

SEQ ID NO: 251242 - protein, 15 aa, Artificial Sequence
  Description of Artificial Sequence: Synthetic peptide
  Seed: DPWVLLNASWFNSFL
DPWVYLNTSFFNPFL

SEQ ID NO: 251243 - protein, 15 aa, Artificial Sequence
  Description of Artificial Sequence: Synthetic peptide
  Seed: DPWVLLNASWFNSFL
DPWVYLNTSFFNRFL

SEQ ID NO: 251244 - protein, 15 aa, Artificial Sequence
  Description of Artificial Sequence: Synthetic peptide
  Seed: DPWVLLNASWFNSFL
DPWVYLNTSFFNSFL

SEQ ID NO: 251245 - protein, 15 aa, Artificial Sequence
  Description of Artificial Sequence: Synthetic peptide
  Seed: DPWVLLNASWFNSFL
DPWVYLNTSFFNTFL

SEQ ID NO: 251246 - protein, 15 aa, Artificial Sequence
  Description of Artificial Sequence: Synthetic peptide
  Seed: DPWVLLNASWFNSFL
DPWVYLNTSFFNVFL

SEQ ID NO: 251247 - protein, 15 aa, Artificial Sequence
  Description of Artificial Sequence: Synthetic peptide
  Seed: DPWVLLNASWFNSFL
DPWVYLNTSYFNLFL

SEQ ID NO: 251248 - protein, 15 aa, Artificial Sequence
  Description of Artificial Sequence: Synthetic peptide
  Seed: DPWVLLNASWFNSFL
DPWVYLNTSYFNVFL

SEQ ID NO: 251249 - protein, 15 aa, Artificial Sequence
  Description of Artificial Sequence: Synthetic peptide
  Seed: DPWVLLNASWFNSFL
DPWVYLNWSFFNAFL

SEQ ID NO: 251250 - protein, 15 aa, Artificial Sequence
  Description of Artificial Sequence: Synthetic peptide
  Seed: DPWVLLNASWFNSFL
DPWVLANASWANSFL

SEQ ID NO: 251251 - protein, 15 aa, Artificial Sequence
  Description of Artificial Sequence: Synthetic peptide
  Seed: DPWVLLNASWFNSFL
DPWVLANASWINSFL

SEQ ID NO: 251252 - protein, 15 aa, Artificial Sequence
  Description of Artificial Sequence: Synthetic peptide
  Seed: DPWVLLNASWFNSFL
DPWVLANASWLNSFL

SEQ ID NO: 251253 - protein, 15 aa, Artificial Sequence
  Description of Artificial Sequence: Synthetic peptide
  Seed: DPWVLLNASWFNSFL
DPWVLANASWMNSFL

SEQ ID NO: 251254 - protein, 15 aa, Artificial Sequence
  Description of Artificial Sequence: Synthetic peptide
  Seed: DPWVLLNASWFNSFL
DPWVLANASWSNSFL

SEQ ID NO: 251255 - protein, 15 aa, Artificial Sequence
  Description of Artificial Sequence: Synthetic peptide
  Seed: DPWVLLNASWFNSFL
DPWVLANASWTNSFL

SEQ ID NO: 251256 - protein, 15 aa, Artificial Sequence
  Description of Artificial Sequence: Synthetic peptide
  Seed: DPWVLLNASWFNSFL
DPWVLANASWVNSFL

SEQ ID NO: 251257 - protein, 15 aa, Artificial Sequence
  Description of Artificial Sequence: Synthetic peptide
  Seed: DPWVLLNASWFNSFL
DPWVLFNAAWFNSIL

SEQ ID NO: 251258 - protein, 15 aa, Artificial Sequence
  Description of Artificial Sequence: Synthetic peptide
  Seed: DPWVLLNASWFNSFL
DPWVLFNAAWFNSLL

SEQ ID NO: 251259 - protein, 15 aa, Artificial Sequence
  Description of Artificial Sequence: Synthetic peptide
  Seed: DPWVLLNASWFNSFL
DPWVLFNAAWFNSML

SEQ ID NO: 251260 - protein, 15 aa, Artificial Sequence
  Description of Artificial Sequence: Synthetic peptide
  Seed: DPWVLLNASWFNSFL
DPWVLFNAAWFNSVL

SEQ ID NO: 251261 - protein, 15 aa, Artificial Sequence
  Description of Artificial Sequence: Synthetic peptide
  Seed: DPWVLLNASWFNSFL
DPWVLFNAAWYNSIL

SEQ ID NO: 251262 - protein, 15 aa, Artificial Sequence
  Description of Artificial Sequence: Synthetic peptide
  Seed: DPWVLLNASWFNSFL
DPWVLFNAAWYNSLL

SEQ ID NO: 251263 - protein, 15 aa, Artificial Sequence
  Description of Artificial Sequence: Synthetic peptide
  Seed: DPWVLLNASWFNSFL
DPWVLFNAAWYNSVL

SEQ ID NO: 251264 - protein, 15 aa, Artificial Sequence
  Description of Artificial Sequence: Synthetic peptide
  Seed: DPWVLLNASWFNSFL
DPWVLFNADWFNSIL

SEQ ID NO: 251265 - protein, 15 aa, Artificial Sequence
  Description of Artificial Sequence: Synthetic peptide
  Seed: DPWVLLNASWFNSFL
DPWVLFNADWFNSLL

SEQ ID NO: 251266 - protein, 15 aa, Artificial Sequence
  Description of Artificial Sequence: Synthetic peptide
  Seed: DPWVLLNASWFNSFL
DPWVLFNADWFNSVL

SEQ ID NO: 251267 - protein, 15 aa, Artificial Sequence
  Description of Artificial Sequence: Synthetic peptide
  Seed: DPWVLLNASWFNSFL
DPWVLFNAEWFNSAL

SEQ ID NO: 251268 - protein, 15 aa, Artificial Sequence
  Description of Artificial Sequence: Synthetic peptide
  Seed: DPWVLLNASWFNSFL
DPWVLFNAEWFNSEL

SEQ ID NO: 251269 - protein, 15 aa, Artificial Sequence
  Description of Artificial Sequence: Synthetic peptide
  Seed: DPWVLLNASWFNSFL
DPWVLFNAEWFNSFL

SEQ ID NO: 251270 - protein, 15 aa, Artificial Sequence
  Description of Artificial Sequence: Synthetic peptide
  Seed: DPWVLLNASWFNSFL
DPWVLFNAEWFNSIL

SEQ ID NO: 251271 - protein, 15 aa, Artificial Sequence
  Description of Artificial Sequence: Synthetic peptide
  Seed: DPWVLLNASWFNSFL
DPWVLFNAEWFNSML

SEQ ID NO: 251272 - protein, 15 aa, Artificial Sequence
  Description of Artificial Sequence: Synthetic peptide
  Seed: DPWVLLNASWFNSFL
DPWVLFNAEWFNSNL

SEQ ID NO: 251273 - protein, 15 aa, Artificial Sequence
  Description of Artificial Sequence: Synthetic peptide
  Seed: DPWVLLNASWFNSFL
DPWVLFNAEWFNSSL

SEQ ID NO: 251274 - protein, 15 aa, Artificial Sequence
  Description of Artificial Sequence: Synthetic peptide
  Seed: DPWVLLNASWFNSFL
DPWVLFNAEWFNSTL

SEQ ID NO: 251275 - protein, 15 aa, Artificial Sequence
  Description of Artificial Sequence: Synthetic peptide
  Seed: DPWVLLNASWFNSFL
DPWVLFNAEWFNSVL

SEQ ID NO: 251276 - protein, 15 aa, Artificial Sequence
  Description of Artificial Sequence: Synthetic peptide
  Seed: DPWVLLNASWFNSFL
DPWVLFNAEWFNSYL

SEQ ID NO: 251277 - protein, 15 aa, Artificial Sequence
  Description of Artificial Sequence: Synthetic peptide
  Seed: DPWVLLNASWFNSFL
DPWVLFNAEWLNSFL

SEQ ID NO: 251278 - protein, 15 aa, Artificial Sequence
  Description of Artificial Sequence: Synthetic peptide
  Seed: DPWVLLNASWFNSFL
DPWVLFNAEWLNSIL

SEQ ID NO: 251279 - protein, 15 aa, Artificial Sequence
  Description of Artificial Sequence: Synthetic peptide
  Seed: DPWVLLNASWFNSFL
DPWVLFNAEWLNSLL

SEQ ID NO: 251280 - protein, 15 aa, Artificial Sequence
  Description of Artificial Sequence: Synthetic peptide
  Seed: DPWVLLNASWFNSFL
DPWVLFNAEWLNSVL

SEQ ID NO: 251281 - protein, 15 aa, Artificial Sequence
  Description of Artificial Sequence: Synthetic peptide
  Seed: DPWVLLNASWFNSFL
DPWVLFNAEWYNSIL

SEQ ID NO: 251282 - protein, 15 aa, Artificial Sequence
  Description of Artificial Sequence: Synthetic peptide
  Seed: DPWVLLNASWFNSFL
DPWVLFNAEWYNSLL

SEQ ID NO: 251283 - protein, 15 aa, Artificial Sequence
  Description of Artificial Sequence: Synthetic peptide
  Seed: DPWVLLNASWFNSFL
DPWVLFNAEWYNSVL

SEQ ID NO: 251284 - protein, 15 aa, Artificial Sequence
  Description of Artificial Sequence: Synthetic peptide
  Seed: DPWVLLNASWFNSFL
DPWVLFNAFWDNSIL

SEQ ID NO: 251285 - protein, 15 aa, Artificial Sequence
  Description of Artificial Sequence: Synthetic peptide
  Seed: DPWVLLNASWFNSFL
DPWVLFNAFWYNSVL

SEQ ID NO: 251286 - protein, 15 aa, Artificial Sequence
  Description of Artificial Sequence: Synthetic peptide
  Seed: DPWVLLNASWFNSFL
DPWVLFNAHWFNSAL

SEQ ID NO: 251287 - protein, 15 aa, Artificial Sequence
  Description of Artificial Sequence: Synthetic peptide
  Seed: DPWVLLNASWFNSFL
DPWVLFNAHWFNSEL

SEQ ID NO: 251288 - protein, 15 aa, Artificial Sequence
  Description of Artificial Sequence: Synthetic peptide
  Seed: DPWVLLNASWFNSFL
DPWVLFNAHWFNSFL

SEQ ID NO: 251289 - protein, 15 aa, Artificial Sequence
  Description of Artificial Sequence: Synthetic peptide
  Seed: DPWVLLNASWFNSFL
DPWVLFNAHWFNSIL

SEQ ID NO: 251290 - protein, 15 aa, Artificial Sequence
  Description of Artificial Sequence: Synthetic peptide
  Seed: DPWVLLNASWFNSFL
DPWVLFNAHWFNSLL

SEQ ID NO: 251291 - protein, 15 aa, Artificial Sequence
  Description of Artificial Sequence: Synthetic peptide
  Seed: DPWVLLNASWFNSFL
DPWVLFNAHWFNSML

SEQ ID NO: 251292 - protein, 15 aa, Artificial Sequence
  Description of Artificial Sequence: Synthetic peptide
  Seed: DPWVLLNASWFNSFL
DPWVLFNAHWFNSNL

SEQ ID NO: 251293 - protein, 15 aa, Artificial Sequence
  Description of Artificial Sequence: Synthetic peptide
  Seed: DPWVLLNASWFNSFL
DPWVLFNAHWFNSSL

SEQ ID NO: 251294 - protein, 15 aa, Artificial Sequence
  Description of Artificial Sequence: Synthetic peptide
  Seed: DPWVLLNASWFNSFL
DPWVLFNAHWFNSTL

SEQ ID NO: 251295 - protein, 15 aa, Artificial Sequence
  Description of Artificial Sequence: Synthetic peptide
  Seed: DPWVLLNASWFNSFL
DPWVLFNAHWFNSVL

SEQ ID NO: 251296 - protein, 15 aa, Artificial Sequence
  Description of Artificial Sequence: Synthetic peptide
  Seed: DPWVLLNASWFNSFL
DPWVLFNAHWFNSYL

SEQ ID NO: 251297 - protein, 15 aa, Artificial Sequence
  Description of Artificial Sequence: Synthetic peptide
  Seed: DPWVLLNASWFNSFL
DPWVLFNAHWINSIL

SEQ ID NO: 251298 - protein, 15 aa, Artificial Sequence
  Description of Artificial Sequence: Synthetic peptide
  Seed: DPWVLLNASWFNSFL
DPWVLFNAHWINSLL

SEQ ID NO: 251299 - protein, 15 aa, Artificial Sequence
  Description of Artificial Sequence: Synthetic peptide
  Seed: DPWVLLNASWFNSFL
DPWVLFNAHWINSVL

SEQ ID NO: 251300 - protein, 15 aa, Artificial Sequence
  Description of Artificial Sequence: Synthetic peptide
  Seed: DPWVLLNASWFNSFL
DPWVLFNAHWLNSIL

SEQ ID NO: 251301 - protein, 15 aa, Artificial Sequence
  Description of Artificial Sequence: Synthetic peptide
  Seed: DPWVLLNASWFNSFL
DPWVLFNAHWLNSLL

SEQ ID NO: 251302 - protein, 15 aa, Artificial Sequence
  Description of Artificial Sequence: Synthetic peptide
  Seed: DPWVLLNASWFNSFL
DPWVLFNAHWLNSML

SEQ ID NO: 251303 - protein, 15 aa, Artificial Sequence
  Description of Artificial Sequence: Synthetic peptide
  Seed: DPWVLLNASWFNSFL
DPWVLFNAHWLNSVL

SEQ ID NO: 251304 - protein, 15 aa, Artificial Sequence
  Description of Artificial Sequence: Synthetic peptide
  Seed: DPWVLLNASWFNSFL
DPWVLFNAHWMNSIL

SEQ ID NO: 251305 - protein, 15 aa, Artificial Sequence
  Description of Artificial Sequence: Synthetic peptide
  Seed: DPWVLLNASWFNSFL
DPWVLFNAHWMNSLL

SEQ ID NO: 251306 - protein, 15 aa, Artificial Sequence
  Description of Artificial Sequence: Synthetic peptide
  Seed: DPWVLLNASWFNSFL
DPWVLFNAHWMNSVL

SEQ ID NO: 251307 - protein, 15 aa, Artificial Sequence
  Description of Artificial Sequence: Synthetic peptide
  Seed: DPWVLLNASWFNSFL
DPWVLFNAHWWNSIL

SEQ ID NO: 251308 - protein, 15 aa, Artificial Sequence
  Description of Artificial Sequence: Synthetic peptide
  Seed: DPWVLLNASWFNSFL
DPWVLFNAHWWNSLL

SEQ ID NO: 251309 - protein, 15 aa, Artificial Sequence
  Description of Artificial Sequence: Synthetic peptide
  Seed: DPWVLLNASWFNSFL
DPWVLFNAHWWNSVL

SEQ ID NO: 251310 - protein, 15 aa, Artificial Sequence
  Description of Artificial Sequence: Synthetic peptide
  Seed: DPWVLLNASWFNSFL
DPWVLFNAHWYNSFL

SEQ ID NO: 251311 - protein, 15 aa, Artificial Sequence
  Description of Artificial Sequence: Synthetic peptide
  Seed: DPWVLLNASWFNSFL
DPWVLFNAHWYNSIL

SEQ ID NO: 251312 - protein, 15 aa, Artificial Sequence
  Description of Artificial Sequence: Synthetic peptide
  Seed: DPWVLLNASWFNSFL
DPWVLFNAHWYNSLL

SEQ ID NO: 251313 - protein, 15 aa, Artificial Sequence
  Description of Artificial Sequence: Synthetic peptide
  Seed: DPWVLLNASWFNSFL
DPWVLFNAHWYNSVL

SEQ ID NO: 251314 - protein, 15 aa, Artificial Sequence
  Description of Artificial Sequence: Synthetic peptide
  Seed: DPWVLLNASWFNSFL
DPWVLFNAIWFNSVL

SEQ ID NO: 251315 - protein, 15 aa, Artificial Sequence
  Description of Artificial Sequence: Synthetic peptide
  Seed: DPWVLLNASWFNSFL
DPWVLFNAIWYNSIL

SEQ ID NO: 251316 - protein, 15 aa, Artificial Sequence
  Description of Artificial Sequence: Synthetic peptide
  Seed: DPWVLLNASWFNSFL
DPWVLFNAIWYNSLL

SEQ ID NO: 251317 - protein, 15 aa, Artificial Sequence
  Description of Artificial Sequence: Synthetic peptide
  Seed: DPWVLLNASWFNSFL
DPWVLFNAIWYNSVL

SEQ ID NO: 251318 - protein, 15 aa, Artificial Sequence
  Description of Artificial Sequence: Synthetic peptide
  Seed: DPWVLLNASWFNSFL
DPWVLFNAKWFNSFL

SEQ ID NO: 251319 - protein, 15 aa, Artificial Sequence
  Description of Artificial Sequence: Synthetic peptide
  Seed: DPWVLLNASWFNSFL
DPWVLFNAKWFNSIL

SEQ ID NO: 251320 - protein, 15 aa, Artificial Sequence
  Description of Artificial Sequence: Synthetic peptide
  Seed: DPWVLLNASWFNSFL
DPWVLFNAKWFNSLL

SEQ ID NO: 251321 - protein, 15 aa, Artificial Sequence
  Description of Artificial Sequence: Synthetic peptide
  Seed: DPWVLLNASWFNSFL
DPWVLFNAKWFNSML

SEQ ID NO: 251322 - protein, 15 aa, Artificial Sequence
  Description of Artificial Sequence: Synthetic peptide
  Seed: DPWVLLNASWFNSFL
DPWVLFNAKWFNSNL

SEQ ID NO: 251323 - protein, 15 aa, Artificial Sequence
  Description of Artificial Sequence: Synthetic peptide
  Seed: DPWVLLNASWFNSFL
DPWVLFNAKWFNSVL

SEQ ID NO: 251324 - protein, 15 aa, Artificial Sequence
  Description of Artificial Sequence: Synthetic peptide
  Seed: DPWVLLNASWFNSFL
DPWVLFNAKWLNSIL

SEQ ID NO: 251325 - protein, 15 aa, Artificial Sequence
  Description of Artificial Sequence: Synthetic peptide
  Seed: DPWVLLNASWFNSFL
DPWVLFNAKWLNSLL

SEQ ID NO: 251326 - protein, 15 aa, Artificial Sequence
  Description of Artificial Sequence: Synthetic peptide
  Seed: DPWVLLNASWFNSFL
DPWVLFNAKWLNSVL

SEQ ID NO: 251327 - protein, 15 aa, Artificial Sequence
  Description of Artificial Sequence: Synthetic peptide
  Seed: DPWVLLNASWFNSFL
DPWVLFNAKWYNSLL

SEQ ID NO: 251328 - protein, 15 aa, Artificial Sequence
  Description of Artificial Sequence: Synthetic peptide
  Seed: DPWVLLNASWFNSFL
DPWVLFNALWYNSIL

SEQ ID NO: 251329 - protein, 15 aa, Artificial Sequence
  Description of Artificial Sequence: Synthetic peptide
  Seed: DPWVLLNASWFNSFL
DPWVLFNALWYNSLL

SEQ ID NO: 251330 - protein, 15 aa, Artificial Sequence
  Description of Artificial Sequence: Synthetic peptide
  Seed: DPWVLLNASWFNSFL
DPWVLFNALWYNSVL

SEQ ID NO: 251331 - protein, 15 aa, Artificial Sequence
  Description of Artificial Sequence: Synthetic peptide
  Seed: DPWVLLNASWFNSFL
DPWVLFNANWFNSFL

SEQ ID NO: 251332 - protein, 15 aa, Artificial Sequence
  Description of Artificial Sequence: Synthetic peptide
  Seed: DPWVLLNASWFNSFL
DPWVLFNANWFNSIL

SEQ ID NO: 251333 - protein, 15 aa, Artificial Sequence
  Description of Artificial Sequence: Synthetic peptide
  Seed: DPWVLLNASWFNSFL
DPWVLFNANWFNSLL

SEQ ID NO: 251334 - protein, 15 aa, Artificial Sequence
  Description of Artificial Sequence: Synthetic peptide
  Seed: DPWVLLNASWFNSFL
DPWVLFNANWFNSML

SEQ ID NO: 251335 - protein, 15 aa, Artificial Sequence
  Description of Artificial Sequence: Synthetic peptide
  Seed: DPWVLLNASWFNSFL
DPWVLFNANWFNSVL

SEQ ID NO: 251336 - protein, 15 aa, Artificial Sequence
  Description of Artificial Sequence: Synthetic peptide
  Seed: DPWVLLNASWFNSFL
DPWVLFNANWFNSYL

SEQ ID NO: 251337 - protein, 15 aa, Artificial Sequence
  Description of Artificial Sequence: Synthetic peptide
  Seed: DPWVLLNASWFNSFL
DPWVLFNAQWFNSFL

SEQ ID NO: 251338 - protein, 15 aa, Artificial Sequence
  Description of Artificial Sequence: Synthetic peptide
  Seed: DPWVLLNASWFNSFL
DPWVLFNAQWFNSIL

SEQ ID NO: 251339 - protein, 15 aa, Artificial Sequence
  Description of Artificial Sequence: Synthetic peptide
  Seed: DPWVLLNASWFNSFL
DPWVLFNAQWFNSLL

SEQ ID NO: 251340 - protein, 15 aa, Artificial Sequence
  Description of Artificial Sequence: Synthetic peptide
  Seed: DPWVLLNASWFNSFL
DPWVLFNAQWFNSML

SEQ ID NO: 251341 - protein, 15 aa, Artificial Sequence
  Description of Artificial Sequence: Synthetic peptide
  Seed: DPWVLLNASWFNSFL
DPWVLFNAQWFNSVL

SEQ ID NO: 251342 - protein, 15 aa, Artificial Sequence
  Description of Artificial Sequence: Synthetic peptide
  Seed: DPWVLLNASWFNSFL
DPWVLFNAQWFNSYL

SEQ ID NO: 251343 - protein, 15 aa, Artificial Sequence
  Description of Artificial Sequence: Synthetic peptide
  Seed: DPWVLLNASWFNSFL
DPWVLFNAQWYNSIL

SEQ ID NO: 251344 - protein, 15 aa, Artificial Sequence
  Description of Artificial Sequence: Synthetic peptide
  Seed: DPWVLLNASWFNSFL
DPWVLFNAQWYNSLL

SEQ ID NO: 251345 - protein, 15 aa, Artificial Sequence
  Description of Artificial Sequence: Synthetic peptide
  Seed: DPWVLLNASWFNSFL
DPWVLFNAQWYNSVL

SEQ ID NO: 251346 - protein, 15 aa, Artificial Sequence
  Description of Artificial Sequence: Synthetic peptide
  Seed: DPWVLLNASWFNSFL
DPWVLFNARWFNSIL

SEQ ID NO: 251347 - protein, 15 aa, Artificial Sequence
  Description of Artificial Sequence: Synthetic peptide
  Seed: DPWVLLNASWFNSFL
DPWVLFNARWFNSLL

SEQ ID NO: 251348 - protein, 15 aa, Artificial Sequence
  Description of Artificial Sequence: Synthetic peptide
  Seed: DPWVLLNASWFNSFL
DPWVLFNARWFNSML

SEQ ID NO: 251349 - protein, 15 aa, Artificial Sequence
  Description of Artificial Sequence: Synthetic peptide
  Seed: DPWVLLNASWFNSFL
DPWVLFNARWFNSVL

SEQ ID NO: 251350 - protein, 15 aa, Artificial Sequence
  Description of Artificial Sequence: Synthetic peptide
  Seed: DPWVLLNASWFNSFL
DPWVLFNASWFNSAL

SEQ ID NO: 251351 - protein, 15 aa, Artificial Sequence
  Description of Artificial Sequence: Synthetic peptide
  Seed: DPWVLLNASWFNSFL
DPWVLFNASWFNSFL

SEQ ID NO: 251352 - protein, 15 aa, Artificial Sequence
  Description of Artificial Sequence: Synthetic peptide
  Seed: DPWVLLNASWFNSFL
DPWVLFNASWFNSIL

SEQ ID NO: 251353 - protein, 15 aa, Artificial Sequence
  Description of Artificial Sequence: Synthetic peptide
  Seed: DPWVLLNASWFNSFL
DPWVLFNASWFNSLL

SEQ ID NO: 251354 - protein, 15 aa, Artificial Sequence
  Description of Artificial Sequence: Synthetic peptide
  Seed: DPWVLLNASWFNSFL
DPWVLFNASWFNSML

SEQ ID NO: 251355 - protein, 15 aa, Artificial Sequence
  Description of Artificial Sequence: Synthetic peptide
  Seed: DPWVLLNASWFNSFL
DPWVLFNASWFNSNL

SEQ ID NO: 251356 - protein, 15 aa, Artificial Sequence
  Description of Artificial Sequence: Synthetic peptide
  Seed: DPWVLLNASWFNSFL
DPWVLFNASWFNSTL

SEQ ID NO: 251357 - protein, 15 aa, Artificial Sequence
  Description of Artificial Sequence: Synthetic peptide
  Seed: DPWVLLNASWFNSFL
DPWVLFNASWFNSVL

SEQ ID NO: 251358 - protein, 15 aa, Artificial Sequence
  Description of Artificial Sequence: Synthetic peptide
  Seed: DPWVLLNASWFNSFL
DPWVLFNASWFNSYL

SEQ ID NO: 251359 - protein, 15 aa, Artificial Sequence
  Description of Artificial Sequence: Synthetic peptide
  Seed: DPWVLLNASWFNSFL
DPWVLFNASWLNSIL

SEQ ID NO: 251360 - protein, 15 aa, Artificial Sequence
  Description of Artificial Sequence: Synthetic peptide
  Seed: DPWVLLNASWFNSFL
DPWVLFNASWLNSLL

SEQ ID NO: 251361 - protein, 15 aa, Artificial Sequence
  Description of Artificial Sequence: Synthetic peptide
  Seed: DPWVLLNASWFNSFL
DPWVLFNASWLNSVL

SEQ ID NO: 251362 - protein, 15 aa, Artificial Sequence
  Description of Artificial Sequence: Synthetic peptide
  Seed: DPWVLLNASWFNSFL
DPWVLFNASWYNSIL

SEQ ID NO: 251363 - protein, 15 aa, Artificial Sequence
  Description of Artificial Sequence: Synthetic peptide
  Seed: DPWVLLNASWFNSFL
DPWVLFNASWYNSLL

SEQ ID NO: 251364 - protein, 15 aa, Artificial Sequence
  Description of Artificial Sequence: Synthetic peptide
  Seed: DPWVLLNASWFNSFL
DPWVLFNASWYNSVL

SEQ ID NO: 251365 - protein, 15 aa, Artificial Sequence
  Description of Artificial Sequence: Synthetic peptide
  Seed: DPWVLLNASWFNSFL
DPWVLFNATWFNSAL

SEQ ID NO: 251366 - protein, 15 aa, Artificial Sequence
  Description of Artificial Sequence: Synthetic peptide
  Seed: DPWVLLNASWFNSFL
DPWVLFNATWFNSEL

SEQ ID NO: 251367 - protein, 15 aa, Artificial Sequence
  Description of Artificial Sequence: Synthetic peptide
  Seed: DPWVLLNASWFNSFL
DPWVLFNATWFNSFL

SEQ ID NO: 251368 - protein, 15 aa, Artificial Sequence
  Description of Artificial Sequence: Synthetic peptide
  Seed: DPWVLLNASWFNSFL
DPWVLFNATWFNSIL

SEQ ID NO: 251369 - protein, 15 aa, Artificial Sequence
  Description of Artificial Sequence: Synthetic peptide
  Seed: DPWVLLNASWFNSFL
DPWVLFNATWFNSML

SEQ ID NO: 251370 - protein, 15 aa, Artificial Sequence
  Description of Artificial Sequence: Synthetic peptide
  Seed: DPWVLLNASWFNSFL
DPWVLFNATWFNSNL

SEQ ID NO: 251371 - protein, 15 aa, Artificial Sequence
  Description of Artificial Sequence: Synthetic peptide
  Seed: DPWVLLNASWFNSFL
DPWVLFNATWFNSSL

SEQ ID NO: 251372 - protein, 15 aa, Artificial Sequence
  Description of Artificial Sequence: Synthetic peptide
  Seed: DPWVLLNASWFNSFL
DPWVLFNATWFNSTL

SEQ ID NO: 251373 - protein, 15 aa, Artificial Sequence
  Description of Artificial Sequence: Synthetic peptide
  Seed: DPWVLLNASWFNSFL
DPWVLFNATWFNSVL

SEQ ID NO: 251374 - protein, 15 aa, Artificial Sequence
  Description of Artificial Sequence: Synthetic peptide
  Seed: DPWVLLNASWFNSFL
DPWVLFNATWFNSYL

SEQ ID NO: 251375 - protein, 15 aa, Artificial Sequence
  Description of Artificial Sequence: Synthetic peptide
  Seed: DPWVLLNASWFNSFL
DPWVLFNATWLNSIL

SEQ ID NO: 251376 - protein, 15 aa, Artificial Sequence
  Description of Artificial Sequence: Synthetic peptide
  Seed: DPWVLLNASWFNSFL
DPWVLFNATWLNSLL

SEQ ID NO: 251377 - protein, 15 aa, Artificial Sequence
  Description of Artificial Sequence: Synthetic peptide
  Seed: DPWVLLNASWFNSFL
DPWVLFNATWLNSVL

SEQ ID NO: 251378 - protein, 15 aa, Artificial Sequence
  Description of Artificial Sequence: Synthetic peptide
  Seed: DPWVLLNASWFNSFL
DPWVLFNATWYNSIL

SEQ ID NO: 251379 - protein, 15 aa, Artificial Sequence
  Description of Artificial Sequence: Synthetic peptide
  Seed: DPWVLLNASWFNSFL
DPWVLFNATWYNSLL

SEQ ID NO: 251380 - protein, 15 aa, Artificial Sequence
  Description of Artificial Sequence: Synthetic peptide
  Seed: DPWVLLNASWFNSFL
DPWVLFNATWYNSML

SEQ ID NO: 251381 - protein, 15 aa, Artificial Sequence
  Description of Artificial Sequence: Synthetic peptide
  Seed: DPWVLLNASWFNSFL
DPWVLFNATWYNSVL

SEQ ID NO: 251382 - protein, 15 aa, Artificial Sequence
  Description of Artificial Sequence: Synthetic peptide
  Seed: DPWVLLNASWFNSFL
DPWVLFNAVWFNSVL

SEQ ID NO: 251383 - protein, 15 aa, Artificial Sequence
  Description of Artificial Sequence: Synthetic peptide
  Seed: DPWVLLNASWFNSFL
DPWVLFNAVWYNSIL

SEQ ID NO: 251384 - protein, 15 aa, Artificial Sequence
  Description of Artificial Sequence: Synthetic peptide
  Seed: DPWVLLNASWFNSFL
DPWVLFNAVWYNSLL

SEQ ID NO: 251385 - protein, 15 aa, Artificial Sequence
  Description of Artificial Sequence: Synthetic peptide
  Seed: DPWVLLNASWFNSFL
DPWVLFNAVWYNSVL

SEQ ID NO: 251386 - protein, 15 aa, Artificial Sequence
  Description of Artificial Sequence: Synthetic peptide
  Seed: DPWVLLNASWFNSFL
DPWVLINAEWFNSIL

SEQ ID NO: 251387 - protein, 15 aa, Artificial Sequence
  Description of Artificial Sequence: Synthetic peptide
  Seed: DPWVLLNASWFNSFL
DPWVLINAEWFNSLL

SEQ ID NO: 251388 - protein, 15 aa, Artificial Sequence
  Description of Artificial Sequence: Synthetic peptide
  Seed: DPWVLLNASWFNSFL
DPWVLINAEWFNSVL

SEQ ID NO: 251389 - protein, 15 aa, Artificial Sequence
  Description of Artificial Sequence: Synthetic peptide
  Seed: DPWVLLNASWFNSFL
DPWVLINAFWDNSAL

SEQ ID NO: 251390 - protein, 15 aa, Artificial Sequence
  Description of Artificial Sequence: Synthetic peptide
  Seed: DPWVLLNASWFNSFL
DPWVLINAFWDNSIL

SEQ ID NO: 251391 - protein, 15 aa, Artificial Sequence
  Description of Artificial Sequence: Synthetic peptide
  Seed: DPWVLLNASWFNSFL
DPWVLINAFWDNSLL

SEQ ID NO: 251392 - protein, 15 aa, Artificial Sequence
  Description of Artificial Sequence: Synthetic peptide
  Seed: DPWVLLNASWFNSFL
DPWVLINAFWDNSML

SEQ ID NO: 251393 - protein, 15 aa, Artificial Sequence
  Description of Artificial Sequence: Synthetic peptide
  Seed: DPWVLLNASWFNSFL
DPWVLINAHWFNSFL

SEQ ID NO: 251394 - protein, 15 aa, Artificial Sequence
  Description of Artificial Sequence: Synthetic peptide
  Seed: DPWVLLNASWFNSFL
DPWVLINAHWFNSIL

SEQ ID NO: 251395 - protein, 15 aa, Artificial Sequence
  Description of Artificial Sequence: Synthetic peptide
  Seed: DPWVLLNASWFNSFL
DPWVLINAHWFNSLL

SEQ ID NO: 251396 - protein, 15 aa, Artificial Sequence
  Description of Artificial Sequence: Synthetic peptide
  Seed: DPWVLLNASWFNSFL
DPWVLINAHWFNSML

SEQ ID NO: 251397 - protein, 15 aa, Artificial Sequence
  Description of Artificial Sequence: Synthetic peptide
  Seed: DPWVLLNASWFNSFL
DPWVLINAHWFNSVL

SEQ ID NO: 251398 - protein, 15 aa, Artificial Sequence
  Description of Artificial Sequence: Synthetic peptide
  Seed: DPWVLLNASWFNSFL
DPWVLINAMWANSIL

SEQ ID NO: 251399 - protein, 15 aa, Artificial Sequence
  Description of Artificial Sequence: Synthetic peptide
  Seed: DPWVLLNASWFNSFL
DPWVLINAMWANSLL

SEQ ID NO: 251400 - protein, 15 aa, Artificial Sequence
  Description of Artificial Sequence: Synthetic peptide
  Seed: DPWVLLNASWFNSFL
DPWVLINAMWANSML

SEQ ID NO: 251401 - protein, 15 aa, Artificial Sequence
  Description of Artificial Sequence: Synthetic peptide
  Seed: DPWVLLNASWFNSFL
DPWVLINAMWANSVL

SEQ ID NO: 251402 - protein, 15 aa, Artificial Sequence
  Description of Artificial Sequence: Synthetic peptide
  Seed: DPWVLLNASWFNSFL
DPWVLINAMWDNSIL

SEQ ID NO: 251403 - protein, 15 aa, Artificial Sequence
  Description of Artificial Sequence: Synthetic peptide
  Seed: DPWVLLNASWFNSFL
DPWVLINAMWDNSLL

SEQ ID NO: 251404 - protein, 15 aa, Artificial Sequence
  Description of Artificial Sequence: Synthetic peptide
  Seed: DPWVLLNASWFNSFL
DPWVLINAMWDNSML

SEQ ID NO: 251405 - protein, 15 aa, Artificial Sequence
  Description of Artificial Sequence: Synthetic peptide
  Seed: DPWVLLNASWFNSFL
DPWVLINAMWDNSVL

SEQ ID NO: 251406 - protein, 15 aa, Artificial Sequence
  Description of Artificial Sequence: Synthetic peptide
  Seed: DPWVLLNASWFNSFL
DPWVLINANWFNSIL

SEQ ID NO: 251407 - protein, 15 aa, Artificial Sequence
  Description of Artificial Sequence: Synthetic peptide
  Seed: DPWVLLNASWFNSFL
DPWVLINANWFNSLL

SEQ ID NO: 251408 - protein, 15 aa, Artificial Sequence
  Description of Artificial Sequence: Synthetic peptide
  Seed: DPWVLLNASWFNSFL
DPWVLINANWFNSVL

SEQ ID NO: 251409 - protein, 15 aa, Artificial Sequence
  Description of Artificial Sequence: Synthetic peptide
  Seed: DPWVLLNASWFNSFL
DPWVLINASWANSFL

SEQ ID NO: 251410 - protein, 15 aa, Artificial Sequence
  Description of Artificial Sequence: Synthetic peptide
  Seed: DPWVLLNASWFNSFL
DPWVLINASWFNSIL

SEQ ID NO: 251411 - protein, 15 aa, Artificial Sequence
  Description of Artificial Sequence: Synthetic peptide
  Seed: DPWVLLNASWFNSFL
DPWVLINASWFNSVL

SEQ ID NO: 251412 - protein, 15 aa, Artificial Sequence
  Description of Artificial Sequence: Synthetic peptide
  Seed: DPWVLLNASWFNSFL
DPWVLINASWINSFL

SEQ ID NO: 251413 - protein, 15 aa, Artificial Sequence
  Description of Artificial Sequence: Synthetic peptide
  Seed: DPWVLLNASWFNSFL
DPWVLINASWLNSFL

SEQ ID NO: 251414 - protein, 15 aa, Artificial Sequence
  Description of Artificial Sequence: Synthetic peptide
  Seed: DPWVLLNASWFNSFL
DPWVLINASWMNSFL

SEQ ID NO: 251415 - protein, 15 aa, Artificial Sequence
  Description of Artificial Sequence: Synthetic peptide
  Seed: DPWVLLNASWFNSFL
DPWVLINASWNNSFL

SEQ ID NO: 251416 - protein, 15 aa, Artificial Sequence
  Description of Artificial Sequence: Synthetic peptide
  Seed: DPWVLLNASWFNSFL
DPWVLINASWSNSFL

SEQ ID NO: 251417 - protein, 15 aa, Artificial Sequence
  Description of Artificial Sequence: Synthetic peptide
  Seed: DPWVLLNASWFNSFL
DPWVLINASWTNSFL

SEQ ID NO: 251418 - protein, 15 aa, Artificial Sequence
  Description of Artificial Sequence: Synthetic peptide
  Seed: DPWVLLNASWFNSFL
DPWVLINASWVNSFL

SEQ ID NO: 251419 - protein, 15 aa, Artificial Sequence
  Description of Artificial Sequence: Synthetic peptide
  Seed: DPWVLLNASWFNSFL
DPWVLINATWFNSIL

SEQ ID NO: 251420 - protein, 15 aa, Artificial Sequence
  Description of Artificial Sequence: Synthetic peptide
  Seed: DPWVLLNASWFNSFL
DPWVLINATWFNSLL

SEQ ID NO: 251421 - protein, 15 aa, Artificial Sequence
  Description of Artificial Sequence: Synthetic peptide
  Seed: DPWVLLNASWFNSFL
DPWVLINATWFNSVL

SEQ ID NO: 251422 - protein, 15 aa, Artificial Sequence
  Description of Artificial Sequence: Synthetic peptide
  Seed: DPWVLLNASWFNSFL
DPWVLINAYWDNSAL

SEQ ID NO: 251423 - protein, 15 aa, Artificial Sequence
  Description of Artificial Sequence: Synthetic peptide
  Seed: DPWVLLNASWFNSFL
DPWVLINAYWDNSIL

SEQ ID NO: 251424 - protein, 15 aa, Artificial Sequence
  Description of Artificial Sequence: Synthetic peptide
  Seed: DPWVLLNASWFNSFL
DPWVLINAYWDNSLL

SEQ ID NO: 251425 - protein, 15 aa, Artificial Sequence
  Description of Artificial Sequence: Synthetic peptide
  Seed: DPWVLLNASWFNSFL
DPWVLINAYWDNSML

SEQ ID NO: 251426 - protein, 15 aa, Artificial Sequence
  Description of Artificial Sequence: Synthetic peptide
  Seed: DPWVLLNASWFNSFL
DPWVLINAYWDNSVL

SEQ ID NO: 251427 - protein, 15 aa, Artificial Sequence
  Description of Artificial Sequence: Synthetic peptide
  Seed: DPWVLLNASWFNSFL
DPWVLLNAEWFNSIL

SEQ ID NO: 251428 - protein, 15 aa, Artificial Sequence
  Description of Artificial Sequence: Synthetic peptide
  Seed: DPWVLLNASWFNSFL
DPWVLLNAEWFNSLL

SEQ ID NO: 251429 - protein, 15 aa, Artificial Sequence
  Description of Artificial Sequence: Synthetic peptide
  Seed: DPWVLLNASWFNSFL
DPWVLLNAEWFNSVL

SEQ ID NO: 251430 - protein, 15 aa, Artificial Sequence
  Description of Artificial Sequence: Synthetic peptide
  Seed: DPWVLLNASWFNSFL
DPWVLLNAFWDNSAL

SEQ ID NO: 251431 - protein, 15 aa, Artificial Sequence
  Description of Artificial Sequence: Synthetic peptide
  Seed: DPWVLLNASWFNSFL
DPWVLLNAFWDNSIL

SEQ ID NO: 251432 - protein, 15 aa, Artificial Sequence
  Description of Artificial Sequence: Synthetic peptide
  Seed: DPWVLLNASWFNSFL
DPWVLLNAFWDNSVL

SEQ ID NO: 251433 - protein, 15 aa, Artificial Sequence
  Description of Artificial Sequence: Synthetic peptide
  Seed: DPWVLLNASWFNSFL
DPWVLLNAHWFNSIL

SEQ ID NO: 251434 - protein, 15 aa, Artificial Sequence
  Description of Artificial Sequence: Synthetic peptide
  Seed: DPWVLLNASWFNSFL
DPWVLLNAHWFNSLL

SEQ ID NO: 251435 - protein, 15 aa, Artificial Sequence
  Description of Artificial Sequence: Synthetic peptide
  Seed: DPWVLLNASWFNSFL
DPWVLLNAHWFNSML

SEQ ID NO: 251436 - protein, 15 aa, Artificial Sequence
  Description of Artificial Sequence: Synthetic peptide
  Seed: DPWVLLNASWFNSFL
DPWVLLNAHWFNSVL

SEQ ID NO: 251437 - protein, 15 aa, Artificial Sequence
  Description of Artificial Sequence: Synthetic peptide
  Seed: DPWVLLNASWFNSFL
DPWVLLNAMWANSIL

SEQ ID NO: 251438 - protein, 15 aa, Artificial Sequence
  Description of Artificial Sequence: Synthetic peptide
  Seed: DPWVLLNASWFNSFL
DPWVLLNAMWANSLL

SEQ ID NO: 251439 - protein, 15 aa, Artificial Sequence
  Description of Artificial Sequence: Synthetic peptide
  Seed: DPWVLLNASWFNSFL
DPWVLLNANWFNSIL

SEQ ID NO: 251440 - protein, 15 aa, Artificial Sequence
  Description of Artificial Sequence: Synthetic peptide
  Seed: DPWVLLNASWFNSFL
DPWVLLNANWFNSLL

SEQ ID NO: 251441 - protein, 15 aa, Artificial Sequence
  Description of Artificial Sequence: Synthetic peptide
  Seed: DPWVLLNASWFNSFL
DPWVLLNANWFNSVL

SEQ ID NO: 251442 - protein, 15 aa, Artificial Sequence
  Description of Artificial Sequence: Synthetic peptide
  Seed: DPWVLLNASWFNSFL
DPWVLLNASWANSFL

SEQ ID NO: 251443 - protein, 15 aa, Artificial Sequence
  Description of Artificial Sequence: Synthetic peptide
  Seed: DPWVLLNASWFNSFL
DPWVLLNASWFNSIL

SEQ ID NO: 251444 - protein, 15 aa, Artificial Sequence
  Description of Artificial Sequence: Synthetic peptide
  Seed: DPWVLLNASWFNSFL
DPWVLLNASWFNSLL

SEQ ID NO: 251445 - protein, 15 aa, Artificial Sequence
  Description of Artificial Sequence: Synthetic peptide
  Seed: DPWVLLNASWFNSFL
DPWVLLNASWFNSVL

SEQ ID NO: 251446 - protein, 15 aa, Artificial Sequence
  Description of Artificial Sequence: Synthetic peptide
  Seed: DPWVLLNASWFNSFL
DPWVLLNASWGNSFL

SEQ ID NO: 251447 - protein, 15 aa, Artificial Sequence
  Description of Artificial Sequence: Synthetic peptide
  Seed: DPWVLLNASWFNSFL
DPWVLLNASWINSFL

SEQ ID NO: 251448 - protein, 15 aa, Artificial Sequence
  Description of Artificial Sequence: Synthetic peptide
  Seed: DPWVLLNASWFNSFL
DPWVLLNASWLNSFL

SEQ ID NO: 251449 - protein, 15 aa, Artificial Sequence
  Description of Artificial Sequence: Synthetic peptide
  Seed: DPWVLLNASWFNSFL
DPWVLLNASWMNSFL

SEQ ID NO: 251450 - protein, 15 aa, Artificial Sequence
  Description of Artificial Sequence: Synthetic peptide
  Seed: DPWVLLNASWFNSFL
DPWVLLNASWNNSFL

SEQ ID NO: 251451 - protein, 15 aa, Artificial Sequence
  Description of Artificial Sequence: Synthetic peptide
  Seed: DPWVLLNASWFNSFL
DPWVLLNASWSNSFL

SEQ ID NO: 251452 - protein, 15 aa, Artificial Sequence
  Description of Artificial Sequence: Synthetic peptide
  Seed: DPWVLLNASWFNSFL
DPWVLLNASWTNSFL

SEQ ID NO: 251453 - protein, 15 aa, Artificial Sequence
  Description of Artificial Sequence: Synthetic peptide
  Seed: DPWVLLNASWFNSFL
DPWVLLNASWVNSFL

SEQ ID NO: 251454 - protein, 15 aa, Artificial Sequence
  Description of Artificial Sequence: Synthetic peptide
  Seed: DPWVLLNASWFNSFL
DPWVLLNATWFNSIL

SEQ ID NO: 251455 - protein, 15 aa, Artificial Sequence
  Description of Artificial Sequence: Synthetic peptide
  Seed: DPWVLLNASWFNSFL
DPWVLLNATWFNSLL

SEQ ID NO: 251456 - protein, 15 aa, Artificial Sequence
  Description of Artificial Sequence: Synthetic peptide
  Seed: DPWVLLNASWFNSFL
DPWVLLNATWFNSVL

SEQ ID NO: 251457 - protein, 15 aa, Artificial Sequence
  Description of Artificial Sequence: Synthetic peptide
  Seed: DPWVLLNASWFNSFL
DPWVLMNAFWDNSIL

SEQ ID NO: 251458 - protein, 15 aa, Artificial Sequence
  Description of Artificial Sequence: Synthetic peptide
  Seed: DPWVLLNASWFNSFL
DPWVLMNASWANSFL

SEQ ID NO: 251459 - protein, 15 aa, Artificial Sequence
  Description of Artificial Sequence: Synthetic peptide
  Seed: DPWVLLNASWFNSFL
DPWVLMNASWINSFL

SEQ ID NO: 251460 - protein, 15 aa, Artificial Sequence
  Description of Artificial Sequence: Synthetic peptide
  Seed: DPWVLLNASWFNSFL
DPWVLMNASWLNSFL

SEQ ID NO: 251461 - protein, 15 aa, Artificial Sequence
  Description of Artificial Sequence: Synthetic peptide
  Seed: DPWVLLNASWFNSFL
DPWVLMNASWMNSFL

SEQ ID NO: 251462 - protein, 15 aa, Artificial Sequence
  Description of Artificial Sequence: Synthetic peptide
  Seed: DPWVLLNASWFNSFL
DPWVLMNASWNNSFL

SEQ ID NO: 251463 - protein, 15 aa, Artificial Sequence
  Description of Artificial Sequence: Synthetic peptide
  Seed: DPWVLLNASWFNSFL
DPWVLMNASWSNSFL

SEQ ID NO: 251464 - protein, 15 aa, Artificial Sequence
  Description of Artificial Sequence: Synthetic peptide
  Seed: DPWVLLNASWFNSFL
DPWVLMNASWTNSFL

SEQ ID NO: 251465 - protein, 15 aa, Artificial Sequence
  Description of Artificial Sequence: Synthetic peptide
  Seed: DPWVLLNASWFNSFL
DPWVLMNASWVNSFL

SEQ ID NO: 251466 - protein, 15 aa, Artificial Sequence
  Description of Artificial Sequence: Synthetic peptide
  Seed: DPWVLLNASWFNSFL
DPWVLQNASWANSFL

SEQ ID NO: 251467 - protein, 15 aa, Artificial Sequence
  Description of Artificial Sequence: Synthetic peptide
  Seed: DPWVLLNASWFNSFL
DPWVLQNASWINSFL

SEQ ID NO: 251468 - protein, 15 aa, Artificial Sequence
  Description of Artificial Sequence: Synthetic peptide
  Seed: DPWVLLNASWFNSFL
DPWVLQNASWLNSFL

SEQ ID NO: 251469 - protein, 15 aa, Artificial Sequence
  Description of Artificial Sequence: Synthetic peptide
  Seed: DPWVLLNASWFNSFL
DPWVLQNASWMNSFL

SEQ ID NO: 251470 - protein, 15 aa, Artificial Sequence
  Description of Artificial Sequence: Synthetic peptide
  Seed: DPWVLLNASWFNSFL
DPWVLQNASWVNSFL

SEQ ID NO: 251471 - protein, 15 aa, Artificial Sequence
  Description of Artificial Sequence: Synthetic peptide
  Seed: DPWVLLNASWFNSFL
DPWVLSNASWANSFL

SEQ ID NO: 251472 - protein, 15 aa, Artificial Sequence
  Description of Artificial Sequence: Synthetic peptide
  Seed: DPWVLLNASWFNSFL
DPWVLSNASWINSFL

SEQ ID NO: 251473 - protein, 15 aa, Artificial Sequence
  Description of Artificial Sequence: Synthetic peptide
  Seed: DPWVLLNASWFNSFL
DPWVLSNASWLNSFL

SEQ ID NO: 251474 - protein, 15 aa, Artificial Sequence
  Description of Artificial Sequence: Synthetic peptide
  Seed: DPWVLLNASWFNSFL
DPWVLSNASWVNSFL

SEQ ID NO: 251475 - protein, 15 aa, Artificial Sequence
  Description of Artificial Sequence: Synthetic peptide
  Seed: DPWVLLNASWFNSFL
DPWVLTNASWINSFL

SEQ ID NO: 251476 - protein, 15 aa, Artificial Sequence
  Description of Artificial Sequence: Synthetic peptide
  Seed: DPWVLLNASWFNSFL
DPWVLTNASWLNSFL

SEQ ID NO: 251477 - protein, 15 aa, Artificial Sequence
  Description of Artificial Sequence: Synthetic peptide
  Seed: DPWVLLNASWFNSFL
DPWVLVNAHWFNSIL

SEQ ID NO: 251478 - protein, 15 aa, Artificial Sequence
  Description of Artificial Sequence: Synthetic peptide
  Seed: DPWVLLNASWFNSFL
DPWVLVNAHWFNSLL

SEQ ID NO: 251479 - protein, 15 aa, Artificial Sequence
  Description of Artificial Sequence: Synthetic peptide
  Seed: DPWVLLNASWFNSFL
DPWVLVNAHWFNSVL

SEQ ID NO: 251480 - protein, 15 aa, Artificial Sequence
  Description of Artificial Sequence: Synthetic peptide
  Seed: DPWVLLNASWFNSFL
DPWVLVNASWANSFL

SEQ ID NO: 251481 - protein, 15 aa, Artificial Sequence
  Description of Artificial Sequence: Synthetic peptide
  Seed: DPWVLLNASWFNSFL
DPWVLVNASWLNSFL

SEQ ID NO: 251482 - protein, 15 aa, Artificial Sequence
  Description of Artificial Sequence: Synthetic peptide
  Seed: DPWVLLNASWFNSFL
DPWVLVNASWVNSFL

SEQ ID NO: 251483 - protein, 15 aa, Artificial Sequence
  Description of Artificial Sequence: Synthetic peptide
  Seed: DPWVLLNASWFNSFL
DPWVLWNAHWFNSIL

SEQ ID NO: 251484 - protein, 15 aa, Artificial Sequence
  Description of Artificial Sequence: Synthetic peptide
  Seed: DPWVLLNASWFNSFL
DPWVLWNAHWFNSLL

SEQ ID NO: 251485 - protein, 15 aa, Artificial Sequence
  Description of Artificial Sequence: Synthetic peptide
  Seed: DPWVLLNASWFNSFL
DPWVLWNAHWFNSVL

SEQ ID NO: 251486 - protein, 15 aa, Artificial Sequence
  Description of Artificial Sequence: Synthetic peptide
  Seed: DPWVLLNASWFNSFL
DPWVLYNAEWFNSIL

SEQ ID NO: 251487 - protein, 15 aa, Artificial Sequence
  Description of Artificial Sequence: Synthetic peptide
  Seed: DPWVLLNASWFNSFL
DPWVLYNAEWFNSLL

SEQ ID NO: 251488 - protein, 15 aa, Artificial Sequence
  Description of Artificial Sequence: Synthetic peptide
  Seed: DPWVLLNASWFNSFL
DPWVLYNAEWFNSVL

SEQ ID NO: 251489 - protein, 15 aa, Artificial Sequence
  Description of Artificial Sequence: Synthetic peptide
  Seed: DPWVLLNASWFNSFL
DPWVLYNAHWFNSFL

SEQ ID NO: 251490 - protein, 15 aa, Artificial Sequence
  Description of Artificial Sequence: Synthetic peptide
  Seed: DPWVLLNASWFNSFL
DPWVLYNAHWFNSIL

SEQ ID NO: 251491 - protein, 15 aa, Artificial Sequence
  Description of Artificial Sequence: Synthetic peptide
  Seed: DPWVLLNASWFNSFL
DPWVLYNAHWFNSLL

SEQ ID NO: 251492 - protein, 15 aa, Artificial Sequence
  Description of Artificial Sequence: Synthetic peptide
  Seed: DPWVLLNASWFNSFL
DPWVLYNAHWFNSML

SEQ ID NO: 251493 - protein, 15 aa, Artificial Sequence
  Description of Artificial Sequence: Synthetic peptide
  Seed: DPWVLLNASWFNSFL
DPWVLYNAHWFNSVL

SEQ ID NO: 251494 - protein, 15 aa, Artificial Sequence
  Description of Artificial Sequence: Synthetic peptide
  Seed: DPWVLLNASWFNSFL
DPWVLYNANWFNSIL

SEQ ID NO: 251495 - protein, 15 aa, Artificial Sequence
  Description of Artificial Sequence: Synthetic peptide
  Seed: DPWVLLNASWFNSFL
DPWVLYNANWFNSLL

SEQ ID NO: 251496 - protein, 15 aa, Artificial Sequence
  Description of Artificial Sequence: Synthetic peptide
  Seed: DPWVLLNASWFNSFL
DPWVLYNANWFNSVL

SEQ ID NO: 251497 - protein, 15 aa, Artificial Sequence
  Description of Artificial Sequence: Synthetic peptide
  Seed: DPWVLLNASWFNSFL
DPWVLYNAQWFNSIL

SEQ ID NO: 251498 - protein, 15 aa, Artificial Sequence
  Description of Artificial Sequence: Synthetic peptide
  Seed: DPWVLLNASWFNSFL
DPWVLYNAQWFNSLL

SEQ ID NO: 251499 - protein, 15 aa, Artificial Sequence
  Description of Artificial Sequence: Synthetic peptide
  Seed: DPWVLLNASWFNSFL
DPWVLYNAQWFNSVL

SEQ ID NO: 251500 - protein, 15 aa, Artificial Sequence
  Description of Artificial Sequence: Synthetic peptide
  Seed: DPWVLLNASWFNSFL
DPWVLYNASWFNSIL

SEQ ID NO: 251501 - protein, 15 aa, Artificial Sequence
  Description of Artificial Sequence: Synthetic peptide
  Seed: DPWVLLNASWFNSFL
DPWVLYNASWFNSLL

SEQ ID NO: 251502 - protein, 15 aa, Artificial Sequence
  Description of Artificial Sequence: Synthetic peptide
  Seed: DPWVLLNASWFNSFL
DPWVLYNASWFNSVL

SEQ ID NO: 251503 - protein, 15 aa, Artificial Sequence
  Description of Artificial Sequence: Synthetic peptide
  Seed: DPWVLLNASWFNSFL
DPWVLYNATWFNSIL

SEQ ID NO: 251504 - protein, 15 aa, Artificial Sequence
  Description of Artificial Sequence: Synthetic peptide
  Seed: DPWVLLNASWFNSFL
DPWVLYNATWFNSLL

SEQ ID NO: 251505 - protein, 15 aa, Artificial Sequence
  Description of Artificial Sequence: Synthetic peptide
  Seed: DPWVLLNASWFNSFL
DPWVLYNATWFNSML

SEQ ID NO: 251506 - protein, 15 aa, Artificial Sequence
  Description of Artificial Sequence: Synthetic peptide
  Seed: DPWVLLNASWFNSFL
DPWVLYNATWFNSVL

SEQ ID NO: 251507 - protein, 15 aa, Artificial Sequence
  Description of Artificial Sequence: Synthetic peptide
  Seed: DPWVLLNASWFNSFL
DPWVLYNATWYNSIL

SEQ ID NO: 251508 - protein, 15 aa, Artificial Sequence
  Description of Artificial Sequence: Synthetic peptide
  Seed: DPWVLLNASWFNSFL
DPWVLYNATWYNSLL

SEQ ID NO: 251509 - protein, 15 aa, Artificial Sequence
  Description of Artificial Sequence: Synthetic peptide
  Seed: DPWVLLNASWFNSFL
DPWVLYNATWYNSVL

SEQ ID NO: 251510 - protein, 15 aa, Artificial Sequence
  Description of Artificial Sequence: Synthetic peptide
  Seed: DPWVLLNASWFNSFL
DPWILLHAKWFHSFL

SEQ ID NO: 251511 - protein, 15 aa, Artificial Sequence
  Description of Artificial Sequence: Synthetic peptide
  Seed: DPWVLLNASWFNSFL
DPWILLHAKWFKSFL

SEQ ID NO: 251512 - protein, 15 aa, Artificial Sequence
  Description of Artificial Sequence: Synthetic peptide
  Seed: DPWVLLNASWFNSFL
DPWILLHAKWFRSFL

SEQ ID NO: 251513 - protein, 15 aa, Artificial Sequence
  Description of Artificial Sequence: Synthetic peptide
  Seed: DPWVLLNASWFNSFL
DPWILLHARWFHSFL

SEQ ID NO: 251514 - protein, 15 aa, Artificial Sequence
  Description of Artificial Sequence: Synthetic peptide
  Seed: DPWVLLNASWFNSFL
DPWILLHARWFKSFL

SEQ ID NO: 251515 - protein, 15 aa, Artificial Sequence
  Description of Artificial Sequence: Synthetic peptide
  Seed: DPWVLLNASWFNSFL
DPWILLHARWFRSFL

SEQ ID NO: 251516 - protein, 15 aa, Artificial Sequence
  Description of Artificial Sequence: Synthetic peptide
  Seed: DPWVLLNASWFNSFL
DPWILLNAPWFYSFL

SEQ ID NO: 251517 - protein, 15 aa, Artificial Sequence
  Description of Artificial Sequence: Synthetic peptide
  Seed: DPWVLLNASWFNSFL
DPWLLLHAKWFRSFL

SEQ ID NO: 251518 - protein, 15 aa, Artificial Sequence
  Description of Artificial Sequence: Synthetic peptide
  Seed: DPWVLLNASWFNSFL
DPWLLLHARWFRSFL

SEQ ID NO: 251519 - protein, 15 aa, Artificial Sequence
  Description of Artificial Sequence: Synthetic peptide
  Seed: DPWVLLNASWFNSFL
DPWMLLHAKWFRSFL

SEQ ID NO: 251520 - protein, 15 aa, Artificial Sequence
  Description of Artificial Sequence: Synthetic peptide
  Seed: DPWVLLNASWFNSFL
DPWMLLHARWFKSFL

SEQ ID NO: 251521 - protein, 15 aa, Artificial Sequence
  Description of Artificial Sequence: Synthetic peptide
  Seed: DPWVLLNASWFNSFL
DPWMLLHARWFRSFL

SEQ ID NO: 251522 - protein, 15 aa, Artificial Sequence
  Description of Artificial Sequence: Synthetic peptide
  Seed: DPWVLLNASWFNSFL
DPWVLLHAKWFRSFL

SEQ ID NO: 251523 - protein, 15 aa, Artificial Sequence
  Description of Artificial Sequence: Synthetic peptide
  Seed: DPWVLLNASWFNSFL
DPWVLLHARWFRSFL

SEQ ID NO: 251524 - protein, 15 aa, Artificial Sequence
  Description of Artificial Sequence: Synthetic peptide
  Seed: DPWVLLNASWFNSFL
DPFVLANASWANSFL

SEQ ID NO: 251525 - protein, 15 aa, Artificial Sequence
  Description of Artificial Sequence: Synthetic peptide
  Seed: DPWVLLNASWFNSFL
DPFVLANASWCNSFL

SEQ ID NO: 251526 - protein, 15 aa, Artificial Sequence
  Description of Artificial Sequence: Synthetic peptide
  Seed: DPWVLLNASWFNSFL
DPFVLANASWFNSFL

SEQ ID NO: 251527 - protein, 15 aa, Artificial Sequence
  Description of Artificial Sequence: Synthetic peptide
  Seed: DPWVLLNASWFNSFL
DPFVLANASWGNSFL

SEQ ID NO: 251528 - protein, 15 aa, Artificial Sequence
  Description of Artificial Sequence: Synthetic peptide
  Seed: DPWVLLNASWFNSFL
DPFVLANASWHNSFL

SEQ ID NO: 251529 - protein, 15 aa, Artificial Sequence
  Description of Artificial Sequence: Synthetic peptide
  Seed: DPWVLLNASWFNSFL
DPFVLANASWINSFL

SEQ ID NO: 251530 - protein, 15 aa, Artificial Sequence
  Description of Artificial Sequence: Synthetic peptide
  Seed: DPWVLLNASWFNSFL
DPFVLANASWKNSFL

SEQ ID NO: 251531 - protein, 15 aa, Artificial Sequence
  Description of Artificial Sequence: Synthetic peptide
  Seed: DPWVLLNASWFNSFL
DPFVLANASWLNSFL

SEQ ID NO: 251532 - protein, 15 aa, Artificial Sequence
  Description of Artificial Sequence: Synthetic peptide
  Seed: DPWVLLNASWFNSFL
DPFVLANASWMNSFL

SEQ ID NO: 251533 - protein, 15 aa, Artificial Sequence
  Description of Artificial Sequence: Synthetic peptide
  Seed: DPWVLLNASWFNSFL
DPFVLANASWNNSFL

SEQ ID NO: 251534 - protein, 15 aa, Artificial Sequence
  Description of Artificial Sequence: Synthetic peptide
  Seed: DPWVLLNASWFNSFL
DPFVLANASWQNSFL

SEQ ID NO: 251535 - protein, 15 aa, Artificial Sequence
  Description of Artificial Sequence: Synthetic peptide
  Seed: DPWVLLNASWFNSFL
DPFVLANASWRNSFL

SEQ ID NO: 251536 - protein, 15 aa, Artificial Sequence
  Description of Artificial Sequence: Synthetic peptide
  Seed: DPWVLLNASWFNSFL
DPFVLANASWSNSFL

SEQ ID NO: 251537 - protein, 15 aa, Artificial Sequence
  Description of Artificial Sequence: Synthetic peptide
  Seed: DPWVLLNASWFNSFL
DPFVLANASWTNSFL

SEQ ID NO: 251538 - protein, 15 aa, Artificial Sequence
  Description of Artificial Sequence: Synthetic peptide
  Seed: DPWVLLNASWFNSFL
DPFVLANASWVNSFL

SEQ ID NO: 251539 - protein, 15 aa, Artificial Sequence
  Description of Artificial Sequence: Synthetic peptide
  Seed: DPWVLLNASWFNSFL
DPFVLANASWYNSFL

SEQ ID NO: 251540 - protein, 15 aa, Artificial Sequence
  Description of Artificial Sequence: Synthetic peptide
  Seed: DPWVLLNASWFNSFL
DPFVLANDSWANSFL

SEQ ID NO: 251541 - protein, 15 aa, Artificial Sequence
  Description of Artificial Sequence: Synthetic peptide
  Seed: DPWVLLNASWFNSFL
DPFVLANGSWANSFL

SEQ ID NO: 251542 - protein, 15 aa, Artificial Sequence
  Description of Artificial Sequence: Synthetic peptide
  Seed: DPWVLLNASWFNSFL
DPFVLANGSWFNSFL

SEQ ID NO: 251543 - protein, 15 aa, Artificial Sequence
  Description of Artificial Sequence: Synthetic peptide
  Seed: DPWVLLNASWFNSFL
DPFVLANGSWGNSFL

SEQ ID NO: 251544 - protein, 15 aa, Artificial Sequence
  Description of Artificial Sequence: Synthetic peptide
  Seed: DPWVLLNASWFNSFL
DPFVLANGSWINSFL

SEQ ID NO: 251545 - protein, 15 aa, Artificial Sequence
  Description of Artificial Sequence: Synthetic peptide
  Seed: DPWVLLNASWFNSFL
DPFVLANGSWLNSFL

SEQ ID NO: 251546 - protein, 15 aa, Artificial Sequence
  Description of Artificial Sequence: Synthetic peptide
  Seed: DPWVLLNASWFNSFL
DPFVLANGSWMNSFL

SEQ ID NO: 251547 - protein, 15 aa, Artificial Sequence
  Description of Artificial Sequence: Synthetic peptide
  Seed: DPWVLLNASWFNSFL
DPFVLANGSWNNSFL

SEQ ID NO: 251548 - protein, 15 aa, Artificial Sequence
  Description of Artificial Sequence: Synthetic peptide
  Seed: DPWVLLNASWFNSFL
DPFVLANGSWSNSFL

SEQ ID NO: 251549 - protein, 15 aa, Artificial Sequence
  Description of Artificial Sequence: Synthetic peptide
  Seed: DPWVLLNASWFNSFL
DPFVLANGSWTNSFL

SEQ ID NO: 251550 - protein, 15 aa, Artificial Sequence
  Description of Artificial Sequence: Synthetic peptide
  Seed: DPWVLLNASWFNSFL
DPFVLANGSWVNSFL

SEQ ID NO: 251551 - protein, 15 aa, Artificial Sequence
  Description of Artificial Sequence: Synthetic peptide
  Seed: DPWVLLNASWFNSFL
DPFVLANISWANSFL

SEQ ID NO: 251552 - protein, 15 aa, Artificial Sequence
  Description of Artificial Sequence: Synthetic peptide
  Seed: DPWVLLNASWFNSFL
DPFVLANISWHNSFL

SEQ ID NO: 251553 - protein, 15 aa, Artificial Sequence
  Description of Artificial Sequence: Synthetic peptide
  Seed: DPWVLLNASWFNSFL
DPFVLANISWNNSFL

SEQ ID NO: 251554 - protein, 15 aa, Artificial Sequence
  Description of Artificial Sequence: Synthetic peptide
  Seed: DPWVLLNASWFNSFL
DPFVLANISWSNSFL

SEQ ID NO: 251555 - protein, 15 aa, Artificial Sequence
  Description of Artificial Sequence: Synthetic peptide
  Seed: DPWVLLNASWFNSFL
DPFVLANLSWNNSFL

SEQ ID NO: 251556 - protein, 15 aa, Artificial Sequence
  Description of Artificial Sequence: Synthetic peptide
  Seed: DPWVLLNASWFNSFL
DPFVLANMSWNNSFL

SEQ ID NO: 251557 - protein, 15 aa, Artificial Sequence
  Description of Artificial Sequence: Synthetic peptide
  Seed: DPWVLLNASWFNSFL
DPFVLANNSWANSFL

SEQ ID NO: 251558 - protein, 15 aa, Artificial Sequence
  Description of Artificial Sequence: Synthetic peptide
  Seed: DPWVLLNASWFNSFL
DPFVLANNSWDNSFL

SEQ ID NO: 251559 - protein, 15 aa, Artificial Sequence
  Description of Artificial Sequence: Synthetic peptide
  Seed: DPWVLLNASWFNSFL
DPFVLANNSWENSFL

SEQ ID NO: 251560 - protein, 15 aa, Artificial Sequence
  Description of Artificial Sequence: Synthetic peptide
  Seed: DPWVLLNASWFNSFL
DPFVLANNSWGNSFL

SEQ ID NO: 251561 - protein, 15 aa, Artificial Sequence
  Description of Artificial Sequence: Synthetic peptide
  Seed: DPWVLLNASWFNSFL
DPFVLANNSWHNSFL

SEQ ID NO: 251562 - protein, 15 aa, Artificial Sequence
  Description of Artificial Sequence: Synthetic peptide
  Seed: DPWVLLNASWFNSFL
DPFVLANNSWLNSFL

SEQ ID NO: 251563 - protein, 15 aa, Artificial Sequence
  Description of Artificial Sequence: Synthetic peptide
  Seed: DPWVLLNASWFNSFL
DPFVLANNSWMNSFL

SEQ ID NO: 251564 - protein, 15 aa, Artificial Sequence
  Description of Artificial Sequence: Synthetic peptide
  Seed: DPWVLLNASWFNSFL
DPFVLANNSWNNSFL

SEQ ID NO: 251565 - protein, 15 aa, Artificial Sequence
  Description of Artificial Sequence: Synthetic peptide
  Seed: DPWVLLNASWFNSFL
DPFVLANNSWQNSFL

SEQ ID NO: 251566 - protein, 15 aa, Artificial Sequence
  Description of Artificial Sequence: Synthetic peptide
  Seed: DPWVLLNASWFNSFL
DPFVLANNSWSNSFL

SEQ ID NO: 251567 - protein, 15 aa, Artificial Sequence
  Description of Artificial Sequence: Synthetic peptide
  Seed: DPWVLLNASWFNSFL
DPFVLANNSWTNSFL

SEQ ID NO: 251568 - protein, 15 aa, Artificial Sequence
  Description of Artificial Sequence: Synthetic peptide
  Seed: DPWVLLNASWFNSFL
DPFVLANNSWVNSFL

SEQ ID NO: 251569 - protein, 15 aa, Artificial Sequence
  Description of Artificial Sequence: Synthetic peptide
  Seed: DPWVLLNASWFNSFL
DPFVLANPSWANSFL

SEQ ID NO: 251570 - protein, 15 aa, Artificial Sequence
  Description of Artificial Sequence: Synthetic peptide
  Seed: DPWVLLNASWFNSFL
DPFVLANPSWGNSFL

SEQ ID NO: 251571 - protein, 15 aa, Artificial Sequence
  Description of Artificial Sequence: Synthetic peptide
  Seed: DPWVLLNASWFNSFL
DPFVLANPSWHNSFL

SEQ ID NO: 251572 - protein, 15 aa, Artificial Sequence
  Description of Artificial Sequence: Synthetic peptide
  Seed: DPWVLLNASWFNSFL
DPFVLANPSWINSFL

SEQ ID NO: 251573 - protein, 15 aa, Artificial Sequence
  Description of Artificial Sequence: Synthetic peptide
  Seed: DPWVLLNASWFNSFL
DPFVLANPSWLNSFL

SEQ ID NO: 251574 - protein, 15 aa, Artificial Sequence
  Description of Artificial Sequence: Synthetic peptide
  Seed: DPWVLLNASWFNSFL
DPFVLANPSWMNSFL

SEQ ID NO: 251575 - protein, 15 aa, Artificial Sequence
  Description of Artificial Sequence: Synthetic peptide
  Seed: DPWVLLNASWFNSFL
DPFVLANPSWNNSFL

SEQ ID NO: 251576 - protein, 15 aa, Artificial Sequence
  Description of Artificial Sequence: Synthetic peptide
  Seed: DPWVLLNASWFNSFL
DPFVLANPSWQNSFL

SEQ ID NO: 251577 - protein, 15 aa, Artificial Sequence
  Description of Artificial Sequence: Synthetic peptide
  Seed: DPWVLLNASWFNSFL
DPFVLANPSWSNSFL

SEQ ID NO: 251578 - protein, 15 aa, Artificial Sequence
  Description of Artificial Sequence: Synthetic peptide
  Seed: DPWVLLNASWFNSFL
DPFVLANPSWTNSFL

SEQ ID NO: 251579 - protein, 15 aa, Artificial Sequence
  Description of Artificial Sequence: Synthetic peptide
  Seed: DPWVLLNASWFNSFL
DPFVLANPSWVNSFL

SEQ ID NO: 251580 - protein, 15 aa, Artificial Sequence
  Description of Artificial Sequence: Synthetic peptide
  Seed: DPWVLLNASWFNSFL
DPFVLANSSWANSFL

SEQ ID NO: 251581 - protein, 15 aa, Artificial Sequence
  Description of Artificial Sequence: Synthetic peptide
  Seed: DPWVLLNASWFNSFL
DPFVLANSSWGNSFL

SEQ ID NO: 251582 - protein, 15 aa, Artificial Sequence
  Description of Artificial Sequence: Synthetic peptide
  Seed: DPWVLLNASWFNSFL
DPFVLANSSWHNSFL

SEQ ID NO: 251583 - protein, 15 aa, Artificial Sequence
  Description of Artificial Sequence: Synthetic peptide
  Seed: DPWVLLNASWFNSFL
DPFVLANSSWINSFL

SEQ ID NO: 251584 - protein, 15 aa, Artificial Sequence
  Description of Artificial Sequence: Synthetic peptide
  Seed: DPWVLLNASWFNSFL
DPFVLANSSWLNSFL

SEQ ID NO: 251585 - protein, 15 aa, Artificial Sequence
  Description of Artificial Sequence: Synthetic peptide
  Seed: DPWVLLNASWFNSFL
DPFVLANSSWMNSFL

SEQ ID NO: 251586 - protein, 15 aa, Artificial Sequence
  Description of Artificial Sequence: Synthetic peptide
  Seed: DPWVLLNASWFNSFL
DPFVLANSSWNNSFL

SEQ ID NO: 251587 - protein, 15 aa, Artificial Sequence
  Description of Artificial Sequence: Synthetic peptide
  Seed: DPWVLLNASWFNSFL
DPFVLANSSWSNSFL

SEQ ID NO: 251588 - protein, 15 aa, Artificial Sequence
  Description of Artificial Sequence: Synthetic peptide
  Seed: DPWVLLNASWFNSFL
DPFVLANSSWTNSFL

SEQ ID NO: 251589 - protein, 15 aa, Artificial Sequence
  Description of Artificial Sequence: Synthetic peptide
  Seed: DPWVLLNASWFNSFL
DPFVLANSSWVNSFL

SEQ ID NO: 251590 - protein, 15 aa, Artificial Sequence
  Description of Artificial Sequence: Synthetic peptide
  Seed: DPWVLLNASWFNSFL
DPFVLANTSWANSFL

SEQ ID NO: 251591 - protein, 15 aa, Artificial Sequence
  Description of Artificial Sequence: Synthetic peptide
  Seed: DPWVLLNASWFNSFL
DPFVLANTSWDNSFL

SEQ ID NO: 251592 - protein, 15 aa, Artificial Sequence
  Description of Artificial Sequence: Synthetic peptide
  Seed: DPWVLLNASWFNSFL
DPFVLANTSWHNSFL

SEQ ID NO: 251593 - protein, 15 aa, Artificial Sequence
  Description of Artificial Sequence: Synthetic peptide
  Seed: DPWVLLNASWFNSFL
DPFVLANTSWINSFL

SEQ ID NO: 251594 - protein, 15 aa, Artificial Sequence
  Description of Artificial Sequence: Synthetic peptide
  Seed: DPWVLLNASWFNSFL
DPFVLANTSWLNSFL

SEQ ID NO: 251595 - protein, 15 aa, Artificial Sequence
  Description of Artificial Sequence: Synthetic peptide
  Seed: DPWVLLNASWFNSFL
DPFVLANTSWMNSFL

SEQ ID NO: 251596 - protein, 15 aa, Artificial Sequence
  Description of Artificial Sequence: Synthetic peptide
  Seed: DPWVLLNASWFNSFL
DPFVLANTSWNNSFL

SEQ ID NO: 251597 - protein, 15 aa, Artificial Sequence
  Description of Artificial Sequence: Synthetic peptide
  Seed: DPWVLLNASWFNSFL
DPFVLANTSWQNSFL

SEQ ID NO: 251598 - protein, 15 aa, Artificial Sequence
  Description of Artificial Sequence: Synthetic peptide
  Seed: DPWVLLNASWFNSFL
DPFVLANTSWSNSFL

SEQ ID NO: 251599 - protein, 15 aa, Artificial Sequence
  Description of Artificial Sequence: Synthetic peptide
  Seed: DPWVLLNASWFNSFL
DPFVLANTSWTNSFL

SEQ ID NO: 251600 - protein, 15 aa, Artificial Sequence
  Description of Artificial Sequence: Synthetic peptide
  Seed: DPWVLLNASWFNSFL
DPFVLANTSWVNSFL

SEQ ID NO: 251601 - protein, 15 aa, Artificial Sequence
  Description of Artificial Sequence: Synthetic peptide
  Seed: DPWVLLNASWFNSFL
DPFVLANVSWANSFL

SEQ ID NO: 251602 - protein, 15 aa, Artificial Sequence
  Description of Artificial Sequence: Synthetic peptide
  Seed: DPWVLLNASWFNSFL
DPFVLANVSWHNSFL

SEQ ID NO: 251603 - protein, 15 aa, Artificial Sequence
  Description of Artificial Sequence: Synthetic peptide
  Seed: DPWVLLNASWFNSFL
DPFVLANVSWINSFL

SEQ ID NO: 251604 - protein, 15 aa, Artificial Sequence
  Description of Artificial Sequence: Synthetic peptide
  Seed: DPWVLLNASWFNSFL
DPFVLANVSWLNSFL

SEQ ID NO: 251605 - protein, 15 aa, Artificial Sequence
  Description of Artificial Sequence: Synthetic peptide
  Seed: DPWVLLNASWFNSFL
DPFVLANVSWMNSFL

SEQ ID NO: 251606 - protein, 15 aa, Artificial Sequence
  Description of Artificial Sequence: Synthetic peptide
  Seed: DPWVLLNASWFNSFL
DPFVLANVSWNNSFL

SEQ ID NO: 251607 - protein, 15 aa, Artificial Sequence
  Description of Artificial Sequence: Synthetic peptide
  Seed: DPWVLLNASWFNSFL
DPFVLANVSWQNSFL

SEQ ID NO: 251608 - protein, 15 aa, Artificial Sequence
  Description of Artificial Sequence: Synthetic peptide
  Seed: DPWVLLNASWFNSFL
DPFVLANVSWSNSFL

SEQ ID NO: 251609 - protein, 15 aa, Artificial Sequence
  Description of Artificial Sequence: Synthetic peptide
  Seed: DPWVLLNASWFNSFL
DPFVLANVSWTNSFL

SEQ ID NO: 251610 - protein, 15 aa, Artificial Sequence
  Description of Artificial Sequence: Synthetic peptide
  Seed: DPWVLLNASWFNSFL
DPFVLANVSWVNSFL

SEQ ID NO: 251611 - protein, 15 aa, Artificial Sequence
  Description of Artificial Sequence: Synthetic peptide
  Seed: DPWVLLNASWFNSFL
DPFVLCNASWANSFL

SEQ ID NO: 251612 - protein, 15 aa, Artificial Sequence
  Description of Artificial Sequence: Synthetic peptide
  Seed: DPWVLLNASWFNSFL
DPFVLCNASWINSFL

SEQ ID NO: 251613 - protein, 15 aa, Artificial Sequence
  Description of Artificial Sequence: Synthetic peptide
  Seed: DPWVLLNASWFNSFL
DPFVLCNASWLNSFL

SEQ ID NO: 251614 - protein, 15 aa, Artificial Sequence
  Description of Artificial Sequence: Synthetic peptide
  Seed: DPWVLLNASWFNSFL
DPFVLCNASWVNSFL

SEQ ID NO: 251615 - protein, 15 aa, Artificial Sequence
  Description of Artificial Sequence: Synthetic peptide
  Seed: DPWVLLNASWFNSFL
DPFVLDNNSWANSFL

SEQ ID NO: 251616 - protein, 15 aa, Artificial Sequence
  Description of Artificial Sequence: Synthetic peptide
  Seed: DPWVLLNASWFNSFL
DPFVLDNNSWSNSFL

SEQ ID NO: 251617 - protein, 15 aa, Artificial Sequence
  Description of Artificial Sequence: Synthetic peptide
  Seed: DPWVLLNASWFNSFL
DPFVLENASWANSFL

SEQ ID NO: 251618 - protein, 15 aa, Artificial Sequence
  Description of Artificial Sequence: Synthetic peptide
  Seed: DPWVLLNASWFNSFL
DPFVLENASWINSFL

SEQ ID NO: 251619 - protein, 15 aa, Artificial Sequence
  Description of Artificial Sequence: Synthetic peptide
  Seed: DPWVLLNASWFNSFL
DPFVLENASWLNSFL

SEQ ID NO: 251620 - protein, 15 aa, Artificial Sequence
  Description of Artificial Sequence: Synthetic peptide
  Seed: DPWVLLNASWFNSFL
DPFVLENASWMNSFL

SEQ ID NO: 251621 - protein, 15 aa, Artificial Sequence
  Description of Artificial Sequence: Synthetic peptide
  Seed: DPWVLLNASWFNSFL
DPFVLENASWSNSFL

SEQ ID NO: 251622 - protein, 15 aa, Artificial Sequence
  Description of Artificial Sequence: Synthetic peptide
  Seed: DPWVLLNASWFNSFL
DPFVLENASWTNSFL

SEQ ID NO: 251623 - protein, 15 aa, Artificial Sequence
  Description of Artificial Sequence: Synthetic peptide
  Seed: DPWVLLNASWFNSFL
DPFVLENASWVNSFL

SEQ ID NO: 251624 - protein, 15 aa, Artificial Sequence
  Description of Artificial Sequence: Synthetic peptide
  Seed: DPWVLLNASWFNSFL
DPFVLENGSWANSFL

SEQ ID NO: 251625 - protein, 15 aa, Artificial Sequence
  Description of Artificial Sequence: Synthetic peptide
  Seed: DPWVLLNASWFNSFL
DPFVLENGSWINSFL

SEQ ID NO: 251626 - protein, 15 aa, Artificial Sequence
  Description of Artificial Sequence: Synthetic peptide
  Seed: DPWVLLNASWFNSFL
DPFVLENGSWLNSFL

SEQ ID NO: 251627 - protein, 15 aa, Artificial Sequence
  Description of Artificial Sequence: Synthetic peptide
  Seed: DPWVLLNASWFNSFL
DPFVLENGSWVNSFL

SEQ ID NO: 251628 - protein, 15 aa, Artificial Sequence
  Description of Artificial Sequence: Synthetic peptide
  Seed: DPWVLLNASWFNSFL
DPFVLENNSWANSFL

SEQ ID NO: 251629 - protein, 15 aa, Artificial Sequence
  Description of Artificial Sequence: Synthetic peptide
  Seed: DPWVLLNASWFNSFL
DPFVLENNSWLNSFL

SEQ ID NO: 251630 - protein, 15 aa, Artificial Sequence
  Description of Artificial Sequence: Synthetic peptide
  Seed: DPWVLLNASWFNSFL
DPFVLENNSWSNSFL

SEQ ID NO: 251631 - protein, 15 aa, Artificial Sequence
  Description of Artificial Sequence: Synthetic peptide
  Seed: DPWVLLNASWFNSFL
DPFVLENNSWVNSFL

SEQ ID NO: 251632 - protein, 15 aa, Artificial Sequence
  Description of Artificial Sequence: Synthetic peptide
  Seed: DPWVLLNASWFNSFL
DPFVLENPSWINSFL

SEQ ID NO: 251633 - protein, 15 aa, Artificial Sequence
  Description of Artificial Sequence: Synthetic peptide
  Seed: DPWVLLNASWFNSFL
DPFVLENPSWLNSFL

SEQ ID NO: 251634 - protein, 15 aa, Artificial Sequence
  Description of Artificial Sequence: Synthetic peptide
  Seed: DPWVLLNASWFNSFL
DPFVLENPSWVNSFL

SEQ ID NO: 251635 - protein, 15 aa, Artificial Sequence
  Description of Artificial Sequence: Synthetic peptide
  Seed: DPWVLLNASWFNSFL
DPFVLENSSWANSFL

SEQ ID NO: 251636 - protein, 15 aa, Artificial Sequence
  Description of Artificial Sequence: Synthetic peptide
  Seed: DPWVLLNASWFNSFL
DPFVLENSSWINSFL

SEQ ID NO: 251637 - protein, 15 aa, Artificial Sequence
  Description of Artificial Sequence: Synthetic peptide
  Seed: DPWVLLNASWFNSFL
DPFVLENSSWLNSFL

SEQ ID NO: 251638 - protein, 15 aa, Artificial Sequence
  Description of Artificial Sequence: Synthetic peptide
  Seed: DPWVLLNASWFNSFL
DPFVLENSSWVNSFL

SEQ ID NO: 251639 - protein, 15 aa, Artificial Sequence
  Description of Artificial Sequence: Synthetic peptide
  Seed: DPWVLLNASWFNSFL
DPFVLFNASWANSFL

SEQ ID NO: 251640 - protein, 15 aa, Artificial Sequence
  Description of Artificial Sequence: Synthetic peptide
  Seed: DPWVLLNASWFNSFL
DPFVLFNASWINSFL

SEQ ID NO: 251641 - protein, 15 aa, Artificial Sequence
  Description of Artificial Sequence: Synthetic peptide
  Seed: DPWVLLNASWFNSFL
DPFVLFNASWLNSFL

SEQ ID NO: 251642 - protein, 15 aa, Artificial Sequence
  Description of Artificial Sequence: Synthetic peptide
  Seed: DPWVLLNASWFNSFL
DPFVLFNASWNNSFL

SEQ ID NO: 251643 - protein, 15 aa, Artificial Sequence
  Description of Artificial Sequence: Synthetic peptide
  Seed: DPWVLLNASWFNSFL
DPFVLFNASWSNSFL

SEQ ID NO: 251644 - protein, 15 aa, Artificial Sequence
  Description of Artificial Sequence: Synthetic peptide
  Seed: DPWVLLNASWFNSFL
DPFVLFNASWTNSFL

SEQ ID NO: 251645 - protein, 15 aa, Artificial Sequence
  Description of Artificial Sequence: Synthetic peptide
  Seed: DPWVLLNASWFNSFL
DPFVLFNGSWANSFL

SEQ ID NO: 251646 - protein, 15 aa, Artificial Sequence
  Description of Artificial Sequence: Synthetic peptide
  Seed: DPWVLLNASWFNSFL
DPFVLFNGSWVNSFL

SEQ ID NO: 251647 - protein, 15 aa, Artificial Sequence
  Description of Artificial Sequence: Synthetic peptide
  Seed: DPWVLLNASWFNSFL
DPFVLFNNSWDNSFL

SEQ ID NO: 251648 - protein, 15 aa, Artificial Sequence
  Description of Artificial Sequence: Synthetic peptide
  Seed: DPWVLLNASWFNSFL
DPFVLFNNSWINSFL

SEQ ID NO: 251649 - protein, 15 aa, Artificial Sequence
  Description of Artificial Sequence: Synthetic peptide
  Seed: DPWVLLNASWFNSFL
DPFVLFNNSWLNSFL

SEQ ID NO: 251650 - protein, 15 aa, Artificial Sequence
  Description of Artificial Sequence: Synthetic peptide
  Seed: DPWVLLNASWFNSFL
DPFVLFNNSWVNSFL

SEQ ID NO: 251651 - protein, 15 aa, Artificial Sequence
  Description of Artificial Sequence: Synthetic peptide
  Seed: DPWVLLNASWFNSFL
DPFVLFNPSWANSFL

SEQ ID NO: 251652 - protein, 15 aa, Artificial Sequence
  Description of Artificial Sequence: Synthetic peptide
  Seed: DPWVLLNASWFNSFL
DPFVLFNPSWINSFL

SEQ ID NO: 251653 - protein, 15 aa, Artificial Sequence
  Description of Artificial Sequence: Synthetic peptide
  Seed: DPWVLLNASWFNSFL
DPFVLFNPSWLNSFL

SEQ ID NO: 251654 - protein, 15 aa, Artificial Sequence
  Description of Artificial Sequence: Synthetic peptide
  Seed: DPWVLLNASWFNSFL
DPFVLFNPSWNNSFL

SEQ ID NO: 251655 - protein, 15 aa, Artificial Sequence
  Description of Artificial Sequence: Synthetic peptide
  Seed: DPWVLLNASWFNSFL
DPFVLFNPSWVNSFL

SEQ ID NO: 251656 - protein, 15 aa, Artificial Sequence
  Description of Artificial Sequence: Synthetic peptide
  Seed: DPWVLLNASWFNSFL
DPFVLFNSSWANSFL

SEQ ID NO: 251657 - protein, 15 aa, Artificial Sequence
  Description of Artificial Sequence: Synthetic peptide
  Seed: DPWVLLNASWFNSFL
DPFVLFNSSWINSFL

SEQ ID NO: 251658 - protein, 15 aa, Artificial Sequence
  Description of Artificial Sequence: Synthetic peptide
  Seed: DPWVLLNASWFNSFL
DPFVLFNSSWLNSFL

SEQ ID NO: 251659 - protein, 15 aa, Artificial Sequence
  Description of Artificial Sequence: Synthetic peptide
  Seed: DPWVLLNASWFNSFL
DPFVLFNSSWVNSFL

SEQ ID NO: 251660 - protein, 15 aa, Artificial Sequence
  Description of Artificial Sequence: Synthetic peptide
  Seed: DPWVLLNASWFNSFL
DPFVLFNTSWDNSFL

SEQ ID NO: 251661 - protein, 15 aa, Artificial Sequence
  Description of Artificial Sequence: Synthetic peptide
  Seed: DPWVLLNASWFNSFL
DPFVLGNASWANSFL

SEQ ID NO: 251662 - protein, 15 aa, Artificial Sequence
  Description of Artificial Sequence: Synthetic peptide
  Seed: DPWVLLNASWFNSFL
DPFVLGNASWINSFL

SEQ ID NO: 251663 - protein, 15 aa, Artificial Sequence
  Description of Artificial Sequence: Synthetic peptide
  Seed: DPWVLLNASWFNSFL
DPFVLGNASWLNSFL

SEQ ID NO: 251664 - protein, 15 aa, Artificial Sequence
  Description of Artificial Sequence: Synthetic peptide
  Seed: DPWVLLNASWFNSFL
DPFVLGNASWMNSFL

SEQ ID NO: 251665 - protein, 15 aa, Artificial Sequence
  Description of Artificial Sequence: Synthetic peptide
  Seed: DPWVLLNASWFNSFL
DPFVLGNASWVNSFL

SEQ ID NO: 251666 - protein, 15 aa, Artificial Sequence
  Description of Artificial Sequence: Synthetic peptide
  Seed: DPWVLLNASWFNSFL
DPFVLGNGSWINSFL

SEQ ID NO: 251667 - protein, 15 aa, Artificial Sequence
  Description of Artificial Sequence: Synthetic peptide
  Seed: DPWVLLNASWFNSFL
DPFVLGNGSWLNSFL

SEQ ID NO: 251668 - protein, 15 aa, Artificial Sequence
  Description of Artificial Sequence: Synthetic peptide
  Seed: DPWVLLNASWFNSFL
DPFVLGNGSWVNSFL

SEQ ID NO: 251669 - protein, 15 aa, Artificial Sequence
  Description of Artificial Sequence: Synthetic peptide
  Seed: DPWVLLNASWFNSFL
DPFVLGNPSWINSFL

SEQ ID NO: 251670 - protein, 15 aa, Artificial Sequence
  Description of Artificial Sequence: Synthetic peptide
  Seed: DPWVLLNASWFNSFL
DPFVLGNPSWLNSFL

SEQ ID NO: 251671 - protein, 15 aa, Artificial Sequence
  Description of Artificial Sequence: Synthetic peptide
  Seed: DPWVLLNASWFNSFL
DPFVLGNPSWVNSFL

SEQ ID NO: 251672 - protein, 15 aa, Artificial Sequence
  Description of Artificial Sequence: Synthetic peptide
  Seed: DPWVLLNASWFNSFL
DPFVLGNSSWINSFL

SEQ ID NO: 251673 - protein, 15 aa, Artificial Sequence
  Description of Artificial Sequence: Synthetic peptide
  Seed: DPWVLLNASWFNSFL
DPFVLGNSSWLNSFL

SEQ ID NO: 251674 - protein, 15 aa, Artificial Sequence
  Description of Artificial Sequence: Synthetic peptide
  Seed: DPWVLLNASWFNSFL
DPFVLGNSSWVNSFL

SEQ ID NO: 251675 - protein, 15 aa, Artificial Sequence
  Description of Artificial Sequence: Synthetic peptide
  Seed: DPWVLLNASWFNSFL
DPFVLHNASWANSFL

SEQ ID NO: 251676 - protein, 15 aa, Artificial Sequence
  Description of Artificial Sequence: Synthetic peptide
  Seed: DPWVLLNASWFNSFL
DPFVLHNASWINSFL

SEQ ID NO: 251677 - protein, 15 aa, Artificial Sequence
  Description of Artificial Sequence: Synthetic peptide
  Seed: DPWVLLNASWFNSFL
DPFVLHNASWLNSFL

SEQ ID NO: 251678 - protein, 15 aa, Artificial Sequence
  Description of Artificial Sequence: Synthetic peptide
  Seed: DPWVLLNASWFNSFL
DPFVLHNASWMNSFL

SEQ ID NO: 251679 - protein, 15 aa, Artificial Sequence
  Description of Artificial Sequence: Synthetic peptide
  Seed: DPWVLLNASWFNSFL
DPFVLHNASWVNSFL

SEQ ID NO: 251680 - protein, 15 aa, Artificial Sequence
  Description of Artificial Sequence: Synthetic peptide
  Seed: DPWVLLNASWFNSFL
DPFVLHNGSWINSFL

SEQ ID NO: 251681 - protein, 15 aa, Artificial Sequence
  Description of Artificial Sequence: Synthetic peptide
  Seed: DPWVLLNASWFNSFL
DPFVLHNGSWLNSFL

SEQ ID NO: 251682 - protein, 15 aa, Artificial Sequence
  Description of Artificial Sequence: Synthetic peptide
  Seed: DPWVLLNASWFNSFL
DPFVLHNGSWVNSFL

SEQ ID NO: 251683 - protein, 15 aa, Artificial Sequence
  Description of Artificial Sequence: Synthetic peptide
  Seed: DPWVLLNASWFNSFL
DPFVLHNSSWINSFL

SEQ ID NO: 251684 - protein, 15 aa, Artificial Sequence
  Description of Artificial Sequence: Synthetic peptide
  Seed: DPWVLLNASWFNSFL
DPFVLHNSSWLNSFL

SEQ ID NO: 251685 - protein, 15 aa, Artificial Sequence
  Description of Artificial Sequence: Synthetic peptide
  Seed: DPWVLLNASWFNSFL
DPFVLHNSSWVNSFL

SEQ ID NO: 251686 - protein, 15 aa, Artificial Sequence
  Description of Artificial Sequence: Synthetic peptide
  Seed: DPWVLLNASWFNSFL
DPFVLINASWANSFL

SEQ ID NO: 251687 - protein, 15 aa, Artificial Sequence
  Description of Artificial Sequence: Synthetic peptide
  Seed: DPWVLLNASWFNSFL
DPFVLINASWCNSFL

SEQ ID NO: 251688 - protein, 15 aa, Artificial Sequence
  Description of Artificial Sequence: Synthetic peptide
  Seed: DPWVLLNASWFNSFL
DPFVLINASWDNSFL

SEQ ID NO: 251689 - protein, 15 aa, Artificial Sequence
  Description of Artificial Sequence: Synthetic peptide
  Seed: DPWVLLNASWFNSFL
DPFVLINASWENSFL

SEQ ID NO: 251690 - protein, 15 aa, Artificial Sequence
  Description of Artificial Sequence: Synthetic peptide
  Seed: DPWVLLNASWFNSFL
DPFVLINASWFNSFL

SEQ ID NO: 251691 - protein, 15 aa, Artificial Sequence
  Description of Artificial Sequence: Synthetic peptide
  Seed: DPWVLLNASWFNSFL
DPFVLINASWGNSFL

SEQ ID NO: 251692 - protein, 15 aa, Artificial Sequence
  Description of Artificial Sequence: Synthetic peptide
  Seed: DPWVLLNASWFNSFL
DPFVLINASWHNSFL

SEQ ID NO: 251693 - protein, 15 aa, Artificial Sequence
  Description of Artificial Sequence: Synthetic peptide
  Seed: DPWVLLNASWFNSFL
DPFVLINASWINSFL

SEQ ID NO: 251694 - protein, 15 aa, Artificial Sequence
  Description of Artificial Sequence: Synthetic peptide
  Seed: DPWVLLNASWFNSFL
DPFVLINASWKNSFL

SEQ ID NO: 251695 - protein, 15 aa, Artificial Sequence
  Description of Artificial Sequence: Synthetic peptide
  Seed: DPWVLLNASWFNSFL
DPFVLINASWLNSFL

SEQ ID NO: 251696 - protein, 15 aa, Artificial Sequence
  Description of Artificial Sequence: Synthetic peptide
  Seed: DPWVLLNASWFNSFL
DPFVLINASWMNSFL

SEQ ID NO: 251697 - protein, 15 aa, Artificial Sequence
  Description of Artificial Sequence: Synthetic peptide
  Seed: DPWVLLNASWFNSFL
DPFVLINASWNNSFL

SEQ ID NO: 251698 - protein, 15 aa, Artificial Sequence
  Description of Artificial Sequence: Synthetic peptide
  Seed: DPWVLLNASWFNSFL
DPFVLINASWPNSFL

SEQ ID NO: 251699 - protein, 15 aa, Artificial Sequence
  Description of Artificial Sequence: Synthetic peptide
  Seed: DPWVLLNASWFNSFL
DPFVLINASWQNSFL

SEQ ID NO: 251700 - protein, 15 aa, Artificial Sequence
  Description of Artificial Sequence: Synthetic peptide
  Seed: DPWVLLNASWFNSFL
DPFVLINASWRNSFL

SEQ ID NO: 251701 - protein, 15 aa, Artificial Sequence
  Description of Artificial Sequence: Synthetic peptide
  Seed: DPWVLLNASWFNSFL
DPFVLINASWSNSFL

SEQ ID NO: 251702 - protein, 15 aa, Artificial Sequence
  Description of Artificial Sequence: Synthetic peptide
  Seed: DPWVLLNASWFNSFL
DPFVLINASWTNSFL

SEQ ID NO: 251703 - protein, 15 aa, Artificial Sequence
  Description of Artificial Sequence: Synthetic peptide
  Seed: DPWVLLNASWFNSFL
DPFVLINDSWANSFL

SEQ ID NO: 251704 - protein, 15 aa, Artificial Sequence
  Description of Artificial Sequence: Synthetic peptide
  Seed: DPWVLLNASWFNSFL
DPFVLINDSWDNSFL

SEQ ID NO: 251705 - protein, 15 aa, Artificial Sequence
  Description of Artificial Sequence: Synthetic peptide
  Seed: DPWVLLNASWFNSFL
DPFVLINDSWSNSFL

SEQ ID NO: 251706 - protein, 15 aa, Artificial Sequence
  Description of Artificial Sequence: Synthetic peptide
  Seed: DPWVLLNASWFNSFL
DPFVLINGSWANSFL

SEQ ID NO: 251707 - protein, 15 aa, Artificial Sequence
  Description of Artificial Sequence: Synthetic peptide
  Seed: DPWVLLNASWFNSFL
DPFVLINGSWGNSFL

SEQ ID NO: 251708 - protein, 15 aa, Artificial Sequence
  Description of Artificial Sequence: Synthetic peptide
  Seed: DPWVLLNASWFNSFL
DPFVLINGSWHNSFL

SEQ ID NO: 251709 - protein, 15 aa, Artificial Sequence
  Description of Artificial Sequence: Synthetic peptide
  Seed: DPWVLLNASWFNSFL
DPFVLINGSWINSFL

SEQ ID NO: 251710 - protein, 15 aa, Artificial Sequence
  Description of Artificial Sequence: Synthetic peptide
  Seed: DPWVLLNASWFNSFL
DPFVLINGSWLNSFL

SEQ ID NO: 251711 - protein, 15 aa, Artificial Sequence
  Description of Artificial Sequence: Synthetic peptide
  Seed: DPWVLLNASWFNSFL
DPFVLINGSWMNSFL

SEQ ID NO: 251712 - protein, 15 aa, Artificial Sequence
  Description of Artificial Sequence: Synthetic peptide
  Seed: DPWVLLNASWFNSFL
DPFVLINGSWNNSFL

SEQ ID NO: 251713 - protein, 15 aa, Artificial Sequence
  Description of Artificial Sequence: Synthetic peptide
  Seed: DPWVLLNASWFNSFL
DPFVLINGSWSNSFL

SEQ ID NO: 251714 - protein, 15 aa, Artificial Sequence
  Description of Artificial Sequence: Synthetic peptide
  Seed: DPWVLLNASWFNSFL
DPFVLINGSWTNSFL

SEQ ID NO: 251715 - protein, 15 aa, Artificial Sequence
  Description of Artificial Sequence: Synthetic peptide
  Seed: DPWVLLNASWFNSFL
DPFVLINGSWVNSFL

SEQ ID NO: 251716 - protein, 15 aa, Artificial Sequence
  Description of Artificial Sequence: Synthetic peptide
  Seed: DPWVLLNASWFNSFL
DPFVLINHSWANSFL

SEQ ID NO: 251717 - protein, 15 aa, Artificial Sequence
  Description of Artificial Sequence: Synthetic peptide
  Seed: DPWVLLNASWFNSFL
DPFVLINISWANSFL

SEQ ID NO: 251718 - protein, 15 aa, Artificial Sequence
  Description of Artificial Sequence: Synthetic peptide
  Seed: DPWVLLNASWFNSFL
DPFVLINISWDNSFL

SEQ ID NO: 251719 - protein, 15 aa, Artificial Sequence
  Description of Artificial Sequence: Synthetic peptide
  Seed: DPWVLLNASWFNSFL
DPFVLINISWHNSFL

SEQ ID NO: 251720 - protein, 15 aa, Artificial Sequence
  Description of Artificial Sequence: Synthetic peptide
  Seed: DPWVLLNASWFNSFL
DPFVLINISWNNSFL

SEQ ID NO: 251721 - protein, 15 aa, Artificial Sequence
  Description of Artificial Sequence: Synthetic peptide
  Seed: DPWVLLNASWFNSFL
DPFVLINISWSNSFL

SEQ ID NO: 251722 - protein, 15 aa, Artificial Sequence
  Description of Artificial Sequence: Synthetic peptide
  Seed: DPWVLLNASWFNSFL
DPFVLINMSWNNSFL

SEQ ID NO: 251723 - protein, 15 aa, Artificial Sequence
  Description of Artificial Sequence: Synthetic peptide
  Seed: DPWVLLNASWFNSFL
DPFVLINNSWANSFL

SEQ ID NO: 251724 - protein, 15 aa, Artificial Sequence
  Description of Artificial Sequence: Synthetic peptide
  Seed: DPWVLLNASWFNSFL
DPFVLINNSWDNSFL

SEQ ID NO: 251725 - protein, 15 aa, Artificial Sequence
  Description of Artificial Sequence: Synthetic peptide
  Seed: DPWVLLNASWFNSFL
DPFVLINNSWENSFL

SEQ ID NO: 251726 - protein, 15 aa, Artificial Sequence
  Description of Artificial Sequence: Synthetic peptide
  Seed: DPWVLLNASWFNSFL
DPFVLINNSWGNSFL

SEQ ID NO: 251727 - protein, 15 aa, Artificial Sequence
  Description of Artificial Sequence: Synthetic peptide
  Seed: DPWVLLNASWFNSFL
DPFVLINNSWHNSFL

SEQ ID NO: 251728 - protein, 15 aa, Artificial Sequence
  Description of Artificial Sequence: Synthetic peptide
  Seed: DPWVLLNASWFNSFL
DPFVLINNSWINSFL

SEQ ID NO: 251729 - protein, 15 aa, Artificial Sequence
  Description of Artificial Sequence: Synthetic peptide
  Seed: DPWVLLNASWFNSFL
DPFVLINNSWLNSFL

SEQ ID NO: 251730 - protein, 15 aa, Artificial Sequence
  Description of Artificial Sequence: Synthetic peptide
  Seed: DPWVLLNASWFNSFL
DPFVLINNSWMNSFL

SEQ ID NO: 251731 - protein, 15 aa, Artificial Sequence
  Description of Artificial Sequence: Synthetic peptide
  Seed: DPWVLLNASWFNSFL
DPFVLINNSWNNSFL

SEQ ID NO: 251732 - protein, 15 aa, Artificial Sequence
  Description of Artificial Sequence: Synthetic peptide
  Seed: DPWVLLNASWFNSFL
DPFVLINNSWQNSFL

SEQ ID NO: 251733 - protein, 15 aa, Artificial Sequence
  Description of Artificial Sequence: Synthetic peptide
  Seed: DPWVLLNASWFNSFL
DPFVLINNSWSNSFL

SEQ ID NO: 251734 - protein, 15 aa, Artificial Sequence
  Description of Artificial Sequence: Synthetic peptide
  Seed: DPWVLLNASWFNSFL
DPFVLINNSWTNSFL

SEQ ID NO: 251735 - protein, 15 aa, Artificial Sequence
  Description of Artificial Sequence: Synthetic peptide
  Seed: DPWVLLNASWFNSFL
DPFVLINNSWVNSFL

SEQ ID NO: 251736 - protein, 15 aa, Artificial Sequence
  Description of Artificial Sequence: Synthetic peptide
  Seed: DPWVLLNASWFNSFL
DPFVLINPSWANSFL

SEQ ID NO: 251737 - protein, 15 aa, Artificial Sequence
  Description of Artificial Sequence: Synthetic peptide
  Seed: DPWVLLNASWFNSFL
DPFVLINPSWGNSFL

SEQ ID NO: 251738 - protein, 15 aa, Artificial Sequence
  Description of Artificial Sequence: Synthetic peptide
  Seed: DPWVLLNASWFNSFL
DPFVLINPSWHNSFL

SEQ ID NO: 251739 - protein, 15 aa, Artificial Sequence
  Description of Artificial Sequence: Synthetic peptide
  Seed: DPWVLLNASWFNSFL
DPFVLINPSWINSFL

SEQ ID NO: 251740 - protein, 15 aa, Artificial Sequence
  Description of Artificial Sequence: Synthetic peptide
  Seed: DPWVLLNASWFNSFL
DPFVLINPSWLNSFL

SEQ ID NO: 251741 - protein, 15 aa, Artificial Sequence
  Description of Artificial Sequence: Synthetic peptide
  Seed: DPWVLLNASWFNSFL
DPFVLINPSWMNSFL

SEQ ID NO: 251742 - protein, 15 aa, Artificial Sequence
  Description of Artificial Sequence: Synthetic peptide
  Seed: DPWVLLNASWFNSFL
DPFVLINPSWNNSFL

SEQ ID NO: 251743 - protein, 15 aa, Artificial Sequence
  Description of Artificial Sequence: Synthetic peptide
  Seed: DPWVLLNASWFNSFL
DPFVLINPSWQNSFL

SEQ ID NO: 251744 - protein, 15 aa, Artificial Sequence
  Description of Artificial Sequence: Synthetic peptide
  Seed: DPWVLLNASWFNSFL
DPFVLINPSWSNSFL

SEQ ID NO: 251745 - protein, 15 aa, Artificial Sequence
  Description of Artificial Sequence: Synthetic peptide
  Seed: DPWVLLNASWFNSFL
DPFVLINPSWTNSFL

SEQ ID NO: 251746 - protein, 15 aa, Artificial Sequence
  Description of Artificial Sequence: Synthetic peptide
  Seed: DPWVLLNASWFNSFL
DPFVLINPSWVNSFL

SEQ ID NO: 251747 - protein, 15 aa, Artificial Sequence
  Description of Artificial Sequence: Synthetic peptide
  Seed: DPWVLLNASWFNSFL
DPFVLINSSWANSFL

SEQ ID NO: 251748 - protein, 15 aa, Artificial Sequence
  Description of Artificial Sequence: Synthetic peptide
  Seed: DPWVLLNASWFNSFL
DPFVLINSSWDNSFL

SEQ ID NO: 251749 - protein, 15 aa, Artificial Sequence
  Description of Artificial Sequence: Synthetic peptide
  Seed: DPWVLLNASWFNSFL
DPFVLINSSWENSFL

SEQ ID NO: 251750 - protein, 15 aa, Artificial Sequence
  Description of Artificial Sequence: Synthetic peptide
  Seed: DPWVLLNASWFNSFL
DPFVLINSSWGNSFL

SEQ ID NO: 251751 - protein, 15 aa, Artificial Sequence
  Description of Artificial Sequence: Synthetic peptide
  Seed: DPWVLLNASWFNSFL
DPFVLINSSWHNSFL

SEQ ID NO: 251752 - protein, 15 aa, Artificial Sequence
  Description of Artificial Sequence: Synthetic peptide
  Seed: DPWVLLNASWFNSFL
DPFVLINSSWINSFL

SEQ ID NO: 251753 - protein, 15 aa, Artificial Sequence
  Description of Artificial Sequence: Synthetic peptide
  Seed: DPWVLLNASWFNSFL
DPFVLINSSWLNSFL

SEQ ID NO: 251754 - protein, 15 aa, Artificial Sequence
  Description of Artificial Sequence: Synthetic peptide
  Seed: DPWVLLNASWFNSFL
DPFVLINSSWMNSFL

SEQ ID NO: 251755 - protein, 15 aa, Artificial Sequence
  Description of Artificial Sequence: Synthetic peptide
  Seed: DPWVLLNASWFNSFL
DPFVLINSSWNNSFL

SEQ ID NO: 251756 - protein, 15 aa, Artificial Sequence
  Description of Artificial Sequence: Synthetic peptide
  Seed: DPWVLLNASWFNSFL
DPFVLINSSWQNSFL

SEQ ID NO: 251757 - protein, 15 aa, Artificial Sequence
  Description of Artificial Sequence: Synthetic peptide
  Seed: DPWVLLNASWFNSFL
DPFVLINSSWSNSFL

SEQ ID NO: 251758 - protein, 15 aa, Artificial Sequence
  Description of Artificial Sequence: Synthetic peptide
  Seed: DPWVLLNASWFNSFL
DPFVLINSSWTNSFL

SEQ ID NO: 251759 - protein, 15 aa, Artificial Sequence
  Description of Artificial Sequence: Synthetic peptide
  Seed: DPWVLLNASWFNSFL
DPFVLINSSWVNSFL

SEQ ID NO: 251760 - protein, 15 aa, Artificial Sequence
  Description of Artificial Sequence: Synthetic peptide
  Seed: DPWVLLNASWFNSFL
DPFVLINTSWANSFL

SEQ ID NO: 251761 - protein, 15 aa, Artificial Sequence
  Description of Artificial Sequence: Synthetic peptide
  Seed: DPWVLLNASWFNSFL
DPFVLINTSWDNSFL

SEQ ID NO: 251762 - protein, 15 aa, Artificial Sequence
  Description of Artificial Sequence: Synthetic peptide
  Seed: DPWVLLNASWFNSFL
DPFVLINTSWENSFL

SEQ ID NO: 251763 - protein, 15 aa, Artificial Sequence
  Description of Artificial Sequence: Synthetic peptide
  Seed: DPWVLLNASWFNSFL
DPFVLINTSWGNSFL

SEQ ID NO: 251764 - protein, 15 aa, Artificial Sequence
  Description of Artificial Sequence: Synthetic peptide
  Seed: DPWVLLNASWFNSFL
DPFVLINTSWHNSFL

SEQ ID NO: 251765 - protein, 15 aa, Artificial Sequence
  Description of Artificial Sequence: Synthetic peptide
  Seed: DPWVLLNASWFNSFL
DPFVLINTSWINSFL

SEQ ID NO: 251766 - protein, 15 aa, Artificial Sequence
  Description of Artificial Sequence: Synthetic peptide
  Seed: DPWVLLNASWFNSFL
DPFVLINTSWLNSFL

SEQ ID NO: 251767 - protein, 15 aa, Artificial Sequence
  Description of Artificial Sequence: Synthetic peptide
  Seed: DPWVLLNASWFNSFL
DPFVLINTSWMNSFL

SEQ ID NO: 251768 - protein, 15 aa, Artificial Sequence
  Description of Artificial Sequence: Synthetic peptide
  Seed: DPWVLLNASWFNSFL
DPFVLINTSWNNSFL

SEQ ID NO: 251769 - protein, 15 aa, Artificial Sequence
  Description of Artificial Sequence: Synthetic peptide
  Seed: DPWVLLNASWFNSFL
DPFVLINTSWQNSFL

SEQ ID NO: 251770 - protein, 15 aa, Artificial Sequence
  Description of Artificial Sequence: Synthetic peptide
  Seed: DPWVLLNASWFNSFL
DPFVLINTSWSNSFL

SEQ ID NO: 251771 - protein, 15 aa, Artificial Sequence
  Description of Artificial Sequence: Synthetic peptide
  Seed: DPWVLLNASWFNSFL
DPFVLINTSWTNSFL

SEQ ID NO: 251772 - protein, 15 aa, Artificial Sequence
  Description of Artificial Sequence: Synthetic peptide
  Seed: DPWVLLNASWFNSFL
DPFVLINTSWVNSFL

SEQ ID NO: 251773 - protein, 15 aa, Artificial Sequence
  Description of Artificial Sequence: Synthetic peptide
  Seed: DPWVLLNASWFNSFL
DPFVLINVSWANSFL

SEQ ID NO: 251774 - protein, 15 aa, Artificial Sequence
  Description of Artificial Sequence: Synthetic peptide
  Seed: DPWVLLNASWFNSFL
DPFVLINVSWDNSFL

SEQ ID NO: 251775 - protein, 15 aa, Artificial Sequence
  Description of Artificial Sequence: Synthetic peptide
  Seed: DPWVLLNASWFNSFL
DPFVLINVSWHNSFL

SEQ ID NO: 251776 - protein, 15 aa, Artificial Sequence
  Description of Artificial Sequence: Synthetic peptide
  Seed: DPWVLLNASWFNSFL
DPFVLINVSWNNSFL

SEQ ID NO: 251777 - protein, 15 aa, Artificial Sequence
  Description of Artificial Sequence: Synthetic peptide
  Seed: DPWVLLNASWFNSFL
DPFVLINVSWSNSFL

SEQ ID NO: 251778 - protein, 15 aa, Artificial Sequence
  Description of Artificial Sequence: Synthetic peptide
  Seed: DPWVLLNASWFNSFL
DPFVLINVSWTNSFL

SEQ ID NO: 251779 - protein, 15 aa, Artificial Sequence
  Description of Artificial Sequence: Synthetic peptide
  Seed: DPWVLLNASWFNSFL
DPFVLKNASWINSFL

SEQ ID NO: 251780 - protein, 15 aa, Artificial Sequence
  Description of Artificial Sequence: Synthetic peptide
  Seed: DPWVLLNASWFNSFL
DPFVLKNASWLNSFL

SEQ ID NO: 251781 - protein, 15 aa, Artificial Sequence
  Description of Artificial Sequence: Synthetic peptide
  Seed: DPWVLLNASWFNSFL
DPFVLKNASWVNSFL

SEQ ID NO: 251782 - protein, 15 aa, Artificial Sequence
  Description of Artificial Sequence: Synthetic peptide
  Seed: DPWVLLNASWFNSFL
DPFVLKNGSWLNSFL

SEQ ID NO: 251783 - protein, 15 aa, Artificial Sequence
  Description of Artificial Sequence: Synthetic peptide
  Seed: DPWVLLNASWFNSFL
DPFVLKNSSWLNSFL

SEQ ID NO: 251784 - protein, 15 aa, Artificial Sequence
  Description of Artificial Sequence: Synthetic peptide
  Seed: DPWVLLNASWFNSFL
DPFVLLNASWANSFL

SEQ ID NO: 251785 - protein, 15 aa, Artificial Sequence
  Description of Artificial Sequence: Synthetic peptide
  Seed: DPWVLLNASWFNSFL
DPFVLLNASWCNSFL

SEQ ID NO: 251786 - protein, 15 aa, Artificial Sequence
  Description of Artificial Sequence: Synthetic peptide
  Seed: DPWVLLNASWFNSFL
DPFVLLNASWDNSFL

SEQ ID NO: 251787 - protein, 15 aa, Artificial Sequence
  Description of Artificial Sequence: Synthetic peptide
  Seed: DPWVLLNASWFNSFL
DPFVLLNASWENSFL

SEQ ID NO: 251788 - protein, 15 aa, Artificial Sequence
  Description of Artificial Sequence: Synthetic peptide
  Seed: DPWVLLNASWFNSFL
DPFVLLNASWFNSFL

SEQ ID NO: 251789 - protein, 15 aa, Artificial Sequence
  Description of Artificial Sequence: Synthetic peptide
  Seed: DPWVLLNASWFNSFL
DPFVLLNASWGNSFL

SEQ ID NO: 251790 - protein, 15 aa, Artificial Sequence
  Description of Artificial Sequence: Synthetic peptide
  Seed: DPWVLLNASWFNSFL
DPFVLLNASWHNSFL

SEQ ID NO: 251791 - protein, 15 aa, Artificial Sequence
  Description of Artificial Sequence: Synthetic peptide
  Seed: DPWVLLNASWFNSFL
DPFVLLNASWINSFL

SEQ ID NO: 251792 - protein, 15 aa, Artificial Sequence
  Description of Artificial Sequence: Synthetic peptide
  Seed: DPWVLLNASWFNSFL
DPFVLLNASWKNSFL

SEQ ID NO: 251793 - protein, 15 aa, Artificial Sequence
  Description of Artificial Sequence: Synthetic peptide
  Seed: DPWVLLNASWFNSFL
DPFVLLNASWLNSFL

SEQ ID NO: 251794 - protein, 15 aa, Artificial Sequence
  Description of Artificial Sequence: Synthetic peptide
  Seed: DPWVLLNASWFNSFL
DPFVLLNASWMNSFL

SEQ ID NO: 251795 - protein, 15 aa, Artificial Sequence
  Description of Artificial Sequence: Synthetic peptide
  Seed: DPWVLLNASWFNSFL
DPFVLLNASWNNSFL

SEQ ID NO: 251796 - protein, 15 aa, Artificial Sequence
  Description of Artificial Sequence: Synthetic peptide
  Seed: DPWVLLNASWFNSFL
DPFVLLNASWPNSFL

SEQ ID NO: 251797 - protein, 15 aa, Artificial Sequence
  Description of Artificial Sequence: Synthetic peptide
  Seed: DPWVLLNASWFNSFL
DPFVLLNASWQNSFL

SEQ ID NO: 251798 - protein, 15 aa, Artificial Sequence
  Description of Artificial Sequence: Synthetic peptide
  Seed: DPWVLLNASWFNSFL
DPFVLLNASWRNSFL

SEQ ID NO: 251799 - protein, 15 aa, Artificial Sequence
  Description of Artificial Sequence: Synthetic peptide
  Seed: DPWVLLNASWFNSFL
DPFVLLNASWSNSFL

SEQ ID NO: 251800 - protein, 15 aa, Artificial Sequence
  Description of Artificial Sequence: Synthetic peptide
  Seed: DPWVLLNASWFNSFL
DPFVLLNASWTNSFL

SEQ ID NO: 251801 - protein, 15 aa, Artificial Sequence
  Description of Artificial Sequence: Synthetic peptide
  Seed: DPWVLLNASWFNSFL
DPFVLLNASWVNSFL

SEQ ID NO: 251802 - protein, 15 aa, Artificial Sequence
  Description of Artificial Sequence: Synthetic peptide
  Seed: DPWVLLNASWFNSFL
DPFVLLNASWYNSFL

SEQ ID NO: 251803 - protein, 15 aa, Artificial Sequence
  Description of Artificial Sequence: Synthetic peptide
  Seed: DPWVLLNASWFNSFL
DPFVLLNDSWINSFL

SEQ ID NO: 251804 - protein, 15 aa, Artificial Sequence
  Description of Artificial Sequence: Synthetic peptide
  Seed: DPWVLLNASWFNSFL
DPFVLLNDSWLNSFL

SEQ ID NO: 251805 - protein, 15 aa, Artificial Sequence
  Description of Artificial Sequence: Synthetic peptide
  Seed: DPWVLLNASWFNSFL
DPFVLLNDSWVNSFL

SEQ ID NO: 251806 - protein, 15 aa, Artificial Sequence
  Description of Artificial Sequence: Synthetic peptide
  Seed: DPWVLLNASWFNSFL
DPFVLLNESWLNSFL

SEQ ID NO: 251807 - protein, 15 aa, Artificial Sequence
  Description of Artificial Sequence: Synthetic peptide
  Seed: DPWVLLNASWFNSFL
DPFVLLNESWVNSFL

SEQ ID NO: 251808 - protein, 15 aa, Artificial Sequence
  Description of Artificial Sequence: Synthetic peptide
  Seed: DPWVLLNASWFNSFL
DPFVLLNGSWANSFL

SEQ ID NO: 251809 - protein, 15 aa, Artificial Sequence
  Description of Artificial Sequence: Synthetic peptide
  Seed: DPWVLLNASWFNSFL
DPFVLLNGSWCNSFL

SEQ ID NO: 251810 - protein, 15 aa, Artificial Sequence
  Description of Artificial Sequence: Synthetic peptide
  Seed: DPWVLLNASWFNSFL
DPFVLLNGSWFNSFL

SEQ ID NO: 251811 - protein, 15 aa, Artificial Sequence
  Description of Artificial Sequence: Synthetic peptide
  Seed: DPWVLLNASWFNSFL
DPFVLLNGSWGNSFL

SEQ ID NO: 251812 - protein, 15 aa, Artificial Sequence
  Description of Artificial Sequence: Synthetic peptide
  Seed: DPWVLLNASWFNSFL
DPFVLLNGSWHNSFL

SEQ ID NO: 251813 - protein, 15 aa, Artificial Sequence
  Description of Artificial Sequence: Synthetic peptide
  Seed: DPWVLLNASWFNSFL
DPFVLLNGSWINSFL

SEQ ID NO: 251814 - protein, 15 aa, Artificial Sequence
  Description of Artificial Sequence: Synthetic peptide
  Seed: DPWVLLNASWFNSFL
DPFVLLNGSWKNSFL

SEQ ID NO: 251815 - protein, 15 aa, Artificial Sequence
  Description of Artificial Sequence: Synthetic peptide
  Seed: DPWVLLNASWFNSFL
DPFVLLNGSWLNSFL

SEQ ID NO: 251816 - protein, 15 aa, Artificial Sequence
  Description of Artificial Sequence: Synthetic peptide
  Seed: DPWVLLNASWFNSFL
DPFVLLNGSWMNSFL

SEQ ID NO: 251817 - protein, 15 aa, Artificial Sequence
  Description of Artificial Sequence: Synthetic peptide
  Seed: DPWVLLNASWFNSFL
DPFVLLNGSWNNSFL

SEQ ID NO: 251818 - protein, 15 aa, Artificial Sequence
  Description of Artificial Sequence: Synthetic peptide
  Seed: DPWVLLNASWFNSFL
DPFVLLNGSWPNSFL

SEQ ID NO: 251819 - protein, 15 aa, Artificial Sequence
  Description of Artificial Sequence: Synthetic peptide
  Seed: DPWVLLNASWFNSFL
DPFVLLNGSWQNSFL

SEQ ID NO: 251820 - protein, 15 aa, Artificial Sequence
  Description of Artificial Sequence: Synthetic peptide
  Seed: DPWVLLNASWFNSFL
DPFVLLNGSWRNSFL

SEQ ID NO: 251821 - protein, 15 aa, Artificial Sequence
  Description of Artificial Sequence: Synthetic peptide
  Seed: DPWVLLNASWFNSFL
DPFVLLNGSWSNSFL

SEQ ID NO: 251822 - protein, 15 aa, Artificial Sequence
  Description of Artificial Sequence: Synthetic peptide
  Seed: DPWVLLNASWFNSFL
DPFVLLNGSWTNSFL

SEQ ID NO: 251823 - protein, 15 aa, Artificial Sequence
  Description of Artificial Sequence: Synthetic peptide
  Seed: DPWVLLNASWFNSFL
DPFVLLNGSWVNSFL

SEQ ID NO: 251824 - protein, 15 aa, Artificial Sequence
  Description of Artificial Sequence: Synthetic peptide
  Seed: DPWVLLNASWFNSFL
DPFVLLNGSWYNSFL

SEQ ID NO: 251825 - protein, 15 aa, Artificial Sequence
  Description of Artificial Sequence: Synthetic peptide
  Seed: DPWVLLNASWFNSFL
DPFVLLNHSWANSFL

SEQ ID NO: 251826 - protein, 15 aa, Artificial Sequence
  Description of Artificial Sequence: Synthetic peptide
  Seed: DPWVLLNASWFNSFL
DPFVLLNHSWLNSFL

SEQ ID NO: 251827 - protein, 15 aa, Artificial Sequence
  Description of Artificial Sequence: Synthetic peptide
  Seed: DPWVLLNASWFNSFL
DPFVLLNHSWMNSFL

SEQ ID NO: 251828 - protein, 15 aa, Artificial Sequence
  Description of Artificial Sequence: Synthetic peptide
  Seed: DPWVLLNASWFNSFL
DPFVLLNHSWVNSFL

SEQ ID NO: 251829 - protein, 15 aa, Artificial Sequence
  Description of Artificial Sequence: Synthetic peptide
  Seed: DPWVLLNASWFNSFL
DPFVLLNISWANSFL

SEQ ID NO: 251830 - protein, 15 aa, Artificial Sequence
  Description of Artificial Sequence: Synthetic peptide
  Seed: DPWVLLNASWFNSFL
DPFVLLNISWHNSFL

SEQ ID NO: 251831 - protein, 15 aa, Artificial Sequence
  Description of Artificial Sequence: Synthetic peptide
  Seed: DPWVLLNASWFNSFL
DPFVLLNISWNNSFL

SEQ ID NO: 251832 - protein, 15 aa, Artificial Sequence
  Description of Artificial Sequence: Synthetic peptide
  Seed: DPWVLLNASWFNSFL
DPFVLLNISWSNSFL

SEQ ID NO: 251833 - protein, 15 aa, Artificial Sequence
  Description of Artificial Sequence: Synthetic peptide
  Seed: DPWVLLNASWFNSFL
DPFVLLNLSWNNSFL

SEQ ID NO: 251834 - protein, 15 aa, Artificial Sequence
  Description of Artificial Sequence: Synthetic peptide
  Seed: DPWVLLNASWFNSFL
DPFVLLNMSWNNSFL

SEQ ID NO: 251835 - protein, 15 aa, Artificial Sequence
  Description of Artificial Sequence: Synthetic peptide
  Seed: DPWVLLNASWFNSFL
DPFVLLNNSWANSFL

SEQ ID NO: 251836 - protein, 15 aa, Artificial Sequence
  Description of Artificial Sequence: Synthetic peptide
  Seed: DPWVLLNASWFNSFL
DPFVLLNNSWDNSFL

SEQ ID NO: 251837 - protein, 15 aa, Artificial Sequence
  Description of Artificial Sequence: Synthetic peptide
  Seed: DPWVLLNASWFNSFL
DPFVLLNNSWENSFL

SEQ ID NO: 251838 - protein, 15 aa, Artificial Sequence
  Description of Artificial Sequence: Synthetic peptide
  Seed: DPWVLLNASWFNSFL
DPFVLLNNSWFNSFL

SEQ ID NO: 251839 - protein, 15 aa, Artificial Sequence
  Description of Artificial Sequence: Synthetic peptide
  Seed: DPWVLLNASWFNSFL
DPFVLLNNSWGNSFL

SEQ ID NO: 251840 - protein, 15 aa, Artificial Sequence
  Description of Artificial Sequence: Synthetic peptide
  Seed: DPWVLLNASWFNSFL
DPFVLLNNSWHNSFL

SEQ ID NO: 251841 - protein, 15 aa, Artificial Sequence
  Description of Artificial Sequence: Synthetic peptide
  Seed: DPWVLLNASWFNSFL
DPFVLLNNSWINSFL

SEQ ID NO: 251842 - protein, 15 aa, Artificial Sequence
  Description of Artificial Sequence: Synthetic peptide
  Seed: DPWVLLNASWFNSFL
DPFVLLNNSWLNSFL

SEQ ID NO: 251843 - protein, 15 aa, Artificial Sequence
  Description of Artificial Sequence: Synthetic peptide
  Seed: DPWVLLNASWFNSFL
DPFVLLNNSWMNSFL

SEQ ID NO: 251844 - protein, 15 aa, Artificial Sequence
  Description of Artificial Sequence: Synthetic peptide
  Seed: DPWVLLNASWFNSFL
DPFVLLNNSWNNSFL

SEQ ID NO: 251845 - protein, 15 aa, Artificial Sequence
  Description of Artificial Sequence: Synthetic peptide
  Seed: DPWVLLNASWFNSFL
DPFVLLNNSWQNSFL

SEQ ID NO: 251846 - protein, 15 aa, Artificial Sequence
  Description of Artificial Sequence: Synthetic peptide
  Seed: DPWVLLNASWFNSFL
DPFVLLNNSWSNSFL

SEQ ID NO: 251847 - protein, 15 aa, Artificial Sequence
  Description of Artificial Sequence: Synthetic peptide
  Seed: DPWVLLNASWFNSFL
DPFVLLNNSWTNSFL

SEQ ID NO: 251848 - protein, 15 aa, Artificial Sequence
  Description of Artificial Sequence: Synthetic peptide
  Seed: DPWVLLNASWFNSFL
DPFVLLNNSWVNSFL

SEQ ID NO: 251849 - protein, 15 aa, Artificial Sequence
  Description of Artificial Sequence: Synthetic peptide
  Seed: DPWVLLNASWFNSFL
DPFVLLNPSWANSFL

SEQ ID NO: 251850 - protein, 15 aa, Artificial Sequence
  Description of Artificial Sequence: Synthetic peptide
  Seed: DPWVLLNASWFNSFL
DPFVLLNPSWCNSFL

SEQ ID NO: 251851 - protein, 15 aa, Artificial Sequence
  Description of Artificial Sequence: Synthetic peptide
  Seed: DPWVLLNASWFNSFL
DPFVLLNPSWDNSFL

SEQ ID NO: 251852 - protein, 15 aa, Artificial Sequence
  Description of Artificial Sequence: Synthetic peptide
  Seed: DPWVLLNASWFNSFL
DPFVLLNPSWENSFL

SEQ ID NO: 251853 - protein, 15 aa, Artificial Sequence
  Description of Artificial Sequence: Synthetic peptide
  Seed: DPWVLLNASWFNSFL
DPFVLLNPSWFNSFL

SEQ ID NO: 251854 - protein, 15 aa, Artificial Sequence
  Description of Artificial Sequence: Synthetic peptide
  Seed: DPWVLLNASWFNSFL
DPFVLLNPSWGNSFL

SEQ ID NO: 251855 - protein, 15 aa, Artificial Sequence
  Description of Artificial Sequence: Synthetic peptide
  Seed: DPWVLLNASWFNSFL
DPFVLLNPSWHNSFL

SEQ ID NO: 251856 - protein, 15 aa, Artificial Sequence
  Description of Artificial Sequence: Synthetic peptide
  Seed: DPWVLLNASWFNSFL
DPFVLLNPSWINSFL

SEQ ID NO: 251857 - protein, 15 aa, Artificial Sequence
  Description of Artificial Sequence: Synthetic peptide
  Seed: DPWVLLNASWFNSFL
DPFVLLNPSWKNSFL

SEQ ID NO: 251858 - protein, 15 aa, Artificial Sequence
  Description of Artificial Sequence: Synthetic peptide
  Seed: DPWVLLNASWFNSFL
DPFVLLNPSWLNSFL

SEQ ID NO: 251859 - protein, 15 aa, Artificial Sequence
  Description of Artificial Sequence: Synthetic peptide
  Seed: DPWVLLNASWFNSFL
DPFVLLNPSWMNSFL

SEQ ID NO: 251860 - protein, 15 aa, Artificial Sequence
  Description of Artificial Sequence: Synthetic peptide
  Seed: DPWVLLNASWFNSFL
DPFVLLNPSWNNSFL

SEQ ID NO: 251861 - protein, 15 aa, Artificial Sequence
  Description of Artificial Sequence: Synthetic peptide
  Seed: DPWVLLNASWFNSFL
DPFVLLNPSWPNSFL

SEQ ID NO: 251862 - protein, 15 aa, Artificial Sequence
  Description of Artificial Sequence: Synthetic peptide
  Seed: DPWVLLNASWFNSFL
DPFVLLNPSWQNSFL

SEQ ID NO: 251863 - protein, 15 aa, Artificial Sequence
  Description of Artificial Sequence: Synthetic peptide
  Seed: DPWVLLNASWFNSFL
DPFVLLNPSWRNSFL

SEQ ID NO: 251864 - protein, 15 aa, Artificial Sequence
  Description of Artificial Sequence: Synthetic peptide
  Seed: DPWVLLNASWFNSFL
DPFVLLNPSWSNSFL

SEQ ID NO: 251865 - protein, 15 aa, Artificial Sequence
  Description of Artificial Sequence: Synthetic peptide
  Seed: DPWVLLNASWFNSFL
DPFVLLNPSWTNSFL

SEQ ID NO: 251866 - protein, 15 aa, Artificial Sequence
  Description of Artificial Sequence: Synthetic peptide
  Seed: DPWVLLNASWFNSFL
DPFVLLNPSWVNSFL

SEQ ID NO: 251867 - protein, 15 aa, Artificial Sequence
  Description of Artificial Sequence: Synthetic peptide
  Seed: DPWVLLNASWFNSFL
DPFVLLNPSWYNSFL

SEQ ID NO: 251868 - protein, 15 aa, Artificial Sequence
  Description of Artificial Sequence: Synthetic peptide
  Seed: DPWVLLNASWFNSFL
DPFVLLNSSWANSFL

SEQ ID NO: 251869 - protein, 15 aa, Artificial Sequence
  Description of Artificial Sequence: Synthetic peptide
  Seed: DPWVLLNASWFNSFL
DPFVLLNSSWCNSFL

SEQ ID NO: 251870 - protein, 15 aa, Artificial Sequence
  Description of Artificial Sequence: Synthetic peptide
  Seed: DPWVLLNASWFNSFL
DPFVLLNSSWDNSFL

SEQ ID NO: 251871 - protein, 15 aa, Artificial Sequence
  Description of Artificial Sequence: Synthetic peptide
  Seed: DPWVLLNASWFNSFL
DPFVLLNSSWENSFL

SEQ ID NO: 251872 - protein, 15 aa, Artificial Sequence
  Description of Artificial Sequence: Synthetic peptide
  Seed: DPWVLLNASWFNSFL
DPFVLLNSSWFNSFL

SEQ ID NO: 251873 - protein, 15 aa, Artificial Sequence
  Description of Artificial Sequence: Synthetic peptide
  Seed: DPWVLLNASWFNSFL
DPFVLLNSSWGNSFL

SEQ ID NO: 251874 - protein, 15 aa, Artificial Sequence
  Description of Artificial Sequence: Synthetic peptide
  Seed: DPWVLLNASWFNSFL
DPFVLLNSSWHNSFL

SEQ ID NO: 251875 - protein, 15 aa, Artificial Sequence
  Description of Artificial Sequence: Synthetic peptide
  Seed: DPWVLLNASWFNSFL
DPFVLLNSSWINSFL

SEQ ID NO: 251876 - protein, 15 aa, Artificial Sequence
  Description of Artificial Sequence: Synthetic peptide
  Seed: DPWVLLNASWFNSFL
DPFVLLNSSWKNSFL

SEQ ID NO: 251877 - protein, 15 aa, Artificial Sequence
  Description of Artificial Sequence: Synthetic peptide
  Seed: DPWVLLNASWFNSFL
DPFVLLNSSWMNSFL

SEQ ID NO: 251878 - protein, 15 aa, Artificial Sequence
  Description of Artificial Sequence: Synthetic peptide
  Seed: DPWVLLNASWFNSFL
DPFVLLNSSWNNSFL

SEQ ID NO: 251879 - protein, 15 aa, Artificial Sequence
  Description of Artificial Sequence: Synthetic peptide
  Seed: DPWVLLNASWFNSFL
DPFVLLNSSWPNSFL

SEQ ID NO: 251880 - protein, 15 aa, Artificial Sequence
  Description of Artificial Sequence: Synthetic peptide
  Seed: DPWVLLNASWFNSFL
DPFVLLNSSWQNSFL

SEQ ID NO: 251881 - protein, 15 aa, Artificial Sequence
  Description of Artificial Sequence: Synthetic peptide
  Seed: DPWVLLNASWFNSFL
DPFVLLNSSWRNSFL

SEQ ID NO: 251882 - protein, 15 aa, Artificial Sequence
  Description of Artificial Sequence: Synthetic peptide
  Seed: DPWVLLNASWFNSFL
DPFVLLNSSWSNSFL

SEQ ID NO: 251883 - protein, 15 aa, Artificial Sequence
  Description of Artificial Sequence: Synthetic peptide
  Seed: DPWVLLNASWFNSFL
DPFVLLNSSWTNSFL

SEQ ID NO: 251884 - protein, 15 aa, Artificial Sequence
  Description of Artificial Sequence: Synthetic peptide
  Seed: DPWVLLNASWFNSFL
DPFVLLNSSWVNSFL

SEQ ID NO: 251885 - protein, 15 aa, Artificial Sequence
  Description of Artificial Sequence: Synthetic peptide
  Seed: DPWVLLNASWFNSFL
DPFVLLNSSWYNSFL

SEQ ID NO: 251886 - protein, 15 aa, Artificial Sequence
  Description of Artificial Sequence: Synthetic peptide
  Seed: DPWVLLNASWFNSFL
DPFVLLNTSWANSFL

SEQ ID NO: 251887 - protein, 15 aa, Artificial Sequence
  Description of Artificial Sequence: Synthetic peptide
  Seed: DPWVLLNASWFNSFL
DPFVLLNTSWDNSFL

SEQ ID NO: 251888 - protein, 15 aa, Artificial Sequence
  Description of Artificial Sequence: Synthetic peptide
  Seed: DPWVLLNASWFNSFL
DPFVLLNTSWENSFL

SEQ ID NO: 251889 - protein, 15 aa, Artificial Sequence
  Description of Artificial Sequence: Synthetic peptide
  Seed: DPWVLLNASWFNSFL
DPFVLLNTSWGNSFL

SEQ ID NO: 251890 - protein, 15 aa, Artificial Sequence
  Description of Artificial Sequence: Synthetic peptide
  Seed: DPWVLLNASWFNSFL
DPFVLLNTSWHNSFL

SEQ ID NO: 251891 - protein, 15 aa, Artificial Sequence
  Description of Artificial Sequence: Synthetic peptide
  Seed: DPWVLLNASWFNSFL
DPFVLLNTSWINSFL

SEQ ID NO: 251892 - protein, 15 aa, Artificial Sequence
  Description of Artificial Sequence: Synthetic peptide
  Seed: DPWVLLNASWFNSFL
DPFVLLNTSWLNSFL

SEQ ID NO: 251893 - protein, 15 aa, Artificial Sequence
  Description of Artificial Sequence: Synthetic peptide
  Seed: DPWVLLNASWFNSFL
DPFVLLNTSWMNSFL

SEQ ID NO: 251894 - protein, 15 aa, Artificial Sequence
  Description of Artificial Sequence: Synthetic peptide
  Seed: DPWVLLNASWFNSFL
DPFVLLNTSWNNSFL

SEQ ID NO: 251895 - protein, 15 aa, Artificial Sequence
  Description of Artificial Sequence: Synthetic peptide
  Seed: DPWVLLNASWFNSFL
DPFVLLNTSWQNSFL

SEQ ID NO: 251896 - protein, 15 aa, Artificial Sequence
  Description of Artificial Sequence: Synthetic peptide
  Seed: DPWVLLNASWFNSFL
DPFVLLNTSWRNSFL

SEQ ID NO: 251897 - protein, 15 aa, Artificial Sequence
  Description of Artificial Sequence: Synthetic peptide
  Seed: DPWVLLNASWFNSFL
DPFVLLNTSWSNSFL

SEQ ID NO: 251898 - protein, 15 aa, Artificial Sequence
  Description of Artificial Sequence: Synthetic peptide
  Seed: DPWVLLNASWFNSFL
DPFVLLNTSWTNSFL

SEQ ID NO: 251899 - protein, 15 aa, Artificial Sequence
  Description of Artificial Sequence: Synthetic peptide
  Seed: DPWVLLNASWFNSFL
DPFVLLNTSWVNSFL

SEQ ID NO: 251900 - protein, 15 aa, Artificial Sequence
  Description of Artificial Sequence: Synthetic peptide
  Seed: DPWVLLNASWFNSFL
DPFVLLNVSWANSFL

SEQ ID NO: 251901 - protein, 15 aa, Artificial Sequence
  Description of Artificial Sequence: Synthetic peptide
  Seed: DPWVLLNASWFNSFL
DPFVLLNVSWDNSFL

SEQ ID NO: 251902 - protein, 15 aa, Artificial Sequence
  Description of Artificial Sequence: Synthetic peptide
  Seed: DPWVLLNASWFNSFL
DPFVLLNVSWHNSFL

SEQ ID NO: 251903 - protein, 15 aa, Artificial Sequence
  Description of Artificial Sequence: Synthetic peptide
  Seed: DPWVLLNASWFNSFL
DPFVLLNVSWNNSFL

SEQ ID NO: 251904 - protein, 15 aa, Artificial Sequence
  Description of Artificial Sequence: Synthetic peptide
  Seed: DPWVLLNASWFNSFL
DPFVLLNVSWSNSFL

SEQ ID NO: 251905 - protein, 15 aa, Artificial Sequence
  Description of Artificial Sequence: Synthetic peptide
  Seed: DPWVLLNASWFNSFL
DPFVLLNVSWTNSFL

SEQ ID NO: 251906 - protein, 15 aa, Artificial Sequence
  Description of Artificial Sequence: Synthetic peptide
  Seed: DPWVLLNASWFNSFL
DPFVLLNVSWVNSFL

SEQ ID NO: 251907 - protein, 15 aa, Artificial Sequence
  Description of Artificial Sequence: Synthetic peptide
  Seed: DPWVLLNASWFNSFL
DPFVLMNASWANSFL

SEQ ID NO: 251908 - protein, 15 aa, Artificial Sequence
  Description of Artificial Sequence: Synthetic peptide
  Seed: DPWVLLNASWFNSFL
DPFVLMNASWCNSFL

SEQ ID NO: 251909 - protein, 15 aa, Artificial Sequence
  Description of Artificial Sequence: Synthetic peptide
  Seed: DPWVLLNASWFNSFL
DPFVLMNASWDNSFL

SEQ ID NO: 251910 - protein, 15 aa, Artificial Sequence
  Description of Artificial Sequence: Synthetic peptide
  Seed: DPWVLLNASWFNSFL
DPFVLMNASWENSFL

SEQ ID NO: 251911 - protein, 15 aa, Artificial Sequence
  Description of Artificial Sequence: Synthetic peptide
  Seed: DPWVLLNASWFNSFL
DPFVLMNASWFNSFL

SEQ ID NO: 251912 - protein, 15 aa, Artificial Sequence
  Description of Artificial Sequence: Synthetic peptide
  Seed: DPWVLLNASWFNSFL
DPFVLMNASWGNSFL

SEQ ID NO: 251913 - protein, 15 aa, Artificial Sequence
  Description of Artificial Sequence: Synthetic peptide
  Seed: DPWVLLNASWFNSFL
DPFVLMNASWHNSFL

SEQ ID NO: 251914 - protein, 15 aa, Artificial Sequence
  Description of Artificial Sequence: Synthetic peptide
  Seed: DPWVLLNASWFNSFL
DPFVLMNASWINSFL

SEQ ID NO: 251915 - protein, 15 aa, Artificial Sequence
  Description of Artificial Sequence: Synthetic peptide
  Seed: DPWVLLNASWFNSFL
DPFVLMNASWKNSFL

SEQ ID NO: 251916 - protein, 15 aa, Artificial Sequence
  Description of Artificial Sequence: Synthetic peptide
  Seed: DPWVLLNASWFNSFL
DPFVLMNASWLNSFL

SEQ ID NO: 251917 - protein, 15 aa, Artificial Sequence
  Description of Artificial Sequence: Synthetic peptide
  Seed: DPWVLLNASWFNSFL
DPFVLMNASWMNSFL

SEQ ID NO: 251918 - protein, 15 aa, Artificial Sequence
  Description of Artificial Sequence: Synthetic peptide
  Seed: DPWVLLNASWFNSFL
DPFVLMNASWNNSFL

SEQ ID NO: 251919 - protein, 15 aa, Artificial Sequence
  Description of Artificial Sequence: Synthetic peptide
  Seed: DPWVLLNASWFNSFL
DPFVLMNASWPNSFL

SEQ ID NO: 251920 - protein, 15 aa, Artificial Sequence
  Description of Artificial Sequence: Synthetic peptide
  Seed: DPWVLLNASWFNSFL
DPFVLMNASWQNSFL

SEQ ID NO: 251921 - protein, 15 aa, Artificial Sequence
  Description of Artificial Sequence: Synthetic peptide
  Seed: DPWVLLNASWFNSFL
DPFVLMNASWRNSFL

SEQ ID NO: 251922 - protein, 15 aa, Artificial Sequence
  Description of Artificial Sequence: Synthetic peptide
  Seed: DPWVLLNASWFNSFL
DPFVLMNASWSNSFL

SEQ ID NO: 251923 - protein, 15 aa, Artificial Sequence
  Description of Artificial Sequence: Synthetic peptide
  Seed: DPWVLLNASWFNSFL
DPFVLMNASWTNSFL

SEQ ID NO: 251924 - protein, 15 aa, Artificial Sequence
  Description of Artificial Sequence: Synthetic peptide
  Seed: DPWVLLNASWFNSFL
DPFVLMNASWVNSFL

SEQ ID NO: 251925 - protein, 15 aa, Artificial Sequence
  Description of Artificial Sequence: Synthetic peptide
  Seed: DPWVLLNASWFNSFL
DPFVLMNASWYNSFL

SEQ ID NO: 251926 - protein, 15 aa, Artificial Sequence
  Description of Artificial Sequence: Synthetic peptide
  Seed: DPWVLLNASWFNSFL
DPFVLMNDSWANSFL

SEQ ID NO: 251927 - protein, 15 aa, Artificial Sequence
  Description of Artificial Sequence: Synthetic peptide
  Seed: DPWVLLNASWFNSFL
DPFVLMNDSWINSFL

SEQ ID NO: 251928 - protein, 15 aa, Artificial Sequence
  Description of Artificial Sequence: Synthetic peptide
  Seed: DPWVLLNASWFNSFL
DPFVLMNDSWLNSFL

SEQ ID NO: 251929 - protein, 15 aa, Artificial Sequence
  Description of Artificial Sequence: Synthetic peptide
  Seed: DPWVLLNASWFNSFL
DPFVLMNDSWVNSFL

SEQ ID NO: 251930 - protein, 15 aa, Artificial Sequence
  Description of Artificial Sequence: Synthetic peptide
  Seed: DPWVLLNASWFNSFL
DPFVLMNESWLNSFL

SEQ ID NO: 251931 - protein, 15 aa, Artificial Sequence
  Description of Artificial Sequence: Synthetic peptide
  Seed: DPWVLLNASWFNSFL
DPFVLMNESWVNSFL

SEQ ID NO: 251932 - protein, 15 aa, Artificial Sequence
  Description of Artificial Sequence: Synthetic peptide
  Seed: DPWVLLNASWFNSFL
DPFVLMNGSWANSFL

SEQ ID NO: 251933 - protein, 15 aa, Artificial Sequence
  Description of Artificial Sequence: Synthetic peptide
  Seed: DPWVLLNASWFNSFL
DPFVLMNGSWCNSFL

SEQ ID NO: 251934 - protein, 15 aa, Artificial Sequence
  Description of Artificial Sequence: Synthetic peptide
  Seed: DPWVLLNASWFNSFL
DPFVLMNGSWFNSFL

SEQ ID NO: 251935 - protein, 15 aa, Artificial Sequence
  Description of Artificial Sequence: Synthetic peptide
  Seed: DPWVLLNASWFNSFL
DPFVLMNGSWGNSFL

SEQ ID NO: 251936 - protein, 15 aa, Artificial Sequence
  Description of Artificial Sequence: Synthetic peptide
  Seed: DPWVLLNASWFNSFL
DPFVLMNGSWHNSFL

SEQ ID NO: 251937 - protein, 15 aa, Artificial Sequence
  Description of Artificial Sequence: Synthetic peptide
  Seed: DPWVLLNASWFNSFL
DPFVLMNGSWINSFL

SEQ ID NO: 251938 - protein, 15 aa, Artificial Sequence
  Description of Artificial Sequence: Synthetic peptide
  Seed: DPWVLLNASWFNSFL
DPFVLMNGSWKNSFL

SEQ ID NO: 251939 - protein, 15 aa, Artificial Sequence
  Description of Artificial Sequence: Synthetic peptide
  Seed: DPWVLLNASWFNSFL
DPFVLMNGSWLNSFL

SEQ ID NO: 251940 - protein, 15 aa, Artificial Sequence
  Description of Artificial Sequence: Synthetic peptide
  Seed: DPWVLLNASWFNSFL
DPFVLMNGSWMNSFL

SEQ ID NO: 251941 - protein, 15 aa, Artificial Sequence
  Description of Artificial Sequence: Synthetic peptide
  Seed: DPWVLLNASWFNSFL
DPFVLMNGSWNNSFL

SEQ ID NO: 251942 - protein, 15 aa, Artificial Sequence
  Description of Artificial Sequence: Synthetic peptide
  Seed: DPWVLLNASWFNSFL
DPFVLMNGSWPNSFL

SEQ ID NO: 251943 - protein, 15 aa, Artificial Sequence
  Description of Artificial Sequence: Synthetic peptide
  Seed: DPWVLLNASWFNSFL
DPFVLMNGSWQNSFL

SEQ ID NO: 251944 - protein, 15 aa, Artificial Sequence
  Description of Artificial Sequence: Synthetic peptide
  Seed: DPWVLLNASWFNSFL
DPFVLMNGSWRNSFL

SEQ ID NO: 251945 - protein, 15 aa, Artificial Sequence
  Description of Artificial Sequence: Synthetic peptide
  Seed: DPWVLLNASWFNSFL
DPFVLMNGSWSNSFL

SEQ ID NO: 251946 - protein, 15 aa, Artificial Sequence
  Description of Artificial Sequence: Synthetic peptide
  Seed: DPWVLLNASWFNSFL
DPFVLMNGSWTNSFL

SEQ ID NO: 251947 - protein, 15 aa, Artificial Sequence
  Description of Artificial Sequence: Synthetic peptide
  Seed: DPWVLLNASWFNSFL
DPFVLMNGSWVNSFL

SEQ ID NO: 251948 - protein, 15 aa, Artificial Sequence
  Description of Artificial Sequence: Synthetic peptide
  Seed: DPWVLLNASWFNSFL
DPFVLMNGSWYNSFL

SEQ ID NO: 251949 - protein, 15 aa, Artificial Sequence
  Description of Artificial Sequence: Synthetic peptide
  Seed: DPWVLLNASWFNSFL
DPFVLMNHSWANSFL

SEQ ID NO: 251950 - protein, 15 aa, Artificial Sequence
  Description of Artificial Sequence: Synthetic peptide
  Seed: DPWVLLNASWFNSFL
DPFVLMNHSWINSFL

SEQ ID NO: 251951 - protein, 15 aa, Artificial Sequence
  Description of Artificial Sequence: Synthetic peptide
  Seed: DPWVLLNASWFNSFL
DPFVLMNHSWLNSFL

SEQ ID NO: 251952 - protein, 15 aa, Artificial Sequence
  Description of Artificial Sequence: Synthetic peptide
  Seed: DPWVLLNASWFNSFL
DPFVLMNHSWMNSFL

SEQ ID NO: 251953 - protein, 15 aa, Artificial Sequence
  Description of Artificial Sequence: Synthetic peptide
  Seed: DPWVLLNASWFNSFL
DPFVLMNHSWVNSFL

SEQ ID NO: 251954 - protein, 15 aa, Artificial Sequence
  Description of Artificial Sequence: Synthetic peptide
  Seed: DPWVLLNASWFNSFL
DPFVLMNISWANSFL

SEQ ID NO: 251955 - protein, 15 aa, Artificial Sequence
  Description of Artificial Sequence: Synthetic peptide
  Seed: DPWVLLNASWFNSFL
DPFVLMNISWDNSFL

SEQ ID NO: 251956 - protein, 15 aa, Artificial Sequence
  Description of Artificial Sequence: Synthetic peptide
  Seed: DPWVLLNASWFNSFL
DPFVLMNISWHNSFL

SEQ ID NO: 251957 - protein, 15 aa, Artificial Sequence
  Description of Artificial Sequence: Synthetic peptide
  Seed: DPWVLLNASWFNSFL
DPFVLMNISWNNSFL

SEQ ID NO: 251958 - protein, 15 aa, Artificial Sequence
  Description of Artificial Sequence: Synthetic peptide
  Seed: DPWVLLNASWFNSFL
DPFVLMNISWSNSFL

SEQ ID NO: 251959 - protein, 15 aa, Artificial Sequence
  Description of Artificial Sequence: Synthetic peptide
  Seed: DPWVLLNASWFNSFL
DPFVLMNISWTNSFL

SEQ ID NO: 251960 - protein, 15 aa, Artificial Sequence
  Description of Artificial Sequence: Synthetic peptide
  Seed: DPWVLLNASWFNSFL
DPFVLMNLSWNNSFL

SEQ ID NO: 251961 - protein, 15 aa, Artificial Sequence
  Description of Artificial Sequence: Synthetic peptide
  Seed: DPWVLLNASWFNSFL
DPFVLMNMSWANSFL

SEQ ID NO: 251962 - protein, 15 aa, Artificial Sequence
  Description of Artificial Sequence: Synthetic peptide
  Seed: DPWVLLNASWFNSFL
DPFVLMNMSWNNSFL

SEQ ID NO: 251963 - protein, 15 aa, Artificial Sequence
  Description of Artificial Sequence: Synthetic peptide
  Seed: DPWVLLNASWFNSFL
DPFVLMNNSWANSFL

SEQ ID NO: 251964 - protein, 15 aa, Artificial Sequence
  Description of Artificial Sequence: Synthetic peptide
  Seed: DPWVLLNASWFNSFL
DPFVLMNNSWDNSFL

SEQ ID NO: 251965 - protein, 15 aa, Artificial Sequence
  Description of Artificial Sequence: Synthetic peptide
  Seed: DPWVLLNASWFNSFL
DPFVLMNNSWENSFL

SEQ ID NO: 251966 - protein, 15 aa, Artificial Sequence
  Description of Artificial Sequence: Synthetic peptide
  Seed: DPWVLLNASWFNSFL
DPFVLMNNSWGNSFL

SEQ ID NO: 251967 - protein, 15 aa, Artificial Sequence
  Description of Artificial Sequence: Synthetic peptide
  Seed: DPWVLLNASWFNSFL
DPFVLMNNSWHNSFL

SEQ ID NO: 251968 - protein, 15 aa, Artificial Sequence
  Description of Artificial Sequence: Synthetic peptide
  Seed: DPWVLLNASWFNSFL
DPFVLMNNSWINSFL

SEQ ID NO: 251969 - protein, 15 aa, Artificial Sequence
  Description of Artificial Sequence: Synthetic peptide
  Seed: DPWVLLNASWFNSFL
DPFVLMNNSWLNSFL

SEQ ID NO: 251970 - protein, 15 aa, Artificial Sequence
  Description of Artificial Sequence: Synthetic peptide
  Seed: DPWVLLNASWFNSFL
DPFVLMNNSWMNSFL

SEQ ID NO: 251971 - protein, 15 aa, Artificial Sequence
  Description of Artificial Sequence: Synthetic peptide
  Seed: DPWVLLNASWFNSFL
DPFVLMNNSWNNSFL

SEQ ID NO: 251972 - protein, 15 aa, Artificial Sequence
  Description of Artificial Sequence: Synthetic peptide
  Seed: DPWVLLNASWFNSFL
DPFVLMNNSWQNSFL

SEQ ID NO: 251973 - protein, 15 aa, Artificial Sequence
  Description of Artificial Sequence: Synthetic peptide
  Seed: DPWVLLNASWFNSFL
DPFVLMNNSWSNSFL

SEQ ID NO: 251974 - protein, 15 aa, Artificial Sequence
  Description of Artificial Sequence: Synthetic peptide
  Seed: DPWVLLNASWFNSFL
DPFVLMNNSWTNSFL

SEQ ID NO: 251975 - protein, 15 aa, Artificial Sequence
  Description of Artificial Sequence: Synthetic peptide
  Seed: DPWVLLNASWFNSFL
DPFVLMNNSWVNSFL

SEQ ID NO: 251976 - protein, 15 aa, Artificial Sequence
  Description of Artificial Sequence: Synthetic peptide
  Seed: DPWVLLNASWFNSFL
DPFVLMNPSWANSFL

SEQ ID NO: 251977 - protein, 15 aa, Artificial Sequence
  Description of Artificial Sequence: Synthetic peptide
  Seed: DPWVLLNASWFNSFL
DPFVLMNPSWCNSFL

SEQ ID NO: 251978 - protein, 15 aa, Artificial Sequence
  Description of Artificial Sequence: Synthetic peptide
  Seed: DPWVLLNASWFNSFL
DPFVLMNPSWDNSFL

SEQ ID NO: 251979 - protein, 15 aa, Artificial Sequence
  Description of Artificial Sequence: Synthetic peptide
  Seed: DPWVLLNASWFNSFL
DPFVLMNPSWENSFL

SEQ ID NO: 251980 - protein, 15 aa, Artificial Sequence
  Description of Artificial Sequence: Synthetic peptide
  Seed: DPWVLLNASWFNSFL
DPFVLMNPSWFNSFL

SEQ ID NO: 251981 - protein, 15 aa, Artificial Sequence
  Description of Artificial Sequence: Synthetic peptide
  Seed: DPWVLLNASWFNSFL
DPFVLMNPSWGNSFL

SEQ ID NO: 251982 - protein, 15 aa, Artificial Sequence
  Description of Artificial Sequence: Synthetic peptide
  Seed: DPWVLLNASWFNSFL
DPFVLMNPSWHNSFL

SEQ ID NO: 251983 - protein, 15 aa, Artificial Sequence
  Description of Artificial Sequence: Synthetic peptide
  Seed: DPWVLLNASWFNSFL
DPFVLMNPSWINSFL

SEQ ID NO: 251984 - protein, 15 aa, Artificial Sequence
  Description of Artificial Sequence: Synthetic peptide
  Seed: DPWVLLNASWFNSFL
DPFVLMNPSWLNSFL

SEQ ID NO: 251985 - protein, 15 aa, Artificial Sequence
  Description of Artificial Sequence: Synthetic peptide
  Seed: DPWVLLNASWFNSFL
DPFVLMNPSWMNSFL

SEQ ID NO: 251986 - protein, 15 aa, Artificial Sequence
  Description of Artificial Sequence: Synthetic peptide
  Seed: DPWVLLNASWFNSFL
DPFVLMNPSWNNSFL

SEQ ID NO: 251987 - protein, 15 aa, Artificial Sequence
  Description of Artificial Sequence: Synthetic peptide
  Seed: DPWVLLNASWFNSFL
DPFVLMNPSWPNSFL

SEQ ID NO: 251988 - protein, 15 aa, Artificial Sequence
  Description of Artificial Sequence: Synthetic peptide
  Seed: DPWVLLNASWFNSFL
DPFVLMNPSWQNSFL

SEQ ID NO: 251989 - protein, 15 aa, Artificial Sequence
  Description of Artificial Sequence: Synthetic peptide
  Seed: DPWVLLNASWFNSFL
DPFVLMNPSWRNSFL

SEQ ID NO: 251990 - protein, 15 aa, Artificial Sequence
  Description of Artificial Sequence: Synthetic peptide
  Seed: DPWVLLNASWFNSFL
DPFVLMNPSWSNSFL

SEQ ID NO: 251991 - protein, 15 aa, Artificial Sequence
  Description of Artificial Sequence: Synthetic peptide
  Seed: DPWVLLNASWFNSFL
DPFVLMNPSWTNSFL

SEQ ID NO: 251992 - protein, 15 aa, Artificial Sequence
  Description of Artificial Sequence: Synthetic peptide
  Seed: DPWVLLNASWFNSFL
DPFVLMNPSWVNSFL

SEQ ID NO: 251993 - protein, 15 aa, Artificial Sequence
  Description of Artificial Sequence: Synthetic peptide
  Seed: DPWVLLNASWFNSFL
DPFVLMNPSWYNSFL

SEQ ID NO: 251994 - protein, 15 aa, Artificial Sequence
  Description of Artificial Sequence: Synthetic peptide
  Seed: DPWVLLNASWFNSFL
DPFVLMNQSWLNSFL

SEQ ID NO: 251995 - protein, 15 aa, Artificial Sequence
  Description of Artificial Sequence: Synthetic peptide
  Seed: DPWVLLNASWFNSFL
DPFVLMNSSWANSFL

SEQ ID NO: 251996 - protein, 15 aa, Artificial Sequence
  Description of Artificial Sequence: Synthetic peptide
  Seed: DPWVLLNASWFNSFL
DPFVLMNSSWCNSFL

SEQ ID NO: 251997 - protein, 15 aa, Artificial Sequence
  Description of Artificial Sequence: Synthetic peptide
  Seed: DPWVLLNASWFNSFL
DPFVLMNSSWDNSFL

SEQ ID NO: 251998 - protein, 15 aa, Artificial Sequence
  Description of Artificial Sequence: Synthetic peptide
  Seed: DPWVLLNASWFNSFL
DPFVLMNSSWENSFL

SEQ ID NO: 251999 - protein, 15 aa, Artificial Sequence
  Description of Artificial Sequence: Synthetic peptide
  Seed: DPWVLLNASWFNSFL
DPFVLMNSSWFNSFL

SEQ ID NO: 252000 - protein, 15 aa, Artificial Sequence
  Description of Artificial Sequence: Synthetic peptide
  Seed: DPWVLLNASWFNSFL
DPFVLMNSSWGNSFL

SEQ ID NO: 252001 - protein, 15 aa, Artificial Sequence
  Description of Artificial Sequence: Synthetic peptide
  Seed: DPWVLLNASWFNSFL
DPFVLMNSSWHNSFL

SEQ ID NO: 252002 - protein, 15 aa, Artificial Sequence
  Description of Artificial Sequence: Synthetic peptide
  Seed: DPWVLLNASWFNSFL
DPFVLMNSSWINSFL

SEQ ID NO: 252003 - protein, 15 aa, Artificial Sequence
  Description of Artificial Sequence: Synthetic peptide
  Seed: DPWVLLNASWFNSFL
DPFVLMNSSWKNSFL

SEQ ID NO: 252004 - protein, 15 aa, Artificial Sequence
  Description of Artificial Sequence: Synthetic peptide
  Seed: DPWVLLNASWFNSFL
DPFVLMNSSWMNSFL

SEQ ID NO: 252005 - protein, 15 aa, Artificial Sequence
  Description of Artificial Sequence: Synthetic peptide
  Seed: DPWVLLNASWFNSFL
DPFVLMNSSWNNSFL

SEQ ID NO: 252006 - protein, 15 aa, Artificial Sequence
  Description of Artificial Sequence: Synthetic peptide
  Seed: DPWVLLNASWFNSFL
DPFVLMNSSWQNSFL

SEQ ID NO: 252007 - protein, 15 aa, Artificial Sequence
  Description of Artificial Sequence: Synthetic peptide
  Seed: DPWVLLNASWFNSFL
DPFVLMNSSWRNSFL

SEQ ID NO: 252008 - protein, 15 aa, Artificial Sequence
  Description of Artificial Sequence: Synthetic peptide
  Seed: DPWVLLNASWFNSFL
DPFVLMNSSWSNSFL

SEQ ID NO: 252009 - protein, 15 aa, Artificial Sequence
  Description of Artificial Sequence: Synthetic peptide
  Seed: DPWVLLNASWFNSFL
DPFVLMNSSWTNSFL

SEQ ID NO: 252010 - protein, 15 aa, Artificial Sequence
  Description of Artificial Sequence: Synthetic peptide
  Seed: DPWVLLNASWFNSFL
DPFVLMNSSWVNSFL

SEQ ID NO: 252011 - protein, 15 aa, Artificial Sequence
  Description of Artificial Sequence: Synthetic peptide
  Seed: DPWVLLNASWFNSFL
DPFVLMNSSWYNSFL

SEQ ID NO: 252012 - protein, 15 aa, Artificial Sequence
  Description of Artificial Sequence: Synthetic peptide
  Seed: DPWVLLNASWFNSFL
DPFVLMNTSWANSFL

SEQ ID NO: 252013 - protein, 15 aa, Artificial Sequence
  Description of Artificial Sequence: Synthetic peptide
  Seed: DPWVLLNASWFNSFL
DPFVLMNTSWDNSFL

SEQ ID NO: 252014 - protein, 15 aa, Artificial Sequence
  Description of Artificial Sequence: Synthetic peptide
  Seed: DPWVLLNASWFNSFL
DPFVLMNTSWENSFL

SEQ ID NO: 252015 - protein, 15 aa, Artificial Sequence
  Description of Artificial Sequence: Synthetic peptide
  Seed: DPWVLLNASWFNSFL
DPFVLMNTSWGNSFL

SEQ ID NO: 252016 - protein, 15 aa, Artificial Sequence
  Description of Artificial Sequence: Synthetic peptide
  Seed: DPWVLLNASWFNSFL
DPFVLMNTSWHNSFL

SEQ ID NO: 252017 - protein, 15 aa, Artificial Sequence
  Description of Artificial Sequence: Synthetic peptide
  Seed: DPWVLLNASWFNSFL
DPFVLMNTSWINSFL

SEQ ID NO: 252018 - protein, 15 aa, Artificial Sequence
  Description of Artificial Sequence: Synthetic peptide
  Seed: DPWVLLNASWFNSFL
DPFVLMNTSWLNSFL

SEQ ID NO: 252019 - protein, 15 aa, Artificial Sequence
  Description of Artificial Sequence: Synthetic peptide
  Seed: DPWVLLNASWFNSFL
DPFVLMNTSWMNSFL

SEQ ID NO: 252020 - protein, 15 aa, Artificial Sequence
  Description of Artificial Sequence: Synthetic peptide
  Seed: DPWVLLNASWFNSFL
DPFVLMNTSWNNSFL

SEQ ID NO: 252021 - protein, 15 aa, Artificial Sequence
  Description of Artificial Sequence: Synthetic peptide
  Seed: DPWVLLNASWFNSFL
DPFVLMNTSWQNSFL

SEQ ID NO: 252022 - protein, 15 aa, Artificial Sequence
  Description of Artificial Sequence: Synthetic peptide
  Seed: DPWVLLNASWFNSFL
DPFVLMNTSWRNSFL

SEQ ID NO: 252023 - protein, 15 aa, Artificial Sequence
  Description of Artificial Sequence: Synthetic peptide
  Seed: DPWVLLNASWFNSFL
DPFVLMNTSWSNSFL

SEQ ID NO: 252024 - protein, 15 aa, Artificial Sequence
  Description of Artificial Sequence: Synthetic peptide
  Seed: DPWVLLNASWFNSFL
DPFVLMNTSWTNSFL

SEQ ID NO: 252025 - protein, 15 aa, Artificial Sequence
  Description of Artificial Sequence: Synthetic peptide
  Seed: DPWVLLNASWFNSFL
DPFVLMNTSWVNSFL

SEQ ID NO: 252026 - protein, 15 aa, Artificial Sequence
  Description of Artificial Sequence: Synthetic peptide
  Seed: DPWVLLNASWFNSFL
DPFVLMNVSWANSFL

SEQ ID NO: 252027 - protein, 15 aa, Artificial Sequence
  Description of Artificial Sequence: Synthetic peptide
  Seed: DPWVLLNASWFNSFL
DPFVLMNVSWDNSFL

SEQ ID NO: 252028 - protein, 15 aa, Artificial Sequence
  Description of Artificial Sequence: Synthetic peptide
  Seed: DPWVLLNASWFNSFL
DPFVLMNVSWHNSFL

SEQ ID NO: 252029 - protein, 15 aa, Artificial Sequence
  Description of Artificial Sequence: Synthetic peptide
  Seed: DPWVLLNASWFNSFL
DPFVLMNVSWINSFL

SEQ ID NO: 252030 - protein, 15 aa, Artificial Sequence
  Description of Artificial Sequence: Synthetic peptide
  Seed: DPWVLLNASWFNSFL
DPFVLMNVSWLNSFL

SEQ ID NO: 252031 - protein, 15 aa, Artificial Sequence
  Description of Artificial Sequence: Synthetic peptide
  Seed: DPWVLLNASWFNSFL
DPFVLMNVSWMNSFL

SEQ ID NO: 252032 - protein, 15 aa, Artificial Sequence
  Description of Artificial Sequence: Synthetic peptide
  Seed: DPWVLLNASWFNSFL
DPFVLMNVSWNNSFL

SEQ ID NO: 252033 - protein, 15 aa, Artificial Sequence
  Description of Artificial Sequence: Synthetic peptide
  Seed: DPWVLLNASWFNSFL
DPFVLMNVSWQNSFL

SEQ ID NO: 252034 - protein, 15 aa, Artificial Sequence
  Description of Artificial Sequence: Synthetic peptide
  Seed: DPWVLLNASWFNSFL
DPFVLMNVSWSNSFL

SEQ ID NO: 252035 - protein, 15 aa, Artificial Sequence
  Description of Artificial Sequence: Synthetic peptide
  Seed: DPWVLLNASWFNSFL
DPFVLMNVSWTNSFL

SEQ ID NO: 252036 - protein, 15 aa, Artificial Sequence
  Description of Artificial Sequence: Synthetic peptide
  Seed: DPWVLLNASWFNSFL
DPFVLMNVSWVNSFL

SEQ ID NO: 252037 - protein, 15 aa, Artificial Sequence
  Description of Artificial Sequence: Synthetic peptide
  Seed: DPWVLLNASWFNSFL
DPFVLNNASWANSFL

SEQ ID NO: 252038 - protein, 15 aa, Artificial Sequence
  Description of Artificial Sequence: Synthetic peptide
  Seed: DPWVLLNASWFNSFL
DPFVLNNASWINSFL

SEQ ID NO: 252039 - protein, 15 aa, Artificial Sequence
  Description of Artificial Sequence: Synthetic peptide
  Seed: DPWVLLNASWFNSFL
DPFVLNNASWLNSFL

SEQ ID NO: 252040 - protein, 15 aa, Artificial Sequence
  Description of Artificial Sequence: Synthetic peptide
  Seed: DPWVLLNASWFNSFL
DPFVLNNASWMNSFL

SEQ ID NO: 252041 - protein, 15 aa, Artificial Sequence
  Description of Artificial Sequence: Synthetic peptide
  Seed: DPWVLLNASWFNSFL
DPFVLNNASWSNSFL

SEQ ID NO: 252042 - protein, 15 aa, Artificial Sequence
  Description of Artificial Sequence: Synthetic peptide
  Seed: DPWVLLNASWFNSFL
DPFVLNNASWTNSFL

SEQ ID NO: 252043 - protein, 15 aa, Artificial Sequence
  Description of Artificial Sequence: Synthetic peptide
  Seed: DPWVLLNASWFNSFL
DPFVLNNASWVNSFL

SEQ ID NO: 252044 - protein, 15 aa, Artificial Sequence
  Description of Artificial Sequence: Synthetic peptide
  Seed: DPWVLLNASWFNSFL
DPFVLNNGSWINSFL

SEQ ID NO: 252045 - protein, 15 aa, Artificial Sequence
  Description of Artificial Sequence: Synthetic peptide
  Seed: DPWVLLNASWFNSFL
DPFVLNNGSWLNSFL

SEQ ID NO: 252046 - protein, 15 aa, Artificial Sequence
  Description of Artificial Sequence: Synthetic peptide
  Seed: DPWVLLNASWFNSFL
DPFVLNNGSWVNSFL

SEQ ID NO: 252047 - protein, 15 aa, Artificial Sequence
  Description of Artificial Sequence: Synthetic peptide
  Seed: DPWVLLNASWFNSFL
DPFVLNNPSWINSFL

SEQ ID NO: 252048 - protein, 15 aa, Artificial Sequence
  Description of Artificial Sequence: Synthetic peptide
  Seed: DPWVLLNASWFNSFL
DPFVLNNPSWLNSFL

SEQ ID NO: 252049 - protein, 15 aa, Artificial Sequence
  Description of Artificial Sequence: Synthetic peptide
  Seed: DPWVLLNASWFNSFL
DPFVLNNPSWVNSFL

SEQ ID NO: 252050 - protein, 15 aa, Artificial Sequence
  Description of Artificial Sequence: Synthetic peptide
  Seed: DPWVLLNASWFNSFL
DPFVLNNSSWINSFL

SEQ ID NO: 252051 - protein, 15 aa, Artificial Sequence
  Description of Artificial Sequence: Synthetic peptide
  Seed: DPWVLLNASWFNSFL
DPFVLNNSSWLNSFL

SEQ ID NO: 252052 - protein, 15 aa, Artificial Sequence
  Description of Artificial Sequence: Synthetic peptide
  Seed: DPWVLLNASWFNSFL
DPFVLNNSSWVNSFL

SEQ ID NO: 252053 - protein, 15 aa, Artificial Sequence
  Description of Artificial Sequence: Synthetic peptide
  Seed: DPWVLLNASWFNSFL
DPFVLQNASWANSFL

SEQ ID NO: 252054 - protein, 15 aa, Artificial Sequence
  Description of Artificial Sequence: Synthetic peptide
  Seed: DPWVLLNASWFNSFL
DPFVLQNASWCNSFL

SEQ ID NO: 252055 - protein, 15 aa, Artificial Sequence
  Description of Artificial Sequence: Synthetic peptide
  Seed: DPWVLLNASWFNSFL
DPFVLQNASWFNSFL

SEQ ID NO: 252056 - protein, 15 aa, Artificial Sequence
  Description of Artificial Sequence: Synthetic peptide
  Seed: DPWVLLNASWFNSFL
DPFVLQNASWGNSFL

SEQ ID NO: 252057 - protein, 15 aa, Artificial Sequence
  Description of Artificial Sequence: Synthetic peptide
  Seed: DPWVLLNASWFNSFL
DPFVLQNASWINSFL

SEQ ID NO: 252058 - protein, 15 aa, Artificial Sequence
  Description of Artificial Sequence: Synthetic peptide
  Seed: DPWVLLNASWFNSFL
DPFVLQNASWLNSFL

SEQ ID NO: 252059 - protein, 15 aa, Artificial Sequence
  Description of Artificial Sequence: Synthetic peptide
  Seed: DPWVLLNASWFNSFL
DPFVLQNASWMNSFL

SEQ ID NO: 252060 - protein, 15 aa, Artificial Sequence
  Description of Artificial Sequence: Synthetic peptide
  Seed: DPWVLLNASWFNSFL
DPFVLQNASWNNSFL

SEQ ID NO: 252061 - protein, 15 aa, Artificial Sequence
  Description of Artificial Sequence: Synthetic peptide
  Seed: DPWVLLNASWFNSFL
DPFVLQNASWSNSFL

SEQ ID NO: 252062 - protein, 15 aa, Artificial Sequence
  Description of Artificial Sequence: Synthetic peptide
  Seed: DPWVLLNASWFNSFL
DPFVLQNASWTNSFL

SEQ ID NO: 252063 - protein, 15 aa, Artificial Sequence
  Description of Artificial Sequence: Synthetic peptide
  Seed: DPWVLLNASWFNSFL
DPFVLQNASWVNSFL

SEQ ID NO: 252064 - protein, 15 aa, Artificial Sequence
  Description of Artificial Sequence: Synthetic peptide
  Seed: DPWVLLNASWFNSFL
DPFVLQNGSWANSFL

SEQ ID NO: 252065 - protein, 15 aa, Artificial Sequence
  Description of Artificial Sequence: Synthetic peptide
  Seed: DPWVLLNASWFNSFL
DPFVLQNGSWINSFL

SEQ ID NO: 252066 - protein, 15 aa, Artificial Sequence
  Description of Artificial Sequence: Synthetic peptide
  Seed: DPWVLLNASWFNSFL
DPFVLQNGSWLNSFL

SEQ ID NO: 252067 - protein, 15 aa, Artificial Sequence
  Description of Artificial Sequence: Synthetic peptide
  Seed: DPWVLLNASWFNSFL
DPFVLQNGSWMNSFL

SEQ ID NO: 252068 - protein, 15 aa, Artificial Sequence
  Description of Artificial Sequence: Synthetic peptide
  Seed: DPWVLLNASWFNSFL
DPFVLQNGSWSNSFL

SEQ ID NO: 252069 - protein, 15 aa, Artificial Sequence
  Description of Artificial Sequence: Synthetic peptide
  Seed: DPWVLLNASWFNSFL
DPFVLQNGSWTNSFL

SEQ ID NO: 252070 - protein, 15 aa, Artificial Sequence
  Description of Artificial Sequence: Synthetic peptide
  Seed: DPWVLLNASWFNSFL
DPFVLQNGSWVNSFL

SEQ ID NO: 252071 - protein, 15 aa, Artificial Sequence
  Description of Artificial Sequence: Synthetic peptide
  Seed: DPWVLLNASWFNSFL
DPFVLQNISWNNSFL

SEQ ID NO: 252072 - protein, 15 aa, Artificial Sequence
  Description of Artificial Sequence: Synthetic peptide
  Seed: DPWVLLNASWFNSFL
DPFVLQNNSWANSFL

SEQ ID NO: 252073 - protein, 15 aa, Artificial Sequence
  Description of Artificial Sequence: Synthetic peptide
  Seed: DPWVLLNASWFNSFL
DPFVLQNNSWINSFL

SEQ ID NO: 252074 - protein, 15 aa, Artificial Sequence
  Description of Artificial Sequence: Synthetic peptide
  Seed: DPWVLLNASWFNSFL
DPFVLQNNSWLNSFL

SEQ ID NO: 252075 - protein, 15 aa, Artificial Sequence
  Description of Artificial Sequence: Synthetic peptide
  Seed: DPWVLLNASWFNSFL
DPFVLQNNSWMNSFL

SEQ ID NO: 252076 - protein, 15 aa, Artificial Sequence
  Description of Artificial Sequence: Synthetic peptide
  Seed: DPWVLLNASWFNSFL
DPFVLQNNSWSNSFL

SEQ ID NO: 252077 - protein, 15 aa, Artificial Sequence
  Description of Artificial Sequence: Synthetic peptide
  Seed: DPWVLLNASWFNSFL
DPFVLQNNSWTNSFL

SEQ ID NO: 252078 - protein, 15 aa, Artificial Sequence
  Description of Artificial Sequence: Synthetic peptide
  Seed: DPWVLLNASWFNSFL
DPFVLQNNSWVNSFL

SEQ ID NO: 252079 - protein, 15 aa, Artificial Sequence
  Description of Artificial Sequence: Synthetic peptide
  Seed: DPWVLLNASWFNSFL
DPFVLQNPSWANSFL

SEQ ID NO: 252080 - protein, 15 aa, Artificial Sequence
  Description of Artificial Sequence: Synthetic peptide
  Seed: DPWVLLNASWFNSFL
DPFVLQNPSWINSFL

SEQ ID NO: 252081 - protein, 15 aa, Artificial Sequence
  Description of Artificial Sequence: Synthetic peptide
  Seed: DPWVLLNASWFNSFL
DPFVLQNPSWLNSFL

SEQ ID NO: 252082 - protein, 15 aa, Artificial Sequence
  Description of Artificial Sequence: Synthetic peptide
  Seed: DPWVLLNASWFNSFL
DPFVLQNPSWMNSFL

SEQ ID NO: 252083 - protein, 15 aa, Artificial Sequence
  Description of Artificial Sequence: Synthetic peptide
  Seed: DPWVLLNASWFNSFL
DPFVLQNPSWNNSFL

SEQ ID NO: 252084 - protein, 15 aa, Artificial Sequence
  Description of Artificial Sequence: Synthetic peptide
  Seed: DPWVLLNASWFNSFL
DPFVLQNPSWSNSFL

SEQ ID NO: 252085 - protein, 15 aa, Artificial Sequence
  Description of Artificial Sequence: Synthetic peptide
  Seed: DPWVLLNASWFNSFL
DPFVLQNPSWTNSFL

SEQ ID NO: 252086 - protein, 15 aa, Artificial Sequence
  Description of Artificial Sequence: Synthetic peptide
  Seed: DPWVLLNASWFNSFL
DPFVLQNPSWVNSFL

SEQ ID NO: 252087 - protein, 15 aa, Artificial Sequence
  Description of Artificial Sequence: Synthetic peptide
  Seed: DPWVLLNASWFNSFL
DPFVLQNSSWANSFL

SEQ ID NO: 252088 - protein, 15 aa, Artificial Sequence
  Description of Artificial Sequence: Synthetic peptide
  Seed: DPWVLLNASWFNSFL
DPFVLQNSSWINSFL

SEQ ID NO: 252089 - protein, 15 aa, Artificial Sequence
  Description of Artificial Sequence: Synthetic peptide
  Seed: DPWVLLNASWFNSFL
DPFVLQNSSWLNSFL

SEQ ID NO: 252090 - protein, 15 aa, Artificial Sequence
  Description of Artificial Sequence: Synthetic peptide
  Seed: DPWVLLNASWFNSFL
DPFVLQNSSWMNSFL

SEQ ID NO: 252091 - protein, 15 aa, Artificial Sequence
  Description of Artificial Sequence: Synthetic peptide
  Seed: DPWVLLNASWFNSFL
DPFVLQNSSWSNSFL

SEQ ID NO: 252092 - protein, 15 aa, Artificial Sequence
  Description of Artificial Sequence: Synthetic peptide
  Seed: DPWVLLNASWFNSFL
DPFVLQNSSWTNSFL

SEQ ID NO: 252093 - protein, 15 aa, Artificial Sequence
  Description of Artificial Sequence: Synthetic peptide
  Seed: DPWVLLNASWFNSFL
DPFVLQNSSWVNSFL

SEQ ID NO: 252094 - protein, 15 aa, Artificial Sequence
  Description of Artificial Sequence: Synthetic peptide
  Seed: DPWVLLNASWFNSFL
DPFVLQNTSWANSFL

SEQ ID NO: 252095 - protein, 15 aa, Artificial Sequence
  Description of Artificial Sequence: Synthetic peptide
  Seed: DPWVLLNASWFNSFL
DPFVLQNTSWINSFL

SEQ ID NO: 252096 - protein, 15 aa, Artificial Sequence
  Description of Artificial Sequence: Synthetic peptide
  Seed: DPWVLLNASWFNSFL
DPFVLQNTSWLNSFL

SEQ ID NO: 252097 - protein, 15 aa, Artificial Sequence
  Description of Artificial Sequence: Synthetic peptide
  Seed: DPWVLLNASWFNSFL
DPFVLQNTSWNNSFL

SEQ ID NO: 252098 - protein, 15 aa, Artificial Sequence
  Description of Artificial Sequence: Synthetic peptide
  Seed: DPWVLLNASWFNSFL
DPFVLQNTSWSNSFL

SEQ ID NO: 252099 - protein, 15 aa, Artificial Sequence
  Description of Artificial Sequence: Synthetic peptide
  Seed: DPWVLLNASWFNSFL
DPFVLQNTSWVNSFL

SEQ ID NO: 252100 - protein, 15 aa, Artificial Sequence
  Description of Artificial Sequence: Synthetic peptide
  Seed: DPWVLLNASWFNSFL
DPFVLQNVSWANSFL

SEQ ID NO: 252101 - protein, 15 aa, Artificial Sequence
  Description of Artificial Sequence: Synthetic peptide
  Seed: DPWVLLNASWFNSFL
DPFVLQNVSWNNSFL

SEQ ID NO: 252102 - protein, 15 aa, Artificial Sequence
  Description of Artificial Sequence: Synthetic peptide
  Seed: DPWVLLNASWFNSFL
DPFVLSNASWANSFL

SEQ ID NO: 252103 - protein, 15 aa, Artificial Sequence
  Description of Artificial Sequence: Synthetic peptide
  Seed: DPWVLLNASWFNSFL
DPFVLSNASWFNSFL

SEQ ID NO: 252104 - protein, 15 aa, Artificial Sequence
  Description of Artificial Sequence: Synthetic peptide
  Seed: DPWVLLNASWFNSFL
DPFVLSNASWGNSFL

SEQ ID NO: 252105 - protein, 15 aa, Artificial Sequence
  Description of Artificial Sequence: Synthetic peptide
  Seed: DPWVLLNASWFNSFL
DPFVLSNASWINSFL

SEQ ID NO: 252106 - protein, 15 aa, Artificial Sequence
  Description of Artificial Sequence: Synthetic peptide
  Seed: DPWVLLNASWFNSFL
DPFVLSNASWLNSFL

SEQ ID NO: 252107 - protein, 15 aa, Artificial Sequence
  Description of Artificial Sequence: Synthetic peptide
  Seed: DPWVLLNASWFNSFL
DPFVLSNASWMNSFL

SEQ ID NO: 252108 - protein, 15 aa, Artificial Sequence
  Description of Artificial Sequence: Synthetic peptide
  Seed: DPWVLLNASWFNSFL
DPFVLSNASWNNSFL

SEQ ID NO: 252109 - protein, 15 aa, Artificial Sequence
  Description of Artificial Sequence: Synthetic peptide
  Seed: DPWVLLNASWFNSFL
DPFVLSNASWSNSFL

SEQ ID NO: 252110 - protein, 15 aa, Artificial Sequence
  Description of Artificial Sequence: Synthetic peptide
  Seed: DPWVLLNASWFNSFL
DPFVLSNASWTNSFL

SEQ ID NO: 252111 - protein, 15 aa, Artificial Sequence
  Description of Artificial Sequence: Synthetic peptide
  Seed: DPWVLLNASWFNSFL
DPFVLSNASWVNSFL

SEQ ID NO: 252112 - protein, 15 aa, Artificial Sequence
  Description of Artificial Sequence: Synthetic peptide
  Seed: DPWVLLNASWFNSFL
DPFVLSNGSWANSFL

SEQ ID NO: 252113 - protein, 15 aa, Artificial Sequence
  Description of Artificial Sequence: Synthetic peptide
  Seed: DPWVLLNASWFNSFL
DPFVLSNGSWINSFL

SEQ ID NO: 252114 - protein, 15 aa, Artificial Sequence
  Description of Artificial Sequence: Synthetic peptide
  Seed: DPWVLLNASWFNSFL
DPFVLSNGSWLNSFL

SEQ ID NO: 252115 - protein, 15 aa, Artificial Sequence
  Description of Artificial Sequence: Synthetic peptide
  Seed: DPWVLLNASWFNSFL
DPFVLSNGSWMNSFL

SEQ ID NO: 252116 - protein, 15 aa, Artificial Sequence
  Description of Artificial Sequence: Synthetic peptide
  Seed: DPWVLLNASWFNSFL
DPFVLSNGSWSNSFL

SEQ ID NO: 252117 - protein, 15 aa, Artificial Sequence
  Description of Artificial Sequence: Synthetic peptide
  Seed: DPWVLLNASWFNSFL
DPFVLSNGSWTNSFL

SEQ ID NO: 252118 - protein, 15 aa, Artificial Sequence
  Description of Artificial Sequence: Synthetic peptide
  Seed: DPWVLLNASWFNSFL
DPFVLSNGSWVNSFL

SEQ ID NO: 252119 - protein, 15 aa, Artificial Sequence
  Description of Artificial Sequence: Synthetic peptide
  Seed: DPWVLLNASWFNSFL
DPFVLSNNSWANSFL

SEQ ID NO: 252120 - protein, 15 aa, Artificial Sequence
  Description of Artificial Sequence: Synthetic peptide
  Seed: DPWVLLNASWFNSFL
DPFVLSNNSWINSFL

SEQ ID NO: 252121 - protein, 15 aa, Artificial Sequence
  Description of Artificial Sequence: Synthetic peptide
  Seed: DPWVLLNASWFNSFL
DPFVLSNNSWLNSFL

SEQ ID NO: 252122 - protein, 15 aa, Artificial Sequence
  Description of Artificial Sequence: Synthetic peptide
  Seed: DPWVLLNASWFNSFL
DPFVLSNNSWSNSFL

SEQ ID NO: 252123 - protein, 15 aa, Artificial Sequence
  Description of Artificial Sequence: Synthetic peptide
  Seed: DPWVLLNASWFNSFL
DPFVLSNNSWVNSFL

SEQ ID NO: 252124 - protein, 15 aa, Artificial Sequence
  Description of Artificial Sequence: Synthetic peptide
  Seed: DPWVLLNASWFNSFL
DPFVLSNPSWANSFL

SEQ ID NO: 252125 - protein, 15 aa, Artificial Sequence
  Description of Artificial Sequence: Synthetic peptide
  Seed: DPWVLLNASWFNSFL
DPFVLSNPSWINSFL

SEQ ID NO: 252126 - protein, 15 aa, Artificial Sequence
  Description of Artificial Sequence: Synthetic peptide
  Seed: DPWVLLNASWFNSFL
DPFVLSNPSWLNSFL

SEQ ID NO: 252127 - protein, 15 aa, Artificial Sequence
  Description of Artificial Sequence: Synthetic peptide
  Seed: DPWVLLNASWFNSFL
DPFVLSNPSWMNSFL

SEQ ID NO: 252128 - protein, 15 aa, Artificial Sequence
  Description of Artificial Sequence: Synthetic peptide
  Seed: DPWVLLNASWFNSFL
DPFVLSNPSWNNSFL

SEQ ID NO: 252129 - protein, 15 aa, Artificial Sequence
  Description of Artificial Sequence: Synthetic peptide
  Seed: DPWVLLNASWFNSFL
DPFVLSNPSWSNSFL

SEQ ID NO: 252130 - protein, 15 aa, Artificial Sequence
  Description of Artificial Sequence: Synthetic peptide
  Seed: DPWVLLNASWFNSFL
DPFVLSNPSWVNSFL

SEQ ID NO: 252131 - protein, 15 aa, Artificial Sequence
  Description of Artificial Sequence: Synthetic peptide
  Seed: DPWVLLNASWFNSFL
DPFVLSNSSWANSFL

SEQ ID NO: 252132 - protein, 15 aa, Artificial Sequence
  Description of Artificial Sequence: Synthetic peptide
  Seed: DPWVLLNASWFNSFL
DPFVLSNSSWFNSFL

SEQ ID NO: 252133 - protein, 15 aa, Artificial Sequence
  Description of Artificial Sequence: Synthetic peptide
  Seed: DPWVLLNASWFNSFL
DPFVLSNSSWINSFL

SEQ ID NO: 252134 - protein, 15 aa, Artificial Sequence
  Description of Artificial Sequence: Synthetic peptide
  Seed: DPWVLLNASWFNSFL
DPFVLSNSSWLNSFL

SEQ ID NO: 252135 - protein, 15 aa, Artificial Sequence
  Description of Artificial Sequence: Synthetic peptide
  Seed: DPWVLLNASWFNSFL
DPFVLSNSSWMNSFL

SEQ ID NO: 252136 - protein, 15 aa, Artificial Sequence
  Description of Artificial Sequence: Synthetic peptide
  Seed: DPWVLLNASWFNSFL
DPFVLSNSSWVNSFL

SEQ ID NO: 252137 - protein, 15 aa, Artificial Sequence
  Description of Artificial Sequence: Synthetic peptide
  Seed: DPWVLLNASWFNSFL
DPFVLSNTSWANSFL

SEQ ID NO: 252138 - protein, 15 aa, Artificial Sequence
  Description of Artificial Sequence: Synthetic peptide
  Seed: DPWVLLNASWFNSFL
DPFVLSNTSWINSFL

SEQ ID NO: 252139 - protein, 15 aa, Artificial Sequence
  Description of Artificial Sequence: Synthetic peptide
  Seed: DPWVLLNASWFNSFL
DPFVLSNTSWLNSFL

SEQ ID NO: 252140 - protein, 15 aa, Artificial Sequence
  Description of Artificial Sequence: Synthetic peptide
  Seed: DPWVLLNASWFNSFL
DPFVLSNTSWVNSFL

SEQ ID NO: 252141 - protein, 15 aa, Artificial Sequence
  Description of Artificial Sequence: Synthetic peptide
  Seed: DPWVLLNASWFNSFL
DPFVLSNVSWANSFL

SEQ ID NO: 252142 - protein, 15 aa, Artificial Sequence
  Description of Artificial Sequence: Synthetic peptide
  Seed: DPWVLLNASWFNSFL
DPFVLSNVSWINSFL

SEQ ID NO: 252143 - protein, 15 aa, Artificial Sequence
  Description of Artificial Sequence: Synthetic peptide
  Seed: DPWVLLNASWFNSFL
DPFVLSNVSWNNSFL

SEQ ID NO: 252144 - protein, 15 aa, Artificial Sequence
  Description of Artificial Sequence: Synthetic peptide
  Seed: DPWVLLNASWFNSFL
DPFVLTNASWANSFL

SEQ ID NO: 252145 - protein, 15 aa, Artificial Sequence
  Description of Artificial Sequence: Synthetic peptide
  Seed: DPWVLLNASWFNSFL
DPFVLTNASWFNSFL

SEQ ID NO: 252146 - protein, 15 aa, Artificial Sequence
  Description of Artificial Sequence: Synthetic peptide
  Seed: DPWVLLNASWFNSFL
DPFVLTNASWINSFL

SEQ ID NO: 252147 - protein, 15 aa, Artificial Sequence
  Description of Artificial Sequence: Synthetic peptide
  Seed: DPWVLLNASWFNSFL
DPFVLTNASWLNSFL

SEQ ID NO: 252148 - protein, 15 aa, Artificial Sequence
  Description of Artificial Sequence: Synthetic peptide
  Seed: DPWVLLNASWFNSFL
DPFVLTNASWMNSFL

SEQ ID NO: 252149 - protein, 15 aa, Artificial Sequence
  Description of Artificial Sequence: Synthetic peptide
  Seed: DPWVLLNASWFNSFL
DPFVLTNASWNNSFL

SEQ ID NO: 252150 - protein, 15 aa, Artificial Sequence
  Description of Artificial Sequence: Synthetic peptide
  Seed: DPWVLLNASWFNSFL
DPFVLTNASWSNSFL

SEQ ID NO: 252151 - protein, 15 aa, Artificial Sequence
  Description of Artificial Sequence: Synthetic peptide
  Seed: DPWVLLNASWFNSFL
DPFVLTNASWTNSFL

SEQ ID NO: 252152 - protein, 15 aa, Artificial Sequence
  Description of Artificial Sequence: Synthetic peptide
  Seed: DPWVLLNASWFNSFL
DPFVLTNASWVNSFL

SEQ ID NO: 252153 - protein, 15 aa, Artificial Sequence
  Description of Artificial Sequence: Synthetic peptide
  Seed: DPWVLLNASWFNSFL
DPFVLTNGSWANSFL

SEQ ID NO: 252154 - protein, 15 aa, Artificial Sequence
  Description of Artificial Sequence: Synthetic peptide
  Seed: DPWVLLNASWFNSFL
DPFVLTNGSWFNSFL

SEQ ID NO: 252155 - protein, 15 aa, Artificial Sequence
  Description of Artificial Sequence: Synthetic peptide
  Seed: DPWVLLNASWFNSFL
DPFVLTNGSWINSFL

SEQ ID NO: 252156 - protein, 15 aa, Artificial Sequence
  Description of Artificial Sequence: Synthetic peptide
  Seed: DPWVLLNASWFNSFL
DPFVLTNGSWLNSFL

SEQ ID NO: 252157 - protein, 15 aa, Artificial Sequence
  Description of Artificial Sequence: Synthetic peptide
  Seed: DPWVLLNASWFNSFL
DPFVLTNGSWMNSFL

SEQ ID NO: 252158 - protein, 15 aa, Artificial Sequence
  Description of Artificial Sequence: Synthetic peptide
  Seed: DPWVLLNASWFNSFL
DPFVLTNGSWVNSFL

SEQ ID NO: 252159 - protein, 15 aa, Artificial Sequence
  Description of Artificial Sequence: Synthetic peptide
  Seed: DPWVLLNASWFNSFL
DPFVLTNNSWANSFL

SEQ ID NO: 252160 - protein, 15 aa, Artificial Sequence
  Description of Artificial Sequence: Synthetic peptide
  Seed: DPWVLLNASWFNSFL
DPFVLTNNSWINSFL

SEQ ID NO: 252161 - protein, 15 aa, Artificial Sequence
  Description of Artificial Sequence: Synthetic peptide
  Seed: DPWVLLNASWFNSFL
DPFVLTNNSWLNSFL

SEQ ID NO: 252162 - protein, 15 aa, Artificial Sequence
  Description of Artificial Sequence: Synthetic peptide
  Seed: DPWVLLNASWFNSFL
DPFVLTNNSWSNSFL

SEQ ID NO: 252163 - protein, 15 aa, Artificial Sequence
  Description of Artificial Sequence: Synthetic peptide
  Seed: DPWVLLNASWFNSFL
DPFVLTNNSWVNSFL

SEQ ID NO: 252164 - protein, 15 aa, Artificial Sequence
  Description of Artificial Sequence: Synthetic peptide
  Seed: DPWVLLNASWFNSFL
DPFVLTNPSWANSFL

SEQ ID NO: 252165 - protein, 15 aa, Artificial Sequence
  Description of Artificial Sequence: Synthetic peptide
  Seed: DPWVLLNASWFNSFL
DPFVLTNPSWFNSFL

SEQ ID NO: 252166 - protein, 15 aa, Artificial Sequence
  Description of Artificial Sequence: Synthetic peptide
  Seed: DPWVLLNASWFNSFL
DPFVLTNPSWINSFL

SEQ ID NO: 252167 - protein, 15 aa, Artificial Sequence
  Description of Artificial Sequence: Synthetic peptide
  Seed: DPWVLLNASWFNSFL
DPFVLTNPSWLNSFL

SEQ ID NO: 252168 - protein, 15 aa, Artificial Sequence
  Description of Artificial Sequence: Synthetic peptide
  Seed: DPWVLLNASWFNSFL
DPFVLTNPSWMNSFL

SEQ ID NO: 252169 - protein, 15 aa, Artificial Sequence
  Description of Artificial Sequence: Synthetic peptide
  Seed: DPWVLLNASWFNSFL
DPFVLTNPSWNNSFL

SEQ ID NO: 252170 - protein, 15 aa, Artificial Sequence
  Description of Artificial Sequence: Synthetic peptide
  Seed: DPWVLLNASWFNSFL
DPFVLTNPSWSNSFL

SEQ ID NO: 252171 - protein, 15 aa, Artificial Sequence
  Description of Artificial Sequence: Synthetic peptide
  Seed: DPWVLLNASWFNSFL
DPFVLTNPSWVNSFL

SEQ ID NO: 252172 - protein, 15 aa, Artificial Sequence
  Description of Artificial Sequence: Synthetic peptide
  Seed: DPWVLLNASWFNSFL
DPFVLTNSSWANSFL

SEQ ID NO: 252173 - protein, 15 aa, Artificial Sequence
  Description of Artificial Sequence: Synthetic peptide
  Seed: DPWVLLNASWFNSFL
DPFVLTNSSWFNSFL

SEQ ID NO: 252174 - protein, 15 aa, Artificial Sequence
  Description of Artificial Sequence: Synthetic peptide
  Seed: DPWVLLNASWFNSFL
DPFVLTNSSWINSFL

SEQ ID NO: 252175 - protein, 15 aa, Artificial Sequence
  Description of Artificial Sequence: Synthetic peptide
  Seed: DPWVLLNASWFNSFL
DPFVLTNSSWLNSFL

SEQ ID NO: 252176 - protein, 15 aa, Artificial Sequence
  Description of Artificial Sequence: Synthetic peptide
  Seed: DPWVLLNASWFNSFL
DPFVLTNSSWMNSFL

SEQ ID NO: 252177 - protein, 15 aa, Artificial Sequence
  Description of Artificial Sequence: Synthetic peptide
  Seed: DPWVLLNASWFNSFL
DPFVLTNSSWVNSFL

SEQ ID NO: 252178 - protein, 15 aa, Artificial Sequence
  Description of Artificial Sequence: Synthetic peptide
  Seed: DPWVLLNASWFNSFL
DPFVLTNSSWYNSFL

SEQ ID NO: 252179 - protein, 15 aa, Artificial Sequence
  Description of Artificial Sequence: Synthetic peptide
  Seed: DPWVLLNASWFNSFL
DPFVLTNTSWANSFL

SEQ ID NO: 252180 - protein, 15 aa, Artificial Sequence
  Description of Artificial Sequence: Synthetic peptide
  Seed: DPWVLLNASWFNSFL
DPFVLTNTSWINSFL

SEQ ID NO: 252181 - protein, 15 aa, Artificial Sequence
  Description of Artificial Sequence: Synthetic peptide
  Seed: DPWVLLNASWFNSFL
DPFVLTNTSWLNSFL

SEQ ID NO: 252182 - protein, 15 aa, Artificial Sequence
  Description of Artificial Sequence: Synthetic peptide
  Seed: DPWVLLNASWFNSFL
DPFVLTNTSWVNSFL

SEQ ID NO: 252183 - protein, 15 aa, Artificial Sequence
  Description of Artificial Sequence: Synthetic peptide
  Seed: DPWVLLNASWFNSFL
DPFVLTNVSWINSFL

SEQ ID NO: 252184 - protein, 15 aa, Artificial Sequence
  Description of Artificial Sequence: Synthetic peptide
  Seed: DPWVLLNASWFNSFL
DPFVLTNVSWNNSFL

SEQ ID NO: 252185 - protein, 15 aa, Artificial Sequence
  Description of Artificial Sequence: Synthetic peptide
  Seed: DPWVLLNASWFNSFL
DPFVLVNASWANSFL

SEQ ID NO: 252186 - protein, 15 aa, Artificial Sequence
  Description of Artificial Sequence: Synthetic peptide
  Seed: DPWVLLNASWFNSFL
DPFVLVNASWGNSFL

SEQ ID NO: 252187 - protein, 15 aa, Artificial Sequence
  Description of Artificial Sequence: Synthetic peptide
  Seed: DPWVLLNASWFNSFL
DPFVLVNASWHNSFL

SEQ ID NO: 252188 - protein, 15 aa, Artificial Sequence
  Description of Artificial Sequence: Synthetic peptide
  Seed: DPWVLLNASWFNSFL
DPFVLVNASWINSFL

SEQ ID NO: 252189 - protein, 15 aa, Artificial Sequence
  Description of Artificial Sequence: Synthetic peptide
  Seed: DPWVLLNASWFNSFL
DPFVLVNASWLNSFL

SEQ ID NO: 252190 - protein, 15 aa, Artificial Sequence
  Description of Artificial Sequence: Synthetic peptide
  Seed: DPWVLLNASWFNSFL
DPFVLVNASWMNSFL

SEQ ID NO: 252191 - protein, 15 aa, Artificial Sequence
  Description of Artificial Sequence: Synthetic peptide
  Seed: DPWVLLNASWFNSFL
DPFVLVNASWNNSFL

SEQ ID NO: 252192 - protein, 15 aa, Artificial Sequence
  Description of Artificial Sequence: Synthetic peptide
  Seed: DPWVLLNASWFNSFL
DPFVLVNASWSNSFL

SEQ ID NO: 252193 - protein, 15 aa, Artificial Sequence
  Description of Artificial Sequence: Synthetic peptide
  Seed: DPWVLLNASWFNSFL
DPFVLVNASWTNSFL

SEQ ID NO: 252194 - protein, 15 aa, Artificial Sequence
  Description of Artificial Sequence: Synthetic peptide
  Seed: DPWVLLNASWFNSFL
DPFVLVNASWVNSFL

SEQ ID NO: 252195 - protein, 15 aa, Artificial Sequence
  Description of Artificial Sequence: Synthetic peptide
  Seed: DPWVLLNASWFNSFL
DPFVLVNGSWANSFL

SEQ ID NO: 252196 - protein, 15 aa, Artificial Sequence
  Description of Artificial Sequence: Synthetic peptide
  Seed: DPWVLLNASWFNSFL
DPFVLVNGSWGNSFL

SEQ ID NO: 252197 - protein, 15 aa, Artificial Sequence
  Description of Artificial Sequence: Synthetic peptide
  Seed: DPWVLLNASWFNSFL
DPFVLVNGSWINSFL

SEQ ID NO: 252198 - protein, 15 aa, Artificial Sequence
  Description of Artificial Sequence: Synthetic peptide
  Seed: DPWVLLNASWFNSFL
DPFVLVNGSWLNSFL

SEQ ID NO: 252199 - protein, 15 aa, Artificial Sequence
  Description of Artificial Sequence: Synthetic peptide
  Seed: DPWVLLNASWFNSFL
DPFVLVNGSWMNSFL

SEQ ID NO: 252200 - protein, 15 aa, Artificial Sequence
  Description of Artificial Sequence: Synthetic peptide
  Seed: DPWVLLNASWFNSFL
DPFVLVNGSWNNSFL

SEQ ID NO: 252201 - protein, 15 aa, Artificial Sequence
  Description of Artificial Sequence: Synthetic peptide
  Seed: DPWVLLNASWFNSFL
DPFVLVNGSWSNSFL

SEQ ID NO: 252202 - protein, 15 aa, Artificial Sequence
  Description of Artificial Sequence: Synthetic peptide
  Seed: DPWVLLNASWFNSFL
DPFVLVNGSWTNSFL

SEQ ID NO: 252203 - protein, 15 aa, Artificial Sequence
  Description of Artificial Sequence: Synthetic peptide
  Seed: DPWVLLNASWFNSFL
DPFVLVNGSWVNSFL

SEQ ID NO: 252204 - protein, 15 aa, Artificial Sequence
  Description of Artificial Sequence: Synthetic peptide
  Seed: DPWVLLNASWFNSFL
DPFVLVNISWNNSFL

SEQ ID NO: 252205 - protein, 15 aa, Artificial Sequence
  Description of Artificial Sequence: Synthetic peptide
  Seed: DPWVLLNASWFNSFL
DPFVLVNNSWANSFL

SEQ ID NO: 252206 - protein, 15 aa, Artificial Sequence
  Description of Artificial Sequence: Synthetic peptide
  Seed: DPWVLLNASWFNSFL
DPFVLVNNSWDNSFL

SEQ ID NO: 252207 - protein, 15 aa, Artificial Sequence
  Description of Artificial Sequence: Synthetic peptide
  Seed: DPWVLLNASWFNSFL
DPFVLVNNSWENSFL

SEQ ID NO: 252208 - protein, 15 aa, Artificial Sequence
  Description of Artificial Sequence: Synthetic peptide
  Seed: DPWVLLNASWFNSFL
DPFVLVNNSWGNSFL

SEQ ID NO: 252209 - protein, 15 aa, Artificial Sequence
  Description of Artificial Sequence: Synthetic peptide
  Seed: DPWVLLNASWFNSFL
DPFVLVNNSWINSFL

SEQ ID NO: 252210 - protein, 15 aa, Artificial Sequence
  Description of Artificial Sequence: Synthetic peptide
  Seed: DPWVLLNASWFNSFL
DPFVLVNNSWLNSFL

SEQ ID NO: 252211 - protein, 15 aa, Artificial Sequence
  Description of Artificial Sequence: Synthetic peptide
  Seed: DPWVLLNASWFNSFL
DPFVLVNNSWMNSFL

SEQ ID NO: 252212 - protein, 15 aa, Artificial Sequence
  Description of Artificial Sequence: Synthetic peptide
  Seed: DPWVLLNASWFNSFL
DPFVLVNNSWNNSFL

SEQ ID NO: 252213 - protein, 15 aa, Artificial Sequence
  Description of Artificial Sequence: Synthetic peptide
  Seed: DPWVLLNASWFNSFL
DPFVLVNNSWQNSFL

SEQ ID NO: 252214 - protein, 15 aa, Artificial Sequence
  Description of Artificial Sequence: Synthetic peptide
  Seed: DPWVLLNASWFNSFL
DPFVLVNNSWSNSFL

SEQ ID NO: 252215 - protein, 15 aa, Artificial Sequence
  Description of Artificial Sequence: Synthetic peptide
  Seed: DPWVLLNASWFNSFL
DPFVLVNNSWTNSFL

SEQ ID NO: 252216 - protein, 15 aa, Artificial Sequence
  Description of Artificial Sequence: Synthetic peptide
  Seed: DPWVLLNASWFNSFL
DPFVLVNNSWVNSFL

SEQ ID NO: 252217 - protein, 15 aa, Artificial Sequence
  Description of Artificial Sequence: Synthetic peptide
  Seed: DPWVLLNASWFNSFL
DPFVLVNPSWANSFL

SEQ ID NO: 252218 - protein, 15 aa, Artificial Sequence
  Description of Artificial Sequence: Synthetic peptide
  Seed: DPWVLLNASWFNSFL
DPFVLVNPSWHNSFL

SEQ ID NO: 252219 - protein, 15 aa, Artificial Sequence
  Description of Artificial Sequence: Synthetic peptide
  Seed: DPWVLLNASWFNSFL
DPFVLVNPSWINSFL

SEQ ID NO: 252220 - protein, 15 aa, Artificial Sequence
  Description of Artificial Sequence: Synthetic peptide
  Seed: DPWVLLNASWFNSFL
DPFVLVNPSWLNSFL

SEQ ID NO: 252221 - protein, 15 aa, Artificial Sequence
  Description of Artificial Sequence: Synthetic peptide
  Seed: DPWVLLNASWFNSFL
DPFVLVNPSWMNSFL

SEQ ID NO: 252222 - protein, 15 aa, Artificial Sequence
  Description of Artificial Sequence: Synthetic peptide
  Seed: DPWVLLNASWFNSFL
DPFVLVNPSWNNSFL

SEQ ID NO: 252223 - protein, 15 aa, Artificial Sequence
  Description of Artificial Sequence: Synthetic peptide
  Seed: DPWVLLNASWFNSFL
DPFVLVNPSWSNSFL

SEQ ID NO: 252224 - protein, 15 aa, Artificial Sequence
  Description of Artificial Sequence: Synthetic peptide
  Seed: DPWVLLNASWFNSFL
DPFVLVNPSWTNSFL

SEQ ID NO: 252225 - protein, 15 aa, Artificial Sequence
  Description of Artificial Sequence: Synthetic peptide
  Seed: DPWVLLNASWFNSFL
DPFVLVNPSWVNSFL

SEQ ID NO: 252226 - protein, 15 aa, Artificial Sequence
  Description of Artificial Sequence: Synthetic peptide
  Seed: DPWVLLNASWFNSFL
DPFVLVNSSWANSFL

SEQ ID NO: 252227 - protein, 15 aa, Artificial Sequence
  Description of Artificial Sequence: Synthetic peptide
  Seed: DPWVLLNASWFNSFL
DPFVLVNSSWDNSFL

SEQ ID NO: 252228 - protein, 15 aa, Artificial Sequence
  Description of Artificial Sequence: Synthetic peptide
  Seed: DPWVLLNASWFNSFL
DPFVLVNSSWENSFL

SEQ ID NO: 252229 - protein, 15 aa, Artificial Sequence
  Description of Artificial Sequence: Synthetic peptide
  Seed: DPWVLLNASWFNSFL
DPFVLVNSSWINSFL

SEQ ID NO: 252230 - protein, 15 aa, Artificial Sequence
  Description of Artificial Sequence: Synthetic peptide
  Seed: DPWVLLNASWFNSFL
DPFVLVNSSWLNSFL

SEQ ID NO: 252231 - protein, 15 aa, Artificial Sequence
  Description of Artificial Sequence: Synthetic peptide
  Seed: DPWVLLNASWFNSFL
DPFVLVNSSWMNSFL

SEQ ID NO: 252232 - protein, 15 aa, Artificial Sequence
  Description of Artificial Sequence: Synthetic peptide
  Seed: DPWVLLNASWFNSFL
DPFVLVNSSWNNSFL

SEQ ID NO: 252233 - protein, 15 aa, Artificial Sequence
  Description of Artificial Sequence: Synthetic peptide
  Seed: DPWVLLNASWFNSFL
DPFVLVNSSWSNSFL

SEQ ID NO: 252234 - protein, 15 aa, Artificial Sequence
  Description of Artificial Sequence: Synthetic peptide
  Seed: DPWVLLNASWFNSFL
DPFVLVNSSWTNSFL

SEQ ID NO: 252235 - protein, 15 aa, Artificial Sequence
  Description of Artificial Sequence: Synthetic peptide
  Seed: DPWVLLNASWFNSFL
DPFVLVNSSWVNSFL

SEQ ID NO: 252236 - protein, 15 aa, Artificial Sequence
  Description of Artificial Sequence: Synthetic peptide
  Seed: DPWVLLNASWFNSFL
DPFVLVNTSWANSFL

SEQ ID NO: 252237 - protein, 15 aa, Artificial Sequence
  Description of Artificial Sequence: Synthetic peptide
  Seed: DPWVLLNASWFNSFL
DPFVLVNTSWDNSFL

SEQ ID NO: 252238 - protein, 15 aa, Artificial Sequence
  Description of Artificial Sequence: Synthetic peptide
  Seed: DPWVLLNASWFNSFL
DPFVLVNTSWENSFL

SEQ ID NO: 252239 - protein, 15 aa, Artificial Sequence
  Description of Artificial Sequence: Synthetic peptide
  Seed: DPWVLLNASWFNSFL
DPFVLVNTSWINSFL

SEQ ID NO: 252240 - protein, 15 aa, Artificial Sequence
  Description of Artificial Sequence: Synthetic peptide
  Seed: DPWVLLNASWFNSFL
DPFVLVNTSWLNSFL

SEQ ID NO: 252241 - protein, 15 aa, Artificial Sequence
  Description of Artificial Sequence: Synthetic peptide
  Seed: DPWVLLNASWFNSFL
DPFVLVNTSWNNSFL

SEQ ID NO: 252242 - protein, 15 aa, Artificial Sequence
  Description of Artificial Sequence: Synthetic peptide
  Seed: DPWVLLNASWFNSFL
DPFVLVNTSWQNSFL

SEQ ID NO: 252243 - protein, 15 aa, Artificial Sequence
  Description of Artificial Sequence: Synthetic peptide
  Seed: DPWVLLNASWFNSFL
DPFVLVNTSWSNSFL

SEQ ID NO: 252244 - protein, 15 aa, Artificial Sequence
  Description of Artificial Sequence: Synthetic peptide
  Seed: DPWVLLNASWFNSFL
DPFVLVNTSWTNSFL

SEQ ID NO: 252245 - protein, 15 aa, Artificial Sequence
  Description of Artificial Sequence: Synthetic peptide
  Seed: DPWVLLNASWFNSFL
DPFVLVNTSWVNSFL

SEQ ID NO: 252246 - protein, 15 aa, Artificial Sequence
  Description of Artificial Sequence: Synthetic peptide
  Seed: DPWVLLNASWFNSFL
DPFVLVNVSWNNSFL

SEQ ID NO: 252247 - protein, 15 aa, Artificial Sequence
  Description of Artificial Sequence: Synthetic peptide
  Seed: DPWVLLNASWFNSFL
DPFVLYNNSWINSFL

SEQ ID NO: 252248 - protein, 15 aa, Artificial Sequence
  Description of Artificial Sequence: Synthetic peptide
  Seed: DPWVLLNASWFNSFL
DPFVLYNNSWLNSFL

SEQ ID NO: 252249 - protein, 15 aa, Artificial Sequence
  Description of Artificial Sequence: Synthetic peptide
  Seed: DPWVLLNASWFNSFL
DPFVLYNNSWVNSFL

SEQ ID NO: 252250 - protein, 15 aa, Artificial Sequence
  Description of Artificial Sequence: Synthetic peptide
  Seed: DPWVLLNASWFNSFL
DPFVLYNSSWLNSFL

SEQ ID NO: 252251 - protein, 15 aa, Artificial Sequence
  Description of Artificial Sequence: Synthetic peptide
  Seed: DPWVLLNASWFNSFL
DPFVLYNSSWVNSFL

SEQ ID NO: 252252 - protein, 15 aa, Artificial Sequence
  Description of Artificial Sequence: Synthetic peptide
  Seed: DPWVLLNASWFNSFL
DPIVLANASWANSFL

SEQ ID NO: 252253 - protein, 15 aa, Artificial Sequence
  Description of Artificial Sequence: Synthetic peptide
  Seed: DPWVLLNASWFNSFL
DPIVLANASWINSFL

SEQ ID NO: 252254 - protein, 15 aa, Artificial Sequence
  Description of Artificial Sequence: Synthetic peptide
  Seed: DPWVLLNASWFNSFL
DPIVLANASWLNSFL

SEQ ID NO: 252255 - protein, 15 aa, Artificial Sequence
  Description of Artificial Sequence: Synthetic peptide
  Seed: DPWVLLNASWFNSFL
DPIVLANASWMNSFL

SEQ ID NO: 252256 - protein, 15 aa, Artificial Sequence
  Description of Artificial Sequence: Synthetic peptide
  Seed: DPWVLLNASWFNSFL
DPIVLANASWTNSFL

SEQ ID NO: 252257 - protein, 15 aa, Artificial Sequence
  Description of Artificial Sequence: Synthetic peptide
  Seed: DPWVLLNASWFNSFL
DPIVLANASWVNSFL

SEQ ID NO: 252258 - protein, 15 aa, Artificial Sequence
  Description of Artificial Sequence: Synthetic peptide
  Seed: DPWVLLNASWFNSFL
DPIVLANGSWANSFL

SEQ ID NO: 252259 - protein, 15 aa, Artificial Sequence
  Description of Artificial Sequence: Synthetic peptide
  Seed: DPWVLLNASWFNSFL
DPIVLANGSWINSFL

SEQ ID NO: 252260 - protein, 15 aa, Artificial Sequence
  Description of Artificial Sequence: Synthetic peptide
  Seed: DPWVLLNASWFNSFL
DPIVLANGSWLNSFL

SEQ ID NO: 252261 - protein, 15 aa, Artificial Sequence
  Description of Artificial Sequence: Synthetic peptide
  Seed: DPWVLLNASWFNSFL
DPIVLANGSWVNSFL

SEQ ID NO: 252262 - protein, 15 aa, Artificial Sequence
  Description of Artificial Sequence: Synthetic peptide
  Seed: DPWVLLNASWFNSFL
DPIVLANPSWLNSFL

SEQ ID NO: 252263 - protein, 15 aa, Artificial Sequence
  Description of Artificial Sequence: Synthetic peptide
  Seed: DPWVLLNASWFNSFL
DPIVLANPSWVNSFL

SEQ ID NO: 252264 - protein, 15 aa, Artificial Sequence
  Description of Artificial Sequence: Synthetic peptide
  Seed: DPWVLLNASWFNSFL
DPIVLANSSWANSFL

SEQ ID NO: 252265 - protein, 15 aa, Artificial Sequence
  Description of Artificial Sequence: Synthetic peptide
  Seed: DPWVLLNASWFNSFL
DPIVLANSSWINSFL

SEQ ID NO: 252266 - protein, 15 aa, Artificial Sequence
  Description of Artificial Sequence: Synthetic peptide
  Seed: DPWVLLNASWFNSFL
DPIVLANSSWLNSFL

SEQ ID NO: 252267 - protein, 15 aa, Artificial Sequence
  Description of Artificial Sequence: Synthetic peptide
  Seed: DPWVLLNASWFNSFL
DPIVLANSSWVNSFL

SEQ ID NO: 252268 - protein, 15 aa, Artificial Sequence
  Description of Artificial Sequence: Synthetic peptide
  Seed: DPWVLLNASWFNSFL
DPIVLFNASWANSFL

SEQ ID NO: 252269 - protein, 15 aa, Artificial Sequence
  Description of Artificial Sequence: Synthetic peptide
  Seed: DPWVLLNASWFNSFL
DPIVLFNASWINSFL

SEQ ID NO: 252270 - protein, 15 aa, Artificial Sequence
  Description of Artificial Sequence: Synthetic peptide
  Seed: DPWVLLNASWFNSFL
DPIVLFNASWLNSFL

SEQ ID NO: 252271 - protein, 15 aa, Artificial Sequence
  Description of Artificial Sequence: Synthetic peptide
  Seed: DPWVLLNASWFNSFL
DPIVLFNASWVNSFL

SEQ ID NO: 252272 - protein, 15 aa, Artificial Sequence
  Description of Artificial Sequence: Synthetic peptide
  Seed: DPWVLLNASWFNSFL
DPIVLFNGSWANSFL

SEQ ID NO: 252273 - protein, 15 aa, Artificial Sequence
  Description of Artificial Sequence: Synthetic peptide
  Seed: DPWVLLNASWFNSFL
DPIVLFNGSWINSFL

SEQ ID NO: 252274 - protein, 15 aa, Artificial Sequence
  Description of Artificial Sequence: Synthetic peptide
  Seed: DPWVLLNASWFNSFL
DPIVLFNGSWLNSFL

SEQ ID NO: 252275 - protein, 15 aa, Artificial Sequence
  Description of Artificial Sequence: Synthetic peptide
  Seed: DPWVLLNASWFNSFL
DPIVLFNGSWMNSFL

SEQ ID NO: 252276 - protein, 15 aa, Artificial Sequence
  Description of Artificial Sequence: Synthetic peptide
  Seed: DPWVLLNASWFNSFL
DPIVLFNGSWTNSFL

SEQ ID NO: 252277 - protein, 15 aa, Artificial Sequence
  Description of Artificial Sequence: Synthetic peptide
  Seed: DPWVLLNASWFNSFL
DPIVLFNGSWVNSFL

SEQ ID NO: 252278 - protein, 15 aa, Artificial Sequence
  Description of Artificial Sequence: Synthetic peptide
  Seed: DPWVLLNASWFNSFL
DPIVLFNNSWANSFL

SEQ ID NO: 252279 - protein, 15 aa, Artificial Sequence
  Description of Artificial Sequence: Synthetic peptide
  Seed: DPWVLLNASWFNSFL
DPIVLFNNSWINSFL

SEQ ID NO: 252280 - protein, 15 aa, Artificial Sequence
  Description of Artificial Sequence: Synthetic peptide
  Seed: DPWVLLNASWFNSFL
DPIVLFNNSWLNSFL

SEQ ID NO: 252281 - protein, 15 aa, Artificial Sequence
  Description of Artificial Sequence: Synthetic peptide
  Seed: DPWVLLNASWFNSFL
DPIVLFNNSWMNSFL

SEQ ID NO: 252282 - protein, 15 aa, Artificial Sequence
  Description of Artificial Sequence: Synthetic peptide
  Seed: DPWVLLNASWFNSFL
DPIVLFNNSWSNSFL

SEQ ID NO: 252283 - protein, 15 aa, Artificial Sequence
  Description of Artificial Sequence: Synthetic peptide
  Seed: DPWVLLNASWFNSFL
DPIVLFNNSWTNSFL

SEQ ID NO: 252284 - protein, 15 aa, Artificial Sequence
  Description of Artificial Sequence: Synthetic peptide
  Seed: DPWVLLNASWFNSFL
DPIVLFNNSWVNSFL

SEQ ID NO: 252285 - protein, 15 aa, Artificial Sequence
  Description of Artificial Sequence: Synthetic peptide
  Seed: DPWVLLNASWFNSFL
DPIVLFNSSWANSFL

SEQ ID NO: 252286 - protein, 15 aa, Artificial Sequence
  Description of Artificial Sequence: Synthetic peptide
  Seed: DPWVLLNASWFNSFL
DPIVLFNSSWHNSFL

SEQ ID NO: 252287 - protein, 15 aa, Artificial Sequence
  Description of Artificial Sequence: Synthetic peptide
  Seed: DPWVLLNASWFNSFL
DPIVLFNSSWINSFL

SEQ ID NO: 252288 - protein, 15 aa, Artificial Sequence
  Description of Artificial Sequence: Synthetic peptide
  Seed: DPWVLLNASWFNSFL
DPIVLFNSSWLNSFL

SEQ ID NO: 252289 - protein, 15 aa, Artificial Sequence
  Description of Artificial Sequence: Synthetic peptide
  Seed: DPWVLLNASWFNSFL
DPIVLFNSSWMNSFL

SEQ ID NO: 252290 - protein, 15 aa, Artificial Sequence
  Description of Artificial Sequence: Synthetic peptide
  Seed: DPWVLLNASWFNSFL
DPIVLFNSSWSNSFL

SEQ ID NO: 252291 - protein, 15 aa, Artificial Sequence
  Description of Artificial Sequence: Synthetic peptide
  Seed: DPWVLLNASWFNSFL
DPIVLFNSSWTNSFL

SEQ ID NO: 252292 - protein, 15 aa, Artificial Sequence
  Description of Artificial Sequence: Synthetic peptide
  Seed: DPWVLLNASWFNSFL
DPIVLFNSSWVNSFL

SEQ ID NO: 252293 - protein, 15 aa, Artificial Sequence
  Description of Artificial Sequence: Synthetic peptide
  Seed: DPWVLLNASWFNSFL
DPIVLFNTSWINSFL

SEQ ID NO: 252294 - protein, 15 aa, Artificial Sequence
  Description of Artificial Sequence: Synthetic peptide
  Seed: DPWVLLNASWFNSFL
DPIVLFNTSWLNSFL

SEQ ID NO: 252295 - protein, 15 aa, Artificial Sequence
  Description of Artificial Sequence: Synthetic peptide
  Seed: DPWVLLNASWFNSFL
DPIVLFNTSWVNSFL

SEQ ID NO: 252296 - protein, 15 aa, Artificial Sequence
  Description of Artificial Sequence: Synthetic peptide
  Seed: DPWVLLNASWFNSFL
DPIVLINASWANSFL

SEQ ID NO: 252297 - protein, 15 aa, Artificial Sequence
  Description of Artificial Sequence: Synthetic peptide
  Seed: DPWVLLNASWFNSFL
DPIVLINASWINSFL

SEQ ID NO: 252298 - protein, 15 aa, Artificial Sequence
  Description of Artificial Sequence: Synthetic peptide
  Seed: DPWVLLNASWFNSFL
DPIVLINASWLNSFL

SEQ ID NO: 252299 - protein, 15 aa, Artificial Sequence
  Description of Artificial Sequence: Synthetic peptide
  Seed: DPWVLLNASWFNSFL
DPIVLINASWVNSFL

SEQ ID NO: 252300 - protein, 15 aa, Artificial Sequence
  Description of Artificial Sequence: Synthetic peptide
  Seed: DPWVLLNASWFNSFL
DPIVLINGSWANSFL

SEQ ID NO: 252301 - protein, 15 aa, Artificial Sequence
  Description of Artificial Sequence: Synthetic peptide
  Seed: DPWVLLNASWFNSFL
DPIVLINGSWINSFL

SEQ ID NO: 252302 - protein, 15 aa, Artificial Sequence
  Description of Artificial Sequence: Synthetic peptide
  Seed: DPWVLLNASWFNSFL
DPIVLINGSWLNSFL

SEQ ID NO: 252303 - protein, 15 aa, Artificial Sequence
  Description of Artificial Sequence: Synthetic peptide
  Seed: DPWVLLNASWFNSFL
DPIVLINGSWVNSFL

SEQ ID NO: 252304 - protein, 15 aa, Artificial Sequence
  Description of Artificial Sequence: Synthetic peptide
  Seed: DPWVLLNASWFNSFL
DPIVLINNSWINSFL

SEQ ID NO: 252305 - protein, 15 aa, Artificial Sequence
  Description of Artificial Sequence: Synthetic peptide
  Seed: DPWVLLNASWFNSFL
DPIVLINNSWLNSFL

SEQ ID NO: 252306 - protein, 15 aa, Artificial Sequence
  Description of Artificial Sequence: Synthetic peptide
  Seed: DPWVLLNASWFNSFL
DPIVLINNSWVNSFL

SEQ ID NO: 252307 - protein, 15 aa, Artificial Sequence
  Description of Artificial Sequence: Synthetic peptide
  Seed: DPWVLLNASWFNSFL
DPIVLINPSWANSFL

SEQ ID NO: 252308 - protein, 15 aa, Artificial Sequence
  Description of Artificial Sequence: Synthetic peptide
  Seed: DPWVLLNASWFNSFL
DPIVLINPSWLNSFL

SEQ ID NO: 252309 - protein, 15 aa, Artificial Sequence
  Description of Artificial Sequence: Synthetic peptide
  Seed: DPWVLLNASWFNSFL
DPIVLINPSWVNSFL

SEQ ID NO: 252310 - protein, 15 aa, Artificial Sequence
  Description of Artificial Sequence: Synthetic peptide
  Seed: DPWVLLNASWFNSFL
DPIVLINSSWANSFL

SEQ ID NO: 252311 - protein, 15 aa, Artificial Sequence
  Description of Artificial Sequence: Synthetic peptide
  Seed: DPWVLLNASWFNSFL
DPIVLINSSWLNSFL

SEQ ID NO: 252312 - protein, 15 aa, Artificial Sequence
  Description of Artificial Sequence: Synthetic peptide
  Seed: DPWVLLNASWFNSFL
DPIVLINSSWVNSFL

SEQ ID NO: 252313 - protein, 15 aa, Artificial Sequence
  Description of Artificial Sequence: Synthetic peptide
  Seed: DPWVLLNASWFNSFL
DPIVLLNASWANSFL

SEQ ID NO: 252314 - protein, 15 aa, Artificial Sequence
  Description of Artificial Sequence: Synthetic peptide
  Seed: DPWVLLNASWFNSFL
DPIVLLNASWINSFL

SEQ ID NO: 252315 - protein, 15 aa, Artificial Sequence
  Description of Artificial Sequence: Synthetic peptide
  Seed: DPWVLLNASWFNSFL
DPIVLLNASWLNSFL

SEQ ID NO: 252316 - protein, 15 aa, Artificial Sequence
  Description of Artificial Sequence: Synthetic peptide
  Seed: DPWVLLNASWFNSFL
DPIVLLNASWMNSFL

SEQ ID NO: 252317 - protein, 15 aa, Artificial Sequence
  Description of Artificial Sequence: Synthetic peptide
  Seed: DPWVLLNASWFNSFL
DPIVLLNASWSNSFL

SEQ ID NO: 252318 - protein, 15 aa, Artificial Sequence
  Description of Artificial Sequence: Synthetic peptide
  Seed: DPWVLLNASWFNSFL
DPIVLLNASWTNSFL

SEQ ID NO: 252319 - protein, 15 aa, Artificial Sequence
  Description of Artificial Sequence: Synthetic peptide
  Seed: DPWVLLNASWFNSFL
DPIVLLNASWVNSFL

SEQ ID NO: 252320 - protein, 15 aa, Artificial Sequence
  Description of Artificial Sequence: Synthetic peptide
  Seed: DPWVLLNASWFNSFL
DPIVLLNGSWANSFL

SEQ ID NO: 252321 - protein, 15 aa, Artificial Sequence
  Description of Artificial Sequence: Synthetic peptide
  Seed: DPWVLLNASWFNSFL
DPIVLLNGSWINSFL

SEQ ID NO: 252322 - protein, 15 aa, Artificial Sequence
  Description of Artificial Sequence: Synthetic peptide
  Seed: DPWVLLNASWFNSFL
DPIVLLNGSWLNSFL

SEQ ID NO: 252323 - protein, 15 aa, Artificial Sequence
  Description of Artificial Sequence: Synthetic peptide
  Seed: DPWVLLNASWFNSFL
DPIVLLNGSWMNSFL

SEQ ID NO: 252324 - protein, 15 aa, Artificial Sequence
  Description of Artificial Sequence: Synthetic peptide
  Seed: DPWVLLNASWFNSFL
DPIVLLNGSWSNSFL

SEQ ID NO: 252325 - protein, 15 aa, Artificial Sequence
  Description of Artificial Sequence: Synthetic peptide
  Seed: DPWVLLNASWFNSFL
DPIVLLNGSWTNSFL

SEQ ID NO: 252326 - protein, 15 aa, Artificial Sequence
  Description of Artificial Sequence: Synthetic peptide
  Seed: DPWVLLNASWFNSFL
DPIVLLNGSWVNSFL

SEQ ID NO: 252327 - protein, 15 aa, Artificial Sequence
  Description of Artificial Sequence: Synthetic peptide
  Seed: DPWVLLNASWFNSFL
DPIVLLNNSWANSFL

SEQ ID NO: 252328 - protein, 15 aa, Artificial Sequence
  Description of Artificial Sequence: Synthetic peptide
  Seed: DPWVLLNASWFNSFL
DPIVLLNNSWINSFL

SEQ ID NO: 252329 - protein, 15 aa, Artificial Sequence
  Description of Artificial Sequence: Synthetic peptide
  Seed: DPWVLLNASWFNSFL
DPIVLLNNSWLNSFL

SEQ ID NO: 252330 - protein, 15 aa, Artificial Sequence
  Description of Artificial Sequence: Synthetic peptide
  Seed: DPWVLLNASWFNSFL
DPIVLLNNSWTNSFL

SEQ ID NO: 252331 - protein, 15 aa, Artificial Sequence
  Description of Artificial Sequence: Synthetic peptide
  Seed: DPWVLLNASWFNSFL
DPIVLLNNSWVNSFL

SEQ ID NO: 252332 - protein, 15 aa, Artificial Sequence
  Description of Artificial Sequence: Synthetic peptide
  Seed: DPWVLLNASWFNSFL
DPIVLLNPSWANSFL

SEQ ID NO: 252333 - protein, 15 aa, Artificial Sequence
  Description of Artificial Sequence: Synthetic peptide
  Seed: DPWVLLNASWFNSFL
DPIVLLNPSWINSFL

SEQ ID NO: 252334 - protein, 15 aa, Artificial Sequence
  Description of Artificial Sequence: Synthetic peptide
  Seed: DPWVLLNASWFNSFL
DPIVLLNPSWLNSFL

SEQ ID NO: 252335 - protein, 15 aa, Artificial Sequence
  Description of Artificial Sequence: Synthetic peptide
  Seed: DPWVLLNASWFNSFL
DPIVLLNPSWMNSFL

SEQ ID NO: 252336 - protein, 15 aa, Artificial Sequence
  Description of Artificial Sequence: Synthetic peptide
  Seed: DPWVLLNASWFNSFL
DPIVLLNPSWSNSFL

SEQ ID NO: 252337 - protein, 15 aa, Artificial Sequence
  Description of Artificial Sequence: Synthetic peptide
  Seed: DPWVLLNASWFNSFL
DPIVLLNPSWTNSFL

SEQ ID NO: 252338 - protein, 15 aa, Artificial Sequence
  Description of Artificial Sequence: Synthetic peptide
  Seed: DPWVLLNASWFNSFL
DPIVLLNPSWVNSFL

SEQ ID NO: 252339 - protein, 15 aa, Artificial Sequence
  Description of Artificial Sequence: Synthetic peptide
  Seed: DPWVLLNASWFNSFL
DPIVLLNSSWANSFL

SEQ ID NO: 252340 - protein, 15 aa, Artificial Sequence
  Description of Artificial Sequence: Synthetic peptide
  Seed: DPWVLLNASWFNSFL
DPIVLLNSSWINSFL

SEQ ID NO: 252341 - protein, 15 aa, Artificial Sequence
  Description of Artificial Sequence: Synthetic peptide
  Seed: DPWVLLNASWFNSFL
DPIVLLNSSWLNSFL

SEQ ID NO: 252342 - protein, 15 aa, Artificial Sequence
  Description of Artificial Sequence: Synthetic peptide
  Seed: DPWVLLNASWFNSFL
DPIVLLNSSWMNSFL

SEQ ID NO: 252343 - protein, 15 aa, Artificial Sequence
  Description of Artificial Sequence: Synthetic peptide
  Seed: DPWVLLNASWFNSFL
DPIVLLNSSWSNSFL

SEQ ID NO: 252344 - protein, 15 aa, Artificial Sequence
  Description of Artificial Sequence: Synthetic peptide
  Seed: DPWVLLNASWFNSFL
DPIVLLNSSWTNSFL

SEQ ID NO: 252345 - protein, 15 aa, Artificial Sequence
  Description of Artificial Sequence: Synthetic peptide
  Seed: DPWVLLNASWFNSFL
DPIVLLNSSWVNSFL

SEQ ID NO: 252346 - protein, 15 aa, Artificial Sequence
  Description of Artificial Sequence: Synthetic peptide
  Seed: DPWVLLNASWFNSFL
DPIVLLNTSWANSFL

SEQ ID NO: 252347 - protein, 15 aa, Artificial Sequence
  Description of Artificial Sequence: Synthetic peptide
  Seed: DPWVLLNASWFNSFL
DPIVLLNTSWLNSFL

SEQ ID NO: 252348 - protein, 15 aa, Artificial Sequence
  Description of Artificial Sequence: Synthetic peptide
  Seed: DPWVLLNASWFNSFL
DPIVLLNTSWVNSFL

SEQ ID NO: 252349 - protein, 15 aa, Artificial Sequence
  Description of Artificial Sequence: Synthetic peptide
  Seed: DPWVLLNASWFNSFL
DPIVLMNASWANSFL

SEQ ID NO: 252350 - protein, 15 aa, Artificial Sequence
  Description of Artificial Sequence: Synthetic peptide
  Seed: DPWVLLNASWFNSFL
DPIVLMNASWINSFL

SEQ ID NO: 252351 - protein, 15 aa, Artificial Sequence
  Description of Artificial Sequence: Synthetic peptide
  Seed: DPWVLLNASWFNSFL
DPIVLMNASWLNSFL

SEQ ID NO: 252352 - protein, 15 aa, Artificial Sequence
  Description of Artificial Sequence: Synthetic peptide
  Seed: DPWVLLNASWFNSFL
DPIVLMNASWMNSFL

SEQ ID NO: 252353 - protein, 15 aa, Artificial Sequence
  Description of Artificial Sequence: Synthetic peptide
  Seed: DPWVLLNASWFNSFL
DPIVLMNASWSNSFL

SEQ ID NO: 252354 - protein, 15 aa, Artificial Sequence
  Description of Artificial Sequence: Synthetic peptide
  Seed: DPWVLLNASWFNSFL
DPIVLMNASWTNSFL

SEQ ID NO: 252355 - protein, 15 aa, Artificial Sequence
  Description of Artificial Sequence: Synthetic peptide
  Seed: DPWVLLNASWFNSFL
DPIVLMNASWVNSFL

SEQ ID NO: 252356 - protein, 15 aa, Artificial Sequence
  Description of Artificial Sequence: Synthetic peptide
  Seed: DPWVLLNASWFNSFL
DPIVLMNGSWANSFL

SEQ ID NO: 252357 - protein, 15 aa, Artificial Sequence
  Description of Artificial Sequence: Synthetic peptide
  Seed: DPWVLLNASWFNSFL
DPIVLMNGSWINSFL

SEQ ID NO: 252358 - protein, 15 aa, Artificial Sequence
  Description of Artificial Sequence: Synthetic peptide
  Seed: DPWVLLNASWFNSFL
DPIVLMNGSWLNSFL

SEQ ID NO: 252359 - protein, 15 aa, Artificial Sequence
  Description of Artificial Sequence: Synthetic peptide
  Seed: DPWVLLNASWFNSFL
DPIVLMNGSWMNSFL

SEQ ID NO: 252360 - protein, 15 aa, Artificial Sequence
  Description of Artificial Sequence: Synthetic peptide
  Seed: DPWVLLNASWFNSFL
DPIVLMNGSWSNSFL

SEQ ID NO: 252361 - protein, 15 aa, Artificial Sequence
  Description of Artificial Sequence: Synthetic peptide
  Seed: DPWVLLNASWFNSFL
DPIVLMNGSWTNSFL

SEQ ID NO: 252362 - protein, 15 aa, Artificial Sequence
  Description of Artificial Sequence: Synthetic peptide
  Seed: DPWVLLNASWFNSFL
DPIVLMNGSWVNSFL

SEQ ID NO: 252363 - protein, 15 aa, Artificial Sequence
  Description of Artificial Sequence: Synthetic peptide
  Seed: DPWVLLNASWFNSFL
DPIVLMNNSWANSFL

SEQ ID NO: 252364 - protein, 15 aa, Artificial Sequence
  Description of Artificial Sequence: Synthetic peptide
  Seed: DPWVLLNASWFNSFL
DPIVLMNNSWINSFL

SEQ ID NO: 252365 - protein, 15 aa, Artificial Sequence
  Description of Artificial Sequence: Synthetic peptide
  Seed: DPWVLLNASWFNSFL
DPIVLMNNSWLNSFL

SEQ ID NO: 252366 - protein, 15 aa, Artificial Sequence
  Description of Artificial Sequence: Synthetic peptide
  Seed: DPWVLLNASWFNSFL
DPIVLMNNSWVNSFL

SEQ ID NO: 252367 - protein, 15 aa, Artificial Sequence
  Description of Artificial Sequence: Synthetic peptide
  Seed: DPWVLLNASWFNSFL
DPIVLMNPSWANSFL

SEQ ID NO: 252368 - protein, 15 aa, Artificial Sequence
  Description of Artificial Sequence: Synthetic peptide
  Seed: DPWVLLNASWFNSFL
DPIVLMNPSWINSFL

SEQ ID NO: 252369 - protein, 15 aa, Artificial Sequence
  Description of Artificial Sequence: Synthetic peptide
  Seed: DPWVLLNASWFNSFL
DPIVLMNPSWLNSFL

SEQ ID NO: 252370 - protein, 15 aa, Artificial Sequence
  Description of Artificial Sequence: Synthetic peptide
  Seed: DPWVLLNASWFNSFL
DPIVLMNPSWMNSFL

SEQ ID NO: 252371 - protein, 15 aa, Artificial Sequence
  Description of Artificial Sequence: Synthetic peptide
  Seed: DPWVLLNASWFNSFL
DPIVLMNPSWTNSFL

SEQ ID NO: 252372 - protein, 15 aa, Artificial Sequence
  Description of Artificial Sequence: Synthetic peptide
  Seed: DPWVLLNASWFNSFL
DPIVLMNPSWVNSFL

SEQ ID NO: 252373 - protein, 15 aa, Artificial Sequence
  Description of Artificial Sequence: Synthetic peptide
  Seed: DPWVLLNASWFNSFL
DPIVLMNSSWANSFL

SEQ ID NO: 252374 - protein, 15 aa, Artificial Sequence
  Description of Artificial Sequence: Synthetic peptide
  Seed: DPWVLLNASWFNSFL
DPIVLMNSSWINSFL

SEQ ID NO: 252375 - protein, 15 aa, Artificial Sequence
  Description of Artificial Sequence: Synthetic peptide
  Seed: DPWVLLNASWFNSFL
DPIVLMNSSWLNSFL

SEQ ID NO: 252376 - protein, 15 aa, Artificial Sequence
  Description of Artificial Sequence: Synthetic peptide
  Seed: DPWVLLNASWFNSFL
DPIVLMNSSWMNSFL

SEQ ID NO: 252377 - protein, 15 aa, Artificial Sequence
  Description of Artificial Sequence: Synthetic peptide
  Seed: DPWVLLNASWFNSFL
DPIVLMNSSWSNSFL

SEQ ID NO: 252378 - protein, 15 aa, Artificial Sequence
  Description of Artificial Sequence: Synthetic peptide
  Seed: DPWVLLNASWFNSFL
DPIVLMNSSWTNSFL

SEQ ID NO: 252379 - protein, 15 aa, Artificial Sequence
  Description of Artificial Sequence: Synthetic peptide
  Seed: DPWVLLNASWFNSFL
DPIVLMNSSWVNSFL

SEQ ID NO: 252380 - protein, 15 aa, Artificial Sequence
  Description of Artificial Sequence: Synthetic peptide
  Seed: DPWVLLNASWFNSFL
DPIVLMNTSWANSFL

SEQ ID NO: 252381 - protein, 15 aa, Artificial Sequence
  Description of Artificial Sequence: Synthetic peptide
  Seed: DPWVLLNASWFNSFL
DPIVLMNTSWLNSFL

SEQ ID NO: 252382 - protein, 15 aa, Artificial Sequence
  Description of Artificial Sequence: Synthetic peptide
  Seed: DPWVLLNASWFNSFL
DPIVLMNTSWVNSFL

SEQ ID NO: 252383 - protein, 15 aa, Artificial Sequence
  Description of Artificial Sequence: Synthetic peptide
  Seed: DPWVLLNASWFNSFL
DPIVLQNASWANSFL

SEQ ID NO: 252384 - protein, 15 aa, Artificial Sequence
  Description of Artificial Sequence: Synthetic peptide
  Seed: DPWVLLNASWFNSFL
DPIVLQNASWINSFL

SEQ ID NO: 252385 - protein, 15 aa, Artificial Sequence
  Description of Artificial Sequence: Synthetic peptide
  Seed: DPWVLLNASWFNSFL
DPIVLQNASWLNSFL

SEQ ID NO: 252386 - protein, 15 aa, Artificial Sequence
  Description of Artificial Sequence: Synthetic peptide
  Seed: DPWVLLNASWFNSFL
DPIVLQNASWVNSFL

SEQ ID NO: 252387 - protein, 15 aa, Artificial Sequence
  Description of Artificial Sequence: Synthetic peptide
  Seed: DPWVLLNASWFNSFL
DPIVLQNGSWLNSFL

SEQ ID NO: 252388 - protein, 15 aa, Artificial Sequence
  Description of Artificial Sequence: Synthetic peptide
  Seed: DPWVLLNASWFNSFL
DPIVLQNGSWVNSFL

SEQ ID NO: 252389 - protein, 15 aa, Artificial Sequence
  Description of Artificial Sequence: Synthetic peptide
  Seed: DPWVLLNASWFNSFL
DPIVLSNASWINSFL

SEQ ID NO: 252390 - protein, 15 aa, Artificial Sequence
  Description of Artificial Sequence: Synthetic peptide
  Seed: DPWVLLNASWFNSFL
DPIVLSNASWLNSFL

SEQ ID NO: 252391 - protein, 15 aa, Artificial Sequence
  Description of Artificial Sequence: Synthetic peptide
  Seed: DPWVLLNASWFNSFL
DPIVLSNSSWINSFL

SEQ ID NO: 252392 - protein, 15 aa, Artificial Sequence
  Description of Artificial Sequence: Synthetic peptide
  Seed: DPWVLLNASWFNSFL
DPIVLTNASWINSFL

SEQ ID NO: 252393 - protein, 15 aa, Artificial Sequence
  Description of Artificial Sequence: Synthetic peptide
  Seed: DPWVLLNASWFNSFL
DPIVLTNASWLNSFL

SEQ ID NO: 252394 - protein, 15 aa, Artificial Sequence
  Description of Artificial Sequence: Synthetic peptide
  Seed: DPWVLLNASWFNSFL
DPIVLTNASWVNSFL

SEQ ID NO: 252395 - protein, 15 aa, Artificial Sequence
  Description of Artificial Sequence: Synthetic peptide
  Seed: DPWVLLNASWFNSFL
DPIVLTNSSWINSFL

SEQ ID NO: 252396 - protein, 15 aa, Artificial Sequence
  Description of Artificial Sequence: Synthetic peptide
  Seed: DPWVLLNASWFNSFL
DPIVLTNSSWLNSFL

SEQ ID NO: 252397 - protein, 15 aa, Artificial Sequence
  Description of Artificial Sequence: Synthetic peptide
  Seed: DPWVLLNASWFNSFL
DPIVLTNSSWVNSFL

SEQ ID NO: 252398 - protein, 15 aa, Artificial Sequence
  Description of Artificial Sequence: Synthetic peptide
  Seed: DPWVLLNASWFNSFL
DPIVLVNASWANSFL

SEQ ID NO: 252399 - protein, 15 aa, Artificial Sequence
  Description of Artificial Sequence: Synthetic peptide
  Seed: DPWVLLNASWFNSFL
DPIVLWNASWLNSFL

SEQ ID NO: 252400 - protein, 15 aa, Artificial Sequence
  Description of Artificial Sequence: Synthetic peptide
  Seed: DPWVLLNASWFNSFL
DPIVLWNNSWINSFL

SEQ ID NO: 252401 - protein, 15 aa, Artificial Sequence
  Description of Artificial Sequence: Synthetic peptide
  Seed: DPWVLLNASWFNSFL
DPIVLWNNSWLNSFL

SEQ ID NO: 252402 - protein, 15 aa, Artificial Sequence
  Description of Artificial Sequence: Synthetic peptide
  Seed: DPWVLLNASWFNSFL
DPIVLWNNSWVNSFL

SEQ ID NO: 252403 - protein, 15 aa, Artificial Sequence
  Description of Artificial Sequence: Synthetic peptide
  Seed: DPWVLLNASWFNSFL
DPIVLWNSSWANSFL

SEQ ID NO: 252404 - protein, 15 aa, Artificial Sequence
  Description of Artificial Sequence: Synthetic peptide
  Seed: DPWVLLNASWFNSFL
DPIVLWNSSWINSFL

SEQ ID NO: 252405 - protein, 15 aa, Artificial Sequence
  Description of Artificial Sequence: Synthetic peptide
  Seed: DPWVLLNASWFNSFL
DPIVLWNSSWLNSFL

SEQ ID NO: 252406 - protein, 15 aa, Artificial Sequence
  Description of Artificial Sequence: Synthetic peptide
  Seed: DPWVLLNASWFNSFL
DPIVLWNSSWVNSFL

SEQ ID NO: 252407 - protein, 15 aa, Artificial Sequence
  Description of Artificial Sequence: Synthetic peptide
  Seed: DPWVLLNASWFNSFL
DPIVLYNASWANSFL

SEQ ID NO: 252408 - protein, 15 aa, Artificial Sequence
  Description of Artificial Sequence: Synthetic peptide
  Seed: DPWVLLNASWFNSFL
DPIVLYNASWINSFL

SEQ ID NO: 252409 - protein, 15 aa, Artificial Sequence
  Description of Artificial Sequence: Synthetic peptide
  Seed: DPWVLLNASWFNSFL
DPIVLYNASWLNSFL

SEQ ID NO: 252410 - protein, 15 aa, Artificial Sequence
  Description of Artificial Sequence: Synthetic peptide
  Seed: DPWVLLNASWFNSFL
DPIVLYNASWMNSFL

SEQ ID NO: 252411 - protein, 15 aa, Artificial Sequence
  Description of Artificial Sequence: Synthetic peptide
  Seed: DPWVLLNASWFNSFL
DPIVLYNASWTNSFL

SEQ ID NO: 252412 - protein, 15 aa, Artificial Sequence
  Description of Artificial Sequence: Synthetic peptide
  Seed: DPWVLLNASWFNSFL
DPIVLYNASWVNSFL

SEQ ID NO: 252413 - protein, 15 aa, Artificial Sequence
  Description of Artificial Sequence: Synthetic peptide
  Seed: DPWVLLNASWFNSFL
DPIVLYNGSWANSFL

SEQ ID NO: 252414 - protein, 15 aa, Artificial Sequence
  Description of Artificial Sequence: Synthetic peptide
  Seed: DPWVLLNASWFNSFL
DPIVLYNGSWINSFL

SEQ ID NO: 252415 - protein, 15 aa, Artificial Sequence
  Description of Artificial Sequence: Synthetic peptide
  Seed: DPWVLLNASWFNSFL
DPIVLYNGSWLNSFL

SEQ ID NO: 252416 - protein, 15 aa, Artificial Sequence
  Description of Artificial Sequence: Synthetic peptide
  Seed: DPWVLLNASWFNSFL
DPIVLYNGSWMNSFL

SEQ ID NO: 252417 - protein, 15 aa, Artificial Sequence
  Description of Artificial Sequence: Synthetic peptide
  Seed: DPWVLLNASWFNSFL
DPIVLYNGSWSNSFL

SEQ ID NO: 252418 - protein, 15 aa, Artificial Sequence
  Description of Artificial Sequence: Synthetic peptide
  Seed: DPWVLLNASWFNSFL
DPIVLYNGSWTNSFL

SEQ ID NO: 252419 - protein, 15 aa, Artificial Sequence
  Description of Artificial Sequence: Synthetic peptide
  Seed: DPWVLLNASWFNSFL
DPIVLYNGSWVNSFL

SEQ ID NO: 252420 - protein, 15 aa, Artificial Sequence
  Description of Artificial Sequence: Synthetic peptide
  Seed: DPWVLLNASWFNSFL
DPIVLYNNSWANSFL

SEQ ID NO: 252421 - protein, 15 aa, Artificial Sequence
  Description of Artificial Sequence: Synthetic peptide
  Seed: DPWVLLNASWFNSFL
DPIVLYNNSWFNSFL

SEQ ID NO: 252422 - protein, 15 aa, Artificial Sequence
  Description of Artificial Sequence: Synthetic peptide
  Seed: DPWVLLNASWFNSFL
DPIVLYNNSWHNSFL

SEQ ID NO: 252423 - protein, 15 aa, Artificial Sequence
  Description of Artificial Sequence: Synthetic peptide
  Seed: DPWVLLNASWFNSFL
DPIVLYNNSWINSFL

SEQ ID NO: 252424 - protein, 15 aa, Artificial Sequence
  Description of Artificial Sequence: Synthetic peptide
  Seed: DPWVLLNASWFNSFL
DPIVLYNNSWLNSFL

SEQ ID NO: 252425 - protein, 15 aa, Artificial Sequence
  Description of Artificial Sequence: Synthetic peptide
  Seed: DPWVLLNASWFNSFL
DPIVLYNNSWMNSFL

SEQ ID NO: 252426 - protein, 15 aa, Artificial Sequence
  Description of Artificial Sequence: Synthetic peptide
  Seed: DPWVLLNASWFNSFL
DPIVLYNNSWSNSFL

SEQ ID NO: 252427 - protein, 15 aa, Artificial Sequence
  Description of Artificial Sequence: Synthetic peptide
  Seed: DPWVLLNASWFNSFL
DPIVLYNNSWTNSFL

SEQ ID NO: 252428 - protein, 15 aa, Artificial Sequence
  Description of Artificial Sequence: Synthetic peptide
  Seed: DPWVLLNASWFNSFL
DPIVLYNNSWVNSFL

SEQ ID NO: 252429 - protein, 15 aa, Artificial Sequence
  Description of Artificial Sequence: Synthetic peptide
  Seed: DPWVLLNASWFNSFL
DPIVLYNPSWLNSFL

SEQ ID NO: 252430 - protein, 15 aa, Artificial Sequence
  Description of Artificial Sequence: Synthetic peptide
  Seed: DPWVLLNASWFNSFL
DPIVLYNSSWANSFL

SEQ ID NO: 252431 - protein, 15 aa, Artificial Sequence
  Description of Artificial Sequence: Synthetic peptide
  Seed: DPWVLLNASWFNSFL
DPIVLYNSSWHNSFL

SEQ ID NO: 252432 - protein, 15 aa, Artificial Sequence
  Description of Artificial Sequence: Synthetic peptide
  Seed: DPWVLLNASWFNSFL
DPIVLYNSSWINSFL

SEQ ID NO: 252433 - protein, 15 aa, Artificial Sequence
  Description of Artificial Sequence: Synthetic peptide
  Seed: DPWVLLNASWFNSFL
DPIVLYNSSWLNSFL

SEQ ID NO: 252434 - protein, 15 aa, Artificial Sequence
  Description of Artificial Sequence: Synthetic peptide
  Seed: DPWVLLNASWFNSFL
DPIVLYNSSWMNSFL

SEQ ID NO: 252435 - protein, 15 aa, Artificial Sequence
  Description of Artificial Sequence: Synthetic peptide
  Seed: DPWVLLNASWFNSFL
DPIVLYNSSWSNSFL

SEQ ID NO: 252436 - protein, 15 aa, Artificial Sequence
  Description of Artificial Sequence: Synthetic peptide
  Seed: DPWVLLNASWFNSFL
DPIVLYNSSWTNSFL

SEQ ID NO: 252437 - protein, 15 aa, Artificial Sequence
  Description of Artificial Sequence: Synthetic peptide
  Seed: DPWVLLNASWFNSFL
DPIVLYNSSWVNSFL

SEQ ID NO: 252438 - protein, 15 aa, Artificial Sequence
  Description of Artificial Sequence: Synthetic peptide
  Seed: DPWVLLNASWFNSFL
DPIVLYNTSWANSFL

SEQ ID NO: 252439 - protein, 15 aa, Artificial Sequence
  Description of Artificial Sequence: Synthetic peptide
  Seed: DPWVLLNASWFNSFL
DPIVLYNTSWINSFL

SEQ ID NO: 252440 - protein, 15 aa, Artificial Sequence
  Description of Artificial Sequence: Synthetic peptide
  Seed: DPWVLLNASWFNSFL
DPIVLYNTSWLNSFL

SEQ ID NO: 252441 - protein, 15 aa, Artificial Sequence
  Description of Artificial Sequence: Synthetic peptide
  Seed: DPWVLLNASWFNSFL
DPIVLYNTSWVNSFL

SEQ ID NO: 252442 - protein, 15 aa, Artificial Sequence
  Description of Artificial Sequence: Synthetic peptide
  Seed: DPWVLLNASWFNSFL
DPLVLANASWANSFL

SEQ ID NO: 252443 - protein, 15 aa, Artificial Sequence
  Description of Artificial Sequence: Synthetic peptide
  Seed: DPWVLLNASWFNSFL
DPLVLANASWINSFL

SEQ ID NO: 252444 - protein, 15 aa, Artificial Sequence
  Description of Artificial Sequence: Synthetic peptide
  Seed: DPWVLLNASWFNSFL
DPLVLANASWLNSFL

SEQ ID NO: 252445 - protein, 15 aa, Artificial Sequence
  Description of Artificial Sequence: Synthetic peptide
  Seed: DPWVLLNASWFNSFL
DPLVLANASWMNSFL

SEQ ID NO: 252446 - protein, 15 aa, Artificial Sequence
  Description of Artificial Sequence: Synthetic peptide
  Seed: DPWVLLNASWFNSFL
DPLVLANASWVNSFL

SEQ ID NO: 252447 - protein, 15 aa, Artificial Sequence
  Description of Artificial Sequence: Synthetic peptide
  Seed: DPWVLLNASWFNSFL
DPLVLANGSWANSFL

SEQ ID NO: 252448 - protein, 15 aa, Artificial Sequence
  Description of Artificial Sequence: Synthetic peptide
  Seed: DPWVLLNASWFNSFL
DPLVLANGSWINSFL

SEQ ID NO: 252449 - protein, 15 aa, Artificial Sequence
  Description of Artificial Sequence: Synthetic peptide
  Seed: DPWVLLNASWFNSFL
DPLVLANGSWLNSFL

SEQ ID NO: 252450 - protein, 15 aa, Artificial Sequence
  Description of Artificial Sequence: Synthetic peptide
  Seed: DPWVLLNASWFNSFL
DPLVLANGSWVNSFL

SEQ ID NO: 252451 - protein, 15 aa, Artificial Sequence
  Description of Artificial Sequence: Synthetic peptide
  Seed: DPWVLLNASWFNSFL
DPLVLFNNSWANSFL

SEQ ID NO: 252452 - protein, 15 aa, Artificial Sequence
  Description of Artificial Sequence: Synthetic peptide
  Seed: DPWVLLNASWFNSFL
DPLVLFNNSWINSFL

SEQ ID NO: 252453 - protein, 15 aa, Artificial Sequence
  Description of Artificial Sequence: Synthetic peptide
  Seed: DPWVLLNASWFNSFL
DPLVLFNNSWLNSFL

SEQ ID NO: 252454 - protein, 15 aa, Artificial Sequence
  Description of Artificial Sequence: Synthetic peptide
  Seed: DPWVLLNASWFNSFL
DPLVLFNNSWMNSFL

SEQ ID NO: 252455 - protein, 15 aa, Artificial Sequence
  Description of Artificial Sequence: Synthetic peptide
  Seed: DPWVLLNASWFNSFL
DPLVLFNNSWVNSFL

SEQ ID NO: 252456 - protein, 15 aa, Artificial Sequence
  Description of Artificial Sequence: Synthetic peptide
  Seed: DPWVLLNASWFNSFL
DPLVLFNSSWANSFL

SEQ ID NO: 252457 - protein, 15 aa, Artificial Sequence
  Description of Artificial Sequence: Synthetic peptide
  Seed: DPWVLLNASWFNSFL
DPLVLFNSSWINSFL

SEQ ID NO: 252458 - protein, 15 aa, Artificial Sequence
  Description of Artificial Sequence: Synthetic peptide
  Seed: DPWVLLNASWFNSFL
DPLVLFNSSWLNSFL

SEQ ID NO: 252459 - protein, 15 aa, Artificial Sequence
  Description of Artificial Sequence: Synthetic peptide
  Seed: DPWVLLNASWFNSFL
DPLVLFNSSWVNSFL

SEQ ID NO: 252460 - protein, 15 aa, Artificial Sequence
  Description of Artificial Sequence: Synthetic peptide
  Seed: DPWVLLNASWFNSFL
DPLVLINASWANSFL

SEQ ID NO: 252461 - protein, 15 aa, Artificial Sequence
  Description of Artificial Sequence: Synthetic peptide
  Seed: DPWVLLNASWFNSFL
DPLVLINASWLNSFL

SEQ ID NO: 252462 - protein, 15 aa, Artificial Sequence
  Description of Artificial Sequence: Synthetic peptide
  Seed: DPWVLLNASWFNSFL
DPLVLINASWVNSFL

SEQ ID NO: 252463 - protein, 15 aa, Artificial Sequence
  Description of Artificial Sequence: Synthetic peptide
  Seed: DPWVLLNASWFNSFL
DPLVLINGSWANSFL

SEQ ID NO: 252464 - protein, 15 aa, Artificial Sequence
  Description of Artificial Sequence: Synthetic peptide
  Seed: DPWVLLNASWFNSFL
DPLVLINGSWLNSFL

SEQ ID NO: 252465 - protein, 15 aa, Artificial Sequence
  Description of Artificial Sequence: Synthetic peptide
  Seed: DPWVLLNASWFNSFL
DPLVLINGSWVNSFL

SEQ ID NO: 252466 - protein, 15 aa, Artificial Sequence
  Description of Artificial Sequence: Synthetic peptide
  Seed: DPWVLLNASWFNSFL
DPLVLINSSWANSFL

SEQ ID NO: 252467 - protein, 15 aa, Artificial Sequence
  Description of Artificial Sequence: Synthetic peptide
  Seed: DPWVLLNASWFNSFL
DPLVLLNASWANSFL

SEQ ID NO: 252468 - protein, 15 aa, Artificial Sequence
  Description of Artificial Sequence: Synthetic peptide
  Seed: DPWVLLNASWFNSFL
DPLVLLNASWINSFL

SEQ ID NO: 252469 - protein, 15 aa, Artificial Sequence
  Description of Artificial Sequence: Synthetic peptide
  Seed: DPWVLLNASWFNSFL
DPLVLLNASWLNSFL

SEQ ID NO: 252470 - protein, 15 aa, Artificial Sequence
  Description of Artificial Sequence: Synthetic peptide
  Seed: DPWVLLNASWFNSFL
DPLVLLNASWMNSFL

SEQ ID NO: 252471 - protein, 15 aa, Artificial Sequence
  Description of Artificial Sequence: Synthetic peptide
  Seed: DPWVLLNASWFNSFL
DPLVLLNASWSNSFL

SEQ ID NO: 252472 - protein, 15 aa, Artificial Sequence
  Description of Artificial Sequence: Synthetic peptide
  Seed: DPWVLLNASWFNSFL
DPLVLLNASWTNSFL

SEQ ID NO: 252473 - protein, 15 aa, Artificial Sequence
  Description of Artificial Sequence: Synthetic peptide
  Seed: DPWVLLNASWFNSFL
DPLVLLNASWVNSFL

SEQ ID NO: 252474 - protein, 15 aa, Artificial Sequence
  Description of Artificial Sequence: Synthetic peptide
  Seed: DPWVLLNASWFNSFL
DPLVLLNGSWANSFL

SEQ ID NO: 252475 - protein, 15 aa, Artificial Sequence
  Description of Artificial Sequence: Synthetic peptide
  Seed: DPWVLLNASWFNSFL
DPLVLLNGSWINSFL

SEQ ID NO: 252476 - protein, 15 aa, Artificial Sequence
  Description of Artificial Sequence: Synthetic peptide
  Seed: DPWVLLNASWFNSFL
DPLVLLNGSWLNSFL

SEQ ID NO: 252477 - protein, 15 aa, Artificial Sequence
  Description of Artificial Sequence: Synthetic peptide
  Seed: DPWVLLNASWFNSFL
DPLVLLNGSWMNSFL

SEQ ID NO: 252478 - protein, 15 aa, Artificial Sequence
  Description of Artificial Sequence: Synthetic peptide
  Seed: DPWVLLNASWFNSFL
DPLVLLNGSWSNSFL

SEQ ID NO: 252479 - protein, 15 aa, Artificial Sequence
  Description of Artificial Sequence: Synthetic peptide
  Seed: DPWVLLNASWFNSFL
DPLVLLNGSWTNSFL

SEQ ID NO: 252480 - protein, 15 aa, Artificial Sequence
  Description of Artificial Sequence: Synthetic peptide
  Seed: DPWVLLNASWFNSFL
DPLVLLNGSWVNSFL

SEQ ID NO: 252481 - protein, 15 aa, Artificial Sequence
  Description of Artificial Sequence: Synthetic peptide
  Seed: DPWVLLNASWFNSFL
DPLVLLNNSWANSFL

SEQ ID NO: 252482 - protein, 15 aa, Artificial Sequence
  Description of Artificial Sequence: Synthetic peptide
  Seed: DPWVLLNASWFNSFL
DPLVLLNNSWLNSFL

SEQ ID NO: 252483 - protein, 15 aa, Artificial Sequence
  Description of Artificial Sequence: Synthetic peptide
  Seed: DPWVLLNASWFNSFL
DPLVLLNNSWVNSFL

SEQ ID NO: 252484 - protein, 15 aa, Artificial Sequence
  Description of Artificial Sequence: Synthetic peptide
  Seed: DPWVLLNASWFNSFL
DPLVLLNPSWANSFL

SEQ ID NO: 252485 - protein, 15 aa, Artificial Sequence
  Description of Artificial Sequence: Synthetic peptide
  Seed: DPWVLLNASWFNSFL
DPLVLLNPSWINSFL

SEQ ID NO: 252486 - protein, 15 aa, Artificial Sequence
  Description of Artificial Sequence: Synthetic peptide
  Seed: DPWVLLNASWFNSFL
DPLVLLNPSWLNSFL

SEQ ID NO: 252487 - protein, 15 aa, Artificial Sequence
  Description of Artificial Sequence: Synthetic peptide
  Seed: DPWVLLNASWFNSFL
DPLVLLNPSWMNSFL

SEQ ID NO: 252488 - protein, 15 aa, Artificial Sequence
  Description of Artificial Sequence: Synthetic peptide
  Seed: DPWVLLNASWFNSFL
DPLVLLNPSWNNSFL

SEQ ID NO: 252489 - protein, 15 aa, Artificial Sequence
  Description of Artificial Sequence: Synthetic peptide
  Seed: DPWVLLNASWFNSFL
DPLVLLNPSWTNSFL

SEQ ID NO: 252490 - protein, 15 aa, Artificial Sequence
  Description of Artificial Sequence: Synthetic peptide
  Seed: DPWVLLNASWFNSFL
DPLVLLNPSWVNSFL

SEQ ID NO: 252491 - protein, 15 aa, Artificial Sequence
  Description of Artificial Sequence: Synthetic peptide
  Seed: DPWVLLNASWFNSFL
DPLVLLNSSWANSFL

SEQ ID NO: 252492 - protein, 15 aa, Artificial Sequence
  Description of Artificial Sequence: Synthetic peptide
  Seed: DPWVLLNASWFNSFL
DPLVLLNSSWINSFL

SEQ ID NO: 252493 - protein, 15 aa, Artificial Sequence
  Description of Artificial Sequence: Synthetic peptide
  Seed: DPWVLLNASWFNSFL
DPLVLLNSSWLNSFL

SEQ ID NO: 252494 - protein, 15 aa, Artificial Sequence
  Description of Artificial Sequence: Synthetic peptide
  Seed: DPWVLLNASWFNSFL
DPLVLLNSSWSNSFL

SEQ ID NO: 252495 - protein, 15 aa, Artificial Sequence
  Description of Artificial Sequence: Synthetic peptide
  Seed: DPWVLLNASWFNSFL
DPLVLLNSSWTNSFL

SEQ ID NO: 252496 - protein, 15 aa, Artificial Sequence
  Description of Artificial Sequence: Synthetic peptide
  Seed: DPWVLLNASWFNSFL
DPLVLLNSSWVNSFL

SEQ ID NO: 252497 - protein, 15 aa, Artificial Sequence
  Description of Artificial Sequence: Synthetic peptide
  Seed: DPWVLLNASWFNSFL
DPLVLLNTSWANSFL

SEQ ID NO: 252498 - protein, 15 aa, Artificial Sequence
  Description of Artificial Sequence: Synthetic peptide
  Seed: DPWVLLNASWFNSFL
DPLVLLNTSWVNSFL

SEQ ID NO: 252499 - protein, 15 aa, Artificial Sequence
  Description of Artificial Sequence: Synthetic peptide
  Seed: DPWVLLNASWFNSFL
DPLVLMNASWANSFL

SEQ ID NO: 252500 - protein, 15 aa, Artificial Sequence
  Description of Artificial Sequence: Synthetic peptide
  Seed: DPWVLLNASWFNSFL
DPLVLMNASWINSFL

SEQ ID NO: 252501 - protein, 15 aa, Artificial Sequence
  Description of Artificial Sequence: Synthetic peptide
  Seed: DPWVLLNASWFNSFL
DPLVLMNASWLNSFL

SEQ ID NO: 252502 - protein, 15 aa, Artificial Sequence
  Description of Artificial Sequence: Synthetic peptide
  Seed: DPWVLLNASWFNSFL
DPLVLMNASWMNSFL

SEQ ID NO: 252503 - protein, 15 aa, Artificial Sequence
  Description of Artificial Sequence: Synthetic peptide
  Seed: DPWVLLNASWFNSFL
DPLVLMNASWSNSFL

SEQ ID NO: 252504 - protein, 15 aa, Artificial Sequence
  Description of Artificial Sequence: Synthetic peptide
  Seed: DPWVLLNASWFNSFL
DPLVLMNASWTNSFL

SEQ ID NO: 252505 - protein, 15 aa, Artificial Sequence
  Description of Artificial Sequence: Synthetic peptide
  Seed: DPWVLLNASWFNSFL
DPLVLMNASWVNSFL

SEQ ID NO: 252506 - protein, 15 aa, Artificial Sequence
  Description of Artificial Sequence: Synthetic peptide
  Seed: DPWVLLNASWFNSFL
DPLVLMNGSWANSFL

SEQ ID NO: 252507 - protein, 15 aa, Artificial Sequence
  Description of Artificial Sequence: Synthetic peptide
  Seed: DPWVLLNASWFNSFL
DPLVLMNGSWINSFL

SEQ ID NO: 252508 - protein, 15 aa, Artificial Sequence
  Description of Artificial Sequence: Synthetic peptide
  Seed: DPWVLLNASWFNSFL
DPLVLMNGSWLNSFL

SEQ ID NO: 252509 - protein, 15 aa, Artificial Sequence
  Description of Artificial Sequence: Synthetic peptide
  Seed: DPWVLLNASWFNSFL
DPLVLMNGSWMNSFL

SEQ ID NO: 252510 - protein, 15 aa, Artificial Sequence
  Description of Artificial Sequence: Synthetic peptide
  Seed: DPWVLLNASWFNSFL
DPLVLMNGSWSNSFL

SEQ ID NO: 252511 - protein, 15 aa, Artificial Sequence
  Description of Artificial Sequence: Synthetic peptide
  Seed: DPWVLLNASWFNSFL
DPLVLMNGSWTNSFL

SEQ ID NO: 252512 - protein, 15 aa, Artificial Sequence
  Description of Artificial Sequence: Synthetic peptide
  Seed: DPWVLLNASWFNSFL
DPLVLMNGSWVNSFL

SEQ ID NO: 252513 - protein, 15 aa, Artificial Sequence
  Description of Artificial Sequence: Synthetic peptide
  Seed: DPWVLLNASWFNSFL
DPLVLMNNSWANSFL

SEQ ID NO: 252514 - protein, 15 aa, Artificial Sequence
  Description of Artificial Sequence: Synthetic peptide
  Seed: DPWVLLNASWFNSFL
DPLVLMNNSWINSFL

SEQ ID NO: 252515 - protein, 15 aa, Artificial Sequence
  Description of Artificial Sequence: Synthetic peptide
  Seed: DPWVLLNASWFNSFL
DPLVLMNNSWLNSFL

SEQ ID NO: 252516 - protein, 15 aa, Artificial Sequence
  Description of Artificial Sequence: Synthetic peptide
  Seed: DPWVLLNASWFNSFL
DPLVLMNNSWVNSFL

SEQ ID NO: 252517 - protein, 15 aa, Artificial Sequence
  Description of Artificial Sequence: Synthetic peptide
  Seed: DPWVLLNASWFNSFL
DPLVLMNPSWANSFL

SEQ ID NO: 252518 - protein, 15 aa, Artificial Sequence
  Description of Artificial Sequence: Synthetic peptide
  Seed: DPWVLLNASWFNSFL
DPLVLMNPSWINSFL

SEQ ID NO: 252519 - protein, 15 aa, Artificial Sequence
  Description of Artificial Sequence: Synthetic peptide
  Seed: DPWVLLNASWFNSFL
DPLVLMNPSWLNSFL

SEQ ID NO: 252520 - protein, 15 aa, Artificial Sequence
  Description of Artificial Sequence: Synthetic peptide
  Seed: DPWVLLNASWFNSFL
DPLVLMNPSWMNSFL

SEQ ID NO: 252521 - protein, 15 aa, Artificial Sequence
  Description of Artificial Sequence: Synthetic peptide
  Seed: DPWVLLNASWFNSFL
DPLVLMNPSWVNSFL

SEQ ID NO: 252522 - protein, 15 aa, Artificial Sequence
  Description of Artificial Sequence: Synthetic peptide
  Seed: DPWVLLNASWFNSFL
DPLVLMNSSWANSFL

SEQ ID NO: 252523 - protein, 15 aa, Artificial Sequence
  Description of Artificial Sequence: Synthetic peptide
  Seed: DPWVLLNASWFNSFL
DPLVLMNSSWINSFL

SEQ ID NO: 252524 - protein, 15 aa, Artificial Sequence
  Description of Artificial Sequence: Synthetic peptide
  Seed: DPWVLLNASWFNSFL
DPLVLMNSSWLNSFL

SEQ ID NO: 252525 - protein, 15 aa, Artificial Sequence
  Description of Artificial Sequence: Synthetic peptide
  Seed: DPWVLLNASWFNSFL
DPLVLMNSSWMNSFL

SEQ ID NO: 252526 - protein, 15 aa, Artificial Sequence
  Description of Artificial Sequence: Synthetic peptide
  Seed: DPWVLLNASWFNSFL
DPLVLMNSSWTNSFL

SEQ ID NO: 252527 - protein, 15 aa, Artificial Sequence
  Description of Artificial Sequence: Synthetic peptide
  Seed: DPWVLLNASWFNSFL
DPLVLMNSSWVNSFL

SEQ ID NO: 252528 - protein, 15 aa, Artificial Sequence
  Description of Artificial Sequence: Synthetic peptide
  Seed: DPWVLLNASWFNSFL
DPLVLMNTSWLNSFL

SEQ ID NO: 252529 - protein, 15 aa, Artificial Sequence
  Description of Artificial Sequence: Synthetic peptide
  Seed: DPWVLLNASWFNSFL
DPLVLMNTSWVNSFL

SEQ ID NO: 252530 - protein, 15 aa, Artificial Sequence
  Description of Artificial Sequence: Synthetic peptide
  Seed: DPWVLLNASWFNSFL
DPLVLQNASWANSFL

SEQ ID NO: 252531 - protein, 15 aa, Artificial Sequence
  Description of Artificial Sequence: Synthetic peptide
  Seed: DPWVLLNASWFNSFL
DPLVLQNASWINSFL

SEQ ID NO: 252532 - protein, 15 aa, Artificial Sequence
  Description of Artificial Sequence: Synthetic peptide
  Seed: DPWVLLNASWFNSFL
DPLVLQNASWLNSFL

SEQ ID NO: 252533 - protein, 15 aa, Artificial Sequence
  Description of Artificial Sequence: Synthetic peptide
  Seed: DPWVLLNASWFNSFL
DPLVLQNASWVNSFL

SEQ ID NO: 252534 - protein, 15 aa, Artificial Sequence
  Description of Artificial Sequence: Synthetic peptide
  Seed: DPWVLLNASWFNSFL
DPLVLSNASWINSFL

SEQ ID NO: 252535 - protein, 15 aa, Artificial Sequence
  Description of Artificial Sequence: Synthetic peptide
  Seed: DPWVLLNASWFNSFL
DPLVLSNSSWINSFL

SEQ ID NO: 252536 - protein, 15 aa, Artificial Sequence
  Description of Artificial Sequence: Synthetic peptide
  Seed: DPWVLLNASWFNSFL
DPLVLTNASWINSFL

SEQ ID NO: 252537 - protein, 15 aa, Artificial Sequence
  Description of Artificial Sequence: Synthetic peptide
  Seed: DPWVLLNASWFNSFL
DPLVLTNASWLNSFL

SEQ ID NO: 252538 - protein, 15 aa, Artificial Sequence
  Description of Artificial Sequence: Synthetic peptide
  Seed: DPWVLLNASWFNSFL
DPLVLTNSSWINSFL

SEQ ID NO: 252539 - protein, 15 aa, Artificial Sequence
  Description of Artificial Sequence: Synthetic peptide
  Seed: DPWVLLNASWFNSFL
DPLVLTNSSWLNSFL

SEQ ID NO: 252540 - protein, 15 aa, Artificial Sequence
  Description of Artificial Sequence: Synthetic peptide
  Seed: DPWVLLNASWFNSFL
DPLVLTNSSWVNSFL

SEQ ID NO: 252541 - protein, 15 aa, Artificial Sequence
  Description of Artificial Sequence: Synthetic peptide
  Seed: DPWVLLNASWFNSFL
DPLVLWNNSWLNSFL

SEQ ID NO: 252542 - protein, 15 aa, Artificial Sequence
  Description of Artificial Sequence: Synthetic peptide
  Seed: DPWVLLNASWFNSFL
DPLVLWNNSWVNSFL

SEQ ID NO: 252543 - protein, 15 aa, Artificial Sequence
  Description of Artificial Sequence: Synthetic peptide
  Seed: DPWVLLNASWFNSFL
DPLVLWNSSWLNSFL

SEQ ID NO: 252544 - protein, 15 aa, Artificial Sequence
  Description of Artificial Sequence: Synthetic peptide
  Seed: DPWVLLNASWFNSFL
DPLVLYNASWLNSFL

SEQ ID NO: 252545 - protein, 15 aa, Artificial Sequence
  Description of Artificial Sequence: Synthetic peptide
  Seed: DPWVLLNASWFNSFL
DPLVLYNASWVNSFL

SEQ ID NO: 252546 - protein, 15 aa, Artificial Sequence
  Description of Artificial Sequence: Synthetic peptide
  Seed: DPWVLLNASWFNSFL
DPLVLYNGSWANSFL

SEQ ID NO: 252547 - protein, 15 aa, Artificial Sequence
  Description of Artificial Sequence: Synthetic peptide
  Seed: DPWVLLNASWFNSFL
DPLVLYNGSWINSFL

SEQ ID NO: 252548 - protein, 15 aa, Artificial Sequence
  Description of Artificial Sequence: Synthetic peptide
  Seed: DPWVLLNASWFNSFL
DPLVLYNGSWLNSFL

SEQ ID NO: 252549 - protein, 15 aa, Artificial Sequence
  Description of Artificial Sequence: Synthetic peptide
  Seed: DPWVLLNASWFNSFL
DPLVLYNGSWVNSFL

SEQ ID NO: 252550 - protein, 15 aa, Artificial Sequence
  Description of Artificial Sequence: Synthetic peptide
  Seed: DPWVLLNASWFNSFL
DPLVLYNNSWANSFL

SEQ ID NO: 252551 - protein, 15 aa, Artificial Sequence
  Description of Artificial Sequence: Synthetic peptide
  Seed: DPWVLLNASWFNSFL
DPLVLYNNSWINSFL

SEQ ID NO: 252552 - protein, 15 aa, Artificial Sequence
  Description of Artificial Sequence: Synthetic peptide
  Seed: DPWVLLNASWFNSFL
DPLVLYNNSWLNSFL

SEQ ID NO: 252553 - protein, 15 aa, Artificial Sequence
  Description of Artificial Sequence: Synthetic peptide
  Seed: DPWVLLNASWFNSFL
DPLVLYNNSWMNSFL

SEQ ID NO: 252554 - protein, 15 aa, Artificial Sequence
  Description of Artificial Sequence: Synthetic peptide
  Seed: DPWVLLNASWFNSFL
DPLVLYNNSWTNSFL

SEQ ID NO: 252555 - protein, 15 aa, Artificial Sequence
  Description of Artificial Sequence: Synthetic peptide
  Seed: DPWVLLNASWFNSFL
DPLVLYNNSWVNSFL

SEQ ID NO: 252556 - protein, 15 aa, Artificial Sequence
  Description of Artificial Sequence: Synthetic peptide
  Seed: DPWVLLNASWFNSFL
DPLVLYNSSWANSFL

SEQ ID NO: 252557 - protein, 15 aa, Artificial Sequence
  Description of Artificial Sequence: Synthetic peptide
  Seed: DPWVLLNASWFNSFL
DPLVLYNSSWINSFL

SEQ ID NO: 252558 - protein, 15 aa, Artificial Sequence
  Description of Artificial Sequence: Synthetic peptide
  Seed: DPWVLLNASWFNSFL
DPLVLYNSSWLNSFL

SEQ ID NO: 252559 - protein, 15 aa, Artificial Sequence
  Description of Artificial Sequence: Synthetic peptide
  Seed: DPWVLLNASWFNSFL
DPLVLYNSSWMNSFL

SEQ ID NO: 252560 - protein, 15 aa, Artificial Sequence
  Description of Artificial Sequence: Synthetic peptide
  Seed: DPWVLLNASWFNSFL
DPLVLYNSSWTNSFL

SEQ ID NO: 252561 - protein, 15 aa, Artificial Sequence
  Description of Artificial Sequence: Synthetic peptide
  Seed: DPWVLLNASWFNSFL
DPLVLYNSSWVNSFL

SEQ ID NO: 252562 - protein, 15 aa, Artificial Sequence
  Description of Artificial Sequence: Synthetic peptide
  Seed: DPWVLLNASWFNSFL
DPLVLYNTSWLNSFL

SEQ ID NO: 252563 - protein, 15 aa, Artificial Sequence
  Description of Artificial Sequence: Synthetic peptide
  Seed: DPWVLLNASWFNSFL
DPMVLANASWLNSFL

SEQ ID NO: 252564 - protein, 15 aa, Artificial Sequence
  Description of Artificial Sequence: Synthetic peptide
  Seed: DPWVLLNASWFNSFL
DPMVLANASWVNSFL

SEQ ID NO: 252565 - protein, 15 aa, Artificial Sequence
  Description of Artificial Sequence: Synthetic peptide
  Seed: DPWVLLNASWFNSFL
DPMVLFNNSWINSFL

SEQ ID NO: 252566 - protein, 15 aa, Artificial Sequence
  Description of Artificial Sequence: Synthetic peptide
  Seed: DPWVLLNASWFNSFL
DPMVLFNNSWLNSFL

SEQ ID NO: 252567 - protein, 15 aa, Artificial Sequence
  Description of Artificial Sequence: Synthetic peptide
  Seed: DPWVLLNASWFNSFL
DPMVLFNNSWVNSFL

SEQ ID NO: 252568 - protein, 15 aa, Artificial Sequence
  Description of Artificial Sequence: Synthetic peptide
  Seed: DPWVLLNASWFNSFL
DPMVLFNSSWLNSFL

SEQ ID NO: 252569 - protein, 15 aa, Artificial Sequence
  Description of Artificial Sequence: Synthetic peptide
  Seed: DPWVLLNASWFNSFL
DPMVLINASWANSFL

SEQ ID NO: 252570 - protein, 15 aa, Artificial Sequence
  Description of Artificial Sequence: Synthetic peptide
  Seed: DPWVLLNASWFNSFL
DPMVLLNASWANSFL

SEQ ID NO: 252571 - protein, 15 aa, Artificial Sequence
  Description of Artificial Sequence: Synthetic peptide
  Seed: DPWVLLNASWFNSFL
DPMVLLNASWINSFL

SEQ ID NO: 252572 - protein, 15 aa, Artificial Sequence
  Description of Artificial Sequence: Synthetic peptide
  Seed: DPWVLLNASWFNSFL
DPMVLLNASWLNSFL

SEQ ID NO: 252573 - protein, 15 aa, Artificial Sequence
  Description of Artificial Sequence: Synthetic peptide
  Seed: DPWVLLNASWFNSFL
DPMVLLNASWSNSFL

SEQ ID NO: 252574 - protein, 15 aa, Artificial Sequence
  Description of Artificial Sequence: Synthetic peptide
  Seed: DPWVLLNASWFNSFL
DPMVLLNASWTNSFL

SEQ ID NO: 252575 - protein, 15 aa, Artificial Sequence
  Description of Artificial Sequence: Synthetic peptide
  Seed: DPWVLLNASWFNSFL
DPMVLLNASWVNSFL

SEQ ID NO: 252576 - protein, 15 aa, Artificial Sequence
  Description of Artificial Sequence: Synthetic peptide
  Seed: DPWVLLNASWFNSFL
DPMVLLNGSWANSFL

SEQ ID NO: 252577 - protein, 15 aa, Artificial Sequence
  Description of Artificial Sequence: Synthetic peptide
  Seed: DPWVLLNASWFNSFL
DPMVLLNGSWINSFL

SEQ ID NO: 252578 - protein, 15 aa, Artificial Sequence
  Description of Artificial Sequence: Synthetic peptide
  Seed: DPWVLLNASWFNSFL
DPMVLLNGSWLNSFL

SEQ ID NO: 252579 - protein, 15 aa, Artificial Sequence
  Description of Artificial Sequence: Synthetic peptide
  Seed: DPWVLLNASWFNSFL
DPMVLLNGSWTNSFL

SEQ ID NO: 252580 - protein, 15 aa, Artificial Sequence
  Description of Artificial Sequence: Synthetic peptide
  Seed: DPWVLLNASWFNSFL
DPMVLLNGSWVNSFL

SEQ ID NO: 252581 - protein, 15 aa, Artificial Sequence
  Description of Artificial Sequence: Synthetic peptide
  Seed: DPWVLLNASWFNSFL
DPMVLLNPSWANSFL

SEQ ID NO: 252582 - protein, 15 aa, Artificial Sequence
  Description of Artificial Sequence: Synthetic peptide
  Seed: DPWVLLNASWFNSFL
DPMVLLNPSWINSFL

SEQ ID NO: 252583 - protein, 15 aa, Artificial Sequence
  Description of Artificial Sequence: Synthetic peptide
  Seed: DPWVLLNASWFNSFL
DPMVLLNPSWLNSFL

SEQ ID NO: 252584 - protein, 15 aa, Artificial Sequence
  Description of Artificial Sequence: Synthetic peptide
  Seed: DPWVLLNASWFNSFL
DPMVLLNPSWVNSFL

SEQ ID NO: 252585 - protein, 15 aa, Artificial Sequence
  Description of Artificial Sequence: Synthetic peptide
  Seed: DPWVLLNASWFNSFL
DPMVLLNSSWANSFL

SEQ ID NO: 252586 - protein, 15 aa, Artificial Sequence
  Description of Artificial Sequence: Synthetic peptide
  Seed: DPWVLLNASWFNSFL
DPMVLLNSSWINSFL

SEQ ID NO: 252587 - protein, 15 aa, Artificial Sequence
  Description of Artificial Sequence: Synthetic peptide
  Seed: DPWVLLNASWFNSFL
DPMVLLNSSWLNSFL

SEQ ID NO: 252588 - protein, 15 aa, Artificial Sequence
  Description of Artificial Sequence: Synthetic peptide
  Seed: DPWVLLNASWFNSFL
DPMVLLNSSWVNSFL

SEQ ID NO: 252589 - protein, 15 aa, Artificial Sequence
  Description of Artificial Sequence: Synthetic peptide
  Seed: DPWVLLNASWFNSFL
DPMVLMNASWANSFL

SEQ ID NO: 252590 - protein, 15 aa, Artificial Sequence
  Description of Artificial Sequence: Synthetic peptide
  Seed: DPWVLLNASWFNSFL
DPMVLMNASWINSFL

SEQ ID NO: 252591 - protein, 15 aa, Artificial Sequence
  Description of Artificial Sequence: Synthetic peptide
  Seed: DPWVLLNASWFNSFL
DPMVLMNASWLNSFL

SEQ ID NO: 252592 - protein, 15 aa, Artificial Sequence
  Description of Artificial Sequence: Synthetic peptide
  Seed: DPWVLLNASWFNSFL
DPMVLMNASWMNSFL

SEQ ID NO: 252593 - protein, 15 aa, Artificial Sequence
  Description of Artificial Sequence: Synthetic peptide
  Seed: DPWVLLNASWFNSFL
DPMVLMNASWTNSFL

SEQ ID NO: 252594 - protein, 15 aa, Artificial Sequence
  Description of Artificial Sequence: Synthetic peptide
  Seed: DPWVLLNASWFNSFL
DPMVLMNASWVNSFL

SEQ ID NO: 252595 - protein, 15 aa, Artificial Sequence
  Description of Artificial Sequence: Synthetic peptide
  Seed: DPWVLLNASWFNSFL
DPMVLMNGSWANSFL

SEQ ID NO: 252596 - protein, 15 aa, Artificial Sequence
  Description of Artificial Sequence: Synthetic peptide
  Seed: DPWVLLNASWFNSFL
DPMVLMNGSWINSFL

SEQ ID NO: 252597 - protein, 15 aa, Artificial Sequence
  Description of Artificial Sequence: Synthetic peptide
  Seed: DPWVLLNASWFNSFL
DPMVLMNGSWLNSFL

SEQ ID NO: 252598 - protein, 15 aa, Artificial Sequence
  Description of Artificial Sequence: Synthetic peptide
  Seed: DPWVLLNASWFNSFL
DPMVLMNGSWVNSFL

SEQ ID NO: 252599 - protein, 15 aa, Artificial Sequence
  Description of Artificial Sequence: Synthetic peptide
  Seed: DPWVLLNASWFNSFL
DPMVLMNPSWINSFL

SEQ ID NO: 252600 - protein, 15 aa, Artificial Sequence
  Description of Artificial Sequence: Synthetic peptide
  Seed: DPWVLLNASWFNSFL
DPMVLMNPSWLNSFL

SEQ ID NO: 252601 - protein, 15 aa, Artificial Sequence
  Description of Artificial Sequence: Synthetic peptide
  Seed: DPWVLLNASWFNSFL
DPMVLMNPSWVNSFL

SEQ ID NO: 252602 - protein, 15 aa, Artificial Sequence
  Description of Artificial Sequence: Synthetic peptide
  Seed: DPWVLLNASWFNSFL
DPMVLMNSSWANSFL

SEQ ID NO: 252603 - protein, 15 aa, Artificial Sequence
  Description of Artificial Sequence: Synthetic peptide
  Seed: DPWVLLNASWFNSFL
DPMVLMNSSWINSFL

SEQ ID NO: 252604 - protein, 15 aa, Artificial Sequence
  Description of Artificial Sequence: Synthetic peptide
  Seed: DPWVLLNASWFNSFL
DPMVLMNSSWLNSFL

SEQ ID NO: 252605 - protein, 15 aa, Artificial Sequence
  Description of Artificial Sequence: Synthetic peptide
  Seed: DPWVLLNASWFNSFL
DPMVLMNSSWVNSFL

SEQ ID NO: 252606 - protein, 15 aa, Artificial Sequence
  Description of Artificial Sequence: Synthetic peptide
  Seed: DPWVLLNASWFNSFL
DPMVLTNSSWINSFL

SEQ ID NO: 252607 - protein, 15 aa, Artificial Sequence
  Description of Artificial Sequence: Synthetic peptide
  Seed: DPWVLLNASWFNSFL
DPMVLYNNSWINSFL

SEQ ID NO: 252608 - protein, 15 aa, Artificial Sequence
  Description of Artificial Sequence: Synthetic peptide
  Seed: DPWVLLNASWFNSFL
DPMVLYNNSWLNSFL

SEQ ID NO: 252609 - protein, 15 aa, Artificial Sequence
  Description of Artificial Sequence: Synthetic peptide
  Seed: DPWVLLNASWFNSFL
DPMVLYNNSWVNSFL

SEQ ID NO: 252610 - protein, 15 aa, Artificial Sequence
  Description of Artificial Sequence: Synthetic peptide
  Seed: DPWVLLNASWFNSFL
DPMVLYNSSWINSFL

SEQ ID NO: 252611 - protein, 15 aa, Artificial Sequence
  Description of Artificial Sequence: Synthetic peptide
  Seed: DPWVLLNASWFNSFL
DPMVLYNSSWLNSFL

SEQ ID NO: 252612 - protein, 15 aa, Artificial Sequence
  Description of Artificial Sequence: Synthetic peptide
  Seed: DPWVLLNASWFNSFL
DPMVLYNSSWVNSFL

SEQ ID NO: 252613 - protein, 15 aa, Artificial Sequence
  Description of Artificial Sequence: Synthetic peptide
  Seed: DPWVLLNASWFNSFL
DPVVLANASWLNSFL

SEQ ID NO: 252614 - protein, 15 aa, Artificial Sequence
  Description of Artificial Sequence: Synthetic peptide
  Seed: DPWVLLNASWFNSFL
DPVVLFNNSWINSFL

SEQ ID NO: 252615 - protein, 15 aa, Artificial Sequence
  Description of Artificial Sequence: Synthetic peptide
  Seed: DPWVLLNASWFNSFL
DPVVLFNNSWLNSFL

SEQ ID NO: 252616 - protein, 15 aa, Artificial Sequence
  Description of Artificial Sequence: Synthetic peptide
  Seed: DPWVLLNASWFNSFL
DPVVLFNNSWVNSFL

SEQ ID NO: 252617 - protein, 15 aa, Artificial Sequence
  Description of Artificial Sequence: Synthetic peptide
  Seed: DPWVLLNASWFNSFL
DPVVLFNSSWANSFL

SEQ ID NO: 252618 - protein, 15 aa, Artificial Sequence
  Description of Artificial Sequence: Synthetic peptide
  Seed: DPWVLLNASWFNSFL
DPVVLFNSSWINSFL

SEQ ID NO: 252619 - protein, 15 aa, Artificial Sequence
  Description of Artificial Sequence: Synthetic peptide
  Seed: DPWVLLNASWFNSFL
DPVVLFNSSWLNSFL

SEQ ID NO: 252620 - protein, 15 aa, Artificial Sequence
  Description of Artificial Sequence: Synthetic peptide
  Seed: DPWVLLNASWFNSFL
DPVVLFNSSWVNSFL

SEQ ID NO: 252621 - protein, 15 aa, Artificial Sequence
  Description of Artificial Sequence: Synthetic peptide
  Seed: DPWVLLNASWFNSFL
DPVVLLNASWANSFL

SEQ ID NO: 252622 - protein, 15 aa, Artificial Sequence
  Description of Artificial Sequence: Synthetic peptide
  Seed: DPWVLLNASWFNSFL
DPVVLLNASWINSFL

SEQ ID NO: 252623 - protein, 15 aa, Artificial Sequence
  Description of Artificial Sequence: Synthetic peptide
  Seed: DPWVLLNASWFNSFL
DPVVLLNASWLNSFL

SEQ ID NO: 252624 - protein, 15 aa, Artificial Sequence
  Description of Artificial Sequence: Synthetic peptide
  Seed: DPWVLLNASWFNSFL
DPVVLLNASWTNSFL

SEQ ID NO: 252625 - protein, 15 aa, Artificial Sequence
  Description of Artificial Sequence: Synthetic peptide
  Seed: DPWVLLNASWFNSFL
DPVVLLNASWVNSFL

SEQ ID NO: 252626 - protein, 15 aa, Artificial Sequence
  Description of Artificial Sequence: Synthetic peptide
  Seed: DPWVLLNASWFNSFL
DPVVLLNGSWANSFL

SEQ ID NO: 252627 - protein, 15 aa, Artificial Sequence
  Description of Artificial Sequence: Synthetic peptide
  Seed: DPWVLLNASWFNSFL
DPVVLLNGSWINSFL

SEQ ID NO: 252628 - protein, 15 aa, Artificial Sequence
  Description of Artificial Sequence: Synthetic peptide
  Seed: DPWVLLNASWFNSFL
DPVVLLNGSWLNSFL

SEQ ID NO: 252629 - protein, 15 aa, Artificial Sequence
  Description of Artificial Sequence: Synthetic peptide
  Seed: DPWVLLNASWFNSFL
DPVVLLNGSWTNSFL

SEQ ID NO: 252630 - protein, 15 aa, Artificial Sequence
  Description of Artificial Sequence: Synthetic peptide
  Seed: DPWVLLNASWFNSFL
DPVVLLNGSWVNSFL

SEQ ID NO: 252631 - protein, 15 aa, Artificial Sequence
  Description of Artificial Sequence: Synthetic peptide
  Seed: DPWVLLNASWFNSFL
DPVVLLNPSWINSFL

SEQ ID NO: 252632 - protein, 15 aa, Artificial Sequence
  Description of Artificial Sequence: Synthetic peptide
  Seed: DPWVLLNASWFNSFL
DPVVLLNPSWLNSFL

SEQ ID NO: 252633 - protein, 15 aa, Artificial Sequence
  Description of Artificial Sequence: Synthetic peptide
  Seed: DPWVLLNASWFNSFL
DPVVLLNPSWVNSFL

SEQ ID NO: 252634 - protein, 15 aa, Artificial Sequence
  Description of Artificial Sequence: Synthetic peptide
  Seed: DPWVLLNASWFNSFL
DPVVLLNSSWANSFL

SEQ ID NO: 252635 - protein, 15 aa, Artificial Sequence
  Description of Artificial Sequence: Synthetic peptide
  Seed: DPWVLLNASWFNSFL
DPVVLLNSSWVNSFL

SEQ ID NO: 252636 - protein, 15 aa, Artificial Sequence
  Description of Artificial Sequence: Synthetic peptide
  Seed: DPWVLLNASWFNSFL
DPVVLMNASWANSFL

SEQ ID NO: 252637 - protein, 15 aa, Artificial Sequence
  Description of Artificial Sequence: Synthetic peptide
  Seed: DPWVLLNASWFNSFL
DPVVLMNASWINSFL

SEQ ID NO: 252638 - protein, 15 aa, Artificial Sequence
  Description of Artificial Sequence: Synthetic peptide
  Seed: DPWVLLNASWFNSFL
DPVVLMNASWLNSFL

SEQ ID NO: 252639 - protein, 15 aa, Artificial Sequence
  Description of Artificial Sequence: Synthetic peptide
  Seed: DPWVLLNASWFNSFL
DPVVLMNASWMNSFL

SEQ ID NO: 252640 - protein, 15 aa, Artificial Sequence
  Description of Artificial Sequence: Synthetic peptide
  Seed: DPWVLLNASWFNSFL
DPVVLMNASWVNSFL

SEQ ID NO: 252641 - protein, 15 aa, Artificial Sequence
  Description of Artificial Sequence: Synthetic peptide
  Seed: DPWVLLNASWFNSFL
DPVVLMNGSWANSFL

SEQ ID NO: 252642 - protein, 15 aa, Artificial Sequence
  Description of Artificial Sequence: Synthetic peptide
  Seed: DPWVLLNASWFNSFL
DPVVLMNGSWINSFL

SEQ ID NO: 252643 - protein, 15 aa, Artificial Sequence
  Description of Artificial Sequence: Synthetic peptide
  Seed: DPWVLLNASWFNSFL
DPVVLMNGSWLNSFL

SEQ ID NO: 252644 - protein, 15 aa, Artificial Sequence
  Description of Artificial Sequence: Synthetic peptide
  Seed: DPWVLLNASWFNSFL
DPVVLMNGSWVNSFL

SEQ ID NO: 252645 - protein, 15 aa, Artificial Sequence
  Description of Artificial Sequence: Synthetic peptide
  Seed: DPWVLLNASWFNSFL
DPVVLMNPSWLNSFL

SEQ ID NO: 252646 - protein, 15 aa, Artificial Sequence
  Description of Artificial Sequence: Synthetic peptide
  Seed: DPWVLLNASWFNSFL
DPVVLMNPSWVNSFL

SEQ ID NO: 252647 - protein, 15 aa, Artificial Sequence
  Description of Artificial Sequence: Synthetic peptide
  Seed: DPWVLLNASWFNSFL
DPVVLMNSSWANSFL

SEQ ID NO: 252648 - protein, 15 aa, Artificial Sequence
  Description of Artificial Sequence: Synthetic peptide
  Seed: DPWVLLNASWFNSFL
DPVVLMNSSWLNSFL

SEQ ID NO: 252649 - protein, 15 aa, Artificial Sequence
  Description of Artificial Sequence: Synthetic peptide
  Seed: DPWVLLNASWFNSFL
DPVVLMNSSWVNSFL

SEQ ID NO: 252650 - protein, 15 aa, Artificial Sequence
  Description of Artificial Sequence: Synthetic peptide
  Seed: DPWVLLNASWFNSFL
DPVVLYNNSWANSFL

SEQ ID NO: 252651 - protein, 15 aa, Artificial Sequence
  Description of Artificial Sequence: Synthetic peptide
  Seed: DPWVLLNASWFNSFL
DPVVLYNNSWINSFL

SEQ ID NO: 252652 - protein, 15 aa, Artificial Sequence
  Description of Artificial Sequence: Synthetic peptide
  Seed: DPWVLLNASWFNSFL
DPVVLYNNSWLNSFL

SEQ ID NO: 252653 - protein, 15 aa, Artificial Sequence
  Description of Artificial Sequence: Synthetic peptide
  Seed: DPWVLLNASWFNSFL
DPVVLYNNSWMNSFL

SEQ ID NO: 252654 - protein, 15 aa, Artificial Sequence
  Description of Artificial Sequence: Synthetic peptide
  Seed: DPWVLLNASWFNSFL
DPVVLYNNSWVNSFL

SEQ ID NO: 252655 - protein, 15 aa, Artificial Sequence
  Description of Artificial Sequence: Synthetic peptide
  Seed: DPWVLLNASWFNSFL
DPVVLYNSSWANSFL

SEQ ID NO: 252656 - protein, 15 aa, Artificial Sequence
  Description of Artificial Sequence: Synthetic peptide
  Seed: DPWVLLNASWFNSFL
DPVVLYNSSWINSFL

SEQ ID NO: 252657 - protein, 15 aa, Artificial Sequence
  Description of Artificial Sequence: Synthetic peptide
  Seed: DPWVLLNASWFNSFL
DPVVLYNSSWLNSFL

SEQ ID NO: 252658 - protein, 15 aa, Artificial Sequence
  Description of Artificial Sequence: Synthetic peptide
  Seed: DPWVLLNASWFNSFL
DPVVLYNSSWMNSFL

SEQ ID NO: 252659 - protein, 15 aa, Artificial Sequence
  Description of Artificial Sequence: Synthetic peptide
  Seed: DPWVLLNASWFNSFL
DPVVLYNSSWVNSFL

SEQ ID NO: 252660 - protein, 15 aa, Artificial Sequence
  Description of Artificial Sequence: Synthetic peptide
  Seed: DPWVLLNASWFNSFL
DPWVLANGSWANSFL

SEQ ID NO: 252661 - protein, 15 aa, Artificial Sequence
  Description of Artificial Sequence: Synthetic peptide
  Seed: DPWVLLNASWFNSFL
DPWVLANGSWINSFL

SEQ ID NO: 252662 - protein, 15 aa, Artificial Sequence
  Description of Artificial Sequence: Synthetic peptide
  Seed: DPWVLLNASWFNSFL
DPWVLANGSWLNSFL

SEQ ID NO: 252663 - protein, 15 aa, Artificial Sequence
  Description of Artificial Sequence: Synthetic peptide
  Seed: DPWVLLNASWFNSFL
DPWVLANGSWVNSFL

SEQ ID NO: 252664 - protein, 15 aa, Artificial Sequence
  Description of Artificial Sequence: Synthetic peptide
  Seed: DPWVLLNASWFNSFL
DPWVLANPSWANSFL

SEQ ID NO: 252665 - protein, 15 aa, Artificial Sequence
  Description of Artificial Sequence: Synthetic peptide
  Seed: DPWVLLNASWFNSFL
DPWVLANPSWINSFL

SEQ ID NO: 252666 - protein, 15 aa, Artificial Sequence
  Description of Artificial Sequence: Synthetic peptide
  Seed: DPWVLLNASWFNSFL
DPWVLANPSWLNSFL

SEQ ID NO: 252667 - protein, 15 aa, Artificial Sequence
  Description of Artificial Sequence: Synthetic peptide
  Seed: DPWVLLNASWFNSFL
DPWVLANPSWVNSFL

SEQ ID NO: 252668 - protein, 15 aa, Artificial Sequence
  Description of Artificial Sequence: Synthetic peptide
  Seed: DPWVLLNASWFNSFL
DPWVLANSSWANSFL

SEQ ID NO: 252669 - protein, 15 aa, Artificial Sequence
  Description of Artificial Sequence: Synthetic peptide
  Seed: DPWVLLNASWFNSFL
DPWVLANSSWINSFL

SEQ ID NO: 252670 - protein, 15 aa, Artificial Sequence
  Description of Artificial Sequence: Synthetic peptide
  Seed: DPWVLLNASWFNSFL
DPWVLANSSWLNSFL

SEQ ID NO: 252671 - protein, 15 aa, Artificial Sequence
  Description of Artificial Sequence: Synthetic peptide
  Seed: DPWVLLNASWFNSFL
DPWVLANSSWVNSFL

SEQ ID NO: 252672 - protein, 15 aa, Artificial Sequence
  Description of Artificial Sequence: Synthetic peptide
  Seed: DPWVLLNASWFNSFL
DPWVLINGSWANSFL

SEQ ID NO: 252673 - protein, 15 aa, Artificial Sequence
  Description of Artificial Sequence: Synthetic peptide
  Seed: DPWVLLNASWFNSFL
DPWVLINGSWINSFL

SEQ ID NO: 252674 - protein, 15 aa, Artificial Sequence
  Description of Artificial Sequence: Synthetic peptide
  Seed: DPWVLLNASWFNSFL
DPWVLINGSWLNSFL

SEQ ID NO: 252675 - protein, 15 aa, Artificial Sequence
  Description of Artificial Sequence: Synthetic peptide
  Seed: DPWVLLNASWFNSFL
DPWVLINGSWMNSFL

SEQ ID NO: 252676 - protein, 15 aa, Artificial Sequence
  Description of Artificial Sequence: Synthetic peptide
  Seed: DPWVLLNASWFNSFL
DPWVLINGSWTNSFL

SEQ ID NO: 252677 - protein, 15 aa, Artificial Sequence
  Description of Artificial Sequence: Synthetic peptide
  Seed: DPWVLLNASWFNSFL
DPWVLINGSWVNSFL

SEQ ID NO: 252678 - protein, 15 aa, Artificial Sequence
  Description of Artificial Sequence: Synthetic peptide
  Seed: DPWVLLNASWFNSFL
DPWVLINPSWANSFL

SEQ ID NO: 252679 - protein, 15 aa, Artificial Sequence
  Description of Artificial Sequence: Synthetic peptide
  Seed: DPWVLLNASWFNSFL
DPWVLINPSWINSFL

SEQ ID NO: 252680 - protein, 15 aa, Artificial Sequence
  Description of Artificial Sequence: Synthetic peptide
  Seed: DPWVLLNASWFNSFL
DPWVLINPSWLNSFL

SEQ ID NO: 252681 - protein, 15 aa, Artificial Sequence
  Description of Artificial Sequence: Synthetic peptide
  Seed: DPWVLLNASWFNSFL
DPWVLINPSWNNSFL

SEQ ID NO: 252682 - protein, 15 aa, Artificial Sequence
  Description of Artificial Sequence: Synthetic peptide
  Seed: DPWVLLNASWFNSFL
DPWVLINPSWSNSFL

SEQ ID NO: 252683 - protein, 15 aa, Artificial Sequence
  Description of Artificial Sequence: Synthetic peptide
  Seed: DPWVLLNASWFNSFL
DPWVLINPSWVNSFL

SEQ ID NO: 252684 - protein, 15 aa, Artificial Sequence
  Description of Artificial Sequence: Synthetic peptide
  Seed: DPWVLLNASWFNSFL
DPWVLINSSWANSFL

SEQ ID NO: 252685 - protein, 15 aa, Artificial Sequence
  Description of Artificial Sequence: Synthetic peptide
  Seed: DPWVLLNASWFNSFL
DPWVLINSSWINSFL

SEQ ID NO: 252686 - protein, 15 aa, Artificial Sequence
  Description of Artificial Sequence: Synthetic peptide
  Seed: DPWVLLNASWFNSFL
DPWVLINSSWLNSFL

SEQ ID NO: 252687 - protein, 15 aa, Artificial Sequence
  Description of Artificial Sequence: Synthetic peptide
  Seed: DPWVLLNASWFNSFL
DPWVLINSSWTNSFL

SEQ ID NO: 252688 - protein, 15 aa, Artificial Sequence
  Description of Artificial Sequence: Synthetic peptide
  Seed: DPWVLLNASWFNSFL
DPWVLINSSWVNSFL

SEQ ID NO: 252689 - protein, 15 aa, Artificial Sequence
  Description of Artificial Sequence: Synthetic peptide
  Seed: DPWVLLNASWFNSFL
DPWVLLNGSWANSFL

SEQ ID NO: 252690 - protein, 15 aa, Artificial Sequence
  Description of Artificial Sequence: Synthetic peptide
  Seed: DPWVLLNASWFNSFL
DPWVLLNGSWINSFL

SEQ ID NO: 252691 - protein, 15 aa, Artificial Sequence
  Description of Artificial Sequence: Synthetic peptide
  Seed: DPWVLLNASWFNSFL
DPWVLLNGSWLNSFL

SEQ ID NO: 252692 - protein, 15 aa, Artificial Sequence
  Description of Artificial Sequence: Synthetic peptide
  Seed: DPWVLLNASWFNSFL
DPWVLLNGSWMNSFL

SEQ ID NO: 252693 - protein, 15 aa, Artificial Sequence
  Description of Artificial Sequence: Synthetic peptide
  Seed: DPWVLLNASWFNSFL
DPWVLLNGSWSNSFL

SEQ ID NO: 252694 - protein, 15 aa, Artificial Sequence
  Description of Artificial Sequence: Synthetic peptide
  Seed: DPWVLLNASWFNSFL
DPWVLLNGSWTNSFL

SEQ ID NO: 252695 - protein, 15 aa, Artificial Sequence
  Description of Artificial Sequence: Synthetic peptide
  Seed: DPWVLLNASWFNSFL
DPWVLLNGSWVNSFL

SEQ ID NO: 252696 - protein, 15 aa, Artificial Sequence
  Description of Artificial Sequence: Synthetic peptide
  Seed: DPWVLLNASWFNSFL
DPWVLLNNSWANSFL

SEQ ID NO: 252697 - protein, 15 aa, Artificial Sequence
  Description of Artificial Sequence: Synthetic peptide
  Seed: DPWVLLNASWFNSFL
DPWVLLNNSWINSFL

SEQ ID NO: 252698 - protein, 15 aa, Artificial Sequence
  Description of Artificial Sequence: Synthetic peptide
  Seed: DPWVLLNASWFNSFL
DPWVLLNNSWLNSFL

SEQ ID NO: 252699 - protein, 15 aa, Artificial Sequence
  Description of Artificial Sequence: Synthetic peptide
  Seed: DPWVLLNASWFNSFL
DPWVLLNNSWTNSFL

SEQ ID NO: 252700 - protein, 15 aa, Artificial Sequence
  Description of Artificial Sequence: Synthetic peptide
  Seed: DPWVLLNASWFNSFL
DPWVLLNNSWVNSFL

SEQ ID NO: 252701 - protein, 15 aa, Artificial Sequence
  Description of Artificial Sequence: Synthetic peptide
  Seed: DPWVLLNASWFNSFL
DPWVLLNPSWANSFL

SEQ ID NO: 252702 - protein, 15 aa, Artificial Sequence
  Description of Artificial Sequence: Synthetic peptide
  Seed: DPWVLLNASWFNSFL
DPWVLLNPSWINSFL

SEQ ID NO: 252703 - protein, 15 aa, Artificial Sequence
  Description of Artificial Sequence: Synthetic peptide
  Seed: DPWVLLNASWFNSFL
DPWVLLNPSWLNSFL

SEQ ID NO: 252704 - protein, 15 aa, Artificial Sequence
  Description of Artificial Sequence: Synthetic peptide
  Seed: DPWVLLNASWFNSFL
DPWVLLNPSWMNSFL

SEQ ID NO: 252705 - protein, 15 aa, Artificial Sequence
  Description of Artificial Sequence: Synthetic peptide
  Seed: DPWVLLNASWFNSFL
DPWVLLNPSWNNSFL

SEQ ID NO: 252706 - protein, 15 aa, Artificial Sequence
  Description of Artificial Sequence: Synthetic peptide
  Seed: DPWVLLNASWFNSFL
DPWVLLNPSWSNSFL

SEQ ID NO: 252707 - protein, 15 aa, Artificial Sequence
  Description of Artificial Sequence: Synthetic peptide
  Seed: DPWVLLNASWFNSFL
DPWVLLNPSWTNSFL

SEQ ID NO: 252708 - protein, 15 aa, Artificial Sequence
  Description of Artificial Sequence: Synthetic peptide
  Seed: DPWVLLNASWFNSFL
DPWVLLNPSWVNSFL

SEQ ID NO: 252709 - protein, 15 aa, Artificial Sequence
  Description of Artificial Sequence: Synthetic peptide
  Seed: DPWVLLNASWFNSFL
DPWVLLNSSWANSFL

SEQ ID NO: 252710 - protein, 15 aa, Artificial Sequence
  Description of Artificial Sequence: Synthetic peptide
  Seed: DPWVLLNASWFNSFL
DPWVLLNSSWINSFL

SEQ ID NO: 252711 - protein, 15 aa, Artificial Sequence
  Description of Artificial Sequence: Synthetic peptide
  Seed: DPWVLLNASWFNSFL
DPWVLLNSSWLNSFL

SEQ ID NO: 252712 - protein, 15 aa, Artificial Sequence
  Description of Artificial Sequence: Synthetic peptide
  Seed: DPWVLLNASWFNSFL
DPWVLLNSSWMNSFL

SEQ ID NO: 252713 - protein, 15 aa, Artificial Sequence
  Description of Artificial Sequence: Synthetic peptide
  Seed: DPWVLLNASWFNSFL
DPWVLLNSSWNNSFL

SEQ ID NO: 252714 - protein, 15 aa, Artificial Sequence
  Description of Artificial Sequence: Synthetic peptide
  Seed: DPWVLLNASWFNSFL
DPWVLLNSSWSNSFL

SEQ ID NO: 252715 - protein, 15 aa, Artificial Sequence
  Description of Artificial Sequence: Synthetic peptide
  Seed: DPWVLLNASWFNSFL
DPWVLLNSSWTNSFL

SEQ ID NO: 252716 - protein, 15 aa, Artificial Sequence
  Description of Artificial Sequence: Synthetic peptide
  Seed: DPWVLLNASWFNSFL
DPWVLLNSSWVNSFL

SEQ ID NO: 252717 - protein, 15 aa, Artificial Sequence
  Description of Artificial Sequence: Synthetic peptide
  Seed: DPWVLLNASWFNSFL
DPWVLLNTSWANSFL

SEQ ID NO: 252718 - protein, 15 aa, Artificial Sequence
  Description of Artificial Sequence: Synthetic peptide
  Seed: DPWVLLNASWFNSFL
DPWVLLNTSWINSFL

SEQ ID NO: 252719 - protein, 15 aa, Artificial Sequence
  Description of Artificial Sequence: Synthetic peptide
  Seed: DPWVLLNASWFNSFL
DPWVLLNTSWLNSFL

SEQ ID NO: 252720 - protein, 15 aa, Artificial Sequence
  Description of Artificial Sequence: Synthetic peptide
  Seed: DPWVLLNASWFNSFL
DPWVLLNTSWNNSFL

SEQ ID NO: 252721 - protein, 15 aa, Artificial Sequence
  Description of Artificial Sequence: Synthetic peptide
  Seed: DPWVLLNASWFNSFL
DPWVLLNTSWSNSFL

SEQ ID NO: 252722 - protein, 15 aa, Artificial Sequence
  Description of Artificial Sequence: Synthetic peptide
  Seed: DPWVLLNASWFNSFL
DPWVLLNTSWVNSFL

SEQ ID NO: 252723 - protein, 15 aa, Artificial Sequence
  Description of Artificial Sequence: Synthetic peptide
  Seed: DPWVLLNASWFNSFL
DPWVLLNVSWNNSFL

SEQ ID NO: 252724 - protein, 15 aa, Artificial Sequence
  Description of Artificial Sequence: Synthetic peptide
  Seed: DPWVLLNASWFNSFL
DPWVLMNGSWANSFL

SEQ ID NO: 252725 - protein, 15 aa, Artificial Sequence
  Description of Artificial Sequence: Synthetic peptide
  Seed: DPWVLLNASWFNSFL
DPWVLMNGSWINSFL

SEQ ID NO: 252726 - protein, 15 aa, Artificial Sequence
  Description of Artificial Sequence: Synthetic peptide
  Seed: DPWVLLNASWFNSFL
DPWVLMNGSWLNSFL

SEQ ID NO: 252727 - protein, 15 aa, Artificial Sequence
  Description of Artificial Sequence: Synthetic peptide
  Seed: DPWVLLNASWFNSFL
DPWVLMNGSWMNSFL

SEQ ID NO: 252728 - protein, 15 aa, Artificial Sequence
  Description of Artificial Sequence: Synthetic peptide
  Seed: DPWVLLNASWFNSFL
DPWVLMNGSWSNSFL

SEQ ID NO: 252729 - protein, 15 aa, Artificial Sequence
  Description of Artificial Sequence: Synthetic peptide
  Seed: DPWVLLNASWFNSFL
DPWVLMNGSWTNSFL

SEQ ID NO: 252730 - protein, 15 aa, Artificial Sequence
  Description of Artificial Sequence: Synthetic peptide
  Seed: DPWVLLNASWFNSFL
DPWVLMNGSWVNSFL

SEQ ID NO: 252731 - protein, 15 aa, Artificial Sequence
  Description of Artificial Sequence: Synthetic peptide
  Seed: DPWVLLNASWFNSFL
DPWVLMNNSWANSFL

SEQ ID NO: 252732 - protein, 15 aa, Artificial Sequence
  Description of Artificial Sequence: Synthetic peptide
  Seed: DPWVLLNASWFNSFL
DPWVLMNNSWINSFL

SEQ ID NO: 252733 - protein, 15 aa, Artificial Sequence
  Description of Artificial Sequence: Synthetic peptide
  Seed: DPWVLLNASWFNSFL
DPWVLMNNSWLNSFL

SEQ ID NO: 252734 - protein, 15 aa, Artificial Sequence
  Description of Artificial Sequence: Synthetic peptide
  Seed: DPWVLLNASWFNSFL
DPWVLMNNSWMNSFL

SEQ ID NO: 252735 - protein, 15 aa, Artificial Sequence
  Description of Artificial Sequence: Synthetic peptide
  Seed: DPWVLLNASWFNSFL
DPWVLMNNSWVNSFL

SEQ ID NO: 252736 - protein, 15 aa, Artificial Sequence
  Description of Artificial Sequence: Synthetic peptide
  Seed: DPWVLLNASWFNSFL
DPWVLMNPSWANSFL

SEQ ID NO: 252737 - protein, 15 aa, Artificial Sequence
  Description of Artificial Sequence: Synthetic peptide
  Seed: DPWVLLNASWFNSFL
DPWVLMNPSWINSFL

SEQ ID NO: 252738 - protein, 15 aa, Artificial Sequence
  Description of Artificial Sequence: Synthetic peptide
  Seed: DPWVLLNASWFNSFL
DPWVLMNPSWLNSFL

SEQ ID NO: 252739 - protein, 15 aa, Artificial Sequence
  Description of Artificial Sequence: Synthetic peptide
  Seed: DPWVLLNASWFNSFL
DPWVLMNPSWMNSFL

SEQ ID NO: 252740 - protein, 15 aa, Artificial Sequence
  Description of Artificial Sequence: Synthetic peptide
  Seed: DPWVLLNASWFNSFL
DPWVLMNPSWNNSFL

SEQ ID NO: 252741 - protein, 15 aa, Artificial Sequence
  Description of Artificial Sequence: Synthetic peptide
  Seed: DPWVLLNASWFNSFL
DPWVLMNPSWSNSFL

SEQ ID NO: 252742 - protein, 15 aa, Artificial Sequence
  Description of Artificial Sequence: Synthetic peptide
  Seed: DPWVLLNASWFNSFL
DPWVLMNPSWTNSFL

SEQ ID NO: 252743 - protein, 15 aa, Artificial Sequence
  Description of Artificial Sequence: Synthetic peptide
  Seed: DPWVLLNASWFNSFL
DPWVLMNPSWVNSFL

SEQ ID NO: 252744 - protein, 15 aa, Artificial Sequence
  Description of Artificial Sequence: Synthetic peptide
  Seed: DPWVLLNASWFNSFL
DPWVLMNSSWANSFL

SEQ ID NO: 252745 - protein, 15 aa, Artificial Sequence
  Description of Artificial Sequence: Synthetic peptide
  Seed: DPWVLLNASWFNSFL
DPWVLMNSSWINSFL

SEQ ID NO: 252746 - protein, 15 aa, Artificial Sequence
  Description of Artificial Sequence: Synthetic peptide
  Seed: DPWVLLNASWFNSFL
DPWVLMNSSWLNSFL

SEQ ID NO: 252747 - protein, 15 aa, Artificial Sequence
  Description of Artificial Sequence: Synthetic peptide
  Seed: DPWVLLNASWFNSFL
DPWVLMNSSWMNSFL

SEQ ID NO: 252748 - protein, 15 aa, Artificial Sequence
  Description of Artificial Sequence: Synthetic peptide
  Seed: DPWVLLNASWFNSFL
DPWVLMNSSWSNSFL

SEQ ID NO: 252749 - protein, 15 aa, Artificial Sequence
  Description of Artificial Sequence: Synthetic peptide
  Seed: DPWVLLNASWFNSFL
DPWVLMNSSWTNSFL

SEQ ID NO: 252750 - protein, 15 aa, Artificial Sequence
  Description of Artificial Sequence: Synthetic peptide
  Seed: DPWVLLNASWFNSFL
DPWVLMNSSWVNSFL

SEQ ID NO: 252751 - protein, 15 aa, Artificial Sequence
  Description of Artificial Sequence: Synthetic peptide
  Seed: DPWVLLNASWFNSFL
DPWVLMNTSWANSFL

SEQ ID NO: 252752 - protein, 15 aa, Artificial Sequence
  Description of Artificial Sequence: Synthetic peptide
  Seed: DPWVLLNASWFNSFL
DPWVLMNTSWINSFL

SEQ ID NO: 252753 - protein, 15 aa, Artificial Sequence
  Description of Artificial Sequence: Synthetic peptide
  Seed: DPWVLLNASWFNSFL
DPWVLMNTSWLNSFL

SEQ ID NO: 252754 - protein, 15 aa, Artificial Sequence
  Description of Artificial Sequence: Synthetic peptide
  Seed: DPWVLLNASWFNSFL
DPWVLMNTSWNNSFL

SEQ ID NO: 252755 - protein, 15 aa, Artificial Sequence
  Description of Artificial Sequence: Synthetic peptide
  Seed: DPWVLLNASWFNSFL
DPWVLMNTSWVNSFL

SEQ ID NO: 252756 - protein, 15 aa, Artificial Sequence
  Description of Artificial Sequence: Synthetic peptide
  Seed: DPWVLLNASWFNSFL
DPWVLMNVSWNNSFL

SEQ ID NO: 252757 - protein, 15 aa, Artificial Sequence
  Description of Artificial Sequence: Synthetic peptide
  Seed: DPWVLLNASWFNSFL
DPWVLQNGSWINSFL

SEQ ID NO: 252758 - protein, 15 aa, Artificial Sequence
  Description of Artificial Sequence: Synthetic peptide
  Seed: DPWVLLNASWFNSFL
DPWVLQNGSWLNSFL

SEQ ID NO: 252759 - protein, 15 aa, Artificial Sequence
  Description of Artificial Sequence: Synthetic peptide
  Seed: DPWVLLNASWFNSFL
DPWVLQNGSWVNSFL

SEQ ID NO: 252760 - protein, 15 aa, Artificial Sequence
  Description of Artificial Sequence: Synthetic peptide
  Seed: DPWVLLNASWFNSFL
DPWVLQNSSWINSFL

SEQ ID NO: 252761 - protein, 15 aa, Artificial Sequence
  Description of Artificial Sequence: Synthetic peptide
  Seed: DPWVLLNASWFNSFL
DPWVLQNSSWLNSFL

SEQ ID NO: 252762 - protein, 15 aa, Artificial Sequence
  Description of Artificial Sequence: Synthetic peptide
  Seed: DPWVLLNASWFNSFL
DPWVLQNSSWVNSFL

SEQ ID NO: 252763 - protein, 15 aa, Artificial Sequence
  Description of Artificial Sequence: Synthetic peptide
  Seed: DPWVLLNASWFNSFL
DPWVLSNSSWINSFL

SEQ ID NO: 252764 - protein, 15 aa, Artificial Sequence
  Description of Artificial Sequence: Synthetic peptide
  Seed: DPWVLLNASWFNSFL
DPWVLSNSSWLNSFL

SEQ ID NO: 252765 - protein, 15 aa, Artificial Sequence
  Description of Artificial Sequence: Synthetic peptide
  Seed: DPWVLLNASWFNSFL
DPWVLTNSSWINSFL

SEQ ID NO: 252766 - protein, 15 aa, Artificial Sequence
  Description of Artificial Sequence: Synthetic peptide
  Seed: DPWVLLNASWFNSFL
DPWVLTNSSWLNSFL

SEQ ID NO: 252767 - protein, 15 aa, Artificial Sequence
  Description of Artificial Sequence: Synthetic peptide
  Seed: DPWVLLNASWFNSFL
DPWVLTNSSWVNSFL

SEQ ID NO: 252768 - protein, 15 aa, Artificial Sequence
  Description of Artificial Sequence: Synthetic peptide
  Seed: DPWVLLNASWFNSFL
DPWVLVNGSWANSFL

SEQ ID NO: 252769 - protein, 15 aa, Artificial Sequence
  Description of Artificial Sequence: Synthetic peptide
  Seed: DPWVLLNASWFNSFL
DPWVLVNGSWLNSFL

SEQ ID NO: 252770 - protein, 15 aa, Artificial Sequence
  Description of Artificial Sequence: Synthetic peptide
  Seed: DPWVLLNASWFNSFL
DPWVLVNGSWVNSFL

SEQ ID NO: 252771 - protein, 15 aa, Artificial Sequence
  Description of Artificial Sequence: Synthetic peptide
  Seed: DPWVLLNASWFNSFL
DPYVLANASWANSFL

SEQ ID NO: 252772 - protein, 15 aa, Artificial Sequence
  Description of Artificial Sequence: Synthetic peptide
  Seed: DPWVLLNASWFNSFL
DPYVLANASWFNSFL

SEQ ID NO: 252773 - protein, 15 aa, Artificial Sequence
  Description of Artificial Sequence: Synthetic peptide
  Seed: DPWVLLNASWFNSFL
DPYVLANASWGNSFL

SEQ ID NO: 252774 - protein, 15 aa, Artificial Sequence
  Description of Artificial Sequence: Synthetic peptide
  Seed: DPWVLLNASWFNSFL
DPYVLANASWHNSFL

SEQ ID NO: 252775 - protein, 15 aa, Artificial Sequence
  Description of Artificial Sequence: Synthetic peptide
  Seed: DPWVLLNASWFNSFL
DPYVLANASWINSFL

SEQ ID NO: 252776 - protein, 15 aa, Artificial Sequence
  Description of Artificial Sequence: Synthetic peptide
  Seed: DPWVLLNASWFNSFL
DPYVLANASWLNSFL

SEQ ID NO: 252777 - protein, 15 aa, Artificial Sequence
  Description of Artificial Sequence: Synthetic peptide
  Seed: DPWVLLNASWFNSFL
DPYVLANASWMNSFL

SEQ ID NO: 252778 - protein, 15 aa, Artificial Sequence
  Description of Artificial Sequence: Synthetic peptide
  Seed: DPWVLLNASWFNSFL
DPYVLANASWNNSFL

SEQ ID NO: 252779 - protein, 15 aa, Artificial Sequence
  Description of Artificial Sequence: Synthetic peptide
  Seed: DPWVLLNASWFNSFL
DPYVLANASWQNSFL

SEQ ID NO: 252780 - protein, 15 aa, Artificial Sequence
  Description of Artificial Sequence: Synthetic peptide
  Seed: DPWVLLNASWFNSFL
DPYVLANASWRNSFL

SEQ ID NO: 252781 - protein, 15 aa, Artificial Sequence
  Description of Artificial Sequence: Synthetic peptide
  Seed: DPWVLLNASWFNSFL
DPYVLANASWSNSFL

SEQ ID NO: 252782 - protein, 15 aa, Artificial Sequence
  Description of Artificial Sequence: Synthetic peptide
  Seed: DPWVLLNASWFNSFL
DPYVLANASWTNSFL

SEQ ID NO: 252783 - protein, 15 aa, Artificial Sequence
  Description of Artificial Sequence: Synthetic peptide
  Seed: DPWVLLNASWFNSFL
DPYVLANASWVNSFL

SEQ ID NO: 252784 - protein, 15 aa, Artificial Sequence
  Description of Artificial Sequence: Synthetic peptide
  Seed: DPWVLLNASWFNSFL
DPYVLANGSWANSFL

SEQ ID NO: 252785 - protein, 15 aa, Artificial Sequence
  Description of Artificial Sequence: Synthetic peptide
  Seed: DPWVLLNASWFNSFL
DPYVLANGSWINSFL

SEQ ID NO: 252786 - protein, 15 aa, Artificial Sequence
  Description of Artificial Sequence: Synthetic peptide
  Seed: DPWVLLNASWFNSFL
DPYVLANGSWLNSFL

SEQ ID NO: 252787 - protein, 15 aa, Artificial Sequence
  Description of Artificial Sequence: Synthetic peptide
  Seed: DPWVLLNASWFNSFL
DPYVLANGSWMNSFL

SEQ ID NO: 252788 - protein, 15 aa, Artificial Sequence
  Description of Artificial Sequence: Synthetic peptide
  Seed: DPWVLLNASWFNSFL
DPYVLANGSWSNSFL

SEQ ID NO: 252789 - protein, 15 aa, Artificial Sequence
  Description of Artificial Sequence: Synthetic peptide
  Seed: DPWVLLNASWFNSFL
DPYVLANGSWTNSFL

SEQ ID NO: 252790 - protein, 15 aa, Artificial Sequence
  Description of Artificial Sequence: Synthetic peptide
  Seed: DPWVLLNASWFNSFL
DPYVLANGSWVNSFL

SEQ ID NO: 252791 - protein, 15 aa, Artificial Sequence
  Description of Artificial Sequence: Synthetic peptide
  Seed: DPWVLLNASWFNSFL
DPYVLANISWANSFL

SEQ ID NO: 252792 - protein, 15 aa, Artificial Sequence
  Description of Artificial Sequence: Synthetic peptide
  Seed: DPWVLLNASWFNSFL
DPYVLANISWNNSFL

SEQ ID NO: 252793 - protein, 15 aa, Artificial Sequence
  Description of Artificial Sequence: Synthetic peptide
  Seed: DPWVLLNASWFNSFL
DPYVLANISWSNSFL

SEQ ID NO: 252794 - protein, 15 aa, Artificial Sequence
  Description of Artificial Sequence: Synthetic peptide
  Seed: DPWVLLNASWFNSFL
DPYVLANLSWANSFL

SEQ ID NO: 252795 - protein, 15 aa, Artificial Sequence
  Description of Artificial Sequence: Synthetic peptide
  Seed: DPWVLLNASWFNSFL
DPYVLANLSWNNSFL

SEQ ID NO: 252796 - protein, 15 aa, Artificial Sequence
  Description of Artificial Sequence: Synthetic peptide
  Seed: DPWVLLNASWFNSFL
DPYVLANNSWANSFL

SEQ ID NO: 252797 - protein, 15 aa, Artificial Sequence
  Description of Artificial Sequence: Synthetic peptide
  Seed: DPWVLLNASWFNSFL
DPYVLANNSWINSFL

SEQ ID NO: 252798 - protein, 15 aa, Artificial Sequence
  Description of Artificial Sequence: Synthetic peptide
  Seed: DPWVLLNASWFNSFL
DPYVLANNSWLNSFL

SEQ ID NO: 252799 - protein, 15 aa, Artificial Sequence
  Description of Artificial Sequence: Synthetic peptide
  Seed: DPWVLLNASWFNSFL
DPYVLANNSWMNSFL

SEQ ID NO: 252800 - protein, 15 aa, Artificial Sequence
  Description of Artificial Sequence: Synthetic peptide
  Seed: DPWVLLNASWFNSFL
DPYVLANNSWSNSFL

SEQ ID NO: 252801 - protein, 15 aa, Artificial Sequence
  Description of Artificial Sequence: Synthetic peptide
  Seed: DPWVLLNASWFNSFL
DPYVLANNSWTNSFL

SEQ ID NO: 252802 - protein, 15 aa, Artificial Sequence
  Description of Artificial Sequence: Synthetic peptide
  Seed: DPWVLLNASWFNSFL
DPYVLANNSWVNSFL

SEQ ID NO: 252803 - protein, 15 aa, Artificial Sequence
  Description of Artificial Sequence: Synthetic peptide
  Seed: DPWVLLNASWFNSFL
DPYVLANPSWANSFL

SEQ ID NO: 252804 - protein, 15 aa, Artificial Sequence
  Description of Artificial Sequence: Synthetic peptide
  Seed: DPWVLLNASWFNSFL
DPYVLANPSWINSFL

SEQ ID NO: 252805 - protein, 15 aa, Artificial Sequence
  Description of Artificial Sequence: Synthetic peptide
  Seed: DPWVLLNASWFNSFL
DPYVLANPSWLNSFL

SEQ ID NO: 252806 - protein, 15 aa, Artificial Sequence
  Description of Artificial Sequence: Synthetic peptide
  Seed: DPWVLLNASWFNSFL
DPYVLANPSWMNSFL

SEQ ID NO: 252807 - protein, 15 aa, Artificial Sequence
  Description of Artificial Sequence: Synthetic peptide
  Seed: DPWVLLNASWFNSFL
DPYVLANPSWNNSFL

SEQ ID NO: 252808 - protein, 15 aa, Artificial Sequence
  Description of Artificial Sequence: Synthetic peptide
  Seed: DPWVLLNASWFNSFL
DPYVLANPSWSNSFL

SEQ ID NO: 252809 - protein, 15 aa, Artificial Sequence
  Description of Artificial Sequence: Synthetic peptide
  Seed: DPWVLLNASWFNSFL
DPYVLANPSWTNSFL

SEQ ID NO: 252810 - protein, 15 aa, Artificial Sequence
  Description of Artificial Sequence: Synthetic peptide
  Seed: DPWVLLNASWFNSFL
DPYVLANPSWVNSFL

SEQ ID NO: 252811 - protein, 15 aa, Artificial Sequence
  Description of Artificial Sequence: Synthetic peptide
  Seed: DPWVLLNASWFNSFL
DPYVLANSSWANSFL

SEQ ID NO: 252812 - protein, 15 aa, Artificial Sequence
  Description of Artificial Sequence: Synthetic peptide
  Seed: DPWVLLNASWFNSFL
DPYVLANSSWINSFL

SEQ ID NO: 252813 - protein, 15 aa, Artificial Sequence
  Description of Artificial Sequence: Synthetic peptide
  Seed: DPWVLLNASWFNSFL
DPYVLANSSWLNSFL

SEQ ID NO: 252814 - protein, 15 aa, Artificial Sequence
  Description of Artificial Sequence: Synthetic peptide
  Seed: DPWVLLNASWFNSFL
DPYVLANSSWMNSFL

SEQ ID NO: 252815 - protein, 15 aa, Artificial Sequence
  Description of Artificial Sequence: Synthetic peptide
  Seed: DPWVLLNASWFNSFL
DPYVLANSSWNNSFL

SEQ ID NO: 252816 - protein, 15 aa, Artificial Sequence
  Description of Artificial Sequence: Synthetic peptide
  Seed: DPWVLLNASWFNSFL
DPYVLANSSWSNSFL

SEQ ID NO: 252817 - protein, 15 aa, Artificial Sequence
  Description of Artificial Sequence: Synthetic peptide
  Seed: DPWVLLNASWFNSFL
DPYVLANSSWTNSFL

SEQ ID NO: 252818 - protein, 15 aa, Artificial Sequence
  Description of Artificial Sequence: Synthetic peptide
  Seed: DPWVLLNASWFNSFL
DPYVLANSSWVNSFL

SEQ ID NO: 252819 - protein, 15 aa, Artificial Sequence
  Description of Artificial Sequence: Synthetic peptide
  Seed: DPWVLLNASWFNSFL
DPYVLANTSWANSFL

SEQ ID NO: 252820 - protein, 15 aa, Artificial Sequence
  Description of Artificial Sequence: Synthetic peptide
  Seed: DPWVLLNASWFNSFL
DPYVLANTSWINSFL

SEQ ID NO: 252821 - protein, 15 aa, Artificial Sequence
  Description of Artificial Sequence: Synthetic peptide
  Seed: DPWVLLNASWFNSFL
DPYVLANTSWLNSFL

SEQ ID NO: 252822 - protein, 15 aa, Artificial Sequence
  Description of Artificial Sequence: Synthetic peptide
  Seed: DPWVLLNASWFNSFL
DPYVLANTSWMNSFL

SEQ ID NO: 252823 - protein, 15 aa, Artificial Sequence
  Description of Artificial Sequence: Synthetic peptide
  Seed: DPWVLLNASWFNSFL
DPYVLANTSWNNSFL

SEQ ID NO: 252824 - protein, 15 aa, Artificial Sequence
  Description of Artificial Sequence: Synthetic peptide
  Seed: DPWVLLNASWFNSFL
DPYVLANTSWSNSFL

SEQ ID NO: 252825 - protein, 15 aa, Artificial Sequence
  Description of Artificial Sequence: Synthetic peptide
  Seed: DPWVLLNASWFNSFL
DPYVLANTSWVNSFL

SEQ ID NO: 252826 - protein, 15 aa, Artificial Sequence
  Description of Artificial Sequence: Synthetic peptide
  Seed: DPWVLLNASWFNSFL
DPYVLANVSWANSFL

SEQ ID NO: 252827 - protein, 15 aa, Artificial Sequence
  Description of Artificial Sequence: Synthetic peptide
  Seed: DPWVLLNASWFNSFL
DPYVLANVSWHNSFL

SEQ ID NO: 252828 - protein, 15 aa, Artificial Sequence
  Description of Artificial Sequence: Synthetic peptide
  Seed: DPWVLLNASWFNSFL
DPYVLANVSWINSFL

SEQ ID NO: 252829 - protein, 15 aa, Artificial Sequence
  Description of Artificial Sequence: Synthetic peptide
  Seed: DPWVLLNASWFNSFL
DPYVLANVSWLNSFL

SEQ ID NO: 252830 - protein, 15 aa, Artificial Sequence
  Description of Artificial Sequence: Synthetic peptide
  Seed: DPWVLLNASWFNSFL
DPYVLANVSWMNSFL

SEQ ID NO: 252831 - protein, 15 aa, Artificial Sequence
  Description of Artificial Sequence: Synthetic peptide
  Seed: DPWVLLNASWFNSFL
DPYVLANVSWNNSFL

SEQ ID NO: 252832 - protein, 15 aa, Artificial Sequence
  Description of Artificial Sequence: Synthetic peptide
  Seed: DPWVLLNASWFNSFL
DPYVLANVSWSNSFL

SEQ ID NO: 252833 - protein, 15 aa, Artificial Sequence
  Description of Artificial Sequence: Synthetic peptide
  Seed: DPWVLLNASWFNSFL
DPYVLANVSWTNSFL

SEQ ID NO: 252834 - protein, 15 aa, Artificial Sequence
  Description of Artificial Sequence: Synthetic peptide
  Seed: DPWVLLNASWFNSFL
DPYVLANVSWVNSFL

SEQ ID NO: 252835 - protein, 15 aa, Artificial Sequence
  Description of Artificial Sequence: Synthetic peptide
  Seed: DPWVLLNASWFNSFL
DPYVLCNASWINSFL

SEQ ID NO: 252836 - protein, 15 aa, Artificial Sequence
  Description of Artificial Sequence: Synthetic peptide
  Seed: DPWVLLNASWFNSFL
DPYVLCNASWLNSFL

SEQ ID NO: 252837 - protein, 15 aa, Artificial Sequence
  Description of Artificial Sequence: Synthetic peptide
  Seed: DPWVLLNASWFNSFL
DPYVLCNASWVNSFL

SEQ ID NO: 252838 - protein, 15 aa, Artificial Sequence
  Description of Artificial Sequence: Synthetic peptide
  Seed: DPWVLLNASWFNSFL
DPYVLENASWANSFL

SEQ ID NO: 252839 - protein, 15 aa, Artificial Sequence
  Description of Artificial Sequence: Synthetic peptide
  Seed: DPWVLLNASWFNSFL
DPYVLENASWINSFL

SEQ ID NO: 252840 - protein, 15 aa, Artificial Sequence
  Description of Artificial Sequence: Synthetic peptide
  Seed: DPWVLLNASWFNSFL
DPYVLENASWLNSFL

SEQ ID NO: 252841 - protein, 15 aa, Artificial Sequence
  Description of Artificial Sequence: Synthetic peptide
  Seed: DPWVLLNASWFNSFL
DPYVLENASWMNSFL

SEQ ID NO: 252842 - protein, 15 aa, Artificial Sequence
  Description of Artificial Sequence: Synthetic peptide
  Seed: DPWVLLNASWFNSFL
DPYVLENASWTNSFL

SEQ ID NO: 252843 - protein, 15 aa, Artificial Sequence
  Description of Artificial Sequence: Synthetic peptide
  Seed: DPWVLLNASWFNSFL
DPYVLENASWVNSFL

SEQ ID NO: 252844 - protein, 15 aa, Artificial Sequence
  Description of Artificial Sequence: Synthetic peptide
  Seed: DPWVLLNASWFNSFL
DPYVLENGSWANSFL

SEQ ID NO: 252845 - protein, 15 aa, Artificial Sequence
  Description of Artificial Sequence: Synthetic peptide
  Seed: DPWVLLNASWFNSFL
DPYVLENGSWINSFL

SEQ ID NO: 252846 - protein, 15 aa, Artificial Sequence
  Description of Artificial Sequence: Synthetic peptide
  Seed: DPWVLLNASWFNSFL
DPYVLENGSWLNSFL

SEQ ID NO: 252847 - protein, 15 aa, Artificial Sequence
  Description of Artificial Sequence: Synthetic peptide
  Seed: DPWVLLNASWFNSFL
DPYVLENGSWVNSFL

SEQ ID NO: 252848 - protein, 15 aa, Artificial Sequence
  Description of Artificial Sequence: Synthetic peptide
  Seed: DPWVLLNASWFNSFL
DPYVLENSSWINSFL

SEQ ID NO: 252849 - protein, 15 aa, Artificial Sequence
  Description of Artificial Sequence: Synthetic peptide
  Seed: DPWVLLNASWFNSFL
DPYVLENSSWLNSFL

SEQ ID NO: 252850 - protein, 15 aa, Artificial Sequence
  Description of Artificial Sequence: Synthetic peptide
  Seed: DPWVLLNASWFNSFL
DPYVLENSSWVNSFL

SEQ ID NO: 252851 - protein, 15 aa, Artificial Sequence
  Description of Artificial Sequence: Synthetic peptide
  Seed: DPWVLLNASWFNSFL
DPYVLFNASWANSFL

SEQ ID NO: 252852 - protein, 15 aa, Artificial Sequence
  Description of Artificial Sequence: Synthetic peptide
  Seed: DPWVLLNASWFNSFL
DPYVLFNASWINSFL

SEQ ID NO: 252853 - protein, 15 aa, Artificial Sequence
  Description of Artificial Sequence: Synthetic peptide
  Seed: DPWVLLNASWFNSFL
DPYVLFNASWLNSFL

SEQ ID NO: 252854 - protein, 15 aa, Artificial Sequence
  Description of Artificial Sequence: Synthetic peptide
  Seed: DPWVLLNASWFNSFL
DPYVLFNASWSNSFL

SEQ ID NO: 252855 - protein, 15 aa, Artificial Sequence
  Description of Artificial Sequence: Synthetic peptide
  Seed: DPWVLLNASWFNSFL
DPYVLFNASWVNSFL

SEQ ID NO: 252856 - protein, 15 aa, Artificial Sequence
  Description of Artificial Sequence: Synthetic peptide
  Seed: DPWVLLNASWFNSFL
DPYVLFNGSWANSFL

SEQ ID NO: 252857 - protein, 15 aa, Artificial Sequence
  Description of Artificial Sequence: Synthetic peptide
  Seed: DPWVLLNASWFNSFL
DPYVLFNPSWANSFL

SEQ ID NO: 252858 - protein, 15 aa, Artificial Sequence
  Description of Artificial Sequence: Synthetic peptide
  Seed: DPWVLLNASWFNSFL
DPYVLFNPSWVNSFL

SEQ ID NO: 252859 - protein, 15 aa, Artificial Sequence
  Description of Artificial Sequence: Synthetic peptide
  Seed: DPWVLLNASWFNSFL
DPYVLFNSSWANSFL

SEQ ID NO: 252860 - protein, 15 aa, Artificial Sequence
  Description of Artificial Sequence: Synthetic peptide
  Seed: DPWVLLNASWFNSFL
DPYVLGNASWANSFL

SEQ ID NO: 252861 - protein, 15 aa, Artificial Sequence
  Description of Artificial Sequence: Synthetic peptide
  Seed: DPWVLLNASWFNSFL
DPYVLGNASWINSFL

SEQ ID NO: 252862 - protein, 15 aa, Artificial Sequence
  Description of Artificial Sequence: Synthetic peptide
  Seed: DPWVLLNASWFNSFL
DPYVLGNASWLNSFL

SEQ ID NO: 252863 - protein, 15 aa, Artificial Sequence
  Description of Artificial Sequence: Synthetic peptide
  Seed: DPWVLLNASWFNSFL
DPYVLGNASWMNSFL

SEQ ID NO: 252864 - protein, 15 aa, Artificial Sequence
  Description of Artificial Sequence: Synthetic peptide
  Seed: DPWVLLNASWFNSFL
DPYVLGNASWVNSFL

SEQ ID NO: 252865 - protein, 15 aa, Artificial Sequence
  Description of Artificial Sequence: Synthetic peptide
  Seed: DPWVLLNASWFNSFL
DPYVLGNGSWLNSFL

SEQ ID NO: 252866 - protein, 15 aa, Artificial Sequence
  Description of Artificial Sequence: Synthetic peptide
  Seed: DPWVLLNASWFNSFL
DPYVLGNSSWLNSFL

SEQ ID NO: 252867 - protein, 15 aa, Artificial Sequence
  Description of Artificial Sequence: Synthetic peptide
  Seed: DPWVLLNASWFNSFL
DPYVLHNASWANSFL

SEQ ID NO: 252868 - protein, 15 aa, Artificial Sequence
  Description of Artificial Sequence: Synthetic peptide
  Seed: DPWVLLNASWFNSFL
DPYVLHNASWINSFL

SEQ ID NO: 252869 - protein, 15 aa, Artificial Sequence
  Description of Artificial Sequence: Synthetic peptide
  Seed: DPWVLLNASWFNSFL
DPYVLHNASWLNSFL

SEQ ID NO: 252870 - protein, 15 aa, Artificial Sequence
  Description of Artificial Sequence: Synthetic peptide
  Seed: DPWVLLNASWFNSFL
DPYVLHNASWVNSFL

SEQ ID NO: 252871 - protein, 15 aa, Artificial Sequence
  Description of Artificial Sequence: Synthetic peptide
  Seed: DPWVLLNASWFNSFL
DPYVLHNGSWLNSFL

SEQ ID NO: 252872 - protein, 15 aa, Artificial Sequence
  Description of Artificial Sequence: Synthetic peptide
  Seed: DPWVLLNASWFNSFL
DPYVLINASWANSFL

SEQ ID NO: 252873 - protein, 15 aa, Artificial Sequence
  Description of Artificial Sequence: Synthetic peptide
  Seed: DPWVLLNASWFNSFL
DPYVLINASWGNSFL

SEQ ID NO: 252874 - protein, 15 aa, Artificial Sequence
  Description of Artificial Sequence: Synthetic peptide
  Seed: DPWVLLNASWFNSFL
DPYVLINASWHNSFL

SEQ ID NO: 252875 - protein, 15 aa, Artificial Sequence
  Description of Artificial Sequence: Synthetic peptide
  Seed: DPWVLLNASWFNSFL
DPYVLINASWINSFL

SEQ ID NO: 252876 - protein, 15 aa, Artificial Sequence
  Description of Artificial Sequence: Synthetic peptide
  Seed: DPWVLLNASWFNSFL
DPYVLINASWLNSFL

SEQ ID NO: 252877 - protein, 15 aa, Artificial Sequence
  Description of Artificial Sequence: Synthetic peptide
  Seed: DPWVLLNASWFNSFL
DPYVLINASWMNSFL

SEQ ID NO: 252878 - protein, 15 aa, Artificial Sequence
  Description of Artificial Sequence: Synthetic peptide
  Seed: DPWVLLNASWFNSFL
DPYVLINASWNNSFL

SEQ ID NO: 252879 - protein, 15 aa, Artificial Sequence
  Description of Artificial Sequence: Synthetic peptide
  Seed: DPWVLLNASWFNSFL
DPYVLINASWQNSFL

SEQ ID NO: 252880 - protein, 15 aa, Artificial Sequence
  Description of Artificial Sequence: Synthetic peptide
  Seed: DPWVLLNASWFNSFL
DPYVLINASWRNSFL

SEQ ID NO: 252881 - protein, 15 aa, Artificial Sequence
  Description of Artificial Sequence: Synthetic peptide
  Seed: DPWVLLNASWFNSFL
DPYVLINASWSNSFL

SEQ ID NO: 252882 - protein, 15 aa, Artificial Sequence
  Description of Artificial Sequence: Synthetic peptide
  Seed: DPWVLLNASWFNSFL
DPYVLINASWTNSFL

SEQ ID NO: 252883 - protein, 15 aa, Artificial Sequence
  Description of Artificial Sequence: Synthetic peptide
  Seed: DPWVLLNASWFNSFL
DPYVLINASWVNSFL

SEQ ID NO: 252884 - protein, 15 aa, Artificial Sequence
  Description of Artificial Sequence: Synthetic peptide
  Seed: DPWVLLNASWFNSFL
DPYVLINGSWANSFL

SEQ ID NO: 252885 - protein, 15 aa, Artificial Sequence
  Description of Artificial Sequence: Synthetic peptide
  Seed: DPWVLLNASWFNSFL
DPYVLINGSWGNSFL

SEQ ID NO: 252886 - protein, 15 aa, Artificial Sequence
  Description of Artificial Sequence: Synthetic peptide
  Seed: DPWVLLNASWFNSFL
DPYVLINGSWINSFL

SEQ ID NO: 252887 - protein, 15 aa, Artificial Sequence
  Description of Artificial Sequence: Synthetic peptide
  Seed: DPWVLLNASWFNSFL
DPYVLINGSWLNSFL

SEQ ID NO: 252888 - protein, 15 aa, Artificial Sequence
  Description of Artificial Sequence: Synthetic peptide
  Seed: DPWVLLNASWFNSFL
DPYVLINGSWMNSFL

SEQ ID NO: 252889 - protein, 15 aa, Artificial Sequence
  Description of Artificial Sequence: Synthetic peptide
  Seed: DPWVLLNASWFNSFL
DPYVLINGSWNNSFL

SEQ ID NO: 252890 - protein, 15 aa, Artificial Sequence
  Description of Artificial Sequence: Synthetic peptide
  Seed: DPWVLLNASWFNSFL
DPYVLINGSWSNSFL

SEQ ID NO: 252891 - protein, 15 aa, Artificial Sequence
  Description of Artificial Sequence: Synthetic peptide
  Seed: DPWVLLNASWFNSFL
DPYVLINGSWTNSFL

SEQ ID NO: 252892 - protein, 15 aa, Artificial Sequence
  Description of Artificial Sequence: Synthetic peptide
  Seed: DPWVLLNASWFNSFL
DPYVLINGSWVNSFL

SEQ ID NO: 252893 - protein, 15 aa, Artificial Sequence
  Description of Artificial Sequence: Synthetic peptide
  Seed: DPWVLLNASWFNSFL
DPYVLINHSWANSFL

SEQ ID NO: 252894 - protein, 15 aa, Artificial Sequence
  Description of Artificial Sequence: Synthetic peptide
  Seed: DPWVLLNASWFNSFL
DPYVLINISWANSFL

SEQ ID NO: 252895 - protein, 15 aa, Artificial Sequence
  Description of Artificial Sequence: Synthetic peptide
  Seed: DPWVLLNASWFNSFL
DPYVLINISWNNSFL

SEQ ID NO: 252896 - protein, 15 aa, Artificial Sequence
  Description of Artificial Sequence: Synthetic peptide
  Seed: DPWVLLNASWFNSFL
DPYVLINISWSNSFL

SEQ ID NO: 252897 - protein, 15 aa, Artificial Sequence
  Description of Artificial Sequence: Synthetic peptide
  Seed: DPWVLLNASWFNSFL
DPYVLINNSWANSFL

SEQ ID NO: 252898 - protein, 15 aa, Artificial Sequence
  Description of Artificial Sequence: Synthetic peptide
  Seed: DPWVLLNASWFNSFL
DPYVLINNSWDNSFL

SEQ ID NO: 252899 - protein, 15 aa, Artificial Sequence
  Description of Artificial Sequence: Synthetic peptide
  Seed: DPWVLLNASWFNSFL
DPYVLINNSWENSFL

SEQ ID NO: 252900 - protein, 15 aa, Artificial Sequence
  Description of Artificial Sequence: Synthetic peptide
  Seed: DPWVLLNASWFNSFL
DPYVLINNSWGNSFL

SEQ ID NO: 252901 - protein, 15 aa, Artificial Sequence
  Description of Artificial Sequence: Synthetic peptide
  Seed: DPWVLLNASWFNSFL
DPYVLINNSWINSFL

SEQ ID NO: 252902 - protein, 15 aa, Artificial Sequence
  Description of Artificial Sequence: Synthetic peptide
  Seed: DPWVLLNASWFNSFL
DPYVLINNSWLNSFL

SEQ ID NO: 252903 - protein, 15 aa, Artificial Sequence
  Description of Artificial Sequence: Synthetic peptide
  Seed: DPWVLLNASWFNSFL
DPYVLINNSWMNSFL

SEQ ID NO: 252904 - protein, 15 aa, Artificial Sequence
  Description of Artificial Sequence: Synthetic peptide
  Seed: DPWVLLNASWFNSFL
DPYVLINNSWNNSFL

SEQ ID NO: 252905 - protein, 15 aa, Artificial Sequence
  Description of Artificial Sequence: Synthetic peptide
  Seed: DPWVLLNASWFNSFL
DPYVLINNSWQNSFL

SEQ ID NO: 252906 - protein, 15 aa, Artificial Sequence
  Description of Artificial Sequence: Synthetic peptide
  Seed: DPWVLLNASWFNSFL
DPYVLINNSWSNSFL

SEQ ID NO: 252907 - protein, 15 aa, Artificial Sequence
  Description of Artificial Sequence: Synthetic peptide
  Seed: DPWVLLNASWFNSFL
DPYVLINNSWTNSFL

SEQ ID NO: 252908 - protein, 15 aa, Artificial Sequence
  Description of Artificial Sequence: Synthetic peptide
  Seed: DPWVLLNASWFNSFL
DPYVLINNSWVNSFL

SEQ ID NO: 252909 - protein, 15 aa, Artificial Sequence
  Description of Artificial Sequence: Synthetic peptide
  Seed: DPWVLLNASWFNSFL
DPYVLINPSWANSFL

SEQ ID NO: 252910 - protein, 15 aa, Artificial Sequence
  Description of Artificial Sequence: Synthetic peptide
  Seed: DPWVLLNASWFNSFL
DPYVLINPSWHNSFL

SEQ ID NO: 252911 - protein, 15 aa, Artificial Sequence
  Description of Artificial Sequence: Synthetic peptide
  Seed: DPWVLLNASWFNSFL
DPYVLINPSWINSFL

SEQ ID NO: 252912 - protein, 15 aa, Artificial Sequence
  Description of Artificial Sequence: Synthetic peptide
  Seed: DPWVLLNASWFNSFL
DPYVLINPSWLNSFL

SEQ ID NO: 252913 - protein, 15 aa, Artificial Sequence
  Description of Artificial Sequence: Synthetic peptide
  Seed: DPWVLLNASWFNSFL
DPYVLINPSWMNSFL

SEQ ID NO: 252914 - protein, 15 aa, Artificial Sequence
  Description of Artificial Sequence: Synthetic peptide
  Seed: DPWVLLNASWFNSFL
DPYVLINPSWNNSFL

SEQ ID NO: 252915 - protein, 15 aa, Artificial Sequence
  Description of Artificial Sequence: Synthetic peptide
  Seed: DPWVLLNASWFNSFL
DPYVLINPSWQNSFL

SEQ ID NO: 252916 - protein, 15 aa, Artificial Sequence
  Description of Artificial Sequence: Synthetic peptide
  Seed: DPWVLLNASWFNSFL
DPYVLINPSWSNSFL

SEQ ID NO: 252917 - protein, 15 aa, Artificial Sequence
  Description of Artificial Sequence: Synthetic peptide
  Seed: DPWVLLNASWFNSFL
DPYVLINPSWTNSFL

SEQ ID NO: 252918 - protein, 15 aa, Artificial Sequence
  Description of Artificial Sequence: Synthetic peptide
  Seed: DPWVLLNASWFNSFL
DPYVLINPSWVNSFL

SEQ ID NO: 252919 - protein, 15 aa, Artificial Sequence
  Description of Artificial Sequence: Synthetic peptide
  Seed: DPWVLLNASWFNSFL
DPYVLINSSWANSFL

SEQ ID NO: 252920 - protein, 15 aa, Artificial Sequence
  Description of Artificial Sequence: Synthetic peptide
  Seed: DPWVLLNASWFNSFL
DPYVLINSSWDNSFL

SEQ ID NO: 252921 - protein, 15 aa, Artificial Sequence
  Description of Artificial Sequence: Synthetic peptide
  Seed: DPWVLLNASWFNSFL
DPYVLINSSWGNSFL

SEQ ID NO: 252922 - protein, 15 aa, Artificial Sequence
  Description of Artificial Sequence: Synthetic peptide
  Seed: DPWVLLNASWFNSFL
DPYVLINSSWINSFL

SEQ ID NO: 252923 - protein, 15 aa, Artificial Sequence
  Description of Artificial Sequence: Synthetic peptide
  Seed: DPWVLLNASWFNSFL
DPYVLINSSWLNSFL

SEQ ID NO: 252924 - protein, 15 aa, Artificial Sequence
  Description of Artificial Sequence: Synthetic peptide
  Seed: DPWVLLNASWFNSFL
DPYVLINSSWMNSFL

SEQ ID NO: 252925 - protein, 15 aa, Artificial Sequence
  Description of Artificial Sequence: Synthetic peptide
  Seed: DPWVLLNASWFNSFL
DPYVLINSSWNNSFL

SEQ ID NO: 252926 - protein, 15 aa, Artificial Sequence
  Description of Artificial Sequence: Synthetic peptide
  Seed: DPWVLLNASWFNSFL
DPYVLINSSWSNSFL

SEQ ID NO: 252927 - protein, 15 aa, Artificial Sequence
  Description of Artificial Sequence: Synthetic peptide
  Seed: DPWVLLNASWFNSFL
DPYVLINSSWTNSFL

SEQ ID NO: 252928 - protein, 15 aa, Artificial Sequence
  Description of Artificial Sequence: Synthetic peptide
  Seed: DPWVLLNASWFNSFL
DPYVLINSSWVNSFL

SEQ ID NO: 252929 - protein, 15 aa, Artificial Sequence
  Description of Artificial Sequence: Synthetic peptide
  Seed: DPWVLLNASWFNSFL
DPYVLINTSWANSFL

SEQ ID NO: 252930 - protein, 15 aa, Artificial Sequence
  Description of Artificial Sequence: Synthetic peptide
  Seed: DPWVLLNASWFNSFL
DPYVLINTSWDNSFL

SEQ ID NO: 252931 - protein, 15 aa, Artificial Sequence
  Description of Artificial Sequence: Synthetic peptide
  Seed: DPWVLLNASWFNSFL
DPYVLINTSWENSFL

SEQ ID NO: 252932 - protein, 15 aa, Artificial Sequence
  Description of Artificial Sequence: Synthetic peptide
  Seed: DPWVLLNASWFNSFL
DPYVLINTSWHNSFL

SEQ ID NO: 252933 - protein, 15 aa, Artificial Sequence
  Description of Artificial Sequence: Synthetic peptide
  Seed: DPWVLLNASWFNSFL
DPYVLINTSWINSFL

SEQ ID NO: 252934 - protein, 15 aa, Artificial Sequence
  Description of Artificial Sequence: Synthetic peptide
  Seed: DPWVLLNASWFNSFL
DPYVLINTSWLNSFL

SEQ ID NO: 252935 - protein, 15 aa, Artificial Sequence
  Description of Artificial Sequence: Synthetic peptide
  Seed: DPWVLLNASWFNSFL
DPYVLINTSWNNSFL

SEQ ID NO: 252936 - protein, 15 aa, Artificial Sequence
  Description of Artificial Sequence: Synthetic peptide
  Seed: DPWVLLNASWFNSFL
DPYVLINTSWSNSFL

SEQ ID NO: 252937 - protein, 15 aa, Artificial Sequence
  Description of Artificial Sequence: Synthetic peptide
  Seed: DPWVLLNASWFNSFL
DPYVLINTSWTNSFL

SEQ ID NO: 252938 - protein, 15 aa, Artificial Sequence
  Description of Artificial Sequence: Synthetic peptide
  Seed: DPWVLLNASWFNSFL
DPYVLINTSWVNSFL

SEQ ID NO: 252939 - protein, 15 aa, Artificial Sequence
  Description of Artificial Sequence: Synthetic peptide
  Seed: DPWVLLNASWFNSFL
DPYVLINVSWANSFL

SEQ ID NO: 252940 - protein, 15 aa, Artificial Sequence
  Description of Artificial Sequence: Synthetic peptide
  Seed: DPWVLLNASWFNSFL
DPYVLINVSWHNSFL

SEQ ID NO: 252941 - protein, 15 aa, Artificial Sequence
  Description of Artificial Sequence: Synthetic peptide
  Seed: DPWVLLNASWFNSFL
DPYVLINVSWNNSFL

SEQ ID NO: 252942 - protein, 15 aa, Artificial Sequence
  Description of Artificial Sequence: Synthetic peptide
  Seed: DPWVLLNASWFNSFL
DPYVLINVSWSNSFL

SEQ ID NO: 252943 - protein, 15 aa, Artificial Sequence
  Description of Artificial Sequence: Synthetic peptide
  Seed: DPWVLLNASWFNSFL
DPYVLINVSWTNSFL

SEQ ID NO: 252944 - protein, 15 aa, Artificial Sequence
  Description of Artificial Sequence: Synthetic peptide
  Seed: DPWVLLNASWFNSFL
DPYVLKNASWLNSFL

SEQ ID NO: 252945 - protein, 15 aa, Artificial Sequence
  Description of Artificial Sequence: Synthetic peptide
  Seed: DPWVLLNASWFNSFL
DPYVLLNASWANSFL

SEQ ID NO: 252946 - protein, 15 aa, Artificial Sequence
  Description of Artificial Sequence: Synthetic peptide
  Seed: DPWVLLNASWFNSFL
DPYVLLNASWCNSFL

SEQ ID NO: 252947 - protein, 15 aa, Artificial Sequence
  Description of Artificial Sequence: Synthetic peptide
  Seed: DPWVLLNASWFNSFL
DPYVLLNASWDNSFL

SEQ ID NO: 252948 - protein, 15 aa, Artificial Sequence
  Description of Artificial Sequence: Synthetic peptide
  Seed: DPWVLLNASWFNSFL
DPYVLLNASWENSFL

SEQ ID NO: 252949 - protein, 15 aa, Artificial Sequence
  Description of Artificial Sequence: Synthetic peptide
  Seed: DPWVLLNASWFNSFL
DPYVLLNASWFNSFL

SEQ ID NO: 252950 - protein, 15 aa, Artificial Sequence
  Description of Artificial Sequence: Synthetic peptide
  Seed: DPWVLLNASWFNSFL
DPYVLLNASWGNSFL

SEQ ID NO: 252951 - protein, 15 aa, Artificial Sequence
  Description of Artificial Sequence: Synthetic peptide
  Seed: DPWVLLNASWFNSFL
DPYVLLNASWHNSFL

SEQ ID NO: 252952 - protein, 15 aa, Artificial Sequence
  Description of Artificial Sequence: Synthetic peptide
  Seed: DPWVLLNASWFNSFL
DPYVLLNASWINSFL

SEQ ID NO: 252953 - protein, 15 aa, Artificial Sequence
  Description of Artificial Sequence: Synthetic peptide
  Seed: DPWVLLNASWFNSFL
DPYVLLNASWKNSFL

SEQ ID NO: 252954 - protein, 15 aa, Artificial Sequence
  Description of Artificial Sequence: Synthetic peptide
  Seed: DPWVLLNASWFNSFL
DPYVLLNASWLNSFL

SEQ ID NO: 252955 - protein, 15 aa, Artificial Sequence
  Description of Artificial Sequence: Synthetic peptide
  Seed: DPWVLLNASWFNSFL
DPYVLLNASWMNSFL

SEQ ID NO: 252956 - protein, 15 aa, Artificial Sequence
  Description of Artificial Sequence: Synthetic peptide
  Seed: DPWVLLNASWFNSFL
DPYVLLNASWNNSFL

SEQ ID NO: 252957 - protein, 15 aa, Artificial Sequence
  Description of Artificial Sequence: Synthetic peptide
  Seed: DPWVLLNASWFNSFL
DPYVLLNASWPNSFL

SEQ ID NO: 252958 - protein, 15 aa, Artificial Sequence
  Description of Artificial Sequence: Synthetic peptide
  Seed: DPWVLLNASWFNSFL
DPYVLLNASWQNSFL

SEQ ID NO: 252959 - protein, 15 aa, Artificial Sequence
  Description of Artificial Sequence: Synthetic peptide
  Seed: DPWVLLNASWFNSFL
DPYVLLNASWRNSFL

SEQ ID NO: 252960 - protein, 15 aa, Artificial Sequence
  Description of Artificial Sequence: Synthetic peptide
  Seed: DPWVLLNASWFNSFL
DPYVLLNASWSNSFL

SEQ ID NO: 252961 - protein, 15 aa, Artificial Sequence
  Description of Artificial Sequence: Synthetic peptide
  Seed: DPWVLLNASWFNSFL
DPYVLLNASWTNSFL

SEQ ID NO: 252962 - protein, 15 aa, Artificial Sequence
  Description of Artificial Sequence: Synthetic peptide
  Seed: DPWVLLNASWFNSFL
DPYVLLNASWVNSFL

SEQ ID NO: 252963 - protein, 15 aa, Artificial Sequence
  Description of Artificial Sequence: Synthetic peptide
  Seed: DPWVLLNASWFNSFL
DPYVLLNASWYNSFL

SEQ ID NO: 252964 - protein, 15 aa, Artificial Sequence
  Description of Artificial Sequence: Synthetic peptide
  Seed: DPWVLLNASWFNSFL
DPYVLLNGSWANSFL

SEQ ID NO: 252965 - protein, 15 aa, Artificial Sequence
  Description of Artificial Sequence: Synthetic peptide
  Seed: DPWVLLNASWFNSFL
DPYVLLNGSWFNSFL

SEQ ID NO: 252966 - protein, 15 aa, Artificial Sequence
  Description of Artificial Sequence: Synthetic peptide
  Seed: DPWVLLNASWFNSFL
DPYVLLNGSWGNSFL

SEQ ID NO: 252967 - protein, 15 aa, Artificial Sequence
  Description of Artificial Sequence: Synthetic peptide
  Seed: DPWVLLNASWFNSFL
DPYVLLNGSWHNSFL

SEQ ID NO: 252968 - protein, 15 aa, Artificial Sequence
  Description of Artificial Sequence: Synthetic peptide
  Seed: DPWVLLNASWFNSFL
DPYVLLNGSWINSFL

SEQ ID NO: 252969 - protein, 15 aa, Artificial Sequence
  Description of Artificial Sequence: Synthetic peptide
  Seed: DPWVLLNASWFNSFL
DPYVLLNGSWLNSFL

SEQ ID NO: 252970 - protein, 15 aa, Artificial Sequence
  Description of Artificial Sequence: Synthetic peptide
  Seed: DPWVLLNASWFNSFL
DPYVLLNGSWMNSFL

SEQ ID NO: 252971 - protein, 15 aa, Artificial Sequence
  Description of Artificial Sequence: Synthetic peptide
  Seed: DPWVLLNASWFNSFL
DPYVLLNGSWNNSFL

SEQ ID NO: 252972 - protein, 15 aa, Artificial Sequence
  Description of Artificial Sequence: Synthetic peptide
  Seed: DPWVLLNASWFNSFL
DPYVLLNGSWPNSFL

SEQ ID NO: 252973 - protein, 15 aa, Artificial Sequence
  Description of Artificial Sequence: Synthetic peptide
  Seed: DPWVLLNASWFNSFL
DPYVLLNGSWRNSFL

SEQ ID NO: 252974 - protein, 15 aa, Artificial Sequence
  Description of Artificial Sequence: Synthetic peptide
  Seed: DPWVLLNASWFNSFL
DPYVLLNGSWSNSFL

SEQ ID NO: 252975 - protein, 15 aa, Artificial Sequence
  Description of Artificial Sequence: Synthetic peptide
  Seed: DPWVLLNASWFNSFL
DPYVLLNGSWTNSFL

SEQ ID NO: 252976 - protein, 15 aa, Artificial Sequence
  Description of Artificial Sequence: Synthetic peptide
  Seed: DPWVLLNASWFNSFL
DPYVLLNGSWVNSFL

SEQ ID NO: 252977 - protein, 15 aa, Artificial Sequence
  Description of Artificial Sequence: Synthetic peptide
  Seed: DPWVLLNASWFNSFL
DPYVLLNHSWANSFL

SEQ ID NO: 252978 - protein, 15 aa, Artificial Sequence
  Description of Artificial Sequence: Synthetic peptide
  Seed: DPWVLLNASWFNSFL
DPYVLLNHSWLNSFL

SEQ ID NO: 252979 - protein, 15 aa, Artificial Sequence
  Description of Artificial Sequence: Synthetic peptide
  Seed: DPWVLLNASWFNSFL
DPYVLLNHSWVNSFL

SEQ ID NO: 252980 - protein, 15 aa, Artificial Sequence
  Description of Artificial Sequence: Synthetic peptide
  Seed: DPWVLLNASWFNSFL
DPYVLLNISWANSFL

SEQ ID NO: 252981 - protein, 15 aa, Artificial Sequence
  Description of Artificial Sequence: Synthetic peptide
  Seed: DPWVLLNASWFNSFL
DPYVLLNISWHNSFL

SEQ ID NO: 252982 - protein, 15 aa, Artificial Sequence
  Description of Artificial Sequence: Synthetic peptide
  Seed: DPWVLLNASWFNSFL
DPYVLLNISWNNSFL

SEQ ID NO: 252983 - protein, 15 aa, Artificial Sequence
  Description of Artificial Sequence: Synthetic peptide
  Seed: DPWVLLNASWFNSFL
DPYVLLNISWSNSFL

SEQ ID NO: 252984 - protein, 15 aa, Artificial Sequence
  Description of Artificial Sequence: Synthetic peptide
  Seed: DPWVLLNASWFNSFL
DPYVLLNISWTNSFL

SEQ ID NO: 252985 - protein, 15 aa, Artificial Sequence
  Description of Artificial Sequence: Synthetic peptide
  Seed: DPWVLLNASWFNSFL
DPYVLLNNSWANSFL

SEQ ID NO: 252986 - protein, 15 aa, Artificial Sequence
  Description of Artificial Sequence: Synthetic peptide
  Seed: DPWVLLNASWFNSFL
DPYVLLNNSWDNSFL

SEQ ID NO: 252987 - protein, 15 aa, Artificial Sequence
  Description of Artificial Sequence: Synthetic peptide
  Seed: DPWVLLNASWFNSFL
DPYVLLNNSWENSFL

SEQ ID NO: 252988 - protein, 15 aa, Artificial Sequence
  Description of Artificial Sequence: Synthetic peptide
  Seed: DPWVLLNASWFNSFL
DPYVLLNNSWGNSFL

SEQ ID NO: 252989 - protein, 15 aa, Artificial Sequence
  Description of Artificial Sequence: Synthetic peptide
  Seed: DPWVLLNASWFNSFL
DPYVLLNNSWINSFL

SEQ ID NO: 252990 - protein, 15 aa, Artificial Sequence
  Description of Artificial Sequence: Synthetic peptide
  Seed: DPWVLLNASWFNSFL
DPYVLLNNSWLNSFL

SEQ ID NO: 252991 - protein, 15 aa, Artificial Sequence
  Description of Artificial Sequence: Synthetic peptide
  Seed: DPWVLLNASWFNSFL
DPYVLLNNSWMNSFL

SEQ ID NO: 252992 - protein, 15 aa, Artificial Sequence
  Description of Artificial Sequence: Synthetic peptide
  Seed: DPWVLLNASWFNSFL
DPYVLLNNSWNNSFL

SEQ ID NO: 252993 - protein, 15 aa, Artificial Sequence
  Description of Artificial Sequence: Synthetic peptide
  Seed: DPWVLLNASWFNSFL
DPYVLLNNSWSNSFL

SEQ ID NO: 252994 - protein, 15 aa, Artificial Sequence
  Description of Artificial Sequence: Synthetic peptide
  Seed: DPWVLLNASWFNSFL
DPYVLLNNSWTNSFL

SEQ ID NO: 252995 - protein, 15 aa, Artificial Sequence
  Description of Artificial Sequence: Synthetic peptide
  Seed: DPWVLLNASWFNSFL
DPYVLLNNSWVNSFL

SEQ ID NO: 252996 - protein, 15 aa, Artificial Sequence
  Description of Artificial Sequence: Synthetic peptide
  Seed: DPWVLLNASWFNSFL
DPYVLLNPSWANSFL

SEQ ID NO: 252997 - protein, 15 aa, Artificial Sequence
  Description of Artificial Sequence: Synthetic peptide
  Seed: DPWVLLNASWFNSFL
DPYVLLNPSWCNSFL

SEQ ID NO: 252998 - protein, 15 aa, Artificial Sequence
  Description of Artificial Sequence: Synthetic peptide
  Seed: DPWVLLNASWFNSFL
DPYVLLNPSWFNSFL

SEQ ID NO: 252999 - protein, 15 aa, Artificial Sequence
  Description of Artificial Sequence: Synthetic peptide
  Seed: DPWVLLNASWFNSFL
DPYVLLNPSWGNSFL

SEQ ID NO: 253000 - protein, 15 aa, Artificial Sequence
  Description of Artificial Sequence: Synthetic peptide
  Seed: DPWVLLNASWFNSFL
DPYVLLNPSWHNSFL

SEQ ID NO: 253001 - protein, 15 aa, Artificial Sequence
  Description of Artificial Sequence: Synthetic peptide
  Seed: DPWVLLNASWFNSFL
DPYVLLNPSWINSFL

SEQ ID NO: 253002 - protein, 15 aa, Artificial Sequence
  Description of Artificial Sequence: Synthetic peptide
  Seed: DPWVLLNASWFNSFL
DPYVLLNPSWLNSFL

SEQ ID NO: 253003 - protein, 15 aa, Artificial Sequence
  Description of Artificial Sequence: Synthetic peptide
  Seed: DPWVLLNASWFNSFL
DPYVLLNPSWMNSFL

SEQ ID NO: 253004 - protein, 15 aa, Artificial Sequence
  Description of Artificial Sequence: Synthetic peptide
  Seed: DPWVLLNASWFNSFL
DPYVLLNPSWNNSFL

SEQ ID NO: 253005 - protein, 15 aa, Artificial Sequence
  Description of Artificial Sequence: Synthetic peptide
  Seed: DPWVLLNASWFNSFL
DPYVLLNPSWQNSFL

SEQ ID NO: 253006 - protein, 15 aa, Artificial Sequence
  Description of Artificial Sequence: Synthetic peptide
  Seed: DPWVLLNASWFNSFL
DPYVLLNPSWRNSFL

SEQ ID NO: 253007 - protein, 15 aa, Artificial Sequence
  Description of Artificial Sequence: Synthetic peptide
  Seed: DPWVLLNASWFNSFL
DPYVLLNPSWSNSFL

SEQ ID NO: 253008 - protein, 15 aa, Artificial Sequence
  Description of Artificial Sequence: Synthetic peptide
  Seed: DPWVLLNASWFNSFL
DPYVLLNPSWTNSFL

SEQ ID NO: 253009 - protein, 15 aa, Artificial Sequence
  Description of Artificial Sequence: Synthetic peptide
  Seed: DPWVLLNASWFNSFL
DPYVLLNPSWVNSFL

SEQ ID NO: 253010 - protein, 15 aa, Artificial Sequence
  Description of Artificial Sequence: Synthetic peptide
  Seed: DPWVLLNASWFNSFL
DPYVLLNSSWANSFL

SEQ ID NO: 253011 - protein, 15 aa, Artificial Sequence
  Description of Artificial Sequence: Synthetic peptide
  Seed: DPWVLLNASWFNSFL
DPYVLLNSSWDNSFL

SEQ ID NO: 253012 - protein, 15 aa, Artificial Sequence
  Description of Artificial Sequence: Synthetic peptide
  Seed: DPWVLLNASWFNSFL
DPYVLLNSSWGNSFL

SEQ ID NO: 253013 - protein, 15 aa, Artificial Sequence
  Description of Artificial Sequence: Synthetic peptide
  Seed: DPWVLLNASWFNSFL
DPYVLLNSSWHNSFL

SEQ ID NO: 253014 - protein, 15 aa, Artificial Sequence
  Description of Artificial Sequence: Synthetic peptide
  Seed: DPWVLLNASWFNSFL
DPYVLLNSSWINSFL

SEQ ID NO: 253015 - protein, 15 aa, Artificial Sequence
  Description of Artificial Sequence: Synthetic peptide
  Seed: DPWVLLNASWFNSFL
DPYVLLNSSWLNSFL

SEQ ID NO: 253016 - protein, 15 aa, Artificial Sequence
  Description of Artificial Sequence: Synthetic peptide
  Seed: DPWVLLNASWFNSFL
DPYVLLNSSWMNSFL

SEQ ID NO: 253017 - protein, 15 aa, Artificial Sequence
  Description of Artificial Sequence: Synthetic peptide
  Seed: DPWVLLNASWFNSFL
DPYVLLNSSWNNSFL

SEQ ID NO: 253018 - protein, 15 aa, Artificial Sequence
  Description of Artificial Sequence: Synthetic peptide
  Seed: DPWVLLNASWFNSFL
DPYVLLNSSWRNSFL

SEQ ID NO: 253019 - protein, 15 aa, Artificial Sequence
  Description of Artificial Sequence: Synthetic peptide
  Seed: DPWVLLNASWFNSFL
DPYVLLNSSWSNSFL

SEQ ID NO: 253020 - protein, 15 aa, Artificial Sequence
  Description of Artificial Sequence: Synthetic peptide
  Seed: DPWVLLNASWFNSFL
DPYVLLNSSWTNSFL

SEQ ID NO: 253021 - protein, 15 aa, Artificial Sequence
  Description of Artificial Sequence: Synthetic peptide
  Seed: DPWVLLNASWFNSFL
DPYVLLNSSWVNSFL

SEQ ID NO: 253022 - protein, 15 aa, Artificial Sequence
  Description of Artificial Sequence: Synthetic peptide
  Seed: DPWVLLNASWFNSFL
DPYVLLNTSWANSFL

SEQ ID NO: 253023 - protein, 15 aa, Artificial Sequence
  Description of Artificial Sequence: Synthetic peptide
  Seed: DPWVLLNASWFNSFL
DPYVLLNTSWDNSFL

SEQ ID NO: 253024 - protein, 15 aa, Artificial Sequence
  Description of Artificial Sequence: Synthetic peptide
  Seed: DPWVLLNASWFNSFL
DPYVLLNTSWHNSFL

SEQ ID NO: 253025 - protein, 15 aa, Artificial Sequence
  Description of Artificial Sequence: Synthetic peptide
  Seed: DPWVLLNASWFNSFL
DPYVLLNTSWINSFL

SEQ ID NO: 253026 - protein, 15 aa, Artificial Sequence
  Description of Artificial Sequence: Synthetic peptide
  Seed: DPWVLLNASWFNSFL
DPYVLLNTSWLNSFL

SEQ ID NO: 253027 - protein, 15 aa, Artificial Sequence
  Description of Artificial Sequence: Synthetic peptide
  Seed: DPWVLLNASWFNSFL
DPYVLLNTSWMNSFL

SEQ ID NO: 253028 - protein, 15 aa, Artificial Sequence
  Description of Artificial Sequence: Synthetic peptide
  Seed: DPWVLLNASWFNSFL
DPYVLLNTSWNNSFL

SEQ ID NO: 253029 - protein, 15 aa, Artificial Sequence
  Description of Artificial Sequence: Synthetic peptide
  Seed: DPWVLLNASWFNSFL
DPYVLLNTSWSNSFL

SEQ ID NO: 253030 - protein, 15 aa, Artificial Sequence
  Description of Artificial Sequence: Synthetic peptide
  Seed: DPWVLLNASWFNSFL
DPYVLLNTSWTNSFL

SEQ ID NO: 253031 - protein, 15 aa, Artificial Sequence
  Description of Artificial Sequence: Synthetic peptide
  Seed: DPWVLLNASWFNSFL
DPYVLLNTSWVNSFL

SEQ ID NO: 253032 - protein, 15 aa, Artificial Sequence
  Description of Artificial Sequence: Synthetic peptide
  Seed: DPWVLLNASWFNSFL
DPYVLLNVSWANSFL

SEQ ID NO: 253033 - protein, 15 aa, Artificial Sequence
  Description of Artificial Sequence: Synthetic peptide
  Seed: DPWVLLNASWFNSFL
DPYVLLNVSWHNSFL

SEQ ID NO: 253034 - protein, 15 aa, Artificial Sequence
  Description of Artificial Sequence: Synthetic peptide
  Seed: DPWVLLNASWFNSFL
DPYVLLNVSWLNSFL

SEQ ID NO: 253035 - protein, 15 aa, Artificial Sequence
  Description of Artificial Sequence: Synthetic peptide
  Seed: DPWVLLNASWFNSFL
DPYVLLNVSWNNSFL

SEQ ID NO: 253036 - protein, 15 aa, Artificial Sequence
  Description of Artificial Sequence: Synthetic peptide
  Seed: DPWVLLNASWFNSFL
DPYVLLNVSWSNSFL

SEQ ID NO: 253037 - protein, 15 aa, Artificial Sequence
  Description of Artificial Sequence: Synthetic peptide
  Seed: DPWVLLNASWFNSFL
DPYVLLNVSWTNSFL

SEQ ID NO: 253038 - protein, 15 aa, Artificial Sequence
  Description of Artificial Sequence: Synthetic peptide
  Seed: DPWVLLNASWFNSFL
DPYVLLNVSWVNSFL

SEQ ID NO: 253039 - protein, 15 aa, Artificial Sequence
  Description of Artificial Sequence: Synthetic peptide
  Seed: DPWVLLNASWFNSFL
DPYVLMNASWANSFL

SEQ ID NO: 253040 - protein, 15 aa, Artificial Sequence
  Description of Artificial Sequence: Synthetic peptide
  Seed: DPWVLLNASWFNSFL
DPYVLMNASWFNSFL

SEQ ID NO: 253041 - protein, 15 aa, Artificial Sequence
  Description of Artificial Sequence: Synthetic peptide
  Seed: DPWVLLNASWFNSFL
DPYVLMNASWGNSFL

SEQ ID NO: 253042 - protein, 15 aa, Artificial Sequence
  Description of Artificial Sequence: Synthetic peptide
  Seed: DPWVLLNASWFNSFL
DPYVLMNASWHNSFL

SEQ ID NO: 253043 - protein, 15 aa, Artificial Sequence
  Description of Artificial Sequence: Synthetic peptide
  Seed: DPWVLLNASWFNSFL
DPYVLMNASWINSFL

SEQ ID NO: 253044 - protein, 15 aa, Artificial Sequence
  Description of Artificial Sequence: Synthetic peptide
  Seed: DPWVLLNASWFNSFL
DPYVLMNASWKNSFL

SEQ ID NO: 253045 - protein, 15 aa, Artificial Sequence
  Description of Artificial Sequence: Synthetic peptide
  Seed: DPWVLLNASWFNSFL
DPYVLMNASWLNSFL

SEQ ID NO: 253046 - protein, 15 aa, Artificial Sequence
  Description of Artificial Sequence: Synthetic peptide
  Seed: DPWVLLNASWFNSFL
DPYVLMNASWMNSFL

SEQ ID NO: 253047 - protein, 15 aa, Artificial Sequence
  Description of Artificial Sequence: Synthetic peptide
  Seed: DPWVLLNASWFNSFL
DPYVLMNASWNNSFL

SEQ ID NO: 253048 - protein, 15 aa, Artificial Sequence
  Description of Artificial Sequence: Synthetic peptide
  Seed: DPWVLLNASWFNSFL
DPYVLMNASWPNSFL

SEQ ID NO: 253049 - protein, 15 aa, Artificial Sequence
  Description of Artificial Sequence: Synthetic peptide
  Seed: DPWVLLNASWFNSFL
DPYVLMNASWQNSFL

SEQ ID NO: 253050 - protein, 15 aa, Artificial Sequence
  Description of Artificial Sequence: Synthetic peptide
  Seed: DPWVLLNASWFNSFL
DPYVLMNASWRNSFL

SEQ ID NO: 253051 - protein, 15 aa, Artificial Sequence
  Description of Artificial Sequence: Synthetic peptide
  Seed: DPWVLLNASWFNSFL
DPYVLMNASWSNSFL

SEQ ID NO: 253052 - protein, 15 aa, Artificial Sequence
  Description of Artificial Sequence: Synthetic peptide
  Seed: DPWVLLNASWFNSFL
DPYVLMNASWTNSFL

SEQ ID NO: 253053 - protein, 15 aa, Artificial Sequence
  Description of Artificial Sequence: Synthetic peptide
  Seed: DPWVLLNASWFNSFL
DPYVLMNASWVNSFL

SEQ ID NO: 253054 - protein, 15 aa, Artificial Sequence
  Description of Artificial Sequence: Synthetic peptide
  Seed: DPWVLLNASWFNSFL
DPYVLMNASWYNSFL

SEQ ID NO: 253055 - protein, 15 aa, Artificial Sequence
  Description of Artificial Sequence: Synthetic peptide
  Seed: DPWVLLNASWFNSFL
DPYVLMNGSWANSFL

SEQ ID NO: 253056 - protein, 15 aa, Artificial Sequence
  Description of Artificial Sequence: Synthetic peptide
  Seed: DPWVLLNASWFNSFL
DPYVLMNGSWFNSFL

SEQ ID NO: 253057 - protein, 15 aa, Artificial Sequence
  Description of Artificial Sequence: Synthetic peptide
  Seed: DPWVLLNASWFNSFL
DPYVLMNGSWGNSFL

SEQ ID NO: 253058 - protein, 15 aa, Artificial Sequence
  Description of Artificial Sequence: Synthetic peptide
  Seed: DPWVLLNASWFNSFL
DPYVLMNGSWHNSFL

SEQ ID NO: 253059 - protein, 15 aa, Artificial Sequence
  Description of Artificial Sequence: Synthetic peptide
  Seed: DPWVLLNASWFNSFL
DPYVLMNGSWINSFL

SEQ ID NO: 253060 - protein, 15 aa, Artificial Sequence
  Description of Artificial Sequence: Synthetic peptide
  Seed: DPWVLLNASWFNSFL
DPYVLMNGSWLNSFL

SEQ ID NO: 253061 - protein, 15 aa, Artificial Sequence
  Description of Artificial Sequence: Synthetic peptide
  Seed: DPWVLLNASWFNSFL
DPYVLMNGSWMNSFL

SEQ ID NO: 253062 - protein, 15 aa, Artificial Sequence
  Description of Artificial Sequence: Synthetic peptide
  Seed: DPWVLLNASWFNSFL
DPYVLMNGSWNNSFL

SEQ ID NO: 253063 - protein, 15 aa, Artificial Sequence
  Description of Artificial Sequence: Synthetic peptide
  Seed: DPWVLLNASWFNSFL
DPYVLMNGSWRNSFL

SEQ ID NO: 253064 - protein, 15 aa, Artificial Sequence
  Description of Artificial Sequence: Synthetic peptide
  Seed: DPWVLLNASWFNSFL
DPYVLMNGSWSNSFL

SEQ ID NO: 253065 - protein, 15 aa, Artificial Sequence
  Description of Artificial Sequence: Synthetic peptide
  Seed: DPWVLLNASWFNSFL
DPYVLMNGSWTNSFL

SEQ ID NO: 253066 - protein, 15 aa, Artificial Sequence
  Description of Artificial Sequence: Synthetic peptide
  Seed: DPWVLLNASWFNSFL
DPYVLMNGSWVNSFL

SEQ ID NO: 253067 - protein, 15 aa, Artificial Sequence
  Description of Artificial Sequence: Synthetic peptide
  Seed: DPWVLLNASWFNSFL
DPYVLMNHSWANSFL

SEQ ID NO: 253068 - protein, 15 aa, Artificial Sequence
  Description of Artificial Sequence: Synthetic peptide
  Seed: DPWVLLNASWFNSFL
DPYVLMNHSWINSFL

SEQ ID NO: 253069 - protein, 15 aa, Artificial Sequence
  Description of Artificial Sequence: Synthetic peptide
  Seed: DPWVLLNASWFNSFL
DPYVLMNHSWLNSFL

SEQ ID NO: 253070 - protein, 15 aa, Artificial Sequence
  Description of Artificial Sequence: Synthetic peptide
  Seed: DPWVLLNASWFNSFL
DPYVLMNHSWVNSFL

SEQ ID NO: 253071 - protein, 15 aa, Artificial Sequence
  Description of Artificial Sequence: Synthetic peptide
  Seed: DPWVLLNASWFNSFL
DPYVLMNISWANSFL

SEQ ID NO: 253072 - protein, 15 aa, Artificial Sequence
  Description of Artificial Sequence: Synthetic peptide
  Seed: DPWVLLNASWFNSFL
DPYVLMNISWHNSFL

SEQ ID NO: 253073 - protein, 15 aa, Artificial Sequence
  Description of Artificial Sequence: Synthetic peptide
  Seed: DPWVLLNASWFNSFL
DPYVLMNISWNNSFL

SEQ ID NO: 253074 - protein, 15 aa, Artificial Sequence
  Description of Artificial Sequence: Synthetic peptide
  Seed: DPWVLLNASWFNSFL
DPYVLMNISWSNSFL

SEQ ID NO: 253075 - protein, 15 aa, Artificial Sequence
  Description of Artificial Sequence: Synthetic peptide
  Seed: DPWVLLNASWFNSFL
DPYVLMNISWTNSFL

SEQ ID NO: 253076 - protein, 15 aa, Artificial Sequence
  Description of Artificial Sequence: Synthetic peptide
  Seed: DPWVLLNASWFNSFL
DPYVLMNLSWNNSFL

SEQ ID NO: 253077 - protein, 15 aa, Artificial Sequence
  Description of Artificial Sequence: Synthetic peptide
  Seed: DPWVLLNASWFNSFL
DPYVLMNMSWANSFL

SEQ ID NO: 253078 - protein, 15 aa, Artificial Sequence
  Description of Artificial Sequence: Synthetic peptide
  Seed: DPWVLLNASWFNSFL
DPYVLMNMSWNNSFL

SEQ ID NO: 253079 - protein, 15 aa, Artificial Sequence
  Description of Artificial Sequence: Synthetic peptide
  Seed: DPWVLLNASWFNSFL
DPYVLMNNSWANSFL

SEQ ID NO: 253080 - protein, 15 aa, Artificial Sequence
  Description of Artificial Sequence: Synthetic peptide
  Seed: DPWVLLNASWFNSFL
DPYVLMNNSWDNSFL

SEQ ID NO: 253081 - protein, 15 aa, Artificial Sequence
  Description of Artificial Sequence: Synthetic peptide
  Seed: DPWVLLNASWFNSFL
DPYVLMNNSWENSFL

SEQ ID NO: 253082 - protein, 15 aa, Artificial Sequence
  Description of Artificial Sequence: Synthetic peptide
  Seed: DPWVLLNASWFNSFL
DPYVLMNNSWINSFL

SEQ ID NO: 253083 - protein, 15 aa, Artificial Sequence
  Description of Artificial Sequence: Synthetic peptide
  Seed: DPWVLLNASWFNSFL
DPYVLMNNSWLNSFL

SEQ ID NO: 253084 - protein, 15 aa, Artificial Sequence
  Description of Artificial Sequence: Synthetic peptide
  Seed: DPWVLLNASWFNSFL
DPYVLMNNSWMNSFL

SEQ ID NO: 253085 - protein, 15 aa, Artificial Sequence
  Description of Artificial Sequence: Synthetic peptide
  Seed: DPWVLLNASWFNSFL
DPYVLMNNSWNNSFL

SEQ ID NO: 253086 - protein, 15 aa, Artificial Sequence
  Description of Artificial Sequence: Synthetic peptide
  Seed: DPWVLLNASWFNSFL
DPYVLMNNSWSNSFL

SEQ ID NO: 253087 - protein, 15 aa, Artificial Sequence
  Description of Artificial Sequence: Synthetic peptide
  Seed: DPWVLLNASWFNSFL
DPYVLMNNSWTNSFL

SEQ ID NO: 253088 - protein, 15 aa, Artificial Sequence
  Description of Artificial Sequence: Synthetic peptide
  Seed: DPWVLLNASWFNSFL
DPYVLMNNSWVNSFL

SEQ ID NO: 253089 - protein, 15 aa, Artificial Sequence
  Description of Artificial Sequence: Synthetic peptide
  Seed: DPWVLLNASWFNSFL
DPYVLMNPSWANSFL

SEQ ID NO: 253090 - protein, 15 aa, Artificial Sequence
  Description of Artificial Sequence: Synthetic peptide
  Seed: DPWVLLNASWFNSFL
DPYVLMNPSWFNSFL

SEQ ID NO: 253091 - protein, 15 aa, Artificial Sequence
  Description of Artificial Sequence: Synthetic peptide
  Seed: DPWVLLNASWFNSFL
DPYVLMNPSWGNSFL

SEQ ID NO: 253092 - protein, 15 aa, Artificial Sequence
  Description of Artificial Sequence: Synthetic peptide
  Seed: DPWVLLNASWFNSFL
DPYVLMNPSWHNSFL

SEQ ID NO: 253093 - protein, 15 aa, Artificial Sequence
  Description of Artificial Sequence: Synthetic peptide
  Seed: DPWVLLNASWFNSFL
DPYVLMNPSWINSFL

SEQ ID NO: 253094 - protein, 15 aa, Artificial Sequence
  Description of Artificial Sequence: Synthetic peptide
  Seed: DPWVLLNASWFNSFL
DPYVLMNPSWLNSFL

SEQ ID NO: 253095 - protein, 15 aa, Artificial Sequence
  Description of Artificial Sequence: Synthetic peptide
  Seed: DPWVLLNASWFNSFL
DPYVLMNPSWMNSFL

SEQ ID NO: 253096 - protein, 15 aa, Artificial Sequence
  Description of Artificial Sequence: Synthetic peptide
  Seed: DPWVLLNASWFNSFL
DPYVLMNPSWNNSFL

SEQ ID NO: 253097 - protein, 15 aa, Artificial Sequence
  Description of Artificial Sequence: Synthetic peptide
  Seed: DPWVLLNASWFNSFL
DPYVLMNPSWQNSFL

SEQ ID NO: 253098 - protein, 15 aa, Artificial Sequence
  Description of Artificial Sequence: Synthetic peptide
  Seed: DPWVLLNASWFNSFL
DPYVLMNPSWSNSFL

SEQ ID NO: 253099 - protein, 15 aa, Artificial Sequence
  Description of Artificial Sequence: Synthetic peptide
  Seed: DPWVLLNASWFNSFL
DPYVLMNPSWTNSFL

SEQ ID NO: 253100 - protein, 15 aa, Artificial Sequence
  Description of Artificial Sequence: Synthetic peptide
  Seed: DPWVLLNASWFNSFL
DPYVLMNPSWVNSFL

SEQ ID NO: 253101 - protein, 15 aa, Artificial Sequence
  Description of Artificial Sequence: Synthetic peptide
  Seed: DPWVLLNASWFNSFL
DPYVLMNQSWLNSFL

SEQ ID NO: 253102 - protein, 15 aa, Artificial Sequence
  Description of Artificial Sequence: Synthetic peptide
  Seed: DPWVLLNASWFNSFL
DPYVLMNSSWANSFL

SEQ ID NO: 253103 - protein, 15 aa, Artificial Sequence
  Description of Artificial Sequence: Synthetic peptide
  Seed: DPWVLLNASWFNSFL
DPYVLMNSSWGNSFL

SEQ ID NO: 253104 - protein, 15 aa, Artificial Sequence
  Description of Artificial Sequence: Synthetic peptide
  Seed: DPWVLLNASWFNSFL
DPYVLMNSSWHNSFL

SEQ ID NO: 253105 - protein, 15 aa, Artificial Sequence
  Description of Artificial Sequence: Synthetic peptide
  Seed: DPWVLLNASWFNSFL
DPYVLMNSSWINSFL

SEQ ID NO: 253106 - protein, 15 aa, Artificial Sequence
  Description of Artificial Sequence: Synthetic peptide
  Seed: DPWVLLNASWFNSFL
DPYVLMNSSWLNSFL

SEQ ID NO: 253107 - protein, 15 aa, Artificial Sequence
  Description of Artificial Sequence: Synthetic peptide
  Seed: DPWVLLNASWFNSFL
DPYVLMNSSWMNSFL

SEQ ID NO: 253108 - protein, 15 aa, Artificial Sequence
  Description of Artificial Sequence: Synthetic peptide
  Seed: DPWVLLNASWFNSFL
DPYVLMNSSWNNSFL

SEQ ID NO: 253109 - protein, 15 aa, Artificial Sequence
  Description of Artificial Sequence: Synthetic peptide
  Seed: DPWVLLNASWFNSFL
DPYVLMNSSWSNSFL

SEQ ID NO: 253110 - protein, 15 aa, Artificial Sequence
  Description of Artificial Sequence: Synthetic peptide
  Seed: DPWVLLNASWFNSFL
DPYVLMNSSWTNSFL

SEQ ID NO: 253111 - protein, 15 aa, Artificial Sequence
  Description of Artificial Sequence: Synthetic peptide
  Seed: DPWVLLNASWFNSFL
DPYVLMNSSWVNSFL

SEQ ID NO: 253112 - protein, 15 aa, Artificial Sequence
  Description of Artificial Sequence: Synthetic peptide
  Seed: DPWVLLNASWFNSFL
DPYVLMNTSWANSFL

SEQ ID NO: 253113 - protein, 15 aa, Artificial Sequence
  Description of Artificial Sequence: Synthetic peptide
  Seed: DPWVLLNASWFNSFL
DPYVLMNTSWDNSFL

SEQ ID NO: 253114 - protein, 15 aa, Artificial Sequence
  Description of Artificial Sequence: Synthetic peptide
  Seed: DPWVLLNASWFNSFL
DPYVLMNTSWHNSFL

SEQ ID NO: 253115 - protein, 15 aa, Artificial Sequence
  Description of Artificial Sequence: Synthetic peptide
  Seed: DPWVLLNASWFNSFL
DPYVLMNTSWINSFL

SEQ ID NO: 253116 - protein, 15 aa, Artificial Sequence
  Description of Artificial Sequence: Synthetic peptide
  Seed: DPWVLLNASWFNSFL
DPYVLMNTSWLNSFL

SEQ ID NO: 253117 - protein, 15 aa, Artificial Sequence
  Description of Artificial Sequence: Synthetic peptide
  Seed: DPWVLLNASWFNSFL
DPYVLMNTSWMNSFL

SEQ ID NO: 253118 - protein, 15 aa, Artificial Sequence
  Description of Artificial Sequence: Synthetic peptide
  Seed: DPWVLLNASWFNSFL
DPYVLMNTSWNNSFL

SEQ ID NO: 253119 - protein, 15 aa, Artificial Sequence
  Description of Artificial Sequence: Synthetic peptide
  Seed: DPWVLLNASWFNSFL
DPYVLMNTSWSNSFL

SEQ ID NO: 253120 - protein, 15 aa, Artificial Sequence
  Description of Artificial Sequence: Synthetic peptide
  Seed: DPWVLLNASWFNSFL
DPYVLMNTSWTNSFL

SEQ ID NO: 253121 - protein, 15 aa, Artificial Sequence
  Description of Artificial Sequence: Synthetic peptide
  Seed: DPWVLLNASWFNSFL
DPYVLMNTSWVNSFL

SEQ ID NO: 253122 - protein, 15 aa, Artificial Sequence
  Description of Artificial Sequence: Synthetic peptide
  Seed: DPWVLLNASWFNSFL
DPYVLMNVSWANSFL

SEQ ID NO: 253123 - protein, 15 aa, Artificial Sequence
  Description of Artificial Sequence: Synthetic peptide
  Seed: DPWVLLNASWFNSFL
DPYVLMNVSWHNSFL

SEQ ID NO: 253124 - protein, 15 aa, Artificial Sequence
  Description of Artificial Sequence: Synthetic peptide
  Seed: DPWVLLNASWFNSFL
DPYVLMNVSWLNSFL

SEQ ID NO: 253125 - protein, 15 aa, Artificial Sequence
  Description of Artificial Sequence: Synthetic peptide
  Seed: DPWVLLNASWFNSFL
DPYVLMNVSWMNSFL

SEQ ID NO: 253126 - protein, 15 aa, Artificial Sequence
  Description of Artificial Sequence: Synthetic peptide
  Seed: DPWVLLNASWFNSFL
DPYVLMNVSWNNSFL

SEQ ID NO: 253127 - protein, 15 aa, Artificial Sequence
  Description of Artificial Sequence: Synthetic peptide
  Seed: DPWVLLNASWFNSFL
DPYVLMNVSWSNSFL

SEQ ID NO: 253128 - protein, 15 aa, Artificial Sequence
  Description of Artificial Sequence: Synthetic peptide
  Seed: DPWVLLNASWFNSFL
DPYVLMNVSWTNSFL

SEQ ID NO: 253129 - protein, 15 aa, Artificial Sequence
  Description of Artificial Sequence: Synthetic peptide
  Seed: DPWVLLNASWFNSFL
DPYVLMNVSWVNSFL

SEQ ID NO: 253130 - protein, 15 aa, Artificial Sequence
  Description of Artificial Sequence: Synthetic peptide
  Seed: DPWVLLNASWFNSFL
DPYVLNNASWANSFL

SEQ ID NO: 253131 - protein, 15 aa, Artificial Sequence
  Description of Artificial Sequence: Synthetic peptide
  Seed: DPWVLLNASWFNSFL
DPYVLNNASWINSFL

SEQ ID NO: 253132 - protein, 15 aa, Artificial Sequence
  Description of Artificial Sequence: Synthetic peptide
  Seed: DPWVLLNASWFNSFL
DPYVLNNASWLNSFL

SEQ ID NO: 253133 - protein, 15 aa, Artificial Sequence
  Description of Artificial Sequence: Synthetic peptide
  Seed: DPWVLLNASWFNSFL
DPYVLNNASWVNSFL

SEQ ID NO: 253134 - protein, 15 aa, Artificial Sequence
  Description of Artificial Sequence: Synthetic peptide
  Seed: DPWVLLNASWFNSFL
DPYVLQNASWANSFL

SEQ ID NO: 253135 - protein, 15 aa, Artificial Sequence
  Description of Artificial Sequence: Synthetic peptide
  Seed: DPWVLLNASWFNSFL
DPYVLQNASWINSFL

SEQ ID NO: 253136 - protein, 15 aa, Artificial Sequence
  Description of Artificial Sequence: Synthetic peptide
  Seed: DPWVLLNASWFNSFL
DPYVLQNASWLNSFL

SEQ ID NO: 253137 - protein, 15 aa, Artificial Sequence
  Description of Artificial Sequence: Synthetic peptide
  Seed: DPWVLLNASWFNSFL
DPYVLQNASWMNSFL

SEQ ID NO: 253138 - protein, 15 aa, Artificial Sequence
  Description of Artificial Sequence: Synthetic peptide
  Seed: DPWVLLNASWFNSFL
DPYVLQNASWNNSFL

SEQ ID NO: 253139 - protein, 15 aa, Artificial Sequence
  Description of Artificial Sequence: Synthetic peptide
  Seed: DPWVLLNASWFNSFL
DPYVLQNASWSNSFL

SEQ ID NO: 253140 - protein, 15 aa, Artificial Sequence
  Description of Artificial Sequence: Synthetic peptide
  Seed: DPWVLLNASWFNSFL
DPYVLQNASWTNSFL

SEQ ID NO: 253141 - protein, 15 aa, Artificial Sequence
  Description of Artificial Sequence: Synthetic peptide
  Seed: DPWVLLNASWFNSFL
DPYVLQNASWVNSFL

SEQ ID NO: 253142 - protein, 15 aa, Artificial Sequence
  Description of Artificial Sequence: Synthetic peptide
  Seed: DPWVLLNASWFNSFL
DPYVLQNGSWANSFL

SEQ ID NO: 253143 - protein, 15 aa, Artificial Sequence
  Description of Artificial Sequence: Synthetic peptide
  Seed: DPWVLLNASWFNSFL
DPYVLQNGSWINSFL

SEQ ID NO: 253144 - protein, 15 aa, Artificial Sequence
  Description of Artificial Sequence: Synthetic peptide
  Seed: DPWVLLNASWFNSFL
DPYVLQNGSWLNSFL

SEQ ID NO: 253145 - protein, 15 aa, Artificial Sequence
  Description of Artificial Sequence: Synthetic peptide
  Seed: DPWVLLNASWFNSFL
DPYVLQNGSWMNSFL

SEQ ID NO: 253146 - protein, 15 aa, Artificial Sequence
  Description of Artificial Sequence: Synthetic peptide
  Seed: DPWVLLNASWFNSFL
DPYVLQNGSWSNSFL

SEQ ID NO: 253147 - protein, 15 aa, Artificial Sequence
  Description of Artificial Sequence: Synthetic peptide
  Seed: DPWVLLNASWFNSFL
DPYVLQNGSWTNSFL

SEQ ID NO: 253148 - protein, 15 aa, Artificial Sequence
  Description of Artificial Sequence: Synthetic peptide
  Seed: DPWVLLNASWFNSFL
DPYVLQNGSWVNSFL

SEQ ID NO: 253149 - protein, 15 aa, Artificial Sequence
  Description of Artificial Sequence: Synthetic peptide
  Seed: DPWVLLNASWFNSFL
DPYVLQNNSWANSFL

SEQ ID NO: 253150 - protein, 15 aa, Artificial Sequence
  Description of Artificial Sequence: Synthetic peptide
  Seed: DPWVLLNASWFNSFL
DPYVLQNNSWINSFL

SEQ ID NO: 253151 - protein, 15 aa, Artificial Sequence
  Description of Artificial Sequence: Synthetic peptide
  Seed: DPWVLLNASWFNSFL
DPYVLQNNSWLNSFL

SEQ ID NO: 253152 - protein, 15 aa, Artificial Sequence
  Description of Artificial Sequence: Synthetic peptide
  Seed: DPWVLLNASWFNSFL
DPYVLQNNSWVNSFL

SEQ ID NO: 253153 - protein, 15 aa, Artificial Sequence
  Description of Artificial Sequence: Synthetic peptide
  Seed: DPWVLLNASWFNSFL
DPYVLQNPSWANSFL

SEQ ID NO: 253154 - protein, 15 aa, Artificial Sequence
  Description of Artificial Sequence: Synthetic peptide
  Seed: DPWVLLNASWFNSFL
DPYVLQNPSWINSFL

SEQ ID NO: 253155 - protein, 15 aa, Artificial Sequence
  Description of Artificial Sequence: Synthetic peptide
  Seed: DPWVLLNASWFNSFL
DPYVLQNPSWLNSFL

SEQ ID NO: 253156 - protein, 15 aa, Artificial Sequence
  Description of Artificial Sequence: Synthetic peptide
  Seed: DPWVLLNASWFNSFL
DPYVLQNPSWMNSFL

SEQ ID NO: 253157 - protein, 15 aa, Artificial Sequence
  Description of Artificial Sequence: Synthetic peptide
  Seed: DPWVLLNASWFNSFL
DPYVLQNPSWVNSFL

SEQ ID NO: 253158 - protein, 15 aa, Artificial Sequence
  Description of Artificial Sequence: Synthetic peptide
  Seed: DPWVLLNASWFNSFL
DPYVLQNSSWANSFL

SEQ ID NO: 253159 - protein, 15 aa, Artificial Sequence
  Description of Artificial Sequence: Synthetic peptide
  Seed: DPWVLLNASWFNSFL
DPYVLQNSSWINSFL

SEQ ID NO: 253160 - protein, 15 aa, Artificial Sequence
  Description of Artificial Sequence: Synthetic peptide
  Seed: DPWVLLNASWFNSFL
DPYVLQNSSWLNSFL

SEQ ID NO: 253161 - protein, 15 aa, Artificial Sequence
  Description of Artificial Sequence: Synthetic peptide
  Seed: DPWVLLNASWFNSFL
DPYVLQNSSWMNSFL

SEQ ID NO: 253162 - protein, 15 aa, Artificial Sequence
  Description of Artificial Sequence: Synthetic peptide
  Seed: DPWVLLNASWFNSFL
DPYVLQNSSWSNSFL

SEQ ID NO: 253163 - protein, 15 aa, Artificial Sequence
  Description of Artificial Sequence: Synthetic peptide
  Seed: DPWVLLNASWFNSFL
DPYVLQNSSWTNSFL

SEQ ID NO: 253164 - protein, 15 aa, Artificial Sequence
  Description of Artificial Sequence: Synthetic peptide
  Seed: DPWVLLNASWFNSFL
DPYVLQNSSWVNSFL

SEQ ID NO: 253165 - protein, 15 aa, Artificial Sequence
  Description of Artificial Sequence: Synthetic peptide
  Seed: DPWVLLNASWFNSFL
DPYVLQNTSWINSFL

SEQ ID NO: 253166 - protein, 15 aa, Artificial Sequence
  Description of Artificial Sequence: Synthetic peptide
  Seed: DPWVLLNASWFNSFL
DPYVLQNTSWLNSFL

SEQ ID NO: 253167 - protein, 15 aa, Artificial Sequence
  Description of Artificial Sequence: Synthetic peptide
  Seed: DPWVLLNASWFNSFL
DPYVLQNTSWVNSFL

SEQ ID NO: 253168 - protein, 15 aa, Artificial Sequence
  Description of Artificial Sequence: Synthetic peptide
  Seed: DPWVLLNASWFNSFL
DPYVLSNASWANSFL

SEQ ID NO: 253169 - protein, 15 aa, Artificial Sequence
  Description of Artificial Sequence: Synthetic peptide
  Seed: DPWVLLNASWFNSFL
DPYVLSNASWFNSFL

SEQ ID NO: 253170 - protein, 15 aa, Artificial Sequence
  Description of Artificial Sequence: Synthetic peptide
  Seed: DPWVLLNASWFNSFL
DPYVLSNASWINSFL

SEQ ID NO: 253171 - protein, 15 aa, Artificial Sequence
  Description of Artificial Sequence: Synthetic peptide
  Seed: DPWVLLNASWFNSFL
DPYVLSNASWLNSFL

SEQ ID NO: 253172 - protein, 15 aa, Artificial Sequence
  Description of Artificial Sequence: Synthetic peptide
  Seed: DPWVLLNASWFNSFL
DPYVLSNASWMNSFL

SEQ ID NO: 253173 - protein, 15 aa, Artificial Sequence
  Description of Artificial Sequence: Synthetic peptide
  Seed: DPWVLLNASWFNSFL
DPYVLSNASWNNSFL

SEQ ID NO: 253174 - protein, 15 aa, Artificial Sequence
  Description of Artificial Sequence: Synthetic peptide
  Seed: DPWVLLNASWFNSFL
DPYVLSNASWSNSFL

SEQ ID NO: 253175 - protein, 15 aa, Artificial Sequence
  Description of Artificial Sequence: Synthetic peptide
  Seed: DPWVLLNASWFNSFL
DPYVLSNASWTNSFL

SEQ ID NO: 253176 - protein, 15 aa, Artificial Sequence
  Description of Artificial Sequence: Synthetic peptide
  Seed: DPWVLLNASWFNSFL
DPYVLSNASWVNSFL

SEQ ID NO: 253177 - protein, 15 aa, Artificial Sequence
  Description of Artificial Sequence: Synthetic peptide
  Seed: DPWVLLNASWFNSFL
DPYVLSNGSWANSFL

SEQ ID NO: 253178 - protein, 15 aa, Artificial Sequence
  Description of Artificial Sequence: Synthetic peptide
  Seed: DPWVLLNASWFNSFL
DPYVLSNGSWINSFL

SEQ ID NO: 253179 - protein, 15 aa, Artificial Sequence
  Description of Artificial Sequence: Synthetic peptide
  Seed: DPWVLLNASWFNSFL
DPYVLSNGSWLNSFL

SEQ ID NO: 253180 - protein, 15 aa, Artificial Sequence
  Description of Artificial Sequence: Synthetic peptide
  Seed: DPWVLLNASWFNSFL
DPYVLSNGSWMNSFL

SEQ ID NO: 253181 - protein, 15 aa, Artificial Sequence
  Description of Artificial Sequence: Synthetic peptide
  Seed: DPWVLLNASWFNSFL
DPYVLSNGSWVNSFL

SEQ ID NO: 253182 - protein, 15 aa, Artificial Sequence
  Description of Artificial Sequence: Synthetic peptide
  Seed: DPWVLLNASWFNSFL
DPYVLSNNSWANSFL

SEQ ID NO: 253183 - protein, 15 aa, Artificial Sequence
  Description of Artificial Sequence: Synthetic peptide
  Seed: DPWVLLNASWFNSFL
DPYVLSNNSWLNSFL

SEQ ID NO: 253184 - protein, 15 aa, Artificial Sequence
  Description of Artificial Sequence: Synthetic peptide
  Seed: DPWVLLNASWFNSFL
DPYVLSNPSWANSFL

SEQ ID NO: 253185 - protein, 15 aa, Artificial Sequence
  Description of Artificial Sequence: Synthetic peptide
  Seed: DPWVLLNASWFNSFL
DPYVLSNPSWINSFL

SEQ ID NO: 253186 - protein, 15 aa, Artificial Sequence
  Description of Artificial Sequence: Synthetic peptide
  Seed: DPWVLLNASWFNSFL
DPYVLSNPSWLNSFL

SEQ ID NO: 253187 - protein, 15 aa, Artificial Sequence
  Description of Artificial Sequence: Synthetic peptide
  Seed: DPWVLLNASWFNSFL
DPYVLSNPSWVNSFL

SEQ ID NO: 253188 - protein, 15 aa, Artificial Sequence
  Description of Artificial Sequence: Synthetic peptide
  Seed: DPWVLLNASWFNSFL
DPYVLSNSSWANSFL

SEQ ID NO: 253189 - protein, 15 aa, Artificial Sequence
  Description of Artificial Sequence: Synthetic peptide
  Seed: DPWVLLNASWFNSFL
DPYVLSNSSWINSFL

SEQ ID NO: 253190 - protein, 15 aa, Artificial Sequence
  Description of Artificial Sequence: Synthetic peptide
  Seed: DPWVLLNASWFNSFL
DPYVLSNSSWLNSFL

SEQ ID NO: 253191 - protein, 15 aa, Artificial Sequence
  Description of Artificial Sequence: Synthetic peptide
  Seed: DPWVLLNASWFNSFL
DPYVLSNSSWMNSFL

SEQ ID NO: 253192 - protein, 15 aa, Artificial Sequence
  Description of Artificial Sequence: Synthetic peptide
  Seed: DPWVLLNASWFNSFL
DPYVLSNSSWVNSFL

SEQ ID NO: 253193 - protein, 15 aa, Artificial Sequence
  Description of Artificial Sequence: Synthetic peptide
  Seed: DPWVLLNASWFNSFL
DPYVLSNTSWINSFL

SEQ ID NO: 253194 - protein, 15 aa, Artificial Sequence
  Description of Artificial Sequence: Synthetic peptide
  Seed: DPWVLLNASWFNSFL
DPYVLTNASWANSFL

SEQ ID NO: 253195 - protein, 15 aa, Artificial Sequence
  Description of Artificial Sequence: Synthetic peptide
  Seed: DPWVLLNASWFNSFL
DPYVLTNASWFNSFL

SEQ ID NO: 253196 - protein, 15 aa, Artificial Sequence
  Description of Artificial Sequence: Synthetic peptide
  Seed: DPWVLLNASWFNSFL
DPYVLTNASWINSFL

SEQ ID NO: 253197 - protein, 15 aa, Artificial Sequence
  Description of Artificial Sequence: Synthetic peptide
  Seed: DPWVLLNASWFNSFL
DPYVLTNASWLNSFL

SEQ ID NO: 253198 - protein, 15 aa, Artificial Sequence
  Description of Artificial Sequence: Synthetic peptide
  Seed: DPWVLLNASWFNSFL
DPYVLTNASWMNSFL

SEQ ID NO: 253199 - protein, 15 aa, Artificial Sequence
  Description of Artificial Sequence: Synthetic peptide
  Seed: DPWVLLNASWFNSFL
DPYVLTNASWNNSFL

SEQ ID NO: 253200 - protein, 15 aa, Artificial Sequence
  Description of Artificial Sequence: Synthetic peptide
  Seed: DPWVLLNASWFNSFL
DPYVLTNASWSNSFL

SEQ ID NO: 253201 - protein, 15 aa, Artificial Sequence
  Description of Artificial Sequence: Synthetic peptide
  Seed: DPWVLLNASWFNSFL
DPYVLTNASWTNSFL

SEQ ID NO: 253202 - protein, 15 aa, Artificial Sequence
  Description of Artificial Sequence: Synthetic peptide
  Seed: DPWVLLNASWFNSFL
DPYVLTNASWVNSFL

SEQ ID NO: 253203 - protein, 15 aa, Artificial Sequence
  Description of Artificial Sequence: Synthetic peptide
  Seed: DPWVLLNASWFNSFL
DPYVLTNGSWANSFL

SEQ ID NO: 253204 - protein, 15 aa, Artificial Sequence
  Description of Artificial Sequence: Synthetic peptide
  Seed: DPWVLLNASWFNSFL
DPYVLTNGSWINSFL

SEQ ID NO: 253205 - protein, 15 aa, Artificial Sequence
  Description of Artificial Sequence: Synthetic peptide
  Seed: DPWVLLNASWFNSFL
DPYVLTNGSWLNSFL

SEQ ID NO: 253206 - protein, 15 aa, Artificial Sequence
  Description of Artificial Sequence: Synthetic peptide
  Seed: DPWVLLNASWFNSFL
DPYVLTNGSWVNSFL

SEQ ID NO: 253207 - protein, 15 aa, Artificial Sequence
  Description of Artificial Sequence: Synthetic peptide
  Seed: DPWVLLNASWFNSFL
DPYVLTNNSWINSFL

SEQ ID NO: 253208 - protein, 15 aa, Artificial Sequence
  Description of Artificial Sequence: Synthetic peptide
  Seed: DPWVLLNASWFNSFL
DPYVLTNPSWINSFL

SEQ ID NO: 253209 - protein, 15 aa, Artificial Sequence
  Description of Artificial Sequence: Synthetic peptide
  Seed: DPWVLLNASWFNSFL
DPYVLTNPSWLNSFL

SEQ ID NO: 253210 - protein, 15 aa, Artificial Sequence
  Description of Artificial Sequence: Synthetic peptide
  Seed: DPWVLLNASWFNSFL
DPYVLTNPSWVNSFL

SEQ ID NO: 253211 - protein, 15 aa, Artificial Sequence
  Description of Artificial Sequence: Synthetic peptide
  Seed: DPWVLLNASWFNSFL
DPYVLTNSSWFNSFL

SEQ ID NO: 253212 - protein, 15 aa, Artificial Sequence
  Description of Artificial Sequence: Synthetic peptide
  Seed: DPWVLLNASWFNSFL
DPYVLTNSSWINSFL

SEQ ID NO: 253213 - protein, 15 aa, Artificial Sequence
  Description of Artificial Sequence: Synthetic peptide
  Seed: DPWVLLNASWFNSFL
DPYVLTNSSWLNSFL

SEQ ID NO: 253214 - protein, 15 aa, Artificial Sequence
  Description of Artificial Sequence: Synthetic peptide
  Seed: DPWVLLNASWFNSFL
DPYVLTNSSWMNSFL

SEQ ID NO: 253215 - protein, 15 aa, Artificial Sequence
  Description of Artificial Sequence: Synthetic peptide
  Seed: DPWVLLNASWFNSFL
DPYVLTNSSWVNSFL

SEQ ID NO: 253216 - protein, 15 aa, Artificial Sequence
  Description of Artificial Sequence: Synthetic peptide
  Seed: DPWVLLNASWFNSFL
DPYVLTNTSWINSFL

SEQ ID NO: 253217 - protein, 15 aa, Artificial Sequence
  Description of Artificial Sequence: Synthetic peptide
  Seed: DPWVLLNASWFNSFL
DPYVLTNTSWLNSFL

SEQ ID NO: 253218 - protein, 15 aa, Artificial Sequence
  Description of Artificial Sequence: Synthetic peptide
  Seed: DPWVLLNASWFNSFL
DPYVLVNASWANSFL

SEQ ID NO: 253219 - protein, 15 aa, Artificial Sequence
  Description of Artificial Sequence: Synthetic peptide
  Seed: DPWVLLNASWFNSFL
DPYVLVNASWHNSFL

SEQ ID NO: 253220 - protein, 15 aa, Artificial Sequence
  Description of Artificial Sequence: Synthetic peptide
  Seed: DPWVLLNASWFNSFL
DPYVLVNASWINSFL

SEQ ID NO: 253221 - protein, 15 aa, Artificial Sequence
  Description of Artificial Sequence: Synthetic peptide
  Seed: DPWVLLNASWFNSFL
DPYVLVNASWLNSFL

SEQ ID NO: 253222 - protein, 15 aa, Artificial Sequence
  Description of Artificial Sequence: Synthetic peptide
  Seed: DPWVLLNASWFNSFL
DPYVLVNASWMNSFL

SEQ ID NO: 253223 - protein, 15 aa, Artificial Sequence
  Description of Artificial Sequence: Synthetic peptide
  Seed: DPWVLLNASWFNSFL
DPYVLVNASWNNSFL

SEQ ID NO: 253224 - protein, 15 aa, Artificial Sequence
  Description of Artificial Sequence: Synthetic peptide
  Seed: DPWVLLNASWFNSFL
DPYVLVNASWSNSFL

SEQ ID NO: 253225 - protein, 15 aa, Artificial Sequence
  Description of Artificial Sequence: Synthetic peptide
  Seed: DPWVLLNASWFNSFL
DPYVLVNASWTNSFL

SEQ ID NO: 253226 - protein, 15 aa, Artificial Sequence
  Description of Artificial Sequence: Synthetic peptide
  Seed: DPWVLLNASWFNSFL
DPYVLVNASWVNSFL

SEQ ID NO: 253227 - protein, 15 aa, Artificial Sequence
  Description of Artificial Sequence: Synthetic peptide
  Seed: DPWVLLNASWFNSFL
DPYVLVNGSWANSFL

SEQ ID NO: 253228 - protein, 15 aa, Artificial Sequence
  Description of Artificial Sequence: Synthetic peptide
  Seed: DPWVLLNASWFNSFL
DPYVLVNGSWINSFL

SEQ ID NO: 253229 - protein, 15 aa, Artificial Sequence
  Description of Artificial Sequence: Synthetic peptide
  Seed: DPWVLLNASWFNSFL
DPYVLVNGSWLNSFL

SEQ ID NO: 253230 - protein, 15 aa, Artificial Sequence
  Description of Artificial Sequence: Synthetic peptide
  Seed: DPWVLLNASWFNSFL
DPYVLVNGSWMNSFL

SEQ ID NO: 253231 - protein, 15 aa, Artificial Sequence
  Description of Artificial Sequence: Synthetic peptide
  Seed: DPWVLLNASWFNSFL
DPYVLVNGSWSNSFL

SEQ ID NO: 253232 - protein, 15 aa, Artificial Sequence
  Description of Artificial Sequence: Synthetic peptide
  Seed: DPWVLLNASWFNSFL
DPYVLVNGSWTNSFL

SEQ ID NO: 253233 - protein, 15 aa, Artificial Sequence
  Description of Artificial Sequence: Synthetic peptide
  Seed: DPWVLLNASWFNSFL
DPYVLVNGSWVNSFL

SEQ ID NO: 253234 - protein, 15 aa, Artificial Sequence
  Description of Artificial Sequence: Synthetic peptide
  Seed: DPWVLLNASWFNSFL
DPYVLVNISWNNSFL

SEQ ID NO: 253235 - protein, 15 aa, Artificial Sequence
  Description of Artificial Sequence: Synthetic peptide
  Seed: DPWVLLNASWFNSFL
DPYVLVNNSWANSFL

SEQ ID NO: 253236 - protein, 15 aa, Artificial Sequence
  Description of Artificial Sequence: Synthetic peptide
  Seed: DPWVLLNASWFNSFL
DPYVLVNNSWDNSFL

SEQ ID NO: 253237 - protein, 15 aa, Artificial Sequence
  Description of Artificial Sequence: Synthetic peptide
  Seed: DPWVLLNASWFNSFL
DPYVLVNNSWENSFL

SEQ ID NO: 253238 - protein, 15 aa, Artificial Sequence
  Description of Artificial Sequence: Synthetic peptide
  Seed: DPWVLLNASWFNSFL
DPYVLVNNSWINSFL

SEQ ID NO: 253239 - protein, 15 aa, Artificial Sequence
  Description of Artificial Sequence: Synthetic peptide
  Seed: DPWVLLNASWFNSFL
DPYVLVNNSWLNSFL

SEQ ID NO: 253240 - protein, 15 aa, Artificial Sequence
  Description of Artificial Sequence: Synthetic peptide
  Seed: DPWVLLNASWFNSFL
DPYVLVNNSWSNSFL

SEQ ID NO: 253241 - protein, 15 aa, Artificial Sequence
  Description of Artificial Sequence: Synthetic peptide
  Seed: DPWVLLNASWFNSFL
DPYVLVNNSWVNSFL

SEQ ID NO: 253242 - protein, 15 aa, Artificial Sequence
  Description of Artificial Sequence: Synthetic peptide
  Seed: DPWVLLNASWFNSFL
DPYVLVNPSWANSFL

SEQ ID NO: 253243 - protein, 15 aa, Artificial Sequence
  Description of Artificial Sequence: Synthetic peptide
  Seed: DPWVLLNASWFNSFL
DPYVLVNPSWINSFL

SEQ ID NO: 253244 - protein, 15 aa, Artificial Sequence
  Description of Artificial Sequence: Synthetic peptide
  Seed: DPWVLLNASWFNSFL
DPYVLVNPSWLNSFL

SEQ ID NO: 253245 - protein, 15 aa, Artificial Sequence
  Description of Artificial Sequence: Synthetic peptide
  Seed: DPWVLLNASWFNSFL
DPYVLVNPSWMNSFL

SEQ ID NO: 253246 - protein, 15 aa, Artificial Sequence
  Description of Artificial Sequence: Synthetic peptide
  Seed: DPWVLLNASWFNSFL
DPYVLVNPSWNNSFL

SEQ ID NO: 253247 - protein, 15 aa, Artificial Sequence
  Description of Artificial Sequence: Synthetic peptide
  Seed: DPWVLLNASWFNSFL
DPYVLVNPSWSNSFL

SEQ ID NO: 253248 - protein, 15 aa, Artificial Sequence
  Description of Artificial Sequence: Synthetic peptide
  Seed: DPWVLLNASWFNSFL
DPYVLVNPSWTNSFL

SEQ ID NO: 253249 - protein, 15 aa, Artificial Sequence
  Description of Artificial Sequence: Synthetic peptide
  Seed: DPWVLLNASWFNSFL
DPYVLVNPSWVNSFL

SEQ ID NO: 253250 - protein, 15 aa, Artificial Sequence
  Description of Artificial Sequence: Synthetic peptide
  Seed: DPWVLLNASWFNSFL
DPYVLVNSSWANSFL

SEQ ID NO: 253251 - protein, 15 aa, Artificial Sequence
  Description of Artificial Sequence: Synthetic peptide
  Seed: DPWVLLNASWFNSFL
DPYVLVNSSWINSFL

SEQ ID NO: 253252 - protein, 15 aa, Artificial Sequence
  Description of Artificial Sequence: Synthetic peptide
  Seed: DPWVLLNASWFNSFL
DPYVLVNSSWLNSFL

SEQ ID NO: 253253 - protein, 15 aa, Artificial Sequence
  Description of Artificial Sequence: Synthetic peptide
  Seed: DPWVLLNASWFNSFL
DPYVLVNSSWMNSFL

SEQ ID NO: 253254 - protein, 15 aa, Artificial Sequence
  Description of Artificial Sequence: Synthetic peptide
  Seed: DPWVLLNASWFNSFL
DPYVLVNSSWNNSFL

SEQ ID NO: 253255 - protein, 15 aa, Artificial Sequence
  Description of Artificial Sequence: Synthetic peptide
  Seed: DPWVLLNASWFNSFL
DPYVLVNSSWSNSFL

SEQ ID NO: 253256 - protein, 15 aa, Artificial Sequence
  Description of Artificial Sequence: Synthetic peptide
  Seed: DPWVLLNASWFNSFL
DPYVLVNSSWTNSFL

SEQ ID NO: 253257 - protein, 15 aa, Artificial Sequence
  Description of Artificial Sequence: Synthetic peptide
  Seed: DPWVLLNASWFNSFL
DPYVLVNSSWVNSFL

SEQ ID NO: 253258 - protein, 15 aa, Artificial Sequence
  Description of Artificial Sequence: Synthetic peptide
  Seed: DPWVLLNASWFNSFL
DPYVLVNTSWANSFL

SEQ ID NO: 253259 - protein, 15 aa, Artificial Sequence
  Description of Artificial Sequence: Synthetic peptide
  Seed: DPWVLLNASWFNSFL
DPYVLVNTSWLNSFL

SEQ ID NO: 253260 - protein, 15 aa, Artificial Sequence
  Description of Artificial Sequence: Synthetic peptide
  Seed: DPWVLLNASWFNSFL
DPYVLVNTSWNNSFL

SEQ ID NO: 253261 - protein, 15 aa, Artificial Sequence
  Description of Artificial Sequence: Synthetic peptide
  Seed: DPWVLLNASWFNSFL
DPYVLVNTSWSNSFL

SEQ ID NO: 253262 - protein, 15 aa, Artificial Sequence
  Description of Artificial Sequence: Synthetic peptide
  Seed: DPWVLLNASWFNSFL
DPYVLVNTSWVNSFL

SEQ ID NO: 253263 - protein, 15 aa, Artificial Sequence
  Description of Artificial Sequence: Synthetic peptide
  Seed: DPWVLLNASWFNSFL
DPYVLVNVSWNNSFL

SEQ ID NO: 253264 - protein, 15 aa, Artificial Sequence
  Description of Artificial Sequence: Synthetic peptide
  Seed: EECLINDPWVLLNAS
EECCINIPAVLANAS

SEQ ID NO: 253265 - protein, 15 aa, Artificial Sequence
  Description of Artificial Sequence: Synthetic peptide
  Seed: EECLINDPWVLLNAS
EECCINIPAVLINAS

SEQ ID NO: 253266 - protein, 15 aa, Artificial Sequence
  Description of Artificial Sequence: Synthetic peptide
  Seed: EECLINDPWVLLNAS
EECCINIPAVLLNAS

SEQ ID NO: 253267 - protein, 15 aa, Artificial Sequence
  Description of Artificial Sequence: Synthetic peptide
  Seed: EECLINDPWVLLNAS
EECCINIPAVLVNAS

SEQ ID NO: 253268 - protein, 15 aa, Artificial Sequence
  Description of Artificial Sequence: Synthetic peptide
  Seed: EECLINDPWVLLNAS
EECCINIPGVLVNAS

SEQ ID NO: 253269 - protein, 15 aa, Artificial Sequence
  Description of Artificial Sequence: Synthetic peptide
  Seed: EECLINDPWVLLNAS
EECCINLPAVLANAS

SEQ ID NO: 253270 - protein, 15 aa, Artificial Sequence
  Description of Artificial Sequence: Synthetic peptide
  Seed: EECLINDPWVLLNAS
EECCINLPAVLINAS

SEQ ID NO: 253271 - protein, 15 aa, Artificial Sequence
  Description of Artificial Sequence: Synthetic peptide
  Seed: EECLINDPWVLLNAS
EECCINLPAVLLNAS

SEQ ID NO: 253272 - protein, 15 aa, Artificial Sequence
  Description of Artificial Sequence: Synthetic peptide
  Seed: EECLINDPWVLLNAS
EECCINLPAVLMNAS

SEQ ID NO: 253273 - protein, 15 aa, Artificial Sequence
  Description of Artificial Sequence: Synthetic peptide
  Seed: EECLINDPWVLLNAS
EECCINLPAVLSNAS

SEQ ID NO: 253274 - protein, 15 aa, Artificial Sequence
  Description of Artificial Sequence: Synthetic peptide
  Seed: EECLINDPWVLLNAS
EECCINLPAVLTNAS

SEQ ID NO: 253275 - protein, 15 aa, Artificial Sequence
  Description of Artificial Sequence: Synthetic peptide
  Seed: EECLINDPWVLLNAS
EECCINLPAVLVNAS

SEQ ID NO: 253276 - protein, 15 aa, Artificial Sequence
  Description of Artificial Sequence: Synthetic peptide
  Seed: EECLINDPWVLLNAS
EECCINLPGVLANAS

SEQ ID NO: 253277 - protein, 15 aa, Artificial Sequence
  Description of Artificial Sequence: Synthetic peptide
  Seed: EECLINDPWVLLNAS
EECCINLPGVLINAS

SEQ ID NO: 253278 - protein, 15 aa, Artificial Sequence
  Description of Artificial Sequence: Synthetic peptide
  Seed: EECLINDPWVLLNAS
EECCINLPGVLLNAS

SEQ ID NO: 253279 - protein, 15 aa, Artificial Sequence
  Description of Artificial Sequence: Synthetic peptide
  Seed: EECLINDPWVLLNAS
EECCINLPGVLMNAS

SEQ ID NO: 253280 - protein, 15 aa, Artificial Sequence
  Description of Artificial Sequence: Synthetic peptide
  Seed: EECLINDPWVLLNAS
EECCINLPGVLTNAS

SEQ ID NO: 253281 - protein, 15 aa, Artificial Sequence
  Description of Artificial Sequence: Synthetic peptide
  Seed: EECLINDPWVLLNAS
EECCINLPGVLVNAS

SEQ ID NO: 253282 - protein, 15 aa, Artificial Sequence
  Description of Artificial Sequence: Synthetic peptide
  Seed: EECLINDPWVLLNAS
EECCINLPPVLINAS

SEQ ID NO: 253283 - protein, 15 aa, Artificial Sequence
  Description of Artificial Sequence: Synthetic peptide
  Seed: EECLINDPWVLLNAS
EECCINLPPVLLNAS

SEQ ID NO: 253284 - protein, 15 aa, Artificial Sequence
  Description of Artificial Sequence: Synthetic peptide
  Seed: EECLINDPWVLLNAS
EECCINLPPVLVNAS

SEQ ID NO: 253285 - protein, 15 aa, Artificial Sequence
  Description of Artificial Sequence: Synthetic peptide
  Seed: EECLINDPWVLLNAS
EECCINLPSVLANAS

SEQ ID NO: 253286 - protein, 15 aa, Artificial Sequence
  Description of Artificial Sequence: Synthetic peptide
  Seed: EECLINDPWVLLNAS
EECCINLPSVLINAS

SEQ ID NO: 253287 - protein, 15 aa, Artificial Sequence
  Description of Artificial Sequence: Synthetic peptide
  Seed: EECLINDPWVLLNAS
EECCINLPSVLLNAS

SEQ ID NO: 253288 - protein, 15 aa, Artificial Sequence
  Description of Artificial Sequence: Synthetic peptide
  Seed: EECLINDPWVLLNAS
EECCINLPSVLVNAS

SEQ ID NO: 253289 - protein, 15 aa, Artificial Sequence
  Description of Artificial Sequence: Synthetic peptide
  Seed: EECLINDPWVLLNAS
EECCINMPAVLANAS

SEQ ID NO: 253290 - protein, 15 aa, Artificial Sequence
  Description of Artificial Sequence: Synthetic peptide
  Seed: EECLINDPWVLLNAS
EECCINMPAVLINAS

SEQ ID NO: 253291 - protein, 15 aa, Artificial Sequence
  Description of Artificial Sequence: Synthetic peptide
  Seed: EECLINDPWVLLNAS
EECCINMPAVLLNAS

SEQ ID NO: 253292 - protein, 15 aa, Artificial Sequence
  Description of Artificial Sequence: Synthetic peptide
  Seed: EECLINDPWVLLNAS
EECCINMPAVLMNAS

SEQ ID NO: 253293 - protein, 15 aa, Artificial Sequence
  Description of Artificial Sequence: Synthetic peptide
  Seed: EECLINDPWVLLNAS
EECCINMPAVLSNAS

SEQ ID NO: 253294 - protein, 15 aa, Artificial Sequence
  Description of Artificial Sequence: Synthetic peptide
  Seed: EECLINDPWVLLNAS
EECCINMPAVLTNAS

SEQ ID NO: 253295 - protein, 15 aa, Artificial Sequence
  Description of Artificial Sequence: Synthetic peptide
  Seed: EECLINDPWVLLNAS
EECCINMPAVLVNAS

SEQ ID NO: 253296 - protein, 15 aa, Artificial Sequence
  Description of Artificial Sequence: Synthetic peptide
  Seed: EECLINDPWVLLNAS
EECCINMPGVLANAS

SEQ ID NO: 253297 - protein, 15 aa, Artificial Sequence
  Description of Artificial Sequence: Synthetic peptide
  Seed: EECLINDPWVLLNAS
EECCINMPGVLINAS

SEQ ID NO: 253298 - protein, 15 aa, Artificial Sequence
  Description of Artificial Sequence: Synthetic peptide
  Seed: EECLINDPWVLLNAS
EECCINMPGVLLNAS

SEQ ID NO: 253299 - protein, 15 aa, Artificial Sequence
  Description of Artificial Sequence: Synthetic peptide
  Seed: EECLINDPWVLLNAS
EECCINMPGVLVNAS

SEQ ID NO: 253300 - protein, 15 aa, Artificial Sequence
  Description of Artificial Sequence: Synthetic peptide
  Seed: EECLINDPWVLLNAS
EECCINMPPVLINAS

SEQ ID NO: 253301 - protein, 15 aa, Artificial Sequence
  Description of Artificial Sequence: Synthetic peptide
  Seed: EECLINDPWVLLNAS
EECCINMPPVLLNAS

SEQ ID NO: 253302 - protein, 15 aa, Artificial Sequence
  Description of Artificial Sequence: Synthetic peptide
  Seed: EECLINDPWVLLNAS
EECCINMPPVLVNAS

SEQ ID NO: 253303 - protein, 15 aa, Artificial Sequence
  Description of Artificial Sequence: Synthetic peptide
  Seed: EECLINDPWVLLNAS
EECCINMPSVLANAS

SEQ ID NO: 253304 - protein, 15 aa, Artificial Sequence
  Description of Artificial Sequence: Synthetic peptide
  Seed: EECLINDPWVLLNAS
EECCINMPSVLINAS

SEQ ID NO: 253305 - protein, 15 aa, Artificial Sequence
  Description of Artificial Sequence: Synthetic peptide
  Seed: EECLINDPWVLLNAS
EECCINMPSVLLNAS

SEQ ID NO: 253306 - protein, 15 aa, Artificial Sequence
  Description of Artificial Sequence: Synthetic peptide
  Seed: EECLINDPWVLLNAS
EECCINMPSVLVNAS

SEQ ID NO: 253307 - protein, 15 aa, Artificial Sequence
  Description of Artificial Sequence: Synthetic peptide
  Seed: EECLINDPWVLLNAS
EECFINAPAVLANAS

SEQ ID NO: 253308 - protein, 15 aa, Artificial Sequence
  Description of Artificial Sequence: Synthetic peptide
  Seed: EECLINDPWVLLNAS
EECFINAPAVLCNAS

SEQ ID NO: 253309 - protein, 15 aa, Artificial Sequence
  Description of Artificial Sequence: Synthetic peptide
  Seed: EECLINDPWVLLNAS
EECFINAPAVLFNAS

SEQ ID NO: 253310 - protein, 15 aa, Artificial Sequence
  Description of Artificial Sequence: Synthetic peptide
  Seed: EECLINDPWVLLNAS
EECFINAPAVLGNAS

SEQ ID NO: 253311 - protein, 15 aa, Artificial Sequence
  Description of Artificial Sequence: Synthetic peptide
  Seed: EECLINDPWVLLNAS
EECFINAPAVLHNAS

SEQ ID NO: 253312 - protein, 15 aa, Artificial Sequence
  Description of Artificial Sequence: Synthetic peptide
  Seed: EECLINDPWVLLNAS
EECFINAPAVLINAS

SEQ ID NO: 253313 - protein, 15 aa, Artificial Sequence
  Description of Artificial Sequence: Synthetic peptide
  Seed: EECLINDPWVLLNAS
EECFINAPAVLKNAS

SEQ ID NO: 253314 - protein, 15 aa, Artificial Sequence
  Description of Artificial Sequence: Synthetic peptide
  Seed: EECLINDPWVLLNAS
EECFINAPAVLLNAS

SEQ ID NO: 253315 - protein, 15 aa, Artificial Sequence
  Description of Artificial Sequence: Synthetic peptide
  Seed: EECLINDPWVLLNAS
EECFINAPAVLMNAS

SEQ ID NO: 253316 - protein, 15 aa, Artificial Sequence
  Description of Artificial Sequence: Synthetic peptide
  Seed: EECLINDPWVLLNAS
EECFINAPAVLNNAS

SEQ ID NO: 253317 - protein, 15 aa, Artificial Sequence
  Description of Artificial Sequence: Synthetic peptide
  Seed: EECLINDPWVLLNAS
EECFINAPAVLPNAS

SEQ ID NO: 253318 - protein, 15 aa, Artificial Sequence
  Description of Artificial Sequence: Synthetic peptide
  Seed: EECLINDPWVLLNAS
EECFINAPAVLQNAS

SEQ ID NO: 253319 - protein, 15 aa, Artificial Sequence
  Description of Artificial Sequence: Synthetic peptide
  Seed: EECLINDPWVLLNAS
EECFINAPAVLRNAS

SEQ ID NO: 253320 - protein, 15 aa, Artificial Sequence
  Description of Artificial Sequence: Synthetic peptide
  Seed: EECLINDPWVLLNAS
EECFINAPAVLSNAS

SEQ ID NO: 253321 - protein, 15 aa, Artificial Sequence
  Description of Artificial Sequence: Synthetic peptide
  Seed: EECLINDPWVLLNAS
EECFINAPAVLTNAS

SEQ ID NO: 253322 - protein, 15 aa, Artificial Sequence
  Description of Artificial Sequence: Synthetic peptide
  Seed: EECLINDPWVLLNAS
EECFINAPAVLVNAS

SEQ ID NO: 253323 - protein, 15 aa, Artificial Sequence
  Description of Artificial Sequence: Synthetic peptide
  Seed: EECLINDPWVLLNAS
EECFINAPAVLWNAS

SEQ ID NO: 253324 - protein, 15 aa, Artificial Sequence
  Description of Artificial Sequence: Synthetic peptide
  Seed: EECLINDPWVLLNAS
EECFINAPAVLYNAS

SEQ ID NO: 253325 - protein, 15 aa, Artificial Sequence
  Description of Artificial Sequence: Synthetic peptide
  Seed: EECLINDPWVLLNAS
EECFINAPCVLANAS

SEQ ID NO: 253326 - protein, 15 aa, Artificial Sequence
  Description of Artificial Sequence: Synthetic peptide
  Seed: EECLINDPWVLLNAS
EECFINAPCVLVNAS

SEQ ID NO: 253327 - protein, 15 aa, Artificial Sequence
  Description of Artificial Sequence: Synthetic peptide
  Seed: EECLINDPWVLLNAS
EECFINAPEVLANAS

SEQ ID NO: 253328 - protein, 15 aa, Artificial Sequence
  Description of Artificial Sequence: Synthetic peptide
  Seed: EECLINDPWVLLNAS
EECFINAPEVLLNAS

SEQ ID NO: 253329 - protein, 15 aa, Artificial Sequence
  Description of Artificial Sequence: Synthetic peptide
  Seed: EECLINDPWVLLNAS
EECFINAPFVLANAS

SEQ ID NO: 253330 - protein, 15 aa, Artificial Sequence
  Description of Artificial Sequence: Synthetic peptide
  Seed: EECLINDPWVLLNAS
EECFINAPFVLENAS

SEQ ID NO: 253331 - protein, 15 aa, Artificial Sequence
  Description of Artificial Sequence: Synthetic peptide
  Seed: EECLINDPWVLLNAS
EECFINAPFVLFNAS

SEQ ID NO: 253332 - protein, 15 aa, Artificial Sequence
  Description of Artificial Sequence: Synthetic peptide
  Seed: EECLINDPWVLLNAS
EECFINAPFVLINAS

SEQ ID NO: 253333 - protein, 15 aa, Artificial Sequence
  Description of Artificial Sequence: Synthetic peptide
  Seed: EECLINDPWVLLNAS
EECFINAPFVLLNAS

SEQ ID NO: 253334 - protein, 15 aa, Artificial Sequence
  Description of Artificial Sequence: Synthetic peptide
  Seed: EECLINDPWVLLNAS
EECFINAPFVLMNAS

SEQ ID NO: 253335 - protein, 15 aa, Artificial Sequence
  Description of Artificial Sequence: Synthetic peptide
  Seed: EECLINDPWVLLNAS
EECFINAPFVLNNAS

SEQ ID NO: 253336 - protein, 15 aa, Artificial Sequence
  Description of Artificial Sequence: Synthetic peptide
  Seed: EECLINDPWVLLNAS
EECFINAPFVLSNAS

SEQ ID NO: 253337 - protein, 15 aa, Artificial Sequence
  Description of Artificial Sequence: Synthetic peptide
  Seed: EECLINDPWVLLNAS
EECFINAPFVLTNAS

SEQ ID NO: 253338 - protein, 15 aa, Artificial Sequence
  Description of Artificial Sequence: Synthetic peptide
  Seed: EECLINDPWVLLNAS
EECFINAPFVLVNAS

SEQ ID NO: 253339 - protein, 15 aa, Artificial Sequence
  Description of Artificial Sequence: Synthetic peptide
  Seed: EECLINDPWVLLNAS
EECFINAPFVLYNAS

SEQ ID NO: 253340 - protein, 15 aa, Artificial Sequence
  Description of Artificial Sequence: Synthetic peptide
  Seed: EECLINDPWVLLNAS
EECFINAPGVLANAS

SEQ ID NO: 253341 - protein, 15 aa, Artificial Sequence
  Description of Artificial Sequence: Synthetic peptide
  Seed: EECLINDPWVLLNAS
EECFINAPGVLCNAS

SEQ ID NO: 253342 - protein, 15 aa, Artificial Sequence
  Description of Artificial Sequence: Synthetic peptide
  Seed: EECLINDPWVLLNAS
EECFINAPGVLFNAS

SEQ ID NO: 253343 - protein, 15 aa, Artificial Sequence
  Description of Artificial Sequence: Synthetic peptide
  Seed: EECLINDPWVLLNAS
EECFINAPGVLGNAS

SEQ ID NO: 253344 - protein, 15 aa, Artificial Sequence
  Description of Artificial Sequence: Synthetic peptide
  Seed: EECLINDPWVLLNAS
EECFINAPGVLHNAS

SEQ ID NO: 253345 - protein, 15 aa, Artificial Sequence
  Description of Artificial Sequence: Synthetic peptide
  Seed: EECLINDPWVLLNAS
EECFINAPGVLINAS

SEQ ID NO: 253346 - protein, 15 aa, Artificial Sequence
  Description of Artificial Sequence: Synthetic peptide
  Seed: EECLINDPWVLLNAS
EECFINAPGVLLNAS

SEQ ID NO: 253347 - protein, 15 aa, Artificial Sequence
  Description of Artificial Sequence: Synthetic peptide
  Seed: EECLINDPWVLLNAS
EECFINAPGVLMNAS

SEQ ID NO: 253348 - protein, 15 aa, Artificial Sequence
  Description of Artificial Sequence: Synthetic peptide
  Seed: EECLINDPWVLLNAS
EECFINAPGVLNNAS

SEQ ID NO: 253349 - protein, 15 aa, Artificial Sequence
  Description of Artificial Sequence: Synthetic peptide
  Seed: EECLINDPWVLLNAS
EECFINAPGVLPNAS

SEQ ID NO: 253350 - protein, 15 aa, Artificial Sequence
  Description of Artificial Sequence: Synthetic peptide
  Seed: EECLINDPWVLLNAS
EECFINAPGVLQNAS

SEQ ID NO: 253351 - protein, 15 aa, Artificial Sequence
  Description of Artificial Sequence: Synthetic peptide
  Seed: EECLINDPWVLLNAS
EECFINAPGVLRNAS

SEQ ID NO: 253352 - protein, 15 aa, Artificial Sequence
  Description of Artificial Sequence: Synthetic peptide
  Seed: EECLINDPWVLLNAS
EECFINAPGVLSNAS

SEQ ID NO: 253353 - protein, 15 aa, Artificial Sequence
  Description of Artificial Sequence: Synthetic peptide
  Seed: EECLINDPWVLLNAS
EECFINAPGVLTNAS

SEQ ID NO: 253354 - protein, 15 aa, Artificial Sequence
  Description of Artificial Sequence: Synthetic peptide
  Seed: EECLINDPWVLLNAS
EECFINAPGVLVNAS

SEQ ID NO: 253355 - protein, 15 aa, Artificial Sequence
  Description of Artificial Sequence: Synthetic peptide
  Seed: EECLINDPWVLLNAS
EECFINAPGVLYNAS

SEQ ID NO: 253356 - protein, 15 aa, Artificial Sequence
  Description of Artificial Sequence: Synthetic peptide
  Seed: EECLINDPWVLLNAS
EECFINAPHVLANAS

SEQ ID NO: 253357 - protein, 15 aa, Artificial Sequence
  Description of Artificial Sequence: Synthetic peptide
  Seed: EECLINDPWVLLNAS
EECFINAPHVLINAS

SEQ ID NO: 253358 - protein, 15 aa, Artificial Sequence
  Description of Artificial Sequence: Synthetic peptide
  Seed: EECLINDPWVLLNAS
EECFINAPHVLLNAS

SEQ ID NO: 253359 - protein, 15 aa, Artificial Sequence
  Description of Artificial Sequence: Synthetic peptide
  Seed: EECLINDPWVLLNAS
EECFINAPHVLVNAS

SEQ ID NO: 253360 - protein, 15 aa, Artificial Sequence
  Description of Artificial Sequence: Synthetic peptide
  Seed: EECLINDPWVLLNAS
EECFINAPIVLANAS

SEQ ID NO: 253361 - protein, 15 aa, Artificial Sequence
  Description of Artificial Sequence: Synthetic peptide
  Seed: EECLINDPWVLLNAS
EECFINAPIVLGNAS

SEQ ID NO: 253362 - protein, 15 aa, Artificial Sequence
  Description of Artificial Sequence: Synthetic peptide
  Seed: EECLINDPWVLLNAS
EECFINAPIVLINAS

SEQ ID NO: 253363 - protein, 15 aa, Artificial Sequence
  Description of Artificial Sequence: Synthetic peptide
  Seed: EECLINDPWVLLNAS
EECFINAPIVLLNAS

SEQ ID NO: 253364 - protein, 15 aa, Artificial Sequence
  Description of Artificial Sequence: Synthetic peptide
  Seed: EECLINDPWVLLNAS
EECFINAPIVLMNAS

SEQ ID NO: 253365 - protein, 15 aa, Artificial Sequence
  Description of Artificial Sequence: Synthetic peptide
  Seed: EECLINDPWVLLNAS
EECFINAPIVLSNAS

SEQ ID NO: 253366 - protein, 15 aa, Artificial Sequence
  Description of Artificial Sequence: Synthetic peptide
  Seed: EECLINDPWVLLNAS
EECFINAPIVLTNAS

SEQ ID NO: 253367 - protein, 15 aa, Artificial Sequence
  Description of Artificial Sequence: Synthetic peptide
  Seed: EECLINDPWVLLNAS
EECFINAPIVLVNAS

SEQ ID NO: 253368 - protein, 15 aa, Artificial Sequence
  Description of Artificial Sequence: Synthetic peptide
  Seed: EECLINDPWVLLNAS
EECFINAPLVLANAS

SEQ ID NO: 253369 - protein, 15 aa, Artificial Sequence
  Description of Artificial Sequence: Synthetic peptide
  Seed: EECLINDPWVLLNAS
EECFINAPMVLANAS

SEQ ID NO: 253370 - protein, 15 aa, Artificial Sequence
  Description of Artificial Sequence: Synthetic peptide
  Seed: EECLINDPWVLLNAS
EECFINAPMVLINAS

SEQ ID NO: 253371 - protein, 15 aa, Artificial Sequence
  Description of Artificial Sequence: Synthetic peptide
  Seed: EECLINDPWVLLNAS
EECFINAPMVLLNAS

SEQ ID NO: 253372 - protein, 15 aa, Artificial Sequence
  Description of Artificial Sequence: Synthetic peptide
  Seed: EECLINDPWVLLNAS
EECFINAPMVLVNAS

SEQ ID NO: 253373 - protein, 15 aa, Artificial Sequence
  Description of Artificial Sequence: Synthetic peptide
  Seed: EECLINDPWVLLNAS
EECFINAPNVLANAS

SEQ ID NO: 253374 - protein, 15 aa, Artificial Sequence
  Description of Artificial Sequence: Synthetic peptide
  Seed: EECLINDPWVLLNAS
EECFINAPNVLCNAS

SEQ ID NO: 253375 - protein, 15 aa, Artificial Sequence
  Description of Artificial Sequence: Synthetic peptide
  Seed: EECLINDPWVLLNAS
EECFINAPNVLFNAS

SEQ ID NO: 253376 - protein, 15 aa, Artificial Sequence
  Description of Artificial Sequence: Synthetic peptide
  Seed: EECLINDPWVLLNAS
EECFINAPNVLGNAS

SEQ ID NO: 253377 - protein, 15 aa, Artificial Sequence
  Description of Artificial Sequence: Synthetic peptide
  Seed: EECLINDPWVLLNAS
EECFINAPNVLINAS

SEQ ID NO: 253378 - protein, 15 aa, Artificial Sequence
  Description of Artificial Sequence: Synthetic peptide
  Seed: EECLINDPWVLLNAS
EECFINAPNVLLNAS

SEQ ID NO: 253379 - protein, 15 aa, Artificial Sequence
  Description of Artificial Sequence: Synthetic peptide
  Seed: EECLINDPWVLLNAS
EECFINAPNVLMNAS

SEQ ID NO: 253380 - protein, 15 aa, Artificial Sequence
  Description of Artificial Sequence: Synthetic peptide
  Seed: EECLINDPWVLLNAS
EECFINAPNVLNNAS

SEQ ID NO: 253381 - protein, 15 aa, Artificial Sequence
  Description of Artificial Sequence: Synthetic peptide
  Seed: EECLINDPWVLLNAS
EECFINAPNVLQNAS

SEQ ID NO: 253382 - protein, 15 aa, Artificial Sequence
  Description of Artificial Sequence: Synthetic peptide
  Seed: EECLINDPWVLLNAS
EECFINAPNVLSNAS

SEQ ID NO: 253383 - protein, 15 aa, Artificial Sequence
  Description of Artificial Sequence: Synthetic peptide
  Seed: EECLINDPWVLLNAS
EECFINAPNVLTNAS

SEQ ID NO: 253384 - protein, 15 aa, Artificial Sequence
  Description of Artificial Sequence: Synthetic peptide
  Seed: EECLINDPWVLLNAS
EECFINAPNVLVNAS

SEQ ID NO: 253385 - protein, 15 aa, Artificial Sequence
  Description of Artificial Sequence: Synthetic peptide
  Seed: EECLINDPWVLLNAS
EECFINAPPVLANAS

SEQ ID NO: 253386 - protein, 15 aa, Artificial Sequence
  Description of Artificial Sequence: Synthetic peptide
  Seed: EECLINDPWVLLNAS
EECFINAPPVLCNAS

SEQ ID NO: 253387 - protein, 15 aa, Artificial Sequence
  Description of Artificial Sequence: Synthetic peptide
  Seed: EECLINDPWVLLNAS
EECFINAPPVLFNAS

SEQ ID NO: 253388 - protein, 15 aa, Artificial Sequence
  Description of Artificial Sequence: Synthetic peptide
  Seed: EECLINDPWVLLNAS
EECFINAPPVLGNAS

SEQ ID NO: 253389 - protein, 15 aa, Artificial Sequence
  Description of Artificial Sequence: Synthetic peptide
  Seed: EECLINDPWVLLNAS
EECFINAPPVLHNAS

SEQ ID NO: 253390 - protein, 15 aa, Artificial Sequence
  Description of Artificial Sequence: Synthetic peptide
  Seed: EECLINDPWVLLNAS
EECFINAPPVLINAS

SEQ ID NO: 253391 - protein, 15 aa, Artificial Sequence
  Description of Artificial Sequence: Synthetic peptide
  Seed: EECLINDPWVLLNAS
EECFINAPPVLLNAS

SEQ ID NO: 253392 - protein, 15 aa, Artificial Sequence
  Description of Artificial Sequence: Synthetic peptide
  Seed: EECLINDPWVLLNAS
EECFINAPPVLMNAS

SEQ ID NO: 253393 - protein, 15 aa, Artificial Sequence
  Description of Artificial Sequence: Synthetic peptide
  Seed: EECLINDPWVLLNAS
EECFINAPPVLNNAS

SEQ ID NO: 253394 - protein, 15 aa, Artificial Sequence
  Description of Artificial Sequence: Synthetic peptide
  Seed: EECLINDPWVLLNAS
EECFINAPPVLPNAS

SEQ ID NO: 253395 - protein, 15 aa, Artificial Sequence
  Description of Artificial Sequence: Synthetic peptide
  Seed: EECLINDPWVLLNAS
EECFINAPPVLQNAS

SEQ ID NO: 253396 - protein, 15 aa, Artificial Sequence
  Description of Artificial Sequence: Synthetic peptide
  Seed: EECLINDPWVLLNAS
EECFINAPPVLRNAS

SEQ ID NO: 253397 - protein, 15 aa, Artificial Sequence
  Description of Artificial Sequence: Synthetic peptide
  Seed: EECLINDPWVLLNAS
EECFINAPPVLSNAS

SEQ ID NO: 253398 - protein, 15 aa, Artificial Sequence
  Description of Artificial Sequence: Synthetic peptide
  Seed: EECLINDPWVLLNAS
EECFINAPPVLTNAS

SEQ ID NO: 253399 - protein, 15 aa, Artificial Sequence
  Description of Artificial Sequence: Synthetic peptide
  Seed: EECLINDPWVLLNAS
EECFINAPPVLVNAS

SEQ ID NO: 253400 - protein, 15 aa, Artificial Sequence
  Description of Artificial Sequence: Synthetic peptide
  Seed: EECLINDPWVLLNAS
EECFINAPPVLWNAS

SEQ ID NO: 253401 - protein, 15 aa, Artificial Sequence
  Description of Artificial Sequence: Synthetic peptide
  Seed: EECLINDPWVLLNAS
EECFINAPPVLYNAS

SEQ ID NO: 253402 - protein, 15 aa, Artificial Sequence
  Description of Artificial Sequence: Synthetic peptide
  Seed: EECLINDPWVLLNAS
EECFINAPQVLANAS

SEQ ID NO: 253403 - protein, 15 aa, Artificial Sequence
  Description of Artificial Sequence: Synthetic peptide
  Seed: EECLINDPWVLLNAS
EECFINAPQVLINAS

SEQ ID NO: 253404 - protein, 15 aa, Artificial Sequence
  Description of Artificial Sequence: Synthetic peptide
  Seed: EECLINDPWVLLNAS
EECFINAPQVLLNAS

SEQ ID NO: 253405 - protein, 15 aa, Artificial Sequence
  Description of Artificial Sequence: Synthetic peptide
  Seed: EECLINDPWVLLNAS
EECFINAPQVLVNAS

SEQ ID NO: 253406 - protein, 15 aa, Artificial Sequence
  Description of Artificial Sequence: Synthetic peptide
  Seed: EECLINDPWVLLNAS
EECFINAPSVLANAS

SEQ ID NO: 253407 - protein, 15 aa, Artificial Sequence
  Description of Artificial Sequence: Synthetic peptide
  Seed: EECLINDPWVLLNAS
EECFINAPSVLCNAS

SEQ ID NO: 253408 - protein, 15 aa, Artificial Sequence
  Description of Artificial Sequence: Synthetic peptide
  Seed: EECLINDPWVLLNAS
EECFINAPSVLFNAS

SEQ ID NO: 253409 - protein, 15 aa, Artificial Sequence
  Description of Artificial Sequence: Synthetic peptide
  Seed: EECLINDPWVLLNAS
EECFINAPSVLGNAS

SEQ ID NO: 253410 - protein, 15 aa, Artificial Sequence
  Description of Artificial Sequence: Synthetic peptide
  Seed: EECLINDPWVLLNAS
EECFINAPSVLHNAS

SEQ ID NO: 253411 - protein, 15 aa, Artificial Sequence
  Description of Artificial Sequence: Synthetic peptide
  Seed: EECLINDPWVLLNAS
EECFINAPSVLINAS

SEQ ID NO: 253412 - protein, 15 aa, Artificial Sequence
  Description of Artificial Sequence: Synthetic peptide
  Seed: EECLINDPWVLLNAS
EECFINAPSVLKNAS

SEQ ID NO: 253413 - protein, 15 aa, Artificial Sequence
  Description of Artificial Sequence: Synthetic peptide
  Seed: EECLINDPWVLLNAS
EECFINAPSVLLNAS

SEQ ID NO: 253414 - protein, 15 aa, Artificial Sequence
  Description of Artificial Sequence: Synthetic peptide
  Seed: EECLINDPWVLLNAS
EECFINAPSVLMNAS

SEQ ID NO: 253415 - protein, 15 aa, Artificial Sequence
  Description of Artificial Sequence: Synthetic peptide
  Seed: EECLINDPWVLLNAS
EECFINAPSVLNNAS

SEQ ID NO: 253416 - protein, 15 aa, Artificial Sequence
  Description of Artificial Sequence: Synthetic peptide
  Seed: EECLINDPWVLLNAS
EECFINAPSVLPNAS

SEQ ID NO: 253417 - protein, 15 aa, Artificial Sequence
  Description of Artificial Sequence: Synthetic peptide
  Seed: EECLINDPWVLLNAS
EECFINAPSVLQNAS

SEQ ID NO: 253418 - protein, 15 aa, Artificial Sequence
  Description of Artificial Sequence: Synthetic peptide
  Seed: EECLINDPWVLLNAS
EECFINAPSVLRNAS

SEQ ID NO: 253419 - protein, 15 aa, Artificial Sequence
  Description of Artificial Sequence: Synthetic peptide
  Seed: EECLINDPWVLLNAS
EECFINAPSVLSNAS

SEQ ID NO: 253420 - protein, 15 aa, Artificial Sequence
  Description of Artificial Sequence: Synthetic peptide
  Seed: EECLINDPWVLLNAS
EECFINAPSVLTNAS

SEQ ID NO: 253421 - protein, 15 aa, Artificial Sequence
  Description of Artificial Sequence: Synthetic peptide
  Seed: EECLINDPWVLLNAS
EECFINAPSVLVNAS

SEQ ID NO: 253422 - protein, 15 aa, Artificial Sequence
  Description of Artificial Sequence: Synthetic peptide
  Seed: EECLINDPWVLLNAS
EECFINAPSVLYNAS

SEQ ID NO: 253423 - protein, 15 aa, Artificial Sequence
  Description of Artificial Sequence: Synthetic peptide
  Seed: EECLINDPWVLLNAS
EECFINAPTVLANAS

SEQ ID NO: 253424 - protein, 15 aa, Artificial Sequence
  Description of Artificial Sequence: Synthetic peptide
  Seed: EECLINDPWVLLNAS
EECFINAPTVLCNAS

SEQ ID NO: 253425 - protein, 15 aa, Artificial Sequence
  Description of Artificial Sequence: Synthetic peptide
  Seed: EECLINDPWVLLNAS
EECFINAPTVLFNAS

SEQ ID NO: 253426 - protein, 15 aa, Artificial Sequence
  Description of Artificial Sequence: Synthetic peptide
  Seed: EECLINDPWVLLNAS
EECFINAPTVLGNAS

SEQ ID NO: 253427 - protein, 15 aa, Artificial Sequence
  Description of Artificial Sequence: Synthetic peptide
  Seed: EECLINDPWVLLNAS
EECFINAPTVLHNAS

SEQ ID NO: 253428 - protein, 15 aa, Artificial Sequence
  Description of Artificial Sequence: Synthetic peptide
  Seed: EECLINDPWVLLNAS
EECFINAPTVLINAS

SEQ ID NO: 253429 - protein, 15 aa, Artificial Sequence
  Description of Artificial Sequence: Synthetic peptide
  Seed: EECLINDPWVLLNAS
EECFINAPTVLLNAS

SEQ ID NO: 253430 - protein, 15 aa, Artificial Sequence
  Description of Artificial Sequence: Synthetic peptide
  Seed: EECLINDPWVLLNAS
EECFINAPTVLMNAS

SEQ ID NO: 253431 - protein, 15 aa, Artificial Sequence
  Description of Artificial Sequence: Synthetic peptide
  Seed: EECLINDPWVLLNAS
EECFINAPTVLNNAS

SEQ ID NO: 253432 - protein, 15 aa, Artificial Sequence
  Description of Artificial Sequence: Synthetic peptide
  Seed: EECLINDPWVLLNAS
EECFINAPTVLQNAS

SEQ ID NO: 253433 - protein, 15 aa, Artificial Sequence
  Description of Artificial Sequence: Synthetic peptide
  Seed: EECLINDPWVLLNAS
EECFINAPTVLSNAS

SEQ ID NO: 253434 - protein, 15 aa, Artificial Sequence
  Description of Artificial Sequence: Synthetic peptide
  Seed: EECLINDPWVLLNAS
EECFINAPTVLTNAS

SEQ ID NO: 253435 - protein, 15 aa, Artificial Sequence
  Description of Artificial Sequence: Synthetic peptide
  Seed: EECLINDPWVLLNAS
EECFINAPTVLVNAS

SEQ ID NO: 253436 - protein, 15 aa, Artificial Sequence
  Description of Artificial Sequence: Synthetic peptide
  Seed: EECLINDPWVLLNAS
EECFINAPVVLANAS

SEQ ID NO: 253437 - protein, 15 aa, Artificial Sequence
  Description of Artificial Sequence: Synthetic peptide
  Seed: EECLINDPWVLLNAS
EECFINAPVVLGNAS

SEQ ID NO: 253438 - protein, 15 aa, Artificial Sequence
  Description of Artificial Sequence: Synthetic peptide
  Seed: EECLINDPWVLLNAS
EECFINAPVVLINAS

SEQ ID NO: 253439 - protein, 15 aa, Artificial Sequence
  Description of Artificial Sequence: Synthetic peptide
  Seed: EECLINDPWVLLNAS
EECFINAPVVLLNAS

SEQ ID NO: 253440 - protein, 15 aa, Artificial Sequence
  Description of Artificial Sequence: Synthetic peptide
  Seed: EECLINDPWVLLNAS
EECFINAPVVLMNAS

SEQ ID NO: 253441 - protein, 15 aa, Artificial Sequence
  Description of Artificial Sequence: Synthetic peptide
  Seed: EECLINDPWVLLNAS
EECFINAPVVLNNAS

SEQ ID NO: 253442 - protein, 15 aa, Artificial Sequence
  Description of Artificial Sequence: Synthetic peptide
  Seed: EECLINDPWVLLNAS
EECFINAPVVLSNAS

SEQ ID NO: 253443 - protein, 15 aa, Artificial Sequence
  Description of Artificial Sequence: Synthetic peptide
  Seed: EECLINDPWVLLNAS
EECFINAPVVLTNAS

SEQ ID NO: 253444 - protein, 15 aa, Artificial Sequence
  Description of Artificial Sequence: Synthetic peptide
  Seed: EECLINDPWVLLNAS
EECFINAPVVLVNAS

SEQ ID NO: 253445 - protein, 15 aa, Artificial Sequence
  Description of Artificial Sequence: Synthetic peptide
  Seed: EECLINDPWVLLNAS
EECFINAPYVLINAS

SEQ ID NO: 253446 - protein, 15 aa, Artificial Sequence
  Description of Artificial Sequence: Synthetic peptide
  Seed: EECLINDPWVLLNAS
EECFINAPYVLLNAS

SEQ ID NO: 253447 - protein, 15 aa, Artificial Sequence
  Description of Artificial Sequence: Synthetic peptide
  Seed: EECLINDPWVLLNAS
EECFINAPYVLVNAS

SEQ ID NO: 253448 - protein, 15 aa, Artificial Sequence
  Description of Artificial Sequence: Synthetic peptide
  Seed: EECLINDPWVLLNAS
EECFINCPAVLANAS

SEQ ID NO: 253449 - protein, 15 aa, Artificial Sequence
  Description of Artificial Sequence: Synthetic peptide
  Seed: EECLINDPWVLLNAS
EECFINCPAVLGNAS

SEQ ID NO: 253450 - protein, 15 aa, Artificial Sequence
  Description of Artificial Sequence: Synthetic peptide
  Seed: EECLINDPWVLLNAS
EECFINCPAVLINAS

SEQ ID NO: 253451 - protein, 15 aa, Artificial Sequence
  Description of Artificial Sequence: Synthetic peptide
  Seed: EECLINDPWVLLNAS
EECFINCPAVLLNAS

SEQ ID NO: 253452 - protein, 15 aa, Artificial Sequence
  Description of Artificial Sequence: Synthetic peptide
  Seed: EECLINDPWVLLNAS
EECFINCPAVLMNAS

SEQ ID NO: 253453 - protein, 15 aa, Artificial Sequence
  Description of Artificial Sequence: Synthetic peptide
  Seed: EECLINDPWVLLNAS
EECFINCPAVLSNAS

SEQ ID NO: 253454 - protein, 15 aa, Artificial Sequence
  Description of Artificial Sequence: Synthetic peptide
  Seed: EECLINDPWVLLNAS
EECFINCPAVLTNAS

SEQ ID NO: 253455 - protein, 15 aa, Artificial Sequence
  Description of Artificial Sequence: Synthetic peptide
  Seed: EECLINDPWVLLNAS
EECFINCPAVLVNAS

SEQ ID NO: 253456 - protein, 15 aa, Artificial Sequence
  Description of Artificial Sequence: Synthetic peptide
  Seed: EECLINDPWVLLNAS
EECFINCPGVLANAS

SEQ ID NO: 253457 - protein, 15 aa, Artificial Sequence
  Description of Artificial Sequence: Synthetic peptide
  Seed: EECLINDPWVLLNAS
EECFINCPGVLINAS

SEQ ID NO: 253458 - protein, 15 aa, Artificial Sequence
  Description of Artificial Sequence: Synthetic peptide
  Seed: EECLINDPWVLLNAS
EECFINCPGVLLNAS

SEQ ID NO: 253459 - protein, 15 aa, Artificial Sequence
  Description of Artificial Sequence: Synthetic peptide
  Seed: EECLINDPWVLLNAS
EECFINCPGVLVNAS

SEQ ID NO: 253460 - protein, 15 aa, Artificial Sequence
  Description of Artificial Sequence: Synthetic peptide
  Seed: EECLINDPWVLLNAS
EECFINCPPVLANAS

SEQ ID NO: 253461 - protein, 15 aa, Artificial Sequence
  Description of Artificial Sequence: Synthetic peptide
  Seed: EECLINDPWVLLNAS
EECFINCPPVLINAS

SEQ ID NO: 253462 - protein, 15 aa, Artificial Sequence
  Description of Artificial Sequence: Synthetic peptide
  Seed: EECLINDPWVLLNAS
EECFINCPPVLLNAS

SEQ ID NO: 253463 - protein, 15 aa, Artificial Sequence
  Description of Artificial Sequence: Synthetic peptide
  Seed: EECLINDPWVLLNAS
EECFINCPPVLVNAS

SEQ ID NO: 253464 - protein, 15 aa, Artificial Sequence
  Description of Artificial Sequence: Synthetic peptide
  Seed: EECLINDPWVLLNAS
EECFINCPSVLANAS

SEQ ID NO: 253465 - protein, 15 aa, Artificial Sequence
  Description of Artificial Sequence: Synthetic peptide
  Seed: EECLINDPWVLLNAS
EECFINCPSVLINAS

SEQ ID NO: 253466 - protein, 15 aa, Artificial Sequence
  Description of Artificial Sequence: Synthetic peptide
  Seed: EECLINDPWVLLNAS
EECFINCPSVLLNAS

SEQ ID NO: 253467 - protein, 15 aa, Artificial Sequence
  Description of Artificial Sequence: Synthetic peptide
  Seed: EECLINDPWVLLNAS
EECFINCPSVLMNAS

SEQ ID NO: 253468 - protein, 15 aa, Artificial Sequence
  Description of Artificial Sequence: Synthetic peptide
  Seed: EECLINDPWVLLNAS
EECFINCPSVLTNAS

SEQ ID NO: 253469 - protein, 15 aa, Artificial Sequence
  Description of Artificial Sequence: Synthetic peptide
  Seed: EECLINDPWVLLNAS
EECFINCPSVLVNAS

SEQ ID NO: 253470 - protein, 15 aa, Artificial Sequence
  Description of Artificial Sequence: Synthetic peptide
  Seed: EECLINDPWVLLNAS
EECFINCPTVLANAS

SEQ ID NO: 253471 - protein, 15 aa, Artificial Sequence
  Description of Artificial Sequence: Synthetic peptide
  Seed: EECLINDPWVLLNAS
EECFINCPTVLLNAS

SEQ ID NO: 253472 - protein, 15 aa, Artificial Sequence
  Description of Artificial Sequence: Synthetic peptide
  Seed: EECLINDPWVLLNAS
EECFINCPTVLVNAS

SEQ ID NO: 253473 - protein, 15 aa, Artificial Sequence
  Description of Artificial Sequence: Synthetic peptide
  Seed: EECLINDPWVLLNAS
EECFINDPAVLINAS

SEQ ID NO: 253474 - protein, 15 aa, Artificial Sequence
  Description of Artificial Sequence: Synthetic peptide
  Seed: EECLINDPWVLLNAS
EECFINDPFVLINAS

SEQ ID NO: 253475 - protein, 15 aa, Artificial Sequence
  Description of Artificial Sequence: Synthetic peptide
  Seed: EECLINDPWVLLNAS
EECFINDPFVLLNAS

SEQ ID NO: 253476 - protein, 15 aa, Artificial Sequence
  Description of Artificial Sequence: Synthetic peptide
  Seed: EECLINDPWVLLNAS
EECFINDPFVLVNAS

SEQ ID NO: 253477 - protein, 15 aa, Artificial Sequence
  Description of Artificial Sequence: Synthetic peptide
  Seed: EECLINDPWVLLNAS
EECFINEPAVLANAS

SEQ ID NO: 253478 - protein, 15 aa, Artificial Sequence
  Description of Artificial Sequence: Synthetic peptide
  Seed: EECLINDPWVLLNAS
EECFINEPAVLGNAS

SEQ ID NO: 253479 - protein, 15 aa, Artificial Sequence
  Description of Artificial Sequence: Synthetic peptide
  Seed: EECLINDPWVLLNAS
EECFINEPAVLINAS

SEQ ID NO: 253480 - protein, 15 aa, Artificial Sequence
  Description of Artificial Sequence: Synthetic peptide
  Seed: EECLINDPWVLLNAS
EECFINEPAVLLNAS

SEQ ID NO: 253481 - protein, 15 aa, Artificial Sequence
  Description of Artificial Sequence: Synthetic peptide
  Seed: EECLINDPWVLLNAS
EECFINEPAVLMNAS

SEQ ID NO: 253482 - protein, 15 aa, Artificial Sequence
  Description of Artificial Sequence: Synthetic peptide
  Seed: EECLINDPWVLLNAS
EECFINEPAVLSNAS

SEQ ID NO: 253483 - protein, 15 aa, Artificial Sequence
  Description of Artificial Sequence: Synthetic peptide
  Seed: EECLINDPWVLLNAS
EECFINEPAVLTNAS

SEQ ID NO: 253484 - protein, 15 aa, Artificial Sequence
  Description of Artificial Sequence: Synthetic peptide
  Seed: EECLINDPWVLLNAS
EECFINEPAVLVNAS

SEQ ID NO: 253485 - protein, 15 aa, Artificial Sequence
  Description of Artificial Sequence: Synthetic peptide
  Seed: EECLINDPWVLLNAS
EECFINEPFVLANAS

SEQ ID NO: 253486 - protein, 15 aa, Artificial Sequence
  Description of Artificial Sequence: Synthetic peptide
  Seed: EECLINDPWVLLNAS
EECFINEPFVLENAS

SEQ ID NO: 253487 - protein, 15 aa, Artificial Sequence
  Description of Artificial Sequence: Synthetic peptide
  Seed: EECLINDPWVLLNAS
EECFINEPFVLFNAS

SEQ ID NO: 253488 - protein, 15 aa, Artificial Sequence
  Description of Artificial Sequence: Synthetic peptide
  Seed: EECLINDPWVLLNAS
EECFINEPFVLINAS

SEQ ID NO: 253489 - protein, 15 aa, Artificial Sequence
  Description of Artificial Sequence: Synthetic peptide
  Seed: EECLINDPWVLLNAS
EECFINEPFVLLNAS

SEQ ID NO: 253490 - protein, 15 aa, Artificial Sequence
  Description of Artificial Sequence: Synthetic peptide
  Seed: EECLINDPWVLLNAS
EECFINEPFVLMNAS

SEQ ID NO: 253491 - protein, 15 aa, Artificial Sequence
  Description of Artificial Sequence: Synthetic peptide
  Seed: EECLINDPWVLLNAS
EECFINEPFVLTNAS

SEQ ID NO: 253492 - protein, 15 aa, Artificial Sequence
  Description of Artificial Sequence: Synthetic peptide
  Seed: EECLINDPWVLLNAS
EECFINEPFVLVNAS

SEQ ID NO: 253493 - protein, 15 aa, Artificial Sequence
  Description of Artificial Sequence: Synthetic peptide
  Seed: EECLINDPWVLLNAS
EECFINEPFVLYNAS

SEQ ID NO: 253494 - protein, 15 aa, Artificial Sequence
  Description of Artificial Sequence: Synthetic peptide
  Seed: EECLINDPWVLLNAS
EECFINEPGVLANAS

SEQ ID NO: 253495 - protein, 15 aa, Artificial Sequence
  Description of Artificial Sequence: Synthetic peptide
  Seed: EECLINDPWVLLNAS
EECFINEPGVLGNAS

SEQ ID NO: 253496 - protein, 15 aa, Artificial Sequence
  Description of Artificial Sequence: Synthetic peptide
  Seed: EECLINDPWVLLNAS
EECFINEPGVLINAS

SEQ ID NO: 253497 - protein, 15 aa, Artificial Sequence
  Description of Artificial Sequence: Synthetic peptide
  Seed: EECLINDPWVLLNAS
EECFINEPGVLLNAS

SEQ ID NO: 253498 - protein, 15 aa, Artificial Sequence
  Description of Artificial Sequence: Synthetic peptide
  Seed: EECLINDPWVLLNAS
EECFINEPGVLMNAS

SEQ ID NO: 253499 - protein, 15 aa, Artificial Sequence
  Description of Artificial Sequence: Synthetic peptide
  Seed: EECLINDPWVLLNAS
EECFINEPGVLSNAS

SEQ ID NO: 253500 - protein, 15 aa, Artificial Sequence
  Description of Artificial Sequence: Synthetic peptide
  Seed: EECLINDPWVLLNAS
EECFINEPGVLTNAS

SEQ ID NO: 253501 - protein, 15 aa, Artificial Sequence
  Description of Artificial Sequence: Synthetic peptide
  Seed: EECLINDPWVLLNAS
EECFINEPGVLVNAS

SEQ ID NO: 253502 - protein, 15 aa, Artificial Sequence
  Description of Artificial Sequence: Synthetic peptide
  Seed: EECLINDPWVLLNAS
EECFINEPNVLANAS

SEQ ID NO: 253503 - protein, 15 aa, Artificial Sequence
  Description of Artificial Sequence: Synthetic peptide
  Seed: EECLINDPWVLLNAS
EECFINEPNVLINAS

SEQ ID NO: 253504 - protein, 15 aa, Artificial Sequence
  Description of Artificial Sequence: Synthetic peptide
  Seed: EECLINDPWVLLNAS
EECFINEPNVLLNAS

SEQ ID NO: 253505 - protein, 15 aa, Artificial Sequence
  Description of Artificial Sequence: Synthetic peptide
  Seed: EECLINDPWVLLNAS
EECFINEPNVLVNAS

SEQ ID NO: 253506 - protein, 15 aa, Artificial Sequence
  Description of Artificial Sequence: Synthetic peptide
  Seed: EECLINDPWVLLNAS
EECFINEPPVLANAS

SEQ ID NO: 253507 - protein, 15 aa, Artificial Sequence
  Description of Artificial Sequence: Synthetic peptide
  Seed: EECLINDPWVLLNAS
EECFINEPPVLINAS

SEQ ID NO: 253508 - protein, 15 aa, Artificial Sequence
  Description of Artificial Sequence: Synthetic peptide
  Seed: EECLINDPWVLLNAS
EECFINEPPVLLNAS

SEQ ID NO: 253509 - protein, 15 aa, Artificial Sequence
  Description of Artificial Sequence: Synthetic peptide
  Seed: EECLINDPWVLLNAS
EECFINEPPVLMNAS

SEQ ID NO: 253510 - protein, 15 aa, Artificial Sequence
  Description of Artificial Sequence: Synthetic peptide
  Seed: EECLINDPWVLLNAS
EECFINEPPVLSNAS

SEQ ID NO: 253511 - protein, 15 aa, Artificial Sequence
  Description of Artificial Sequence: Synthetic peptide
  Seed: EECLINDPWVLLNAS
EECFINEPPVLTNAS

SEQ ID NO: 253512 - protein, 15 aa, Artificial Sequence
  Description of Artificial Sequence: Synthetic peptide
  Seed: EECLINDPWVLLNAS
EECFINEPPVLVNAS

SEQ ID NO: 253513 - protein, 15 aa, Artificial Sequence
  Description of Artificial Sequence: Synthetic peptide
  Seed: EECLINDPWVLLNAS
EECFINEPSVLANAS

SEQ ID NO: 253514 - protein, 15 aa, Artificial Sequence
  Description of Artificial Sequence: Synthetic peptide
  Seed: EECLINDPWVLLNAS
EECFINEPSVLGNAS

SEQ ID NO: 253515 - protein, 15 aa, Artificial Sequence
  Description of Artificial Sequence: Synthetic peptide
  Seed: EECLINDPWVLLNAS
EECFINEPSVLINAS

SEQ ID NO: 253516 - protein, 15 aa, Artificial Sequence
  Description of Artificial Sequence: Synthetic peptide
  Seed: EECLINDPWVLLNAS
EECFINEPSVLLNAS

SEQ ID NO: 253517 - protein, 15 aa, Artificial Sequence
  Description of Artificial Sequence: Synthetic peptide
  Seed: EECLINDPWVLLNAS
EECFINEPSVLMNAS

SEQ ID NO: 253518 - protein, 15 aa, Artificial Sequence
  Description of Artificial Sequence: Synthetic peptide
  Seed: EECLINDPWVLLNAS
EECFINEPSVLSNAS

SEQ ID NO: 253519 - protein, 15 aa, Artificial Sequence
  Description of Artificial Sequence: Synthetic peptide
  Seed: EECLINDPWVLLNAS
EECFINEPSVLTNAS

SEQ ID NO: 253520 - protein, 15 aa, Artificial Sequence
  Description of Artificial Sequence: Synthetic peptide
  Seed: EECLINDPWVLLNAS
EECFINEPSVLVNAS

SEQ ID NO: 253521 - protein, 15 aa, Artificial Sequence
  Description of Artificial Sequence: Synthetic peptide
  Seed: EECLINDPWVLLNAS
EECFINEPTVLANAS

SEQ ID NO: 253522 - protein, 15 aa, Artificial Sequence
  Description of Artificial Sequence: Synthetic peptide
  Seed: EECLINDPWVLLNAS
EECFINEPTVLINAS

SEQ ID NO: 253523 - protein, 15 aa, Artificial Sequence
  Description of Artificial Sequence: Synthetic peptide
  Seed: EECLINDPWVLLNAS
EECFINEPTVLLNAS

SEQ ID NO: 253524 - protein, 15 aa, Artificial Sequence
  Description of Artificial Sequence: Synthetic peptide
  Seed: EECLINDPWVLLNAS
EECFINEPTVLMNAS

SEQ ID NO: 253525 - protein, 15 aa, Artificial Sequence
  Description of Artificial Sequence: Synthetic peptide
  Seed: EECLINDPWVLLNAS
EECFINEPTVLSNAS

SEQ ID NO: 253526 - protein, 15 aa, Artificial Sequence
  Description of Artificial Sequence: Synthetic peptide
  Seed: EECLINDPWVLLNAS
EECFINEPTVLTNAS

SEQ ID NO: 253527 - protein, 15 aa, Artificial Sequence
  Description of Artificial Sequence: Synthetic peptide
  Seed: EECLINDPWVLLNAS
EECFINEPTVLVNAS

SEQ ID NO: 253528 - protein, 15 aa, Artificial Sequence
  Description of Artificial Sequence: Synthetic peptide
  Seed: EECLINDPWVLLNAS
EECFINEPVVLANAS

SEQ ID NO: 253529 - protein, 15 aa, Artificial Sequence
  Description of Artificial Sequence: Synthetic peptide
  Seed: EECLINDPWVLLNAS
EECFINEPVVLLNAS

SEQ ID NO: 253530 - protein, 15 aa, Artificial Sequence
  Description of Artificial Sequence: Synthetic peptide
  Seed: EECLINDPWVLLNAS
EECFINEPVVLVNAS

SEQ ID NO: 253531 - protein, 15 aa, Artificial Sequence
  Description of Artificial Sequence: Synthetic peptide
  Seed: EECLINDPWVLLNAS
EECFINFPAVLANAS

SEQ ID NO: 253532 - protein, 15 aa, Artificial Sequence
  Description of Artificial Sequence: Synthetic peptide
  Seed: EECLINDPWVLLNAS
EECFINFPAVLFNAS

SEQ ID NO: 253533 - protein, 15 aa, Artificial Sequence
  Description of Artificial Sequence: Synthetic peptide
  Seed: EECLINDPWVLLNAS
EECFINFPAVLGNAS

SEQ ID NO: 253534 - protein, 15 aa, Artificial Sequence
  Description of Artificial Sequence: Synthetic peptide
  Seed: EECLINDPWVLLNAS
EECFINFPAVLHNAS

SEQ ID NO: 253535 - protein, 15 aa, Artificial Sequence
  Description of Artificial Sequence: Synthetic peptide
  Seed: EECLINDPWVLLNAS
EECFINFPAVLINAS

SEQ ID NO: 253536 - protein, 15 aa, Artificial Sequence
  Description of Artificial Sequence: Synthetic peptide
  Seed: EECLINDPWVLLNAS
EECFINFPAVLLNAS

SEQ ID NO: 253537 - protein, 15 aa, Artificial Sequence
  Description of Artificial Sequence: Synthetic peptide
  Seed: EECLINDPWVLLNAS
EECFINFPAVLMNAS

SEQ ID NO: 253538 - protein, 15 aa, Artificial Sequence
  Description of Artificial Sequence: Synthetic peptide
  Seed: EECLINDPWVLLNAS
EECFINFPAVLNNAS

SEQ ID NO: 253539 - protein, 15 aa, Artificial Sequence
  Description of Artificial Sequence: Synthetic peptide
  Seed: EECLINDPWVLLNAS
EECFINFPAVLSNAS

SEQ ID NO: 253540 - protein, 15 aa, Artificial Sequence
  Description of Artificial Sequence: Synthetic peptide
  Seed: EECLINDPWVLLNAS
EECFINFPAVLTNAS

SEQ ID NO: 253541 - protein, 15 aa, Artificial Sequence
  Description of Artificial Sequence: Synthetic peptide
  Seed: EECLINDPWVLLNAS
EECFINFPAVLVNAS

SEQ ID NO: 253542 - protein, 15 aa, Artificial Sequence
  Description of Artificial Sequence: Synthetic peptide
  Seed: EECLINDPWVLLNAS
EECFINFPFVLANAS

SEQ ID NO: 253543 - protein, 15 aa, Artificial Sequence
  Description of Artificial Sequence: Synthetic peptide
  Seed: EECLINDPWVLLNAS
EECFINFPFVLENAS

SEQ ID NO: 253544 - protein, 15 aa, Artificial Sequence
  Description of Artificial Sequence: Synthetic peptide
  Seed: EECLINDPWVLLNAS
EECFINFPFVLFNAS

SEQ ID NO: 253545 - protein, 15 aa, Artificial Sequence
  Description of Artificial Sequence: Synthetic peptide
  Seed: EECLINDPWVLLNAS
EECFINFPFVLINAS

SEQ ID NO: 253546 - protein, 15 aa, Artificial Sequence
  Description of Artificial Sequence: Synthetic peptide
  Seed: EECLINDPWVLLNAS
EECFINFPFVLLNAS

SEQ ID NO: 253547 - protein, 15 aa, Artificial Sequence
  Description of Artificial Sequence: Synthetic peptide
  Seed: EECLINDPWVLLNAS
EECFINFPFVLMNAS

SEQ ID NO: 253548 - protein, 15 aa, Artificial Sequence
  Description of Artificial Sequence: Synthetic peptide
  Seed: EECLINDPWVLLNAS
EECFINFPFVLNNAS

SEQ ID NO: 253549 - protein, 15 aa, Artificial Sequence
  Description of Artificial Sequence: Synthetic peptide
  Seed: EECLINDPWVLLNAS
EECFINFPFVLSNAS

SEQ ID NO: 253550 - protein, 15 aa, Artificial Sequence
  Description of Artificial Sequence: Synthetic peptide
  Seed: EECLINDPWVLLNAS
EECFINFPFVLTNAS

SEQ ID NO: 253551 - protein, 15 aa, Artificial Sequence
  Description of Artificial Sequence: Synthetic peptide
  Seed: EECLINDPWVLLNAS
EECFINFPFVLVNAS

SEQ ID NO: 253552 - protein, 15 aa, Artificial Sequence
  Description of Artificial Sequence: Synthetic peptide
  Seed: EECLINDPWVLLNAS
EECFINFPFVLYNAS

SEQ ID NO: 253553 - protein, 15 aa, Artificial Sequence
  Description of Artificial Sequence: Synthetic peptide
  Seed: EECLINDPWVLLNAS
EECFINFPGVLANAS

SEQ ID NO: 253554 - protein, 15 aa, Artificial Sequence
  Description of Artificial Sequence: Synthetic peptide
  Seed: EECLINDPWVLLNAS
EECFINFPGVLGNAS

SEQ ID NO: 253555 - protein, 15 aa, Artificial Sequence
  Description of Artificial Sequence: Synthetic peptide
  Seed: EECLINDPWVLLNAS
EECFINFPGVLINAS

SEQ ID NO: 253556 - protein, 15 aa, Artificial Sequence
  Description of Artificial Sequence: Synthetic peptide
  Seed: EECLINDPWVLLNAS
EECFINFPGVLLNAS

SEQ ID NO: 253557 - protein, 15 aa, Artificial Sequence
  Description of Artificial Sequence: Synthetic peptide
  Seed: EECLINDPWVLLNAS
EECFINFPGVLMNAS

SEQ ID NO: 253558 - protein, 15 aa, Artificial Sequence
  Description of Artificial Sequence: Synthetic peptide
  Seed: EECLINDPWVLLNAS
EECFINFPGVLSNAS

SEQ ID NO: 253559 - protein, 15 aa, Artificial Sequence
  Description of Artificial Sequence: Synthetic peptide
  Seed: EECLINDPWVLLNAS
EECFINFPGVLTNAS

SEQ ID NO: 253560 - protein, 15 aa, Artificial Sequence
  Description of Artificial Sequence: Synthetic peptide
  Seed: EECLINDPWVLLNAS
EECFINFPGVLVNAS

SEQ ID NO: 253561 - protein, 15 aa, Artificial Sequence
  Description of Artificial Sequence: Synthetic peptide
  Seed: EECLINDPWVLLNAS
EECFINFPLVLINAS

SEQ ID NO: 253562 - protein, 15 aa, Artificial Sequence
  Description of Artificial Sequence: Synthetic peptide
  Seed: EECLINDPWVLLNAS
EECFINFPLVLLNAS

SEQ ID NO: 253563 - protein, 15 aa, Artificial Sequence
  Description of Artificial Sequence: Synthetic peptide
  Seed: EECLINDPWVLLNAS
EECFINFPLVLVNAS

SEQ ID NO: 253564 - protein, 15 aa, Artificial Sequence
  Description of Artificial Sequence: Synthetic peptide
  Seed: EECLINDPWVLLNAS
EECFINFPNVLANAS

SEQ ID NO: 253565 - protein, 15 aa, Artificial Sequence
  Description of Artificial Sequence: Synthetic peptide
  Seed: EECLINDPWVLLNAS
EECFINFPNVLINAS

SEQ ID NO: 253566 - protein, 15 aa, Artificial Sequence
  Description of Artificial Sequence: Synthetic peptide
  Seed: EECLINDPWVLLNAS
EECFINFPNVLLNAS

SEQ ID NO: 253567 - protein, 15 aa, Artificial Sequence
  Description of Artificial Sequence: Synthetic peptide
  Seed: EECLINDPWVLLNAS
EECFINFPNVLMNAS

SEQ ID NO: 253568 - protein, 15 aa, Artificial Sequence
  Description of Artificial Sequence: Synthetic peptide
  Seed: EECLINDPWVLLNAS
EECFINFPNVLSNAS

SEQ ID NO: 253569 - protein, 15 aa, Artificial Sequence
  Description of Artificial Sequence: Synthetic peptide
  Seed: EECLINDPWVLLNAS
EECFINFPNVLTNAS

SEQ ID NO: 253570 - protein, 15 aa, Artificial Sequence
  Description of Artificial Sequence: Synthetic peptide
  Seed: EECLINDPWVLLNAS
EECFINFPNVLVNAS

SEQ ID NO: 253571 - protein, 15 aa, Artificial Sequence
  Description of Artificial Sequence: Synthetic peptide
  Seed: EECLINDPWVLLNAS
EECFINFPPVLANAS

SEQ ID NO: 253572 - protein, 15 aa, Artificial Sequence
  Description of Artificial Sequence: Synthetic peptide
  Seed: EECLINDPWVLLNAS
EECFINFPPVLGNAS

SEQ ID NO: 253573 - protein, 15 aa, Artificial Sequence
  Description of Artificial Sequence: Synthetic peptide
  Seed: EECLINDPWVLLNAS
EECFINFPPVLINAS

SEQ ID NO: 253574 - protein, 15 aa, Artificial Sequence
  Description of Artificial Sequence: Synthetic peptide
  Seed: EECLINDPWVLLNAS
EECFINFPPVLLNAS

SEQ ID NO: 253575 - protein, 15 aa, Artificial Sequence
  Description of Artificial Sequence: Synthetic peptide
  Seed: EECLINDPWVLLNAS
EECFINFPPVLMNAS

SEQ ID NO: 253576 - protein, 15 aa, Artificial Sequence
  Description of Artificial Sequence: Synthetic peptide
  Seed: EECLINDPWVLLNAS
EECFINFPPVLSNAS

SEQ ID NO: 253577 - protein, 15 aa, Artificial Sequence
  Description of Artificial Sequence: Synthetic peptide
  Seed: EECLINDPWVLLNAS
EECFINFPPVLTNAS

SEQ ID NO: 253578 - protein, 15 aa, Artificial Sequence
  Description of Artificial Sequence: Synthetic peptide
  Seed: EECLINDPWVLLNAS
EECFINFPPVLVNAS

SEQ ID NO: 253579 - protein, 15 aa, Artificial Sequence
  Description of Artificial Sequence: Synthetic peptide
  Seed: EECLINDPWVLLNAS
EECFINFPSVLANAS

SEQ ID NO: 253580 - protein, 15 aa, Artificial Sequence
  Description of Artificial Sequence: Synthetic peptide
  Seed: EECLINDPWVLLNAS
EECFINFPSVLGNAS

SEQ ID NO: 253581 - protein, 15 aa, Artificial Sequence
  Description of Artificial Sequence: Synthetic peptide
  Seed: EECLINDPWVLLNAS
EECFINFPSVLINAS

SEQ ID NO: 253582 - protein, 15 aa, Artificial Sequence
  Description of Artificial Sequence: Synthetic peptide
  Seed: EECLINDPWVLLNAS
EECFINFPSVLLNAS

SEQ ID NO: 253583 - protein, 15 aa, Artificial Sequence
  Description of Artificial Sequence: Synthetic peptide
  Seed: EECLINDPWVLLNAS
EECFINFPSVLMNAS

SEQ ID NO: 253584 - protein, 15 aa, Artificial Sequence
  Description of Artificial Sequence: Synthetic peptide
  Seed: EECLINDPWVLLNAS
EECFINFPSVLSNAS

SEQ ID NO: 253585 - protein, 15 aa, Artificial Sequence
  Description of Artificial Sequence: Synthetic peptide
  Seed: EECLINDPWVLLNAS
EECFINFPSVLTNAS

SEQ ID NO: 253586 - protein, 15 aa, Artificial Sequence
  Description of Artificial Sequence: Synthetic peptide
  Seed: EECLINDPWVLLNAS
EECFINFPSVLVNAS

SEQ ID NO: 253587 - protein, 15 aa, Artificial Sequence
  Description of Artificial Sequence: Synthetic peptide
  Seed: EECLINDPWVLLNAS
EECFINFPTVLANAS

SEQ ID NO: 253588 - protein, 15 aa, Artificial Sequence
  Description of Artificial Sequence: Synthetic peptide
  Seed: EECLINDPWVLLNAS
EECFINFPTVLINAS

SEQ ID NO: 253589 - protein, 15 aa, Artificial Sequence
  Description of Artificial Sequence: Synthetic peptide
  Seed: EECLINDPWVLLNAS
EECFINFPTVLLNAS

SEQ ID NO: 253590 - protein, 15 aa, Artificial Sequence
  Description of Artificial Sequence: Synthetic peptide
  Seed: EECLINDPWVLLNAS
EECFINFPTVLMNAS

SEQ ID NO: 253591 - protein, 15 aa, Artificial Sequence
  Description of Artificial Sequence: Synthetic peptide
  Seed: EECLINDPWVLLNAS
EECFINFPTVLSNAS

SEQ ID NO: 253592 - protein, 15 aa, Artificial Sequence
  Description of Artificial Sequence: Synthetic peptide
  Seed: EECLINDPWVLLNAS
EECFINFPTVLTNAS

SEQ ID NO: 253593 - protein, 15 aa, Artificial Sequence
  Description of Artificial Sequence: Synthetic peptide
  Seed: EECLINDPWVLLNAS
EECFINFPTVLVNAS

SEQ ID NO: 253594 - protein, 15 aa, Artificial Sequence
  Description of Artificial Sequence: Synthetic peptide
  Seed: EECLINDPWVLLNAS
EECFINFPVVLANAS

SEQ ID NO: 253595 - protein, 15 aa, Artificial Sequence
  Description of Artificial Sequence: Synthetic peptide
  Seed: EECLINDPWVLLNAS
EECFINFPVVLVNAS

SEQ ID NO: 253596 - protein, 15 aa, Artificial Sequence
  Description of Artificial Sequence: Synthetic peptide
  Seed: EECLINDPWVLLNAS
EECFINFPYVLFNAS

SEQ ID NO: 253597 - protein, 15 aa, Artificial Sequence
  Description of Artificial Sequence: Synthetic peptide
  Seed: EECLINDPWVLLNAS
EECFINFPYVLINAS

SEQ ID NO: 253598 - protein, 15 aa, Artificial Sequence
  Description of Artificial Sequence: Synthetic peptide
  Seed: EECLINDPWVLLNAS
EECFINFPYVLLNAS

SEQ ID NO: 253599 - protein, 15 aa, Artificial Sequence
  Description of Artificial Sequence: Synthetic peptide
  Seed: EECLINDPWVLLNAS
EECFINFPYVLVNAS

SEQ ID NO: 253600 - protein, 15 aa, Artificial Sequence
  Description of Artificial Sequence: Synthetic peptide
  Seed: EECLINDPWVLLNAS
EECFINGPAVLANAS

SEQ ID NO: 253601 - protein, 15 aa, Artificial Sequence
  Description of Artificial Sequence: Synthetic peptide
  Seed: EECLINDPWVLLNAS
EECFINGPAVLFNAS

SEQ ID NO: 253602 - protein, 15 aa, Artificial Sequence
  Description of Artificial Sequence: Synthetic peptide
  Seed: EECLINDPWVLLNAS
EECFINGPAVLGNAS

SEQ ID NO: 253603 - protein, 15 aa, Artificial Sequence
  Description of Artificial Sequence: Synthetic peptide
  Seed: EECLINDPWVLLNAS
EECFINGPAVLINAS

SEQ ID NO: 253604 - protein, 15 aa, Artificial Sequence
  Description of Artificial Sequence: Synthetic peptide
  Seed: EECLINDPWVLLNAS
EECFINGPAVLLNAS

SEQ ID NO: 253605 - protein, 15 aa, Artificial Sequence
  Description of Artificial Sequence: Synthetic peptide
  Seed: EECLINDPWVLLNAS
EECFINGPAVLMNAS

SEQ ID NO: 253606 - protein, 15 aa, Artificial Sequence
  Description of Artificial Sequence: Synthetic peptide
  Seed: EECLINDPWVLLNAS
EECFINGPAVLSNAS

SEQ ID NO: 253607 - protein, 15 aa, Artificial Sequence
  Description of Artificial Sequence: Synthetic peptide
  Seed: EECLINDPWVLLNAS
EECFINGPAVLTNAS

SEQ ID NO: 253608 - protein, 15 aa, Artificial Sequence
  Description of Artificial Sequence: Synthetic peptide
  Seed: EECLINDPWVLLNAS
EECFINGPAVLVNAS

SEQ ID NO: 253609 - protein, 15 aa, Artificial Sequence
  Description of Artificial Sequence: Synthetic peptide
  Seed: EECLINDPWVLLNAS
EECFINGPFVLINAS

SEQ ID NO: 253610 - protein, 15 aa, Artificial Sequence
  Description of Artificial Sequence: Synthetic peptide
  Seed: EECLINDPWVLLNAS
EECFINGPFVLLNAS

SEQ ID NO: 253611 - protein, 15 aa, Artificial Sequence
  Description of Artificial Sequence: Synthetic peptide
  Seed: EECLINDPWVLLNAS
EECFINGPFVLVNAS

SEQ ID NO: 253612 - protein, 15 aa, Artificial Sequence
  Description of Artificial Sequence: Synthetic peptide
  Seed: EECLINDPWVLLNAS
EECFINGPGVLANAS

SEQ ID NO: 253613 - protein, 15 aa, Artificial Sequence
  Description of Artificial Sequence: Synthetic peptide
  Seed: EECLINDPWVLLNAS
EECFINGPGVLINAS

SEQ ID NO: 253614 - protein, 15 aa, Artificial Sequence
  Description of Artificial Sequence: Synthetic peptide
  Seed: EECLINDPWVLLNAS
EECFINGPGVLLNAS

SEQ ID NO: 253615 - protein, 15 aa, Artificial Sequence
  Description of Artificial Sequence: Synthetic peptide
  Seed: EECLINDPWVLLNAS
EECFINGPGVLMNAS

SEQ ID NO: 253616 - protein, 15 aa, Artificial Sequence
  Description of Artificial Sequence: Synthetic peptide
  Seed: EECLINDPWVLLNAS
EECFINGPGVLSNAS

SEQ ID NO: 253617 - protein, 15 aa, Artificial Sequence
  Description of Artificial Sequence: Synthetic peptide
  Seed: EECLINDPWVLLNAS
EECFINGPGVLTNAS

SEQ ID NO: 253618 - protein, 15 aa, Artificial Sequence
  Description of Artificial Sequence: Synthetic peptide
  Seed: EECLINDPWVLLNAS
EECFINGPGVLVNAS

SEQ ID NO: 253619 - protein, 15 aa, Artificial Sequence
  Description of Artificial Sequence: Synthetic peptide
  Seed: EECLINDPWVLLNAS
EECFINGPNVLANAS

SEQ ID NO: 253620 - protein, 15 aa, Artificial Sequence
  Description of Artificial Sequence: Synthetic peptide
  Seed: EECLINDPWVLLNAS
EECFINGPNVLINAS

SEQ ID NO: 253621 - protein, 15 aa, Artificial Sequence
  Description of Artificial Sequence: Synthetic peptide
  Seed: EECLINDPWVLLNAS
EECFINGPNVLLNAS

SEQ ID NO: 253622 - protein, 15 aa, Artificial Sequence
  Description of Artificial Sequence: Synthetic peptide
  Seed: EECLINDPWVLLNAS
EECFINGPNVLMNAS

SEQ ID NO: 253623 - protein, 15 aa, Artificial Sequence
  Description of Artificial Sequence: Synthetic peptide
  Seed: EECLINDPWVLLNAS
EECFINGPNVLVNAS

SEQ ID NO: 253624 - protein, 15 aa, Artificial Sequence
  Description of Artificial Sequence: Synthetic peptide
  Seed: EECLINDPWVLLNAS
EECFINGPPVLANAS

SEQ ID NO: 253625 - protein, 15 aa, Artificial Sequence
  Description of Artificial Sequence: Synthetic peptide
  Seed: EECLINDPWVLLNAS
EECFINGPPVLINAS

SEQ ID NO: 253626 - protein, 15 aa, Artificial Sequence
  Description of Artificial Sequence: Synthetic peptide
  Seed: EECLINDPWVLLNAS
EECFINGPPVLLNAS

SEQ ID NO: 253627 - protein, 15 aa, Artificial Sequence
  Description of Artificial Sequence: Synthetic peptide
  Seed: EECLINDPWVLLNAS
EECFINGPPVLMNAS

SEQ ID NO: 253628 - protein, 15 aa, Artificial Sequence
  Description of Artificial Sequence: Synthetic peptide
  Seed: EECLINDPWVLLNAS
EECFINGPPVLVNAS

SEQ ID NO: 253629 - protein, 15 aa, Artificial Sequence
  Description of Artificial Sequence: Synthetic peptide
  Seed: EECLINDPWVLLNAS
EECFINGPSVLANAS

SEQ ID NO: 253630 - protein, 15 aa, Artificial Sequence
  Description of Artificial Sequence: Synthetic peptide
  Seed: EECLINDPWVLLNAS
EECFINGPSVLINAS

SEQ ID NO: 253631 - protein, 15 aa, Artificial Sequence
  Description of Artificial Sequence: Synthetic peptide
  Seed: EECLINDPWVLLNAS
EECFINGPSVLLNAS

SEQ ID NO: 253632 - protein, 15 aa, Artificial Sequence
  Description of Artificial Sequence: Synthetic peptide
  Seed: EECLINDPWVLLNAS
EECFINGPSVLMNAS

SEQ ID NO: 253633 - protein, 15 aa, Artificial Sequence
  Description of Artificial Sequence: Synthetic peptide
  Seed: EECLINDPWVLLNAS
EECFINGPSVLSNAS

SEQ ID NO: 253634 - protein, 15 aa, Artificial Sequence
  Description of Artificial Sequence: Synthetic peptide
  Seed: EECLINDPWVLLNAS
EECFINGPSVLTNAS

SEQ ID NO: 253635 - protein, 15 aa, Artificial Sequence
  Description of Artificial Sequence: Synthetic peptide
  Seed: EECLINDPWVLLNAS
EECFINGPSVLVNAS

SEQ ID NO: 253636 - protein, 15 aa, Artificial Sequence
  Description of Artificial Sequence: Synthetic peptide
  Seed: EECLINDPWVLLNAS
EECFINGPTVLANAS

SEQ ID NO: 253637 - protein, 15 aa, Artificial Sequence
  Description of Artificial Sequence: Synthetic peptide
  Seed: EECLINDPWVLLNAS
EECFINGPTVLINAS

SEQ ID NO: 253638 - protein, 15 aa, Artificial Sequence
  Description of Artificial Sequence: Synthetic peptide
  Seed: EECLINDPWVLLNAS
EECFINGPTVLLNAS

SEQ ID NO: 253639 - protein, 15 aa, Artificial Sequence
  Description of Artificial Sequence: Synthetic peptide
  Seed: EECLINDPWVLLNAS
EECFINGPTVLMNAS

SEQ ID NO: 253640 - protein, 15 aa, Artificial Sequence
  Description of Artificial Sequence: Synthetic peptide
  Seed: EECLINDPWVLLNAS
EECFINGPTVLVNAS

SEQ ID NO: 253641 - protein, 15 aa, Artificial Sequence
  Description of Artificial Sequence: Synthetic peptide
  Seed: EECLINDPWVLLNAS
EECFINGPVVLANAS

SEQ ID NO: 253642 - protein, 15 aa, Artificial Sequence
  Description of Artificial Sequence: Synthetic peptide
  Seed: EECLINDPWVLLNAS
EECFINGPVVLINAS

SEQ ID NO: 253643 - protein, 15 aa, Artificial Sequence
  Description of Artificial Sequence: Synthetic peptide
  Seed: EECLINDPWVLLNAS
EECFINGPVVLLNAS

SEQ ID NO: 253644 - protein, 15 aa, Artificial Sequence
  Description of Artificial Sequence: Synthetic peptide
  Seed: EECLINDPWVLLNAS
EECFINGPVVLMNAS

SEQ ID NO: 253645 - protein, 15 aa, Artificial Sequence
  Description of Artificial Sequence: Synthetic peptide
  Seed: EECLINDPWVLLNAS
EECFINGPVVLVNAS

SEQ ID NO: 253646 - protein, 15 aa, Artificial Sequence
  Description of Artificial Sequence: Synthetic peptide
  Seed: EECLINDPWVLLNAS
EECFINHPAVLANAS

SEQ ID NO: 253647 - protein, 15 aa, Artificial Sequence
  Description of Artificial Sequence: Synthetic peptide
  Seed: EECLINDPWVLLNAS
EECFINHPAVLFNAS

SEQ ID NO: 253648 - protein, 15 aa, Artificial Sequence
  Description of Artificial Sequence: Synthetic peptide
  Seed: EECLINDPWVLLNAS
EECFINHPAVLGNAS

SEQ ID NO: 253649 - protein, 15 aa, Artificial Sequence
  Description of Artificial Sequence: Synthetic peptide
  Seed: EECLINDPWVLLNAS
EECFINHPAVLINAS

SEQ ID NO: 253650 - protein, 15 aa, Artificial Sequence
  Description of Artificial Sequence: Synthetic peptide
  Seed: EECLINDPWVLLNAS
EECFINHPAVLLNAS

SEQ ID NO: 253651 - protein, 15 aa, Artificial Sequence
  Description of Artificial Sequence: Synthetic peptide
  Seed: EECLINDPWVLLNAS
EECFINHPAVLMNAS

SEQ ID NO: 253652 - protein, 15 aa, Artificial Sequence
  Description of Artificial Sequence: Synthetic peptide
  Seed: EECLINDPWVLLNAS
EECFINHPAVLSNAS

SEQ ID NO: 253653 - protein, 15 aa, Artificial Sequence
  Description of Artificial Sequence: Synthetic peptide
  Seed: EECLINDPWVLLNAS
EECFINHPAVLTNAS

SEQ ID NO: 253654 - protein, 15 aa, Artificial Sequence
  Description of Artificial Sequence: Synthetic peptide
  Seed: EECLINDPWVLLNAS
EECFINHPAVLVNAS

SEQ ID NO: 253655 - protein, 15 aa, Artificial Sequence
  Description of Artificial Sequence: Synthetic peptide
  Seed: EECLINDPWVLLNAS
EECFINHPFVLANAS

SEQ ID NO: 253656 - protein, 15 aa, Artificial Sequence
  Description of Artificial Sequence: Synthetic peptide
  Seed: EECLINDPWVLLNAS
EECFINHPFVLENAS

SEQ ID NO: 253657 - protein, 15 aa, Artificial Sequence
  Description of Artificial Sequence: Synthetic peptide
  Seed: EECLINDPWVLLNAS
EECFINHPFVLFNAS

SEQ ID NO: 253658 - protein, 15 aa, Artificial Sequence
  Description of Artificial Sequence: Synthetic peptide
  Seed: EECLINDPWVLLNAS
EECFINHPFVLINAS

SEQ ID NO: 253659 - protein, 15 aa, Artificial Sequence
  Description of Artificial Sequence: Synthetic peptide
  Seed: EECLINDPWVLLNAS
EECFINHPFVLLNAS

SEQ ID NO: 253660 - protein, 15 aa, Artificial Sequence
  Description of Artificial Sequence: Synthetic peptide
  Seed: EECLINDPWVLLNAS
EECFINHPFVLMNAS

SEQ ID NO: 253661 - protein, 15 aa, Artificial Sequence
  Description of Artificial Sequence: Synthetic peptide
  Seed: EECLINDPWVLLNAS
EECFINHPFVLSNAS

SEQ ID NO: 253662 - protein, 15 aa, Artificial Sequence
  Description of Artificial Sequence: Synthetic peptide
  Seed: EECLINDPWVLLNAS
EECFINHPFVLTNAS

SEQ ID NO: 253663 - protein, 15 aa, Artificial Sequence
  Description of Artificial Sequence: Synthetic peptide
  Seed: EECLINDPWVLLNAS
EECFINHPFVLVNAS

SEQ ID NO: 253664 - protein, 15 aa, Artificial Sequence
  Description of Artificial Sequence: Synthetic peptide
  Seed: EECLINDPWVLLNAS
EECFINHPFVLYNAS

SEQ ID NO: 253665 - protein, 15 aa, Artificial Sequence
  Description of Artificial Sequence: Synthetic peptide
  Seed: EECLINDPWVLLNAS
EECFINHPGVLANAS

SEQ ID NO: 253666 - protein, 15 aa, Artificial Sequence
  Description of Artificial Sequence: Synthetic peptide
  Seed: EECLINDPWVLLNAS
EECFINHPGVLINAS

SEQ ID NO: 253667 - protein, 15 aa, Artificial Sequence
  Description of Artificial Sequence: Synthetic peptide
  Seed: EECLINDPWVLLNAS
EECFINHPGVLLNAS

SEQ ID NO: 253668 - protein, 15 aa, Artificial Sequence
  Description of Artificial Sequence: Synthetic peptide
  Seed: EECLINDPWVLLNAS
EECFINHPGVLMNAS

SEQ ID NO: 253669 - protein, 15 aa, Artificial Sequence
  Description of Artificial Sequence: Synthetic peptide
  Seed: EECLINDPWVLLNAS
EECFINHPGVLVNAS

SEQ ID NO: 253670 - protein, 15 aa, Artificial Sequence
  Description of Artificial Sequence: Synthetic peptide
  Seed: EECLINDPWVLLNAS
EECFINHPLVLINAS

SEQ ID NO: 253671 - protein, 15 aa, Artificial Sequence
  Description of Artificial Sequence: Synthetic peptide
  Seed: EECLINDPWVLLNAS
EECFINHPLVLLNAS

SEQ ID NO: 253672 - protein, 15 aa, Artificial Sequence
  Description of Artificial Sequence: Synthetic peptide
  Seed: EECLINDPWVLLNAS
EECFINHPLVLVNAS

SEQ ID NO: 253673 - protein, 15 aa, Artificial Sequence
  Description of Artificial Sequence: Synthetic peptide
  Seed: EECLINDPWVLLNAS
EECFINHPNVLANAS

SEQ ID NO: 253674 - protein, 15 aa, Artificial Sequence
  Description of Artificial Sequence: Synthetic peptide
  Seed: EECLINDPWVLLNAS
EECFINHPNVLFNAS

SEQ ID NO: 253675 - protein, 15 aa, Artificial Sequence
  Description of Artificial Sequence: Synthetic peptide
  Seed: EECLINDPWVLLNAS
EECFINHPNVLINAS

SEQ ID NO: 253676 - protein, 15 aa, Artificial Sequence
  Description of Artificial Sequence: Synthetic peptide
  Seed: EECLINDPWVLLNAS
EECFINHPNVLLNAS

SEQ ID NO: 253677 - protein, 15 aa, Artificial Sequence
  Description of Artificial Sequence: Synthetic peptide
  Seed: EECLINDPWVLLNAS
EECFINHPNVLVNAS

SEQ ID NO: 253678 - protein, 15 aa, Artificial Sequence
  Description of Artificial Sequence: Synthetic peptide
  Seed: EECLINDPWVLLNAS
EECFINHPPVLANAS

SEQ ID NO: 253679 - protein, 15 aa, Artificial Sequence
  Description of Artificial Sequence: Synthetic peptide
  Seed: EECLINDPWVLLNAS
EECFINHPPVLINAS

SEQ ID NO: 253680 - protein, 15 aa, Artificial Sequence
  Description of Artificial Sequence: Synthetic peptide
  Seed: EECLINDPWVLLNAS
EECFINHPPVLLNAS

SEQ ID NO: 253681 - protein, 15 aa, Artificial Sequence
  Description of Artificial Sequence: Synthetic peptide
  Seed: EECLINDPWVLLNAS
EECFINHPPVLVNAS

SEQ ID NO: 253682 - protein, 15 aa, Artificial Sequence
  Description of Artificial Sequence: Synthetic peptide
  Seed: EECLINDPWVLLNAS
EECFINHPSVLANAS

SEQ ID NO: 253683 - protein, 15 aa, Artificial Sequence
  Description of Artificial Sequence: Synthetic peptide
  Seed: EECLINDPWVLLNAS
EECFINHPSVLINAS

SEQ ID NO: 253684 - protein, 15 aa, Artificial Sequence
  Description of Artificial Sequence: Synthetic peptide
  Seed: EECLINDPWVLLNAS
EECFINHPSVLLNAS

SEQ ID NO: 253685 - protein, 15 aa, Artificial Sequence
  Description of Artificial Sequence: Synthetic peptide
  Seed: EECLINDPWVLLNAS
EECFINHPSVLMNAS

SEQ ID NO: 253686 - protein, 15 aa, Artificial Sequence
  Description of Artificial Sequence: Synthetic peptide
  Seed: EECLINDPWVLLNAS
EECFINHPSVLSNAS

SEQ ID NO: 253687 - protein, 15 aa, Artificial Sequence
  Description of Artificial Sequence: Synthetic peptide
  Seed: EECLINDPWVLLNAS
EECFINHPSVLTNAS

SEQ ID NO: 253688 - protein, 15 aa, Artificial Sequence
  Description of Artificial Sequence: Synthetic peptide
  Seed: EECLINDPWVLLNAS
EECFINHPSVLVNAS

SEQ ID NO: 253689 - protein, 15 aa, Artificial Sequence
  Description of Artificial Sequence: Synthetic peptide
  Seed: EECLINDPWVLLNAS
EECFINHPTVLANAS

SEQ ID NO: 253690 - protein, 15 aa, Artificial Sequence
  Description of Artificial Sequence: Synthetic peptide
  Seed: EECLINDPWVLLNAS
EECFINHPTVLINAS

SEQ ID NO: 253691 - protein, 15 aa, Artificial Sequence
  Description of Artificial Sequence: Synthetic peptide
  Seed: EECLINDPWVLLNAS
EECFINHPTVLLNAS

SEQ ID NO: 253692 - protein, 15 aa, Artificial Sequence
  Description of Artificial Sequence: Synthetic peptide
  Seed: EECLINDPWVLLNAS
EECFINHPTVLVNAS

SEQ ID NO: 253693 - protein, 15 aa, Artificial Sequence
  Description of Artificial Sequence: Synthetic peptide
  Seed: EECLINDPWVLLNAS
EECFINHPWVLLNAS

SEQ ID NO: 253694 - protein, 15 aa, Artificial Sequence
  Description of Artificial Sequence: Synthetic peptide
  Seed: EECLINDPWVLLNAS
EECFINIPAVLANAS

SEQ ID NO: 253695 - protein, 15 aa, Artificial Sequence
  Description of Artificial Sequence: Synthetic peptide
  Seed: EECLINDPWVLLNAS
EECFINIPAVLCNAS

SEQ ID NO: 253696 - protein, 15 aa, Artificial Sequence
  Description of Artificial Sequence: Synthetic peptide
  Seed: EECLINDPWVLLNAS
EECFINIPAVLDNAS

SEQ ID NO: 253697 - protein, 15 aa, Artificial Sequence
  Description of Artificial Sequence: Synthetic peptide
  Seed: EECLINDPWVLLNAS
EECFINIPAVLENAS

SEQ ID NO: 253698 - protein, 15 aa, Artificial Sequence
  Description of Artificial Sequence: Synthetic peptide
  Seed: EECLINDPWVLLNAS
EECFINIPAVLFNAS

SEQ ID NO: 253699 - protein, 15 aa, Artificial Sequence
  Description of Artificial Sequence: Synthetic peptide
  Seed: EECLINDPWVLLNAS
EECFINIPAVLGNAS

SEQ ID NO: 253700 - protein, 15 aa, Artificial Sequence
  Description of Artificial Sequence: Synthetic peptide
  Seed: EECLINDPWVLLNAS
EECFINIPAVLHNAS

SEQ ID NO: 253701 - protein, 15 aa, Artificial Sequence
  Description of Artificial Sequence: Synthetic peptide
  Seed: EECLINDPWVLLNAS
EECFINIPAVLINAS

SEQ ID NO: 253702 - protein, 15 aa, Artificial Sequence
  Description of Artificial Sequence: Synthetic peptide
  Seed: EECLINDPWVLLNAS
EECFINIPAVLKNAS

SEQ ID NO: 253703 - protein, 15 aa, Artificial Sequence
  Description of Artificial Sequence: Synthetic peptide
  Seed: EECLINDPWVLLNAS
EECFINIPAVLLNAS

SEQ ID NO: 253704 - protein, 15 aa, Artificial Sequence
  Description of Artificial Sequence: Synthetic peptide
  Seed: EECLINDPWVLLNAS
EECFINIPAVLMNAS

SEQ ID NO: 253705 - protein, 15 aa, Artificial Sequence
  Description of Artificial Sequence: Synthetic peptide
  Seed: EECLINDPWVLLNAS
EECFINIPAVLNNAS

SEQ ID NO: 253706 - protein, 15 aa, Artificial Sequence
  Description of Artificial Sequence: Synthetic peptide
  Seed: EECLINDPWVLLNAS
EECFINIPAVLPNAS

SEQ ID NO: 253707 - protein, 15 aa, Artificial Sequence
  Description of Artificial Sequence: Synthetic peptide
  Seed: EECLINDPWVLLNAS
EECFINIPAVLQNAS

SEQ ID NO: 253708 - protein, 15 aa, Artificial Sequence
  Description of Artificial Sequence: Synthetic peptide
  Seed: EECLINDPWVLLNAS
EECFINIPAVLRNAS

SEQ ID NO: 253709 - protein, 15 aa, Artificial Sequence
  Description of Artificial Sequence: Synthetic peptide
  Seed: EECLINDPWVLLNAS
EECFINIPAVLSNAS

SEQ ID NO: 253710 - protein, 15 aa, Artificial Sequence
  Description of Artificial Sequence: Synthetic peptide
  Seed: EECLINDPWVLLNAS
EECFINIPAVLTNAS

SEQ ID NO: 253711 - protein, 15 aa, Artificial Sequence
  Description of Artificial Sequence: Synthetic peptide
  Seed: EECLINDPWVLLNAS
EECFINIPAVLVNAS

SEQ ID NO: 253712 - protein, 15 aa, Artificial Sequence
  Description of Artificial Sequence: Synthetic peptide
  Seed: EECLINDPWVLLNAS
EECFINIPAVLWNAS

SEQ ID NO: 253713 - protein, 15 aa, Artificial Sequence
  Description of Artificial Sequence: Synthetic peptide
  Seed: EECLINDPWVLLNAS
EECFINIPAVLYNAS

SEQ ID NO: 253714 - protein, 15 aa, Artificial Sequence
  Description of Artificial Sequence: Synthetic peptide
  Seed: EECLINDPWVLLNAS
EECFINIPDVLVNAS

SEQ ID NO: 253715 - protein, 15 aa, Artificial Sequence
  Description of Artificial Sequence: Synthetic peptide
  Seed: EECLINDPWVLLNAS
EECFINIPEVLANAS

SEQ ID NO: 253716 - protein, 15 aa, Artificial Sequence
  Description of Artificial Sequence: Synthetic peptide
  Seed: EECLINDPWVLLNAS
EECFINIPEVLINAS

SEQ ID NO: 253717 - protein, 15 aa, Artificial Sequence
  Description of Artificial Sequence: Synthetic peptide
  Seed: EECLINDPWVLLNAS
EECFINIPEVLLNAS

SEQ ID NO: 253718 - protein, 15 aa, Artificial Sequence
  Description of Artificial Sequence: Synthetic peptide
  Seed: EECLINDPWVLLNAS
EECFINIPEVLVNAS

SEQ ID NO: 253719 - protein, 15 aa, Artificial Sequence
  Description of Artificial Sequence: Synthetic peptide
  Seed: EECLINDPWVLLNAS
EECFINIPFVLANAS

SEQ ID NO: 253720 - protein, 15 aa, Artificial Sequence
  Description of Artificial Sequence: Synthetic peptide
  Seed: EECLINDPWVLLNAS
EECFINIPFVLDNAS

SEQ ID NO: 253721 - protein, 15 aa, Artificial Sequence
  Description of Artificial Sequence: Synthetic peptide
  Seed: EECLINDPWVLLNAS
EECFINIPFVLENAS

SEQ ID NO: 253722 - protein, 15 aa, Artificial Sequence
  Description of Artificial Sequence: Synthetic peptide
  Seed: EECLINDPWVLLNAS
EECFINIPFVLFNAS

SEQ ID NO: 253723 - protein, 15 aa, Artificial Sequence
  Description of Artificial Sequence: Synthetic peptide
  Seed: EECLINDPWVLLNAS
EECFINIPFVLINAS

SEQ ID NO: 253724 - protein, 15 aa, Artificial Sequence
  Description of Artificial Sequence: Synthetic peptide
  Seed: EECLINDPWVLLNAS
EECFINIPFVLLNAS

SEQ ID NO: 253725 - protein, 15 aa, Artificial Sequence
  Description of Artificial Sequence: Synthetic peptide
  Seed: EECLINDPWVLLNAS
EECFINIPFVLMNAS

SEQ ID NO: 253726 - protein, 15 aa, Artificial Sequence
  Description of Artificial Sequence: Synthetic peptide
  Seed: EECLINDPWVLLNAS
EECFINIPFVLNNAS

SEQ ID NO: 253727 - protein, 15 aa, Artificial Sequence
  Description of Artificial Sequence: Synthetic peptide
  Seed: EECLINDPWVLLNAS
EECFINIPFVLSNAS

SEQ ID NO: 253728 - protein, 15 aa, Artificial Sequence
  Description of Artificial Sequence: Synthetic peptide
  Seed: EECLINDPWVLLNAS
EECFINIPFVLTNAS

SEQ ID NO: 253729 - protein, 15 aa, Artificial Sequence
  Description of Artificial Sequence: Synthetic peptide
  Seed: EECLINDPWVLLNAS
EECFINIPFVLVNAS

SEQ ID NO: 253730 - protein, 15 aa, Artificial Sequence
  Description of Artificial Sequence: Synthetic peptide
  Seed: EECLINDPWVLLNAS
EECFINIPFVLYNAS

SEQ ID NO: 253731 - protein, 15 aa, Artificial Sequence
  Description of Artificial Sequence: Synthetic peptide
  Seed: EECLINDPWVLLNAS
EECFINIPGVLANAS

SEQ ID NO: 253732 - protein, 15 aa, Artificial Sequence
  Description of Artificial Sequence: Synthetic peptide
  Seed: EECLINDPWVLLNAS
EECFINIPGVLCNAS

SEQ ID NO: 253733 - protein, 15 aa, Artificial Sequence
  Description of Artificial Sequence: Synthetic peptide
  Seed: EECLINDPWVLLNAS
EECFINIPGVLFNAS

SEQ ID NO: 253734 - protein, 15 aa, Artificial Sequence
  Description of Artificial Sequence: Synthetic peptide
  Seed: EECLINDPWVLLNAS
EECFINIPGVLGNAS

SEQ ID NO: 253735 - protein, 15 aa, Artificial Sequence
  Description of Artificial Sequence: Synthetic peptide
  Seed: EECLINDPWVLLNAS
EECFINIPGVLHNAS

SEQ ID NO: 253736 - protein, 15 aa, Artificial Sequence
  Description of Artificial Sequence: Synthetic peptide
  Seed: EECLINDPWVLLNAS
EECFINIPGVLINAS

SEQ ID NO: 253737 - protein, 15 aa, Artificial Sequence
  Description of Artificial Sequence: Synthetic peptide
  Seed: EECLINDPWVLLNAS
EECFINIPGVLKNAS

SEQ ID NO: 253738 - protein, 15 aa, Artificial Sequence
  Description of Artificial Sequence: Synthetic peptide
  Seed: EECLINDPWVLLNAS
EECFINIPGVLLNAS

SEQ ID NO: 253739 - protein, 15 aa, Artificial Sequence
  Description of Artificial Sequence: Synthetic peptide
  Seed: EECLINDPWVLLNAS
EECFINIPGVLMNAS

SEQ ID NO: 253740 - protein, 15 aa, Artificial Sequence
  Description of Artificial Sequence: Synthetic peptide
  Seed: EECLINDPWVLLNAS
EECFINIPGVLNNAS

SEQ ID NO: 253741 - protein, 15 aa, Artificial Sequence
  Description of Artificial Sequence: Synthetic peptide
  Seed: EECLINDPWVLLNAS
EECFINIPGVLPNAS

SEQ ID NO: 253742 - protein, 15 aa, Artificial Sequence
  Description of Artificial Sequence: Synthetic peptide
  Seed: EECLINDPWVLLNAS
EECFINIPGVLQNAS

SEQ ID NO: 253743 - protein, 15 aa, Artificial Sequence
  Description of Artificial Sequence: Synthetic peptide
  Seed: EECLINDPWVLLNAS
EECFINIPGVLRNAS

SEQ ID NO: 253744 - protein, 15 aa, Artificial Sequence
  Description of Artificial Sequence: Synthetic peptide
  Seed: EECLINDPWVLLNAS
EECFINIPGVLSNAS

SEQ ID NO: 253745 - protein, 15 aa, Artificial Sequence
  Description of Artificial Sequence: Synthetic peptide
  Seed: EECLINDPWVLLNAS
EECFINIPGVLTNAS

SEQ ID NO: 253746 - protein, 15 aa, Artificial Sequence
  Description of Artificial Sequence: Synthetic peptide
  Seed: EECLINDPWVLLNAS
EECFINIPGVLVNAS

SEQ ID NO: 253747 - protein, 15 aa, Artificial Sequence
  Description of Artificial Sequence: Synthetic peptide
  Seed: EECLINDPWVLLNAS
EECFINIPGVLYNAS

SEQ ID NO: 253748 - protein, 15 aa, Artificial Sequence
  Description of Artificial Sequence: Synthetic peptide
  Seed: EECLINDPWVLLNAS
EECFINIPHVLANAS

SEQ ID NO: 253749 - protein, 15 aa, Artificial Sequence
  Description of Artificial Sequence: Synthetic peptide
  Seed: EECLINDPWVLLNAS
EECFINIPHVLINAS

SEQ ID NO: 253750 - protein, 15 aa, Artificial Sequence
  Description of Artificial Sequence: Synthetic peptide
  Seed: EECLINDPWVLLNAS
EECFINIPHVLLNAS

SEQ ID NO: 253751 - protein, 15 aa, Artificial Sequence
  Description of Artificial Sequence: Synthetic peptide
  Seed: EECLINDPWVLLNAS
EECFINIPHVLMNAS

SEQ ID NO: 253752 - protein, 15 aa, Artificial Sequence
  Description of Artificial Sequence: Synthetic peptide
  Seed: EECLINDPWVLLNAS
EECFINIPHVLSNAS

SEQ ID NO: 253753 - protein, 15 aa, Artificial Sequence
  Description of Artificial Sequence: Synthetic peptide
  Seed: EECLINDPWVLLNAS
EECFINIPHVLVNAS

SEQ ID NO: 253754 - protein, 15 aa, Artificial Sequence
  Description of Artificial Sequence: Synthetic peptide
  Seed: EECLINDPWVLLNAS
EECFINIPIVLANAS

SEQ ID NO: 253755 - protein, 15 aa, Artificial Sequence
  Description of Artificial Sequence: Synthetic peptide
  Seed: EECLINDPWVLLNAS
EECFINIPIVLINAS

SEQ ID NO: 253756 - protein, 15 aa, Artificial Sequence
  Description of Artificial Sequence: Synthetic peptide
  Seed: EECLINDPWVLLNAS
EECFINIPIVLLNAS

SEQ ID NO: 253757 - protein, 15 aa, Artificial Sequence
  Description of Artificial Sequence: Synthetic peptide
  Seed: EECLINDPWVLLNAS
EECFINIPIVLSNAS

SEQ ID NO: 253758 - protein, 15 aa, Artificial Sequence
  Description of Artificial Sequence: Synthetic peptide
  Seed: EECLINDPWVLLNAS
EECFINIPIVLTNAS

SEQ ID NO: 253759 - protein, 15 aa, Artificial Sequence
  Description of Artificial Sequence: Synthetic peptide
  Seed: EECLINDPWVLLNAS
EECFINIPIVLVNAS

SEQ ID NO: 253760 - protein, 15 aa, Artificial Sequence
  Description of Artificial Sequence: Synthetic peptide
  Seed: EECLINDPWVLLNAS
EECFINIPMVLANAS

SEQ ID NO: 253761 - protein, 15 aa, Artificial Sequence
  Description of Artificial Sequence: Synthetic peptide
  Seed: EECLINDPWVLLNAS
EECFINIPMVLVNAS

SEQ ID NO: 253762 - protein, 15 aa, Artificial Sequence
  Description of Artificial Sequence: Synthetic peptide
  Seed: EECLINDPWVLLNAS
EECFINIPNVLANAS

SEQ ID NO: 253763 - protein, 15 aa, Artificial Sequence
  Description of Artificial Sequence: Synthetic peptide
  Seed: EECLINDPWVLLNAS
EECFINIPNVLCNAS

SEQ ID NO: 253764 - protein, 15 aa, Artificial Sequence
  Description of Artificial Sequence: Synthetic peptide
  Seed: EECLINDPWVLLNAS
EECFINIPNVLFNAS

SEQ ID NO: 253765 - protein, 15 aa, Artificial Sequence
  Description of Artificial Sequence: Synthetic peptide
  Seed: EECLINDPWVLLNAS
EECFINIPNVLGNAS

SEQ ID NO: 253766 - protein, 15 aa, Artificial Sequence
  Description of Artificial Sequence: Synthetic peptide
  Seed: EECLINDPWVLLNAS
EECFINIPNVLHNAS

SEQ ID NO: 253767 - protein, 15 aa, Artificial Sequence
  Description of Artificial Sequence: Synthetic peptide
  Seed: EECLINDPWVLLNAS
EECFINIPNVLINAS

SEQ ID NO: 253768 - protein, 15 aa, Artificial Sequence
  Description of Artificial Sequence: Synthetic peptide
  Seed: EECLINDPWVLLNAS
EECFINIPNVLLNAS

SEQ ID NO: 253769 - protein, 15 aa, Artificial Sequence
  Description of Artificial Sequence: Synthetic peptide
  Seed: EECLINDPWVLLNAS
EECFINIPNVLMNAS

SEQ ID NO: 253770 - protein, 15 aa, Artificial Sequence
  Description of Artificial Sequence: Synthetic peptide
  Seed: EECLINDPWVLLNAS
EECFINIPNVLNNAS

SEQ ID NO: 253771 - protein, 15 aa, Artificial Sequence
  Description of Artificial Sequence: Synthetic peptide
  Seed: EECLINDPWVLLNAS
EECFINIPNVLPNAS

SEQ ID NO: 253772 - protein, 15 aa, Artificial Sequence
  Description of Artificial Sequence: Synthetic peptide
  Seed: EECLINDPWVLLNAS
EECFINIPNVLQNAS

SEQ ID NO: 253773 - protein, 15 aa, Artificial Sequence
  Description of Artificial Sequence: Synthetic peptide
  Seed: EECLINDPWVLLNAS
EECFINIPNVLSNAS

SEQ ID NO: 253774 - protein, 15 aa, Artificial Sequence
  Description of Artificial Sequence: Synthetic peptide
  Seed: EECLINDPWVLLNAS
EECFINIPNVLTNAS

SEQ ID NO: 253775 - protein, 15 aa, Artificial Sequence
  Description of Artificial Sequence: Synthetic peptide
  Seed: EECLINDPWVLLNAS
EECFINIPNVLVNAS

SEQ ID NO: 253776 - protein, 15 aa, Artificial Sequence
  Description of Artificial Sequence: Synthetic peptide
  Seed: EECLINDPWVLLNAS
EECFINIPPVLANAS

SEQ ID NO: 253777 - protein, 15 aa, Artificial Sequence
  Description of Artificial Sequence: Synthetic peptide
  Seed: EECLINDPWVLLNAS
EECFINIPPVLCNAS

SEQ ID NO: 253778 - protein, 15 aa, Artificial Sequence
  Description of Artificial Sequence: Synthetic peptide
  Seed: EECLINDPWVLLNAS
EECFINIPPVLFNAS

SEQ ID NO: 253779 - protein, 15 aa, Artificial Sequence
  Description of Artificial Sequence: Synthetic peptide
  Seed: EECLINDPWVLLNAS
EECFINIPPVLGNAS

SEQ ID NO: 253780 - protein, 15 aa, Artificial Sequence
  Description of Artificial Sequence: Synthetic peptide
  Seed: EECLINDPWVLLNAS
EECFINIPPVLHNAS

SEQ ID NO: 253781 - protein, 15 aa, Artificial Sequence
  Description of Artificial Sequence: Synthetic peptide
  Seed: EECLINDPWVLLNAS
EECFINIPPVLINAS

SEQ ID NO: 253782 - protein, 15 aa, Artificial Sequence
  Description of Artificial Sequence: Synthetic peptide
  Seed: EECLINDPWVLLNAS
EECFINIPPVLKNAS

SEQ ID NO: 253783 - protein, 15 aa, Artificial Sequence
  Description of Artificial Sequence: Synthetic peptide
  Seed: EECLINDPWVLLNAS
EECFINIPPVLLNAS

SEQ ID NO: 253784 - protein, 15 aa, Artificial Sequence
  Description of Artificial Sequence: Synthetic peptide
  Seed: EECLINDPWVLLNAS
EECFINIPPVLMNAS

SEQ ID NO: 253785 - protein, 15 aa, Artificial Sequence
  Description of Artificial Sequence: Synthetic peptide
  Seed: EECLINDPWVLLNAS
EECFINIPPVLNNAS

SEQ ID NO: 253786 - protein, 15 aa, Artificial Sequence
  Description of Artificial Sequence: Synthetic peptide
  Seed: EECLINDPWVLLNAS
EECFINIPPVLPNAS

SEQ ID NO: 253787 - protein, 15 aa, Artificial Sequence
  Description of Artificial Sequence: Synthetic peptide
  Seed: EECLINDPWVLLNAS
EECFINIPPVLQNAS

SEQ ID NO: 253788 - protein, 15 aa, Artificial Sequence
  Description of Artificial Sequence: Synthetic peptide
  Seed: EECLINDPWVLLNAS
EECFINIPPVLRNAS

SEQ ID NO: 253789 - protein, 15 aa, Artificial Sequence
  Description of Artificial Sequence: Synthetic peptide
  Seed: EECLINDPWVLLNAS
EECFINIPPVLSNAS

SEQ ID NO: 253790 - protein, 15 aa, Artificial Sequence
  Description of Artificial Sequence: Synthetic peptide
  Seed: EECLINDPWVLLNAS
EECFINIPPVLTNAS

SEQ ID NO: 253791 - protein, 15 aa, Artificial Sequence
  Description of Artificial Sequence: Synthetic peptide
  Seed: EECLINDPWVLLNAS
EECFINIPPVLVNAS

SEQ ID NO: 253792 - protein, 15 aa, Artificial Sequence
  Description of Artificial Sequence: Synthetic peptide
  Seed: EECLINDPWVLLNAS
EECFINIPPVLWNAS

SEQ ID NO: 253793 - protein, 15 aa, Artificial Sequence
  Description of Artificial Sequence: Synthetic peptide
  Seed: EECLINDPWVLLNAS
EECFINIPPVLYNAS

SEQ ID NO: 253794 - protein, 15 aa, Artificial Sequence
  Description of Artificial Sequence: Synthetic peptide
  Seed: EECLINDPWVLLNAS
EECFINIPQVLANAS

SEQ ID NO: 253795 - protein, 15 aa, Artificial Sequence
  Description of Artificial Sequence: Synthetic peptide
  Seed: EECLINDPWVLLNAS
EECFINIPQVLINAS

SEQ ID NO: 253796 - protein, 15 aa, Artificial Sequence
  Description of Artificial Sequence: Synthetic peptide
  Seed: EECLINDPWVLLNAS
EECFINIPQVLLNAS

SEQ ID NO: 253797 - protein, 15 aa, Artificial Sequence
  Description of Artificial Sequence: Synthetic peptide
  Seed: EECLINDPWVLLNAS
EECFINIPQVLVNAS

SEQ ID NO: 253798 - protein, 15 aa, Artificial Sequence
  Description of Artificial Sequence: Synthetic peptide
  Seed: EECLINDPWVLLNAS
EECFINIPSVLANAS

SEQ ID NO: 253799 - protein, 15 aa, Artificial Sequence
  Description of Artificial Sequence: Synthetic peptide
  Seed: EECLINDPWVLLNAS
EECFINIPSVLCNAS

SEQ ID NO: 253800 - protein, 15 aa, Artificial Sequence
  Description of Artificial Sequence: Synthetic peptide
  Seed: EECLINDPWVLLNAS
EECFINIPSVLFNAS

SEQ ID NO: 253801 - protein, 15 aa, Artificial Sequence
  Description of Artificial Sequence: Synthetic peptide
  Seed: EECLINDPWVLLNAS
EECFINIPSVLGNAS

SEQ ID NO: 253802 - protein, 15 aa, Artificial Sequence
  Description of Artificial Sequence: Synthetic peptide
  Seed: EECLINDPWVLLNAS
EECFINIPSVLHNAS

SEQ ID NO: 253803 - protein, 15 aa, Artificial Sequence
  Description of Artificial Sequence: Synthetic peptide
  Seed: EECLINDPWVLLNAS
EECFINIPSVLINAS

SEQ ID NO: 253804 - protein, 15 aa, Artificial Sequence
  Description of Artificial Sequence: Synthetic peptide
  Seed: EECLINDPWVLLNAS
EECFINIPSVLKNAS

SEQ ID NO: 253805 - protein, 15 aa, Artificial Sequence
  Description of Artificial Sequence: Synthetic peptide
  Seed: EECLINDPWVLLNAS
EECFINIPSVLLNAS

SEQ ID NO: 253806 - protein, 15 aa, Artificial Sequence
  Description of Artificial Sequence: Synthetic peptide
  Seed: EECLINDPWVLLNAS
EECFINIPSVLMNAS

SEQ ID NO: 253807 - protein, 15 aa, Artificial Sequence
  Description of Artificial Sequence: Synthetic peptide
  Seed: EECLINDPWVLLNAS
EECFINIPSVLNNAS

SEQ ID NO: 253808 - protein, 15 aa, Artificial Sequence
  Description of Artificial Sequence: Synthetic peptide
  Seed: EECLINDPWVLLNAS
EECFINIPSVLPNAS

SEQ ID NO: 253809 - protein, 15 aa, Artificial Sequence
  Description of Artificial Sequence: Synthetic peptide
  Seed: EECLINDPWVLLNAS
EECFINIPSVLQNAS

SEQ ID NO: 253810 - protein, 15 aa, Artificial Sequence
  Description of Artificial Sequence: Synthetic peptide
  Seed: EECLINDPWVLLNAS
EECFINIPSVLRNAS

SEQ ID NO: 253811 - protein, 15 aa, Artificial Sequence
  Description of Artificial Sequence: Synthetic peptide
  Seed: EECLINDPWVLLNAS
EECFINIPSVLSNAS

SEQ ID NO: 253812 - protein, 15 aa, Artificial Sequence
  Description of Artificial Sequence: Synthetic peptide
  Seed: EECLINDPWVLLNAS
EECFINIPSVLTNAS

SEQ ID NO: 253813 - protein, 15 aa, Artificial Sequence
  Description of Artificial Sequence: Synthetic peptide
  Seed: EECLINDPWVLLNAS
EECFINIPSVLVNAS

SEQ ID NO: 253814 - protein, 15 aa, Artificial Sequence
  Description of Artificial Sequence: Synthetic peptide
  Seed: EECLINDPWVLLNAS
EECFINIPSVLYNAS

SEQ ID NO: 253815 - protein, 15 aa, Artificial Sequence
  Description of Artificial Sequence: Synthetic peptide
  Seed: EECLINDPWVLLNAS
EECFINIPTVLANAS

SEQ ID NO: 253816 - protein, 15 aa, Artificial Sequence
  Description of Artificial Sequence: Synthetic peptide
  Seed: EECLINDPWVLLNAS
EECFINIPTVLCNAS

SEQ ID NO: 253817 - protein, 15 aa, Artificial Sequence
  Description of Artificial Sequence: Synthetic peptide
  Seed: EECLINDPWVLLNAS
EECFINIPTVLFNAS

SEQ ID NO: 253818 - protein, 15 aa, Artificial Sequence
  Description of Artificial Sequence: Synthetic peptide
  Seed: EECLINDPWVLLNAS
EECFINIPTVLGNAS

SEQ ID NO: 253819 - protein, 15 aa, Artificial Sequence
  Description of Artificial Sequence: Synthetic peptide
  Seed: EECLINDPWVLLNAS
EECFINIPTVLHNAS

SEQ ID NO: 253820 - protein, 15 aa, Artificial Sequence
  Description of Artificial Sequence: Synthetic peptide
  Seed: EECLINDPWVLLNAS
EECFINIPTVLINAS

SEQ ID NO: 253821 - protein, 15 aa, Artificial Sequence
  Description of Artificial Sequence: Synthetic peptide
  Seed: EECLINDPWVLLNAS
EECFINIPTVLKNAS

SEQ ID NO: 253822 - protein, 15 aa, Artificial Sequence
  Description of Artificial Sequence: Synthetic peptide
  Seed: EECLINDPWVLLNAS
EECFINIPTVLLNAS

SEQ ID NO: 253823 - protein, 15 aa, Artificial Sequence
  Description of Artificial Sequence: Synthetic peptide
  Seed: EECLINDPWVLLNAS
EECFINIPTVLMNAS

SEQ ID NO: 253824 - protein, 15 aa, Artificial Sequence
  Description of Artificial Sequence: Synthetic peptide
  Seed: EECLINDPWVLLNAS
EECFINIPTVLNNAS

SEQ ID NO: 253825 - protein, 15 aa, Artificial Sequence
  Description of Artificial Sequence: Synthetic peptide
  Seed: EECLINDPWVLLNAS
EECFINIPTVLPNAS

SEQ ID NO: 253826 - protein, 15 aa, Artificial Sequence
  Description of Artificial Sequence: Synthetic peptide
  Seed: EECLINDPWVLLNAS
EECFINIPTVLQNAS

SEQ ID NO: 253827 - protein, 15 aa, Artificial Sequence
  Description of Artificial Sequence: Synthetic peptide
  Seed: EECLINDPWVLLNAS
EECFINIPTVLRNAS

SEQ ID NO: 253828 - protein, 15 aa, Artificial Sequence
  Description of Artificial Sequence: Synthetic peptide
  Seed: EECLINDPWVLLNAS
EECFINIPTVLSNAS

SEQ ID NO: 253829 - protein, 15 aa, Artificial Sequence
  Description of Artificial Sequence: Synthetic peptide
  Seed: EECLINDPWVLLNAS
EECFINIPTVLTNAS

SEQ ID NO: 253830 - protein, 15 aa, Artificial Sequence
  Description of Artificial Sequence: Synthetic peptide
  Seed: EECLINDPWVLLNAS
EECFINIPTVLVNAS

SEQ ID NO: 253831 - protein, 15 aa, Artificial Sequence
  Description of Artificial Sequence: Synthetic peptide
  Seed: EECLINDPWVLLNAS
EECFINIPTVLYNAS

SEQ ID NO: 253832 - protein, 15 aa, Artificial Sequence
  Description of Artificial Sequence: Synthetic peptide
  Seed: EECLINDPWVLLNAS
EECFINIPVVLANAS

SEQ ID NO: 253833 - protein, 15 aa, Artificial Sequence
  Description of Artificial Sequence: Synthetic peptide
  Seed: EECLINDPWVLLNAS
EECFINIPVVLGNAS

SEQ ID NO: 253834 - protein, 15 aa, Artificial Sequence
  Description of Artificial Sequence: Synthetic peptide
  Seed: EECLINDPWVLLNAS
EECFINIPVVLHNAS

SEQ ID NO: 253835 - protein, 15 aa, Artificial Sequence
  Description of Artificial Sequence: Synthetic peptide
  Seed: EECLINDPWVLLNAS
EECFINIPVVLINAS

SEQ ID NO: 253836 - protein, 15 aa, Artificial Sequence
  Description of Artificial Sequence: Synthetic peptide
  Seed: EECLINDPWVLLNAS
EECFINIPVVLLNAS

SEQ ID NO: 253837 - protein, 15 aa, Artificial Sequence
  Description of Artificial Sequence: Synthetic peptide
  Seed: EECLINDPWVLLNAS
EECFINIPVVLMNAS

SEQ ID NO: 253838 - protein, 15 aa, Artificial Sequence
  Description of Artificial Sequence: Synthetic peptide
  Seed: EECLINDPWVLLNAS
EECFINIPVVLNNAS

SEQ ID NO: 253839 - protein, 15 aa, Artificial Sequence
  Description of Artificial Sequence: Synthetic peptide
  Seed: EECLINDPWVLLNAS
EECFINIPVVLSNAS

SEQ ID NO: 253840 - protein, 15 aa, Artificial Sequence
  Description of Artificial Sequence: Synthetic peptide
  Seed: EECLINDPWVLLNAS
EECFINIPVVLTNAS

SEQ ID NO: 253841 - protein, 15 aa, Artificial Sequence
  Description of Artificial Sequence: Synthetic peptide
  Seed: EECLINDPWVLLNAS
EECFINIPVVLVNAS

SEQ ID NO: 253842 - protein, 15 aa, Artificial Sequence
  Description of Artificial Sequence: Synthetic peptide
  Seed: EECLINDPWVLLNAS
EECFINIPWVLLNAS

SEQ ID NO: 253843 - protein, 15 aa, Artificial Sequence
  Description of Artificial Sequence: Synthetic peptide
  Seed: EECLINDPWVLLNAS
EECFINIPWVLVNAS

SEQ ID NO: 253844 - protein, 15 aa, Artificial Sequence
  Description of Artificial Sequence: Synthetic peptide
  Seed: EECLINDPWVLLNAS
EECFINIPYVLFNAS

SEQ ID NO: 253845 - protein, 15 aa, Artificial Sequence
  Description of Artificial Sequence: Synthetic peptide
  Seed: EECLINDPWVLLNAS
EECFINIPYVLINAS

SEQ ID NO: 253846 - protein, 15 aa, Artificial Sequence
  Description of Artificial Sequence: Synthetic peptide
  Seed: EECLINDPWVLLNAS
EECFINIPYVLLNAS

SEQ ID NO: 253847 - protein, 15 aa, Artificial Sequence
  Description of Artificial Sequence: Synthetic peptide
  Seed: EECLINDPWVLLNAS
EECFINIPYVLVNAS

SEQ ID NO: 253848 - protein, 15 aa, Artificial Sequence
  Description of Artificial Sequence: Synthetic peptide
  Seed: EECLINDPWVLLNAS
EECFINKPAVLANAS

SEQ ID NO: 253849 - protein, 15 aa, Artificial Sequence
  Description of Artificial Sequence: Synthetic peptide
  Seed: EECLINDPWVLLNAS
EECFINKPAVLINAS

SEQ ID NO: 253850 - protein, 15 aa, Artificial Sequence
  Description of Artificial Sequence: Synthetic peptide
  Seed: EECLINDPWVLLNAS
EECFINKPAVLLNAS

SEQ ID NO: 253851 - protein, 15 aa, Artificial Sequence
  Description of Artificial Sequence: Synthetic peptide
  Seed: EECLINDPWVLLNAS
EECFINKPAVLMNAS

SEQ ID NO: 253852 - protein, 15 aa, Artificial Sequence
  Description of Artificial Sequence: Synthetic peptide
  Seed: EECLINDPWVLLNAS
EECFINKPAVLVNAS

SEQ ID NO: 253853 - protein, 15 aa, Artificial Sequence
  Description of Artificial Sequence: Synthetic peptide
  Seed: EECLINDPWVLLNAS
EECFINKPFVLFNAS

SEQ ID NO: 253854 - protein, 15 aa, Artificial Sequence
  Description of Artificial Sequence: Synthetic peptide
  Seed: EECLINDPWVLLNAS
EECFINKPFVLINAS

SEQ ID NO: 253855 - protein, 15 aa, Artificial Sequence
  Description of Artificial Sequence: Synthetic peptide
  Seed: EECLINDPWVLLNAS
EECFINKPFVLLNAS

SEQ ID NO: 253856 - protein, 15 aa, Artificial Sequence
  Description of Artificial Sequence: Synthetic peptide
  Seed: EECLINDPWVLLNAS
EECFINKPFVLMNAS

SEQ ID NO: 253857 - protein, 15 aa, Artificial Sequence
  Description of Artificial Sequence: Synthetic peptide
  Seed: EECLINDPWVLLNAS
EECFINKPFVLVNAS

SEQ ID NO: 253858 - protein, 15 aa, Artificial Sequence
  Description of Artificial Sequence: Synthetic peptide
  Seed: EECLINDPWVLLNAS
EECFINKPGVLANAS

SEQ ID NO: 253859 - protein, 15 aa, Artificial Sequence
  Description of Artificial Sequence: Synthetic peptide
  Seed: EECLINDPWVLLNAS
EECFINKPGVLINAS

SEQ ID NO: 253860 - protein, 15 aa, Artificial Sequence
  Description of Artificial Sequence: Synthetic peptide
  Seed: EECLINDPWVLLNAS
EECFINKPGVLLNAS

SEQ ID NO: 253861 - protein, 15 aa, Artificial Sequence
  Description of Artificial Sequence: Synthetic peptide
  Seed: EECLINDPWVLLNAS
EECFINKPGVLVNAS

SEQ ID NO: 253862 - protein, 15 aa, Artificial Sequence
  Description of Artificial Sequence: Synthetic peptide
  Seed: EECLINDPWVLLNAS
EECFINKPSVLANAS

SEQ ID NO: 253863 - protein, 15 aa, Artificial Sequence
  Description of Artificial Sequence: Synthetic peptide
  Seed: EECLINDPWVLLNAS
EECFINKPSVLINAS

SEQ ID NO: 253864 - protein, 15 aa, Artificial Sequence
  Description of Artificial Sequence: Synthetic peptide
  Seed: EECLINDPWVLLNAS
EECFINKPSVLLNAS

SEQ ID NO: 253865 - protein, 15 aa, Artificial Sequence
  Description of Artificial Sequence: Synthetic peptide
  Seed: EECLINDPWVLLNAS
EECFINKPSVLVNAS

SEQ ID NO: 253866 - protein, 15 aa, Artificial Sequence
  Description of Artificial Sequence: Synthetic peptide
  Seed: EECLINDPWVLLNAS
EECFINLPAVLANAS

SEQ ID NO: 253867 - protein, 15 aa, Artificial Sequence
  Description of Artificial Sequence: Synthetic peptide
  Seed: EECLINDPWVLLNAS
EECFINLPAVLCNAS

SEQ ID NO: 253868 - protein, 15 aa, Artificial Sequence
  Description of Artificial Sequence: Synthetic peptide
  Seed: EECLINDPWVLLNAS
EECFINLPAVLDNAS

SEQ ID NO: 253869 - protein, 15 aa, Artificial Sequence
  Description of Artificial Sequence: Synthetic peptide
  Seed: EECLINDPWVLLNAS
EECFINLPAVLENAS

SEQ ID NO: 253870 - protein, 15 aa, Artificial Sequence
  Description of Artificial Sequence: Synthetic peptide
  Seed: EECLINDPWVLLNAS
EECFINLPAVLFNAS

SEQ ID NO: 253871 - protein, 15 aa, Artificial Sequence
  Description of Artificial Sequence: Synthetic peptide
  Seed: EECLINDPWVLLNAS
EECFINLPAVLGNAS

SEQ ID NO: 253872 - protein, 15 aa, Artificial Sequence
  Description of Artificial Sequence: Synthetic peptide
  Seed: EECLINDPWVLLNAS
EECFINLPAVLHNAS

SEQ ID NO: 253873 - protein, 15 aa, Artificial Sequence
  Description of Artificial Sequence: Synthetic peptide
  Seed: EECLINDPWVLLNAS
EECFINLPAVLINAS

SEQ ID NO: 253874 - protein, 15 aa, Artificial Sequence
  Description of Artificial Sequence: Synthetic peptide
  Seed: EECLINDPWVLLNAS
EECFINLPAVLKNAS

SEQ ID NO: 253875 - protein, 15 aa, Artificial Sequence
  Description of Artificial Sequence: Synthetic peptide
  Seed: EECLINDPWVLLNAS
EECFINLPAVLLNAS

SEQ ID NO: 253876 - protein, 15 aa, Artificial Sequence
  Description of Artificial Sequence: Synthetic peptide
  Seed: EECLINDPWVLLNAS
EECFINLPAVLMNAS

SEQ ID NO: 253877 - protein, 15 aa, Artificial Sequence
  Description of Artificial Sequence: Synthetic peptide
  Seed: EECLINDPWVLLNAS
EECFINLPAVLNNAS

SEQ ID NO: 253878 - protein, 15 aa, Artificial Sequence
  Description of Artificial Sequence: Synthetic peptide
  Seed: EECLINDPWVLLNAS
EECFINLPAVLPNAS

SEQ ID NO: 253879 - protein, 15 aa, Artificial Sequence
  Description of Artificial Sequence: Synthetic peptide
  Seed: EECLINDPWVLLNAS
EECFINLPAVLQNAS

SEQ ID NO: 253880 - protein, 15 aa, Artificial Sequence
  Description of Artificial Sequence: Synthetic peptide
  Seed: EECLINDPWVLLNAS
EECFINLPAVLRNAS

SEQ ID NO: 253881 - protein, 15 aa, Artificial Sequence
  Description of Artificial Sequence: Synthetic peptide
  Seed: EECLINDPWVLLNAS
EECFINLPAVLSNAS

SEQ ID NO: 253882 - protein, 15 aa, Artificial Sequence
  Description of Artificial Sequence: Synthetic peptide
  Seed: EECLINDPWVLLNAS
EECFINLPAVLTNAS

SEQ ID NO: 253883 - protein, 15 aa, Artificial Sequence
  Description of Artificial Sequence: Synthetic peptide
  Seed: EECLINDPWVLLNAS
EECFINLPAVLVNAS

SEQ ID NO: 253884 - protein, 15 aa, Artificial Sequence
  Description of Artificial Sequence: Synthetic peptide
  Seed: EECLINDPWVLLNAS
EECFINLPAVLWNAS

SEQ ID NO: 253885 - protein, 15 aa, Artificial Sequence
  Description of Artificial Sequence: Synthetic peptide
  Seed: EECLINDPWVLLNAS
EECFINLPAVLYNAS

SEQ ID NO: 253886 - protein, 15 aa, Artificial Sequence
  Description of Artificial Sequence: Synthetic peptide
  Seed: EECLINDPWVLLNAS
EECFINLPCVLANAS

SEQ ID NO: 253887 - protein, 15 aa, Artificial Sequence
  Description of Artificial Sequence: Synthetic peptide
  Seed: EECLINDPWVLLNAS
EECFINLPCVLINAS

SEQ ID NO: 253888 - protein, 15 aa, Artificial Sequence
  Description of Artificial Sequence: Synthetic peptide
  Seed: EECLINDPWVLLNAS
EECFINLPCVLLNAS

SEQ ID NO: 253889 - protein, 15 aa, Artificial Sequence
  Description of Artificial Sequence: Synthetic peptide
  Seed: EECLINDPWVLLNAS
EECFINLPCVLSNAS

SEQ ID NO: 253890 - protein, 15 aa, Artificial Sequence
  Description of Artificial Sequence: Synthetic peptide
  Seed: EECLINDPWVLLNAS
EECFINLPCVLTNAS

SEQ ID NO: 253891 - protein, 15 aa, Artificial Sequence
  Description of Artificial Sequence: Synthetic peptide
  Seed: EECLINDPWVLLNAS
EECFINLPCVLVNAS

SEQ ID NO: 253892 - protein, 15 aa, Artificial Sequence
  Description of Artificial Sequence: Synthetic peptide
  Seed: EECLINDPWVLLNAS
EECFINLPDVLANAS

SEQ ID NO: 253893 - protein, 15 aa, Artificial Sequence
  Description of Artificial Sequence: Synthetic peptide
  Seed: EECLINDPWVLLNAS
EECFINLPDVLINAS

SEQ ID NO: 253894 - protein, 15 aa, Artificial Sequence
  Description of Artificial Sequence: Synthetic peptide
  Seed: EECLINDPWVLLNAS
EECFINLPDVLLNAS

SEQ ID NO: 253895 - protein, 15 aa, Artificial Sequence
  Description of Artificial Sequence: Synthetic peptide
  Seed: EECLINDPWVLLNAS
EECFINLPDVLTNAS

SEQ ID NO: 253896 - protein, 15 aa, Artificial Sequence
  Description of Artificial Sequence: Synthetic peptide
  Seed: EECLINDPWVLLNAS
EECFINLPDVLVNAS

SEQ ID NO: 253897 - protein, 15 aa, Artificial Sequence
  Description of Artificial Sequence: Synthetic peptide
  Seed: EECLINDPWVLLNAS
EECFINLPEVLANAS

SEQ ID NO: 253898 - protein, 15 aa, Artificial Sequence
  Description of Artificial Sequence: Synthetic peptide
  Seed: EECLINDPWVLLNAS
EECFINLPEVLINAS

SEQ ID NO: 253899 - protein, 15 aa, Artificial Sequence
  Description of Artificial Sequence: Synthetic peptide
  Seed: EECLINDPWVLLNAS
EECFINLPEVLLNAS

SEQ ID NO: 253900 - protein, 15 aa, Artificial Sequence
  Description of Artificial Sequence: Synthetic peptide
  Seed: EECLINDPWVLLNAS
EECFINLPEVLMNAS

SEQ ID NO: 253901 - protein, 15 aa, Artificial Sequence
  Description of Artificial Sequence: Synthetic peptide
  Seed: EECLINDPWVLLNAS
EECFINLPEVLSNAS

SEQ ID NO: 253902 - protein, 15 aa, Artificial Sequence
  Description of Artificial Sequence: Synthetic peptide
  Seed: EECLINDPWVLLNAS
EECFINLPEVLTNAS

SEQ ID NO: 253903 - protein, 15 aa, Artificial Sequence
  Description of Artificial Sequence: Synthetic peptide
  Seed: EECLINDPWVLLNAS
EECFINLPEVLVNAS

SEQ ID NO: 253904 - protein, 15 aa, Artificial Sequence
  Description of Artificial Sequence: Synthetic peptide
  Seed: EECLINDPWVLLNAS
EECFINLPFVLFNAS

SEQ ID NO: 253905 - protein, 15 aa, Artificial Sequence
  Description of Artificial Sequence: Synthetic peptide
  Seed: EECLINDPWVLLNAS
EECFINLPFVLINAS

SEQ ID NO: 253906 - protein, 15 aa, Artificial Sequence
  Description of Artificial Sequence: Synthetic peptide
  Seed: EECLINDPWVLLNAS
EECFINLPFVLLNAS

SEQ ID NO: 253907 - protein, 15 aa, Artificial Sequence
  Description of Artificial Sequence: Synthetic peptide
  Seed: EECLINDPWVLLNAS
EECFINLPFVLMNAS

SEQ ID NO: 253908 - protein, 15 aa, Artificial Sequence
  Description of Artificial Sequence: Synthetic peptide
  Seed: EECLINDPWVLLNAS
EECFINLPFVLVNAS

SEQ ID NO: 253909 - protein, 15 aa, Artificial Sequence
  Description of Artificial Sequence: Synthetic peptide
  Seed: EECLINDPWVLLNAS
EECFINLPFVLYNAS

SEQ ID NO: 253910 - protein, 15 aa, Artificial Sequence
  Description of Artificial Sequence: Synthetic peptide
  Seed: EECLINDPWVLLNAS
EECFINLPGVLANAS

SEQ ID NO: 253911 - protein, 15 aa, Artificial Sequence
  Description of Artificial Sequence: Synthetic peptide
  Seed: EECLINDPWVLLNAS
EECFINLPGVLCNAS

SEQ ID NO: 253912 - protein, 15 aa, Artificial Sequence
  Description of Artificial Sequence: Synthetic peptide
  Seed: EECLINDPWVLLNAS
EECFINLPGVLDNAS

SEQ ID NO: 253913 - protein, 15 aa, Artificial Sequence
  Description of Artificial Sequence: Synthetic peptide
  Seed: EECLINDPWVLLNAS
EECFINLPGVLENAS

SEQ ID NO: 253914 - protein, 15 aa, Artificial Sequence
  Description of Artificial Sequence: Synthetic peptide
  Seed: EECLINDPWVLLNAS
EECFINLPGVLFNAS

SEQ ID NO: 253915 - protein, 15 aa, Artificial Sequence
  Description of Artificial Sequence: Synthetic peptide
  Seed: EECLINDPWVLLNAS
EECFINLPGVLGNAS

SEQ ID NO: 253916 - protein, 15 aa, Artificial Sequence
  Description of Artificial Sequence: Synthetic peptide
  Seed: EECLINDPWVLLNAS
EECFINLPGVLHNAS

SEQ ID NO: 253917 - protein, 15 aa, Artificial Sequence
  Description of Artificial Sequence: Synthetic peptide
  Seed: EECLINDPWVLLNAS
EECFINLPGVLINAS

SEQ ID NO: 253918 - protein, 15 aa, Artificial Sequence
  Description of Artificial Sequence: Synthetic peptide
  Seed: EECLINDPWVLLNAS
EECFINLPGVLKNAS

SEQ ID NO: 253919 - protein, 15 aa, Artificial Sequence
  Description of Artificial Sequence: Synthetic peptide
  Seed: EECLINDPWVLLNAS
EECFINLPGVLLNAS

SEQ ID NO: 253920 - protein, 15 aa, Artificial Sequence
  Description of Artificial Sequence: Synthetic peptide
  Seed: EECLINDPWVLLNAS
EECFINLPGVLMNAS

SEQ ID NO: 253921 - protein, 15 aa, Artificial Sequence
  Description of Artificial Sequence: Synthetic peptide
  Seed: EECLINDPWVLLNAS
EECFINLPGVLNNAS

SEQ ID NO: 253922 - protein, 15 aa, Artificial Sequence
  Description of Artificial Sequence: Synthetic peptide
  Seed: EECLINDPWVLLNAS
EECFINLPGVLPNAS

SEQ ID NO: 253923 - protein, 15 aa, Artificial Sequence
  Description of Artificial Sequence: Synthetic peptide
  Seed: EECLINDPWVLLNAS
EECFINLPGVLQNAS

SEQ ID NO: 253924 - protein, 15 aa, Artificial Sequence
  Description of Artificial Sequence: Synthetic peptide
  Seed: EECLINDPWVLLNAS
EECFINLPGVLRNAS

SEQ ID NO: 253925 - protein, 15 aa, Artificial Sequence
  Description of Artificial Sequence: Synthetic peptide
  Seed: EECLINDPWVLLNAS
EECFINLPGVLSNAS

SEQ ID NO: 253926 - protein, 15 aa, Artificial Sequence
  Description of Artificial Sequence: Synthetic peptide
  Seed: EECLINDPWVLLNAS
EECFINLPGVLTNAS

SEQ ID NO: 253927 - protein, 15 aa, Artificial Sequence
  Description of Artificial Sequence: Synthetic peptide
  Seed: EECLINDPWVLLNAS
EECFINLPGVLVNAS

SEQ ID NO: 253928 - protein, 15 aa, Artificial Sequence
  Description of Artificial Sequence: Synthetic peptide
  Seed: EECLINDPWVLLNAS
EECFINLPGVLWNAS

SEQ ID NO: 253929 - protein, 15 aa, Artificial Sequence
  Description of Artificial Sequence: Synthetic peptide
  Seed: EECLINDPWVLLNAS
EECFINLPGVLYNAS

SEQ ID NO: 253930 - protein, 15 aa, Artificial Sequence
  Description of Artificial Sequence: Synthetic peptide
  Seed: EECLINDPWVLLNAS
EECFINLPHVLANAS

SEQ ID NO: 253931 - protein, 15 aa, Artificial Sequence
  Description of Artificial Sequence: Synthetic peptide
  Seed: EECLINDPWVLLNAS
EECFINLPHVLINAS

SEQ ID NO: 253932 - protein, 15 aa, Artificial Sequence
  Description of Artificial Sequence: Synthetic peptide
  Seed: EECLINDPWVLLNAS
EECFINLPHVLLNAS

SEQ ID NO: 253933 - protein, 15 aa, Artificial Sequence
  Description of Artificial Sequence: Synthetic peptide
  Seed: EECLINDPWVLLNAS
EECFINLPHVLMNAS

SEQ ID NO: 253934 - protein, 15 aa, Artificial Sequence
  Description of Artificial Sequence: Synthetic peptide
  Seed: EECLINDPWVLLNAS
EECFINLPHVLSNAS

SEQ ID NO: 253935 - protein, 15 aa, Artificial Sequence
  Description of Artificial Sequence: Synthetic peptide
  Seed: EECLINDPWVLLNAS
EECFINLPHVLTNAS

SEQ ID NO: 253936 - protein, 15 aa, Artificial Sequence
  Description of Artificial Sequence: Synthetic peptide
  Seed: EECLINDPWVLLNAS
EECFINLPHVLVNAS

SEQ ID NO: 253937 - protein, 15 aa, Artificial Sequence
  Description of Artificial Sequence: Synthetic peptide
  Seed: EECLINDPWVLLNAS
EECFINLPIVLANAS

SEQ ID NO: 253938 - protein, 15 aa, Artificial Sequence
  Description of Artificial Sequence: Synthetic peptide
  Seed: EECLINDPWVLLNAS
EECFINLPIVLGNAS

SEQ ID NO: 253939 - protein, 15 aa, Artificial Sequence
  Description of Artificial Sequence: Synthetic peptide
  Seed: EECLINDPWVLLNAS
EECFINLPIVLHNAS

SEQ ID NO: 253940 - protein, 15 aa, Artificial Sequence
  Description of Artificial Sequence: Synthetic peptide
  Seed: EECLINDPWVLLNAS
EECFINLPIVLINAS

SEQ ID NO: 253941 - protein, 15 aa, Artificial Sequence
  Description of Artificial Sequence: Synthetic peptide
  Seed: EECLINDPWVLLNAS
EECFINLPIVLLNAS

SEQ ID NO: 253942 - protein, 15 aa, Artificial Sequence
  Description of Artificial Sequence: Synthetic peptide
  Seed: EECLINDPWVLLNAS
EECFINLPIVLMNAS

SEQ ID NO: 253943 - protein, 15 aa, Artificial Sequence
  Description of Artificial Sequence: Synthetic peptide
  Seed: EECLINDPWVLLNAS
EECFINLPIVLNNAS

SEQ ID NO: 253944 - protein, 15 aa, Artificial Sequence
  Description of Artificial Sequence: Synthetic peptide
  Seed: EECLINDPWVLLNAS
EECFINLPIVLSNAS

SEQ ID NO: 253945 - protein, 15 aa, Artificial Sequence
  Description of Artificial Sequence: Synthetic peptide
  Seed: EECLINDPWVLLNAS
EECFINLPIVLTNAS

SEQ ID NO: 253946 - protein, 15 aa, Artificial Sequence
  Description of Artificial Sequence: Synthetic peptide
  Seed: EECLINDPWVLLNAS
EECFINLPIVLVNAS

SEQ ID NO: 253947 - protein, 15 aa, Artificial Sequence
  Description of Artificial Sequence: Synthetic peptide
  Seed: EECLINDPWVLLNAS
EECFINLPLVLANAS

SEQ ID NO: 253948 - protein, 15 aa, Artificial Sequence
  Description of Artificial Sequence: Synthetic peptide
  Seed: EECLINDPWVLLNAS
EECFINLPLVLSNAS

SEQ ID NO: 253949 - protein, 15 aa, Artificial Sequence
  Description of Artificial Sequence: Synthetic peptide
  Seed: EECLINDPWVLLNAS
EECFINLPLVLTNAS

SEQ ID NO: 253950 - protein, 15 aa, Artificial Sequence
  Description of Artificial Sequence: Synthetic peptide
  Seed: EECLINDPWVLLNAS
EECFINLPLVLVNAS

SEQ ID NO: 253951 - protein, 15 aa, Artificial Sequence
  Description of Artificial Sequence: Synthetic peptide
  Seed: EECLINDPWVLLNAS
EECFINLPMVLANAS

SEQ ID NO: 253952 - protein, 15 aa, Artificial Sequence
  Description of Artificial Sequence: Synthetic peptide
  Seed: EECLINDPWVLLNAS
EECFINLPMVLINAS

SEQ ID NO: 253953 - protein, 15 aa, Artificial Sequence
  Description of Artificial Sequence: Synthetic peptide
  Seed: EECLINDPWVLLNAS
EECFINLPMVLLNAS

SEQ ID NO: 253954 - protein, 15 aa, Artificial Sequence
  Description of Artificial Sequence: Synthetic peptide
  Seed: EECLINDPWVLLNAS
EECFINLPMVLMNAS

SEQ ID NO: 253955 - protein, 15 aa, Artificial Sequence
  Description of Artificial Sequence: Synthetic peptide
  Seed: EECLINDPWVLLNAS
EECFINLPMVLSNAS

SEQ ID NO: 253956 - protein, 15 aa, Artificial Sequence
  Description of Artificial Sequence: Synthetic peptide
  Seed: EECLINDPWVLLNAS
EECFINLPMVLTNAS

SEQ ID NO: 253957 - protein, 15 aa, Artificial Sequence
  Description of Artificial Sequence: Synthetic peptide
  Seed: EECLINDPWVLLNAS
EECFINLPMVLVNAS

SEQ ID NO: 253958 - protein, 15 aa, Artificial Sequence
  Description of Artificial Sequence: Synthetic peptide
  Seed: EECLINDPWVLLNAS
EECFINLPNVLANAS

SEQ ID NO: 253959 - protein, 15 aa, Artificial Sequence
  Description of Artificial Sequence: Synthetic peptide
  Seed: EECLINDPWVLLNAS
EECFINLPNVLCNAS

SEQ ID NO: 253960 - protein, 15 aa, Artificial Sequence
  Description of Artificial Sequence: Synthetic peptide
  Seed: EECLINDPWVLLNAS
EECFINLPNVLFNAS

SEQ ID NO: 253961 - protein, 15 aa, Artificial Sequence
  Description of Artificial Sequence: Synthetic peptide
  Seed: EECLINDPWVLLNAS
EECFINLPNVLGNAS

SEQ ID NO: 253962 - protein, 15 aa, Artificial Sequence
  Description of Artificial Sequence: Synthetic peptide
  Seed: EECLINDPWVLLNAS
EECFINLPNVLHNAS

SEQ ID NO: 253963 - protein, 15 aa, Artificial Sequence
  Description of Artificial Sequence: Synthetic peptide
  Seed: EECLINDPWVLLNAS
EECFINLPNVLINAS

SEQ ID NO: 253964 - protein, 15 aa, Artificial Sequence
  Description of Artificial Sequence: Synthetic peptide
  Seed: EECLINDPWVLLNAS
EECFINLPNVLKNAS

SEQ ID NO: 253965 - protein, 15 aa, Artificial Sequence
  Description of Artificial Sequence: Synthetic peptide
  Seed: EECLINDPWVLLNAS
EECFINLPNVLLNAS

SEQ ID NO: 253966 - protein, 15 aa, Artificial Sequence
  Description of Artificial Sequence: Synthetic peptide
  Seed: EECLINDPWVLLNAS
EECFINLPNVLMNAS

SEQ ID NO: 253967 - protein, 15 aa, Artificial Sequence
  Description of Artificial Sequence: Synthetic peptide
  Seed: EECLINDPWVLLNAS
EECFINLPNVLNNAS

SEQ ID NO: 253968 - protein, 15 aa, Artificial Sequence
  Description of Artificial Sequence: Synthetic peptide
  Seed: EECLINDPWVLLNAS
EECFINLPNVLPNAS

SEQ ID NO: 253969 - protein, 15 aa, Artificial Sequence
  Description of Artificial Sequence: Synthetic peptide
  Seed: EECLINDPWVLLNAS
EECFINLPNVLQNAS

SEQ ID NO: 253970 - protein, 15 aa, Artificial Sequence
  Description of Artificial Sequence: Synthetic peptide
  Seed: EECLINDPWVLLNAS
EECFINLPNVLRNAS

SEQ ID NO: 253971 - protein, 15 aa, Artificial Sequence
  Description of Artificial Sequence: Synthetic peptide
  Seed: EECLINDPWVLLNAS
EECFINLPNVLSNAS

SEQ ID NO: 253972 - protein, 15 aa, Artificial Sequence
  Description of Artificial Sequence: Synthetic peptide
  Seed: EECLINDPWVLLNAS
EECFINLPNVLTNAS

SEQ ID NO: 253973 - protein, 15 aa, Artificial Sequence
  Description of Artificial Sequence: Synthetic peptide
  Seed: EECLINDPWVLLNAS
EECFINLPNVLVNAS

SEQ ID NO: 253974 - protein, 15 aa, Artificial Sequence
  Description of Artificial Sequence: Synthetic peptide
  Seed: EECLINDPWVLLNAS
EECFINLPNVLWNAS

SEQ ID NO: 253975 - protein, 15 aa, Artificial Sequence
  Description of Artificial Sequence: Synthetic peptide
  Seed: EECLINDPWVLLNAS
EECFINLPNVLYNAS

SEQ ID NO: 253976 - protein, 15 aa, Artificial Sequence
  Description of Artificial Sequence: Synthetic peptide
  Seed: EECLINDPWVLLNAS
EECFINLPPVLANAS

SEQ ID NO: 253977 - protein, 15 aa, Artificial Sequence
  Description of Artificial Sequence: Synthetic peptide
  Seed: EECLINDPWVLLNAS
EECFINLPPVLCNAS

SEQ ID NO: 253978 - protein, 15 aa, Artificial Sequence
  Description of Artificial Sequence: Synthetic peptide
  Seed: EECLINDPWVLLNAS
EECFINLPPVLENAS

SEQ ID NO: 253979 - protein, 15 aa, Artificial Sequence
  Description of Artificial Sequence: Synthetic peptide
  Seed: EECLINDPWVLLNAS
EECFINLPPVLFNAS

SEQ ID NO: 253980 - protein, 15 aa, Artificial Sequence
  Description of Artificial Sequence: Synthetic peptide
  Seed: EECLINDPWVLLNAS
EECFINLPPVLGNAS

SEQ ID NO: 253981 - protein, 15 aa, Artificial Sequence
  Description of Artificial Sequence: Synthetic peptide
  Seed: EECLINDPWVLLNAS
EECFINLPPVLHNAS

SEQ ID NO: 253982 - protein, 15 aa, Artificial Sequence
  Description of Artificial Sequence: Synthetic peptide
  Seed: EECLINDPWVLLNAS
EECFINLPPVLINAS

SEQ ID NO: 253983 - protein, 15 aa, Artificial Sequence
  Description of Artificial Sequence: Synthetic peptide
  Seed: EECLINDPWVLLNAS
EECFINLPPVLKNAS

SEQ ID NO: 253984 - protein, 15 aa, Artificial Sequence
  Description of Artificial Sequence: Synthetic peptide
  Seed: EECLINDPWVLLNAS
EECFINLPPVLLNAS

SEQ ID NO: 253985 - protein, 15 aa, Artificial Sequence
  Description of Artificial Sequence: Synthetic peptide
  Seed: EECLINDPWVLLNAS
EECFINLPPVLMNAS

SEQ ID NO: 253986 - protein, 15 aa, Artificial Sequence
  Description of Artificial Sequence: Synthetic peptide
  Seed: EECLINDPWVLLNAS
EECFINLPPVLNNAS

SEQ ID NO: 253987 - protein, 15 aa, Artificial Sequence
  Description of Artificial Sequence: Synthetic peptide
  Seed: EECLINDPWVLLNAS
EECFINLPPVLPNAS

SEQ ID NO: 253988 - protein, 15 aa, Artificial Sequence
  Description of Artificial Sequence: Synthetic peptide
  Seed: EECLINDPWVLLNAS
EECFINLPPVLQNAS

SEQ ID NO: 253989 - protein, 15 aa, Artificial Sequence
  Description of Artificial Sequence: Synthetic peptide
  Seed: EECLINDPWVLLNAS
EECFINLPPVLRNAS

SEQ ID NO: 253990 - protein, 15 aa, Artificial Sequence
  Description of Artificial Sequence: Synthetic peptide
  Seed: EECLINDPWVLLNAS
EECFINLPPVLSNAS

SEQ ID NO: 253991 - protein, 15 aa, Artificial Sequence
  Description of Artificial Sequence: Synthetic peptide
  Seed: EECLINDPWVLLNAS
EECFINLPPVLTNAS

SEQ ID NO: 253992 - protein, 15 aa, Artificial Sequence
  Description of Artificial Sequence: Synthetic peptide
  Seed: EECLINDPWVLLNAS
EECFINLPPVLVNAS

SEQ ID NO: 253993 - protein, 15 aa, Artificial Sequence
  Description of Artificial Sequence: Synthetic peptide
  Seed: EECLINDPWVLLNAS
EECFINLPPVLWNAS

SEQ ID NO: 253994 - protein, 15 aa, Artificial Sequence
  Description of Artificial Sequence: Synthetic peptide
  Seed: EECLINDPWVLLNAS
EECFINLPPVLYNAS

SEQ ID NO: 253995 - protein, 15 aa, Artificial Sequence
  Description of Artificial Sequence: Synthetic peptide
  Seed: EECLINDPWVLLNAS
EECFINLPQVLANAS

SEQ ID NO: 253996 - protein, 15 aa, Artificial Sequence
  Description of Artificial Sequence: Synthetic peptide
  Seed: EECLINDPWVLLNAS
EECFINLPQVLINAS

SEQ ID NO: 253997 - protein, 15 aa, Artificial Sequence
  Description of Artificial Sequence: Synthetic peptide
  Seed: EECLINDPWVLLNAS
EECFINLPQVLLNAS

SEQ ID NO: 253998 - protein, 15 aa, Artificial Sequence
  Description of Artificial Sequence: Synthetic peptide
  Seed: EECLINDPWVLLNAS
EECFINLPQVLMNAS

SEQ ID NO: 253999 - protein, 15 aa, Artificial Sequence
  Description of Artificial Sequence: Synthetic peptide
  Seed: EECLINDPWVLLNAS
EECFINLPQVLSNAS

SEQ ID NO: 254000 - protein, 15 aa, Artificial Sequence
  Description of Artificial Sequence: Synthetic peptide
  Seed: EECLINDPWVLLNAS
EECFINLPQVLTNAS

SEQ ID NO: 254001 - protein, 15 aa, Artificial Sequence
  Description of Artificial Sequence: Synthetic peptide
  Seed: EECLINDPWVLLNAS
EECFINLPQVLVNAS

SEQ ID NO: 254002 - protein, 15 aa, Artificial Sequence
  Description of Artificial Sequence: Synthetic peptide
  Seed: EECLINDPWVLLNAS
EECFINLPSVLANAS

SEQ ID NO: 254003 - protein, 15 aa, Artificial Sequence
  Description of Artificial Sequence: Synthetic peptide
  Seed: EECLINDPWVLLNAS
EECFINLPSVLCNAS

SEQ ID NO: 254004 - protein, 15 aa, Artificial Sequence
  Description of Artificial Sequence: Synthetic peptide
  Seed: EECLINDPWVLLNAS
EECFINLPSVLDNAS

SEQ ID NO: 254005 - protein, 15 aa, Artificial Sequence
  Description of Artificial Sequence: Synthetic peptide
  Seed: EECLINDPWVLLNAS
EECFINLPSVLENAS

SEQ ID NO: 254006 - protein, 15 aa, Artificial Sequence
  Description of Artificial Sequence: Synthetic peptide
  Seed: EECLINDPWVLLNAS
EECFINLPSVLFNAS

SEQ ID NO: 254007 - protein, 15 aa, Artificial Sequence
  Description of Artificial Sequence: Synthetic peptide
  Seed: EECLINDPWVLLNAS
EECFINLPSVLGNAS

SEQ ID NO: 254008 - protein, 15 aa, Artificial Sequence
  Description of Artificial Sequence: Synthetic peptide
  Seed: EECLINDPWVLLNAS
EECFINLPSVLHNAS

SEQ ID NO: 254009 - protein, 15 aa, Artificial Sequence
  Description of Artificial Sequence: Synthetic peptide
  Seed: EECLINDPWVLLNAS
EECFINLPSVLINAS

SEQ ID NO: 254010 - protein, 15 aa, Artificial Sequence
  Description of Artificial Sequence: Synthetic peptide
  Seed: EECLINDPWVLLNAS
EECFINLPSVLKNAS

SEQ ID NO: 254011 - protein, 15 aa, Artificial Sequence
  Description of Artificial Sequence: Synthetic peptide
  Seed: EECLINDPWVLLNAS
EECFINLPSVLLNAS

SEQ ID NO: 254012 - protein, 15 aa, Artificial Sequence
  Description of Artificial Sequence: Synthetic peptide
  Seed: EECLINDPWVLLNAS
EECFINLPSVLMNAS

SEQ ID NO: 254013 - protein, 15 aa, Artificial Sequence
  Description of Artificial Sequence: Synthetic peptide
  Seed: EECLINDPWVLLNAS
EECFINLPSVLNNAS

SEQ ID NO: 254014 - protein, 15 aa, Artificial Sequence
  Description of Artificial Sequence: Synthetic peptide
  Seed: EECLINDPWVLLNAS
EECFINLPSVLPNAS

SEQ ID NO: 254015 - protein, 15 aa, Artificial Sequence
  Description of Artificial Sequence: Synthetic peptide
  Seed: EECLINDPWVLLNAS
EECFINLPSVLQNAS

SEQ ID NO: 254016 - protein, 15 aa, Artificial Sequence
  Description of Artificial Sequence: Synthetic peptide
  Seed: EECLINDPWVLLNAS
EECFINLPSVLRNAS

SEQ ID NO: 254017 - protein, 15 aa, Artificial Sequence
  Description of Artificial Sequence: Synthetic peptide
  Seed: EECLINDPWVLLNAS
EECFINLPSVLSNAS

SEQ ID NO: 254018 - protein, 15 aa, Artificial Sequence
  Description of Artificial Sequence: Synthetic peptide
  Seed: EECLINDPWVLLNAS
EECFINLPSVLTNAS

SEQ ID NO: 254019 - protein, 15 aa, Artificial Sequence
  Description of Artificial Sequence: Synthetic peptide
  Seed: EECLINDPWVLLNAS
EECFINLPSVLVNAS

SEQ ID NO: 254020 - protein, 15 aa, Artificial Sequence
  Description of Artificial Sequence: Synthetic peptide
  Seed: EECLINDPWVLLNAS
EECFINLPSVLWNAS

SEQ ID NO: 254021 - protein, 15 aa, Artificial Sequence
  Description of Artificial Sequence: Synthetic peptide
  Seed: EECLINDPWVLLNAS
EECFINLPSVLYNAS

SEQ ID NO: 254022 - protein, 15 aa, Artificial Sequence
  Description of Artificial Sequence: Synthetic peptide
  Seed: EECLINDPWVLLNAS
EECFINLPTVLANAS

SEQ ID NO: 254023 - protein, 15 aa, Artificial Sequence
  Description of Artificial Sequence: Synthetic peptide
  Seed: EECLINDPWVLLNAS
EECFINLPTVLCNAS

SEQ ID NO: 254024 - protein, 15 aa, Artificial Sequence
  Description of Artificial Sequence: Synthetic peptide
  Seed: EECLINDPWVLLNAS
EECFINLPTVLFNAS

SEQ ID NO: 254025 - protein, 15 aa, Artificial Sequence
  Description of Artificial Sequence: Synthetic peptide
  Seed: EECLINDPWVLLNAS
EECFINLPTVLGNAS

SEQ ID NO: 254026 - protein, 15 aa, Artificial Sequence
  Description of Artificial Sequence: Synthetic peptide
  Seed: EECLINDPWVLLNAS
EECFINLPTVLHNAS

SEQ ID NO: 254027 - protein, 15 aa, Artificial Sequence
  Description of Artificial Sequence: Synthetic peptide
  Seed: EECLINDPWVLLNAS
EECFINLPTVLINAS

SEQ ID NO: 254028 - protein, 15 aa, Artificial Sequence
  Description of Artificial Sequence: Synthetic peptide
  Seed: EECLINDPWVLLNAS
EECFINLPTVLKNAS

SEQ ID NO: 254029 - protein, 15 aa, Artificial Sequence
  Description of Artificial Sequence: Synthetic peptide
  Seed: EECLINDPWVLLNAS
EECFINLPTVLLNAS

SEQ ID NO: 254030 - protein, 15 aa, Artificial Sequence
  Description of Artificial Sequence: Synthetic peptide
  Seed: EECLINDPWVLLNAS
EECFINLPTVLMNAS

SEQ ID NO: 254031 - protein, 15 aa, Artificial Sequence
  Description of Artificial Sequence: Synthetic peptide
  Seed: EECLINDPWVLLNAS
EECFINLPTVLNNAS

SEQ ID NO: 254032 - protein, 15 aa, Artificial Sequence
  Description of Artificial Sequence: Synthetic peptide
  Seed: EECLINDPWVLLNAS
EECFINLPTVLPNAS

SEQ ID NO: 254033 - protein, 15 aa, Artificial Sequence
  Description of Artificial Sequence: Synthetic peptide
  Seed: EECLINDPWVLLNAS
EECFINLPTVLQNAS

SEQ ID NO: 254034 - protein, 15 aa, Artificial Sequence
  Description of Artificial Sequence: Synthetic peptide
  Seed: EECLINDPWVLLNAS
EECFINLPTVLRNAS

SEQ ID NO: 254035 - protein, 15 aa, Artificial Sequence
  Description of Artificial Sequence: Synthetic peptide
  Seed: EECLINDPWVLLNAS
EECFINLPTVLSNAS

SEQ ID NO: 254036 - protein, 15 aa, Artificial Sequence
  Description of Artificial Sequence: Synthetic peptide
  Seed: EECLINDPWVLLNAS
EECFINLPTVLTNAS

SEQ ID NO: 254037 - protein, 15 aa, Artificial Sequence
  Description of Artificial Sequence: Synthetic peptide
  Seed: EECLINDPWVLLNAS
EECFINLPTVLVNAS

SEQ ID NO: 254038 - protein, 15 aa, Artificial Sequence
  Description of Artificial Sequence: Synthetic peptide
  Seed: EECLINDPWVLLNAS
EECFINLPTVLYNAS

SEQ ID NO: 254039 - protein, 15 aa, Artificial Sequence
  Description of Artificial Sequence: Synthetic peptide
  Seed: EECLINDPWVLLNAS
EECFINLPVVLANAS

SEQ ID NO: 254040 - protein, 15 aa, Artificial Sequence
  Description of Artificial Sequence: Synthetic peptide
  Seed: EECLINDPWVLLNAS
EECFINLPVVLGNAS

SEQ ID NO: 254041 - protein, 15 aa, Artificial Sequence
  Description of Artificial Sequence: Synthetic peptide
  Seed: EECLINDPWVLLNAS
EECFINLPVVLHNAS

SEQ ID NO: 254042 - protein, 15 aa, Artificial Sequence
  Description of Artificial Sequence: Synthetic peptide
  Seed: EECLINDPWVLLNAS
EECFINLPVVLINAS

SEQ ID NO: 254043 - protein, 15 aa, Artificial Sequence
  Description of Artificial Sequence: Synthetic peptide
  Seed: EECLINDPWVLLNAS
EECFINLPVVLKNAS

SEQ ID NO: 254044 - protein, 15 aa, Artificial Sequence
  Description of Artificial Sequence: Synthetic peptide
  Seed: EECLINDPWVLLNAS
EECFINLPVVLLNAS

SEQ ID NO: 254045 - protein, 15 aa, Artificial Sequence
  Description of Artificial Sequence: Synthetic peptide
  Seed: EECLINDPWVLLNAS
EECFINLPVVLMNAS

SEQ ID NO: 254046 - protein, 15 aa, Artificial Sequence
  Description of Artificial Sequence: Synthetic peptide
  Seed: EECLINDPWVLLNAS
EECFINLPVVLNNAS

SEQ ID NO: 254047 - protein, 15 aa, Artificial Sequence
  Description of Artificial Sequence: Synthetic peptide
  Seed: EECLINDPWVLLNAS
EECFINLPVVLPNAS

SEQ ID NO: 254048 - protein, 15 aa, Artificial Sequence
  Description of Artificial Sequence: Synthetic peptide
  Seed: EECLINDPWVLLNAS
EECFINLPVVLQNAS

SEQ ID NO: 254049 - protein, 15 aa, Artificial Sequence
  Description of Artificial Sequence: Synthetic peptide
  Seed: EECLINDPWVLLNAS
EECFINLPVVLRNAS

SEQ ID NO: 254050 - protein, 15 aa, Artificial Sequence
  Description of Artificial Sequence: Synthetic peptide
  Seed: EECLINDPWVLLNAS
EECFINLPVVLSNAS

SEQ ID NO: 254051 - protein, 15 aa, Artificial Sequence
  Description of Artificial Sequence: Synthetic peptide
  Seed: EECLINDPWVLLNAS
EECFINLPVVLTNAS

SEQ ID NO: 254052 - protein, 15 aa, Artificial Sequence
  Description of Artificial Sequence: Synthetic peptide
  Seed: EECLINDPWVLLNAS
EECFINLPVVLVNAS

SEQ ID NO: 254053 - protein, 15 aa, Artificial Sequence
  Description of Artificial Sequence: Synthetic peptide
  Seed: EECLINDPWVLLNAS
EECFINLPVVLYNAS

SEQ ID NO: 254054 - protein, 15 aa, Artificial Sequence
  Description of Artificial Sequence: Synthetic peptide
  Seed: EECLINDPWVLLNAS
EECFINLPYVLINAS

SEQ ID NO: 254055 - protein, 15 aa, Artificial Sequence
  Description of Artificial Sequence: Synthetic peptide
  Seed: EECLINDPWVLLNAS
EECFINLPYVLLNAS

SEQ ID NO: 254056 - protein, 15 aa, Artificial Sequence
  Description of Artificial Sequence: Synthetic peptide
  Seed: EECLINDPWVLLNAS
EECFINMPAVLANAS

SEQ ID NO: 254057 - protein, 15 aa, Artificial Sequence
  Description of Artificial Sequence: Synthetic peptide
  Seed: EECLINDPWVLLNAS
EECFINMPAVLCNAS

SEQ ID NO: 254058 - protein, 15 aa, Artificial Sequence
  Description of Artificial Sequence: Synthetic peptide
  Seed: EECLINDPWVLLNAS
EECFINMPAVLDNAS

SEQ ID NO: 254059 - protein, 15 aa, Artificial Sequence
  Description of Artificial Sequence: Synthetic peptide
  Seed: EECLINDPWVLLNAS
EECFINMPAVLENAS

SEQ ID NO: 254060 - protein, 15 aa, Artificial Sequence
  Description of Artificial Sequence: Synthetic peptide
  Seed: EECLINDPWVLLNAS
EECFINMPAVLFNAS

SEQ ID NO: 254061 - protein, 15 aa, Artificial Sequence
  Description of Artificial Sequence: Synthetic peptide
  Seed: EECLINDPWVLLNAS
EECFINMPAVLGNAS

SEQ ID NO: 254062 - protein, 15 aa, Artificial Sequence
  Description of Artificial Sequence: Synthetic peptide
  Seed: EECLINDPWVLLNAS
EECFINMPAVLHNAS

SEQ ID NO: 254063 - protein, 15 aa, Artificial Sequence
  Description of Artificial Sequence: Synthetic peptide
  Seed: EECLINDPWVLLNAS
EECFINMPAVLINAS

SEQ ID NO: 254064 - protein, 15 aa, Artificial Sequence
  Description of Artificial Sequence: Synthetic peptide
  Seed: EECLINDPWVLLNAS
EECFINMPAVLKNAS

SEQ ID NO: 254065 - protein, 15 aa, Artificial Sequence
  Description of Artificial Sequence: Synthetic peptide
  Seed: EECLINDPWVLLNAS
EECFINMPAVLLNAS

SEQ ID NO: 254066 - protein, 15 aa, Artificial Sequence
  Description of Artificial Sequence: Synthetic peptide
  Seed: EECLINDPWVLLNAS
EECFINMPAVLMNAS

SEQ ID NO: 254067 - protein, 15 aa, Artificial Sequence
  Description of Artificial Sequence: Synthetic peptide
  Seed: EECLINDPWVLLNAS
EECFINMPAVLNNAS

SEQ ID NO: 254068 - protein, 15 aa, Artificial Sequence
  Description of Artificial Sequence: Synthetic peptide
  Seed: EECLINDPWVLLNAS
EECFINMPAVLPNAS

SEQ ID NO: 254069 - protein, 15 aa, Artificial Sequence
  Description of Artificial Sequence: Synthetic peptide
  Seed: EECLINDPWVLLNAS
EECFINMPAVLQNAS

SEQ ID NO: 254070 - protein, 15 aa, Artificial Sequence
  Description of Artificial Sequence: Synthetic peptide
  Seed: EECLINDPWVLLNAS
EECFINMPAVLRNAS

SEQ ID NO: 254071 - protein, 15 aa, Artificial Sequence
  Description of Artificial Sequence: Synthetic peptide
  Seed: EECLINDPWVLLNAS
EECFINMPAVLSNAS

SEQ ID NO: 254072 - protein, 15 aa, Artificial Sequence
  Description of Artificial Sequence: Synthetic peptide
  Seed: EECLINDPWVLLNAS
EECFINMPAVLTNAS

SEQ ID NO: 254073 - protein, 15 aa, Artificial Sequence
  Description of Artificial Sequence: Synthetic peptide
  Seed: EECLINDPWVLLNAS
EECFINMPAVLVNAS

SEQ ID NO: 254074 - protein, 15 aa, Artificial Sequence
  Description of Artificial Sequence: Synthetic peptide
  Seed: EECLINDPWVLLNAS
EECFINMPAVLWNAS

SEQ ID NO: 254075 - protein, 15 aa, Artificial Sequence
  Description of Artificial Sequence: Synthetic peptide
  Seed: EECLINDPWVLLNAS
EECFINMPAVLYNAS

SEQ ID NO: 254076 - protein, 15 aa, Artificial Sequence
  Description of Artificial Sequence: Synthetic peptide
  Seed: EECLINDPWVLLNAS
EECFINMPCVLANAS

SEQ ID NO: 254077 - protein, 15 aa, Artificial Sequence
  Description of Artificial Sequence: Synthetic peptide
  Seed: EECLINDPWVLLNAS
EECFINMPCVLINAS

SEQ ID NO: 254078 - protein, 15 aa, Artificial Sequence
  Description of Artificial Sequence: Synthetic peptide
  Seed: EECLINDPWVLLNAS
EECFINMPCVLLNAS

SEQ ID NO: 254079 - protein, 15 aa, Artificial Sequence
  Description of Artificial Sequence: Synthetic peptide
  Seed: EECLINDPWVLLNAS
EECFINMPCVLSNAS

SEQ ID NO: 254080 - protein, 15 aa, Artificial Sequence
  Description of Artificial Sequence: Synthetic peptide
  Seed: EECLINDPWVLLNAS
EECFINMPCVLTNAS

SEQ ID NO: 254081 - protein, 15 aa, Artificial Sequence
  Description of Artificial Sequence: Synthetic peptide
  Seed: EECLINDPWVLLNAS
EECFINMPCVLVNAS

SEQ ID NO: 254082 - protein, 15 aa, Artificial Sequence
  Description of Artificial Sequence: Synthetic peptide
  Seed: EECLINDPWVLLNAS
EECFINMPDVLANAS

SEQ ID NO: 254083 - protein, 15 aa, Artificial Sequence
  Description of Artificial Sequence: Synthetic peptide
  Seed: EECLINDPWVLLNAS
EECFINMPDVLINAS

SEQ ID NO: 254084 - protein, 15 aa, Artificial Sequence
  Description of Artificial Sequence: Synthetic peptide
  Seed: EECLINDPWVLLNAS
EECFINMPDVLLNAS

SEQ ID NO: 254085 - protein, 15 aa, Artificial Sequence
  Description of Artificial Sequence: Synthetic peptide
  Seed: EECLINDPWVLLNAS
EECFINMPDVLTNAS

SEQ ID NO: 254086 - protein, 15 aa, Artificial Sequence
  Description of Artificial Sequence: Synthetic peptide
  Seed: EECLINDPWVLLNAS
EECFINMPDVLVNAS

SEQ ID NO: 254087 - protein, 15 aa, Artificial Sequence
  Description of Artificial Sequence: Synthetic peptide
  Seed: EECLINDPWVLLNAS
EECFINMPEVLANAS

SEQ ID NO: 254088 - protein, 15 aa, Artificial Sequence
  Description of Artificial Sequence: Synthetic peptide
  Seed: EECLINDPWVLLNAS
EECFINMPEVLINAS

SEQ ID NO: 254089 - protein, 15 aa, Artificial Sequence
  Description of Artificial Sequence: Synthetic peptide
  Seed: EECLINDPWVLLNAS
EECFINMPEVLLNAS

SEQ ID NO: 254090 - protein, 15 aa, Artificial Sequence
  Description of Artificial Sequence: Synthetic peptide
  Seed: EECLINDPWVLLNAS
EECFINMPEVLMNAS

SEQ ID NO: 254091 - protein, 15 aa, Artificial Sequence
  Description of Artificial Sequence: Synthetic peptide
  Seed: EECLINDPWVLLNAS
EECFINMPEVLSNAS

SEQ ID NO: 254092 - protein, 15 aa, Artificial Sequence
  Description of Artificial Sequence: Synthetic peptide
  Seed: EECLINDPWVLLNAS
EECFINMPEVLTNAS

SEQ ID NO: 254093 - protein, 15 aa, Artificial Sequence
  Description of Artificial Sequence: Synthetic peptide
  Seed: EECLINDPWVLLNAS
EECFINMPEVLVNAS

SEQ ID NO: 254094 - protein, 15 aa, Artificial Sequence
  Description of Artificial Sequence: Synthetic peptide
  Seed: EECLINDPWVLLNAS
EECFINMPFVLFNAS

SEQ ID NO: 254095 - protein, 15 aa, Artificial Sequence
  Description of Artificial Sequence: Synthetic peptide
  Seed: EECLINDPWVLLNAS
EECFINMPFVLINAS

SEQ ID NO: 254096 - protein, 15 aa, Artificial Sequence
  Description of Artificial Sequence: Synthetic peptide
  Seed: EECLINDPWVLLNAS
EECFINMPFVLLNAS

SEQ ID NO: 254097 - protein, 15 aa, Artificial Sequence
  Description of Artificial Sequence: Synthetic peptide
  Seed: EECLINDPWVLLNAS
EECFINMPFVLMNAS

SEQ ID NO: 254098 - protein, 15 aa, Artificial Sequence
  Description of Artificial Sequence: Synthetic peptide
  Seed: EECLINDPWVLLNAS
EECFINMPFVLVNAS

SEQ ID NO: 254099 - protein, 15 aa, Artificial Sequence
  Description of Artificial Sequence: Synthetic peptide
  Seed: EECLINDPWVLLNAS
EECFINMPGVLANAS

SEQ ID NO: 254100 - protein, 15 aa, Artificial Sequence
  Description of Artificial Sequence: Synthetic peptide
  Seed: EECLINDPWVLLNAS
EECFINMPGVLCNAS

SEQ ID NO: 254101 - protein, 15 aa, Artificial Sequence
  Description of Artificial Sequence: Synthetic peptide
  Seed: EECLINDPWVLLNAS
EECFINMPGVLDNAS

SEQ ID NO: 254102 - protein, 15 aa, Artificial Sequence
  Description of Artificial Sequence: Synthetic peptide
  Seed: EECLINDPWVLLNAS
EECFINMPGVLENAS

SEQ ID NO: 254103 - protein, 15 aa, Artificial Sequence
  Description of Artificial Sequence: Synthetic peptide
  Seed: EECLINDPWVLLNAS
EECFINMPGVLFNAS

SEQ ID NO: 254104 - protein, 15 aa, Artificial Sequence
  Description of Artificial Sequence: Synthetic peptide
  Seed: EECLINDPWVLLNAS
EECFINMPGVLGNAS

SEQ ID NO: 254105 - protein, 15 aa, Artificial Sequence
  Description of Artificial Sequence: Synthetic peptide
  Seed: EECLINDPWVLLNAS
EECFINMPGVLHNAS

SEQ ID NO: 254106 - protein, 15 aa, Artificial Sequence
  Description of Artificial Sequence: Synthetic peptide
  Seed: EECLINDPWVLLNAS
EECFINMPGVLINAS

SEQ ID NO: 254107 - protein, 15 aa, Artificial Sequence
  Description of Artificial Sequence: Synthetic peptide
  Seed: EECLINDPWVLLNAS
EECFINMPGVLKNAS

SEQ ID NO: 254108 - protein, 15 aa, Artificial Sequence
  Description of Artificial Sequence: Synthetic peptide
  Seed: EECLINDPWVLLNAS
EECFINMPGVLLNAS

SEQ ID NO: 254109 - protein, 15 aa, Artificial Sequence
  Description of Artificial Sequence: Synthetic peptide
  Seed: EECLINDPWVLLNAS
EECFINMPGVLMNAS

SEQ ID NO: 254110 - protein, 15 aa, Artificial Sequence
  Description of Artificial Sequence: Synthetic peptide
  Seed: EECLINDPWVLLNAS
EECFINMPGVLNNAS

SEQ ID NO: 254111 - protein, 15 aa, Artificial Sequence
  Description of Artificial Sequence: Synthetic peptide
  Seed: EECLINDPWVLLNAS
EECFINMPGVLPNAS

SEQ ID NO: 254112 - protein, 15 aa, Artificial Sequence
  Description of Artificial Sequence: Synthetic peptide
  Seed: EECLINDPWVLLNAS
EECFINMPGVLQNAS

SEQ ID NO: 254113 - protein, 15 aa, Artificial Sequence
  Description of Artificial Sequence: Synthetic peptide
  Seed: EECLINDPWVLLNAS
EECFINMPGVLRNAS

SEQ ID NO: 254114 - protein, 15 aa, Artificial Sequence
  Description of Artificial Sequence: Synthetic peptide
  Seed: EECLINDPWVLLNAS
EECFINMPGVLSNAS

SEQ ID NO: 254115 - protein, 15 aa, Artificial Sequence
  Description of Artificial Sequence: Synthetic peptide
  Seed: EECLINDPWVLLNAS
EECFINMPGVLTNAS

SEQ ID NO: 254116 - protein, 15 aa, Artificial Sequence
  Description of Artificial Sequence: Synthetic peptide
  Seed: EECLINDPWVLLNAS
EECFINMPGVLVNAS

SEQ ID NO: 254117 - protein, 15 aa, Artificial Sequence
  Description of Artificial Sequence: Synthetic peptide
  Seed: EECLINDPWVLLNAS
EECFINMPGVLWNAS

SEQ ID NO: 254118 - protein, 15 aa, Artificial Sequence
  Description of Artificial Sequence: Synthetic peptide
  Seed: EECLINDPWVLLNAS
EECFINMPGVLYNAS

SEQ ID NO: 254119 - protein, 15 aa, Artificial Sequence
  Description of Artificial Sequence: Synthetic peptide
  Seed: EECLINDPWVLLNAS
EECFINMPHVLANAS

SEQ ID NO: 254120 - protein, 15 aa, Artificial Sequence
  Description of Artificial Sequence: Synthetic peptide
  Seed: EECLINDPWVLLNAS
EECFINMPHVLGNAS

SEQ ID NO: 254121 - protein, 15 aa, Artificial Sequence
  Description of Artificial Sequence: Synthetic peptide
  Seed: EECLINDPWVLLNAS
EECFINMPHVLINAS

SEQ ID NO: 254122 - protein, 15 aa, Artificial Sequence
  Description of Artificial Sequence: Synthetic peptide
  Seed: EECLINDPWVLLNAS
EECFINMPHVLLNAS

SEQ ID NO: 254123 - protein, 15 aa, Artificial Sequence
  Description of Artificial Sequence: Synthetic peptide
  Seed: EECLINDPWVLLNAS
EECFINMPHVLMNAS

SEQ ID NO: 254124 - protein, 15 aa, Artificial Sequence
  Description of Artificial Sequence: Synthetic peptide
  Seed: EECLINDPWVLLNAS
EECFINMPHVLSNAS

SEQ ID NO: 254125 - protein, 15 aa, Artificial Sequence
  Description of Artificial Sequence: Synthetic peptide
  Seed: EECLINDPWVLLNAS
EECFINMPHVLTNAS

SEQ ID NO: 254126 - protein, 15 aa, Artificial Sequence
  Description of Artificial Sequence: Synthetic peptide
  Seed: EECLINDPWVLLNAS
EECFINMPHVLVNAS

SEQ ID NO: 254127 - protein, 15 aa, Artificial Sequence
  Description of Artificial Sequence: Synthetic peptide
  Seed: EECLINDPWVLLNAS
EECFINMPIVLANAS

SEQ ID NO: 254128 - protein, 15 aa, Artificial Sequence
  Description of Artificial Sequence: Synthetic peptide
  Seed: EECLINDPWVLLNAS
EECFINMPIVLGNAS

SEQ ID NO: 254129 - protein, 15 aa, Artificial Sequence
  Description of Artificial Sequence: Synthetic peptide
  Seed: EECLINDPWVLLNAS
EECFINMPIVLHNAS

SEQ ID NO: 254130 - protein, 15 aa, Artificial Sequence
  Description of Artificial Sequence: Synthetic peptide
  Seed: EECLINDPWVLLNAS
EECFINMPIVLINAS

SEQ ID NO: 254131 - protein, 15 aa, Artificial Sequence
  Description of Artificial Sequence: Synthetic peptide
  Seed: EECLINDPWVLLNAS
EECFINMPIVLLNAS

SEQ ID NO: 254132 - protein, 15 aa, Artificial Sequence
  Description of Artificial Sequence: Synthetic peptide
  Seed: EECLINDPWVLLNAS
EECFINMPIVLMNAS

SEQ ID NO: 254133 - protein, 15 aa, Artificial Sequence
  Description of Artificial Sequence: Synthetic peptide
  Seed: EECLINDPWVLLNAS
EECFINMPIVLNNAS

SEQ ID NO: 254134 - protein, 15 aa, Artificial Sequence
  Description of Artificial Sequence: Synthetic peptide
  Seed: EECLINDPWVLLNAS
EECFINMPIVLSNAS

SEQ ID NO: 254135 - protein, 15 aa, Artificial Sequence
  Description of Artificial Sequence: Synthetic peptide
  Seed: EECLINDPWVLLNAS
EECFINMPIVLTNAS

SEQ ID NO: 254136 - protein, 15 aa, Artificial Sequence
  Description of Artificial Sequence: Synthetic peptide
  Seed: EECLINDPWVLLNAS
EECFINMPIVLVNAS

SEQ ID NO: 254137 - protein, 15 aa, Artificial Sequence
  Description of Artificial Sequence: Synthetic peptide
  Seed: EECLINDPWVLLNAS
EECFINMPLVLANAS

SEQ ID NO: 254138 - protein, 15 aa, Artificial Sequence
  Description of Artificial Sequence: Synthetic peptide
  Seed: EECLINDPWVLLNAS
EECFINMPLVLLNAS

SEQ ID NO: 254139 - protein, 15 aa, Artificial Sequence
  Description of Artificial Sequence: Synthetic peptide
  Seed: EECLINDPWVLLNAS
EECFINMPLVLSNAS

SEQ ID NO: 254140 - protein, 15 aa, Artificial Sequence
  Description of Artificial Sequence: Synthetic peptide
  Seed: EECLINDPWVLLNAS
EECFINMPLVLTNAS

SEQ ID NO: 254141 - protein, 15 aa, Artificial Sequence
  Description of Artificial Sequence: Synthetic peptide
  Seed: EECLINDPWVLLNAS
EECFINMPLVLVNAS

SEQ ID NO: 254142 - protein, 15 aa, Artificial Sequence
  Description of Artificial Sequence: Synthetic peptide
  Seed: EECLINDPWVLLNAS
EECFINMPMVLANAS

SEQ ID NO: 254143 - protein, 15 aa, Artificial Sequence
  Description of Artificial Sequence: Synthetic peptide
  Seed: EECLINDPWVLLNAS
EECFINMPMVLINAS

SEQ ID NO: 254144 - protein, 15 aa, Artificial Sequence
  Description of Artificial Sequence: Synthetic peptide
  Seed: EECLINDPWVLLNAS
EECFINMPMVLLNAS

SEQ ID NO: 254145 - protein, 15 aa, Artificial Sequence
  Description of Artificial Sequence: Synthetic peptide
  Seed: EECLINDPWVLLNAS
EECFINMPMVLMNAS

SEQ ID NO: 254146 - protein, 15 aa, Artificial Sequence
  Description of Artificial Sequence: Synthetic peptide
  Seed: EECLINDPWVLLNAS
EECFINMPMVLSNAS

SEQ ID NO: 254147 - protein, 15 aa, Artificial Sequence
  Description of Artificial Sequence: Synthetic peptide
  Seed: EECLINDPWVLLNAS
EECFINMPMVLTNAS

SEQ ID NO: 254148 - protein, 15 aa, Artificial Sequence
  Description of Artificial Sequence: Synthetic peptide
  Seed: EECLINDPWVLLNAS
EECFINMPMVLVNAS

SEQ ID NO: 254149 - protein, 15 aa, Artificial Sequence
  Description of Artificial Sequence: Synthetic peptide
  Seed: EECLINDPWVLLNAS
EECFINMPNVLANAS

SEQ ID NO: 254150 - protein, 15 aa, Artificial Sequence
  Description of Artificial Sequence: Synthetic peptide
  Seed: EECLINDPWVLLNAS
EECFINMPNVLCNAS

SEQ ID NO: 254151 - protein, 15 aa, Artificial Sequence
  Description of Artificial Sequence: Synthetic peptide
  Seed: EECLINDPWVLLNAS
EECFINMPNVLFNAS

SEQ ID NO: 254152 - protein, 15 aa, Artificial Sequence
  Description of Artificial Sequence: Synthetic peptide
  Seed: EECLINDPWVLLNAS
EECFINMPNVLGNAS

SEQ ID NO: 254153 - protein, 15 aa, Artificial Sequence
  Description of Artificial Sequence: Synthetic peptide
  Seed: EECLINDPWVLLNAS
EECFINMPNVLHNAS

SEQ ID NO: 254154 - protein, 15 aa, Artificial Sequence
  Description of Artificial Sequence: Synthetic peptide
  Seed: EECLINDPWVLLNAS
EECFINMPNVLINAS

SEQ ID NO: 254155 - protein, 15 aa, Artificial Sequence
  Description of Artificial Sequence: Synthetic peptide
  Seed: EECLINDPWVLLNAS
EECFINMPNVLKNAS

SEQ ID NO: 254156 - protein, 15 aa, Artificial Sequence
  Description of Artificial Sequence: Synthetic peptide
  Seed: EECLINDPWVLLNAS
EECFINMPNVLLNAS

SEQ ID NO: 254157 - protein, 15 aa, Artificial Sequence
  Description of Artificial Sequence: Synthetic peptide
  Seed: EECLINDPWVLLNAS
EECFINMPNVLMNAS

SEQ ID NO: 254158 - protein, 15 aa, Artificial Sequence
  Description of Artificial Sequence: Synthetic peptide
  Seed: EECLINDPWVLLNAS
EECFINMPNVLNNAS

SEQ ID NO: 254159 - protein, 15 aa, Artificial Sequence
  Description of Artificial Sequence: Synthetic peptide
  Seed: EECLINDPWVLLNAS
EECFINMPNVLPNAS

SEQ ID NO: 254160 - protein, 15 aa, Artificial Sequence
  Description of Artificial Sequence: Synthetic peptide
  Seed: EECLINDPWVLLNAS
EECFINMPNVLQNAS

SEQ ID NO: 254161 - protein, 15 aa, Artificial Sequence
  Description of Artificial Sequence: Synthetic peptide
  Seed: EECLINDPWVLLNAS
EECFINMPNVLRNAS

SEQ ID NO: 254162 - protein, 15 aa, Artificial Sequence
  Description of Artificial Sequence: Synthetic peptide
  Seed: EECLINDPWVLLNAS
EECFINMPNVLSNAS

SEQ ID NO: 254163 - protein, 15 aa, Artificial Sequence
  Description of Artificial Sequence: Synthetic peptide
  Seed: EECLINDPWVLLNAS
EECFINMPNVLTNAS

SEQ ID NO: 254164 - protein, 15 aa, Artificial Sequence
  Description of Artificial Sequence: Synthetic peptide
  Seed: EECLINDPWVLLNAS
EECFINMPNVLVNAS

SEQ ID NO: 254165 - protein, 15 aa, Artificial Sequence
  Description of Artificial Sequence: Synthetic peptide
  Seed: EECLINDPWVLLNAS
EECFINMPNVLWNAS

SEQ ID NO: 254166 - protein, 15 aa, Artificial Sequence
  Description of Artificial Sequence: Synthetic peptide
  Seed: EECLINDPWVLLNAS
EECFINMPNVLYNAS

SEQ ID NO: 254167 - protein, 15 aa, Artificial Sequence
  Description of Artificial Sequence: Synthetic peptide
  Seed: EECLINDPWVLLNAS
EECFINMPPVLANAS

SEQ ID NO: 254168 - protein, 15 aa, Artificial Sequence
  Description of Artificial Sequence: Synthetic peptide
  Seed: EECLINDPWVLLNAS
EECFINMPPVLCNAS

SEQ ID NO: 254169 - protein, 15 aa, Artificial Sequence
  Description of Artificial Sequence: Synthetic peptide
  Seed: EECLINDPWVLLNAS
EECFINMPPVLFNAS

SEQ ID NO: 254170 - protein, 15 aa, Artificial Sequence
  Description of Artificial Sequence: Synthetic peptide
  Seed: EECLINDPWVLLNAS
EECFINMPPVLGNAS

SEQ ID NO: 254171 - protein, 15 aa, Artificial Sequence
  Description of Artificial Sequence: Synthetic peptide
  Seed: EECLINDPWVLLNAS
EECFINMPPVLHNAS

SEQ ID NO: 254172 - protein, 15 aa, Artificial Sequence
  Description of Artificial Sequence: Synthetic peptide
  Seed: EECLINDPWVLLNAS
EECFINMPPVLINAS

SEQ ID NO: 254173 - protein, 15 aa, Artificial Sequence
  Description of Artificial Sequence: Synthetic peptide
  Seed: EECLINDPWVLLNAS
EECFINMPPVLKNAS

SEQ ID NO: 254174 - protein, 15 aa, Artificial Sequence
  Description of Artificial Sequence: Synthetic peptide
  Seed: EECLINDPWVLLNAS
EECFINMPPVLLNAS

SEQ ID NO: 254175 - protein, 15 aa, Artificial Sequence
  Description of Artificial Sequence: Synthetic peptide
  Seed: EECLINDPWVLLNAS
EECFINMPPVLMNAS

SEQ ID NO: 254176 - protein, 15 aa, Artificial Sequence
  Description of Artificial Sequence: Synthetic peptide
  Seed: EECLINDPWVLLNAS
EECFINMPPVLNNAS

SEQ ID NO: 254177 - protein, 15 aa, Artificial Sequence
  Description of Artificial Sequence: Synthetic peptide
  Seed: EECLINDPWVLLNAS
EECFINMPPVLPNAS

SEQ ID NO: 254178 - protein, 15 aa, Artificial Sequence
  Description of Artificial Sequence: Synthetic peptide
  Seed: EECLINDPWVLLNAS
EECFINMPPVLQNAS

SEQ ID NO: 254179 - protein, 15 aa, Artificial Sequence
  Description of Artificial Sequence: Synthetic peptide
  Seed: EECLINDPWVLLNAS
EECFINMPPVLRNAS

SEQ ID NO: 254180 - protein, 15 aa, Artificial Sequence
  Description of Artificial Sequence: Synthetic peptide
  Seed: EECLINDPWVLLNAS
EECFINMPPVLSNAS

SEQ ID NO: 254181 - protein, 15 aa, Artificial Sequence
  Description of Artificial Sequence: Synthetic peptide
  Seed: EECLINDPWVLLNAS
EECFINMPPVLTNAS

SEQ ID NO: 254182 - protein, 15 aa, Artificial Sequence
  Description of Artificial Sequence: Synthetic peptide
  Seed: EECLINDPWVLLNAS
EECFINMPPVLVNAS

SEQ ID NO: 254183 - protein, 15 aa, Artificial Sequence
  Description of Artificial Sequence: Synthetic peptide
  Seed: EECLINDPWVLLNAS
EECFINMPPVLWNAS

SEQ ID NO: 254184 - protein, 15 aa, Artificial Sequence
  Description of Artificial Sequence: Synthetic peptide
  Seed: EECLINDPWVLLNAS
EECFINMPPVLYNAS

SEQ ID NO: 254185 - protein, 15 aa, Artificial Sequence
  Description of Artificial Sequence: Synthetic peptide
  Seed: EECLINDPWVLLNAS
EECFINMPQVLANAS

SEQ ID NO: 254186 - protein, 15 aa, Artificial Sequence
  Description of Artificial Sequence: Synthetic peptide
  Seed: EECLINDPWVLLNAS
EECFINMPQVLINAS

SEQ ID NO: 254187 - protein, 15 aa, Artificial Sequence
  Description of Artificial Sequence: Synthetic peptide
  Seed: EECLINDPWVLLNAS
EECFINMPQVLLNAS

SEQ ID NO: 254188 - protein, 15 aa, Artificial Sequence
  Description of Artificial Sequence: Synthetic peptide
  Seed: EECLINDPWVLLNAS
EECFINMPQVLMNAS

SEQ ID NO: 254189 - protein, 15 aa, Artificial Sequence
  Description of Artificial Sequence: Synthetic peptide
  Seed: EECLINDPWVLLNAS
EECFINMPQVLSNAS

SEQ ID NO: 254190 - protein, 15 aa, Artificial Sequence
  Description of Artificial Sequence: Synthetic peptide
  Seed: EECLINDPWVLLNAS
EECFINMPQVLTNAS

SEQ ID NO: 254191 - protein, 15 aa, Artificial Sequence
  Description of Artificial Sequence: Synthetic peptide
  Seed: EECLINDPWVLLNAS
EECFINMPQVLVNAS

SEQ ID NO: 254192 - protein, 15 aa, Artificial Sequence
  Description of Artificial Sequence: Synthetic peptide
  Seed: EECLINDPWVLLNAS
EECFINMPSVLANAS

SEQ ID NO: 254193 - protein, 15 aa, Artificial Sequence
  Description of Artificial Sequence: Synthetic peptide
  Seed: EECLINDPWVLLNAS
EECFINMPSVLCNAS

SEQ ID NO: 254194 - protein, 15 aa, Artificial Sequence
  Description of Artificial Sequence: Synthetic peptide
  Seed: EECLINDPWVLLNAS
EECFINMPSVLDNAS

SEQ ID NO: 254195 - protein, 15 aa, Artificial Sequence
  Description of Artificial Sequence: Synthetic peptide
  Seed: EECLINDPWVLLNAS
EECFINMPSVLENAS

SEQ ID NO: 254196 - protein, 15 aa, Artificial Sequence
  Description of Artificial Sequence: Synthetic peptide
  Seed: EECLINDPWVLLNAS
EECFINMPSVLFNAS

SEQ ID NO: 254197 - protein, 15 aa, Artificial Sequence
  Description of Artificial Sequence: Synthetic peptide
  Seed: EECLINDPWVLLNAS
EECFINMPSVLGNAS

SEQ ID NO: 254198 - protein, 15 aa, Artificial Sequence
  Description of Artificial Sequence: Synthetic peptide
  Seed: EECLINDPWVLLNAS
EECFINMPSVLHNAS

SEQ ID NO: 254199 - protein, 15 aa, Artificial Sequence
  Description of Artificial Sequence: Synthetic peptide
  Seed: EECLINDPWVLLNAS
EECFINMPSVLINAS

SEQ ID NO: 254200 - protein, 15 aa, Artificial Sequence
  Description of Artificial Sequence: Synthetic peptide
  Seed: EECLINDPWVLLNAS
EECFINMPSVLKNAS

SEQ ID NO: 254201 - protein, 15 aa, Artificial Sequence
  Description of Artificial Sequence: Synthetic peptide
  Seed: EECLINDPWVLLNAS
EECFINMPSVLLNAS

SEQ ID NO: 254202 - protein, 15 aa, Artificial Sequence
  Description of Artificial Sequence: Synthetic peptide
  Seed: EECLINDPWVLLNAS
EECFINMPSVLMNAS

SEQ ID NO: 254203 - protein, 15 aa, Artificial Sequence
  Description of Artificial Sequence: Synthetic peptide
  Seed: EECLINDPWVLLNAS
EECFINMPSVLNNAS

SEQ ID NO: 254204 - protein, 15 aa, Artificial Sequence
  Description of Artificial Sequence: Synthetic peptide
  Seed: EECLINDPWVLLNAS
EECFINMPSVLPNAS

SEQ ID NO: 254205 - protein, 15 aa, Artificial Sequence
  Description of Artificial Sequence: Synthetic peptide
  Seed: EECLINDPWVLLNAS
EECFINMPSVLQNAS

SEQ ID NO: 254206 - protein, 15 aa, Artificial Sequence
  Description of Artificial Sequence: Synthetic peptide
  Seed: EECLINDPWVLLNAS
EECFINMPSVLRNAS

SEQ ID NO: 254207 - protein, 15 aa, Artificial Sequence
  Description of Artificial Sequence: Synthetic peptide
  Seed: EECLINDPWVLLNAS
EECFINMPSVLSNAS

SEQ ID NO: 254208 - protein, 15 aa, Artificial Sequence
  Description of Artificial Sequence: Synthetic peptide
  Seed: EECLINDPWVLLNAS
EECFINMPSVLTNAS

SEQ ID NO: 254209 - protein, 15 aa, Artificial Sequence
  Description of Artificial Sequence: Synthetic peptide
  Seed: EECLINDPWVLLNAS
EECFINMPSVLVNAS

SEQ ID NO: 254210 - protein, 15 aa, Artificial Sequence
  Description of Artificial Sequence: Synthetic peptide
  Seed: EECLINDPWVLLNAS
EECFINMPSVLWNAS

SEQ ID NO: 254211 - protein, 15 aa, Artificial Sequence
  Description of Artificial Sequence: Synthetic peptide
  Seed: EECLINDPWVLLNAS
EECFINMPSVLYNAS

SEQ ID NO: 254212 - protein, 15 aa, Artificial Sequence
  Description of Artificial Sequence: Synthetic peptide
  Seed: EECLINDPWVLLNAS
EECFINMPTVLANAS

SEQ ID NO: 254213 - protein, 15 aa, Artificial Sequence
  Description of Artificial Sequence: Synthetic peptide
  Seed: EECLINDPWVLLNAS
EECFINMPTVLCNAS

SEQ ID NO: 254214 - protein, 15 aa, Artificial Sequence
  Description of Artificial Sequence: Synthetic peptide
  Seed: EECLINDPWVLLNAS
EECFINMPTVLFNAS

SEQ ID NO: 254215 - protein, 15 aa, Artificial Sequence
  Description of Artificial Sequence: Synthetic peptide
  Seed: EECLINDPWVLLNAS
EECFINMPTVLGNAS

SEQ ID NO: 254216 - protein, 15 aa, Artificial Sequence
  Description of Artificial Sequence: Synthetic peptide
  Seed: EECLINDPWVLLNAS
EECFINMPTVLHNAS

SEQ ID NO: 254217 - protein, 15 aa, Artificial Sequence
  Description of Artificial Sequence: Synthetic peptide
  Seed: EECLINDPWVLLNAS
EECFINMPTVLINAS

SEQ ID NO: 254218 - protein, 15 aa, Artificial Sequence
  Description of Artificial Sequence: Synthetic peptide
  Seed: EECLINDPWVLLNAS
EECFINMPTVLKNAS

SEQ ID NO: 254219 - protein, 15 aa, Artificial Sequence
  Description of Artificial Sequence: Synthetic peptide
  Seed: EECLINDPWVLLNAS
EECFINMPTVLLNAS

SEQ ID NO: 254220 - protein, 15 aa, Artificial Sequence
  Description of Artificial Sequence: Synthetic peptide
  Seed: EECLINDPWVLLNAS
EECFINMPTVLMNAS

SEQ ID NO: 254221 - protein, 15 aa, Artificial Sequence
  Description of Artificial Sequence: Synthetic peptide
  Seed: EECLINDPWVLLNAS
EECFINMPTVLNNAS

SEQ ID NO: 254222 - protein, 15 aa, Artificial Sequence
  Description of Artificial Sequence: Synthetic peptide
  Seed: EECLINDPWVLLNAS
EECFINMPTVLPNAS

SEQ ID NO: 254223 - protein, 15 aa, Artificial Sequence
  Description of Artificial Sequence: Synthetic peptide
  Seed: EECLINDPWVLLNAS
EECFINMPTVLQNAS

SEQ ID NO: 254224 - protein, 15 aa, Artificial Sequence
  Description of Artificial Sequence: Synthetic peptide
  Seed: EECLINDPWVLLNAS
EECFINMPTVLRNAS

SEQ ID NO: 254225 - protein, 15 aa, Artificial Sequence
  Description of Artificial Sequence: Synthetic peptide
  Seed: EECLINDPWVLLNAS
EECFINMPTVLSNAS

SEQ ID NO: 254226 - protein, 15 aa, Artificial Sequence
  Description of Artificial Sequence: Synthetic peptide
  Seed: EECLINDPWVLLNAS
EECFINMPTVLTNAS

SEQ ID NO: 254227 - protein, 15 aa, Artificial Sequence
  Description of Artificial Sequence: Synthetic peptide
  Seed: EECLINDPWVLLNAS
EECFINMPTVLVNAS

SEQ ID NO: 254228 - protein, 15 aa, Artificial Sequence
  Description of Artificial Sequence: Synthetic peptide
  Seed: EECLINDPWVLLNAS
EECFINMPTVLWNAS

SEQ ID NO: 254229 - protein, 15 aa, Artificial Sequence
  Description of Artificial Sequence: Synthetic peptide
  Seed: EECLINDPWVLLNAS
EECFINMPTVLYNAS

SEQ ID NO: 254230 - protein, 15 aa, Artificial Sequence
  Description of Artificial Sequence: Synthetic peptide
  Seed: EECLINDPWVLLNAS
EECFINMPVVLANAS

SEQ ID NO: 254231 - protein, 15 aa, Artificial Sequence
  Description of Artificial Sequence: Synthetic peptide
  Seed: EECLINDPWVLLNAS
EECFINMPVVLCNAS

SEQ ID NO: 254232 - protein, 15 aa, Artificial Sequence
  Description of Artificial Sequence: Synthetic peptide
  Seed: EECLINDPWVLLNAS
EECFINMPVVLFNAS

SEQ ID NO: 254233 - protein, 15 aa, Artificial Sequence
  Description of Artificial Sequence: Synthetic peptide
  Seed: EECLINDPWVLLNAS
EECFINMPVVLGNAS

SEQ ID NO: 254234 - protein, 15 aa, Artificial Sequence
  Description of Artificial Sequence: Synthetic peptide
  Seed: EECLINDPWVLLNAS
EECFINMPVVLHNAS

SEQ ID NO: 254235 - protein, 15 aa, Artificial Sequence
  Description of Artificial Sequence: Synthetic peptide
  Seed: EECLINDPWVLLNAS
EECFINMPVVLINAS

SEQ ID NO: 254236 - protein, 15 aa, Artificial Sequence
  Description of Artificial Sequence: Synthetic peptide
  Seed: EECLINDPWVLLNAS
EECFINMPVVLKNAS

SEQ ID NO: 254237 - protein, 15 aa, Artificial Sequence
  Description of Artificial Sequence: Synthetic peptide
  Seed: EECLINDPWVLLNAS
EECFINMPVVLLNAS

SEQ ID NO: 254238 - protein, 15 aa, Artificial Sequence
  Description of Artificial Sequence: Synthetic peptide
  Seed: EECLINDPWVLLNAS
EECFINMPVVLMNAS

SEQ ID NO: 254239 - protein, 15 aa, Artificial Sequence
  Description of Artificial Sequence: Synthetic peptide
  Seed: EECLINDPWVLLNAS
EECFINMPVVLNNAS

SEQ ID NO: 254240 - protein, 15 aa, Artificial Sequence
  Description of Artificial Sequence: Synthetic peptide
  Seed: EECLINDPWVLLNAS
EECFINMPVVLPNAS

SEQ ID NO: 254241 - protein, 15 aa, Artificial Sequence
  Description of Artificial Sequence: Synthetic peptide
  Seed: EECLINDPWVLLNAS
EECFINMPVVLQNAS

SEQ ID NO: 254242 - protein, 15 aa, Artificial Sequence
  Description of Artificial Sequence: Synthetic peptide
  Seed: EECLINDPWVLLNAS
EECFINMPVVLRNAS

SEQ ID NO: 254243 - protein, 15 aa, Artificial Sequence
  Description of Artificial Sequence: Synthetic peptide
  Seed: EECLINDPWVLLNAS
EECFINMPVVLSNAS

SEQ ID NO: 254244 - protein, 15 aa, Artificial Sequence
  Description of Artificial Sequence: Synthetic peptide
  Seed: EECLINDPWVLLNAS
EECFINMPVVLTNAS

SEQ ID NO: 254245 - protein, 15 aa, Artificial Sequence
  Description of Artificial Sequence: Synthetic peptide
  Seed: EECLINDPWVLLNAS
EECFINMPVVLVNAS

SEQ ID NO: 254246 - protein, 15 aa, Artificial Sequence
  Description of Artificial Sequence: Synthetic peptide
  Seed: EECLINDPWVLLNAS
EECFINMPVVLYNAS

SEQ ID NO: 254247 - protein, 15 aa, Artificial Sequence
  Description of Artificial Sequence: Synthetic peptide
  Seed: EECLINDPWVLLNAS
EECFINMPWVLANAS

SEQ ID NO: 254248 - protein, 15 aa, Artificial Sequence
  Description of Artificial Sequence: Synthetic peptide
  Seed: EECLINDPWVLLNAS
EECFINMPWVLVNAS

SEQ ID NO: 254249 - protein, 15 aa, Artificial Sequence
  Description of Artificial Sequence: Synthetic peptide
  Seed: EECLINDPWVLLNAS
EECFINNPAVLANAS

SEQ ID NO: 254250 - protein, 15 aa, Artificial Sequence
  Description of Artificial Sequence: Synthetic peptide
  Seed: EECLINDPWVLLNAS
EECFINNPAVLFNAS

SEQ ID NO: 254251 - protein, 15 aa, Artificial Sequence
  Description of Artificial Sequence: Synthetic peptide
  Seed: EECLINDPWVLLNAS
EECFINNPAVLGNAS

SEQ ID NO: 254252 - protein, 15 aa, Artificial Sequence
  Description of Artificial Sequence: Synthetic peptide
  Seed: EECLINDPWVLLNAS
EECFINNPAVLINAS

SEQ ID NO: 254253 - protein, 15 aa, Artificial Sequence
  Description of Artificial Sequence: Synthetic peptide
  Seed: EECLINDPWVLLNAS
EECFINNPAVLLNAS

SEQ ID NO: 254254 - protein, 15 aa, Artificial Sequence
  Description of Artificial Sequence: Synthetic peptide
  Seed: EECLINDPWVLLNAS
EECFINNPAVLMNAS

SEQ ID NO: 254255 - protein, 15 aa, Artificial Sequence
  Description of Artificial Sequence: Synthetic peptide
  Seed: EECLINDPWVLLNAS
EECFINNPAVLNNAS

SEQ ID NO: 254256 - protein, 15 aa, Artificial Sequence
  Description of Artificial Sequence: Synthetic peptide
  Seed: EECLINDPWVLLNAS
EECFINNPAVLQNAS

SEQ ID NO: 254257 - protein, 15 aa, Artificial Sequence
  Description of Artificial Sequence: Synthetic peptide
  Seed: EECLINDPWVLLNAS
EECFINNPAVLSNAS

SEQ ID NO: 254258 - protein, 15 aa, Artificial Sequence
  Description of Artificial Sequence: Synthetic peptide
  Seed: EECLINDPWVLLNAS
EECFINNPAVLTNAS

SEQ ID NO: 254259 - protein, 15 aa, Artificial Sequence
  Description of Artificial Sequence: Synthetic peptide
  Seed: EECLINDPWVLLNAS
EECFINNPAVLVNAS

SEQ ID NO: 254260 - protein, 15 aa, Artificial Sequence
  Description of Artificial Sequence: Synthetic peptide
  Seed: EECLINDPWVLLNAS
EECFINNPAVLWNAS

SEQ ID NO: 254261 - protein, 15 aa, Artificial Sequence
  Description of Artificial Sequence: Synthetic peptide
  Seed: EECLINDPWVLLNAS
EECFINNPAVLYNAS

SEQ ID NO: 254262 - protein, 15 aa, Artificial Sequence
  Description of Artificial Sequence: Synthetic peptide
  Seed: EECLINDPWVLLNAS
EECFINNPCVLINAS

SEQ ID NO: 254263 - protein, 15 aa, Artificial Sequence
  Description of Artificial Sequence: Synthetic peptide
  Seed: EECLINDPWVLLNAS
EECFINNPCVLVNAS

SEQ ID NO: 254264 - protein, 15 aa, Artificial Sequence
  Description of Artificial Sequence: Synthetic peptide
  Seed: EECLINDPWVLLNAS
EECFINNPFVLFNAS

SEQ ID NO: 254265 - protein, 15 aa, Artificial Sequence
  Description of Artificial Sequence: Synthetic peptide
  Seed: EECLINDPWVLLNAS
EECFINNPFVLINAS

SEQ ID NO: 254266 - protein, 15 aa, Artificial Sequence
  Description of Artificial Sequence: Synthetic peptide
  Seed: EECLINDPWVLLNAS
EECFINNPFVLMNAS

SEQ ID NO: 254267 - protein, 15 aa, Artificial Sequence
  Description of Artificial Sequence: Synthetic peptide
  Seed: EECLINDPWVLLNAS
EECFINNPFVLVNAS

SEQ ID NO: 254268 - protein, 15 aa, Artificial Sequence
  Description of Artificial Sequence: Synthetic peptide
  Seed: EECLINDPWVLLNAS
EECFINNPGVLANAS

SEQ ID NO: 254269 - protein, 15 aa, Artificial Sequence
  Description of Artificial Sequence: Synthetic peptide
  Seed: EECLINDPWVLLNAS
EECFINNPGVLFNAS

SEQ ID NO: 254270 - protein, 15 aa, Artificial Sequence
  Description of Artificial Sequence: Synthetic peptide
  Seed: EECLINDPWVLLNAS
EECFINNPGVLINAS

SEQ ID NO: 254271 - protein, 15 aa, Artificial Sequence
  Description of Artificial Sequence: Synthetic peptide
  Seed: EECLINDPWVLLNAS
EECFINNPGVLLNAS

SEQ ID NO: 254272 - protein, 15 aa, Artificial Sequence
  Description of Artificial Sequence: Synthetic peptide
  Seed: EECLINDPWVLLNAS
EECFINNPGVLMNAS

SEQ ID NO: 254273 - protein, 15 aa, Artificial Sequence
  Description of Artificial Sequence: Synthetic peptide
  Seed: EECLINDPWVLLNAS
EECFINNPGVLSNAS

SEQ ID NO: 254274 - protein, 15 aa, Artificial Sequence
  Description of Artificial Sequence: Synthetic peptide
  Seed: EECLINDPWVLLNAS
EECFINNPGVLTNAS

SEQ ID NO: 254275 - protein, 15 aa, Artificial Sequence
  Description of Artificial Sequence: Synthetic peptide
  Seed: EECLINDPWVLLNAS
EECFINNPGVLVNAS

SEQ ID NO: 254276 - protein, 15 aa, Artificial Sequence
  Description of Artificial Sequence: Synthetic peptide
  Seed: EECLINDPWVLLNAS
EECFINNPGVLYNAS

SEQ ID NO: 254277 - protein, 15 aa, Artificial Sequence
  Description of Artificial Sequence: Synthetic peptide
  Seed: EECLINDPWVLLNAS
EECFINNPHVLFNAS

SEQ ID NO: 254278 - protein, 15 aa, Artificial Sequence
  Description of Artificial Sequence: Synthetic peptide
  Seed: EECLINDPWVLLNAS
EECFINNPHVLINAS

SEQ ID NO: 254279 - protein, 15 aa, Artificial Sequence
  Description of Artificial Sequence: Synthetic peptide
  Seed: EECLINDPWVLLNAS
EECFINNPHVLLNAS

SEQ ID NO: 254280 - protein, 15 aa, Artificial Sequence
  Description of Artificial Sequence: Synthetic peptide
  Seed: EECLINDPWVLLNAS
EECFINNPHVLVNAS

SEQ ID NO: 254281 - protein, 15 aa, Artificial Sequence
  Description of Artificial Sequence: Synthetic peptide
  Seed: EECLINDPWVLLNAS
EECFINNPIVLANAS

SEQ ID NO: 254282 - protein, 15 aa, Artificial Sequence
  Description of Artificial Sequence: Synthetic peptide
  Seed: EECLINDPWVLLNAS
EECFINNPIVLFNAS

SEQ ID NO: 254283 - protein, 15 aa, Artificial Sequence
  Description of Artificial Sequence: Synthetic peptide
  Seed: EECLINDPWVLLNAS
EECFINNPIVLINAS

SEQ ID NO: 254284 - protein, 15 aa, Artificial Sequence
  Description of Artificial Sequence: Synthetic peptide
  Seed: EECLINDPWVLLNAS
EECFINNPIVLLNAS

SEQ ID NO: 254285 - protein, 15 aa, Artificial Sequence
  Description of Artificial Sequence: Synthetic peptide
  Seed: EECLINDPWVLLNAS
EECFINNPIVLMNAS

SEQ ID NO: 254286 - protein, 15 aa, Artificial Sequence
  Description of Artificial Sequence: Synthetic peptide
  Seed: EECLINDPWVLLNAS
EECFINNPIVLSNAS

SEQ ID NO: 254287 - protein, 15 aa, Artificial Sequence
  Description of Artificial Sequence: Synthetic peptide
  Seed: EECLINDPWVLLNAS
EECFINNPIVLTNAS

SEQ ID NO: 254288 - protein, 15 aa, Artificial Sequence
  Description of Artificial Sequence: Synthetic peptide
  Seed: EECLINDPWVLLNAS
EECFINNPIVLVNAS

SEQ ID NO: 254289 - protein, 15 aa, Artificial Sequence
  Description of Artificial Sequence: Synthetic peptide
  Seed: EECLINDPWVLLNAS
EECFINNPIVLWNAS

SEQ ID NO: 254290 - protein, 15 aa, Artificial Sequence
  Description of Artificial Sequence: Synthetic peptide
  Seed: EECLINDPWVLLNAS
EECFINNPIVLYNAS

SEQ ID NO: 254291 - protein, 15 aa, Artificial Sequence
  Description of Artificial Sequence: Synthetic peptide
  Seed: EECLINDPWVLLNAS
EECFINNPLVLANAS

SEQ ID NO: 254292 - protein, 15 aa, Artificial Sequence
  Description of Artificial Sequence: Synthetic peptide
  Seed: EECLINDPWVLLNAS
EECFINNPLVLFNAS

SEQ ID NO: 254293 - protein, 15 aa, Artificial Sequence
  Description of Artificial Sequence: Synthetic peptide
  Seed: EECLINDPWVLLNAS
EECFINNPLVLINAS

SEQ ID NO: 254294 - protein, 15 aa, Artificial Sequence
  Description of Artificial Sequence: Synthetic peptide
  Seed: EECLINDPWVLLNAS
EECFINNPLVLLNAS

SEQ ID NO: 254295 - protein, 15 aa, Artificial Sequence
  Description of Artificial Sequence: Synthetic peptide
  Seed: EECLINDPWVLLNAS
EECFINNPLVLMNAS

SEQ ID NO: 254296 - protein, 15 aa, Artificial Sequence
  Description of Artificial Sequence: Synthetic peptide
  Seed: EECLINDPWVLLNAS
EECFINNPLVLVNAS

SEQ ID NO: 254297 - protein, 15 aa, Artificial Sequence
  Description of Artificial Sequence: Synthetic peptide
  Seed: EECLINDPWVLLNAS
EECFINNPLVLYNAS

SEQ ID NO: 254298 - protein, 15 aa, Artificial Sequence
  Description of Artificial Sequence: Synthetic peptide
  Seed: EECLINDPWVLLNAS
EECFINNPMVLANAS

SEQ ID NO: 254299 - protein, 15 aa, Artificial Sequence
  Description of Artificial Sequence: Synthetic peptide
  Seed: EECLINDPWVLLNAS
EECFINNPMVLFNAS

SEQ ID NO: 254300 - protein, 15 aa, Artificial Sequence
  Description of Artificial Sequence: Synthetic peptide
  Seed: EECLINDPWVLLNAS
EECFINNPMVLINAS

SEQ ID NO: 254301 - protein, 15 aa, Artificial Sequence
  Description of Artificial Sequence: Synthetic peptide
  Seed: EECLINDPWVLLNAS
EECFINNPMVLLNAS

SEQ ID NO: 254302 - protein, 15 aa, Artificial Sequence
  Description of Artificial Sequence: Synthetic peptide
  Seed: EECLINDPWVLLNAS
EECFINNPMVLMNAS

SEQ ID NO: 254303 - protein, 15 aa, Artificial Sequence
  Description of Artificial Sequence: Synthetic peptide
  Seed: EECLINDPWVLLNAS
EECFINNPMVLTNAS

SEQ ID NO: 254304 - protein, 15 aa, Artificial Sequence
  Description of Artificial Sequence: Synthetic peptide
  Seed: EECLINDPWVLLNAS
EECFINNPMVLVNAS

SEQ ID NO: 254305 - protein, 15 aa, Artificial Sequence
  Description of Artificial Sequence: Synthetic peptide
  Seed: EECLINDPWVLLNAS
EECFINNPMVLYNAS

SEQ ID NO: 254306 - protein, 15 aa, Artificial Sequence
  Description of Artificial Sequence: Synthetic peptide
  Seed: EECLINDPWVLLNAS
EECFINNPNVLANAS

SEQ ID NO: 254307 - protein, 15 aa, Artificial Sequence
  Description of Artificial Sequence: Synthetic peptide
  Seed: EECLINDPWVLLNAS
EECFINNPNVLFNAS

SEQ ID NO: 254308 - protein, 15 aa, Artificial Sequence
  Description of Artificial Sequence: Synthetic peptide
  Seed: EECLINDPWVLLNAS
EECFINNPNVLINAS

SEQ ID NO: 254309 - protein, 15 aa, Artificial Sequence
  Description of Artificial Sequence: Synthetic peptide
  Seed: EECLINDPWVLLNAS
EECFINNPNVLLNAS

SEQ ID NO: 254310 - protein, 15 aa, Artificial Sequence
  Description of Artificial Sequence: Synthetic peptide
  Seed: EECLINDPWVLLNAS
EECFINNPNVLMNAS

SEQ ID NO: 254311 - protein, 15 aa, Artificial Sequence
  Description of Artificial Sequence: Synthetic peptide
  Seed: EECLINDPWVLLNAS
EECFINNPNVLSNAS

SEQ ID NO: 254312 - protein, 15 aa, Artificial Sequence
  Description of Artificial Sequence: Synthetic peptide
  Seed: EECLINDPWVLLNAS
EECFINNPNVLTNAS

SEQ ID NO: 254313 - protein, 15 aa, Artificial Sequence
  Description of Artificial Sequence: Synthetic peptide
  Seed: EECLINDPWVLLNAS
EECFINNPNVLVNAS

SEQ ID NO: 254314 - protein, 15 aa, Artificial Sequence
  Description of Artificial Sequence: Synthetic peptide
  Seed: EECLINDPWVLLNAS
EECFINNPNVLWNAS

SEQ ID NO: 254315 - protein, 15 aa, Artificial Sequence
  Description of Artificial Sequence: Synthetic peptide
  Seed: EECLINDPWVLLNAS
EECFINNPNVLYNAS

SEQ ID NO: 254316 - protein, 15 aa, Artificial Sequence
  Description of Artificial Sequence: Synthetic peptide
  Seed: EECLINDPWVLLNAS
EECFINNPPVLANAS

SEQ ID NO: 254317 - protein, 15 aa, Artificial Sequence
  Description of Artificial Sequence: Synthetic peptide
  Seed: EECLINDPWVLLNAS
EECFINNPPVLFNAS

SEQ ID NO: 254318 - protein, 15 aa, Artificial Sequence
  Description of Artificial Sequence: Synthetic peptide
  Seed: EECLINDPWVLLNAS
EECFINNPPVLINAS

SEQ ID NO: 254319 - protein, 15 aa, Artificial Sequence
  Description of Artificial Sequence: Synthetic peptide
  Seed: EECLINDPWVLLNAS
EECFINNPPVLLNAS

SEQ ID NO: 254320 - protein, 15 aa, Artificial Sequence
  Description of Artificial Sequence: Synthetic peptide
  Seed: EECLINDPWVLLNAS
EECFINNPPVLMNAS

SEQ ID NO: 254321 - protein, 15 aa, Artificial Sequence
  Description of Artificial Sequence: Synthetic peptide
  Seed: EECLINDPWVLLNAS
EECFINNPPVLVNAS

SEQ ID NO: 254322 - protein, 15 aa, Artificial Sequence
  Description of Artificial Sequence: Synthetic peptide
  Seed: EECLINDPWVLLNAS
EECFINNPPVLYNAS

SEQ ID NO: 254323 - protein, 15 aa, Artificial Sequence
  Description of Artificial Sequence: Synthetic peptide
  Seed: EECLINDPWVLLNAS
EECFINNPQVLINAS

SEQ ID NO: 254324 - protein, 15 aa, Artificial Sequence
  Description of Artificial Sequence: Synthetic peptide
  Seed: EECLINDPWVLLNAS
EECFINNPQVLVNAS

SEQ ID NO: 254325 - protein, 15 aa, Artificial Sequence
  Description of Artificial Sequence: Synthetic peptide
  Seed: EECLINDPWVLLNAS
EECFINNPSVLANAS

SEQ ID NO: 254326 - protein, 15 aa, Artificial Sequence
  Description of Artificial Sequence: Synthetic peptide
  Seed: EECLINDPWVLLNAS
EECFINNPSVLFNAS

SEQ ID NO: 254327 - protein, 15 aa, Artificial Sequence
  Description of Artificial Sequence: Synthetic peptide
  Seed: EECLINDPWVLLNAS
EECFINNPSVLINAS

SEQ ID NO: 254328 - protein, 15 aa, Artificial Sequence
  Description of Artificial Sequence: Synthetic peptide
  Seed: EECLINDPWVLLNAS
EECFINNPSVLLNAS

SEQ ID NO: 254329 - protein, 15 aa, Artificial Sequence
  Description of Artificial Sequence: Synthetic peptide
  Seed: EECLINDPWVLLNAS
EECFINNPSVLMNAS

SEQ ID NO: 254330 - protein, 15 aa, Artificial Sequence
  Description of Artificial Sequence: Synthetic peptide
  Seed: EECLINDPWVLLNAS
EECFINNPSVLSNAS

SEQ ID NO: 254331 - protein, 15 aa, Artificial Sequence
  Description of Artificial Sequence: Synthetic peptide
  Seed: EECLINDPWVLLNAS
EECFINNPSVLTNAS

SEQ ID NO: 254332 - protein, 15 aa, Artificial Sequence
  Description of Artificial Sequence: Synthetic peptide
  Seed: EECLINDPWVLLNAS
EECFINNPSVLVNAS

SEQ ID NO: 254333 - protein, 15 aa, Artificial Sequence
  Description of Artificial Sequence: Synthetic peptide
  Seed: EECLINDPWVLLNAS
EECFINNPSVLWNAS

SEQ ID NO: 254334 - protein, 15 aa, Artificial Sequence
  Description of Artificial Sequence: Synthetic peptide
  Seed: EECLINDPWVLLNAS
EECFINNPSVLYNAS

SEQ ID NO: 254335 - protein, 15 aa, Artificial Sequence
  Description of Artificial Sequence: Synthetic peptide
  Seed: EECLINDPWVLLNAS
EECFINNPTVLANAS

SEQ ID NO: 254336 - protein, 15 aa, Artificial Sequence
  Description of Artificial Sequence: Synthetic peptide
  Seed: EECLINDPWVLLNAS
EECFINNPTVLFNAS

SEQ ID NO: 254337 - protein, 15 aa, Artificial Sequence
  Description of Artificial Sequence: Synthetic peptide
  Seed: EECLINDPWVLLNAS
EECFINNPTVLINAS

SEQ ID NO: 254338 - protein, 15 aa, Artificial Sequence
  Description of Artificial Sequence: Synthetic peptide
  Seed: EECLINDPWVLLNAS
EECFINNPTVLLNAS

SEQ ID NO: 254339 - protein, 15 aa, Artificial Sequence
  Description of Artificial Sequence: Synthetic peptide
  Seed: EECLINDPWVLLNAS
EECFINNPTVLMNAS

SEQ ID NO: 254340 - protein, 15 aa, Artificial Sequence
  Description of Artificial Sequence: Synthetic peptide
  Seed: EECLINDPWVLLNAS
EECFINNPTVLTNAS

SEQ ID NO: 254341 - protein, 15 aa, Artificial Sequence
  Description of Artificial Sequence: Synthetic peptide
  Seed: EECLINDPWVLLNAS
EECFINNPTVLVNAS

SEQ ID NO: 254342 - protein, 15 aa, Artificial Sequence
  Description of Artificial Sequence: Synthetic peptide
  Seed: EECLINDPWVLLNAS
EECFINNPTVLWNAS

SEQ ID NO: 254343 - protein, 15 aa, Artificial Sequence
  Description of Artificial Sequence: Synthetic peptide
  Seed: EECLINDPWVLLNAS
EECFINNPTVLYNAS

SEQ ID NO: 254344 - protein, 15 aa, Artificial Sequence
  Description of Artificial Sequence: Synthetic peptide
  Seed: EECLINDPWVLLNAS
EECFINNPVVLANAS

SEQ ID NO: 254345 - protein, 15 aa, Artificial Sequence
  Description of Artificial Sequence: Synthetic peptide
  Seed: EECLINDPWVLLNAS
EECFINNPVVLFNAS

SEQ ID NO: 254346 - protein, 15 aa, Artificial Sequence
  Description of Artificial Sequence: Synthetic peptide
  Seed: EECLINDPWVLLNAS
EECFINNPVVLINAS

SEQ ID NO: 254347 - protein, 15 aa, Artificial Sequence
  Description of Artificial Sequence: Synthetic peptide
  Seed: EECLINDPWVLLNAS
EECFINNPVVLLNAS

SEQ ID NO: 254348 - protein, 15 aa, Artificial Sequence
  Description of Artificial Sequence: Synthetic peptide
  Seed: EECLINDPWVLLNAS
EECFINNPVVLMNAS

SEQ ID NO: 254349 - protein, 15 aa, Artificial Sequence
  Description of Artificial Sequence: Synthetic peptide
  Seed: EECLINDPWVLLNAS
EECFINNPVVLSNAS

SEQ ID NO: 254350 - protein, 15 aa, Artificial Sequence
  Description of Artificial Sequence: Synthetic peptide
  Seed: EECLINDPWVLLNAS
EECFINNPVVLTNAS

SEQ ID NO: 254351 - protein, 15 aa, Artificial Sequence
  Description of Artificial Sequence: Synthetic peptide
  Seed: EECLINDPWVLLNAS
EECFINNPVVLVNAS

SEQ ID NO: 254352 - protein, 15 aa, Artificial Sequence
  Description of Artificial Sequence: Synthetic peptide
  Seed: EECLINDPWVLLNAS
EECFINNPVVLWNAS

SEQ ID NO: 254353 - protein, 15 aa, Artificial Sequence
  Description of Artificial Sequence: Synthetic peptide
  Seed: EECLINDPWVLLNAS
EECFINNPVVLYNAS

SEQ ID NO: 254354 - protein, 15 aa, Artificial Sequence
  Description of Artificial Sequence: Synthetic peptide
  Seed: EECLINDPWVLLNAS
EECFINQPAVLANAS

SEQ ID NO: 254355 - protein, 15 aa, Artificial Sequence
  Description of Artificial Sequence: Synthetic peptide
  Seed: EECLINDPWVLLNAS
EECFINQPAVLCNAS

SEQ ID NO: 254356 - protein, 15 aa, Artificial Sequence
  Description of Artificial Sequence: Synthetic peptide
  Seed: EECLINDPWVLLNAS
EECFINQPAVLFNAS

SEQ ID NO: 254357 - protein, 15 aa, Artificial Sequence
  Description of Artificial Sequence: Synthetic peptide
  Seed: EECLINDPWVLLNAS
EECFINQPAVLGNAS

SEQ ID NO: 254358 - protein, 15 aa, Artificial Sequence
  Description of Artificial Sequence: Synthetic peptide
  Seed: EECLINDPWVLLNAS
EECFINQPAVLHNAS

SEQ ID NO: 254359 - protein, 15 aa, Artificial Sequence
  Description of Artificial Sequence: Synthetic peptide
  Seed: EECLINDPWVLLNAS
EECFINQPAVLINAS

SEQ ID NO: 254360 - protein, 15 aa, Artificial Sequence
  Description of Artificial Sequence: Synthetic peptide
  Seed: EECLINDPWVLLNAS
EECFINQPAVLKNAS

SEQ ID NO: 254361 - protein, 15 aa, Artificial Sequence
  Description of Artificial Sequence: Synthetic peptide
  Seed: EECLINDPWVLLNAS
EECFINQPAVLLNAS

SEQ ID NO: 254362 - protein, 15 aa, Artificial Sequence
  Description of Artificial Sequence: Synthetic peptide
  Seed: EECLINDPWVLLNAS
EECFINQPAVLMNAS

SEQ ID NO: 254363 - protein, 15 aa, Artificial Sequence
  Description of Artificial Sequence: Synthetic peptide
  Seed: EECLINDPWVLLNAS
EECFINQPAVLNNAS

SEQ ID NO: 254364 - protein, 15 aa, Artificial Sequence
  Description of Artificial Sequence: Synthetic peptide
  Seed: EECLINDPWVLLNAS
EECFINQPAVLPNAS

SEQ ID NO: 254365 - protein, 15 aa, Artificial Sequence
  Description of Artificial Sequence: Synthetic peptide
  Seed: EECLINDPWVLLNAS
EECFINQPAVLQNAS

SEQ ID NO: 254366 - protein, 15 aa, Artificial Sequence
  Description of Artificial Sequence: Synthetic peptide
  Seed: EECLINDPWVLLNAS
EECFINQPAVLRNAS

SEQ ID NO: 254367 - protein, 15 aa, Artificial Sequence
  Description of Artificial Sequence: Synthetic peptide
  Seed: EECLINDPWVLLNAS
EECFINQPAVLSNAS

SEQ ID NO: 254368 - protein, 15 aa, Artificial Sequence
  Description of Artificial Sequence: Synthetic peptide
  Seed: EECLINDPWVLLNAS
EECFINQPAVLTNAS

SEQ ID NO: 254369 - protein, 15 aa, Artificial Sequence
  Description of Artificial Sequence: Synthetic peptide
  Seed: EECLINDPWVLLNAS
EECFINQPAVLVNAS

SEQ ID NO: 254370 - protein, 15 aa, Artificial Sequence
  Description of Artificial Sequence: Synthetic peptide
  Seed: EECLINDPWVLLNAS
EECFINQPAVLWNAS

SEQ ID NO: 254371 - protein, 15 aa, Artificial Sequence
  Description of Artificial Sequence: Synthetic peptide
  Seed: EECLINDPWVLLNAS
EECFINQPAVLYNAS

SEQ ID NO: 254372 - protein, 15 aa, Artificial Sequence
  Description of Artificial Sequence: Synthetic peptide
  Seed: EECLINDPWVLLNAS
EECFINQPFVLFNAS

SEQ ID NO: 254373 - protein, 15 aa, Artificial Sequence
  Description of Artificial Sequence: Synthetic peptide
  Seed: EECLINDPWVLLNAS
EECFINQPFVLINAS

SEQ ID NO: 254374 - protein, 15 aa, Artificial Sequence
  Description of Artificial Sequence: Synthetic peptide
  Seed: EECLINDPWVLLNAS
EECFINQPFVLLNAS

SEQ ID NO: 254375 - protein, 15 aa, Artificial Sequence
  Description of Artificial Sequence: Synthetic peptide
  Seed: EECLINDPWVLLNAS
EECFINQPFVLMNAS

SEQ ID NO: 254376 - protein, 15 aa, Artificial Sequence
  Description of Artificial Sequence: Synthetic peptide
  Seed: EECLINDPWVLLNAS
EECFINQPFVLVNAS

SEQ ID NO: 254377 - protein, 15 aa, Artificial Sequence
  Description of Artificial Sequence: Synthetic peptide
  Seed: EECLINDPWVLLNAS
EECFINQPGVLANAS

SEQ ID NO: 254378 - protein, 15 aa, Artificial Sequence
  Description of Artificial Sequence: Synthetic peptide
  Seed: EECLINDPWVLLNAS
EECFINQPGVLCNAS

SEQ ID NO: 254379 - protein, 15 aa, Artificial Sequence
  Description of Artificial Sequence: Synthetic peptide
  Seed: EECLINDPWVLLNAS
EECFINQPGVLFNAS

SEQ ID NO: 254380 - protein, 15 aa, Artificial Sequence
  Description of Artificial Sequence: Synthetic peptide
  Seed: EECLINDPWVLLNAS
EECFINQPGVLGNAS

SEQ ID NO: 254381 - protein, 15 aa, Artificial Sequence
  Description of Artificial Sequence: Synthetic peptide
  Seed: EECLINDPWVLLNAS
EECFINQPGVLINAS

SEQ ID NO: 254382 - protein, 15 aa, Artificial Sequence
  Description of Artificial Sequence: Synthetic peptide
  Seed: EECLINDPWVLLNAS
EECFINQPGVLLNAS

SEQ ID NO: 254383 - protein, 15 aa, Artificial Sequence
  Description of Artificial Sequence: Synthetic peptide
  Seed: EECLINDPWVLLNAS
EECFINQPGVLMNAS

SEQ ID NO: 254384 - protein, 15 aa, Artificial Sequence
  Description of Artificial Sequence: Synthetic peptide
  Seed: EECLINDPWVLLNAS
EECFINQPGVLNNAS

SEQ ID NO: 254385 - protein, 15 aa, Artificial Sequence
  Description of Artificial Sequence: Synthetic peptide
  Seed: EECLINDPWVLLNAS
EECFINQPGVLQNAS

SEQ ID NO: 254386 - protein, 15 aa, Artificial Sequence
  Description of Artificial Sequence: Synthetic peptide
  Seed: EECLINDPWVLLNAS
EECFINQPGVLSNAS

SEQ ID NO: 254387 - protein, 15 aa, Artificial Sequence
  Description of Artificial Sequence: Synthetic peptide
  Seed: EECLINDPWVLLNAS
EECFINQPGVLTNAS

SEQ ID NO: 254388 - protein, 15 aa, Artificial Sequence
  Description of Artificial Sequence: Synthetic peptide
  Seed: EECLINDPWVLLNAS
EECFINQPGVLVNAS

SEQ ID NO: 254389 - protein, 15 aa, Artificial Sequence
  Description of Artificial Sequence: Synthetic peptide
  Seed: EECLINDPWVLLNAS
EECFINQPIVLANAS

SEQ ID NO: 254390 - protein, 15 aa, Artificial Sequence
  Description of Artificial Sequence: Synthetic peptide
  Seed: EECLINDPWVLLNAS
EECFINQPIVLVNAS

SEQ ID NO: 254391 - protein, 15 aa, Artificial Sequence
  Description of Artificial Sequence: Synthetic peptide
  Seed: EECLINDPWVLLNAS
EECFINQPNVLANAS

SEQ ID NO: 254392 - protein, 15 aa, Artificial Sequence
  Description of Artificial Sequence: Synthetic peptide
  Seed: EECLINDPWVLLNAS
EECFINQPNVLGNAS

SEQ ID NO: 254393 - protein, 15 aa, Artificial Sequence
  Description of Artificial Sequence: Synthetic peptide
  Seed: EECLINDPWVLLNAS
EECFINQPNVLINAS

SEQ ID NO: 254394 - protein, 15 aa, Artificial Sequence
  Description of Artificial Sequence: Synthetic peptide
  Seed: EECLINDPWVLLNAS
EECFINQPNVLLNAS

SEQ ID NO: 254395 - protein, 15 aa, Artificial Sequence
  Description of Artificial Sequence: Synthetic peptide
  Seed: EECLINDPWVLLNAS
EECFINQPNVLMNAS

SEQ ID NO: 254396 - protein, 15 aa, Artificial Sequence
  Description of Artificial Sequence: Synthetic peptide
  Seed: EECLINDPWVLLNAS
EECFINQPNVLSNAS

SEQ ID NO: 254397 - protein, 15 aa, Artificial Sequence
  Description of Artificial Sequence: Synthetic peptide
  Seed: EECLINDPWVLLNAS
EECFINQPNVLTNAS

SEQ ID NO: 254398 - protein, 15 aa, Artificial Sequence
  Description of Artificial Sequence: Synthetic peptide
  Seed: EECLINDPWVLLNAS
EECFINQPNVLVNAS

SEQ ID NO: 254399 - protein, 15 aa, Artificial Sequence
  Description of Artificial Sequence: Synthetic peptide
  Seed: EECLINDPWVLLNAS
EECFINQPPVLANAS

SEQ ID NO: 254400 - protein, 15 aa, Artificial Sequence
  Description of Artificial Sequence: Synthetic peptide
  Seed: EECLINDPWVLLNAS
EECFINQPPVLGNAS

SEQ ID NO: 254401 - protein, 15 aa, Artificial Sequence
  Description of Artificial Sequence: Synthetic peptide
  Seed: EECLINDPWVLLNAS
EECFINQPPVLINAS

SEQ ID NO: 254402 - protein, 15 aa, Artificial Sequence
  Description of Artificial Sequence: Synthetic peptide
  Seed: EECLINDPWVLLNAS
EECFINQPPVLLNAS

SEQ ID NO: 254403 - protein, 15 aa, Artificial Sequence
  Description of Artificial Sequence: Synthetic peptide
  Seed: EECLINDPWVLLNAS
EECFINQPPVLMNAS

SEQ ID NO: 254404 - protein, 15 aa, Artificial Sequence
  Description of Artificial Sequence: Synthetic peptide
  Seed: EECLINDPWVLLNAS
EECFINQPPVLSNAS

SEQ ID NO: 254405 - protein, 15 aa, Artificial Sequence
  Description of Artificial Sequence: Synthetic peptide
  Seed: EECLINDPWVLLNAS
EECFINQPPVLTNAS

SEQ ID NO: 254406 - protein, 15 aa, Artificial Sequence
  Description of Artificial Sequence: Synthetic peptide
  Seed: EECLINDPWVLLNAS
EECFINQPPVLVNAS

SEQ ID NO: 254407 - protein, 15 aa, Artificial Sequence
  Description of Artificial Sequence: Synthetic peptide
  Seed: EECLINDPWVLLNAS
EECFINQPSVLANAS

SEQ ID NO: 254408 - protein, 15 aa, Artificial Sequence
  Description of Artificial Sequence: Synthetic peptide
  Seed: EECLINDPWVLLNAS
EECFINQPSVLCNAS

SEQ ID NO: 254409 - protein, 15 aa, Artificial Sequence
  Description of Artificial Sequence: Synthetic peptide
  Seed: EECLINDPWVLLNAS
EECFINQPSVLFNAS

SEQ ID NO: 254410 - protein, 15 aa, Artificial Sequence
  Description of Artificial Sequence: Synthetic peptide
  Seed: EECLINDPWVLLNAS
EECFINQPSVLGNAS

SEQ ID NO: 254411 - protein, 15 aa, Artificial Sequence
  Description of Artificial Sequence: Synthetic peptide
  Seed: EECLINDPWVLLNAS
EECFINQPSVLINAS

SEQ ID NO: 254412 - protein, 15 aa, Artificial Sequence
  Description of Artificial Sequence: Synthetic peptide
  Seed: EECLINDPWVLLNAS
EECFINQPSVLLNAS

SEQ ID NO: 254413 - protein, 15 aa, Artificial Sequence
  Description of Artificial Sequence: Synthetic peptide
  Seed: EECLINDPWVLLNAS
EECFINQPSVLMNAS

SEQ ID NO: 254414 - protein, 15 aa, Artificial Sequence
  Description of Artificial Sequence: Synthetic peptide
  Seed: EECLINDPWVLLNAS
EECFINQPSVLNNAS

SEQ ID NO: 254415 - protein, 15 aa, Artificial Sequence
  Description of Artificial Sequence: Synthetic peptide
  Seed: EECLINDPWVLLNAS
EECFINQPSVLQNAS

SEQ ID NO: 254416 - protein, 15 aa, Artificial Sequence
  Description of Artificial Sequence: Synthetic peptide
  Seed: EECLINDPWVLLNAS
EECFINQPSVLSNAS

SEQ ID NO: 254417 - protein, 15 aa, Artificial Sequence
  Description of Artificial Sequence: Synthetic peptide
  Seed: EECLINDPWVLLNAS
EECFINQPSVLTNAS

SEQ ID NO: 254418 - protein, 15 aa, Artificial Sequence
  Description of Artificial Sequence: Synthetic peptide
  Seed: EECLINDPWVLLNAS
EECFINQPSVLVNAS

SEQ ID NO: 254419 - protein, 15 aa, Artificial Sequence
  Description of Artificial Sequence: Synthetic peptide
  Seed: EECLINDPWVLLNAS
EECFINQPTVLANAS

SEQ ID NO: 254420 - protein, 15 aa, Artificial Sequence
  Description of Artificial Sequence: Synthetic peptide
  Seed: EECLINDPWVLLNAS
EECFINQPTVLGNAS

SEQ ID NO: 254421 - protein, 15 aa, Artificial Sequence
  Description of Artificial Sequence: Synthetic peptide
  Seed: EECLINDPWVLLNAS
EECFINQPTVLINAS

SEQ ID NO: 254422 - protein, 15 aa, Artificial Sequence
  Description of Artificial Sequence: Synthetic peptide
  Seed: EECLINDPWVLLNAS
EECFINQPTVLLNAS

SEQ ID NO: 254423 - protein, 15 aa, Artificial Sequence
  Description of Artificial Sequence: Synthetic peptide
  Seed: EECLINDPWVLLNAS
EECFINQPTVLMNAS

SEQ ID NO: 254424 - protein, 15 aa, Artificial Sequence
  Description of Artificial Sequence: Synthetic peptide
  Seed: EECLINDPWVLLNAS
EECFINQPTVLSNAS

SEQ ID NO: 254425 - protein, 15 aa, Artificial Sequence
  Description of Artificial Sequence: Synthetic peptide
  Seed: EECLINDPWVLLNAS
EECFINQPTVLTNAS

SEQ ID NO: 254426 - protein, 15 aa, Artificial Sequence
  Description of Artificial Sequence: Synthetic peptide
  Seed: EECLINDPWVLLNAS
EECFINQPTVLVNAS

SEQ ID NO: 254427 - protein, 15 aa, Artificial Sequence
  Description of Artificial Sequence: Synthetic peptide
  Seed: EECLINDPWVLLNAS
EECFINQPVVLANAS

SEQ ID NO: 254428 - protein, 15 aa, Artificial Sequence
  Description of Artificial Sequence: Synthetic peptide
  Seed: EECLINDPWVLLNAS
EECFINQPVVLINAS

SEQ ID NO: 254429 - protein, 15 aa, Artificial Sequence
  Description of Artificial Sequence: Synthetic peptide
  Seed: EECLINDPWVLLNAS
EECFINQPVVLLNAS

SEQ ID NO: 254430 - protein, 15 aa, Artificial Sequence
  Description of Artificial Sequence: Synthetic peptide
  Seed: EECLINDPWVLLNAS
EECFINQPVVLMNAS

SEQ ID NO: 254431 - protein, 15 aa, Artificial Sequence
  Description of Artificial Sequence: Synthetic peptide
  Seed: EECLINDPWVLLNAS
EECFINQPVVLSNAS

SEQ ID NO: 254432 - protein, 15 aa, Artificial Sequence
  Description of Artificial Sequence: Synthetic peptide
  Seed: EECLINDPWVLLNAS
EECFINQPVVLTNAS

SEQ ID NO: 254433 - protein, 15 aa, Artificial Sequence
  Description of Artificial Sequence: Synthetic peptide
  Seed: EECLINDPWVLLNAS
EECFINQPVVLVNAS

SEQ ID NO: 254434 - protein, 15 aa, Artificial Sequence
  Description of Artificial Sequence: Synthetic peptide
  Seed: EECLINDPWVLLNAS
EECFINRPAVLANAS

SEQ ID NO: 254435 - protein, 15 aa, Artificial Sequence
  Description of Artificial Sequence: Synthetic peptide
  Seed: EECLINDPWVLLNAS
EECFINRPAVLINAS

SEQ ID NO: 254436 - protein, 15 aa, Artificial Sequence
  Description of Artificial Sequence: Synthetic peptide
  Seed: EECLINDPWVLLNAS
EECFINRPAVLLNAS

SEQ ID NO: 254437 - protein, 15 aa, Artificial Sequence
  Description of Artificial Sequence: Synthetic peptide
  Seed: EECLINDPWVLLNAS
EECFINRPAVLVNAS

SEQ ID NO: 254438 - protein, 15 aa, Artificial Sequence
  Description of Artificial Sequence: Synthetic peptide
  Seed: EECLINDPWVLLNAS
EECFINRPFVLINAS

SEQ ID NO: 254439 - protein, 15 aa, Artificial Sequence
  Description of Artificial Sequence: Synthetic peptide
  Seed: EECLINDPWVLLNAS
EECFINRPFVLLNAS

SEQ ID NO: 254440 - protein, 15 aa, Artificial Sequence
  Description of Artificial Sequence: Synthetic peptide
  Seed: EECLINDPWVLLNAS
EECFINRPFVLVNAS

SEQ ID NO: 254441 - protein, 15 aa, Artificial Sequence
  Description of Artificial Sequence: Synthetic peptide
  Seed: EECLINDPWVLLNAS
EECFINRPGVLLNAS

SEQ ID NO: 254442 - protein, 15 aa, Artificial Sequence
  Description of Artificial Sequence: Synthetic peptide
  Seed: EECLINDPWVLLNAS
EECFINRPSVLLNAS

SEQ ID NO: 254443 - protein, 15 aa, Artificial Sequence
  Description of Artificial Sequence: Synthetic peptide
  Seed: EECLINDPWVLLNAS
EECFINRPSVLVNAS

SEQ ID NO: 254444 - protein, 15 aa, Artificial Sequence
  Description of Artificial Sequence: Synthetic peptide
  Seed: EECLINDPWVLLNAS
EECFINSPAVLANAS

SEQ ID NO: 254445 - protein, 15 aa, Artificial Sequence
  Description of Artificial Sequence: Synthetic peptide
  Seed: EECLINDPWVLLNAS
EECFINSPAVLCNAS

SEQ ID NO: 254446 - protein, 15 aa, Artificial Sequence
  Description of Artificial Sequence: Synthetic peptide
  Seed: EECLINDPWVLLNAS
EECFINSPAVLFNAS

SEQ ID NO: 254447 - protein, 15 aa, Artificial Sequence
  Description of Artificial Sequence: Synthetic peptide
  Seed: EECLINDPWVLLNAS
EECFINSPAVLGNAS

SEQ ID NO: 254448 - protein, 15 aa, Artificial Sequence
  Description of Artificial Sequence: Synthetic peptide
  Seed: EECLINDPWVLLNAS
EECFINSPAVLHNAS

SEQ ID NO: 254449 - protein, 15 aa, Artificial Sequence
  Description of Artificial Sequence: Synthetic peptide
  Seed: EECLINDPWVLLNAS
EECFINSPAVLINAS

SEQ ID NO: 254450 - protein, 15 aa, Artificial Sequence
  Description of Artificial Sequence: Synthetic peptide
  Seed: EECLINDPWVLLNAS
EECFINSPAVLLNAS

SEQ ID NO: 254451 - protein, 15 aa, Artificial Sequence
  Description of Artificial Sequence: Synthetic peptide
  Seed: EECLINDPWVLLNAS
EECFINSPAVLMNAS

SEQ ID NO: 254452 - protein, 15 aa, Artificial Sequence
  Description of Artificial Sequence: Synthetic peptide
  Seed: EECLINDPWVLLNAS
EECFINSPAVLNNAS

SEQ ID NO: 254453 - protein, 15 aa, Artificial Sequence
  Description of Artificial Sequence: Synthetic peptide
  Seed: EECLINDPWVLLNAS
EECFINSPAVLQNAS

SEQ ID NO: 254454 - protein, 15 aa, Artificial Sequence
  Description of Artificial Sequence: Synthetic peptide
  Seed: EECLINDPWVLLNAS
EECFINSPAVLRNAS

SEQ ID NO: 254455 - protein, 15 aa, Artificial Sequence
  Description of Artificial Sequence: Synthetic peptide
  Seed: EECLINDPWVLLNAS
EECFINSPAVLSNAS

SEQ ID NO: 254456 - protein, 15 aa, Artificial Sequence
  Description of Artificial Sequence: Synthetic peptide
  Seed: EECLINDPWVLLNAS
EECFINSPAVLTNAS

SEQ ID NO: 254457 - protein, 15 aa, Artificial Sequence
  Description of Artificial Sequence: Synthetic peptide
  Seed: EECLINDPWVLLNAS
EECFINSPAVLVNAS

SEQ ID NO: 254458 - protein, 15 aa, Artificial Sequence
  Description of Artificial Sequence: Synthetic peptide
  Seed: EECLINDPWVLLNAS
EECFINSPAVLYNAS

SEQ ID NO: 254459 - protein, 15 aa, Artificial Sequence
  Description of Artificial Sequence: Synthetic peptide
  Seed: EECLINDPWVLLNAS
EECFINSPFVLANAS

SEQ ID NO: 254460 - protein, 15 aa, Artificial Sequence
  Description of Artificial Sequence: Synthetic peptide
  Seed: EECLINDPWVLLNAS
EECFINSPFVLDNAS

SEQ ID NO: 254461 - protein, 15 aa, Artificial Sequence
  Description of Artificial Sequence: Synthetic peptide
  Seed: EECLINDPWVLLNAS
EECFINSPFVLENAS

SEQ ID NO: 254462 - protein, 15 aa, Artificial Sequence
  Description of Artificial Sequence: Synthetic peptide
  Seed: EECLINDPWVLLNAS
EECFINSPFVLFNAS

SEQ ID NO: 254463 - protein, 15 aa, Artificial Sequence
  Description of Artificial Sequence: Synthetic peptide
  Seed: EECLINDPWVLLNAS
EECFINSPFVLINAS

SEQ ID NO: 254464 - protein, 15 aa, Artificial Sequence
  Description of Artificial Sequence: Synthetic peptide
  Seed: EECLINDPWVLLNAS
EECFINSPFVLLNAS

SEQ ID NO: 254465 - protein, 15 aa, Artificial Sequence
  Description of Artificial Sequence: Synthetic peptide
  Seed: EECLINDPWVLLNAS
EECFINSPFVLMNAS

SEQ ID NO: 254466 - protein, 15 aa, Artificial Sequence
  Description of Artificial Sequence: Synthetic peptide
  Seed: EECLINDPWVLLNAS
EECFINSPFVLNNAS

SEQ ID NO: 254467 - protein, 15 aa, Artificial Sequence
  Description of Artificial Sequence: Synthetic peptide
  Seed: EECLINDPWVLLNAS
EECFINSPFVLSNAS

SEQ ID NO: 254468 - protein, 15 aa, Artificial Sequence
  Description of Artificial Sequence: Synthetic peptide
  Seed: EECLINDPWVLLNAS
EECFINSPFVLTNAS

SEQ ID NO: 254469 - protein, 15 aa, Artificial Sequence
  Description of Artificial Sequence: Synthetic peptide
  Seed: EECLINDPWVLLNAS
EECFINSPFVLVNAS

SEQ ID NO: 254470 - protein, 15 aa, Artificial Sequence
  Description of Artificial Sequence: Synthetic peptide
  Seed: EECLINDPWVLLNAS
EECFINSPFVLYNAS

SEQ ID NO: 254471 - protein, 15 aa, Artificial Sequence
  Description of Artificial Sequence: Synthetic peptide
  Seed: EECLINDPWVLLNAS
EECFINSPGVLANAS

SEQ ID NO: 254472 - protein, 15 aa, Artificial Sequence
  Description of Artificial Sequence: Synthetic peptide
  Seed: EECLINDPWVLLNAS
EECFINSPGVLGNAS

SEQ ID NO: 254473 - protein, 15 aa, Artificial Sequence
  Description of Artificial Sequence: Synthetic peptide
  Seed: EECLINDPWVLLNAS
EECFINSPGVLINAS

SEQ ID NO: 254474 - protein, 15 aa, Artificial Sequence
  Description of Artificial Sequence: Synthetic peptide
  Seed: EECLINDPWVLLNAS
EECFINSPGVLLNAS

SEQ ID NO: 254475 - protein, 15 aa, Artificial Sequence
  Description of Artificial Sequence: Synthetic peptide
  Seed: EECLINDPWVLLNAS
EECFINSPGVLMNAS

SEQ ID NO: 254476 - protein, 15 aa, Artificial Sequence
  Description of Artificial Sequence: Synthetic peptide
  Seed: EECLINDPWVLLNAS
EECFINSPGVLSNAS

SEQ ID NO: 254477 - protein, 15 aa, Artificial Sequence
  Description of Artificial Sequence: Synthetic peptide
  Seed: EECLINDPWVLLNAS
EECFINSPGVLTNAS

SEQ ID NO: 254478 - protein, 15 aa, Artificial Sequence
  Description of Artificial Sequence: Synthetic peptide
  Seed: EECLINDPWVLLNAS
EECFINSPGVLVNAS

SEQ ID NO: 254479 - protein, 15 aa, Artificial Sequence
  Description of Artificial Sequence: Synthetic peptide
  Seed: EECLINDPWVLLNAS
EECFINSPLVLINAS

SEQ ID NO: 254480 - protein, 15 aa, Artificial Sequence
  Description of Artificial Sequence: Synthetic peptide
  Seed: EECLINDPWVLLNAS
EECFINSPLVLLNAS

SEQ ID NO: 254481 - protein, 15 aa, Artificial Sequence
  Description of Artificial Sequence: Synthetic peptide
  Seed: EECLINDPWVLLNAS
EECFINSPLVLVNAS

SEQ ID NO: 254482 - protein, 15 aa, Artificial Sequence
  Description of Artificial Sequence: Synthetic peptide
  Seed: EECLINDPWVLLNAS
EECFINSPNVLANAS

SEQ ID NO: 254483 - protein, 15 aa, Artificial Sequence
  Description of Artificial Sequence: Synthetic peptide
  Seed: EECLINDPWVLLNAS
EECFINSPNVLFNAS

SEQ ID NO: 254484 - protein, 15 aa, Artificial Sequence
  Description of Artificial Sequence: Synthetic peptide
  Seed: EECLINDPWVLLNAS
EECFINSPNVLINAS

SEQ ID NO: 254485 - protein, 15 aa, Artificial Sequence
  Description of Artificial Sequence: Synthetic peptide
  Seed: EECLINDPWVLLNAS
EECFINSPNVLLNAS

SEQ ID NO: 254486 - protein, 15 aa, Artificial Sequence
  Description of Artificial Sequence: Synthetic peptide
  Seed: EECLINDPWVLLNAS
EECFINSPNVLMNAS

SEQ ID NO: 254487 - protein, 15 aa, Artificial Sequence
  Description of Artificial Sequence: Synthetic peptide
  Seed: EECLINDPWVLLNAS
EECFINSPNVLSNAS

SEQ ID NO: 254488 - protein, 15 aa, Artificial Sequence
  Description of Artificial Sequence: Synthetic peptide
  Seed: EECLINDPWVLLNAS
EECFINSPNVLTNAS

SEQ ID NO: 254489 - protein, 15 aa, Artificial Sequence
  Description of Artificial Sequence: Synthetic peptide
  Seed: EECLINDPWVLLNAS
EECFINSPNVLVNAS

SEQ ID NO: 254490 - protein, 15 aa, Artificial Sequence
  Description of Artificial Sequence: Synthetic peptide
  Seed: EECLINDPWVLLNAS
EECFINSPNVLYNAS

SEQ ID NO: 254491 - protein, 15 aa, Artificial Sequence
  Description of Artificial Sequence: Synthetic peptide
  Seed: EECLINDPWVLLNAS
EECFINSPPVLANAS

SEQ ID NO: 254492 - protein, 15 aa, Artificial Sequence
  Description of Artificial Sequence: Synthetic peptide
  Seed: EECLINDPWVLLNAS
EECFINSPPVLGNAS

SEQ ID NO: 254493 - protein, 15 aa, Artificial Sequence
  Description of Artificial Sequence: Synthetic peptide
  Seed: EECLINDPWVLLNAS
EECFINSPPVLINAS

SEQ ID NO: 254494 - protein, 15 aa, Artificial Sequence
  Description of Artificial Sequence: Synthetic peptide
  Seed: EECLINDPWVLLNAS
EECFINSPPVLLNAS

SEQ ID NO: 254495 - protein, 15 aa, Artificial Sequence
  Description of Artificial Sequence: Synthetic peptide
  Seed: EECLINDPWVLLNAS
EECFINSPPVLMNAS

SEQ ID NO: 254496 - protein, 15 aa, Artificial Sequence
  Description of Artificial Sequence: Synthetic peptide
  Seed: EECLINDPWVLLNAS
EECFINSPPVLSNAS

SEQ ID NO: 254497 - protein, 15 aa, Artificial Sequence
  Description of Artificial Sequence: Synthetic peptide
  Seed: EECLINDPWVLLNAS
EECFINSPPVLTNAS

SEQ ID NO: 254498 - protein, 15 aa, Artificial Sequence
  Description of Artificial Sequence: Synthetic peptide
  Seed: EECLINDPWVLLNAS
EECFINSPPVLVNAS

SEQ ID NO: 254499 - protein, 15 aa, Artificial Sequence
  Description of Artificial Sequence: Synthetic peptide
  Seed: EECLINDPWVLLNAS
EECFINSPSVLANAS

SEQ ID NO: 254500 - protein, 15 aa, Artificial Sequence
  Description of Artificial Sequence: Synthetic peptide
  Seed: EECLINDPWVLLNAS
EECFINSPSVLGNAS

SEQ ID NO: 254501 - protein, 15 aa, Artificial Sequence
  Description of Artificial Sequence: Synthetic peptide
  Seed: EECLINDPWVLLNAS
EECFINSPSVLINAS

SEQ ID NO: 254502 - protein, 15 aa, Artificial Sequence
  Description of Artificial Sequence: Synthetic peptide
  Seed: EECLINDPWVLLNAS
EECFINSPSVLLNAS

SEQ ID NO: 254503 - protein, 15 aa, Artificial Sequence
  Description of Artificial Sequence: Synthetic peptide
  Seed: EECLINDPWVLLNAS
EECFINSPSVLMNAS

SEQ ID NO: 254504 - protein, 15 aa, Artificial Sequence
  Description of Artificial Sequence: Synthetic peptide
  Seed: EECLINDPWVLLNAS
EECFINSPSVLSNAS

SEQ ID NO: 254505 - protein, 15 aa, Artificial Sequence
  Description of Artificial Sequence: Synthetic peptide
  Seed: EECLINDPWVLLNAS
EECFINSPSVLTNAS

SEQ ID NO: 254506 - protein, 15 aa, Artificial Sequence
  Description of Artificial Sequence: Synthetic peptide
  Seed: EECLINDPWVLLNAS
EECFINSPSVLVNAS

SEQ ID NO: 254507 - protein, 15 aa, Artificial Sequence
  Description of Artificial Sequence: Synthetic peptide
  Seed: EECLINDPWVLLNAS
EECFINSPTVLANAS

SEQ ID NO: 254508 - protein, 15 aa, Artificial Sequence
  Description of Artificial Sequence: Synthetic peptide
  Seed: EECLINDPWVLLNAS
EECFINSPTVLINAS

SEQ ID NO: 254509 - protein, 15 aa, Artificial Sequence
  Description of Artificial Sequence: Synthetic peptide
  Seed: EECLINDPWVLLNAS
EECFINSPTVLLNAS

SEQ ID NO: 254510 - protein, 15 aa, Artificial Sequence
  Description of Artificial Sequence: Synthetic peptide
  Seed: EECLINDPWVLLNAS
EECFINSPTVLMNAS

SEQ ID NO: 254511 - protein, 15 aa, Artificial Sequence
  Description of Artificial Sequence: Synthetic peptide
  Seed: EECLINDPWVLLNAS
EECFINSPTVLSNAS

SEQ ID NO: 254512 - protein, 15 aa, Artificial Sequence
  Description of Artificial Sequence: Synthetic peptide
  Seed: EECLINDPWVLLNAS
EECFINSPTVLTNAS

SEQ ID NO: 254513 - protein, 15 aa, Artificial Sequence
  Description of Artificial Sequence: Synthetic peptide
  Seed: EECLINDPWVLLNAS
EECFINSPTVLVNAS

SEQ ID NO: 254514 - protein, 15 aa, Artificial Sequence
  Description of Artificial Sequence: Synthetic peptide
  Seed: EECLINDPWVLLNAS
EECFINSPVVLANAS

SEQ ID NO: 254515 - protein, 15 aa, Artificial Sequence
  Description of Artificial Sequence: Synthetic peptide
  Seed: EECLINDPWVLLNAS
EECFINSPVVLINAS

SEQ ID NO: 254516 - protein, 15 aa, Artificial Sequence
  Description of Artificial Sequence: Synthetic peptide
  Seed: EECLINDPWVLLNAS
EECFINSPVVLLNAS

SEQ ID NO: 254517 - protein, 15 aa, Artificial Sequence
  Description of Artificial Sequence: Synthetic peptide
  Seed: EECLINDPWVLLNAS
EECFINSPVVLVNAS

SEQ ID NO: 254518 - protein, 15 aa, Artificial Sequence
  Description of Artificial Sequence: Synthetic peptide
  Seed: EECLINDPWVLLNAS
EECFINSPWVLLNAS

SEQ ID NO: 254519 - protein, 15 aa, Artificial Sequence
  Description of Artificial Sequence: Synthetic peptide
  Seed: EECLINDPWVLLNAS
EECFINSPYVLINAS

SEQ ID NO: 254520 - protein, 15 aa, Artificial Sequence
  Description of Artificial Sequence: Synthetic peptide
  Seed: EECLINDPWVLLNAS
EECFINSPYVLLNAS

SEQ ID NO: 254521 - protein, 15 aa, Artificial Sequence
  Description of Artificial Sequence: Synthetic peptide
  Seed: EECLINDPWVLLNAS
EECFINSPYVLVNAS

SEQ ID NO: 254522 - protein, 15 aa, Artificial Sequence
  Description of Artificial Sequence: Synthetic peptide
  Seed: EECLINDPWVLLNAS
EECFINTPAVLANAS

SEQ ID NO: 254523 - protein, 15 aa, Artificial Sequence
  Description of Artificial Sequence: Synthetic peptide
  Seed: EECLINDPWVLLNAS
EECFINTPAVLFNAS

SEQ ID NO: 254524 - protein, 15 aa, Artificial Sequence
  Description of Artificial Sequence: Synthetic peptide
  Seed: EECLINDPWVLLNAS
EECFINTPAVLGNAS

SEQ ID NO: 254525 - protein, 15 aa, Artificial Sequence
  Description of Artificial Sequence: Synthetic peptide
  Seed: EECLINDPWVLLNAS
EECFINTPAVLINAS

SEQ ID NO: 254526 - protein, 15 aa, Artificial Sequence
  Description of Artificial Sequence: Synthetic peptide
  Seed: EECLINDPWVLLNAS
EECFINTPAVLLNAS

SEQ ID NO: 254527 - protein, 15 aa, Artificial Sequence
  Description of Artificial Sequence: Synthetic peptide
  Seed: EECLINDPWVLLNAS
EECFINTPAVLMNAS

SEQ ID NO: 254528 - protein, 15 aa, Artificial Sequence
  Description of Artificial Sequence: Synthetic peptide
  Seed: EECLINDPWVLLNAS
EECFINTPAVLSNAS

SEQ ID NO: 254529 - protein, 15 aa, Artificial Sequence
  Description of Artificial Sequence: Synthetic peptide
  Seed: EECLINDPWVLLNAS
EECFINTPAVLTNAS

SEQ ID NO: 254530 - protein, 15 aa, Artificial Sequence
  Description of Artificial Sequence: Synthetic peptide
  Seed: EECLINDPWVLLNAS
EECFINTPAVLVNAS

SEQ ID NO: 254531 - protein, 15 aa, Artificial Sequence
  Description of Artificial Sequence: Synthetic peptide
  Seed: EECLINDPWVLLNAS
EECFINTPFVLANAS

SEQ ID NO: 254532 - protein, 15 aa, Artificial Sequence
  Description of Artificial Sequence: Synthetic peptide
  Seed: EECLINDPWVLLNAS
EECFINTPFVLDNAS

SEQ ID NO: 254533 - protein, 15 aa, Artificial Sequence
  Description of Artificial Sequence: Synthetic peptide
  Seed: EECLINDPWVLLNAS
EECFINTPFVLENAS

SEQ ID NO: 254534 - protein, 15 aa, Artificial Sequence
  Description of Artificial Sequence: Synthetic peptide
  Seed: EECLINDPWVLLNAS
EECFINTPFVLFNAS

SEQ ID NO: 254535 - protein, 15 aa, Artificial Sequence
  Description of Artificial Sequence: Synthetic peptide
  Seed: EECLINDPWVLLNAS
EECFINTPFVLINAS

SEQ ID NO: 254536 - protein, 15 aa, Artificial Sequence
  Description of Artificial Sequence: Synthetic peptide
  Seed: EECLINDPWVLLNAS
EECFINTPFVLLNAS

SEQ ID NO: 254537 - protein, 15 aa, Artificial Sequence
  Description of Artificial Sequence: Synthetic peptide
  Seed: EECLINDPWVLLNAS
EECFINTPFVLMNAS

SEQ ID NO: 254538 - protein, 15 aa, Artificial Sequence
  Description of Artificial Sequence: Synthetic peptide
  Seed: EECLINDPWVLLNAS
EECFINTPFVLNNAS

SEQ ID NO: 254539 - protein, 15 aa, Artificial Sequence
  Description of Artificial Sequence: Synthetic peptide
  Seed: EECLINDPWVLLNAS
EECFINTPFVLPNAS

SEQ ID NO: 254540 - protein, 15 aa, Artificial Sequence
  Description of Artificial Sequence: Synthetic peptide
  Seed: EECLINDPWVLLNAS
EECFINTPFVLQNAS

SEQ ID NO: 254541 - protein, 15 aa, Artificial Sequence
  Description of Artificial Sequence: Synthetic peptide
  Seed: EECLINDPWVLLNAS
EECFINTPFVLSNAS

SEQ ID NO: 254542 - protein, 15 aa, Artificial Sequence
  Description of Artificial Sequence: Synthetic peptide
  Seed: EECLINDPWVLLNAS
EECFINTPFVLTNAS

SEQ ID NO: 254543 - protein, 15 aa, Artificial Sequence
  Description of Artificial Sequence: Synthetic peptide
  Seed: EECLINDPWVLLNAS
EECFINTPFVLYNAS

SEQ ID NO: 254544 - protein, 15 aa, Artificial Sequence
  Description of Artificial Sequence: Synthetic peptide
  Seed: EECLINDPWVLLNAS
EECFINTPGVLANAS

SEQ ID NO: 254545 - protein, 15 aa, Artificial Sequence
  Description of Artificial Sequence: Synthetic peptide
  Seed: EECLINDPWVLLNAS
EECFINTPGVLGNAS

SEQ ID NO: 254546 - protein, 15 aa, Artificial Sequence
  Description of Artificial Sequence: Synthetic peptide
  Seed: EECLINDPWVLLNAS
EECFINTPGVLINAS

SEQ ID NO: 254547 - protein, 15 aa, Artificial Sequence
  Description of Artificial Sequence: Synthetic peptide
  Seed: EECLINDPWVLLNAS
EECFINTPGVLLNAS

SEQ ID NO: 254548 - protein, 15 aa, Artificial Sequence
  Description of Artificial Sequence: Synthetic peptide
  Seed: EECLINDPWVLLNAS
EECFINTPGVLMNAS

SEQ ID NO: 254549 - protein, 15 aa, Artificial Sequence
  Description of Artificial Sequence: Synthetic peptide
  Seed: EECLINDPWVLLNAS
EECFINTPGVLSNAS

SEQ ID NO: 254550 - protein, 15 aa, Artificial Sequence
  Description of Artificial Sequence: Synthetic peptide
  Seed: EECLINDPWVLLNAS
EECFINTPGVLTNAS

SEQ ID NO: 254551 - protein, 15 aa, Artificial Sequence
  Description of Artificial Sequence: Synthetic peptide
  Seed: EECLINDPWVLLNAS
EECFINTPGVLVNAS

SEQ ID NO: 254552 - protein, 15 aa, Artificial Sequence
  Description of Artificial Sequence: Synthetic peptide
  Seed: EECLINDPWVLLNAS
EECFINTPIVLINAS

SEQ ID NO: 254553 - protein, 15 aa, Artificial Sequence
  Description of Artificial Sequence: Synthetic peptide
  Seed: EECLINDPWVLLNAS
EECFINTPIVLLNAS

SEQ ID NO: 254554 - protein, 15 aa, Artificial Sequence
  Description of Artificial Sequence: Synthetic peptide
  Seed: EECLINDPWVLLNAS
EECFINTPLVLINAS

SEQ ID NO: 254555 - protein, 15 aa, Artificial Sequence
  Description of Artificial Sequence: Synthetic peptide
  Seed: EECLINDPWVLLNAS
EECFINTPLVLLNAS

SEQ ID NO: 254556 - protein, 15 aa, Artificial Sequence
  Description of Artificial Sequence: Synthetic peptide
  Seed: EECLINDPWVLLNAS
EECFINTPLVLVNAS

SEQ ID NO: 254557 - protein, 15 aa, Artificial Sequence
  Description of Artificial Sequence: Synthetic peptide
  Seed: EECLINDPWVLLNAS
EECFINTPMVLLNAS

SEQ ID NO: 254558 - protein, 15 aa, Artificial Sequence
  Description of Artificial Sequence: Synthetic peptide
  Seed: EECLINDPWVLLNAS
EECFINTPNVLANAS

SEQ ID NO: 254559 - protein, 15 aa, Artificial Sequence
  Description of Artificial Sequence: Synthetic peptide
  Seed: EECLINDPWVLLNAS
EECFINTPNVLINAS

SEQ ID NO: 254560 - protein, 15 aa, Artificial Sequence
  Description of Artificial Sequence: Synthetic peptide
  Seed: EECLINDPWVLLNAS
EECFINTPNVLLNAS

SEQ ID NO: 254561 - protein, 15 aa, Artificial Sequence
  Description of Artificial Sequence: Synthetic peptide
  Seed: EECLINDPWVLLNAS
EECFINTPNVLVNAS

SEQ ID NO: 254562 - protein, 15 aa, Artificial Sequence
  Description of Artificial Sequence: Synthetic peptide
  Seed: EECLINDPWVLLNAS
EECFINTPPVLANAS

SEQ ID NO: 254563 - protein, 15 aa, Artificial Sequence
  Description of Artificial Sequence: Synthetic peptide
  Seed: EECLINDPWVLLNAS
EECFINTPPVLINAS

SEQ ID NO: 254564 - protein, 15 aa, Artificial Sequence
  Description of Artificial Sequence: Synthetic peptide
  Seed: EECLINDPWVLLNAS
EECFINTPPVLLNAS

SEQ ID NO: 254565 - protein, 15 aa, Artificial Sequence
  Description of Artificial Sequence: Synthetic peptide
  Seed: EECLINDPWVLLNAS
EECFINTPPVLMNAS

SEQ ID NO: 254566 - protein, 15 aa, Artificial Sequence
  Description of Artificial Sequence: Synthetic peptide
  Seed: EECLINDPWVLLNAS
EECFINTPPVLSNAS

SEQ ID NO: 254567 - protein, 15 aa, Artificial Sequence
  Description of Artificial Sequence: Synthetic peptide
  Seed: EECLINDPWVLLNAS
EECFINTPPVLTNAS

SEQ ID NO: 254568 - protein, 15 aa, Artificial Sequence
  Description of Artificial Sequence: Synthetic peptide
  Seed: EECLINDPWVLLNAS
EECFINTPPVLVNAS

SEQ ID NO: 254569 - protein, 15 aa, Artificial Sequence
  Description of Artificial Sequence: Synthetic peptide
  Seed: EECLINDPWVLLNAS
EECFINTPSVLANAS

SEQ ID NO: 254570 - protein, 15 aa, Artificial Sequence
  Description of Artificial Sequence: Synthetic peptide
  Seed: EECLINDPWVLLNAS
EECFINTPSVLGNAS

SEQ ID NO: 254571 - protein, 15 aa, Artificial Sequence
  Description of Artificial Sequence: Synthetic peptide
  Seed: EECLINDPWVLLNAS
EECFINTPSVLINAS

SEQ ID NO: 254572 - protein, 15 aa, Artificial Sequence
  Description of Artificial Sequence: Synthetic peptide
  Seed: EECLINDPWVLLNAS
EECFINTPSVLLNAS

SEQ ID NO: 254573 - protein, 15 aa, Artificial Sequence
  Description of Artificial Sequence: Synthetic peptide
  Seed: EECLINDPWVLLNAS
EECFINTPSVLMNAS

SEQ ID NO: 254574 - protein, 15 aa, Artificial Sequence
  Description of Artificial Sequence: Synthetic peptide
  Seed: EECLINDPWVLLNAS
EECFINTPSVLSNAS

SEQ ID NO: 254575 - protein, 15 aa, Artificial Sequence
  Description of Artificial Sequence: Synthetic peptide
  Seed: EECLINDPWVLLNAS
EECFINTPSVLTNAS

SEQ ID NO: 254576 - protein, 15 aa, Artificial Sequence
  Description of Artificial Sequence: Synthetic peptide
  Seed: EECLINDPWVLLNAS
EECFINTPSVLVNAS

SEQ ID NO: 254577 - protein, 15 aa, Artificial Sequence
  Description of Artificial Sequence: Synthetic peptide
  Seed: EECLINDPWVLLNAS
EECFINTPTVLANAS

SEQ ID NO: 254578 - protein, 15 aa, Artificial Sequence
  Description of Artificial Sequence: Synthetic peptide
  Seed: EECLINDPWVLLNAS
EECFINTPTVLINAS

SEQ ID NO: 254579 - protein, 15 aa, Artificial Sequence
  Description of Artificial Sequence: Synthetic peptide
  Seed: EECLINDPWVLLNAS
EECFINTPTVLLNAS

SEQ ID NO: 254580 - protein, 15 aa, Artificial Sequence
  Description of Artificial Sequence: Synthetic peptide
  Seed: EECLINDPWVLLNAS
EECFINTPTVLVNAS

SEQ ID NO: 254581 - protein, 15 aa, Artificial Sequence
  Description of Artificial Sequence: Synthetic peptide
  Seed: EECLINDPWVLLNAS
EECFINTPVVLANAS

SEQ ID NO: 254582 - protein, 15 aa, Artificial Sequence
  Description of Artificial Sequence: Synthetic peptide
  Seed: EECLINDPWVLLNAS
EECFINTPVVLVNAS

SEQ ID NO: 254583 - protein, 15 aa, Artificial Sequence
  Description of Artificial Sequence: Synthetic peptide
  Seed: EECLINDPWVLLNAS
EECFINTPWVLINAS

SEQ ID NO: 254584 - protein, 15 aa, Artificial Sequence
  Description of Artificial Sequence: Synthetic peptide
  Seed: EECLINDPWVLLNAS
EECFINTPWVLLNAS

SEQ ID NO: 254585 - protein, 15 aa, Artificial Sequence
  Description of Artificial Sequence: Synthetic peptide
  Seed: EECLINDPWVLLNAS
EECFINTPWVLVNAS

SEQ ID NO: 254586 - protein, 15 aa, Artificial Sequence
  Description of Artificial Sequence: Synthetic peptide
  Seed: EECLINDPWVLLNAS
EECFINTPYVLFNAS

SEQ ID NO: 254587 - protein, 15 aa, Artificial Sequence
  Description of Artificial Sequence: Synthetic peptide
  Seed: EECLINDPWVLLNAS
EECFINTPYVLINAS

SEQ ID NO: 254588 - protein, 15 aa, Artificial Sequence
  Description of Artificial Sequence: Synthetic peptide
  Seed: EECLINDPWVLLNAS
EECFINTPYVLLNAS

SEQ ID NO: 254589 - protein, 15 aa, Artificial Sequence
  Description of Artificial Sequence: Synthetic peptide
  Seed: EECLINDPWVLLNAS
EECFINTPYVLMNAS

SEQ ID NO: 254590 - protein, 15 aa, Artificial Sequence
  Description of Artificial Sequence: Synthetic peptide
  Seed: EECLINDPWVLLNAS
EECFINTPYVLVNAS

SEQ ID NO: 254591 - protein, 15 aa, Artificial Sequence
  Description of Artificial Sequence: Synthetic peptide
  Seed: EECLINDPWVLLNAS
EECFINVPAVLANAS

SEQ ID NO: 254592 - protein, 15 aa, Artificial Sequence
  Description of Artificial Sequence: Synthetic peptide
  Seed: EECLINDPWVLLNAS
EECFINVPAVLCNAS

SEQ ID NO: 254593 - protein, 15 aa, Artificial Sequence
  Description of Artificial Sequence: Synthetic peptide
  Seed: EECLINDPWVLLNAS
EECFINVPAVLFNAS

SEQ ID NO: 254594 - protein, 15 aa, Artificial Sequence
  Description of Artificial Sequence: Synthetic peptide
  Seed: EECLINDPWVLLNAS
EECFINVPAVLGNAS

SEQ ID NO: 254595 - protein, 15 aa, Artificial Sequence
  Description of Artificial Sequence: Synthetic peptide
  Seed: EECLINDPWVLLNAS
EECFINVPAVLHNAS

SEQ ID NO: 254596 - protein, 15 aa, Artificial Sequence
  Description of Artificial Sequence: Synthetic peptide
  Seed: EECLINDPWVLLNAS
EECFINVPAVLINAS

SEQ ID NO: 254597 - protein, 15 aa, Artificial Sequence
  Description of Artificial Sequence: Synthetic peptide
  Seed: EECLINDPWVLLNAS
EECFINVPAVLKNAS

SEQ ID NO: 254598 - protein, 15 aa, Artificial Sequence
  Description of Artificial Sequence: Synthetic peptide
  Seed: EECLINDPWVLLNAS
EECFINVPAVLLNAS

SEQ ID NO: 254599 - protein, 15 aa, Artificial Sequence
  Description of Artificial Sequence: Synthetic peptide
  Seed: EECLINDPWVLLNAS
EECFINVPAVLMNAS

SEQ ID NO: 254600 - protein, 15 aa, Artificial Sequence
  Description of Artificial Sequence: Synthetic peptide
  Seed: EECLINDPWVLLNAS
EECFINVPAVLNNAS

SEQ ID NO: 254601 - protein, 15 aa, Artificial Sequence
  Description of Artificial Sequence: Synthetic peptide
  Seed: EECLINDPWVLLNAS
EECFINVPAVLPNAS

SEQ ID NO: 254602 - protein, 15 aa, Artificial Sequence
  Description of Artificial Sequence: Synthetic peptide
  Seed: EECLINDPWVLLNAS
EECFINVPAVLQNAS

SEQ ID NO: 254603 - protein, 15 aa, Artificial Sequence
  Description of Artificial Sequence: Synthetic peptide
  Seed: EECLINDPWVLLNAS
EECFINVPAVLRNAS

SEQ ID NO: 254604 - protein, 15 aa, Artificial Sequence
  Description of Artificial Sequence: Synthetic peptide
  Seed: EECLINDPWVLLNAS
EECFINVPAVLSNAS

SEQ ID NO: 254605 - protein, 15 aa, Artificial Sequence
  Description of Artificial Sequence: Synthetic peptide
  Seed: EECLINDPWVLLNAS
EECFINVPAVLTNAS

SEQ ID NO: 254606 - protein, 15 aa, Artificial Sequence
  Description of Artificial Sequence: Synthetic peptide
  Seed: EECLINDPWVLLNAS
EECFINVPAVLVNAS

SEQ ID NO: 254607 - protein, 15 aa, Artificial Sequence
  Description of Artificial Sequence: Synthetic peptide
  Seed: EECLINDPWVLLNAS
EECFINVPAVLYNAS

SEQ ID NO: 254608 - protein, 15 aa, Artificial Sequence
  Description of Artificial Sequence: Synthetic peptide
  Seed: EECLINDPWVLLNAS
EECFINVPFVLANAS

SEQ ID NO: 254609 - protein, 15 aa, Artificial Sequence
  Description of Artificial Sequence: Synthetic peptide
  Seed: EECLINDPWVLLNAS
EECFINVPFVLDNAS

SEQ ID NO: 254610 - protein, 15 aa, Artificial Sequence
  Description of Artificial Sequence: Synthetic peptide
  Seed: EECLINDPWVLLNAS
EECFINVPFVLENAS

SEQ ID NO: 254611 - protein, 15 aa, Artificial Sequence
  Description of Artificial Sequence: Synthetic peptide
  Seed: EECLINDPWVLLNAS
EECFINVPFVLFNAS

SEQ ID NO: 254612 - protein, 15 aa, Artificial Sequence
  Description of Artificial Sequence: Synthetic peptide
  Seed: EECLINDPWVLLNAS
EECFINVPFVLINAS

SEQ ID NO: 254613 - protein, 15 aa, Artificial Sequence
  Description of Artificial Sequence: Synthetic peptide
  Seed: EECLINDPWVLLNAS
EECFINVPFVLLNAS

SEQ ID NO: 254614 - protein, 15 aa, Artificial Sequence
  Description of Artificial Sequence: Synthetic peptide
  Seed: EECLINDPWVLLNAS
EECFINVPFVLMNAS

SEQ ID NO: 254615 - protein, 15 aa, Artificial Sequence
  Description of Artificial Sequence: Synthetic peptide
  Seed: EECLINDPWVLLNAS
EECFINVPFVLNNAS

SEQ ID NO: 254616 - protein, 15 aa, Artificial Sequence
  Description of Artificial Sequence: Synthetic peptide
  Seed: EECLINDPWVLLNAS
EECFINVPFVLSNAS

SEQ ID NO: 254617 - protein, 15 aa, Artificial Sequence
  Description of Artificial Sequence: Synthetic peptide
  Seed: EECLINDPWVLLNAS
EECFINVPFVLTNAS

SEQ ID NO: 254618 - protein, 15 aa, Artificial Sequence
  Description of Artificial Sequence: Synthetic peptide
  Seed: EECLINDPWVLLNAS
EECFINVPFVLVNAS

SEQ ID NO: 254619 - protein, 15 aa, Artificial Sequence
  Description of Artificial Sequence: Synthetic peptide
  Seed: EECLINDPWVLLNAS
EECFINVPFVLYNAS

SEQ ID NO: 254620 - protein, 15 aa, Artificial Sequence
  Description of Artificial Sequence: Synthetic peptide
  Seed: EECLINDPWVLLNAS
EECFINVPGVLANAS

SEQ ID NO: 254621 - protein, 15 aa, Artificial Sequence
  Description of Artificial Sequence: Synthetic peptide
  Seed: EECLINDPWVLLNAS
EECFINVPGVLCNAS

SEQ ID NO: 254622 - protein, 15 aa, Artificial Sequence
  Description of Artificial Sequence: Synthetic peptide
  Seed: EECLINDPWVLLNAS
EECFINVPGVLFNAS

SEQ ID NO: 254623 - protein, 15 aa, Artificial Sequence
  Description of Artificial Sequence: Synthetic peptide
  Seed: EECLINDPWVLLNAS
EECFINVPGVLGNAS

SEQ ID NO: 254624 - protein, 15 aa, Artificial Sequence
  Description of Artificial Sequence: Synthetic peptide
  Seed: EECLINDPWVLLNAS
EECFINVPGVLHNAS

SEQ ID NO: 254625 - protein, 15 aa, Artificial Sequence
  Description of Artificial Sequence: Synthetic peptide
  Seed: EECLINDPWVLLNAS
EECFINVPGVLINAS

SEQ ID NO: 254626 - protein, 15 aa, Artificial Sequence
  Description of Artificial Sequence: Synthetic peptide
  Seed: EECLINDPWVLLNAS
EECFINVPGVLLNAS

SEQ ID NO: 254627 - protein, 15 aa, Artificial Sequence
  Description of Artificial Sequence: Synthetic peptide
  Seed: EECLINDPWVLLNAS
EECFINVPGVLMNAS

SEQ ID NO: 254628 - protein, 15 aa, Artificial Sequence
  Description of Artificial Sequence: Synthetic peptide
  Seed: EECLINDPWVLLNAS
EECFINVPGVLNNAS

SEQ ID NO: 254629 - protein, 15 aa, Artificial Sequence
  Description of Artificial Sequence: Synthetic peptide
  Seed: EECLINDPWVLLNAS
EECFINVPGVLPNAS

SEQ ID NO: 254630 - protein, 15 aa, Artificial Sequence
  Description of Artificial Sequence: Synthetic peptide
  Seed: EECLINDPWVLLNAS
EECFINVPGVLQNAS

SEQ ID NO: 254631 - protein, 15 aa, Artificial Sequence
  Description of Artificial Sequence: Synthetic peptide
  Seed: EECLINDPWVLLNAS
EECFINVPGVLSNAS

SEQ ID NO: 254632 - protein, 15 aa, Artificial Sequence
  Description of Artificial Sequence: Synthetic peptide
  Seed: EECLINDPWVLLNAS
EECFINVPGVLTNAS

SEQ ID NO: 254633 - protein, 15 aa, Artificial Sequence
  Description of Artificial Sequence: Synthetic peptide
  Seed: EECLINDPWVLLNAS
EECFINVPGVLVNAS

SEQ ID NO: 254634 - protein, 15 aa, Artificial Sequence
  Description of Artificial Sequence: Synthetic peptide
  Seed: EECLINDPWVLLNAS
EECFINVPHVLANAS

SEQ ID NO: 254635 - protein, 15 aa, Artificial Sequence
  Description of Artificial Sequence: Synthetic peptide
  Seed: EECLINDPWVLLNAS
EECFINVPHVLLNAS

SEQ ID NO: 254636 - protein, 15 aa, Artificial Sequence
  Description of Artificial Sequence: Synthetic peptide
  Seed: EECLINDPWVLLNAS
EECFINVPHVLVNAS

SEQ ID NO: 254637 - protein, 15 aa, Artificial Sequence
  Description of Artificial Sequence: Synthetic peptide
  Seed: EECLINDPWVLLNAS
EECFINVPIVLANAS

SEQ ID NO: 254638 - protein, 15 aa, Artificial Sequence
  Description of Artificial Sequence: Synthetic peptide
  Seed: EECLINDPWVLLNAS
EECFINVPNVLANAS

SEQ ID NO: 254639 - protein, 15 aa, Artificial Sequence
  Description of Artificial Sequence: Synthetic peptide
  Seed: EECLINDPWVLLNAS
EECFINVPNVLGNAS

SEQ ID NO: 254640 - protein, 15 aa, Artificial Sequence
  Description of Artificial Sequence: Synthetic peptide
  Seed: EECLINDPWVLLNAS
EECFINVPNVLINAS

SEQ ID NO: 254641 - protein, 15 aa, Artificial Sequence
  Description of Artificial Sequence: Synthetic peptide
  Seed: EECLINDPWVLLNAS
EECFINVPNVLLNAS

SEQ ID NO: 254642 - protein, 15 aa, Artificial Sequence
  Description of Artificial Sequence: Synthetic peptide
  Seed: EECLINDPWVLLNAS
EECFINVPNVLMNAS

SEQ ID NO: 254643 - protein, 15 aa, Artificial Sequence
  Description of Artificial Sequence: Synthetic peptide
  Seed: EECLINDPWVLLNAS
EECFINVPNVLNNAS

SEQ ID NO: 254644 - protein, 15 aa, Artificial Sequence
  Description of Artificial Sequence: Synthetic peptide
  Seed: EECLINDPWVLLNAS
EECFINVPNVLSNAS

SEQ ID NO: 254645 - protein, 15 aa, Artificial Sequence
  Description of Artificial Sequence: Synthetic peptide
  Seed: EECLINDPWVLLNAS
EECFINVPNVLTNAS

SEQ ID NO: 254646 - protein, 15 aa, Artificial Sequence
  Description of Artificial Sequence: Synthetic peptide
  Seed: EECLINDPWVLLNAS
EECFINVPNVLVNAS

SEQ ID NO: 254647 - protein, 15 aa, Artificial Sequence
  Description of Artificial Sequence: Synthetic peptide
  Seed: EECLINDPWVLLNAS
EECFINVPPVLANAS

SEQ ID NO: 254648 - protein, 15 aa, Artificial Sequence
  Description of Artificial Sequence: Synthetic peptide
  Seed: EECLINDPWVLLNAS
EECFINVPPVLCNAS

SEQ ID NO: 254649 - protein, 15 aa, Artificial Sequence
  Description of Artificial Sequence: Synthetic peptide
  Seed: EECLINDPWVLLNAS
EECFINVPPVLFNAS

SEQ ID NO: 254650 - protein, 15 aa, Artificial Sequence
  Description of Artificial Sequence: Synthetic peptide
  Seed: EECLINDPWVLLNAS
EECFINVPPVLGNAS

SEQ ID NO: 254651 - protein, 15 aa, Artificial Sequence
  Description of Artificial Sequence: Synthetic peptide
  Seed: EECLINDPWVLLNAS
EECFINVPPVLINAS

SEQ ID NO: 254652 - protein, 15 aa, Artificial Sequence
  Description of Artificial Sequence: Synthetic peptide
  Seed: EECLINDPWVLLNAS
EECFINVPPVLLNAS

SEQ ID NO: 254653 - protein, 15 aa, Artificial Sequence
  Description of Artificial Sequence: Synthetic peptide
  Seed: EECLINDPWVLLNAS
EECFINVPPVLMNAS

SEQ ID NO: 254654 - protein, 15 aa, Artificial Sequence
  Description of Artificial Sequence: Synthetic peptide
  Seed: EECLINDPWVLLNAS
EECFINVPPVLNNAS

SEQ ID NO: 254655 - protein, 15 aa, Artificial Sequence
  Description of Artificial Sequence: Synthetic peptide
  Seed: EECLINDPWVLLNAS
EECFINVPPVLSNAS

SEQ ID NO: 254656 - protein, 15 aa, Artificial Sequence
  Description of Artificial Sequence: Synthetic peptide
  Seed: EECLINDPWVLLNAS
EECFINVPPVLTNAS

SEQ ID NO: 254657 - protein, 15 aa, Artificial Sequence
  Description of Artificial Sequence: Synthetic peptide
  Seed: EECLINDPWVLLNAS
EECFINVPPVLVNAS

SEQ ID NO: 254658 - protein, 15 aa, Artificial Sequence
  Description of Artificial Sequence: Synthetic peptide
  Seed: EECLINDPWVLLNAS
EECFINVPSVLANAS

SEQ ID NO: 254659 - protein, 15 aa, Artificial Sequence
  Description of Artificial Sequence: Synthetic peptide
  Seed: EECLINDPWVLLNAS
EECFINVPSVLCNAS

SEQ ID NO: 254660 - protein, 15 aa, Artificial Sequence
  Description of Artificial Sequence: Synthetic peptide
  Seed: EECLINDPWVLLNAS
EECFINVPSVLFNAS

SEQ ID NO: 254661 - protein, 15 aa, Artificial Sequence
  Description of Artificial Sequence: Synthetic peptide
  Seed: EECLINDPWVLLNAS
EECFINVPSVLGNAS

SEQ ID NO: 254662 - protein, 15 aa, Artificial Sequence
  Description of Artificial Sequence: Synthetic peptide
  Seed: EECLINDPWVLLNAS
EECFINVPSVLHNAS

SEQ ID NO: 254663 - protein, 15 aa, Artificial Sequence
  Description of Artificial Sequence: Synthetic peptide
  Seed: EECLINDPWVLLNAS
EECFINVPSVLINAS

SEQ ID NO: 254664 - protein, 15 aa, Artificial Sequence
  Description of Artificial Sequence: Synthetic peptide
  Seed: EECLINDPWVLLNAS
EECFINVPSVLKNAS

SEQ ID NO: 254665 - protein, 15 aa, Artificial Sequence
  Description of Artificial Sequence: Synthetic peptide
  Seed: EECLINDPWVLLNAS
EECFINVPSVLLNAS

SEQ ID NO: 254666 - protein, 15 aa, Artificial Sequence
  Description of Artificial Sequence: Synthetic peptide
  Seed: EECLINDPWVLLNAS
EECFINVPSVLMNAS

SEQ ID NO: 254667 - protein, 15 aa, Artificial Sequence
  Description of Artificial Sequence: Synthetic peptide
  Seed: EECLINDPWVLLNAS
EECFINVPSVLNNAS

SEQ ID NO: 254668 - protein, 15 aa, Artificial Sequence
  Description of Artificial Sequence: Synthetic peptide
  Seed: EECLINDPWVLLNAS
EECFINVPSVLPNAS

SEQ ID NO: 254669 - protein, 15 aa, Artificial Sequence
  Description of Artificial Sequence: Synthetic peptide
  Seed: EECLINDPWVLLNAS
EECFINVPSVLQNAS

SEQ ID NO: 254670 - protein, 15 aa, Artificial Sequence
  Description of Artificial Sequence: Synthetic peptide
  Seed: EECLINDPWVLLNAS
EECFINVPSVLRNAS

SEQ ID NO: 254671 - protein, 15 aa, Artificial Sequence
  Description of Artificial Sequence: Synthetic peptide
  Seed: EECLINDPWVLLNAS
EECFINVPSVLSNAS

SEQ ID NO: 254672 - protein, 15 aa, Artificial Sequence
  Description of Artificial Sequence: Synthetic peptide
  Seed: EECLINDPWVLLNAS
EECFINVPSVLTNAS

SEQ ID NO: 254673 - protein, 15 aa, Artificial Sequence
  Description of Artificial Sequence: Synthetic peptide
  Seed: EECLINDPWVLLNAS
EECFINVPSVLVNAS

SEQ ID NO: 254674 - protein, 15 aa, Artificial Sequence
  Description of Artificial Sequence: Synthetic peptide
  Seed: EECLINDPWVLLNAS
EECFINVPTVLANAS

SEQ ID NO: 254675 - protein, 15 aa, Artificial Sequence
  Description of Artificial Sequence: Synthetic peptide
  Seed: EECLINDPWVLLNAS
EECFINVPTVLGNAS

SEQ ID NO: 254676 - protein, 15 aa, Artificial Sequence
  Description of Artificial Sequence: Synthetic peptide
  Seed: EECLINDPWVLLNAS
EECFINVPTVLINAS

SEQ ID NO: 254677 - protein, 15 aa, Artificial Sequence
  Description of Artificial Sequence: Synthetic peptide
  Seed: EECLINDPWVLLNAS
EECFINVPTVLLNAS

SEQ ID NO: 254678 - protein, 15 aa, Artificial Sequence
  Description of Artificial Sequence: Synthetic peptide
  Seed: EECLINDPWVLLNAS
EECFINVPTVLMNAS

SEQ ID NO: 254679 - protein, 15 aa, Artificial Sequence
  Description of Artificial Sequence: Synthetic peptide
  Seed: EECLINDPWVLLNAS
EECFINVPTVLNNAS

SEQ ID NO: 254680 - protein, 15 aa, Artificial Sequence
  Description of Artificial Sequence: Synthetic peptide
  Seed: EECLINDPWVLLNAS
EECFINVPTVLSNAS

SEQ ID NO: 254681 - protein, 15 aa, Artificial Sequence
  Description of Artificial Sequence: Synthetic peptide
  Seed: EECLINDPWVLLNAS
EECFINVPTVLTNAS

SEQ ID NO: 254682 - protein, 15 aa, Artificial Sequence
  Description of Artificial Sequence: Synthetic peptide
  Seed: EECLINDPWVLLNAS
EECFINVPTVLVNAS

SEQ ID NO: 254683 - protein, 15 aa, Artificial Sequence
  Description of Artificial Sequence: Synthetic peptide
  Seed: EECLINDPWVLLNAS
EECFINVPVVLANAS

SEQ ID NO: 254684 - protein, 15 aa, Artificial Sequence
  Description of Artificial Sequence: Synthetic peptide
  Seed: EECLINDPWVLLNAS
EECFINVPVVLGNAS

SEQ ID NO: 254685 - protein, 15 aa, Artificial Sequence
  Description of Artificial Sequence: Synthetic peptide
  Seed: EECLINDPWVLLNAS
EECFINVPVVLINAS

SEQ ID NO: 254686 - protein, 15 aa, Artificial Sequence
  Description of Artificial Sequence: Synthetic peptide
  Seed: EECLINDPWVLLNAS
EECFINVPVVLLNAS

SEQ ID NO: 254687 - protein, 15 aa, Artificial Sequence
  Description of Artificial Sequence: Synthetic peptide
  Seed: EECLINDPWVLLNAS
EECFINVPVVLMNAS

SEQ ID NO: 254688 - protein, 15 aa, Artificial Sequence
  Description of Artificial Sequence: Synthetic peptide
  Seed: EECLINDPWVLLNAS
EECFINVPVVLSNAS

SEQ ID NO: 254689 - protein, 15 aa, Artificial Sequence
  Description of Artificial Sequence: Synthetic peptide
  Seed: EECLINDPWVLLNAS
EECFINVPVVLTNAS

SEQ ID NO: 254690 - protein, 15 aa, Artificial Sequence
  Description of Artificial Sequence: Synthetic peptide
  Seed: EECLINDPWVLLNAS
EECFINVPVVLVNAS

SEQ ID NO: 254691 - protein, 15 aa, Artificial Sequence
  Description of Artificial Sequence: Synthetic peptide
  Seed: EECLINDPWVLLNAS
EECFINVPWVLLNAS

SEQ ID NO: 254692 - protein, 15 aa, Artificial Sequence
  Description of Artificial Sequence: Synthetic peptide
  Seed: EECLINDPWVLLNAS
EECFINVPWVLVNAS

SEQ ID NO: 254693 - protein, 15 aa, Artificial Sequence
  Description of Artificial Sequence: Synthetic peptide
  Seed: EECLINDPWVLLNAS
EECFINVPYVLFNAS

SEQ ID NO: 254694 - protein, 15 aa, Artificial Sequence
  Description of Artificial Sequence: Synthetic peptide
  Seed: EECLINDPWVLLNAS
EECFINVPYVLINAS

SEQ ID NO: 254695 - protein, 15 aa, Artificial Sequence
  Description of Artificial Sequence: Synthetic peptide
  Seed: EECLINDPWVLLNAS
EECFINVPYVLLNAS

SEQ ID NO: 254696 - protein, 15 aa, Artificial Sequence
  Description of Artificial Sequence: Synthetic peptide
  Seed: EECLINDPWVLLNAS
EECFINVPYVLVNAS

SEQ ID NO: 254697 - protein, 15 aa, Artificial Sequence
  Description of Artificial Sequence: Synthetic peptide
  Seed: EECLINDPWVLLNAS
EECFINWPAVLANAS

SEQ ID NO: 254698 - protein, 15 aa, Artificial Sequence
  Description of Artificial Sequence: Synthetic peptide
  Seed: EECLINDPWVLLNAS
EECFINWPAVLINAS

SEQ ID NO: 254699 - protein, 15 aa, Artificial Sequence
  Description of Artificial Sequence: Synthetic peptide
  Seed: EECLINDPWVLLNAS
EECFINWPAVLLNAS

SEQ ID NO: 254700 - protein, 15 aa, Artificial Sequence
  Description of Artificial Sequence: Synthetic peptide
  Seed: EECLINDPWVLLNAS
EECFINWPAVLMNAS

SEQ ID NO: 254701 - protein, 15 aa, Artificial Sequence
  Description of Artificial Sequence: Synthetic peptide
  Seed: EECLINDPWVLLNAS
EECFINWPAVLTNAS

SEQ ID NO: 254702 - protein, 15 aa, Artificial Sequence
  Description of Artificial Sequence: Synthetic peptide
  Seed: EECLINDPWVLLNAS
EECFINWPAVLVNAS

SEQ ID NO: 254703 - protein, 15 aa, Artificial Sequence
  Description of Artificial Sequence: Synthetic peptide
  Seed: EECLINDPWVLLNAS
EECFINWPFVLFNAS

SEQ ID NO: 254704 - protein, 15 aa, Artificial Sequence
  Description of Artificial Sequence: Synthetic peptide
  Seed: EECLINDPWVLLNAS
EECFINWPFVLINAS

SEQ ID NO: 254705 - protein, 15 aa, Artificial Sequence
  Description of Artificial Sequence: Synthetic peptide
  Seed: EECLINDPWVLLNAS
EECFINWPFVLLNAS

SEQ ID NO: 254706 - protein, 15 aa, Artificial Sequence
  Description of Artificial Sequence: Synthetic peptide
  Seed: EECLINDPWVLLNAS
EECFINWPFVLVNAS

SEQ ID NO: 254707 - protein, 15 aa, Artificial Sequence
  Description of Artificial Sequence: Synthetic peptide
  Seed: EECLINDPWVLLNAS
EECFINWPGVLANAS

SEQ ID NO: 254708 - protein, 15 aa, Artificial Sequence
  Description of Artificial Sequence: Synthetic peptide
  Seed: EECLINDPWVLLNAS
EECFINWPGVLINAS

SEQ ID NO: 254709 - protein, 15 aa, Artificial Sequence
  Description of Artificial Sequence: Synthetic peptide
  Seed: EECLINDPWVLLNAS
EECFINWPGVLLNAS

SEQ ID NO: 254710 - protein, 15 aa, Artificial Sequence
  Description of Artificial Sequence: Synthetic peptide
  Seed: EECLINDPWVLLNAS
EECFINWPGVLVNAS

SEQ ID NO: 254711 - protein, 15 aa, Artificial Sequence
  Description of Artificial Sequence: Synthetic peptide
  Seed: EECLINDPWVLLNAS
EECFINWPSVLANAS

SEQ ID NO: 254712 - protein, 15 aa, Artificial Sequence
  Description of Artificial Sequence: Synthetic peptide
  Seed: EECLINDPWVLLNAS
EECFINWPSVLINAS

SEQ ID NO: 254713 - protein, 15 aa, Artificial Sequence
  Description of Artificial Sequence: Synthetic peptide
  Seed: EECLINDPWVLLNAS
EECFINWPSVLLNAS

SEQ ID NO: 254714 - protein, 15 aa, Artificial Sequence
  Description of Artificial Sequence: Synthetic peptide
  Seed: EECLINDPWVLLNAS
EECFINWPSVLVNAS

SEQ ID NO: 254715 - protein, 15 aa, Artificial Sequence
  Description of Artificial Sequence: Synthetic peptide
  Seed: EECLINDPWVLLNAS
EECFINYPAVLANAS

SEQ ID NO: 254716 - protein, 15 aa, Artificial Sequence
  Description of Artificial Sequence: Synthetic peptide
  Seed: EECLINDPWVLLNAS
EECFINYPAVLLNAS

SEQ ID NO: 254717 - protein, 15 aa, Artificial Sequence
  Description of Artificial Sequence: Synthetic peptide
  Seed: EECLINDPWVLLNAS
EECFINYPAVLVNAS

SEQ ID NO: 254718 - protein, 15 aa, Artificial Sequence
  Description of Artificial Sequence: Synthetic peptide
  Seed: EECLINDPWVLLNAS
EECFINYPFVLFNAS

SEQ ID NO: 254719 - protein, 15 aa, Artificial Sequence
  Description of Artificial Sequence: Synthetic peptide
  Seed: EECLINDPWVLLNAS
EECFINYPFVLINAS

SEQ ID NO: 254720 - protein, 15 aa, Artificial Sequence
  Description of Artificial Sequence: Synthetic peptide
  Seed: EECLINDPWVLLNAS
EECFINYPFVLLNAS

SEQ ID NO: 254721 - protein, 15 aa, Artificial Sequence
  Description of Artificial Sequence: Synthetic peptide
  Seed: EECLINDPWVLLNAS
EECFINYPFVLMNAS

SEQ ID NO: 254722 - protein, 15 aa, Artificial Sequence
  Description of Artificial Sequence: Synthetic peptide
  Seed: EECLINDPWVLLNAS
EECFINYPFVLVNAS

SEQ ID NO: 254723 - protein, 15 aa, Artificial Sequence
  Description of Artificial Sequence: Synthetic peptide
  Seed: EECLINDPWVLLNAS
EECHINLPAVLINAS

SEQ ID NO: 254724 - protein, 15 aa, Artificial Sequence
  Description of Artificial Sequence: Synthetic peptide
  Seed: EECLINDPWVLLNAS
EECHINLPAVLLNAS

SEQ ID NO: 254725 - protein, 15 aa, Artificial Sequence
  Description of Artificial Sequence: Synthetic peptide
  Seed: EECLINDPWVLLNAS
EECHINLPAVLVNAS

SEQ ID NO: 254726 - protein, 15 aa, Artificial Sequence
  Description of Artificial Sequence: Synthetic peptide
  Seed: EECLINDPWVLLNAS
EECHINLPGVLLNAS

SEQ ID NO: 254727 - protein, 15 aa, Artificial Sequence
  Description of Artificial Sequence: Synthetic peptide
  Seed: EECLINDPWVLLNAS
EECHINLPGVLVNAS

SEQ ID NO: 254728 - protein, 15 aa, Artificial Sequence
  Description of Artificial Sequence: Synthetic peptide
  Seed: EECLINDPWVLLNAS
EECHINMPAVLLNAS

SEQ ID NO: 254729 - protein, 15 aa, Artificial Sequence
  Description of Artificial Sequence: Synthetic peptide
  Seed: EECLINDPWVLLNAS
EECHINMPAVLVNAS

SEQ ID NO: 254730 - protein, 15 aa, Artificial Sequence
  Description of Artificial Sequence: Synthetic peptide
  Seed: EECLINDPWVLLNAS
EECIINAPAVLANAS

SEQ ID NO: 254731 - protein, 15 aa, Artificial Sequence
  Description of Artificial Sequence: Synthetic peptide
  Seed: EECLINDPWVLLNAS
EECIINAPAVLCNAS

SEQ ID NO: 254732 - protein, 15 aa, Artificial Sequence
  Description of Artificial Sequence: Synthetic peptide
  Seed: EECLINDPWVLLNAS
EECIINAPAVLFNAS

SEQ ID NO: 254733 - protein, 15 aa, Artificial Sequence
  Description of Artificial Sequence: Synthetic peptide
  Seed: EECLINDPWVLLNAS
EECIINAPAVLGNAS

SEQ ID NO: 254734 - protein, 15 aa, Artificial Sequence
  Description of Artificial Sequence: Synthetic peptide
  Seed: EECLINDPWVLLNAS
EECIINAPAVLINAS

SEQ ID NO: 254735 - protein, 15 aa, Artificial Sequence
  Description of Artificial Sequence: Synthetic peptide
  Seed: EECLINDPWVLLNAS
EECIINAPAVLLNAS

SEQ ID NO: 254736 - protein, 15 aa, Artificial Sequence
  Description of Artificial Sequence: Synthetic peptide
  Seed: EECLINDPWVLLNAS
EECIINAPAVLMNAS

SEQ ID NO: 254737 - protein, 15 aa, Artificial Sequence
  Description of Artificial Sequence: Synthetic peptide
  Seed: EECLINDPWVLLNAS
EECIINAPAVLNNAS

SEQ ID NO: 254738 - protein, 15 aa, Artificial Sequence
  Description of Artificial Sequence: Synthetic peptide
  Seed: EECLINDPWVLLNAS
EECIINAPAVLSNAS

SEQ ID NO: 254739 - protein, 15 aa, Artificial Sequence
  Description of Artificial Sequence: Synthetic peptide
  Seed: EECLINDPWVLLNAS
EECIINAPAVLTNAS

SEQ ID NO: 254740 - protein, 15 aa, Artificial Sequence
  Description of Artificial Sequence: Synthetic peptide
  Seed: EECLINDPWVLLNAS
EECIINAPAVLVNAS

SEQ ID NO: 254741 - protein, 15 aa, Artificial Sequence
  Description of Artificial Sequence: Synthetic peptide
  Seed: EECLINDPWVLLNAS
EECIINAPAVLYNAS

SEQ ID NO: 254742 - protein, 15 aa, Artificial Sequence
  Description of Artificial Sequence: Synthetic peptide
  Seed: EECLINDPWVLLNAS
EECIINAPFVLINAS

SEQ ID NO: 254743 - protein, 15 aa, Artificial Sequence
  Description of Artificial Sequence: Synthetic peptide
  Seed: EECLINDPWVLLNAS
EECIINAPFVLLNAS

SEQ ID NO: 254744 - protein, 15 aa, Artificial Sequence
  Description of Artificial Sequence: Synthetic peptide
  Seed: EECLINDPWVLLNAS
EECIINAPFVLVNAS

SEQ ID NO: 254745 - protein, 15 aa, Artificial Sequence
  Description of Artificial Sequence: Synthetic peptide
  Seed: EECLINDPWVLLNAS
EECIINAPGVLANAS

SEQ ID NO: 254746 - protein, 15 aa, Artificial Sequence
  Description of Artificial Sequence: Synthetic peptide
  Seed: EECLINDPWVLLNAS
EECIINAPGVLGNAS

SEQ ID NO: 254747 - protein, 15 aa, Artificial Sequence
  Description of Artificial Sequence: Synthetic peptide
  Seed: EECLINDPWVLLNAS
EECIINAPGVLINAS

SEQ ID NO: 254748 - protein, 15 aa, Artificial Sequence
  Description of Artificial Sequence: Synthetic peptide
  Seed: EECLINDPWVLLNAS
EECIINAPGVLLNAS

SEQ ID NO: 254749 - protein, 15 aa, Artificial Sequence
  Description of Artificial Sequence: Synthetic peptide
  Seed: EECLINDPWVLLNAS
EECIINAPGVLMNAS

SEQ ID NO: 254750 - protein, 15 aa, Artificial Sequence
  Description of Artificial Sequence: Synthetic peptide
  Seed: EECLINDPWVLLNAS
EECIINAPGVLSNAS

SEQ ID NO: 254751 - protein, 15 aa, Artificial Sequence
  Description of Artificial Sequence: Synthetic peptide
  Seed: EECLINDPWVLLNAS
EECIINAPGVLTNAS

SEQ ID NO: 254752 - protein, 15 aa, Artificial Sequence
  Description of Artificial Sequence: Synthetic peptide
  Seed: EECLINDPWVLLNAS
EECIINAPGVLVNAS

SEQ ID NO: 254753 - protein, 15 aa, Artificial Sequence
  Description of Artificial Sequence: Synthetic peptide
  Seed: EECLINDPWVLLNAS
EECIINAPIVLINAS

SEQ ID NO: 254754 - protein, 15 aa, Artificial Sequence
  Description of Artificial Sequence: Synthetic peptide
  Seed: EECLINDPWVLLNAS
EECIINAPIVLVNAS

SEQ ID NO: 254755 - protein, 15 aa, Artificial Sequence
  Description of Artificial Sequence: Synthetic peptide
  Seed: EECLINDPWVLLNAS
EECIINAPNVLANAS

SEQ ID NO: 254756 - protein, 15 aa, Artificial Sequence
  Description of Artificial Sequence: Synthetic peptide
  Seed: EECLINDPWVLLNAS
EECIINAPNVLFNAS

SEQ ID NO: 254757 - protein, 15 aa, Artificial Sequence
  Description of Artificial Sequence: Synthetic peptide
  Seed: EECLINDPWVLLNAS
EECIINAPNVLINAS

SEQ ID NO: 254758 - protein, 15 aa, Artificial Sequence
  Description of Artificial Sequence: Synthetic peptide
  Seed: EECLINDPWVLLNAS
EECIINAPNVLLNAS

SEQ ID NO: 254759 - protein, 15 aa, Artificial Sequence
  Description of Artificial Sequence: Synthetic peptide
  Seed: EECLINDPWVLLNAS
EECIINAPNVLMNAS

SEQ ID NO: 254760 - protein, 15 aa, Artificial Sequence
  Description of Artificial Sequence: Synthetic peptide
  Seed: EECLINDPWVLLNAS
EECIINAPNVLSNAS

SEQ ID NO: 254761 - protein, 15 aa, Artificial Sequence
  Description of Artificial Sequence: Synthetic peptide
  Seed: EECLINDPWVLLNAS
EECIINAPNVLTNAS

SEQ ID NO: 254762 - protein, 15 aa, Artificial Sequence
  Description of Artificial Sequence: Synthetic peptide
  Seed: EECLINDPWVLLNAS
EECIINAPNVLVNAS

SEQ ID NO: 254763 - protein, 15 aa, Artificial Sequence
  Description of Artificial Sequence: Synthetic peptide
  Seed: EECLINDPWVLLNAS
EECIINAPNVLYNAS

SEQ ID NO: 254764 - protein, 15 aa, Artificial Sequence
  Description of Artificial Sequence: Synthetic peptide
  Seed: EECLINDPWVLLNAS
EECIINAPPVLANAS

SEQ ID NO: 254765 - protein, 15 aa, Artificial Sequence
  Description of Artificial Sequence: Synthetic peptide
  Seed: EECLINDPWVLLNAS
EECIINAPPVLFNAS

SEQ ID NO: 254766 - protein, 15 aa, Artificial Sequence
  Description of Artificial Sequence: Synthetic peptide
  Seed: EECLINDPWVLLNAS
EECIINAPPVLINAS

SEQ ID NO: 254767 - protein, 15 aa, Artificial Sequence
  Description of Artificial Sequence: Synthetic peptide
  Seed: EECLINDPWVLLNAS
EECIINAPPVLLNAS

SEQ ID NO: 254768 - protein, 15 aa, Artificial Sequence
  Description of Artificial Sequence: Synthetic peptide
  Seed: EECLINDPWVLLNAS
EECIINAPPVLMNAS

SEQ ID NO: 254769 - protein, 15 aa, Artificial Sequence
  Description of Artificial Sequence: Synthetic peptide
  Seed: EECLINDPWVLLNAS
EECIINAPPVLSNAS

SEQ ID NO: 254770 - protein, 15 aa, Artificial Sequence
  Description of Artificial Sequence: Synthetic peptide
  Seed: EECLINDPWVLLNAS
EECIINAPPVLTNAS

SEQ ID NO: 254771 - protein, 15 aa, Artificial Sequence
  Description of Artificial Sequence: Synthetic peptide
  Seed: EECLINDPWVLLNAS
EECIINAPPVLVNAS

SEQ ID NO: 254772 - protein, 15 aa, Artificial Sequence
  Description of Artificial Sequence: Synthetic peptide
  Seed: EECLINDPWVLLNAS
EECIINAPSVLANAS

SEQ ID NO: 254773 - protein, 15 aa, Artificial Sequence
  Description of Artificial Sequence: Synthetic peptide
  Seed: EECLINDPWVLLNAS
EECIINAPSVLFNAS

SEQ ID NO: 254774 - protein, 15 aa, Artificial Sequence
  Description of Artificial Sequence: Synthetic peptide
  Seed: EECLINDPWVLLNAS
EECIINAPSVLGNAS

SEQ ID NO: 254775 - protein, 15 aa, Artificial Sequence
  Description of Artificial Sequence: Synthetic peptide
  Seed: EECLINDPWVLLNAS
EECIINAPSVLINAS

SEQ ID NO: 254776 - protein, 15 aa, Artificial Sequence
  Description of Artificial Sequence: Synthetic peptide
  Seed: EECLINDPWVLLNAS
EECIINAPSVLLNAS

SEQ ID NO: 254777 - protein, 15 aa, Artificial Sequence
  Description of Artificial Sequence: Synthetic peptide
  Seed: EECLINDPWVLLNAS
EECIINAPSVLMNAS

SEQ ID NO: 254778 - protein, 15 aa, Artificial Sequence
  Description of Artificial Sequence: Synthetic peptide
  Seed: EECLINDPWVLLNAS
EECIINAPSVLSNAS

SEQ ID NO: 254779 - protein, 15 aa, Artificial Sequence
  Description of Artificial Sequence: Synthetic peptide
  Seed: EECLINDPWVLLNAS
EECIINAPSVLTNAS

SEQ ID NO: 254780 - protein, 15 aa, Artificial Sequence
  Description of Artificial Sequence: Synthetic peptide
  Seed: EECLINDPWVLLNAS
EECIINAPSVLVNAS

SEQ ID NO: 254781 - protein, 15 aa, Artificial Sequence
  Description of Artificial Sequence: Synthetic peptide
  Seed: EECLINDPWVLLNAS
EECIINAPSVLYNAS

SEQ ID NO: 254782 - protein, 15 aa, Artificial Sequence
  Description of Artificial Sequence: Synthetic peptide
  Seed: EECLINDPWVLLNAS
EECIINAPTVLANAS

SEQ ID NO: 254783 - protein, 15 aa, Artificial Sequence
  Description of Artificial Sequence: Synthetic peptide
  Seed: EECLINDPWVLLNAS
EECIINAPTVLFNAS

SEQ ID NO: 254784 - protein, 15 aa, Artificial Sequence
  Description of Artificial Sequence: Synthetic peptide
  Seed: EECLINDPWVLLNAS
EECIINAPTVLINAS

SEQ ID NO: 254785 - protein, 15 aa, Artificial Sequence
  Description of Artificial Sequence: Synthetic peptide
  Seed: EECLINDPWVLLNAS
EECIINAPTVLLNAS

SEQ ID NO: 254786 - protein, 15 aa, Artificial Sequence
  Description of Artificial Sequence: Synthetic peptide
  Seed: EECLINDPWVLLNAS
EECIINAPTVLMNAS

SEQ ID NO: 254787 - protein, 15 aa, Artificial Sequence
  Description of Artificial Sequence: Synthetic peptide
  Seed: EECLINDPWVLLNAS
EECIINAPTVLSNAS

SEQ ID NO: 254788 - protein, 15 aa, Artificial Sequence
  Description of Artificial Sequence: Synthetic peptide
  Seed: EECLINDPWVLLNAS
EECIINAPTVLTNAS

SEQ ID NO: 254789 - protein, 15 aa, Artificial Sequence
  Description of Artificial Sequence: Synthetic peptide
  Seed: EECLINDPWVLLNAS
EECIINAPTVLVNAS

SEQ ID NO: 254790 - protein, 15 aa, Artificial Sequence
  Description of Artificial Sequence: Synthetic peptide
  Seed: EECLINDPWVLLNAS
EECIINAPVVLANAS

SEQ ID NO: 254791 - protein, 15 aa, Artificial Sequence
  Description of Artificial Sequence: Synthetic peptide
  Seed: EECLINDPWVLLNAS
EECIINAPVVLINAS

SEQ ID NO: 254792 - protein, 15 aa, Artificial Sequence
  Description of Artificial Sequence: Synthetic peptide
  Seed: EECLINDPWVLLNAS
EECIINAPVVLLNAS

SEQ ID NO: 254793 - protein, 15 aa, Artificial Sequence
  Description of Artificial Sequence: Synthetic peptide
  Seed: EECLINDPWVLLNAS
EECIINAPVVLVNAS

SEQ ID NO: 254794 - protein, 15 aa, Artificial Sequence
  Description of Artificial Sequence: Synthetic peptide
  Seed: EECLINDPWVLLNAS
EECIINAPVVLYNAS

SEQ ID NO: 254795 - protein, 15 aa, Artificial Sequence
  Description of Artificial Sequence: Synthetic peptide
  Seed: EECLINDPWVLLNAS
EECIINCPAVLANAS

SEQ ID NO: 254796 - protein, 15 aa, Artificial Sequence
  Description of Artificial Sequence: Synthetic peptide
  Seed: EECLINDPWVLLNAS
EECIINCPAVLINAS

SEQ ID NO: 254797 - protein, 15 aa, Artificial Sequence
  Description of Artificial Sequence: Synthetic peptide
  Seed: EECLINDPWVLLNAS
EECIINCPAVLLNAS

SEQ ID NO: 254798 - protein, 15 aa, Artificial Sequence
  Description of Artificial Sequence: Synthetic peptide
  Seed: EECLINDPWVLLNAS
EECIINCPAVLVNAS

SEQ ID NO: 254799 - protein, 15 aa, Artificial Sequence
  Description of Artificial Sequence: Synthetic peptide
  Seed: EECLINDPWVLLNAS
EECIINCPNVLINAS

SEQ ID NO: 254800 - protein, 15 aa, Artificial Sequence
  Description of Artificial Sequence: Synthetic peptide
  Seed: EECLINDPWVLLNAS
EECIINDPAVLFNAS

SEQ ID NO: 254801 - protein, 15 aa, Artificial Sequence
  Description of Artificial Sequence: Synthetic peptide
  Seed: EECLINDPWVLLNAS
EECIINDPAVLINAS

SEQ ID NO: 254802 - protein, 15 aa, Artificial Sequence
  Description of Artificial Sequence: Synthetic peptide
  Seed: EECLINDPWVLLNAS
EECIINDPAVLLNAS

SEQ ID NO: 254803 - protein, 15 aa, Artificial Sequence
  Description of Artificial Sequence: Synthetic peptide
  Seed: EECLINDPWVLLNAS
EECIINDPAVLMNAS

SEQ ID NO: 254804 - protein, 15 aa, Artificial Sequence
  Description of Artificial Sequence: Synthetic peptide
  Seed: EECLINDPWVLLNAS
EECIINDPAVLRNAS

SEQ ID NO: 254805 - protein, 15 aa, Artificial Sequence
  Description of Artificial Sequence: Synthetic peptide
  Seed: EECLINDPWVLLNAS
EECIINDPAVLVNAS

SEQ ID NO: 254806 - protein, 15 aa, Artificial Sequence
  Description of Artificial Sequence: Synthetic peptide
  Seed: EECLINDPWVLLNAS
EECIINDPAVLYNAS

SEQ ID NO: 254807 - protein, 15 aa, Artificial Sequence
  Description of Artificial Sequence: Synthetic peptide
  Seed: EECLINDPWVLLNAS
EECIINDPHVLFNAS

SEQ ID NO: 254808 - protein, 15 aa, Artificial Sequence
  Description of Artificial Sequence: Synthetic peptide
  Seed: EECLINDPWVLLNAS
EECIINDPHVLYNAS

SEQ ID NO: 254809 - protein, 15 aa, Artificial Sequence
  Description of Artificial Sequence: Synthetic peptide
  Seed: EECLINDPWVLLNAS
EECIINDPIVLINAS

SEQ ID NO: 254810 - protein, 15 aa, Artificial Sequence
  Description of Artificial Sequence: Synthetic peptide
  Seed: EECLINDPWVLLNAS
EECIINDPIVLKNAS

SEQ ID NO: 254811 - protein, 15 aa, Artificial Sequence
  Description of Artificial Sequence: Synthetic peptide
  Seed: EECLINDPWVLLNAS
EECIINDPIVLRNAS

SEQ ID NO: 254812 - protein, 15 aa, Artificial Sequence
  Description of Artificial Sequence: Synthetic peptide
  Seed: EECLINDPWVLLNAS
EECIINDPIVLVNAS

SEQ ID NO: 254813 - protein, 15 aa, Artificial Sequence
  Description of Artificial Sequence: Synthetic peptide
  Seed: EECLINDPWVLLNAS
EECIINDPIVLYNAS

SEQ ID NO: 254814 - protein, 15 aa, Artificial Sequence
  Description of Artificial Sequence: Synthetic peptide
  Seed: EECLINDPWVLLNAS
EECIINDPKVLANAS

SEQ ID NO: 254815 - protein, 15 aa, Artificial Sequence
  Description of Artificial Sequence: Synthetic peptide
  Seed: EECLINDPWVLLNAS
EECIINDPKVLFNAS

SEQ ID NO: 254816 - protein, 15 aa, Artificial Sequence
  Description of Artificial Sequence: Synthetic peptide
  Seed: EECLINDPWVLLNAS
EECIINDPKVLINAS

SEQ ID NO: 254817 - protein, 15 aa, Artificial Sequence
  Description of Artificial Sequence: Synthetic peptide
  Seed: EECLINDPWVLLNAS
EECIINDPKVLLNAS

SEQ ID NO: 254818 - protein, 15 aa, Artificial Sequence
  Description of Artificial Sequence: Synthetic peptide
  Seed: EECLINDPWVLLNAS
EECIINDPKVLMNAS

SEQ ID NO: 254819 - protein, 15 aa, Artificial Sequence
  Description of Artificial Sequence: Synthetic peptide
  Seed: EECLINDPWVLLNAS
EECIINDPKVLQNAS

SEQ ID NO: 254820 - protein, 15 aa, Artificial Sequence
  Description of Artificial Sequence: Synthetic peptide
  Seed: EECLINDPWVLLNAS
EECIINDPKVLRNAS

SEQ ID NO: 254821 - protein, 15 aa, Artificial Sequence
  Description of Artificial Sequence: Synthetic peptide
  Seed: EECLINDPWVLLNAS
EECIINDPKVLSNAS

SEQ ID NO: 254822 - protein, 15 aa, Artificial Sequence
  Description of Artificial Sequence: Synthetic peptide
  Seed: EECLINDPWVLLNAS
EECIINDPKVLVNAS

SEQ ID NO: 254823 - protein, 15 aa, Artificial Sequence
  Description of Artificial Sequence: Synthetic peptide
  Seed: EECLINDPWVLLNAS
EECIINDPKVLWNAS

SEQ ID NO: 254824 - protein, 15 aa, Artificial Sequence
  Description of Artificial Sequence: Synthetic peptide
  Seed: EECLINDPWVLLNAS
EECIINDPKVLYNAS

SEQ ID NO: 254825 - protein, 15 aa, Artificial Sequence
  Description of Artificial Sequence: Synthetic peptide
  Seed: EECLINDPWVLLNAS
EECIINDPLVLRNAS

SEQ ID NO: 254826 - protein, 15 aa, Artificial Sequence
  Description of Artificial Sequence: Synthetic peptide
  Seed: EECLINDPWVLLNAS
EECIINDPMVLRNAS

SEQ ID NO: 254827 - protein, 15 aa, Artificial Sequence
  Description of Artificial Sequence: Synthetic peptide
  Seed: EECLINDPWVLLNAS
EECIINDPNVLFNAS

SEQ ID NO: 254828 - protein, 15 aa, Artificial Sequence
  Description of Artificial Sequence: Synthetic peptide
  Seed: EECLINDPWVLLNAS
EECIINDPNVLINAS

SEQ ID NO: 254829 - protein, 15 aa, Artificial Sequence
  Description of Artificial Sequence: Synthetic peptide
  Seed: EECLINDPWVLLNAS
EECIINDPNVLMNAS

SEQ ID NO: 254830 - protein, 15 aa, Artificial Sequence
  Description of Artificial Sequence: Synthetic peptide
  Seed: EECLINDPWVLLNAS
EECIINDPNVLRNAS

SEQ ID NO: 254831 - protein, 15 aa, Artificial Sequence
  Description of Artificial Sequence: Synthetic peptide
  Seed: EECLINDPWVLLNAS
EECIINDPNVLVNAS

SEQ ID NO: 254832 - protein, 15 aa, Artificial Sequence
  Description of Artificial Sequence: Synthetic peptide
  Seed: EECLINDPWVLLNAS
EECIINDPNVLYNAS

SEQ ID NO: 254833 - protein, 15 aa, Artificial Sequence
  Description of Artificial Sequence: Synthetic peptide
  Seed: EECLINDPWVLLNAS
EECIINDPPVLFNAS

SEQ ID NO: 254834 - protein, 15 aa, Artificial Sequence
  Description of Artificial Sequence: Synthetic peptide
  Seed: EECLINDPWVLLNAS
EECIINDPPVLMNAS

SEQ ID NO: 254835 - protein, 15 aa, Artificial Sequence
  Description of Artificial Sequence: Synthetic peptide
  Seed: EECLINDPWVLLNAS
EECIINDPPVLRNAS

SEQ ID NO: 254836 - protein, 15 aa, Artificial Sequence
  Description of Artificial Sequence: Synthetic peptide
  Seed: EECLINDPWVLLNAS
EECIINDPPVLYNAS

SEQ ID NO: 254837 - protein, 15 aa, Artificial Sequence
  Description of Artificial Sequence: Synthetic peptide
  Seed: EECLINDPWVLLNAS
EECIINDPRVLANAS

SEQ ID NO: 254838 - protein, 15 aa, Artificial Sequence
  Description of Artificial Sequence: Synthetic peptide
  Seed: EECLINDPWVLLNAS
EECIINDPRVLFNAS

SEQ ID NO: 254839 - protein, 15 aa, Artificial Sequence
  Description of Artificial Sequence: Synthetic peptide
  Seed: EECLINDPWVLLNAS
EECIINDPRVLINAS

SEQ ID NO: 254840 - protein, 15 aa, Artificial Sequence
  Description of Artificial Sequence: Synthetic peptide
  Seed: EECLINDPWVLLNAS
EECIINDPRVLLNAS

SEQ ID NO: 254841 - protein, 15 aa, Artificial Sequence
  Description of Artificial Sequence: Synthetic peptide
  Seed: EECLINDPWVLLNAS
EECIINDPRVLMNAS

SEQ ID NO: 254842 - protein, 15 aa, Artificial Sequence
  Description of Artificial Sequence: Synthetic peptide
  Seed: EECLINDPWVLLNAS
EECIINDPRVLQNAS

SEQ ID NO: 254843 - protein, 15 aa, Artificial Sequence
  Description of Artificial Sequence: Synthetic peptide
  Seed: EECLINDPWVLLNAS
EECIINDPRVLRNAS

SEQ ID NO: 254844 - protein, 15 aa, Artificial Sequence
  Description of Artificial Sequence: Synthetic peptide
  Seed: EECLINDPWVLLNAS
EECIINDPRVLSNAS

SEQ ID NO: 254845 - protein, 15 aa, Artificial Sequence
  Description of Artificial Sequence: Synthetic peptide
  Seed: EECLINDPWVLLNAS
EECIINDPRVLVNAS

SEQ ID NO: 254846 - protein, 15 aa, Artificial Sequence
  Description of Artificial Sequence: Synthetic peptide
  Seed: EECLINDPWVLLNAS
EECIINDPRVLYNAS

SEQ ID NO: 254847 - protein, 15 aa, Artificial Sequence
  Description of Artificial Sequence: Synthetic peptide
  Seed: EECLINDPWVLLNAS
EECIINDPSVLFNAS

SEQ ID NO: 254848 - protein, 15 aa, Artificial Sequence
  Description of Artificial Sequence: Synthetic peptide
  Seed: EECLINDPWVLLNAS
EECIINDPSVLINAS

SEQ ID NO: 254849 - protein, 15 aa, Artificial Sequence
  Description of Artificial Sequence: Synthetic peptide
  Seed: EECLINDPWVLLNAS
EECIINDPSVLMNAS

SEQ ID NO: 254850 - protein, 15 aa, Artificial Sequence
  Description of Artificial Sequence: Synthetic peptide
  Seed: EECLINDPWVLLNAS
EECIINDPSVLRNAS

SEQ ID NO: 254851 - protein, 15 aa, Artificial Sequence
  Description of Artificial Sequence: Synthetic peptide
  Seed: EECLINDPWVLLNAS
EECIINDPSVLVNAS

SEQ ID NO: 254852 - protein, 15 aa, Artificial Sequence
  Description of Artificial Sequence: Synthetic peptide
  Seed: EECLINDPWVLLNAS
EECIINDPSVLYNAS

SEQ ID NO: 254853 - protein, 15 aa, Artificial Sequence
  Description of Artificial Sequence: Synthetic peptide
  Seed: EECLINDPWVLLNAS
EECIINDPTVLFNAS

SEQ ID NO: 254854 - protein, 15 aa, Artificial Sequence
  Description of Artificial Sequence: Synthetic peptide
  Seed: EECLINDPWVLLNAS
EECIINDPTVLLNAS

SEQ ID NO: 254855 - protein, 15 aa, Artificial Sequence
  Description of Artificial Sequence: Synthetic peptide
  Seed: EECLINDPWVLLNAS
EECIINDPTVLMNAS

SEQ ID NO: 254856 - protein, 15 aa, Artificial Sequence
  Description of Artificial Sequence: Synthetic peptide
  Seed: EECLINDPWVLLNAS
EECIINDPTVLRNAS

SEQ ID NO: 254857 - protein, 15 aa, Artificial Sequence
  Description of Artificial Sequence: Synthetic peptide
  Seed: EECLINDPWVLLNAS
EECIINDPTVLYNAS

SEQ ID NO: 254858 - protein, 15 aa, Artificial Sequence
  Description of Artificial Sequence: Synthetic peptide
  Seed: EECLINDPWVLLNAS
EECIINDPVVLFNAS

SEQ ID NO: 254859 - protein, 15 aa, Artificial Sequence
  Description of Artificial Sequence: Synthetic peptide
  Seed: EECLINDPWVLLNAS
EECIINDPVVLINAS

SEQ ID NO: 254860 - protein, 15 aa, Artificial Sequence
  Description of Artificial Sequence: Synthetic peptide
  Seed: EECLINDPWVLLNAS
EECIINDPVVLKNAS

SEQ ID NO: 254861 - protein, 15 aa, Artificial Sequence
  Description of Artificial Sequence: Synthetic peptide
  Seed: EECLINDPWVLLNAS
EECIINDPVVLMNAS

SEQ ID NO: 254862 - protein, 15 aa, Artificial Sequence
  Description of Artificial Sequence: Synthetic peptide
  Seed: EECLINDPWVLLNAS
EECIINDPVVLRNAS

SEQ ID NO: 254863 - protein, 15 aa, Artificial Sequence
  Description of Artificial Sequence: Synthetic peptide
  Seed: EECLINDPWVLLNAS
EECIINDPVVLVNAS

SEQ ID NO: 254864 - protein, 15 aa, Artificial Sequence
  Description of Artificial Sequence: Synthetic peptide
  Seed: EECLINDPWVLLNAS
EECIINDPVVLYNAS

SEQ ID NO: 254865 - protein, 15 aa, Artificial Sequence
  Description of Artificial Sequence: Synthetic peptide
  Seed: EECLINDPWVLLNAS
EECIINEPAVLANAS

SEQ ID NO: 254866 - protein, 15 aa, Artificial Sequence
  Description of Artificial Sequence: Synthetic peptide
  Seed: EECLINDPWVLLNAS
EECIINEPAVLINAS

SEQ ID NO: 254867 - protein, 15 aa, Artificial Sequence
  Description of Artificial Sequence: Synthetic peptide
  Seed: EECLINDPWVLLNAS
EECIINEPAVLLNAS

SEQ ID NO: 254868 - protein, 15 aa, Artificial Sequence
  Description of Artificial Sequence: Synthetic peptide
  Seed: EECLINDPWVLLNAS
EECIINEPAVLMNAS

SEQ ID NO: 254869 - protein, 15 aa, Artificial Sequence
  Description of Artificial Sequence: Synthetic peptide
  Seed: EECLINDPWVLLNAS
EECIINEPAVLSNAS

SEQ ID NO: 254870 - protein, 15 aa, Artificial Sequence
  Description of Artificial Sequence: Synthetic peptide
  Seed: EECLINDPWVLLNAS
EECIINEPAVLTNAS

SEQ ID NO: 254871 - protein, 15 aa, Artificial Sequence
  Description of Artificial Sequence: Synthetic peptide
  Seed: EECLINDPWVLLNAS
EECIINEPAVLVNAS

SEQ ID NO: 254872 - protein, 15 aa, Artificial Sequence
  Description of Artificial Sequence: Synthetic peptide
  Seed: EECLINDPWVLLNAS
EECIINEPFVLINAS

SEQ ID NO: 254873 - protein, 15 aa, Artificial Sequence
  Description of Artificial Sequence: Synthetic peptide
  Seed: EECLINDPWVLLNAS
EECIINEPFVLLNAS

SEQ ID NO: 254874 - protein, 15 aa, Artificial Sequence
  Description of Artificial Sequence: Synthetic peptide
  Seed: EECLINDPWVLLNAS
EECIINEPFVLVNAS

SEQ ID NO: 254875 - protein, 15 aa, Artificial Sequence
  Description of Artificial Sequence: Synthetic peptide
  Seed: EECLINDPWVLLNAS
EECIINEPGVLANAS

SEQ ID NO: 254876 - protein, 15 aa, Artificial Sequence
  Description of Artificial Sequence: Synthetic peptide
  Seed: EECLINDPWVLLNAS
EECIINEPGVLINAS

SEQ ID NO: 254877 - protein, 15 aa, Artificial Sequence
  Description of Artificial Sequence: Synthetic peptide
  Seed: EECLINDPWVLLNAS
EECIINEPGVLLNAS

SEQ ID NO: 254878 - protein, 15 aa, Artificial Sequence
  Description of Artificial Sequence: Synthetic peptide
  Seed: EECLINDPWVLLNAS
EECIINEPGVLVNAS

SEQ ID NO: 254879 - protein, 15 aa, Artificial Sequence
  Description of Artificial Sequence: Synthetic peptide
  Seed: EECLINDPWVLLNAS
EECIINEPNVLINAS

SEQ ID NO: 254880 - protein, 15 aa, Artificial Sequence
  Description of Artificial Sequence: Synthetic peptide
  Seed: EECLINDPWVLLNAS
EECIINEPNVLVNAS

SEQ ID NO: 254881 - protein, 15 aa, Artificial Sequence
  Description of Artificial Sequence: Synthetic peptide
  Seed: EECLINDPWVLLNAS
EECIINEPSVLANAS

SEQ ID NO: 254882 - protein, 15 aa, Artificial Sequence
  Description of Artificial Sequence: Synthetic peptide
  Seed: EECLINDPWVLLNAS
EECIINEPSVLINAS

SEQ ID NO: 254883 - protein, 15 aa, Artificial Sequence
  Description of Artificial Sequence: Synthetic peptide
  Seed: EECLINDPWVLLNAS
EECIINEPSVLLNAS

SEQ ID NO: 254884 - protein, 15 aa, Artificial Sequence
  Description of Artificial Sequence: Synthetic peptide
  Seed: EECLINDPWVLLNAS
EECIINEPSVLVNAS

SEQ ID NO: 254885 - protein, 15 aa, Artificial Sequence
  Description of Artificial Sequence: Synthetic peptide
  Seed: EECLINDPWVLLNAS
EECIINFPAVLANAS

SEQ ID NO: 254886 - protein, 15 aa, Artificial Sequence
  Description of Artificial Sequence: Synthetic peptide
  Seed: EECLINDPWVLLNAS
EECIINFPAVLINAS

SEQ ID NO: 254887 - protein, 15 aa, Artificial Sequence
  Description of Artificial Sequence: Synthetic peptide
  Seed: EECLINDPWVLLNAS
EECIINFPAVLLNAS

SEQ ID NO: 254888 - protein, 15 aa, Artificial Sequence
  Description of Artificial Sequence: Synthetic peptide
  Seed: EECLINDPWVLLNAS
EECIINFPAVLMNAS

SEQ ID NO: 254889 - protein, 15 aa, Artificial Sequence
  Description of Artificial Sequence: Synthetic peptide
  Seed: EECLINDPWVLLNAS
EECIINFPAVLSNAS

SEQ ID NO: 254890 - protein, 15 aa, Artificial Sequence
  Description of Artificial Sequence: Synthetic peptide
  Seed: EECLINDPWVLLNAS
EECIINFPAVLTNAS

SEQ ID NO: 254891 - protein, 15 aa, Artificial Sequence
  Description of Artificial Sequence: Synthetic peptide
  Seed: EECLINDPWVLLNAS
EECIINFPAVLVNAS

SEQ ID NO: 254892 - protein, 15 aa, Artificial Sequence
  Description of Artificial Sequence: Synthetic peptide
  Seed: EECLINDPWVLLNAS
EECIINFPGVLANAS

SEQ ID NO: 254893 - protein, 15 aa, Artificial Sequence
  Description of Artificial Sequence: Synthetic peptide
  Seed: EECLINDPWVLLNAS
EECIINFPGVLVNAS

SEQ ID NO: 254894 - protein, 15 aa, Artificial Sequence
  Description of Artificial Sequence: Synthetic peptide
  Seed: EECLINDPWVLLNAS
EECIINFPNVLANAS

SEQ ID NO: 254895 - protein, 15 aa, Artificial Sequence
  Description of Artificial Sequence: Synthetic peptide
  Seed: EECLINDPWVLLNAS
EECIINFPNVLFNAS

SEQ ID NO: 254896 - protein, 15 aa, Artificial Sequence
  Description of Artificial Sequence: Synthetic peptide
  Seed: EECLINDPWVLLNAS
EECIINFPNVLINAS

SEQ ID NO: 254897 - protein, 15 aa, Artificial Sequence
  Description of Artificial Sequence: Synthetic peptide
  Seed: EECLINDPWVLLNAS
EECIINFPNVLLNAS

SEQ ID NO: 254898 - protein, 15 aa, Artificial Sequence
  Description of Artificial Sequence: Synthetic peptide
  Seed: EECLINDPWVLLNAS
EECIINFPNVLMNAS

SEQ ID NO: 254899 - protein, 15 aa, Artificial Sequence
  Description of Artificial Sequence: Synthetic peptide
  Seed: EECLINDPWVLLNAS
EECIINFPNVLVNAS

SEQ ID NO: 254900 - protein, 15 aa, Artificial Sequence
  Description of Artificial Sequence: Synthetic peptide
  Seed: EECLINDPWVLLNAS
EECIINFPNVLYNAS

SEQ ID NO: 254901 - protein, 15 aa, Artificial Sequence
  Description of Artificial Sequence: Synthetic peptide
  Seed: EECLINDPWVLLNAS
EECIINFPPVLANAS

SEQ ID NO: 254902 - protein, 15 aa, Artificial Sequence
  Description of Artificial Sequence: Synthetic peptide
  Seed: EECLINDPWVLLNAS
EECIINFPPVLVNAS

SEQ ID NO: 254903 - protein, 15 aa, Artificial Sequence
  Description of Artificial Sequence: Synthetic peptide
  Seed: EECLINDPWVLLNAS
EECIINFPSVLANAS

SEQ ID NO: 254904 - protein, 15 aa, Artificial Sequence
  Description of Artificial Sequence: Synthetic peptide
  Seed: EECLINDPWVLLNAS
EECIINFPSVLVNAS

SEQ ID NO: 254905 - protein, 15 aa, Artificial Sequence
  Description of Artificial Sequence: Synthetic peptide
  Seed: EECLINDPWVLLNAS
EECIINGPAVLANAS

SEQ ID NO: 254906 - protein, 15 aa, Artificial Sequence
  Description of Artificial Sequence: Synthetic peptide
  Seed: EECLINDPWVLLNAS
EECIINGPAVLFNAS

SEQ ID NO: 254907 - protein, 15 aa, Artificial Sequence
  Description of Artificial Sequence: Synthetic peptide
  Seed: EECLINDPWVLLNAS
EECIINGPAVLINAS

SEQ ID NO: 254908 - protein, 15 aa, Artificial Sequence
  Description of Artificial Sequence: Synthetic peptide
  Seed: EECLINDPWVLLNAS
EECIINGPAVLLNAS

SEQ ID NO: 254909 - protein, 15 aa, Artificial Sequence
  Description of Artificial Sequence: Synthetic peptide
  Seed: EECLINDPWVLLNAS
EECIINGPAVLMNAS

SEQ ID NO: 254910 - protein, 15 aa, Artificial Sequence
  Description of Artificial Sequence: Synthetic peptide
  Seed: EECLINDPWVLLNAS
EECIINGPAVLVNAS

SEQ ID NO: 254911 - protein, 15 aa, Artificial Sequence
  Description of Artificial Sequence: Synthetic peptide
  Seed: EECLINDPWVLLNAS
EECIINGPGVLLNAS

SEQ ID NO: 254912 - protein, 15 aa, Artificial Sequence
  Description of Artificial Sequence: Synthetic peptide
  Seed: EECLINDPWVLLNAS
EECIINGPIVLINAS

SEQ ID NO: 254913 - protein, 15 aa, Artificial Sequence
  Description of Artificial Sequence: Synthetic peptide
  Seed: EECLINDPWVLLNAS
EECIINGPIVLVNAS

SEQ ID NO: 254914 - protein, 15 aa, Artificial Sequence
  Description of Artificial Sequence: Synthetic peptide
  Seed: EECLINDPWVLLNAS
EECIINGPNVLFNAS

SEQ ID NO: 254915 - protein, 15 aa, Artificial Sequence
  Description of Artificial Sequence: Synthetic peptide
  Seed: EECLINDPWVLLNAS
EECIINGPNVLINAS

SEQ ID NO: 254916 - protein, 15 aa, Artificial Sequence
  Description of Artificial Sequence: Synthetic peptide
  Seed: EECLINDPWVLLNAS
EECIINGPNVLLNAS

SEQ ID NO: 254917 - protein, 15 aa, Artificial Sequence
  Description of Artificial Sequence: Synthetic peptide
  Seed: EECLINDPWVLLNAS
EECIINGPNVLMNAS

SEQ ID NO: 254918 - protein, 15 aa, Artificial Sequence
  Description of Artificial Sequence: Synthetic peptide
  Seed: EECLINDPWVLLNAS
EECIINGPNVLVNAS

SEQ ID NO: 254919 - protein, 15 aa, Artificial Sequence
  Description of Artificial Sequence: Synthetic peptide
  Seed: EECLINDPWVLLNAS
EECIINGPNVLYNAS

SEQ ID NO: 254920 - protein, 15 aa, Artificial Sequence
  Description of Artificial Sequence: Synthetic peptide
  Seed: EECLINDPWVLLNAS
EECIINGPSVLANAS

SEQ ID NO: 254921 - protein, 15 aa, Artificial Sequence
  Description of Artificial Sequence: Synthetic peptide
  Seed: EECLINDPWVLLNAS
EECIINGPSVLINAS

SEQ ID NO: 254922 - protein, 15 aa, Artificial Sequence
  Description of Artificial Sequence: Synthetic peptide
  Seed: EECLINDPWVLLNAS
EECIINGPSVLLNAS

SEQ ID NO: 254923 - protein, 15 aa, Artificial Sequence
  Description of Artificial Sequence: Synthetic peptide
  Seed: EECLINDPWVLLNAS
EECIINGPSVLVNAS

SEQ ID NO: 254924 - protein, 15 aa, Artificial Sequence
  Description of Artificial Sequence: Synthetic peptide
  Seed: EECLINDPWVLLNAS
EECIINGPVVLINAS

SEQ ID NO: 254925 - protein, 15 aa, Artificial Sequence
  Description of Artificial Sequence: Synthetic peptide
  Seed: EECLINDPWVLLNAS
EECIINGPVVLVNAS

SEQ ID NO: 254926 - protein, 15 aa, Artificial Sequence
  Description of Artificial Sequence: Synthetic peptide
  Seed: EECLINDPWVLLNAS
EECIINHPAVLANAS

SEQ ID NO: 254927 - protein, 15 aa, Artificial Sequence
  Description of Artificial Sequence: Synthetic peptide
  Seed: EECLINDPWVLLNAS
EECIINHPAVLFNAS

SEQ ID NO: 254928 - protein, 15 aa, Artificial Sequence
  Description of Artificial Sequence: Synthetic peptide
  Seed: EECLINDPWVLLNAS
EECIINHPAVLHNAS

SEQ ID NO: 254929 - protein, 15 aa, Artificial Sequence
  Description of Artificial Sequence: Synthetic peptide
  Seed: EECLINDPWVLLNAS
EECIINHPAVLINAS

SEQ ID NO: 254930 - protein, 15 aa, Artificial Sequence
  Description of Artificial Sequence: Synthetic peptide
  Seed: EECLINDPWVLLNAS
EECIINHPAVLKNAS

SEQ ID NO: 254931 - protein, 15 aa, Artificial Sequence
  Description of Artificial Sequence: Synthetic peptide
  Seed: EECLINDPWVLLNAS
EECIINHPAVLLNAS

SEQ ID NO: 254932 - protein, 15 aa, Artificial Sequence
  Description of Artificial Sequence: Synthetic peptide
  Seed: EECLINDPWVLLNAS
EECIINHPAVLMNAS

SEQ ID NO: 254933 - protein, 15 aa, Artificial Sequence
  Description of Artificial Sequence: Synthetic peptide
  Seed: EECLINDPWVLLNAS
EECIINHPAVLQNAS

SEQ ID NO: 254934 - protein, 15 aa, Artificial Sequence
  Description of Artificial Sequence: Synthetic peptide
  Seed: EECLINDPWVLLNAS
EECIINHPAVLRNAS

SEQ ID NO: 254935 - protein, 15 aa, Artificial Sequence
  Description of Artificial Sequence: Synthetic peptide
  Seed: EECLINDPWVLLNAS
EECIINHPAVLSNAS

SEQ ID NO: 254936 - protein, 15 aa, Artificial Sequence
  Description of Artificial Sequence: Synthetic peptide
  Seed: EECLINDPWVLLNAS
EECIINHPAVLTNAS

SEQ ID NO: 254937 - protein, 15 aa, Artificial Sequence
  Description of Artificial Sequence: Synthetic peptide
  Seed: EECLINDPWVLLNAS
EECIINHPAVLVNAS

SEQ ID NO: 254938 - protein, 15 aa, Artificial Sequence
  Description of Artificial Sequence: Synthetic peptide
  Seed: EECLINDPWVLLNAS
EECIINHPAVLWNAS

SEQ ID NO: 254939 - protein, 15 aa, Artificial Sequence
  Description of Artificial Sequence: Synthetic peptide
  Seed: EECLINDPWVLLNAS
EECIINHPAVLYNAS

SEQ ID NO: 254940 - protein, 15 aa, Artificial Sequence
  Description of Artificial Sequence: Synthetic peptide
  Seed: EECLINDPWVLLNAS
EECIINHPFVLINAS

SEQ ID NO: 254941 - protein, 15 aa, Artificial Sequence
  Description of Artificial Sequence: Synthetic peptide
  Seed: EECLINDPWVLLNAS
EECIINHPFVLLNAS

SEQ ID NO: 254942 - protein, 15 aa, Artificial Sequence
  Description of Artificial Sequence: Synthetic peptide
  Seed: EECLINDPWVLLNAS
EECIINHPFVLVNAS

SEQ ID NO: 254943 - protein, 15 aa, Artificial Sequence
  Description of Artificial Sequence: Synthetic peptide
  Seed: EECLINDPWVLLNAS
EECIINHPGVLFNAS

SEQ ID NO: 254944 - protein, 15 aa, Artificial Sequence
  Description of Artificial Sequence: Synthetic peptide
  Seed: EECLINDPWVLLNAS
EECIINHPGVLINAS

SEQ ID NO: 254945 - protein, 15 aa, Artificial Sequence
  Description of Artificial Sequence: Synthetic peptide
  Seed: EECLINDPWVLLNAS
EECIINHPGVLLNAS

SEQ ID NO: 254946 - protein, 15 aa, Artificial Sequence
  Description of Artificial Sequence: Synthetic peptide
  Seed: EECLINDPWVLLNAS
EECIINHPGVLVNAS

SEQ ID NO: 254947 - protein, 15 aa, Artificial Sequence
  Description of Artificial Sequence: Synthetic peptide
  Seed: EECLINDPWVLLNAS
EECIINHPIVLANAS

SEQ ID NO: 254948 - protein, 15 aa, Artificial Sequence
  Description of Artificial Sequence: Synthetic peptide
  Seed: EECLINDPWVLLNAS
EECIINHPIVLFNAS

SEQ ID NO: 254949 - protein, 15 aa, Artificial Sequence
  Description of Artificial Sequence: Synthetic peptide
  Seed: EECLINDPWVLLNAS
EECIINHPIVLINAS

SEQ ID NO: 254950 - protein, 15 aa, Artificial Sequence
  Description of Artificial Sequence: Synthetic peptide
  Seed: EECLINDPWVLLNAS
EECIINHPIVLKNAS

SEQ ID NO: 254951 - protein, 15 aa, Artificial Sequence
  Description of Artificial Sequence: Synthetic peptide
  Seed: EECLINDPWVLLNAS
EECIINHPIVLLNAS

SEQ ID NO: 254952 - protein, 15 aa, Artificial Sequence
  Description of Artificial Sequence: Synthetic peptide
  Seed: EECLINDPWVLLNAS
EECIINHPIVLMNAS

SEQ ID NO: 254953 - protein, 15 aa, Artificial Sequence
  Description of Artificial Sequence: Synthetic peptide
  Seed: EECLINDPWVLLNAS
EECIINHPIVLRNAS

SEQ ID NO: 254954 - protein, 15 aa, Artificial Sequence
  Description of Artificial Sequence: Synthetic peptide
  Seed: EECLINDPWVLLNAS
EECIINHPIVLSNAS

SEQ ID NO: 254955 - protein, 15 aa, Artificial Sequence
  Description of Artificial Sequence: Synthetic peptide
  Seed: EECLINDPWVLLNAS
EECIINHPIVLTNAS

SEQ ID NO: 254956 - protein, 15 aa, Artificial Sequence
  Description of Artificial Sequence: Synthetic peptide
  Seed: EECLINDPWVLLNAS
EECIINHPIVLVNAS

SEQ ID NO: 254957 - protein, 15 aa, Artificial Sequence
  Description of Artificial Sequence: Synthetic peptide
  Seed: EECLINDPWVLLNAS
EECIINHPIVLYNAS

SEQ ID NO: 254958 - protein, 15 aa, Artificial Sequence
  Description of Artificial Sequence: Synthetic peptide
  Seed: EECLINDPWVLLNAS
EECIINHPLVLFNAS

SEQ ID NO: 254959 - protein, 15 aa, Artificial Sequence
  Description of Artificial Sequence: Synthetic peptide
  Seed: EECLINDPWVLLNAS
EECIINHPLVLINAS

SEQ ID NO: 254960 - protein, 15 aa, Artificial Sequence
  Description of Artificial Sequence: Synthetic peptide
  Seed: EECLINDPWVLLNAS
EECIINHPLVLLNAS

SEQ ID NO: 254961 - protein, 15 aa, Artificial Sequence
  Description of Artificial Sequence: Synthetic peptide
  Seed: EECLINDPWVLLNAS
EECIINHPLVLMNAS

SEQ ID NO: 254962 - protein, 15 aa, Artificial Sequence
  Description of Artificial Sequence: Synthetic peptide
  Seed: EECLINDPWVLLNAS
EECIINHPLVLRNAS

SEQ ID NO: 254963 - protein, 15 aa, Artificial Sequence
  Description of Artificial Sequence: Synthetic peptide
  Seed: EECLINDPWVLLNAS
EECIINHPLVLVNAS

SEQ ID NO: 254964 - protein, 15 aa, Artificial Sequence
  Description of Artificial Sequence: Synthetic peptide
  Seed: EECLINDPWVLLNAS
EECIINHPLVLYNAS

SEQ ID NO: 254965 - protein, 15 aa, Artificial Sequence
  Description of Artificial Sequence: Synthetic peptide
  Seed: EECLINDPWVLLNAS
EECIINHPMVLFNAS

SEQ ID NO: 254966 - protein, 15 aa, Artificial Sequence
  Description of Artificial Sequence: Synthetic peptide
  Seed: EECLINDPWVLLNAS
EECIINHPMVLINAS

SEQ ID NO: 254967 - protein, 15 aa, Artificial Sequence
  Description of Artificial Sequence: Synthetic peptide
  Seed: EECLINDPWVLLNAS
EECIINHPMVLLNAS

SEQ ID NO: 254968 - protein, 15 aa, Artificial Sequence
  Description of Artificial Sequence: Synthetic peptide
  Seed: EECLINDPWVLLNAS
EECIINHPMVLMNAS

SEQ ID NO: 254969 - protein, 15 aa, Artificial Sequence
  Description of Artificial Sequence: Synthetic peptide
  Seed: EECLINDPWVLLNAS
EECIINHPMVLVNAS

SEQ ID NO: 254970 - protein, 15 aa, Artificial Sequence
  Description of Artificial Sequence: Synthetic peptide
  Seed: EECLINDPWVLLNAS
EECIINHPMVLYNAS

SEQ ID NO: 254971 - protein, 15 aa, Artificial Sequence
  Description of Artificial Sequence: Synthetic peptide
  Seed: EECLINDPWVLLNAS
EECIINHPNVLANAS

SEQ ID NO: 254972 - protein, 15 aa, Artificial Sequence
  Description of Artificial Sequence: Synthetic peptide
  Seed: EECLINDPWVLLNAS
EECIINHPNVLFNAS

SEQ ID NO: 254973 - protein, 15 aa, Artificial Sequence
  Description of Artificial Sequence: Synthetic peptide
  Seed: EECLINDPWVLLNAS
EECIINHPNVLHNAS

SEQ ID NO: 254974 - protein, 15 aa, Artificial Sequence
  Description of Artificial Sequence: Synthetic peptide
  Seed: EECLINDPWVLLNAS
EECIINHPNVLINAS

SEQ ID NO: 254975 - protein, 15 aa, Artificial Sequence
  Description of Artificial Sequence: Synthetic peptide
  Seed: EECLINDPWVLLNAS
EECIINHPNVLKNAS

SEQ ID NO: 254976 - protein, 15 aa, Artificial Sequence
  Description of Artificial Sequence: Synthetic peptide
  Seed: EECLINDPWVLLNAS
EECIINHPNVLLNAS

SEQ ID NO: 254977 - protein, 15 aa, Artificial Sequence
  Description of Artificial Sequence: Synthetic peptide
  Seed: EECLINDPWVLLNAS
EECIINHPNVLMNAS

SEQ ID NO: 254978 - protein, 15 aa, Artificial Sequence
  Description of Artificial Sequence: Synthetic peptide
  Seed: EECLINDPWVLLNAS
EECIINHPNVLNNAS

SEQ ID NO: 254979 - protein, 15 aa, Artificial Sequence
  Description of Artificial Sequence: Synthetic peptide
  Seed: EECLINDPWVLLNAS
EECIINHPNVLQNAS

SEQ ID NO: 254980 - protein, 15 aa, Artificial Sequence
  Description of Artificial Sequence: Synthetic peptide
  Seed: EECLINDPWVLLNAS
EECIINHPNVLRNAS

SEQ ID NO: 254981 - protein, 15 aa, Artificial Sequence
  Description of Artificial Sequence: Synthetic peptide
  Seed: EECLINDPWVLLNAS
EECIINHPNVLSNAS

SEQ ID NO: 254982 - protein, 15 aa, Artificial Sequence
  Description of Artificial Sequence: Synthetic peptide
  Seed: EECLINDPWVLLNAS
EECIINHPNVLTNAS

SEQ ID NO: 254983 - protein, 15 aa, Artificial Sequence
  Description of Artificial Sequence: Synthetic peptide
  Seed: EECLINDPWVLLNAS
EECIINHPNVLVNAS

SEQ ID NO: 254984 - protein, 15 aa, Artificial Sequence
  Description of Artificial Sequence: Synthetic peptide
  Seed: EECLINDPWVLLNAS
EECIINHPNVLWNAS

SEQ ID NO: 254985 - protein, 15 aa, Artificial Sequence
  Description of Artificial Sequence: Synthetic peptide
  Seed: EECLINDPWVLLNAS
EECIINHPNVLYNAS

SEQ ID NO: 254986 - protein, 15 aa, Artificial Sequence
  Description of Artificial Sequence: Synthetic peptide
  Seed: EECLINDPWVLLNAS
EECIINHPPVLFNAS

SEQ ID NO: 254987 - protein, 15 aa, Artificial Sequence
  Description of Artificial Sequence: Synthetic peptide
  Seed: EECLINDPWVLLNAS
EECIINHPPVLINAS

SEQ ID NO: 254988 - protein, 15 aa, Artificial Sequence
  Description of Artificial Sequence: Synthetic peptide
  Seed: EECLINDPWVLLNAS
EECIINHPPVLLNAS

SEQ ID NO: 254989 - protein, 15 aa, Artificial Sequence
  Description of Artificial Sequence: Synthetic peptide
  Seed: EECLINDPWVLLNAS
EECIINHPPVLMNAS

SEQ ID NO: 254990 - protein, 15 aa, Artificial Sequence
  Description of Artificial Sequence: Synthetic peptide
  Seed: EECLINDPWVLLNAS
EECIINHPPVLVNAS

SEQ ID NO: 254991 - protein, 15 aa, Artificial Sequence
  Description of Artificial Sequence: Synthetic peptide
  Seed: EECLINDPWVLLNAS
EECIINHPPVLYNAS

SEQ ID NO: 254992 - protein, 15 aa, Artificial Sequence
  Description of Artificial Sequence: Synthetic peptide
  Seed: EECLINDPWVLLNAS
EECIINHPSVLANAS

SEQ ID NO: 254993 - protein, 15 aa, Artificial Sequence
  Description of Artificial Sequence: Synthetic peptide
  Seed: EECLINDPWVLLNAS
EECIINHPSVLFNAS

SEQ ID NO: 254994 - protein, 15 aa, Artificial Sequence
  Description of Artificial Sequence: Synthetic peptide
  Seed: EECLINDPWVLLNAS
EECIINHPSVLINAS

SEQ ID NO: 254995 - protein, 15 aa, Artificial Sequence
  Description of Artificial Sequence: Synthetic peptide
  Seed: EECLINDPWVLLNAS
EECIINHPSVLLNAS

SEQ ID NO: 254996 - protein, 15 aa, Artificial Sequence
  Description of Artificial Sequence: Synthetic peptide
  Seed: EECLINDPWVLLNAS
EECIINHPSVLMNAS

SEQ ID NO: 254997 - protein, 15 aa, Artificial Sequence
  Description of Artificial Sequence: Synthetic peptide
  Seed: EECLINDPWVLLNAS
EECIINHPSVLVNAS

SEQ ID NO: 254998 - protein, 15 aa, Artificial Sequence
  Description of Artificial Sequence: Synthetic peptide
  Seed: EECLINDPWVLLNAS
EECIINHPSVLYNAS

SEQ ID NO: 254999 - protein, 15 aa, Artificial Sequence
  Description of Artificial Sequence: Synthetic peptide
  Seed: EECLINDPWVLLNAS
EECIINHPTVLFNAS

SEQ ID NO: 255000 - protein, 15 aa, Artificial Sequence
  Description of Artificial Sequence: Synthetic peptide
  Seed: EECLINDPWVLLNAS
EECIINHPTVLINAS

SEQ ID NO: 255001 - protein, 15 aa, Artificial Sequence
  Description of Artificial Sequence: Synthetic peptide
  Seed: EECLINDPWVLLNAS
EECIINHPTVLLNAS

SEQ ID NO: 255002 - protein, 15 aa, Artificial Sequence
  Description of Artificial Sequence: Synthetic peptide
  Seed: EECLINDPWVLLNAS
EECIINHPTVLMNAS

SEQ ID NO: 255003 - protein, 15 aa, Artificial Sequence
  Description of Artificial Sequence: Synthetic peptide
  Seed: EECLINDPWVLLNAS
EECIINHPTVLVNAS

SEQ ID NO: 255004 - protein, 15 aa, Artificial Sequence
  Description of Artificial Sequence: Synthetic peptide
  Seed: EECLINDPWVLLNAS
EECIINHPTVLYNAS

SEQ ID NO: 255005 - protein, 15 aa, Artificial Sequence
  Description of Artificial Sequence: Synthetic peptide
  Seed: EECLINDPWVLLNAS
EECIINHPVVLANAS

SEQ ID NO: 255006 - protein, 15 aa, Artificial Sequence
  Description of Artificial Sequence: Synthetic peptide
  Seed: EECLINDPWVLLNAS
EECIINHPVVLFNAS

SEQ ID NO: 255007 - protein, 15 aa, Artificial Sequence
  Description of Artificial Sequence: Synthetic peptide
  Seed: EECLINDPWVLLNAS
EECIINHPVVLINAS

SEQ ID NO: 255008 - protein, 15 aa, Artificial Sequence
  Description of Artificial Sequence: Synthetic peptide
  Seed: EECLINDPWVLLNAS
EECIINHPVVLKNAS

SEQ ID NO: 255009 - protein, 15 aa, Artificial Sequence
  Description of Artificial Sequence: Synthetic peptide
  Seed: EECLINDPWVLLNAS
EECIINHPVVLLNAS

SEQ ID NO: 255010 - protein, 15 aa, Artificial Sequence
  Description of Artificial Sequence: Synthetic peptide
  Seed: EECLINDPWVLLNAS
EECIINHPVVLMNAS

SEQ ID NO: 255011 - protein, 15 aa, Artificial Sequence
  Description of Artificial Sequence: Synthetic peptide
  Seed: EECLINDPWVLLNAS
EECIINHPVVLRNAS

SEQ ID NO: 255012 - protein, 15 aa, Artificial Sequence
  Description of Artificial Sequence: Synthetic peptide
  Seed: EECLINDPWVLLNAS
EECIINHPVVLSNAS

SEQ ID NO: 255013 - protein, 15 aa, Artificial Sequence
  Description of Artificial Sequence: Synthetic peptide
  Seed: EECLINDPWVLLNAS
EECIINHPVVLTNAS

SEQ ID NO: 255014 - protein, 15 aa, Artificial Sequence
  Description of Artificial Sequence: Synthetic peptide
  Seed: EECLINDPWVLLNAS
EECIINHPVVLVNAS

SEQ ID NO: 255015 - protein, 15 aa, Artificial Sequence
  Description of Artificial Sequence: Synthetic peptide
  Seed: EECLINDPWVLLNAS
EECIINHPVVLWNAS

SEQ ID NO: 255016 - protein, 15 aa, Artificial Sequence
  Description of Artificial Sequence: Synthetic peptide
  Seed: EECLINDPWVLLNAS
EECIINHPVVLYNAS

SEQ ID NO: 255017 - protein, 15 aa, Artificial Sequence
  Description of Artificial Sequence: Synthetic peptide
  Seed: EECLINDPWVLLNAS
EECIINIPAVLANAS

SEQ ID NO: 255018 - protein, 15 aa, Artificial Sequence
  Description of Artificial Sequence: Synthetic peptide
  Seed: EECLINDPWVLLNAS
EECIINIPAVLCNAS

SEQ ID NO: 255019 - protein, 15 aa, Artificial Sequence
  Description of Artificial Sequence: Synthetic peptide
  Seed: EECLINDPWVLLNAS
EECIINIPAVLFNAS

SEQ ID NO: 255020 - protein, 15 aa, Artificial Sequence
  Description of Artificial Sequence: Synthetic peptide
  Seed: EECLINDPWVLLNAS
EECIINIPAVLGNAS

SEQ ID NO: 255021 - protein, 15 aa, Artificial Sequence
  Description of Artificial Sequence: Synthetic peptide
  Seed: EECLINDPWVLLNAS
EECIINIPAVLHNAS

SEQ ID NO: 255022 - protein, 15 aa, Artificial Sequence
  Description of Artificial Sequence: Synthetic peptide
  Seed: EECLINDPWVLLNAS
EECIINIPAVLINAS

SEQ ID NO: 255023 - protein, 15 aa, Artificial Sequence
  Description of Artificial Sequence: Synthetic peptide
  Seed: EECLINDPWVLLNAS
EECIINIPAVLKNAS

SEQ ID NO: 255024 - protein, 15 aa, Artificial Sequence
  Description of Artificial Sequence: Synthetic peptide
  Seed: EECLINDPWVLLNAS
EECIINIPAVLLNAS

SEQ ID NO: 255025 - protein, 15 aa, Artificial Sequence
  Description of Artificial Sequence: Synthetic peptide
  Seed: EECLINDPWVLLNAS
EECIINIPAVLMNAS

SEQ ID NO: 255026 - protein, 15 aa, Artificial Sequence
  Description of Artificial Sequence: Synthetic peptide
  Seed: EECLINDPWVLLNAS
EECIINIPAVLNNAS

SEQ ID NO: 255027 - protein, 15 aa, Artificial Sequence
  Description of Artificial Sequence: Synthetic peptide
  Seed: EECLINDPWVLLNAS
EECIINIPAVLRNAS

SEQ ID NO: 255028 - protein, 15 aa, Artificial Sequence
  Description of Artificial Sequence: Synthetic peptide
  Seed: EECLINDPWVLLNAS
EECIINIPAVLSNAS

SEQ ID NO: 255029 - protein, 15 aa, Artificial Sequence
  Description of Artificial Sequence: Synthetic peptide
  Seed: EECLINDPWVLLNAS
EECIINIPAVLTNAS

SEQ ID NO: 255030 - protein, 15 aa, Artificial Sequence
  Description of Artificial Sequence: Synthetic peptide
  Seed: EECLINDPWVLLNAS
EECIINIPAVLVNAS

SEQ ID NO: 255031 - protein, 15 aa, Artificial Sequence
  Description of Artificial Sequence: Synthetic peptide
  Seed: EECLINDPWVLLNAS
EECIINIPAVLYNAS

SEQ ID NO: 255032 - protein, 15 aa, Artificial Sequence
  Description of Artificial Sequence: Synthetic peptide
  Seed: EECLINDPWVLLNAS
EECIINIPFVLINAS

SEQ ID NO: 255033 - protein, 15 aa, Artificial Sequence
  Description of Artificial Sequence: Synthetic peptide
  Seed: EECLINDPWVLLNAS
EECIINIPFVLLNAS

SEQ ID NO: 255034 - protein, 15 aa, Artificial Sequence
  Description of Artificial Sequence: Synthetic peptide
  Seed: EECLINDPWVLLNAS
EECIINIPFVLVNAS

SEQ ID NO: 255035 - protein, 15 aa, Artificial Sequence
  Description of Artificial Sequence: Synthetic peptide
  Seed: EECLINDPWVLLNAS
EECIINIPGVLANAS

SEQ ID NO: 255036 - protein, 15 aa, Artificial Sequence
  Description of Artificial Sequence: Synthetic peptide
  Seed: EECLINDPWVLLNAS
EECIINIPGVLCNAS

SEQ ID NO: 255037 - protein, 15 aa, Artificial Sequence
  Description of Artificial Sequence: Synthetic peptide
  Seed: EECLINDPWVLLNAS
EECIINIPGVLFNAS

SEQ ID NO: 255038 - protein, 15 aa, Artificial Sequence
  Description of Artificial Sequence: Synthetic peptide
  Seed: EECLINDPWVLLNAS
EECIINIPGVLGNAS

SEQ ID NO: 255039 - protein, 15 aa, Artificial Sequence
  Description of Artificial Sequence: Synthetic peptide
  Seed: EECLINDPWVLLNAS
EECIINIPGVLINAS

SEQ ID NO: 255040 - protein, 15 aa, Artificial Sequence
  Description of Artificial Sequence: Synthetic peptide
  Seed: EECLINDPWVLLNAS
EECIINIPGVLLNAS

SEQ ID NO: 255041 - protein, 15 aa, Artificial Sequence
  Description of Artificial Sequence: Synthetic peptide
  Seed: EECLINDPWVLLNAS
EECIINIPGVLMNAS

SEQ ID NO: 255042 - protein, 15 aa, Artificial Sequence
  Description of Artificial Sequence: Synthetic peptide
  Seed: EECLINDPWVLLNAS
EECIINIPGVLNNAS

SEQ ID NO: 255043 - protein, 15 aa, Artificial Sequence
  Description of Artificial Sequence: Synthetic peptide
  Seed: EECLINDPWVLLNAS
EECIINIPGVLSNAS

SEQ ID NO: 255044 - protein, 15 aa, Artificial Sequence
  Description of Artificial Sequence: Synthetic peptide
  Seed: EECLINDPWVLLNAS
EECIINIPGVLTNAS

SEQ ID NO: 255045 - protein, 15 aa, Artificial Sequence
  Description of Artificial Sequence: Synthetic peptide
  Seed: EECLINDPWVLLNAS
EECIINIPGVLVNAS

SEQ ID NO: 255046 - protein, 15 aa, Artificial Sequence
  Description of Artificial Sequence: Synthetic peptide
  Seed: EECLINDPWVLLNAS
EECIINIPGVLYNAS

SEQ ID NO: 255047 - protein, 15 aa, Artificial Sequence
  Description of Artificial Sequence: Synthetic peptide
  Seed: EECLINDPWVLLNAS
EECIINIPHVLINAS

SEQ ID NO: 255048 - protein, 15 aa, Artificial Sequence
  Description of Artificial Sequence: Synthetic peptide
  Seed: EECLINDPWVLLNAS
EECIINIPHVLVNAS

SEQ ID NO: 255049 - protein, 15 aa, Artificial Sequence
  Description of Artificial Sequence: Synthetic peptide
  Seed: EECLINDPWVLLNAS
EECIINIPNVLANAS

SEQ ID NO: 255050 - protein, 15 aa, Artificial Sequence
  Description of Artificial Sequence: Synthetic peptide
  Seed: EECLINDPWVLLNAS
EECIINIPNVLFNAS

SEQ ID NO: 255051 - protein, 15 aa, Artificial Sequence
  Description of Artificial Sequence: Synthetic peptide
  Seed: EECLINDPWVLLNAS
EECIINIPNVLGNAS

SEQ ID NO: 255052 - protein, 15 aa, Artificial Sequence
  Description of Artificial Sequence: Synthetic peptide
  Seed: EECLINDPWVLLNAS
EECIINIPNVLHNAS

SEQ ID NO: 255053 - protein, 15 aa, Artificial Sequence
  Description of Artificial Sequence: Synthetic peptide
  Seed: EECLINDPWVLLNAS
EECIINIPNVLINAS

SEQ ID NO: 255054 - protein, 15 aa, Artificial Sequence
  Description of Artificial Sequence: Synthetic peptide
  Seed: EECLINDPWVLLNAS
EECIINIPNVLKNAS

SEQ ID NO: 255055 - protein, 15 aa, Artificial Sequence
  Description of Artificial Sequence: Synthetic peptide
  Seed: EECLINDPWVLLNAS
EECIINIPNVLLNAS

SEQ ID NO: 255056 - protein, 15 aa, Artificial Sequence
  Description of Artificial Sequence: Synthetic peptide
  Seed: EECLINDPWVLLNAS
EECIINIPNVLMNAS

SEQ ID NO: 255057 - protein, 15 aa, Artificial Sequence
  Description of Artificial Sequence: Synthetic peptide
  Seed: EECLINDPWVLLNAS
EECIINIPNVLNNAS

SEQ ID NO: 255058 - protein, 15 aa, Artificial Sequence
  Description of Artificial Sequence: Synthetic peptide
  Seed: EECLINDPWVLLNAS
EECIINIPNVLPNAS

SEQ ID NO: 255059 - protein, 15 aa, Artificial Sequence
  Description of Artificial Sequence: Synthetic peptide
  Seed: EECLINDPWVLLNAS
EECIINIPNVLQNAS

SEQ ID NO: 255060 - protein, 15 aa, Artificial Sequence
  Description of Artificial Sequence: Synthetic peptide
  Seed: EECLINDPWVLLNAS
EECIINIPNVLRNAS

SEQ ID NO: 255061 - protein, 15 aa, Artificial Sequence
  Description of Artificial Sequence: Synthetic peptide
  Seed: EECLINDPWVLLNAS
EECIINIPNVLSNAS

SEQ ID NO: 255062 - protein, 15 aa, Artificial Sequence
  Description of Artificial Sequence: Synthetic peptide
  Seed: EECLINDPWVLLNAS
EECIINIPNVLTNAS

SEQ ID NO: 255063 - protein, 15 aa, Artificial Sequence
  Description of Artificial Sequence: Synthetic peptide
  Seed: EECLINDPWVLLNAS
EECIINIPNVLVNAS

SEQ ID NO: 255064 - protein, 15 aa, Artificial Sequence
  Description of Artificial Sequence: Synthetic peptide
  Seed: EECLINDPWVLLNAS
EECIINIPNVLWNAS

SEQ ID NO: 255065 - protein, 15 aa, Artificial Sequence
  Description of Artificial Sequence: Synthetic peptide
  Seed: EECLINDPWVLLNAS
EECIINIPNVLYNAS

SEQ ID NO: 255066 - protein, 15 aa, Artificial Sequence
  Description of Artificial Sequence: Synthetic peptide
  Seed: EECLINDPWVLLNAS
EECIINIPPVLANAS

SEQ ID NO: 255067 - protein, 15 aa, Artificial Sequence
  Description of Artificial Sequence: Synthetic peptide
  Seed: EECLINDPWVLLNAS
EECIINIPPVLFNAS

SEQ ID NO: 255068 - protein, 15 aa, Artificial Sequence
  Description of Artificial Sequence: Synthetic peptide
  Seed: EECLINDPWVLLNAS
EECIINIPPVLGNAS

SEQ ID NO: 255069 - protein, 15 aa, Artificial Sequence
  Description of Artificial Sequence: Synthetic peptide
  Seed: EECLINDPWVLLNAS
EECIINIPPVLINAS

SEQ ID NO: 255070 - protein, 15 aa, Artificial Sequence
  Description of Artificial Sequence: Synthetic peptide
  Seed: EECLINDPWVLLNAS
EECIINIPPVLLNAS

SEQ ID NO: 255071 - protein, 15 aa, Artificial Sequence
  Description of Artificial Sequence: Synthetic peptide
  Seed: EECLINDPWVLLNAS
EECIINIPPVLMNAS

SEQ ID NO: 255072 - protein, 15 aa, Artificial Sequence
  Description of Artificial Sequence: Synthetic peptide
  Seed: EECLINDPWVLLNAS
EECIINIPPVLSNAS

SEQ ID NO: 255073 - protein, 15 aa, Artificial Sequence
  Description of Artificial Sequence: Synthetic peptide
  Seed: EECLINDPWVLLNAS
EECIINIPPVLTNAS

SEQ ID NO: 255074 - protein, 15 aa, Artificial Sequence
  Description of Artificial Sequence: Synthetic peptide
  Seed: EECLINDPWVLLNAS
EECIINIPPVLVNAS

SEQ ID NO: 255075 - protein, 15 aa, Artificial Sequence
  Description of Artificial Sequence: Synthetic peptide
  Seed: EECLINDPWVLLNAS
EECIINIPPVLYNAS

SEQ ID NO: 255076 - protein, 15 aa, Artificial Sequence
  Description of Artificial Sequence: Synthetic peptide
  Seed: EECLINDPWVLLNAS
EECIINIPSVLANAS

SEQ ID NO: 255077 - protein, 15 aa, Artificial Sequence
  Description of Artificial Sequence: Synthetic peptide
  Seed: EECLINDPWVLLNAS
EECIINIPSVLFNAS

SEQ ID NO: 255078 - protein, 15 aa, Artificial Sequence
  Description of Artificial Sequence: Synthetic peptide
  Seed: EECLINDPWVLLNAS
EECIINIPSVLGNAS

SEQ ID NO: 255079 - protein, 15 aa, Artificial Sequence
  Description of Artificial Sequence: Synthetic peptide
  Seed: EECLINDPWVLLNAS
EECIINIPSVLINAS

SEQ ID NO: 255080 - protein, 15 aa, Artificial Sequence
  Description of Artificial Sequence: Synthetic peptide
  Seed: EECLINDPWVLLNAS
EECIINIPSVLLNAS

SEQ ID NO: 255081 - protein, 15 aa, Artificial Sequence
  Description of Artificial Sequence: Synthetic peptide
  Seed: EECLINDPWVLLNAS
EECIINIPSVLMNAS

SEQ ID NO: 255082 - protein, 15 aa, Artificial Sequence
  Description of Artificial Sequence: Synthetic peptide
  Seed: EECLINDPWVLLNAS
EECIINIPSVLSNAS

SEQ ID NO: 255083 - protein, 15 aa, Artificial Sequence
  Description of Artificial Sequence: Synthetic peptide
  Seed: EECLINDPWVLLNAS
EECIINIPSVLTNAS

SEQ ID NO: 255084 - protein, 15 aa, Artificial Sequence
  Description of Artificial Sequence: Synthetic peptide
  Seed: EECLINDPWVLLNAS
EECIINIPSVLVNAS

SEQ ID NO: 255085 - protein, 15 aa, Artificial Sequence
  Description of Artificial Sequence: Synthetic peptide
  Seed: EECLINDPWVLLNAS
EECIINIPSVLYNAS

SEQ ID NO: 255086 - protein, 15 aa, Artificial Sequence
  Description of Artificial Sequence: Synthetic peptide
  Seed: EECLINDPWVLLNAS
EECIINIPTVLANAS

SEQ ID NO: 255087 - protein, 15 aa, Artificial Sequence
  Description of Artificial Sequence: Synthetic peptide
  Seed: EECLINDPWVLLNAS
EECIINIPTVLFNAS

SEQ ID NO: 255088 - protein, 15 aa, Artificial Sequence
  Description of Artificial Sequence: Synthetic peptide
  Seed: EECLINDPWVLLNAS
EECIINIPTVLINAS

SEQ ID NO: 255089 - protein, 15 aa, Artificial Sequence
  Description of Artificial Sequence: Synthetic peptide
  Seed: EECLINDPWVLLNAS
EECIINIPTVLLNAS

SEQ ID NO: 255090 - protein, 15 aa, Artificial Sequence
  Description of Artificial Sequence: Synthetic peptide
  Seed: EECLINDPWVLLNAS
EECIINIPTVLMNAS

SEQ ID NO: 255091 - protein, 15 aa, Artificial Sequence
  Description of Artificial Sequence: Synthetic peptide
  Seed: EECLINDPWVLLNAS
EECIINIPTVLSNAS

SEQ ID NO: 255092 - protein, 15 aa, Artificial Sequence
  Description of Artificial Sequence: Synthetic peptide
  Seed: EECLINDPWVLLNAS
EECIINIPTVLTNAS

SEQ ID NO: 255093 - protein, 15 aa, Artificial Sequence
  Description of Artificial Sequence: Synthetic peptide
  Seed: EECLINDPWVLLNAS
EECIINIPTVLVNAS

SEQ ID NO: 255094 - protein, 15 aa, Artificial Sequence
  Description of Artificial Sequence: Synthetic peptide
  Seed: EECLINDPWVLLNAS
EECIINIPTVLYNAS

SEQ ID NO: 255095 - protein, 15 aa, Artificial Sequence
  Description of Artificial Sequence: Synthetic peptide
  Seed: EECLINDPWVLLNAS
EECIINIPVVLANAS

SEQ ID NO: 255096 - protein, 15 aa, Artificial Sequence
  Description of Artificial Sequence: Synthetic peptide
  Seed: EECLINDPWVLLNAS
EECIINIPVVLINAS

SEQ ID NO: 255097 - protein, 15 aa, Artificial Sequence
  Description of Artificial Sequence: Synthetic peptide
  Seed: EECLINDPWVLLNAS
EECIINIPVVLVNAS

SEQ ID NO: 255098 - protein, 15 aa, Artificial Sequence
  Description of Artificial Sequence: Synthetic peptide
  Seed: EECLINDPWVLLNAS
EECIINIPVVLYNAS

SEQ ID NO: 255099 - protein, 15 aa, Artificial Sequence
  Description of Artificial Sequence: Synthetic peptide
  Seed: EECLINDPWVLLNAS
EECIINKPAVLFNAS

SEQ ID NO: 255100 - protein, 15 aa, Artificial Sequence
  Description of Artificial Sequence: Synthetic peptide
  Seed: EECLINDPWVLLNAS
EECIINKPAVLINAS

SEQ ID NO: 255101 - protein, 15 aa, Artificial Sequence
  Description of Artificial Sequence: Synthetic peptide
  Seed: EECLINDPWVLLNAS
EECIINKPAVLLNAS

SEQ ID NO: 255102 - protein, 15 aa, Artificial Sequence
  Description of Artificial Sequence: Synthetic peptide
  Seed: EECLINDPWVLLNAS
EECIINKPAVLMNAS

SEQ ID NO: 255103 - protein, 15 aa, Artificial Sequence
  Description of Artificial Sequence: Synthetic peptide
  Seed: EECLINDPWVLLNAS
EECIINKPAVLVNAS

SEQ ID NO: 255104 - protein, 15 aa, Artificial Sequence
  Description of Artificial Sequence: Synthetic peptide
  Seed: EECLINDPWVLLNAS
EECIINKPAVLYNAS

SEQ ID NO: 255105 - protein, 15 aa, Artificial Sequence
  Description of Artificial Sequence: Synthetic peptide
  Seed: EECLINDPWVLLNAS
EECIINKPIVLFNAS

SEQ ID NO: 255106 - protein, 15 aa, Artificial Sequence
  Description of Artificial Sequence: Synthetic peptide
  Seed: EECLINDPWVLLNAS
EECIINKPIVLINAS

SEQ ID NO: 255107 - protein, 15 aa, Artificial Sequence
  Description of Artificial Sequence: Synthetic peptide
  Seed: EECLINDPWVLLNAS
EECIINKPIVLLNAS

SEQ ID NO: 255108 - protein, 15 aa, Artificial Sequence
  Description of Artificial Sequence: Synthetic peptide
  Seed: EECLINDPWVLLNAS
EECIINKPIVLVNAS

SEQ ID NO: 255109 - protein, 15 aa, Artificial Sequence
  Description of Artificial Sequence: Synthetic peptide
  Seed: EECLINDPWVLLNAS
EECIINKPIVLYNAS

SEQ ID NO: 255110 - protein, 15 aa, Artificial Sequence
  Description of Artificial Sequence: Synthetic peptide
  Seed: EECLINDPWVLLNAS
EECIINKPLVLINAS

SEQ ID NO: 255111 - protein, 15 aa, Artificial Sequence
  Description of Artificial Sequence: Synthetic peptide
  Seed: EECLINDPWVLLNAS
EECIINKPLVLVNAS

SEQ ID NO: 255112 - protein, 15 aa, Artificial Sequence
  Description of Artificial Sequence: Synthetic peptide
  Seed: EECLINDPWVLLNAS
EECIINKPMVLINAS

SEQ ID NO: 255113 - protein, 15 aa, Artificial Sequence
  Description of Artificial Sequence: Synthetic peptide
  Seed: EECLINDPWVLLNAS
EECIINKPMVLVNAS

SEQ ID NO: 255114 - protein, 15 aa, Artificial Sequence
  Description of Artificial Sequence: Synthetic peptide
  Seed: EECLINDPWVLLNAS
EECIINKPNVLANAS

SEQ ID NO: 255115 - protein, 15 aa, Artificial Sequence
  Description of Artificial Sequence: Synthetic peptide
  Seed: EECLINDPWVLLNAS
EECIINKPNVLFNAS

SEQ ID NO: 255116 - protein, 15 aa, Artificial Sequence
  Description of Artificial Sequence: Synthetic peptide
  Seed: EECLINDPWVLLNAS
EECIINKPNVLINAS

SEQ ID NO: 255117 - protein, 15 aa, Artificial Sequence
  Description of Artificial Sequence: Synthetic peptide
  Seed: EECLINDPWVLLNAS
EECIINKPNVLLNAS

SEQ ID NO: 255118 - protein, 15 aa, Artificial Sequence
  Description of Artificial Sequence: Synthetic peptide
  Seed: EECLINDPWVLLNAS
EECIINKPNVLMNAS

SEQ ID NO: 255119 - protein, 15 aa, Artificial Sequence
  Description of Artificial Sequence: Synthetic peptide
  Seed: EECLINDPWVLLNAS
EECIINKPNVLRNAS

SEQ ID NO: 255120 - protein, 15 aa, Artificial Sequence
  Description of Artificial Sequence: Synthetic peptide
  Seed: EECLINDPWVLLNAS
EECIINKPNVLVNAS

SEQ ID NO: 255121 - protein, 15 aa, Artificial Sequence
  Description of Artificial Sequence: Synthetic peptide
  Seed: EECLINDPWVLLNAS
EECIINKPNVLWNAS

SEQ ID NO: 255122 - protein, 15 aa, Artificial Sequence
  Description of Artificial Sequence: Synthetic peptide
  Seed: EECLINDPWVLLNAS
EECIINKPNVLYNAS

SEQ ID NO: 255123 - protein, 15 aa, Artificial Sequence
  Description of Artificial Sequence: Synthetic peptide
  Seed: EECLINDPWVLLNAS
EECIINKPPVLINAS

SEQ ID NO: 255124 - protein, 15 aa, Artificial Sequence
  Description of Artificial Sequence: Synthetic peptide
  Seed: EECLINDPWVLLNAS
EECIINKPSVLINAS

SEQ ID NO: 255125 - protein, 15 aa, Artificial Sequence
  Description of Artificial Sequence: Synthetic peptide
  Seed: EECLINDPWVLLNAS
EECIINKPSVLVNAS

SEQ ID NO: 255126 - protein, 15 aa, Artificial Sequence
  Description of Artificial Sequence: Synthetic peptide
  Seed: EECLINDPWVLLNAS
EECIINKPTVLINAS

SEQ ID NO: 255127 - protein, 15 aa, Artificial Sequence
  Description of Artificial Sequence: Synthetic peptide
  Seed: EECLINDPWVLLNAS
EECIINKPVVLFNAS

SEQ ID NO: 255128 - protein, 15 aa, Artificial Sequence
  Description of Artificial Sequence: Synthetic peptide
  Seed: EECLINDPWVLLNAS
EECIINKPVVLINAS

SEQ ID NO: 255129 - protein, 15 aa, Artificial Sequence
  Description of Artificial Sequence: Synthetic peptide
  Seed: EECLINDPWVLLNAS
EECIINKPVVLLNAS

SEQ ID NO: 255130 - protein, 15 aa, Artificial Sequence
  Description of Artificial Sequence: Synthetic peptide
  Seed: EECLINDPWVLLNAS
EECIINKPVVLMNAS

SEQ ID NO: 255131 - protein, 15 aa, Artificial Sequence
  Description of Artificial Sequence: Synthetic peptide
  Seed: EECLINDPWVLLNAS
EECIINKPVVLVNAS

SEQ ID NO: 255132 - protein, 15 aa, Artificial Sequence
  Description of Artificial Sequence: Synthetic peptide
  Seed: EECLINDPWVLLNAS
EECIINKPVVLYNAS

SEQ ID NO: 255133 - protein, 15 aa, Artificial Sequence
  Description of Artificial Sequence: Synthetic peptide
  Seed: EECLINDPWVLLNAS
EECIINLPAVLANAS

SEQ ID NO: 255134 - protein, 15 aa, Artificial Sequence
  Description of Artificial Sequence: Synthetic peptide
  Seed: EECLINDPWVLLNAS
EECIINLPAVLCNAS

SEQ ID NO: 255135 - protein, 15 aa, Artificial Sequence
  Description of Artificial Sequence: Synthetic peptide
  Seed: EECLINDPWVLLNAS
EECIINLPAVLFNAS

SEQ ID NO: 255136 - protein, 15 aa, Artificial Sequence
  Description of Artificial Sequence: Synthetic peptide
  Seed: EECLINDPWVLLNAS
EECIINLPAVLGNAS

SEQ ID NO: 255137 - protein, 15 aa, Artificial Sequence
  Description of Artificial Sequence: Synthetic peptide
  Seed: EECLINDPWVLLNAS
EECIINLPAVLHNAS

SEQ ID NO: 255138 - protein, 15 aa, Artificial Sequence
  Description of Artificial Sequence: Synthetic peptide
  Seed: EECLINDPWVLLNAS
EECIINLPAVLINAS

SEQ ID NO: 255139 - protein, 15 aa, Artificial Sequence
  Description of Artificial Sequence: Synthetic peptide
  Seed: EECLINDPWVLLNAS
EECIINLPAVLKNAS

SEQ ID NO: 255140 - protein, 15 aa, Artificial Sequence
  Description of Artificial Sequence: Synthetic peptide
  Seed: EECLINDPWVLLNAS
EECIINLPAVLLNAS

SEQ ID NO: 255141 - protein, 15 aa, Artificial Sequence
  Description of Artificial Sequence: Synthetic peptide
  Seed: EECLINDPWVLLNAS
EECIINLPAVLMNAS

SEQ ID NO: 255142 - protein, 15 aa, Artificial Sequence
  Description of Artificial Sequence: Synthetic peptide
  Seed: EECLINDPWVLLNAS
EECIINLPAVLNNAS

SEQ ID NO: 255143 - protein, 15 aa, Artificial Sequence
  Description of Artificial Sequence: Synthetic peptide
  Seed: EECLINDPWVLLNAS
EECIINLPAVLPNAS

SEQ ID NO: 255144 - protein, 15 aa, Artificial Sequence
  Description of Artificial Sequence: Synthetic peptide
  Seed: EECLINDPWVLLNAS
EECIINLPAVLQNAS

SEQ ID NO: 255145 - protein, 15 aa, Artificial Sequence
  Description of Artificial Sequence: Synthetic peptide
  Seed: EECLINDPWVLLNAS
EECIINLPAVLRNAS

SEQ ID NO: 255146 - protein, 15 aa, Artificial Sequence
  Description of Artificial Sequence: Synthetic peptide
  Seed: EECLINDPWVLLNAS
EECIINLPAVLSNAS

SEQ ID NO: 255147 - protein, 15 aa, Artificial Sequence
  Description of Artificial Sequence: Synthetic peptide
  Seed: EECLINDPWVLLNAS
EECIINLPAVLTNAS

SEQ ID NO: 255148 - protein, 15 aa, Artificial Sequence
  Description of Artificial Sequence: Synthetic peptide
  Seed: EECLINDPWVLLNAS
EECIINLPAVLVNAS

SEQ ID NO: 255149 - protein, 15 aa, Artificial Sequence
  Description of Artificial Sequence: Synthetic peptide
  Seed: EECLINDPWVLLNAS
EECIINLPAVLYNAS

SEQ ID NO: 255150 - protein, 15 aa, Artificial Sequence
  Description of Artificial Sequence: Synthetic peptide
  Seed: EECLINDPWVLLNAS
EECIINLPGVLANAS

SEQ ID NO: 255151 - protein, 15 aa, Artificial Sequence
  Description of Artificial Sequence: Synthetic peptide
  Seed: EECLINDPWVLLNAS
EECIINLPGVLCNAS

SEQ ID NO: 255152 - protein, 15 aa, Artificial Sequence
  Description of Artificial Sequence: Synthetic peptide
  Seed: EECLINDPWVLLNAS
EECIINLPGVLFNAS

SEQ ID NO: 255153 - protein, 15 aa, Artificial Sequence
  Description of Artificial Sequence: Synthetic peptide
  Seed: EECLINDPWVLLNAS
EECIINLPGVLGNAS

SEQ ID NO: 255154 - protein, 15 aa, Artificial Sequence
  Description of Artificial Sequence: Synthetic peptide
  Seed: EECLINDPWVLLNAS
EECIINLPGVLHNAS

SEQ ID NO: 255155 - protein, 15 aa, Artificial Sequence
  Description of Artificial Sequence: Synthetic peptide
  Seed: EECLINDPWVLLNAS
EECIINLPGVLINAS

SEQ ID NO: 255156 - protein, 15 aa, Artificial Sequence
  Description of Artificial Sequence: Synthetic peptide
  Seed: EECLINDPWVLLNAS
EECIINLPGVLLNAS

SEQ ID NO: 255157 - protein, 15 aa, Artificial Sequence
  Description of Artificial Sequence: Synthetic peptide
  Seed: EECLINDPWVLLNAS
EECIINLPGVLMNAS

SEQ ID NO: 255158 - protein, 15 aa, Artificial Sequence
  Description of Artificial Sequence: Synthetic peptide
  Seed: EECLINDPWVLLNAS
EECIINLPGVLNNAS

SEQ ID NO: 255159 - protein, 15 aa, Artificial Sequence
  Description of Artificial Sequence: Synthetic peptide
  Seed: EECLINDPWVLLNAS
EECIINLPGVLPNAS

SEQ ID NO: 255160 - protein, 15 aa, Artificial Sequence
  Description of Artificial Sequence: Synthetic peptide
  Seed: EECLINDPWVLLNAS
EECIINLPGVLQNAS

SEQ ID NO: 255161 - protein, 15 aa, Artificial Sequence
  Description of Artificial Sequence: Synthetic peptide
  Seed: EECLINDPWVLLNAS
EECIINLPGVLSNAS

SEQ ID NO: 255162 - protein, 15 aa, Artificial Sequence
  Description of Artificial Sequence: Synthetic peptide
  Seed: EECLINDPWVLLNAS
EECIINLPGVLTNAS

SEQ ID NO: 255163 - protein, 15 aa, Artificial Sequence
  Description of Artificial Sequence: Synthetic peptide
  Seed: EECLINDPWVLLNAS
EECIINLPGVLVNAS

SEQ ID NO: 255164 - protein, 15 aa, Artificial Sequence
  Description of Artificial Sequence: Synthetic peptide
  Seed: EECLINDPWVLLNAS
EECIINLPGVLYNAS

SEQ ID NO: 255165 - protein, 15 aa, Artificial Sequence
  Description of Artificial Sequence: Synthetic peptide
  Seed: EECLINDPWVLLNAS
EECIINLPHVLANAS

SEQ ID NO: 255166 - protein, 15 aa, Artificial Sequence
  Description of Artificial Sequence: Synthetic peptide
  Seed: EECLINDPWVLLNAS
EECIINLPIVLANAS

SEQ ID NO: 255167 - protein, 15 aa, Artificial Sequence
  Description of Artificial Sequence: Synthetic peptide
  Seed: EECLINDPWVLLNAS
EECIINLPNVLANAS

SEQ ID NO: 255168 - protein, 15 aa, Artificial Sequence
  Description of Artificial Sequence: Synthetic peptide
  Seed: EECLINDPWVLLNAS
EECIINLPNVLFNAS

SEQ ID NO: 255169 - protein, 15 aa, Artificial Sequence
  Description of Artificial Sequence: Synthetic peptide
  Seed: EECLINDPWVLLNAS
EECIINLPNVLGNAS

SEQ ID NO: 255170 - protein, 15 aa, Artificial Sequence
  Description of Artificial Sequence: Synthetic peptide
  Seed: EECLINDPWVLLNAS
EECIINLPNVLINAS

SEQ ID NO: 255171 - protein, 15 aa, Artificial Sequence
  Description of Artificial Sequence: Synthetic peptide
  Seed: EECLINDPWVLLNAS
EECIINLPNVLKNAS

SEQ ID NO: 255172 - protein, 15 aa, Artificial Sequence
  Description of Artificial Sequence: Synthetic peptide
  Seed: EECLINDPWVLLNAS
EECIINLPNVLLNAS

SEQ ID NO: 255173 - protein, 15 aa, Artificial Sequence
  Description of Artificial Sequence: Synthetic peptide
  Seed: EECLINDPWVLLNAS
EECIINLPNVLMNAS

SEQ ID NO: 255174 - protein, 15 aa, Artificial Sequence
  Description of Artificial Sequence: Synthetic peptide
  Seed: EECLINDPWVLLNAS
EECIINLPNVLNNAS

SEQ ID NO: 255175 - protein, 15 aa, Artificial Sequence
  Description of Artificial Sequence: Synthetic peptide
  Seed: EECLINDPWVLLNAS
EECIINLPNVLRNAS

SEQ ID NO: 255176 - protein, 15 aa, Artificial Sequence
  Description of Artificial Sequence: Synthetic peptide
  Seed: EECLINDPWVLLNAS
EECIINLPNVLSNAS

SEQ ID NO: 255177 - protein, 15 aa, Artificial Sequence
  Description of Artificial Sequence: Synthetic peptide
  Seed: EECLINDPWVLLNAS
EECIINLPNVLTNAS

SEQ ID NO: 255178 - protein, 15 aa, Artificial Sequence
  Description of Artificial Sequence: Synthetic peptide
  Seed: EECLINDPWVLLNAS
EECIINLPNVLVNAS

SEQ ID NO: 255179 - protein, 15 aa, Artificial Sequence
  Description of Artificial Sequence: Synthetic peptide
  Seed: EECLINDPWVLLNAS
EECIINLPNVLYNAS

SEQ ID NO: 255180 - protein, 15 aa, Artificial Sequence
  Description of Artificial Sequence: Synthetic peptide
  Seed: EECLINDPWVLLNAS
EECIINLPPVLANAS

SEQ ID NO: 255181 - protein, 15 aa, Artificial Sequence
  Description of Artificial Sequence: Synthetic peptide
  Seed: EECLINDPWVLLNAS
EECIINLPPVLCNAS

SEQ ID NO: 255182 - protein, 15 aa, Artificial Sequence
  Description of Artificial Sequence: Synthetic peptide
  Seed: EECLINDPWVLLNAS
EECIINLPPVLFNAS

SEQ ID NO: 255183 - protein, 15 aa, Artificial Sequence
  Description of Artificial Sequence: Synthetic peptide
  Seed: EECLINDPWVLLNAS
EECIINLPPVLGNAS

SEQ ID NO: 255184 - protein, 15 aa, Artificial Sequence
  Description of Artificial Sequence: Synthetic peptide
  Seed: EECLINDPWVLLNAS
EECIINLPPVLINAS

SEQ ID NO: 255185 - protein, 15 aa, Artificial Sequence
  Description of Artificial Sequence: Synthetic peptide
  Seed: EECLINDPWVLLNAS
EECIINLPPVLLNAS

SEQ ID NO: 255186 - protein, 15 aa, Artificial Sequence
  Description of Artificial Sequence: Synthetic peptide
  Seed: EECLINDPWVLLNAS
EECIINLPPVLMNAS

SEQ ID NO: 255187 - protein, 15 aa, Artificial Sequence
  Description of Artificial Sequence: Synthetic peptide
  Seed: EECLINDPWVLLNAS
EECIINLPPVLNNAS

SEQ ID NO: 255188 - protein, 15 aa, Artificial Sequence
  Description of Artificial Sequence: Synthetic peptide
  Seed: EECLINDPWVLLNAS
EECIINLPPVLSNAS

SEQ ID NO: 255189 - protein, 15 aa, Artificial Sequence
  Description of Artificial Sequence: Synthetic peptide
  Seed: EECLINDPWVLLNAS
EECIINLPPVLTNAS

SEQ ID NO: 255190 - protein, 15 aa, Artificial Sequence
  Description of Artificial Sequence: Synthetic peptide
  Seed: EECLINDPWVLLNAS
EECIINLPPVLVNAS

SEQ ID NO: 255191 - protein, 15 aa, Artificial Sequence
  Description of Artificial Sequence: Synthetic peptide
  Seed: EECLINDPWVLLNAS
EECIINLPSVLANAS

SEQ ID NO: 255192 - protein, 15 aa, Artificial Sequence
  Description of Artificial Sequence: Synthetic peptide
  Seed: EECLINDPWVLLNAS
EECIINLPSVLCNAS

SEQ ID NO: 255193 - protein, 15 aa, Artificial Sequence
  Description of Artificial Sequence: Synthetic peptide
  Seed: EECLINDPWVLLNAS
EECIINLPSVLFNAS

SEQ ID NO: 255194 - protein, 15 aa, Artificial Sequence
  Description of Artificial Sequence: Synthetic peptide
  Seed: EECLINDPWVLLNAS
EECIINLPSVLGNAS

SEQ ID NO: 255195 - protein, 15 aa, Artificial Sequence
  Description of Artificial Sequence: Synthetic peptide
  Seed: EECLINDPWVLLNAS
EECIINLPSVLHNAS

SEQ ID NO: 255196 - protein, 15 aa, Artificial Sequence
  Description of Artificial Sequence: Synthetic peptide
  Seed: EECLINDPWVLLNAS
EECIINLPSVLINAS

SEQ ID NO: 255197 - protein, 15 aa, Artificial Sequence
  Description of Artificial Sequence: Synthetic peptide
  Seed: EECLINDPWVLLNAS
EECIINLPSVLKNAS

SEQ ID NO: 255198 - protein, 15 aa, Artificial Sequence
  Description of Artificial Sequence: Synthetic peptide
  Seed: EECLINDPWVLLNAS
EECIINLPSVLLNAS

SEQ ID NO: 255199 - protein, 15 aa, Artificial Sequence
  Description of Artificial Sequence: Synthetic peptide
  Seed: EECLINDPWVLLNAS
EECIINLPSVLMNAS

SEQ ID NO: 255200 - protein, 15 aa, Artificial Sequence
  Description of Artificial Sequence: Synthetic peptide
  Seed: EECLINDPWVLLNAS
EECIINLPSVLNNAS

SEQ ID NO: 255201 - protein, 15 aa, Artificial Sequence
  Description of Artificial Sequence: Synthetic peptide
  Seed: EECLINDPWVLLNAS
EECIINLPSVLPNAS

SEQ ID NO: 255202 - protein, 15 aa, Artificial Sequence
  Description of Artificial Sequence: Synthetic peptide
  Seed: EECLINDPWVLLNAS
EECIINLPSVLQNAS

SEQ ID NO: 255203 - protein, 15 aa, Artificial Sequence
  Description of Artificial Sequence: Synthetic peptide
  Seed: EECLINDPWVLLNAS
EECIINLPSVLRNAS

SEQ ID NO: 255204 - protein, 15 aa, Artificial Sequence
  Description of Artificial Sequence: Synthetic peptide
  Seed: EECLINDPWVLLNAS
EECIINLPSVLSNAS

SEQ ID NO: 255205 - protein, 15 aa, Artificial Sequence
  Description of Artificial Sequence: Synthetic peptide
  Seed: EECLINDPWVLLNAS
EECIINLPSVLTNAS

SEQ ID NO: 255206 - protein, 15 aa, Artificial Sequence
  Description of Artificial Sequence: Synthetic peptide
  Seed: EECLINDPWVLLNAS
EECIINLPSVLVNAS

SEQ ID NO: 255207 - protein, 15 aa, Artificial Sequence
  Description of Artificial Sequence: Synthetic peptide
  Seed: EECLINDPWVLLNAS
EECIINLPSVLYNAS

SEQ ID NO: 255208 - protein, 15 aa, Artificial Sequence
  Description of Artificial Sequence: Synthetic peptide
  Seed: EECLINDPWVLLNAS
EECIINLPTVLANAS

SEQ ID NO: 255209 - protein, 15 aa, Artificial Sequence
  Description of Artificial Sequence: Synthetic peptide
  Seed: EECLINDPWVLLNAS
EECIINLPTVLGNAS

SEQ ID NO: 255210 - protein, 15 aa, Artificial Sequence
  Description of Artificial Sequence: Synthetic peptide
  Seed: EECLINDPWVLLNAS
EECIINLPTVLHNAS

SEQ ID NO: 255211 - protein, 15 aa, Artificial Sequence
  Description of Artificial Sequence: Synthetic peptide
  Seed: EECLINDPWVLLNAS
EECIINLPTVLINAS

SEQ ID NO: 255212 - protein, 15 aa, Artificial Sequence
  Description of Artificial Sequence: Synthetic peptide
  Seed: EECLINDPWVLLNAS
EECIINLPTVLLNAS

SEQ ID NO: 255213 - protein, 15 aa, Artificial Sequence
  Description of Artificial Sequence: Synthetic peptide
  Seed: EECLINDPWVLLNAS
EECIINLPTVLMNAS

SEQ ID NO: 255214 - protein, 15 aa, Artificial Sequence
  Description of Artificial Sequence: Synthetic peptide
  Seed: EECLINDPWVLLNAS
EECIINLPTVLNNAS

SEQ ID NO: 255215 - protein, 15 aa, Artificial Sequence
  Description of Artificial Sequence: Synthetic peptide
  Seed: EECLINDPWVLLNAS
EECIINLPTVLSNAS

SEQ ID NO: 255216 - protein, 15 aa, Artificial Sequence
  Description of Artificial Sequence: Synthetic peptide
  Seed: EECLINDPWVLLNAS
EECIINLPTVLTNAS

SEQ ID NO: 255217 - protein, 15 aa, Artificial Sequence
  Description of Artificial Sequence: Synthetic peptide
  Seed: EECLINDPWVLLNAS
EECIINLPTVLVNAS

SEQ ID NO: 255218 - protein, 15 aa, Artificial Sequence
  Description of Artificial Sequence: Synthetic peptide
  Seed: EECLINDPWVLLNAS
EECIINLPVVLANAS

SEQ ID NO: 255219 - protein, 15 aa, Artificial Sequence
  Description of Artificial Sequence: Synthetic peptide
  Seed: EECLINDPWVLLNAS
EECIINLPVVLINAS

SEQ ID NO: 255220 - protein, 15 aa, Artificial Sequence
  Description of Artificial Sequence: Synthetic peptide
  Seed: EECLINDPWVLLNAS
EECIINLPVVLLNAS

SEQ ID NO: 255221 - protein, 15 aa, Artificial Sequence
  Description of Artificial Sequence: Synthetic peptide
  Seed: EECLINDPWVLLNAS
EECIINLPVVLMNAS

SEQ ID NO: 255222 - protein, 15 aa, Artificial Sequence
  Description of Artificial Sequence: Synthetic peptide
  Seed: EECLINDPWVLLNAS
EECIINLPVVLSNAS

SEQ ID NO: 255223 - protein, 15 aa, Artificial Sequence
  Description of Artificial Sequence: Synthetic peptide
  Seed: EECLINDPWVLLNAS
EECIINLPVVLTNAS

SEQ ID NO: 255224 - protein, 15 aa, Artificial Sequence
  Description of Artificial Sequence: Synthetic peptide
  Seed: EECLINDPWVLLNAS
EECIINLPVVLVNAS

SEQ ID NO: 255225 - protein, 15 aa, Artificial Sequence
  Description of Artificial Sequence: Synthetic peptide
  Seed: EECLINDPWVLLNAS
EECIINMPAVLANAS

SEQ ID NO: 255226 - protein, 15 aa, Artificial Sequence
  Description of Artificial Sequence: Synthetic peptide
  Seed: EECLINDPWVLLNAS
EECIINMPAVLCNAS

SEQ ID NO: 255227 - protein, 15 aa, Artificial Sequence
  Description of Artificial Sequence: Synthetic peptide
  Seed: EECLINDPWVLLNAS
EECIINMPAVLFNAS

SEQ ID NO: 255228 - protein, 15 aa, Artificial Sequence
  Description of Artificial Sequence: Synthetic peptide
  Seed: EECLINDPWVLLNAS
EECIINMPAVLGNAS

SEQ ID NO: 255229 - protein, 15 aa, Artificial Sequence
  Description of Artificial Sequence: Synthetic peptide
  Seed: EECLINDPWVLLNAS
EECIINMPAVLHNAS

SEQ ID NO: 255230 - protein, 15 aa, Artificial Sequence
  Description of Artificial Sequence: Synthetic peptide
  Seed: EECLINDPWVLLNAS
EECIINMPAVLINAS

SEQ ID NO: 255231 - protein, 15 aa, Artificial Sequence
  Description of Artificial Sequence: Synthetic peptide
  Seed: EECLINDPWVLLNAS
EECIINMPAVLKNAS

SEQ ID NO: 255232 - protein, 15 aa, Artificial Sequence
  Description of Artificial Sequence: Synthetic peptide
  Seed: EECLINDPWVLLNAS
EECIINMPAVLLNAS

SEQ ID NO: 255233 - protein, 15 aa, Artificial Sequence
  Description of Artificial Sequence: Synthetic peptide
  Seed: EECLINDPWVLLNAS
EECIINMPAVLMNAS

SEQ ID NO: 255234 - protein, 15 aa, Artificial Sequence
  Description of Artificial Sequence: Synthetic peptide
  Seed: EECLINDPWVLLNAS
EECIINMPAVLNNAS

SEQ ID NO: 255235 - protein, 15 aa, Artificial Sequence
  Description of Artificial Sequence: Synthetic peptide
  Seed: EECLINDPWVLLNAS
EECIINMPAVLPNAS

SEQ ID NO: 255236 - protein, 15 aa, Artificial Sequence
  Description of Artificial Sequence: Synthetic peptide
  Seed: EECLINDPWVLLNAS
EECIINMPAVLQNAS

SEQ ID NO: 255237 - protein, 15 aa, Artificial Sequence
  Description of Artificial Sequence: Synthetic peptide
  Seed: EECLINDPWVLLNAS
EECIINMPAVLRNAS

SEQ ID NO: 255238 - protein, 15 aa, Artificial Sequence
  Description of Artificial Sequence: Synthetic peptide
  Seed: EECLINDPWVLLNAS
EECIINMPAVLSNAS

SEQ ID NO: 255239 - protein, 15 aa, Artificial Sequence
  Description of Artificial Sequence: Synthetic peptide
  Seed: EECLINDPWVLLNAS
EECIINMPAVLTNAS

SEQ ID NO: 255240 - protein, 15 aa, Artificial Sequence
  Description of Artificial Sequence: Synthetic peptide
  Seed: EECLINDPWVLLNAS
EECIINMPAVLVNAS

SEQ ID NO: 255241 - protein, 15 aa, Artificial Sequence
  Description of Artificial Sequence: Synthetic peptide
  Seed: EECLINDPWVLLNAS
EECIINMPAVLYNAS

SEQ ID NO: 255242 - protein, 15 aa, Artificial Sequence
  Description of Artificial Sequence: Synthetic peptide
  Seed: EECLINDPWVLLNAS
EECIINMPGVLANAS

SEQ ID NO: 255243 - protein, 15 aa, Artificial Sequence
  Description of Artificial Sequence: Synthetic peptide
  Seed: EECLINDPWVLLNAS
EECIINMPGVLCNAS

SEQ ID NO: 255244 - protein, 15 aa, Artificial Sequence
  Description of Artificial Sequence: Synthetic peptide
  Seed: EECLINDPWVLLNAS
EECIINMPGVLFNAS

SEQ ID NO: 255245 - protein, 15 aa, Artificial Sequence
  Description of Artificial Sequence: Synthetic peptide
  Seed: EECLINDPWVLLNAS
EECIINMPGVLGNAS

SEQ ID NO: 255246 - protein, 15 aa, Artificial Sequence
  Description of Artificial Sequence: Synthetic peptide
  Seed: EECLINDPWVLLNAS
EECIINMPGVLHNAS

SEQ ID NO: 255247 - protein, 15 aa, Artificial Sequence
  Description of Artificial Sequence: Synthetic peptide
  Seed: EECLINDPWVLLNAS
EECIINMPGVLINAS

SEQ ID NO: 255248 - protein, 15 aa, Artificial Sequence
  Description of Artificial Sequence: Synthetic peptide
  Seed: EECLINDPWVLLNAS
EECIINMPGVLKNAS

SEQ ID NO: 255249 - protein, 15 aa, Artificial Sequence
  Description of Artificial Sequence: Synthetic peptide
  Seed: EECLINDPWVLLNAS
EECIINMPGVLLNAS

SEQ ID NO: 255250 - protein, 15 aa, Artificial Sequence
  Description of Artificial Sequence: Synthetic peptide
  Seed: EECLINDPWVLLNAS
EECIINMPGVLMNAS

SEQ ID NO: 255251 - protein, 15 aa, Artificial Sequence
  Description of Artificial Sequence: Synthetic peptide
  Seed: EECLINDPWVLLNAS
EECIINMPGVLNNAS

SEQ ID NO: 255252 - protein, 15 aa, Artificial Sequence
  Description of Artificial Sequence: Synthetic peptide
  Seed: EECLINDPWVLLNAS
EECIINMPGVLPNAS

SEQ ID NO: 255253 - protein, 15 aa, Artificial Sequence
  Description of Artificial Sequence: Synthetic peptide
  Seed: EECLINDPWVLLNAS
EECIINMPGVLQNAS

SEQ ID NO: 255254 - protein, 15 aa, Artificial Sequence
  Description of Artificial Sequence: Synthetic peptide
  Seed: EECLINDPWVLLNAS
EECIINMPGVLRNAS

SEQ ID NO: 255255 - protein, 15 aa, Artificial Sequence
  Description of Artificial Sequence: Synthetic peptide
  Seed: EECLINDPWVLLNAS
EECIINMPGVLSNAS

SEQ ID NO: 255256 - protein, 15 aa, Artificial Sequence
  Description of Artificial Sequence: Synthetic peptide
  Seed: EECLINDPWVLLNAS
EECIINMPGVLTNAS

SEQ ID NO: 255257 - protein, 15 aa, Artificial Sequence
  Description of Artificial Sequence: Synthetic peptide
  Seed: EECLINDPWVLLNAS
EECIINMPGVLVNAS

SEQ ID NO: 255258 - protein, 15 aa, Artificial Sequence
  Description of Artificial Sequence: Synthetic peptide
  Seed: EECLINDPWVLLNAS
EECIINMPGVLYNAS

SEQ ID NO: 255259 - protein, 15 aa, Artificial Sequence
  Description of Artificial Sequence: Synthetic peptide
  Seed: EECLINDPWVLLNAS
EECIINMPHVLANAS

SEQ ID NO: 255260 - protein, 15 aa, Artificial Sequence
  Description of Artificial Sequence: Synthetic peptide
  Seed: EECLINDPWVLLNAS
EECIINMPHVLINAS

SEQ ID NO: 255261 - protein, 15 aa, Artificial Sequence
  Description of Artificial Sequence: Synthetic peptide
  Seed: EECLINDPWVLLNAS
EECIINMPHVLLNAS

SEQ ID NO: 255262 - protein, 15 aa, Artificial Sequence
  Description of Artificial Sequence: Synthetic peptide
  Seed: EECLINDPWVLLNAS
EECIINMPHVLVNAS

SEQ ID NO: 255263 - protein, 15 aa, Artificial Sequence
  Description of Artificial Sequence: Synthetic peptide
  Seed: EECLINDPWVLLNAS
EECIINMPIVLANAS

SEQ ID NO: 255264 - protein, 15 aa, Artificial Sequence
  Description of Artificial Sequence: Synthetic peptide
  Seed: EECLINDPWVLLNAS
EECIINMPIVLSNAS

SEQ ID NO: 255265 - protein, 15 aa, Artificial Sequence
  Description of Artificial Sequence: Synthetic peptide
  Seed: EECLINDPWVLLNAS
EECIINMPIVLTNAS

SEQ ID NO: 255266 - protein, 15 aa, Artificial Sequence
  Description of Artificial Sequence: Synthetic peptide
  Seed: EECLINDPWVLLNAS
EECIINMPIVLVNAS

SEQ ID NO: 255267 - protein, 15 aa, Artificial Sequence
  Description of Artificial Sequence: Synthetic peptide
  Seed: EECLINDPWVLLNAS
EECIINMPNVLANAS

SEQ ID NO: 255268 - protein, 15 aa, Artificial Sequence
  Description of Artificial Sequence: Synthetic peptide
  Seed: EECLINDPWVLLNAS
EECIINMPNVLFNAS

SEQ ID NO: 255269 - protein, 15 aa, Artificial Sequence
  Description of Artificial Sequence: Synthetic peptide
  Seed: EECLINDPWVLLNAS
EECIINMPNVLGNAS

SEQ ID NO: 255270 - protein, 15 aa, Artificial Sequence
  Description of Artificial Sequence: Synthetic peptide
  Seed: EECLINDPWVLLNAS
EECIINMPNVLHNAS

SEQ ID NO: 255271 - protein, 15 aa, Artificial Sequence
  Description of Artificial Sequence: Synthetic peptide
  Seed: EECLINDPWVLLNAS
EECIINMPNVLINAS

SEQ ID NO: 255272 - protein, 15 aa, Artificial Sequence
  Description of Artificial Sequence: Synthetic peptide
  Seed: EECLINDPWVLLNAS
EECIINMPNVLKNAS

SEQ ID NO: 255273 - protein, 15 aa, Artificial Sequence
  Description of Artificial Sequence: Synthetic peptide
  Seed: EECLINDPWVLLNAS
EECIINMPNVLLNAS

SEQ ID NO: 255274 - protein, 15 aa, Artificial Sequence
  Description of Artificial Sequence: Synthetic peptide
  Seed: EECLINDPWVLLNAS
EECIINMPNVLMNAS

SEQ ID NO: 255275 - protein, 15 aa, Artificial Sequence
  Description of Artificial Sequence: Synthetic peptide
  Seed: EECLINDPWVLLNAS
EECIINMPNVLNNAS

SEQ ID NO: 255276 - protein, 15 aa, Artificial Sequence
  Description of Artificial Sequence: Synthetic peptide
  Seed: EECLINDPWVLLNAS
EECIINMPNVLQNAS

SEQ ID NO: 255277 - protein, 15 aa, Artificial Sequence
  Description of Artificial Sequence: Synthetic peptide
  Seed: EECLINDPWVLLNAS
EECIINMPNVLRNAS

SEQ ID NO: 255278 - protein, 15 aa, Artificial Sequence
  Description of Artificial Sequence: Synthetic peptide
  Seed: EECLINDPWVLLNAS
EECIINMPNVLSNAS

SEQ ID NO: 255279 - protein, 15 aa, Artificial Sequence
  Description of Artificial Sequence: Synthetic peptide
  Seed: EECLINDPWVLLNAS
EECIINMPNVLTNAS

SEQ ID NO: 255280 - protein, 15 aa, Artificial Sequence
  Description of Artificial Sequence: Synthetic peptide
  Seed: EECLINDPWVLLNAS
EECIINMPNVLVNAS

SEQ ID NO: 255281 - protein, 15 aa, Artificial Sequence
  Description of Artificial Sequence: Synthetic peptide
  Seed: EECLINDPWVLLNAS
EECIINMPNVLWNAS

SEQ ID NO: 255282 - protein, 15 aa, Artificial Sequence
  Description of Artificial Sequence: Synthetic peptide
  Seed: EECLINDPWVLLNAS
EECIINMPNVLYNAS

SEQ ID NO: 255283 - protein, 15 aa, Artificial Sequence
  Description of Artificial Sequence: Synthetic peptide
  Seed: EECLINDPWVLLNAS
EECIINMPPVLANAS

SEQ ID NO: 255284 - protein, 15 aa, Artificial Sequence
  Description of Artificial Sequence: Synthetic peptide
  Seed: EECLINDPWVLLNAS
EECIINMPPVLCNAS

SEQ ID NO: 255285 - protein, 15 aa, Artificial Sequence
  Description of Artificial Sequence: Synthetic peptide
  Seed: EECLINDPWVLLNAS
EECIINMPPVLFNAS

SEQ ID NO: 255286 - protein, 15 aa, Artificial Sequence
  Description of Artificial Sequence: Synthetic peptide
  Seed: EECLINDPWVLLNAS
EECIINMPPVLGNAS

SEQ ID NO: 255287 - protein, 15 aa, Artificial Sequence
  Description of Artificial Sequence: Synthetic peptide
  Seed: EECLINDPWVLLNAS
EECIINMPPVLHNAS

SEQ ID NO: 255288 - protein, 15 aa, Artificial Sequence
  Description of Artificial Sequence: Synthetic peptide
  Seed: EECLINDPWVLLNAS
EECIINMPPVLINAS

SEQ ID NO: 255289 - protein, 15 aa, Artificial Sequence
  Description of Artificial Sequence: Synthetic peptide
  Seed: EECLINDPWVLLNAS
EECIINMPPVLLNAS

SEQ ID NO: 255290 - protein, 15 aa, Artificial Sequence
  Description of Artificial Sequence: Synthetic peptide
  Seed: EECLINDPWVLLNAS
EECIINMPPVLMNAS

SEQ ID NO: 255291 - protein, 15 aa, Artificial Sequence
  Description of Artificial Sequence: Synthetic peptide
  Seed: EECLINDPWVLLNAS
EECIINMPPVLNNAS

SEQ ID NO: 255292 - protein, 15 aa, Artificial Sequence
  Description of Artificial Sequence: Synthetic peptide
  Seed: EECLINDPWVLLNAS
EECIINMPPVLSNAS

SEQ ID NO: 255293 - protein, 15 aa, Artificial Sequence
  Description of Artificial Sequence: Synthetic peptide
  Seed: EECLINDPWVLLNAS
EECIINMPPVLTNAS

SEQ ID NO: 255294 - protein, 15 aa, Artificial Sequence
  Description of Artificial Sequence: Synthetic peptide
  Seed: EECLINDPWVLLNAS
EECIINMPPVLVNAS

SEQ ID NO: 255295 - protein, 15 aa, Artificial Sequence
  Description of Artificial Sequence: Synthetic peptide
  Seed: EECLINDPWVLLNAS
EECIINMPPVLYNAS

SEQ ID NO: 255296 - protein, 15 aa, Artificial Sequence
  Description of Artificial Sequence: Synthetic peptide
  Seed: EECLINDPWVLLNAS
EECIINMPSVLANAS

SEQ ID NO: 255297 - protein, 15 aa, Artificial Sequence
  Description of Artificial Sequence: Synthetic peptide
  Seed: EECLINDPWVLLNAS
EECIINMPSVLCNAS

SEQ ID NO: 255298 - protein, 15 aa, Artificial Sequence
  Description of Artificial Sequence: Synthetic peptide
  Seed: EECLINDPWVLLNAS
EECIINMPSVLFNAS

SEQ ID NO: 255299 - protein, 15 aa, Artificial Sequence
  Description of Artificial Sequence: Synthetic peptide
  Seed: EECLINDPWVLLNAS
EECIINMPSVLGNAS

SEQ ID NO: 255300 - protein, 15 aa, Artificial Sequence
  Description of Artificial Sequence: Synthetic peptide
  Seed: EECLINDPWVLLNAS
EECIINMPSVLHNAS

SEQ ID NO: 255301 - protein, 15 aa, Artificial Sequence
  Description of Artificial Sequence: Synthetic peptide
  Seed: EECLINDPWVLLNAS
EECIINMPSVLINAS

SEQ ID NO: 255302 - protein, 15 aa, Artificial Sequence
  Description of Artificial Sequence: Synthetic peptide
  Seed: EECLINDPWVLLNAS
EECIINMPSVLKNAS

SEQ ID NO: 255303 - protein, 15 aa, Artificial Sequence
  Description of Artificial Sequence: Synthetic peptide
  Seed: EECLINDPWVLLNAS
EECIINMPSVLLNAS

SEQ ID NO: 255304 - protein, 15 aa, Artificial Sequence
  Description of Artificial Sequence: Synthetic peptide
  Seed: EECLINDPWVLLNAS
EECIINMPSVLMNAS

SEQ ID NO: 255305 - protein, 15 aa, Artificial Sequence
  Description of Artificial Sequence: Synthetic peptide
  Seed: EECLINDPWVLLNAS
EECIINMPSVLNNAS

SEQ ID NO: 255306 - protein, 15 aa, Artificial Sequence
  Description of Artificial Sequence: Synthetic peptide
  Seed: EECLINDPWVLLNAS
EECIINMPSVLPNAS

SEQ ID NO: 255307 - protein, 15 aa, Artificial Sequence
  Description of Artificial Sequence: Synthetic peptide
  Seed: EECLINDPWVLLNAS
EECIINMPSVLQNAS

SEQ ID NO: 255308 - protein, 15 aa, Artificial Sequence
  Description of Artificial Sequence: Synthetic peptide
  Seed: EECLINDPWVLLNAS
EECIINMPSVLRNAS

SEQ ID NO: 255309 - protein, 15 aa, Artificial Sequence
  Description of Artificial Sequence: Synthetic peptide
  Seed: EECLINDPWVLLNAS
EECIINMPSVLSNAS

SEQ ID NO: 255310 - protein, 15 aa, Artificial Sequence
  Description of Artificial Sequence: Synthetic peptide
  Seed: EECLINDPWVLLNAS
EECIINMPSVLTNAS

SEQ ID NO: 255311 - protein, 15 aa, Artificial Sequence
  Description of Artificial Sequence: Synthetic peptide
  Seed: EECLINDPWVLLNAS
EECIINMPSVLVNAS

SEQ ID NO: 255312 - protein, 15 aa, Artificial Sequence
  Description of Artificial Sequence: Synthetic peptide
  Seed: EECLINDPWVLLNAS
EECIINMPSVLYNAS

SEQ ID NO: 255313 - protein, 15 aa, Artificial Sequence
  Description of Artificial Sequence: Synthetic peptide
  Seed: EECLINDPWVLLNAS
EECIINMPTVLANAS

SEQ ID NO: 255314 - protein, 15 aa, Artificial Sequence
  Description of Artificial Sequence: Synthetic peptide
  Seed: EECLINDPWVLLNAS
EECIINMPTVLGNAS

SEQ ID NO: 255315 - protein, 15 aa, Artificial Sequence
  Description of Artificial Sequence: Synthetic peptide
  Seed: EECLINDPWVLLNAS
EECIINMPTVLHNAS

SEQ ID NO: 255316 - protein, 15 aa, Artificial Sequence
  Description of Artificial Sequence: Synthetic peptide
  Seed: EECLINDPWVLLNAS
EECIINMPTVLINAS

SEQ ID NO: 255317 - protein, 15 aa, Artificial Sequence
  Description of Artificial Sequence: Synthetic peptide
  Seed: EECLINDPWVLLNAS
EECIINMPTVLLNAS

SEQ ID NO: 255318 - protein, 15 aa, Artificial Sequence
  Description of Artificial Sequence: Synthetic peptide
  Seed: EECLINDPWVLLNAS
EECIINMPTVLMNAS

SEQ ID NO: 255319 - protein, 15 aa, Artificial Sequence
  Description of Artificial Sequence: Synthetic peptide
  Seed: EECLINDPWVLLNAS
EECIINMPTVLNNAS

SEQ ID NO: 255320 - protein, 15 aa, Artificial Sequence
  Description of Artificial Sequence: Synthetic peptide
  Seed: EECLINDPWVLLNAS
EECIINMPTVLSNAS

SEQ ID NO: 255321 - protein, 15 aa, Artificial Sequence
  Description of Artificial Sequence: Synthetic peptide
  Seed: EECLINDPWVLLNAS
EECIINMPTVLTNAS

SEQ ID NO: 255322 - protein, 15 aa, Artificial Sequence
  Description of Artificial Sequence: Synthetic peptide
  Seed: EECLINDPWVLLNAS
EECIINMPTVLVNAS

SEQ ID NO: 255323 - protein, 15 aa, Artificial Sequence
  Description of Artificial Sequence: Synthetic peptide
  Seed: EECLINDPWVLLNAS
EECIINMPVVLANAS

SEQ ID NO: 255324 - protein, 15 aa, Artificial Sequence
  Description of Artificial Sequence: Synthetic peptide
  Seed: EECLINDPWVLLNAS
EECIINMPVVLINAS

SEQ ID NO: 255325 - protein, 15 aa, Artificial Sequence
  Description of Artificial Sequence: Synthetic peptide
  Seed: EECLINDPWVLLNAS
EECIINMPVVLLNAS

SEQ ID NO: 255326 - protein, 15 aa, Artificial Sequence
  Description of Artificial Sequence: Synthetic peptide
  Seed: EECLINDPWVLLNAS
EECIINMPVVLMNAS

SEQ ID NO: 255327 - protein, 15 aa, Artificial Sequence
  Description of Artificial Sequence: Synthetic peptide
  Seed: EECLINDPWVLLNAS
EECIINMPVVLSNAS

SEQ ID NO: 255328 - protein, 15 aa, Artificial Sequence
  Description of Artificial Sequence: Synthetic peptide
  Seed: EECLINDPWVLLNAS
EECIINMPVVLTNAS

SEQ ID NO: 255329 - protein, 15 aa, Artificial Sequence
  Description of Artificial Sequence: Synthetic peptide
  Seed: EECLINDPWVLLNAS
EECIINMPVVLVNAS

SEQ ID NO: 255330 - protein, 15 aa, Artificial Sequence
  Description of Artificial Sequence: Synthetic peptide
  Seed: EECLINDPWVLLNAS
EECIINNPAVLANAS

SEQ ID NO: 255331 - protein, 15 aa, Artificial Sequence
  Description of Artificial Sequence: Synthetic peptide
  Seed: EECLINDPWVLLNAS
EECIINNPAVLCNAS

SEQ ID NO: 255332 - protein, 15 aa, Artificial Sequence
  Description of Artificial Sequence: Synthetic peptide
  Seed: EECLINDPWVLLNAS
EECIINNPAVLDNAS

SEQ ID NO: 255333 - protein, 15 aa, Artificial Sequence
  Description of Artificial Sequence: Synthetic peptide
  Seed: EECLINDPWVLLNAS
EECIINNPAVLENAS

SEQ ID NO: 255334 - protein, 15 aa, Artificial Sequence
  Description of Artificial Sequence: Synthetic peptide
  Seed: EECLINDPWVLLNAS
EECIINNPAVLFNAS

SEQ ID NO: 255335 - protein, 15 aa, Artificial Sequence
  Description of Artificial Sequence: Synthetic peptide
  Seed: EECLINDPWVLLNAS
EECIINNPAVLGNAS

SEQ ID NO: 255336 - protein, 15 aa, Artificial Sequence
  Description of Artificial Sequence: Synthetic peptide
  Seed: EECLINDPWVLLNAS
EECIINNPAVLHNAS

SEQ ID NO: 255337 - protein, 15 aa, Artificial Sequence
  Description of Artificial Sequence: Synthetic peptide
  Seed: EECLINDPWVLLNAS
EECIINNPAVLINAS

SEQ ID NO: 255338 - protein, 15 aa, Artificial Sequence
  Description of Artificial Sequence: Synthetic peptide
  Seed: EECLINDPWVLLNAS
EECIINNPAVLKNAS

SEQ ID NO: 255339 - protein, 15 aa, Artificial Sequence
  Description of Artificial Sequence: Synthetic peptide
  Seed: EECLINDPWVLLNAS
EECIINNPAVLLNAS

SEQ ID NO: 255340 - protein, 15 aa, Artificial Sequence
  Description of Artificial Sequence: Synthetic peptide
  Seed: EECLINDPWVLLNAS
EECIINNPAVLMNAS

SEQ ID NO: 255341 - protein, 15 aa, Artificial Sequence
  Description of Artificial Sequence: Synthetic peptide
  Seed: EECLINDPWVLLNAS
EECIINNPAVLNNAS

SEQ ID NO: 255342 - protein, 15 aa, Artificial Sequence
  Description of Artificial Sequence: Synthetic peptide
  Seed: EECLINDPWVLLNAS
EECIINNPAVLPNAS

SEQ ID NO: 255343 - protein, 15 aa, Artificial Sequence
  Description of Artificial Sequence: Synthetic peptide
  Seed: EECLINDPWVLLNAS
EECIINNPAVLQNAS

SEQ ID NO: 255344 - protein, 15 aa, Artificial Sequence
  Description of Artificial Sequence: Synthetic peptide
  Seed: EECLINDPWVLLNAS
EECIINNPAVLRNAS

SEQ ID NO: 255345 - protein, 15 aa, Artificial Sequence
  Description of Artificial Sequence: Synthetic peptide
  Seed: EECLINDPWVLLNAS
EECIINNPAVLSNAS

SEQ ID NO: 255346 - protein, 15 aa, Artificial Sequence
  Description of Artificial Sequence: Synthetic peptide
  Seed: EECLINDPWVLLNAS
EECIINNPAVLTNAS

SEQ ID NO: 255347 - protein, 15 aa, Artificial Sequence
  Description of Artificial Sequence: Synthetic peptide
  Seed: EECLINDPWVLLNAS
EECIINNPAVLVNAS

SEQ ID NO: 255348 - protein, 15 aa, Artificial Sequence
  Description of Artificial Sequence: Synthetic peptide
  Seed: EECLINDPWVLLNAS
EECIINNPAVLWNAS

SEQ ID NO: 255349 - protein, 15 aa, Artificial Sequence
  Description of Artificial Sequence: Synthetic peptide
  Seed: EECLINDPWVLLNAS
EECIINNPAVLYNAS

SEQ ID NO: 255350 - protein, 15 aa, Artificial Sequence
  Description of Artificial Sequence: Synthetic peptide
  Seed: EECLINDPWVLLNAS
EECIINNPCVLFNAS

SEQ ID NO: 255351 - protein, 15 aa, Artificial Sequence
  Description of Artificial Sequence: Synthetic peptide
  Seed: EECLINDPWVLLNAS
EECIINNPCVLINAS

SEQ ID NO: 255352 - protein, 15 aa, Artificial Sequence
  Description of Artificial Sequence: Synthetic peptide
  Seed: EECLINDPWVLLNAS
EECIINNPCVLLNAS

SEQ ID NO: 255353 - protein, 15 aa, Artificial Sequence
  Description of Artificial Sequence: Synthetic peptide
  Seed: EECLINDPWVLLNAS
EECIINNPCVLMNAS

SEQ ID NO: 255354 - protein, 15 aa, Artificial Sequence
  Description of Artificial Sequence: Synthetic peptide
  Seed: EECLINDPWVLLNAS
EECIINNPCVLVNAS

SEQ ID NO: 255355 - protein, 15 aa, Artificial Sequence
  Description of Artificial Sequence: Synthetic peptide
  Seed: EECLINDPWVLLNAS
EECIINNPCVLYNAS

SEQ ID NO: 255356 - protein, 15 aa, Artificial Sequence
  Description of Artificial Sequence: Synthetic peptide
  Seed: EECLINDPWVLLNAS
EECIINNPDVLINAS

SEQ ID NO: 255357 - protein, 15 aa, Artificial Sequence
  Description of Artificial Sequence: Synthetic peptide
  Seed: EECLINDPWVLLNAS
EECIINNPDVLVNAS

SEQ ID NO: 255358 - protein, 15 aa, Artificial Sequence
  Description of Artificial Sequence: Synthetic peptide
  Seed: EECLINDPWVLLNAS
EECIINNPEVLINAS

SEQ ID NO: 255359 - protein, 15 aa, Artificial Sequence
  Description of Artificial Sequence: Synthetic peptide
  Seed: EECLINDPWVLLNAS
EECIINNPEVLLNAS

SEQ ID NO: 255360 - protein, 15 aa, Artificial Sequence
  Description of Artificial Sequence: Synthetic peptide
  Seed: EECLINDPWVLLNAS
EECIINNPEVLVNAS

SEQ ID NO: 255361 - protein, 15 aa, Artificial Sequence
  Description of Artificial Sequence: Synthetic peptide
  Seed: EECLINDPWVLLNAS
EECIINNPFVLANAS

SEQ ID NO: 255362 - protein, 15 aa, Artificial Sequence
  Description of Artificial Sequence: Synthetic peptide
  Seed: EECLINDPWVLLNAS
EECIINNPFVLFNAS

SEQ ID NO: 255363 - protein, 15 aa, Artificial Sequence
  Description of Artificial Sequence: Synthetic peptide
  Seed: EECLINDPWVLLNAS
EECIINNPFVLINAS

SEQ ID NO: 255364 - protein, 15 aa, Artificial Sequence
  Description of Artificial Sequence: Synthetic peptide
  Seed: EECLINDPWVLLNAS
EECIINNPFVLLNAS

SEQ ID NO: 255365 - protein, 15 aa, Artificial Sequence
  Description of Artificial Sequence: Synthetic peptide
  Seed: EECLINDPWVLLNAS
EECIINNPFVLMNAS

SEQ ID NO: 255366 - protein, 15 aa, Artificial Sequence
  Description of Artificial Sequence: Synthetic peptide
  Seed: EECLINDPWVLLNAS
EECIINNPFVLVNAS

SEQ ID NO: 255367 - protein, 15 aa, Artificial Sequence
  Description of Artificial Sequence: Synthetic peptide
  Seed: EECLINDPWVLLNAS
EECIINNPFVLYNAS

SEQ ID NO: 255368 - protein, 15 aa, Artificial Sequence
  Description of Artificial Sequence: Synthetic peptide
  Seed: EECLINDPWVLLNAS
EECIINNPGVLANAS

SEQ ID NO: 255369 - protein, 15 aa, Artificial Sequence
  Description of Artificial Sequence: Synthetic peptide
  Seed: EECLINDPWVLLNAS
EECIINNPGVLFNAS

SEQ ID NO: 255370 - protein, 15 aa, Artificial Sequence
  Description of Artificial Sequence: Synthetic peptide
  Seed: EECLINDPWVLLNAS
EECIINNPGVLHNAS

SEQ ID NO: 255371 - protein, 15 aa, Artificial Sequence
  Description of Artificial Sequence: Synthetic peptide
  Seed: EECLINDPWVLLNAS
EECIINNPGVLINAS

SEQ ID NO: 255372 - protein, 15 aa, Artificial Sequence
  Description of Artificial Sequence: Synthetic peptide
  Seed: EECLINDPWVLLNAS
EECIINNPGVLLNAS

SEQ ID NO: 255373 - protein, 15 aa, Artificial Sequence
  Description of Artificial Sequence: Synthetic peptide
  Seed: EECLINDPWVLLNAS
EECIINNPGVLMNAS

SEQ ID NO: 255374 - protein, 15 aa, Artificial Sequence
  Description of Artificial Sequence: Synthetic peptide
  Seed: EECLINDPWVLLNAS
EECIINNPGVLNNAS

SEQ ID NO: 255375 - protein, 15 aa, Artificial Sequence
  Description of Artificial Sequence: Synthetic peptide
  Seed: EECLINDPWVLLNAS
EECIINNPGVLQNAS

SEQ ID NO: 255376 - protein, 15 aa, Artificial Sequence
  Description of Artificial Sequence: Synthetic peptide
  Seed: EECLINDPWVLLNAS
EECIINNPGVLSNAS

SEQ ID NO: 255377 - protein, 15 aa, Artificial Sequence
  Description of Artificial Sequence: Synthetic peptide
  Seed: EECLINDPWVLLNAS
EECIINNPGVLTNAS

SEQ ID NO: 255378 - protein, 15 aa, Artificial Sequence
  Description of Artificial Sequence: Synthetic peptide
  Seed: EECLINDPWVLLNAS
EECIINNPGVLVNAS

SEQ ID NO: 255379 - protein, 15 aa, Artificial Sequence
  Description of Artificial Sequence: Synthetic peptide
  Seed: EECLINDPWVLLNAS
EECIINNPGVLWNAS

SEQ ID NO: 255380 - protein, 15 aa, Artificial Sequence
  Description of Artificial Sequence: Synthetic peptide
  Seed: EECLINDPWVLLNAS
EECIINNPGVLYNAS

SEQ ID NO: 255381 - protein, 15 aa, Artificial Sequence
  Description of Artificial Sequence: Synthetic peptide
  Seed: EECLINDPWVLLNAS
EECIINNPHVLANAS

SEQ ID NO: 255382 - protein, 15 aa, Artificial Sequence
  Description of Artificial Sequence: Synthetic peptide
  Seed: EECLINDPWVLLNAS
EECIINNPHVLFNAS

SEQ ID NO: 255383 - protein, 15 aa, Artificial Sequence
  Description of Artificial Sequence: Synthetic peptide
  Seed: EECLINDPWVLLNAS
EECIINNPHVLINAS

SEQ ID NO: 255384 - protein, 15 aa, Artificial Sequence
  Description of Artificial Sequence: Synthetic peptide
  Seed: EECLINDPWVLLNAS
EECIINNPHVLLNAS

SEQ ID NO: 255385 - protein, 15 aa, Artificial Sequence
  Description of Artificial Sequence: Synthetic peptide
  Seed: EECLINDPWVLLNAS
EECIINNPHVLMNAS

SEQ ID NO: 255386 - protein, 15 aa, Artificial Sequence
  Description of Artificial Sequence: Synthetic peptide
  Seed: EECLINDPWVLLNAS
EECIINNPHVLSNAS

SEQ ID NO: 255387 - protein, 15 aa, Artificial Sequence
  Description of Artificial Sequence: Synthetic peptide
  Seed: EECLINDPWVLLNAS
EECIINNPHVLVNAS

SEQ ID NO: 255388 - protein, 15 aa, Artificial Sequence
  Description of Artificial Sequence: Synthetic peptide
  Seed: EECLINDPWVLLNAS
EECIINNPHVLWNAS

SEQ ID NO: 255389 - protein, 15 aa, Artificial Sequence
  Description of Artificial Sequence: Synthetic peptide
  Seed: EECLINDPWVLLNAS
EECIINNPHVLYNAS

SEQ ID NO: 255390 - protein, 15 aa, Artificial Sequence
  Description of Artificial Sequence: Synthetic peptide
  Seed: EECLINDPWVLLNAS
EECIINNPIVLANAS

SEQ ID NO: 255391 - protein, 15 aa, Artificial Sequence
  Description of Artificial Sequence: Synthetic peptide
  Seed: EECLINDPWVLLNAS
EECIINNPIVLCNAS

SEQ ID NO: 255392 - protein, 15 aa, Artificial Sequence
  Description of Artificial Sequence: Synthetic peptide
  Seed: EECLINDPWVLLNAS
EECIINNPIVLDNAS

SEQ ID NO: 255393 - protein, 15 aa, Artificial Sequence
  Description of Artificial Sequence: Synthetic peptide
  Seed: EECLINDPWVLLNAS
EECIINNPIVLENAS

SEQ ID NO: 255394 - protein, 15 aa, Artificial Sequence
  Description of Artificial Sequence: Synthetic peptide
  Seed: EECLINDPWVLLNAS
EECIINNPIVLFNAS

SEQ ID NO: 255395 - protein, 15 aa, Artificial Sequence
  Description of Artificial Sequence: Synthetic peptide
  Seed: EECLINDPWVLLNAS
EECIINNPIVLGNAS

SEQ ID NO: 255396 - protein, 15 aa, Artificial Sequence
  Description of Artificial Sequence: Synthetic peptide
  Seed: EECLINDPWVLLNAS
EECIINNPIVLHNAS

SEQ ID NO: 255397 - protein, 15 aa, Artificial Sequence
  Description of Artificial Sequence: Synthetic peptide
  Seed: EECLINDPWVLLNAS
EECIINNPIVLINAS

SEQ ID NO: 255398 - protein, 15 aa, Artificial Sequence
  Description of Artificial Sequence: Synthetic peptide
  Seed: EECLINDPWVLLNAS
EECIINNPIVLKNAS

SEQ ID NO: 255399 - protein, 15 aa, Artificial Sequence
  Description of Artificial Sequence: Synthetic peptide
  Seed: EECLINDPWVLLNAS
EECIINNPIVLLNAS

SEQ ID NO: 255400 - protein, 15 aa, Artificial Sequence
  Description of Artificial Sequence: Synthetic peptide
  Seed: EECLINDPWVLLNAS
EECIINNPIVLMNAS

SEQ ID NO: 255401 - protein, 15 aa, Artificial Sequence
  Description of Artificial Sequence: Synthetic peptide
  Seed: EECLINDPWVLLNAS
EECIINNPIVLNNAS

SEQ ID NO: 255402 - protein, 15 aa, Artificial Sequence
  Description of Artificial Sequence: Synthetic peptide
  Seed: EECLINDPWVLLNAS
EECIINNPIVLPNAS

SEQ ID NO: 255403 - protein, 15 aa, Artificial Sequence
  Description of Artificial Sequence: Synthetic peptide
  Seed: EECLINDPWVLLNAS
EECIINNPIVLQNAS

SEQ ID NO: 255404 - protein, 15 aa, Artificial Sequence
  Description of Artificial Sequence: Synthetic peptide
  Seed: EECLINDPWVLLNAS
EECIINNPIVLRNAS

SEQ ID NO: 255405 - protein, 15 aa, Artificial Sequence
  Description of Artificial Sequence: Synthetic peptide
  Seed: EECLINDPWVLLNAS
EECIINNPIVLSNAS

SEQ ID NO: 255406 - protein, 15 aa, Artificial Sequence
  Description of Artificial Sequence: Synthetic peptide
  Seed: EECLINDPWVLLNAS
EECIINNPIVLTNAS

SEQ ID NO: 255407 - protein, 15 aa, Artificial Sequence
  Description of Artificial Sequence: Synthetic peptide
  Seed: EECLINDPWVLLNAS
EECIINNPIVLVNAS

SEQ ID NO: 255408 - protein, 15 aa, Artificial Sequence
  Description of Artificial Sequence: Synthetic peptide
  Seed: EECLINDPWVLLNAS
EECIINNPIVLWNAS

SEQ ID NO: 255409 - protein, 15 aa, Artificial Sequence
  Description of Artificial Sequence: Synthetic peptide
  Seed: EECLINDPWVLLNAS
EECIINNPIVLYNAS

SEQ ID NO: 255410 - protein, 15 aa, Artificial Sequence
  Description of Artificial Sequence: Synthetic peptide
  Seed: EECLINDPWVLLNAS
EECIINNPKVLINAS

SEQ ID NO: 255411 - protein, 15 aa, Artificial Sequence
  Description of Artificial Sequence: Synthetic peptide
  Seed: EECLINDPWVLLNAS
EECIINNPKVLLNAS

SEQ ID NO: 255412 - protein, 15 aa, Artificial Sequence
  Description of Artificial Sequence: Synthetic peptide
  Seed: EECLINDPWVLLNAS
EECIINNPKVLVNAS

SEQ ID NO: 255413 - protein, 15 aa, Artificial Sequence
  Description of Artificial Sequence: Synthetic peptide
  Seed: EECLINDPWVLLNAS
EECIINNPLVLANAS

SEQ ID NO: 255414 - protein, 15 aa, Artificial Sequence
  Description of Artificial Sequence: Synthetic peptide
  Seed: EECLINDPWVLLNAS
EECIINNPLVLFNAS

SEQ ID NO: 255415 - protein, 15 aa, Artificial Sequence
  Description of Artificial Sequence: Synthetic peptide
  Seed: EECLINDPWVLLNAS
EECIINNPLVLGNAS

SEQ ID NO: 255416 - protein, 15 aa, Artificial Sequence
  Description of Artificial Sequence: Synthetic peptide
  Seed: EECLINDPWVLLNAS
EECIINNPLVLHNAS

SEQ ID NO: 255417 - protein, 15 aa, Artificial Sequence
  Description of Artificial Sequence: Synthetic peptide
  Seed: EECLINDPWVLLNAS
EECIINNPLVLINAS

SEQ ID NO: 255418 - protein, 15 aa, Artificial Sequence
  Description of Artificial Sequence: Synthetic peptide
  Seed: EECLINDPWVLLNAS
EECIINNPLVLKNAS

SEQ ID NO: 255419 - protein, 15 aa, Artificial Sequence
  Description of Artificial Sequence: Synthetic peptide
  Seed: EECLINDPWVLLNAS
EECIINNPLVLLNAS

SEQ ID NO: 255420 - protein, 15 aa, Artificial Sequence
  Description of Artificial Sequence: Synthetic peptide
  Seed: EECLINDPWVLLNAS
EECIINNPLVLMNAS

SEQ ID NO: 255421 - protein, 15 aa, Artificial Sequence
  Description of Artificial Sequence: Synthetic peptide
  Seed: EECLINDPWVLLNAS
EECIINNPLVLNNAS

SEQ ID NO: 255422 - protein, 15 aa, Artificial Sequence
  Description of Artificial Sequence: Synthetic peptide
  Seed: EECLINDPWVLLNAS
EECIINNPLVLQNAS

SEQ ID NO: 255423 - protein, 15 aa, Artificial Sequence
  Description of Artificial Sequence: Synthetic peptide
  Seed: EECLINDPWVLLNAS
EECIINNPLVLRNAS

SEQ ID NO: 255424 - protein, 15 aa, Artificial Sequence
  Description of Artificial Sequence: Synthetic peptide
  Seed: EECLINDPWVLLNAS
EECIINNPLVLSNAS

SEQ ID NO: 255425 - protein, 15 aa, Artificial Sequence
  Description of Artificial Sequence: Synthetic peptide
  Seed: EECLINDPWVLLNAS
EECIINNPLVLTNAS

SEQ ID NO: 255426 - protein, 15 aa, Artificial Sequence
  Description of Artificial Sequence: Synthetic peptide
  Seed: EECLINDPWVLLNAS
EECIINNPLVLVNAS

SEQ ID NO: 255427 - protein, 15 aa, Artificial Sequence
  Description of Artificial Sequence: Synthetic peptide
  Seed: EECLINDPWVLLNAS
EECIINNPLVLWNAS

SEQ ID NO: 255428 - protein, 15 aa, Artificial Sequence
  Description of Artificial Sequence: Synthetic peptide
  Seed: EECLINDPWVLLNAS
EECIINNPLVLYNAS

SEQ ID NO: 255429 - protein, 15 aa, Artificial Sequence
  Description of Artificial Sequence: Synthetic peptide
  Seed: EECLINDPWVLLNAS
EECIINNPMVLANAS

SEQ ID NO: 255430 - protein, 15 aa, Artificial Sequence
  Description of Artificial Sequence: Synthetic peptide
  Seed: EECLINDPWVLLNAS
EECIINNPMVLFNAS

SEQ ID NO: 255431 - protein, 15 aa, Artificial Sequence
  Description of Artificial Sequence: Synthetic peptide
  Seed: EECLINDPWVLLNAS
EECIINNPMVLGNAS

SEQ ID NO: 255432 - protein, 15 aa, Artificial Sequence
  Description of Artificial Sequence: Synthetic peptide
  Seed: EECLINDPWVLLNAS
EECIINNPMVLHNAS

SEQ ID NO: 255433 - protein, 15 aa, Artificial Sequence
  Description of Artificial Sequence: Synthetic peptide
  Seed: EECLINDPWVLLNAS
EECIINNPMVLINAS

SEQ ID NO: 255434 - protein, 15 aa, Artificial Sequence
  Description of Artificial Sequence: Synthetic peptide
  Seed: EECLINDPWVLLNAS
EECIINNPMVLKNAS

SEQ ID NO: 255435 - protein, 15 aa, Artificial Sequence
  Description of Artificial Sequence: Synthetic peptide
  Seed: EECLINDPWVLLNAS
EECIINNPMVLLNAS

SEQ ID NO: 255436 - protein, 15 aa, Artificial Sequence
  Description of Artificial Sequence: Synthetic peptide
  Seed: EECLINDPWVLLNAS
EECIINNPMVLMNAS

SEQ ID NO: 255437 - protein, 15 aa, Artificial Sequence
  Description of Artificial Sequence: Synthetic peptide
  Seed: EECLINDPWVLLNAS
EECIINNPMVLNNAS

SEQ ID NO: 255438 - protein, 15 aa, Artificial Sequence
  Description of Artificial Sequence: Synthetic peptide
  Seed: EECLINDPWVLLNAS
EECIINNPMVLPNAS

SEQ ID NO: 255439 - protein, 15 aa, Artificial Sequence
  Description of Artificial Sequence: Synthetic peptide
  Seed: EECLINDPWVLLNAS
EECIINNPMVLQNAS

SEQ ID NO: 255440 - protein, 15 aa, Artificial Sequence
  Description of Artificial Sequence: Synthetic peptide
  Seed: EECLINDPWVLLNAS
EECIINNPMVLRNAS

SEQ ID NO: 255441 - protein, 15 aa, Artificial Sequence
  Description of Artificial Sequence: Synthetic peptide
  Seed: EECLINDPWVLLNAS
EECIINNPMVLSNAS

SEQ ID NO: 255442 - protein, 15 aa, Artificial Sequence
  Description of Artificial Sequence: Synthetic peptide
  Seed: EECLINDPWVLLNAS
EECIINNPMVLTNAS

SEQ ID NO: 255443 - protein, 15 aa, Artificial Sequence
  Description of Artificial Sequence: Synthetic peptide
  Seed: EECLINDPWVLLNAS
EECIINNPMVLVNAS

SEQ ID NO: 255444 - protein, 15 aa, Artificial Sequence
  Description of Artificial Sequence: Synthetic peptide
  Seed: EECLINDPWVLLNAS
EECIINNPMVLWNAS

SEQ ID NO: 255445 - protein, 15 aa, Artificial Sequence
  Description of Artificial Sequence: Synthetic peptide
  Seed: EECLINDPWVLLNAS
EECIINNPMVLYNAS

SEQ ID NO: 255446 - protein, 15 aa, Artificial Sequence
  Description of Artificial Sequence: Synthetic peptide
  Seed: EECLINDPWVLLNAS
EECIINNPNVLANAS

SEQ ID NO: 255447 - protein, 15 aa, Artificial Sequence
  Description of Artificial Sequence: Synthetic peptide
  Seed: EECLINDPWVLLNAS
EECIINNPNVLCNAS

SEQ ID NO: 255448 - protein, 15 aa, Artificial Sequence
  Description of Artificial Sequence: Synthetic peptide
  Seed: EECLINDPWVLLNAS
EECIINNPNVLENAS

SEQ ID NO: 255449 - protein, 15 aa, Artificial Sequence
  Description of Artificial Sequence: Synthetic peptide
  Seed: EECLINDPWVLLNAS
EECIINNPNVLFNAS

SEQ ID NO: 255450 - protein, 15 aa, Artificial Sequence
  Description of Artificial Sequence: Synthetic peptide
  Seed: EECLINDPWVLLNAS
EECIINNPNVLGNAS

SEQ ID NO: 255451 - protein, 15 aa, Artificial Sequence
  Description of Artificial Sequence: Synthetic peptide
  Seed: EECLINDPWVLLNAS
EECIINNPNVLHNAS

SEQ ID NO: 255452 - protein, 15 aa, Artificial Sequence
  Description of Artificial Sequence: Synthetic peptide
  Seed: EECLINDPWVLLNAS
EECIINNPNVLINAS

SEQ ID NO: 255453 - protein, 15 aa, Artificial Sequence
  Description of Artificial Sequence: Synthetic peptide
  Seed: EECLINDPWVLLNAS
EECIINNPNVLKNAS

SEQ ID NO: 255454 - protein, 15 aa, Artificial Sequence
  Description of Artificial Sequence: Synthetic peptide
  Seed: EECLINDPWVLLNAS
EECIINNPNVLLNAS

SEQ ID NO: 255455 - protein, 15 aa, Artificial Sequence
  Description of Artificial Sequence: Synthetic peptide
  Seed: EECLINDPWVLLNAS
EECIINNPNVLMNAS

SEQ ID NO: 255456 - protein, 15 aa, Artificial Sequence
  Description of Artificial Sequence: Synthetic peptide
  Seed: EECLINDPWVLLNAS
EECIINNPNVLNNAS

SEQ ID NO: 255457 - protein, 15 aa, Artificial Sequence
  Description of Artificial Sequence: Synthetic peptide
  Seed: EECLINDPWVLLNAS
EECIINNPNVLPNAS

SEQ ID NO: 255458 - protein, 15 aa, Artificial Sequence
  Description of Artificial Sequence: Synthetic peptide
  Seed: EECLINDPWVLLNAS
EECIINNPNVLQNAS

SEQ ID NO: 255459 - protein, 15 aa, Artificial Sequence
  Description of Artificial Sequence: Synthetic peptide
  Seed: EECLINDPWVLLNAS
EECIINNPNVLRNAS

SEQ ID NO: 255460 - protein, 15 aa, Artificial Sequence
  Description of Artificial Sequence: Synthetic peptide
  Seed: EECLINDPWVLLNAS
EECIINNPNVLSNAS

SEQ ID NO: 255461 - protein, 15 aa, Artificial Sequence
  Description of Artificial Sequence: Synthetic peptide
  Seed: EECLINDPWVLLNAS
EECIINNPNVLTNAS

SEQ ID NO: 255462 - protein, 15 aa, Artificial Sequence
  Description of Artificial Sequence: Synthetic peptide
  Seed: EECLINDPWVLLNAS
EECIINNPNVLVNAS

SEQ ID NO: 255463 - protein, 15 aa, Artificial Sequence
  Description of Artificial Sequence: Synthetic peptide
  Seed: EECLINDPWVLLNAS
EECIINNPNVLWNAS

SEQ ID NO: 255464 - protein, 15 aa, Artificial Sequence
  Description of Artificial Sequence: Synthetic peptide
  Seed: EECLINDPWVLLNAS
EECIINNPNVLYNAS

SEQ ID NO: 255465 - protein, 15 aa, Artificial Sequence
  Description of Artificial Sequence: Synthetic peptide
  Seed: EECLINDPWVLLNAS
EECIINNPPVLANAS

SEQ ID NO: 255466 - protein, 15 aa, Artificial Sequence
  Description of Artificial Sequence: Synthetic peptide
  Seed: EECLINDPWVLLNAS
EECIINNPPVLFNAS

SEQ ID NO: 255467 - protein, 15 aa, Artificial Sequence
  Description of Artificial Sequence: Synthetic peptide
  Seed: EECLINDPWVLLNAS
EECIINNPPVLINAS

SEQ ID NO: 255468 - protein, 15 aa, Artificial Sequence
  Description of Artificial Sequence: Synthetic peptide
  Seed: EECLINDPWVLLNAS
EECIINNPPVLLNAS

SEQ ID NO: 255469 - protein, 15 aa, Artificial Sequence
  Description of Artificial Sequence: Synthetic peptide
  Seed: EECLINDPWVLLNAS
EECIINNPPVLMNAS

SEQ ID NO: 255470 - protein, 15 aa, Artificial Sequence
  Description of Artificial Sequence: Synthetic peptide
  Seed: EECLINDPWVLLNAS
EECIINNPPVLQNAS

SEQ ID NO: 255471 - protein, 15 aa, Artificial Sequence
  Description of Artificial Sequence: Synthetic peptide
  Seed: EECLINDPWVLLNAS
EECIINNPPVLSNAS

SEQ ID NO: 255472 - protein, 15 aa, Artificial Sequence
  Description of Artificial Sequence: Synthetic peptide
  Seed: EECLINDPWVLLNAS
EECIINNPPVLTNAS

SEQ ID NO: 255473 - protein, 15 aa, Artificial Sequence
  Description of Artificial Sequence: Synthetic peptide
  Seed: EECLINDPWVLLNAS
EECIINNPPVLVNAS

SEQ ID NO: 255474 - protein, 15 aa, Artificial Sequence
  Description of Artificial Sequence: Synthetic peptide
  Seed: EECLINDPWVLLNAS
EECIINNPPVLWNAS

SEQ ID NO: 255475 - protein, 15 aa, Artificial Sequence
  Description of Artificial Sequence: Synthetic peptide
  Seed: EECLINDPWVLLNAS
EECIINNPPVLYNAS

SEQ ID NO: 255476 - protein, 15 aa, Artificial Sequence
  Description of Artificial Sequence: Synthetic peptide
  Seed: EECLINDPWVLLNAS
EECIINNPQVLANAS

SEQ ID NO: 255477 - protein, 15 aa, Artificial Sequence
  Description of Artificial Sequence: Synthetic peptide
  Seed: EECLINDPWVLLNAS
EECIINNPQVLFNAS

SEQ ID NO: 255478 - protein, 15 aa, Artificial Sequence
  Description of Artificial Sequence: Synthetic peptide
  Seed: EECLINDPWVLLNAS
EECIINNPQVLINAS

SEQ ID NO: 255479 - protein, 15 aa, Artificial Sequence
  Description of Artificial Sequence: Synthetic peptide
  Seed: EECLINDPWVLLNAS
EECIINNPQVLLNAS

SEQ ID NO: 255480 - protein, 15 aa, Artificial Sequence
  Description of Artificial Sequence: Synthetic peptide
  Seed: EECLINDPWVLLNAS
EECIINNPQVLMNAS

SEQ ID NO: 255481 - protein, 15 aa, Artificial Sequence
  Description of Artificial Sequence: Synthetic peptide
  Seed: EECLINDPWVLLNAS
EECIINNPQVLVNAS

SEQ ID NO: 255482 - protein, 15 aa, Artificial Sequence
  Description of Artificial Sequence: Synthetic peptide
  Seed: EECLINDPWVLLNAS
EECIINNPQVLYNAS

SEQ ID NO: 255483 - protein, 15 aa, Artificial Sequence
  Description of Artificial Sequence: Synthetic peptide
  Seed: EECLINDPWVLLNAS
EECIINNPRVLANAS

SEQ ID NO: 255484 - protein, 15 aa, Artificial Sequence
  Description of Artificial Sequence: Synthetic peptide
  Seed: EECLINDPWVLLNAS
EECIINNPRVLFNAS

SEQ ID NO: 255485 - protein, 15 aa, Artificial Sequence
  Description of Artificial Sequence: Synthetic peptide
  Seed: EECLINDPWVLLNAS
EECIINNPRVLINAS

SEQ ID NO: 255486 - protein, 15 aa, Artificial Sequence
  Description of Artificial Sequence: Synthetic peptide
  Seed: EECLINDPWVLLNAS
EECIINNPRVLLNAS

SEQ ID NO: 255487 - protein, 15 aa, Artificial Sequence
  Description of Artificial Sequence: Synthetic peptide
  Seed: EECLINDPWVLLNAS
EECIINNPRVLMNAS

SEQ ID NO: 255488 - protein, 15 aa, Artificial Sequence
  Description of Artificial Sequence: Synthetic peptide
  Seed: EECLINDPWVLLNAS
EECIINNPRVLVNAS

SEQ ID NO: 255489 - protein, 15 aa, Artificial Sequence
  Description of Artificial Sequence: Synthetic peptide
  Seed: EECLINDPWVLLNAS
EECIINNPRVLYNAS

SEQ ID NO: 255490 - protein, 15 aa, Artificial Sequence
  Description of Artificial Sequence: Synthetic peptide
  Seed: EECLINDPWVLLNAS
EECIINNPSVLANAS

SEQ ID NO: 255491 - protein, 15 aa, Artificial Sequence
  Description of Artificial Sequence: Synthetic peptide
  Seed: EECLINDPWVLLNAS
EECIINNPSVLFNAS

SEQ ID NO: 255492 - protein, 15 aa, Artificial Sequence
  Description of Artificial Sequence: Synthetic peptide
  Seed: EECLINDPWVLLNAS
EECIINNPSVLGNAS

SEQ ID NO: 255493 - protein, 15 aa, Artificial Sequence
  Description of Artificial Sequence: Synthetic peptide
  Seed: EECLINDPWVLLNAS
EECIINNPSVLHNAS

SEQ ID NO: 255494 - protein, 15 aa, Artificial Sequence
  Description of Artificial Sequence: Synthetic peptide
  Seed: EECLINDPWVLLNAS
EECIINNPSVLINAS

SEQ ID NO: 255495 - protein, 15 aa, Artificial Sequence
  Description of Artificial Sequence: Synthetic peptide
  Seed: EECLINDPWVLLNAS
EECIINNPSVLKNAS

SEQ ID NO: 255496 - protein, 15 aa, Artificial Sequence
  Description of Artificial Sequence: Synthetic peptide
  Seed: EECLINDPWVLLNAS
EECIINNPSVLLNAS

SEQ ID NO: 255497 - protein, 15 aa, Artificial Sequence
  Description of Artificial Sequence: Synthetic peptide
  Seed: EECLINDPWVLLNAS
EECIINNPSVLMNAS

SEQ ID NO: 255498 - protein, 15 aa, Artificial Sequence
  Description of Artificial Sequence: Synthetic peptide
  Seed: EECLINDPWVLLNAS
EECIINNPSVLNNAS

SEQ ID NO: 255499 - protein, 15 aa, Artificial Sequence
  Description of Artificial Sequence: Synthetic peptide
  Seed: EECLINDPWVLLNAS
EECIINNPSVLPNAS

SEQ ID NO: 255500 - protein, 15 aa, Artificial Sequence
  Description of Artificial Sequence: Synthetic peptide
  Seed: EECLINDPWVLLNAS
EECIINNPSVLQNAS

SEQ ID NO: 255501 - protein, 15 aa, Artificial Sequence
  Description of Artificial Sequence: Synthetic peptide
  Seed: EECLINDPWVLLNAS
EECIINNPSVLRNAS

SEQ ID NO: 255502 - protein, 15 aa, Artificial Sequence
  Description of Artificial Sequence: Synthetic peptide
  Seed: EECLINDPWVLLNAS
EECIINNPSVLSNAS

SEQ ID NO: 255503 - protein, 15 aa, Artificial Sequence
  Description of Artificial Sequence: Synthetic peptide
  Seed: EECLINDPWVLLNAS
EECIINNPSVLTNAS

SEQ ID NO: 255504 - protein, 15 aa, Artificial Sequence
  Description of Artificial Sequence: Synthetic peptide
  Seed: EECLINDPWVLLNAS
EECIINNPSVLVNAS

SEQ ID NO: 255505 - protein, 15 aa, Artificial Sequence
  Description of Artificial Sequence: Synthetic peptide
  Seed: EECLINDPWVLLNAS
EECIINNPSVLWNAS

SEQ ID NO: 255506 - protein, 15 aa, Artificial Sequence
  Description of Artificial Sequence: Synthetic peptide
  Seed: EECLINDPWVLLNAS
EECIINNPSVLYNAS

SEQ ID NO: 255507 - protein, 15 aa, Artificial Sequence
  Description of Artificial Sequence: Synthetic peptide
  Seed: EECLINDPWVLLNAS
EECIINNPTVLANAS

SEQ ID NO: 255508 - protein, 15 aa, Artificial Sequence
  Description of Artificial Sequence: Synthetic peptide
  Seed: EECLINDPWVLLNAS
EECIINNPTVLFNAS

SEQ ID NO: 255509 - protein, 15 aa, Artificial Sequence
  Description of Artificial Sequence: Synthetic peptide
  Seed: EECLINDPWVLLNAS
EECIINNPTVLHNAS

SEQ ID NO: 255510 - protein, 15 aa, Artificial Sequence
  Description of Artificial Sequence: Synthetic peptide
  Seed: EECLINDPWVLLNAS
EECIINNPTVLINAS

SEQ ID NO: 255511 - protein, 15 aa, Artificial Sequence
  Description of Artificial Sequence: Synthetic peptide
  Seed: EECLINDPWVLLNAS
EECIINNPTVLLNAS

SEQ ID NO: 255512 - protein, 15 aa, Artificial Sequence
  Description of Artificial Sequence: Synthetic peptide
  Seed: EECLINDPWVLLNAS
EECIINNPTVLMNAS

SEQ ID NO: 255513 - protein, 15 aa, Artificial Sequence
  Description of Artificial Sequence: Synthetic peptide
  Seed: EECLINDPWVLLNAS
EECIINNPTVLNNAS

SEQ ID NO: 255514 - protein, 15 aa, Artificial Sequence
  Description of Artificial Sequence: Synthetic peptide
  Seed: EECLINDPWVLLNAS
EECIINNPTVLQNAS

SEQ ID NO: 255515 - protein, 15 aa, Artificial Sequence
  Description of Artificial Sequence: Synthetic peptide
  Seed: EECLINDPWVLLNAS
EECIINNPTVLSNAS

SEQ ID NO: 255516 - protein, 15 aa, Artificial Sequence
  Description of Artificial Sequence: Synthetic peptide
  Seed: EECLINDPWVLLNAS
EECIINNPTVLTNAS

SEQ ID NO: 255517 - protein, 15 aa, Artificial Sequence
  Description of Artificial Sequence: Synthetic peptide
  Seed: EECLINDPWVLLNAS
EECIINNPTVLVNAS

SEQ ID NO: 255518 - protein, 15 aa, Artificial Sequence
  Description of Artificial Sequence: Synthetic peptide
  Seed: EECLINDPWVLLNAS
EECIINNPTVLWNAS

SEQ ID NO: 255519 - protein, 15 aa, Artificial Sequence
  Description of Artificial Sequence: Synthetic peptide
  Seed: EECLINDPWVLLNAS
EECIINNPTVLYNAS

SEQ ID NO: 255520 - protein, 15 aa, Artificial Sequence
  Description of Artificial Sequence: Synthetic peptide
  Seed: EECLINDPWVLLNAS
EECIINNPVVLANAS

SEQ ID NO: 255521 - protein, 15 aa, Artificial Sequence
  Description of Artificial Sequence: Synthetic peptide
  Seed: EECLINDPWVLLNAS
EECIINNPVVLCNAS

SEQ ID NO: 255522 - protein, 15 aa, Artificial Sequence
  Description of Artificial Sequence: Synthetic peptide
  Seed: EECLINDPWVLLNAS
EECIINNPVVLDNAS

SEQ ID NO: 255523 - protein, 15 aa, Artificial Sequence
  Description of Artificial Sequence: Synthetic peptide
  Seed: EECLINDPWVLLNAS
EECIINNPVVLENAS

SEQ ID NO: 255524 - protein, 15 aa, Artificial Sequence
  Description of Artificial Sequence: Synthetic peptide
  Seed: EECLINDPWVLLNAS
EECIINNPVVLFNAS

SEQ ID NO: 255525 - protein, 15 aa, Artificial Sequence
  Description of Artificial Sequence: Synthetic peptide
  Seed: EECLINDPWVLLNAS
EECIINNPVVLGNAS

SEQ ID NO: 255526 - protein, 15 aa, Artificial Sequence
  Description of Artificial Sequence: Synthetic peptide
  Seed: EECLINDPWVLLNAS
EECIINNPVVLHNAS

SEQ ID NO: 255527 - protein, 15 aa, Artificial Sequence
  Description of Artificial Sequence: Synthetic peptide
  Seed: EECLINDPWVLLNAS
EECIINNPVVLINAS

SEQ ID NO: 255528 - protein, 15 aa, Artificial Sequence
  Description of Artificial Sequence: Synthetic peptide
  Seed: EECLINDPWVLLNAS
EECIINNPVVLKNAS

SEQ ID NO: 255529 - protein, 15 aa, Artificial Sequence
  Description of Artificial Sequence: Synthetic peptide
  Seed: EECLINDPWVLLNAS
EECIINNPVVLLNAS

SEQ ID NO: 255530 - protein, 15 aa, Artificial Sequence
  Description of Artificial Sequence: Synthetic peptide
  Seed: EECLINDPWVLLNAS
EECIINNPVVLMNAS

SEQ ID NO: 255531 - protein, 15 aa, Artificial Sequence
  Description of Artificial Sequence: Synthetic peptide
  Seed: EECLINDPWVLLNAS
EECIINNPVVLNNAS

SEQ ID NO: 255532 - protein, 15 aa, Artificial Sequence
  Description of Artificial Sequence: Synthetic peptide
  Seed: EECLINDPWVLLNAS
EECIINNPVVLPNAS

SEQ ID NO: 255533 - protein, 15 aa, Artificial Sequence
  Description of Artificial Sequence: Synthetic peptide
  Seed: EECLINDPWVLLNAS
EECIINNPVVLQNAS

SEQ ID NO: 255534 - protein, 15 aa, Artificial Sequence
  Description of Artificial Sequence: Synthetic peptide
  Seed: EECLINDPWVLLNAS
EECIINNPVVLRNAS

SEQ ID NO: 255535 - protein, 15 aa, Artificial Sequence
  Description of Artificial Sequence: Synthetic peptide
  Seed: EECLINDPWVLLNAS
EECIINNPVVLSNAS

SEQ ID NO: 255536 - protein, 15 aa, Artificial Sequence
  Description of Artificial Sequence: Synthetic peptide
  Seed: EECLINDPWVLLNAS
EECIINNPVVLTNAS

SEQ ID NO: 255537 - protein, 15 aa, Artificial Sequence
  Description of Artificial Sequence: Synthetic peptide
  Seed: EECLINDPWVLLNAS
EECIINNPVVLVNAS

SEQ ID NO: 255538 - protein, 15 aa, Artificial Sequence
  Description of Artificial Sequence: Synthetic peptide
  Seed: EECLINDPWVLLNAS
EECIINNPVVLWNAS

SEQ ID NO: 255539 - protein, 15 aa, Artificial Sequence
  Description of Artificial Sequence: Synthetic peptide
  Seed: EECLINDPWVLLNAS
EECIINNPVVLYNAS

SEQ ID NO: 255540 - protein, 15 aa, Artificial Sequence
  Description of Artificial Sequence: Synthetic peptide
  Seed: EECLINDPWVLLNAS
EECIINNPWVLINAS

SEQ ID NO: 255541 - protein, 15 aa, Artificial Sequence
  Description of Artificial Sequence: Synthetic peptide
  Seed: EECLINDPWVLLNAS
EECIINNPWVLLNAS

SEQ ID NO: 255542 - protein, 15 aa, Artificial Sequence
  Description of Artificial Sequence: Synthetic peptide
  Seed: EECLINDPWVLLNAS
EECIINNPWVLVNAS

SEQ ID NO: 255543 - protein, 15 aa, Artificial Sequence
  Description of Artificial Sequence: Synthetic peptide
  Seed: EECLINDPWVLLNAS
EECIINNPYVLANAS

SEQ ID NO: 255544 - protein, 15 aa, Artificial Sequence
  Description of Artificial Sequence: Synthetic peptide
  Seed: EECLINDPWVLLNAS
EECIINNPYVLFNAS

SEQ ID NO: 255545 - protein, 15 aa, Artificial Sequence
  Description of Artificial Sequence: Synthetic peptide
  Seed: EECLINDPWVLLNAS
EECIINNPYVLINAS

SEQ ID NO: 255546 - protein, 15 aa, Artificial Sequence
  Description of Artificial Sequence: Synthetic peptide
  Seed: EECLINDPWVLLNAS
EECIINNPYVLLNAS

SEQ ID NO: 255547 - protein, 15 aa, Artificial Sequence
  Description of Artificial Sequence: Synthetic peptide
  Seed: EECLINDPWVLLNAS
EECIINNPYVLMNAS

SEQ ID NO: 255548 - protein, 15 aa, Artificial Sequence
  Description of Artificial Sequence: Synthetic peptide
  Seed: EECLINDPWVLLNAS
EECIINNPYVLSNAS

SEQ ID NO: 255549 - protein, 15 aa, Artificial Sequence
  Description of Artificial Sequence: Synthetic peptide
  Seed: EECLINDPWVLLNAS
EECIINNPYVLVNAS

SEQ ID NO: 255550 - protein, 15 aa, Artificial Sequence
  Description of Artificial Sequence: Synthetic peptide
  Seed: EECLINDPWVLLNAS
EECIINNPYVLYNAS

SEQ ID NO: 255551 - protein, 15 aa, Artificial Sequence
  Description of Artificial Sequence: Synthetic peptide
  Seed: EECLINDPWVLLNAS
EECIINQPAVLANAS

SEQ ID NO: 255552 - protein, 15 aa, Artificial Sequence
  Description of Artificial Sequence: Synthetic peptide
  Seed: EECLINDPWVLLNAS
EECIINQPAVLFNAS

SEQ ID NO: 255553 - protein, 15 aa, Artificial Sequence
  Description of Artificial Sequence: Synthetic peptide
  Seed: EECLINDPWVLLNAS
EECIINQPAVLGNAS

SEQ ID NO: 255554 - protein, 15 aa, Artificial Sequence
  Description of Artificial Sequence: Synthetic peptide
  Seed: EECLINDPWVLLNAS
EECIINQPAVLINAS

SEQ ID NO: 255555 - protein, 15 aa, Artificial Sequence
  Description of Artificial Sequence: Synthetic peptide
  Seed: EECLINDPWVLLNAS
EECIINQPAVLLNAS

SEQ ID NO: 255556 - protein, 15 aa, Artificial Sequence
  Description of Artificial Sequence: Synthetic peptide
  Seed: EECLINDPWVLLNAS
EECIINQPAVLMNAS

SEQ ID NO: 255557 - protein, 15 aa, Artificial Sequence
  Description of Artificial Sequence: Synthetic peptide
  Seed: EECLINDPWVLLNAS
EECIINQPAVLSNAS

SEQ ID NO: 255558 - protein, 15 aa, Artificial Sequence
  Description of Artificial Sequence: Synthetic peptide
  Seed: EECLINDPWVLLNAS
EECIINQPAVLTNAS

SEQ ID NO: 255559 - protein, 15 aa, Artificial Sequence
  Description of Artificial Sequence: Synthetic peptide
  Seed: EECLINDPWVLLNAS
EECIINQPAVLVNAS

SEQ ID NO: 255560 - protein, 15 aa, Artificial Sequence
  Description of Artificial Sequence: Synthetic peptide
  Seed: EECLINDPWVLLNAS
EECIINQPAVLYNAS

SEQ ID NO: 255561 - protein, 15 aa, Artificial Sequence
  Description of Artificial Sequence: Synthetic peptide
  Seed: EECLINDPWVLLNAS
EECIINQPFVLINAS

SEQ ID NO: 255562 - protein, 15 aa, Artificial Sequence
  Description of Artificial Sequence: Synthetic peptide
  Seed: EECLINDPWVLLNAS
EECIINQPFVLLNAS

SEQ ID NO: 255563 - protein, 15 aa, Artificial Sequence
  Description of Artificial Sequence: Synthetic peptide
  Seed: EECLINDPWVLLNAS
EECIINQPFVLVNAS

SEQ ID NO: 255564 - protein, 15 aa, Artificial Sequence
  Description of Artificial Sequence: Synthetic peptide
  Seed: EECLINDPWVLLNAS
EECIINQPGVLANAS

SEQ ID NO: 255565 - protein, 15 aa, Artificial Sequence
  Description of Artificial Sequence: Synthetic peptide
  Seed: EECLINDPWVLLNAS
EECIINQPGVLINAS

SEQ ID NO: 255566 - protein, 15 aa, Artificial Sequence
  Description of Artificial Sequence: Synthetic peptide
  Seed: EECLINDPWVLLNAS
EECIINQPGVLLNAS

SEQ ID NO: 255567 - protein, 15 aa, Artificial Sequence
  Description of Artificial Sequence: Synthetic peptide
  Seed: EECLINDPWVLLNAS
EECIINQPGVLMNAS

SEQ ID NO: 255568 - protein, 15 aa, Artificial Sequence
  Description of Artificial Sequence: Synthetic peptide
  Seed: EECLINDPWVLLNAS
EECIINQPGVLSNAS

SEQ ID NO: 255569 - protein, 15 aa, Artificial Sequence
  Description of Artificial Sequence: Synthetic peptide
  Seed: EECLINDPWVLLNAS
EECIINQPGVLTNAS

SEQ ID NO: 255570 - protein, 15 aa, Artificial Sequence
  Description of Artificial Sequence: Synthetic peptide
  Seed: EECLINDPWVLLNAS
EECIINQPGVLVNAS

SEQ ID NO: 255571 - protein, 15 aa, Artificial Sequence
  Description of Artificial Sequence: Synthetic peptide
  Seed: EECLINDPWVLLNAS
EECIINQPIVLINAS

SEQ ID NO: 255572 - protein, 15 aa, Artificial Sequence
  Description of Artificial Sequence: Synthetic peptide
  Seed: EECLINDPWVLLNAS
EECIINQPIVLVNAS

SEQ ID NO: 255573 - protein, 15 aa, Artificial Sequence
  Description of Artificial Sequence: Synthetic peptide
  Seed: EECLINDPWVLLNAS
EECIINQPNVLANAS

SEQ ID NO: 255574 - protein, 15 aa, Artificial Sequence
  Description of Artificial Sequence: Synthetic peptide
  Seed: EECLINDPWVLLNAS
EECIINQPNVLFNAS

SEQ ID NO: 255575 - protein, 15 aa, Artificial Sequence
  Description of Artificial Sequence: Synthetic peptide
  Seed: EECLINDPWVLLNAS
EECIINQPNVLINAS

SEQ ID NO: 255576 - protein, 15 aa, Artificial Sequence
  Description of Artificial Sequence: Synthetic peptide
  Seed: EECLINDPWVLLNAS
EECIINQPNVLLNAS

SEQ ID NO: 255577 - protein, 15 aa, Artificial Sequence
  Description of Artificial Sequence: Synthetic peptide
  Seed: EECLINDPWVLLNAS
EECIINQPNVLMNAS

SEQ ID NO: 255578 - protein, 15 aa, Artificial Sequence
  Description of Artificial Sequence: Synthetic peptide
  Seed: EECLINDPWVLLNAS
EECIINQPNVLVNAS

SEQ ID NO: 255579 - protein, 15 aa, Artificial Sequence
  Description of Artificial Sequence: Synthetic peptide
  Seed: EECLINDPWVLLNAS
EECIINQPNVLYNAS

SEQ ID NO: 255580 - protein, 15 aa, Artificial Sequence
  Description of Artificial Sequence: Synthetic peptide
  Seed: EECLINDPWVLLNAS
EECIINQPPVLANAS

SEQ ID NO: 255581 - protein, 15 aa, Artificial Sequence
  Description of Artificial Sequence: Synthetic peptide
  Seed: EECLINDPWVLLNAS
EECIINQPPVLINAS

SEQ ID NO: 255582 - protein, 15 aa, Artificial Sequence
  Description of Artificial Sequence: Synthetic peptide
  Seed: EECLINDPWVLLNAS
EECIINQPPVLLNAS

SEQ ID NO: 255583 - protein, 15 aa, Artificial Sequence
  Description of Artificial Sequence: Synthetic peptide
  Seed: EECLINDPWVLLNAS
EECIINQPPVLVNAS

SEQ ID NO: 255584 - protein, 15 aa, Artificial Sequence
  Description of Artificial Sequence: Synthetic peptide
  Seed: EECLINDPWVLLNAS
EECIINQPSVLANAS

SEQ ID NO: 255585 - protein, 15 aa, Artificial Sequence
  Description of Artificial Sequence: Synthetic peptide
  Seed: EECLINDPWVLLNAS
EECIINQPSVLINAS

SEQ ID NO: 255586 - protein, 15 aa, Artificial Sequence
  Description of Artificial Sequence: Synthetic peptide
  Seed: EECLINDPWVLLNAS
EECIINQPSVLLNAS

SEQ ID NO: 255587 - protein, 15 aa, Artificial Sequence
  Description of Artificial Sequence: Synthetic peptide
  Seed: EECLINDPWVLLNAS
EECIINQPSVLMNAS

SEQ ID NO: 255588 - protein, 15 aa, Artificial Sequence
  Description of Artificial Sequence: Synthetic peptide
  Seed: EECLINDPWVLLNAS
EECIINQPSVLSNAS

SEQ ID NO: 255589 - protein, 15 aa, Artificial Sequence
  Description of Artificial Sequence: Synthetic peptide
  Seed: EECLINDPWVLLNAS
EECIINQPSVLTNAS

SEQ ID NO: 255590 - protein, 15 aa, Artificial Sequence
  Description of Artificial Sequence: Synthetic peptide
  Seed: EECLINDPWVLLNAS
EECIINQPSVLVNAS

SEQ ID NO: 255591 - protein, 15 aa, Artificial Sequence
  Description of Artificial Sequence: Synthetic peptide
  Seed: EECLINDPWVLLNAS
EECIINQPTVLANAS

SEQ ID NO: 255592 - protein, 15 aa, Artificial Sequence
  Description of Artificial Sequence: Synthetic peptide
  Seed: EECLINDPWVLLNAS
EECIINQPTVLINAS

SEQ ID NO: 255593 - protein, 15 aa, Artificial Sequence
  Description of Artificial Sequence: Synthetic peptide
  Seed: EECLINDPWVLLNAS
EECIINQPTVLLNAS

SEQ ID NO: 255594 - protein, 15 aa, Artificial Sequence
  Description of Artificial Sequence: Synthetic peptide
  Seed: EECLINDPWVLLNAS
EECIINQPTVLVNAS

SEQ ID NO: 255595 - protein, 15 aa, Artificial Sequence
  Description of Artificial Sequence: Synthetic peptide
  Seed: EECLINDPWVLLNAS
EECIINQPVVLINAS

SEQ ID NO: 255596 - protein, 15 aa, Artificial Sequence
  Description of Artificial Sequence: Synthetic peptide
  Seed: EECLINDPWVLLNAS
EECIINQPVVLVNAS

SEQ ID NO: 255597 - protein, 15 aa, Artificial Sequence
  Description of Artificial Sequence: Synthetic peptide
  Seed: EECLINDPWVLLNAS
EECIINRPAVLANAS

SEQ ID NO: 255598 - protein, 15 aa, Artificial Sequence
  Description of Artificial Sequence: Synthetic peptide
  Seed: EECLINDPWVLLNAS
EECIINRPAVLFNAS

SEQ ID NO: 255599 - protein, 15 aa, Artificial Sequence
  Description of Artificial Sequence: Synthetic peptide
  Seed: EECLINDPWVLLNAS
EECIINRPAVLINAS

SEQ ID NO: 255600 - protein, 15 aa, Artificial Sequence
  Description of Artificial Sequence: Synthetic peptide
  Seed: EECLINDPWVLLNAS
EECIINRPAVLKNAS

SEQ ID NO: 255601 - protein, 15 aa, Artificial Sequence
  Description of Artificial Sequence: Synthetic peptide
  Seed: EECLINDPWVLLNAS
EECIINRPAVLLNAS

SEQ ID NO: 255602 - protein, 15 aa, Artificial Sequence
  Description of Artificial Sequence: Synthetic peptide
  Seed: EECLINDPWVLLNAS
EECIINRPAVLMNAS

SEQ ID NO: 255603 - protein, 15 aa, Artificial Sequence
  Description of Artificial Sequence: Synthetic peptide
  Seed: EECLINDPWVLLNAS
EECIINRPAVLRNAS

SEQ ID NO: 255604 - protein, 15 aa, Artificial Sequence
  Description of Artificial Sequence: Synthetic peptide
  Seed: EECLINDPWVLLNAS
EECIINRPAVLVNAS

SEQ ID NO: 255605 - protein, 15 aa, Artificial Sequence
  Description of Artificial Sequence: Synthetic peptide
  Seed: EECLINDPWVLLNAS
EECIINRPAVLYNAS

SEQ ID NO: 255606 - protein, 15 aa, Artificial Sequence
  Description of Artificial Sequence: Synthetic peptide
  Seed: EECLINDPWVLLNAS
EECIINRPIVLFNAS

SEQ ID NO: 255607 - protein, 15 aa, Artificial Sequence
  Description of Artificial Sequence: Synthetic peptide
  Seed: EECLINDPWVLLNAS
EECIINRPIVLINAS

SEQ ID NO: 255608 - protein, 15 aa, Artificial Sequence
  Description of Artificial Sequence: Synthetic peptide
  Seed: EECLINDPWVLLNAS
EECIINRPIVLLNAS

SEQ ID NO: 255609 - protein, 15 aa, Artificial Sequence
  Description of Artificial Sequence: Synthetic peptide
  Seed: EECLINDPWVLLNAS
EECIINRPIVLRNAS

SEQ ID NO: 255610 - protein, 15 aa, Artificial Sequence
  Description of Artificial Sequence: Synthetic peptide
  Seed: EECLINDPWVLLNAS
EECIINRPIVLVNAS

SEQ ID NO: 255611 - protein, 15 aa, Artificial Sequence
  Description of Artificial Sequence: Synthetic peptide
  Seed: EECLINDPWVLLNAS
EECIINRPIVLYNAS

SEQ ID NO: 255612 - protein, 15 aa, Artificial Sequence
  Description of Artificial Sequence: Synthetic peptide
  Seed: EECLINDPWVLLNAS
EECIINRPMVLVNAS

SEQ ID NO: 255613 - protein, 15 aa, Artificial Sequence
  Description of Artificial Sequence: Synthetic peptide
  Seed: EECLINDPWVLLNAS
EECIINRPNVLANAS

SEQ ID NO: 255614 - protein, 15 aa, Artificial Sequence
  Description of Artificial Sequence: Synthetic peptide
  Seed: EECLINDPWVLLNAS
EECIINRPNVLFNAS

SEQ ID NO: 255615 - protein, 15 aa, Artificial Sequence
  Description of Artificial Sequence: Synthetic peptide
  Seed: EECLINDPWVLLNAS
EECIINRPNVLINAS

SEQ ID NO: 255616 - protein, 15 aa, Artificial Sequence
  Description of Artificial Sequence: Synthetic peptide
  Seed: EECLINDPWVLLNAS
EECIINRPNVLLNAS

SEQ ID NO: 255617 - protein, 15 aa, Artificial Sequence
  Description of Artificial Sequence: Synthetic peptide
  Seed: EECLINDPWVLLNAS
EECIINRPNVLMNAS

SEQ ID NO: 255618 - protein, 15 aa, Artificial Sequence
  Description of Artificial Sequence: Synthetic peptide
  Seed: EECLINDPWVLLNAS
EECIINRPNVLRNAS

SEQ ID NO: 255619 - protein, 15 aa, Artificial Sequence
  Description of Artificial Sequence: Synthetic peptide
  Seed: EECLINDPWVLLNAS
EECIINRPNVLVNAS

SEQ ID NO: 255620 - protein, 15 aa, Artificial Sequence
  Description of Artificial Sequence: Synthetic peptide
  Seed: EECLINDPWVLLNAS
EECIINRPNVLYNAS

SEQ ID NO: 255621 - protein, 15 aa, Artificial Sequence
  Description of Artificial Sequence: Synthetic peptide
  Seed: EECLINDPWVLLNAS
EECIINRPSVLINAS

SEQ ID NO: 255622 - protein, 15 aa, Artificial Sequence
  Description of Artificial Sequence: Synthetic peptide
  Seed: EECLINDPWVLLNAS
EECIINRPSVLVNAS

SEQ ID NO: 255623 - protein, 15 aa, Artificial Sequence
  Description of Artificial Sequence: Synthetic peptide
  Seed: EECLINDPWVLLNAS
EECIINRPVVLANAS

SEQ ID NO: 255624 - protein, 15 aa, Artificial Sequence
  Description of Artificial Sequence: Synthetic peptide
  Seed: EECLINDPWVLLNAS
EECIINRPVVLFNAS

SEQ ID NO: 255625 - protein, 15 aa, Artificial Sequence
  Description of Artificial Sequence: Synthetic peptide
  Seed: EECLINDPWVLLNAS
EECIINRPVVLINAS

SEQ ID NO: 255626 - protein, 15 aa, Artificial Sequence
  Description of Artificial Sequence: Synthetic peptide
  Seed: EECLINDPWVLLNAS
EECIINRPVVLLNAS

SEQ ID NO: 255627 - protein, 15 aa, Artificial Sequence
  Description of Artificial Sequence: Synthetic peptide
  Seed: EECLINDPWVLLNAS
EECIINRPVVLMNAS

SEQ ID NO: 255628 - protein, 15 aa, Artificial Sequence
  Description of Artificial Sequence: Synthetic peptide
  Seed: EECLINDPWVLLNAS
EECIINRPVVLRNAS

SEQ ID NO: 255629 - protein, 15 aa, Artificial Sequence
  Description of Artificial Sequence: Synthetic peptide
  Seed: EECLINDPWVLLNAS
EECIINRPVVLVNAS

SEQ ID NO: 255630 - protein, 15 aa, Artificial Sequence
  Description of Artificial Sequence: Synthetic peptide
  Seed: EECLINDPWVLLNAS
EECIINRPVVLYNAS

SEQ ID NO: 255631 - protein, 15 aa, Artificial Sequence
  Description of Artificial Sequence: Synthetic peptide
  Seed: EECLINDPWVLLNAS
EECIINSPAVLANAS

SEQ ID NO: 255632 - protein, 15 aa, Artificial Sequence
  Description of Artificial Sequence: Synthetic peptide
  Seed: EECLINDPWVLLNAS
EECIINSPAVLFNAS

SEQ ID NO: 255633 - protein, 15 aa, Artificial Sequence
  Description of Artificial Sequence: Synthetic peptide
  Seed: EECLINDPWVLLNAS
EECIINSPAVLINAS

SEQ ID NO: 255634 - protein, 15 aa, Artificial Sequence
  Description of Artificial Sequence: Synthetic peptide
  Seed: EECLINDPWVLLNAS
EECIINSPAVLLNAS

SEQ ID NO: 255635 - protein, 15 aa, Artificial Sequence
  Description of Artificial Sequence: Synthetic peptide
  Seed: EECLINDPWVLLNAS
EECIINSPAVLMNAS

SEQ ID NO: 255636 - protein, 15 aa, Artificial Sequence
  Description of Artificial Sequence: Synthetic peptide
  Seed: EECLINDPWVLLNAS
EECIINSPAVLRNAS

SEQ ID NO: 255637 - protein, 15 aa, Artificial Sequence
  Description of Artificial Sequence: Synthetic peptide
  Seed: EECLINDPWVLLNAS
EECIINSPAVLSNAS

SEQ ID NO: 255638 - protein, 15 aa, Artificial Sequence
  Description of Artificial Sequence: Synthetic peptide
  Seed: EECLINDPWVLLNAS
EECIINSPAVLTNAS

SEQ ID NO: 255639 - protein, 15 aa, Artificial Sequence
  Description of Artificial Sequence: Synthetic peptide
  Seed: EECLINDPWVLLNAS
EECIINSPAVLVNAS

SEQ ID NO: 255640 - protein, 15 aa, Artificial Sequence
  Description of Artificial Sequence: Synthetic peptide
  Seed: EECLINDPWVLLNAS
EECIINSPAVLWNAS

SEQ ID NO: 255641 - protein, 15 aa, Artificial Sequence
  Description of Artificial Sequence: Synthetic peptide
  Seed: EECLINDPWVLLNAS
EECIINSPAVLYNAS

SEQ ID NO: 255642 - protein, 15 aa, Artificial Sequence
  Description of Artificial Sequence: Synthetic peptide
  Seed: EECLINDPWVLLNAS
EECIINSPFVLFNAS

SEQ ID NO: 255643 - protein, 15 aa, Artificial Sequence
  Description of Artificial Sequence: Synthetic peptide
  Seed: EECLINDPWVLLNAS
EECIINSPFVLINAS

SEQ ID NO: 255644 - protein, 15 aa, Artificial Sequence
  Description of Artificial Sequence: Synthetic peptide
  Seed: EECLINDPWVLLNAS
EECIINSPFVLLNAS

SEQ ID NO: 255645 - protein, 15 aa, Artificial Sequence
  Description of Artificial Sequence: Synthetic peptide
  Seed: EECLINDPWVLLNAS
EECIINSPFVLMNAS

SEQ ID NO: 255646 - protein, 15 aa, Artificial Sequence
  Description of Artificial Sequence: Synthetic peptide
  Seed: EECLINDPWVLLNAS
EECIINSPFVLVNAS

SEQ ID NO: 255647 - protein, 15 aa, Artificial Sequence
  Description of Artificial Sequence: Synthetic peptide
  Seed: EECLINDPWVLLNAS
EECIINSPGVLANAS

SEQ ID NO: 255648 - protein, 15 aa, Artificial Sequence
  Description of Artificial Sequence: Synthetic peptide
  Seed: EECLINDPWVLLNAS
EECIINSPGVLFNAS

SEQ ID NO: 255649 - protein, 15 aa, Artificial Sequence
  Description of Artificial Sequence: Synthetic peptide
  Seed: EECLINDPWVLLNAS
EECIINSPGVLINAS

SEQ ID NO: 255650 - protein, 15 aa, Artificial Sequence
  Description of Artificial Sequence: Synthetic peptide
  Seed: EECLINDPWVLLNAS
EECIINSPGVLLNAS

SEQ ID NO: 255651 - protein, 15 aa, Artificial Sequence
  Description of Artificial Sequence: Synthetic peptide
  Seed: EECLINDPWVLLNAS
EECIINSPGVLMNAS

SEQ ID NO: 255652 - protein, 15 aa, Artificial Sequence
  Description of Artificial Sequence: Synthetic peptide
  Seed: EECLINDPWVLLNAS
EECIINSPGVLVNAS

SEQ ID NO: 255653 - protein, 15 aa, Artificial Sequence
  Description of Artificial Sequence: Synthetic peptide
  Seed: EECLINDPWVLLNAS
EECIINSPGVLYNAS

SEQ ID NO: 255654 - protein, 15 aa, Artificial Sequence
  Description of Artificial Sequence: Synthetic peptide
  Seed: EECLINDPWVLLNAS
EECIINSPHVLINAS

SEQ ID NO: 255655 - protein, 15 aa, Artificial Sequence
  Description of Artificial Sequence: Synthetic peptide
  Seed: EECLINDPWVLLNAS
EECIINSPHVLVNAS

SEQ ID NO: 255656 - protein, 15 aa, Artificial Sequence
  Description of Artificial Sequence: Synthetic peptide
  Seed: EECLINDPWVLLNAS
EECIINSPIVLANAS

SEQ ID NO: 255657 - protein, 15 aa, Artificial Sequence
  Description of Artificial Sequence: Synthetic peptide
  Seed: EECLINDPWVLLNAS
EECIINSPIVLFNAS

SEQ ID NO: 255658 - protein, 15 aa, Artificial Sequence
  Description of Artificial Sequence: Synthetic peptide
  Seed: EECLINDPWVLLNAS
EECIINSPIVLINAS

SEQ ID NO: 255659 - protein, 15 aa, Artificial Sequence
  Description of Artificial Sequence: Synthetic peptide
  Seed: EECLINDPWVLLNAS
EECIINSPIVLLNAS

SEQ ID NO: 255660 - protein, 15 aa, Artificial Sequence
  Description of Artificial Sequence: Synthetic peptide
  Seed: EECLINDPWVLLNAS
EECIINSPIVLMNAS

SEQ ID NO: 255661 - protein, 15 aa, Artificial Sequence
  Description of Artificial Sequence: Synthetic peptide
  Seed: EECLINDPWVLLNAS
EECIINSPIVLVNAS

SEQ ID NO: 255662 - protein, 15 aa, Artificial Sequence
  Description of Artificial Sequence: Synthetic peptide
  Seed: EECLINDPWVLLNAS
EECIINSPIVLYNAS

SEQ ID NO: 255663 - protein, 15 aa, Artificial Sequence
  Description of Artificial Sequence: Synthetic peptide
  Seed: EECLINDPWVLLNAS
EECIINSPLVLINAS

SEQ ID NO: 255664 - protein, 15 aa, Artificial Sequence
  Description of Artificial Sequence: Synthetic peptide
  Seed: EECLINDPWVLLNAS
EECIINSPLVLVNAS

SEQ ID NO: 255665 - protein, 15 aa, Artificial Sequence
  Description of Artificial Sequence: Synthetic peptide
  Seed: EECLINDPWVLLNAS
EECIINSPMVLFNAS

SEQ ID NO: 255666 - protein, 15 aa, Artificial Sequence
  Description of Artificial Sequence: Synthetic peptide
  Seed: EECLINDPWVLLNAS
EECIINSPMVLINAS

SEQ ID NO: 255667 - protein, 15 aa, Artificial Sequence
  Description of Artificial Sequence: Synthetic peptide
  Seed: EECLINDPWVLLNAS
EECIINSPMVLLNAS

SEQ ID NO: 255668 - protein, 15 aa, Artificial Sequence
  Description of Artificial Sequence: Synthetic peptide
  Seed: EECLINDPWVLLNAS
EECIINSPMVLVNAS

SEQ ID NO: 255669 - protein, 15 aa, Artificial Sequence
  Description of Artificial Sequence: Synthetic peptide
  Seed: EECLINDPWVLLNAS
EECIINSPMVLYNAS

SEQ ID NO: 255670 - protein, 15 aa, Artificial Sequence
  Description of Artificial Sequence: Synthetic peptide
  Seed: EECLINDPWVLLNAS
EECIINSPNVLANAS

SEQ ID NO: 255671 - protein, 15 aa, Artificial Sequence
  Description of Artificial Sequence: Synthetic peptide
  Seed: EECLINDPWVLLNAS
EECIINSPNVLFNAS

SEQ ID NO: 255672 - protein, 15 aa, Artificial Sequence
  Description of Artificial Sequence: Synthetic peptide
  Seed: EECLINDPWVLLNAS
EECIINSPNVLINAS

SEQ ID NO: 255673 - protein, 15 aa, Artificial Sequence
  Description of Artificial Sequence: Synthetic peptide
  Seed: EECLINDPWVLLNAS
EECIINSPNVLLNAS

SEQ ID NO: 255674 - protein, 15 aa, Artificial Sequence
  Description of Artificial Sequence: Synthetic peptide
  Seed: EECLINDPWVLLNAS
EECIINSPNVLMNAS

SEQ ID NO: 255675 - protein, 15 aa, Artificial Sequence
  Description of Artificial Sequence: Synthetic peptide
  Seed: EECLINDPWVLLNAS
EECIINSPNVLSNAS

SEQ ID NO: 255676 - protein, 15 aa, Artificial Sequence
  Description of Artificial Sequence: Synthetic peptide
  Seed: EECLINDPWVLLNAS
EECIINSPNVLTNAS

SEQ ID NO: 255677 - protein, 15 aa, Artificial Sequence
  Description of Artificial Sequence: Synthetic peptide
  Seed: EECLINDPWVLLNAS
EECIINSPNVLVNAS

SEQ ID NO: 255678 - protein, 15 aa, Artificial Sequence
  Description of Artificial Sequence: Synthetic peptide
  Seed: EECLINDPWVLLNAS
EECIINSPNVLWNAS

SEQ ID NO: 255679 - protein, 15 aa, Artificial Sequence
  Description of Artificial Sequence: Synthetic peptide
  Seed: EECLINDPWVLLNAS
EECIINSPNVLYNAS

SEQ ID NO: 255680 - protein, 15 aa, Artificial Sequence
  Description of Artificial Sequence: Synthetic peptide
  Seed: EECLINDPWVLLNAS
EECIINSPPVLANAS

SEQ ID NO: 255681 - protein, 15 aa, Artificial Sequence
  Description of Artificial Sequence: Synthetic peptide
  Seed: EECLINDPWVLLNAS
EECIINSPPVLFNAS

SEQ ID NO: 255682 - protein, 15 aa, Artificial Sequence
  Description of Artificial Sequence: Synthetic peptide
  Seed: EECLINDPWVLLNAS
EECIINSPPVLINAS

SEQ ID NO: 255683 - protein, 15 aa, Artificial Sequence
  Description of Artificial Sequence: Synthetic peptide
  Seed: EECLINDPWVLLNAS
EECIINSPPVLLNAS

SEQ ID NO: 255684 - protein, 15 aa, Artificial Sequence
  Description of Artificial Sequence: Synthetic peptide
  Seed: EECLINDPWVLLNAS
EECIINSPPVLMNAS

SEQ ID NO: 255685 - protein, 15 aa, Artificial Sequence
  Description of Artificial Sequence: Synthetic peptide
  Seed: EECLINDPWVLLNAS
EECIINSPPVLVNAS

SEQ ID NO: 255686 - protein, 15 aa, Artificial Sequence
  Description of Artificial Sequence: Synthetic peptide
  Seed: EECLINDPWVLLNAS
EECIINSPPVLYNAS

SEQ ID NO: 255687 - protein, 15 aa, Artificial Sequence
  Description of Artificial Sequence: Synthetic peptide
  Seed: EECLINDPWVLLNAS
EECIINSPSVLANAS

SEQ ID NO: 255688 - protein, 15 aa, Artificial Sequence
  Description of Artificial Sequence: Synthetic peptide
  Seed: EECLINDPWVLLNAS
EECIINSPSVLFNAS

SEQ ID NO: 255689 - protein, 15 aa, Artificial Sequence
  Description of Artificial Sequence: Synthetic peptide
  Seed: EECLINDPWVLLNAS
EECIINSPSVLINAS

SEQ ID NO: 255690 - protein, 15 aa, Artificial Sequence
  Description of Artificial Sequence: Synthetic peptide
  Seed: EECLINDPWVLLNAS
EECIINSPSVLLNAS

SEQ ID NO: 255691 - protein, 15 aa, Artificial Sequence
  Description of Artificial Sequence: Synthetic peptide
  Seed: EECLINDPWVLLNAS
EECIINSPSVLMNAS

SEQ ID NO: 255692 - protein, 15 aa, Artificial Sequence
  Description of Artificial Sequence: Synthetic peptide
  Seed: EECLINDPWVLLNAS
EECIINSPSVLVNAS

SEQ ID NO: 255693 - protein, 15 aa, Artificial Sequence
  Description of Artificial Sequence: Synthetic peptide
  Seed: EECLINDPWVLLNAS
EECIINSPSVLYNAS

SEQ ID NO: 255694 - protein, 15 aa, Artificial Sequence
  Description of Artificial Sequence: Synthetic peptide
  Seed: EECLINDPWVLLNAS
EECIINSPTVLFNAS

SEQ ID NO: 255695 - protein, 15 aa, Artificial Sequence
  Description of Artificial Sequence: Synthetic peptide
  Seed: EECLINDPWVLLNAS
EECIINSPTVLINAS

SEQ ID NO: 255696 - protein, 15 aa, Artificial Sequence
  Description of Artificial Sequence: Synthetic peptide
  Seed: EECLINDPWVLLNAS
EECIINSPTVLLNAS

SEQ ID NO: 255697 - protein, 15 aa, Artificial Sequence
  Description of Artificial Sequence: Synthetic peptide
  Seed: EECLINDPWVLLNAS
EECIINSPTVLMNAS

SEQ ID NO: 255698 - protein, 15 aa, Artificial Sequence
  Description of Artificial Sequence: Synthetic peptide
  Seed: EECLINDPWVLLNAS
EECIINSPTVLVNAS

SEQ ID NO: 255699 - protein, 15 aa, Artificial Sequence
  Description of Artificial Sequence: Synthetic peptide
  Seed: EECLINDPWVLLNAS
EECIINSPTVLYNAS

SEQ ID NO: 255700 - protein, 15 aa, Artificial Sequence
  Description of Artificial Sequence: Synthetic peptide
  Seed: EECLINDPWVLLNAS
EECIINSPVVLANAS

SEQ ID NO: 255701 - protein, 15 aa, Artificial Sequence
  Description of Artificial Sequence: Synthetic peptide
  Seed: EECLINDPWVLLNAS
EECIINSPVVLFNAS

SEQ ID NO: 255702 - protein, 15 aa, Artificial Sequence
  Description of Artificial Sequence: Synthetic peptide
  Seed: EECLINDPWVLLNAS
EECIINSPVVLINAS

SEQ ID NO: 255703 - protein, 15 aa, Artificial Sequence
  Description of Artificial Sequence: Synthetic peptide
  Seed: EECLINDPWVLLNAS
EECIINSPVVLLNAS

SEQ ID NO: 255704 - protein, 15 aa, Artificial Sequence
  Description of Artificial Sequence: Synthetic peptide
  Seed: EECLINDPWVLLNAS
EECIINSPVVLMNAS

SEQ ID NO: 255705 - protein, 15 aa, Artificial Sequence
  Description of Artificial Sequence: Synthetic peptide
  Seed: EECLINDPWVLLNAS
EECIINSPVVLVNAS

SEQ ID NO: 255706 - protein, 15 aa, Artificial Sequence
  Description of Artificial Sequence: Synthetic peptide
  Seed: EECLINDPWVLLNAS
EECIINSPVVLYNAS

SEQ ID NO: 255707 - protein, 15 aa, Artificial Sequence
  Description of Artificial Sequence: Synthetic peptide
  Seed: EECLINDPWVLLNAS
EECIINTPAVLANAS

SEQ ID NO: 255708 - protein, 15 aa, Artificial Sequence
  Description of Artificial Sequence: Synthetic peptide
  Seed: EECLINDPWVLLNAS
EECIINTPAVLFNAS

SEQ ID NO: 255709 - protein, 15 aa, Artificial Sequence
  Description of Artificial Sequence: Synthetic peptide
  Seed: EECLINDPWVLLNAS
EECIINTPAVLINAS

SEQ ID NO: 255710 - protein, 15 aa, Artificial Sequence
  Description of Artificial Sequence: Synthetic peptide
  Seed: EECLINDPWVLLNAS
EECIINTPAVLLNAS

SEQ ID NO: 255711 - protein, 15 aa, Artificial Sequence
  Description of Artificial Sequence: Synthetic peptide
  Seed: EECLINDPWVLLNAS
EECIINTPAVLMNAS

SEQ ID NO: 255712 - protein, 15 aa, Artificial Sequence
  Description of Artificial Sequence: Synthetic peptide
  Seed: EECLINDPWVLLNAS
EECIINTPAVLRNAS

SEQ ID NO: 255713 - protein, 15 aa, Artificial Sequence
  Description of Artificial Sequence: Synthetic peptide
  Seed: EECLINDPWVLLNAS
EECIINTPAVLSNAS

SEQ ID NO: 255714 - protein, 15 aa, Artificial Sequence
  Description of Artificial Sequence: Synthetic peptide
  Seed: EECLINDPWVLLNAS
EECIINTPAVLTNAS

SEQ ID NO: 255715 - protein, 15 aa, Artificial Sequence
  Description of Artificial Sequence: Synthetic peptide
  Seed: EECLINDPWVLLNAS
EECIINTPAVLVNAS

SEQ ID NO: 255716 - protein, 15 aa, Artificial Sequence
  Description of Artificial Sequence: Synthetic peptide
  Seed: EECLINDPWVLLNAS
EECIINTPAVLYNAS

SEQ ID NO: 255717 - protein, 15 aa, Artificial Sequence
  Description of Artificial Sequence: Synthetic peptide
  Seed: EECLINDPWVLLNAS
EECIINTPFVLANAS

SEQ ID NO: 255718 - protein, 15 aa, Artificial Sequence
  Description of Artificial Sequence: Synthetic peptide
  Seed: EECLINDPWVLLNAS
EECIINTPFVLFNAS

SEQ ID NO: 255719 - protein, 15 aa, Artificial Sequence
  Description of Artificial Sequence: Synthetic peptide
  Seed: EECLINDPWVLLNAS
EECIINTPFVLINAS

SEQ ID NO: 255720 - protein, 15 aa, Artificial Sequence
  Description of Artificial Sequence: Synthetic peptide
  Seed: EECLINDPWVLLNAS
EECIINTPFVLLNAS

SEQ ID NO: 255721 - protein, 15 aa, Artificial Sequence
  Description of Artificial Sequence: Synthetic peptide
  Seed: EECLINDPWVLLNAS
EECIINTPFVLMNAS

SEQ ID NO: 255722 - protein, 15 aa, Artificial Sequence
  Description of Artificial Sequence: Synthetic peptide
  Seed: EECLINDPWVLLNAS
EECIINTPFVLTNAS

SEQ ID NO: 255723 - protein, 15 aa, Artificial Sequence
  Description of Artificial Sequence: Synthetic peptide
  Seed: EECLINDPWVLLNAS
EECIINTPGVLANAS

SEQ ID NO: 255724 - protein, 15 aa, Artificial Sequence
  Description of Artificial Sequence: Synthetic peptide
  Seed: EECLINDPWVLLNAS
EECIINTPGVLFNAS

SEQ ID NO: 255725 - protein, 15 aa, Artificial Sequence
  Description of Artificial Sequence: Synthetic peptide
  Seed: EECLINDPWVLLNAS
EECIINTPGVLINAS

SEQ ID NO: 255726 - protein, 15 aa, Artificial Sequence
  Description of Artificial Sequence: Synthetic peptide
  Seed: EECLINDPWVLLNAS
EECIINTPGVLLNAS

SEQ ID NO: 255727 - protein, 15 aa, Artificial Sequence
  Description of Artificial Sequence: Synthetic peptide
  Seed: EECLINDPWVLLNAS
EECIINTPGVLVNAS

SEQ ID NO: 255728 - protein, 15 aa, Artificial Sequence
  Description of Artificial Sequence: Synthetic peptide
  Seed: EECLINDPWVLLNAS
EECIINTPIVLFNAS

SEQ ID NO: 255729 - protein, 15 aa, Artificial Sequence
  Description of Artificial Sequence: Synthetic peptide
  Seed: EECLINDPWVLLNAS
EECIINTPIVLINAS

SEQ ID NO: 255730 - protein, 15 aa, Artificial Sequence
  Description of Artificial Sequence: Synthetic peptide
  Seed: EECLINDPWVLLNAS
EECIINTPIVLLNAS

SEQ ID NO: 255731 - protein, 15 aa, Artificial Sequence
  Description of Artificial Sequence: Synthetic peptide
  Seed: EECLINDPWVLLNAS
EECIINTPIVLVNAS

SEQ ID NO: 255732 - protein, 15 aa, Artificial Sequence
  Description of Artificial Sequence: Synthetic peptide
  Seed: EECLINDPWVLLNAS
EECIINTPIVLYNAS

SEQ ID NO: 255733 - protein, 15 aa, Artificial Sequence
  Description of Artificial Sequence: Synthetic peptide
  Seed: EECLINDPWVLLNAS
EECIINTPMVLINAS

SEQ ID NO: 255734 - protein, 15 aa, Artificial Sequence
  Description of Artificial Sequence: Synthetic peptide
  Seed: EECLINDPWVLLNAS
EECIINTPMVLVNAS

SEQ ID NO: 255735 - protein, 15 aa, Artificial Sequence
  Description of Artificial Sequence: Synthetic peptide
  Seed: EECLINDPWVLLNAS
EECIINTPNVLANAS

SEQ ID NO: 255736 - protein, 15 aa, Artificial Sequence
  Description of Artificial Sequence: Synthetic peptide
  Seed: EECLINDPWVLLNAS
EECIINTPNVLFNAS

SEQ ID NO: 255737 - protein, 15 aa, Artificial Sequence
  Description of Artificial Sequence: Synthetic peptide
  Seed: EECLINDPWVLLNAS
EECIINTPNVLINAS

SEQ ID NO: 255738 - protein, 15 aa, Artificial Sequence
  Description of Artificial Sequence: Synthetic peptide
  Seed: EECLINDPWVLLNAS
EECIINTPNVLLNAS

SEQ ID NO: 255739 - protein, 15 aa, Artificial Sequence
  Description of Artificial Sequence: Synthetic peptide
  Seed: EECLINDPWVLLNAS
EECIINTPNVLMNAS

SEQ ID NO: 255740 - protein, 15 aa, Artificial Sequence
  Description of Artificial Sequence: Synthetic peptide
  Seed: EECLINDPWVLLNAS
EECIINTPNVLRNAS

SEQ ID NO: 255741 - protein, 15 aa, Artificial Sequence
  Description of Artificial Sequence: Synthetic peptide
  Seed: EECLINDPWVLLNAS
EECIINTPNVLSNAS

SEQ ID NO: 255742 - protein, 15 aa, Artificial Sequence
  Description of Artificial Sequence: Synthetic peptide
  Seed: EECLINDPWVLLNAS
EECIINTPNVLTNAS

SEQ ID NO: 255743 - protein, 15 aa, Artificial Sequence
  Description of Artificial Sequence: Synthetic peptide
  Seed: EECLINDPWVLLNAS
EECIINTPNVLVNAS

SEQ ID NO: 255744 - protein, 15 aa, Artificial Sequence
  Description of Artificial Sequence: Synthetic peptide
  Seed: EECLINDPWVLLNAS
EECIINTPNVLWNAS

SEQ ID NO: 255745 - protein, 15 aa, Artificial Sequence
  Description of Artificial Sequence: Synthetic peptide
  Seed: EECLINDPWVLLNAS
EECIINTPNVLYNAS

SEQ ID NO: 255746 - protein, 15 aa, Artificial Sequence
  Description of Artificial Sequence: Synthetic peptide
  Seed: EECLINDPWVLLNAS
EECIINTPPVLFNAS

SEQ ID NO: 255747 - protein, 15 aa, Artificial Sequence
  Description of Artificial Sequence: Synthetic peptide
  Seed: EECLINDPWVLLNAS
EECIINTPPVLINAS

SEQ ID NO: 255748 - protein, 15 aa, Artificial Sequence
  Description of Artificial Sequence: Synthetic peptide
  Seed: EECLINDPWVLLNAS
EECIINTPPVLLNAS

SEQ ID NO: 255749 - protein, 15 aa, Artificial Sequence
  Description of Artificial Sequence: Synthetic peptide
  Seed: EECLINDPWVLLNAS
EECIINTPPVLMNAS

SEQ ID NO: 255750 - protein, 15 aa, Artificial Sequence
  Description of Artificial Sequence: Synthetic peptide
  Seed: EECLINDPWVLLNAS
EECIINTPPVLVNAS

SEQ ID NO: 255751 - protein, 15 aa, Artificial Sequence
  Description of Artificial Sequence: Synthetic peptide
  Seed: EECLINDPWVLLNAS
EECIINTPPVLYNAS

SEQ ID NO: 255752 - protein, 15 aa, Artificial Sequence
  Description of Artificial Sequence: Synthetic peptide
  Seed: EECLINDPWVLLNAS
EECIINTPSVLANAS

SEQ ID NO: 255753 - protein, 15 aa, Artificial Sequence
  Description of Artificial Sequence: Synthetic peptide
  Seed: EECLINDPWVLLNAS
EECIINTPSVLFNAS

SEQ ID NO: 255754 - protein, 15 aa, Artificial Sequence
  Description of Artificial Sequence: Synthetic peptide
  Seed: EECLINDPWVLLNAS
EECIINTPSVLINAS

SEQ ID NO: 255755 - protein, 15 aa, Artificial Sequence
  Description of Artificial Sequence: Synthetic peptide
  Seed: EECLINDPWVLLNAS
EECIINTPSVLLNAS

SEQ ID NO: 255756 - protein, 15 aa, Artificial Sequence
  Description of Artificial Sequence: Synthetic peptide
  Seed: EECLINDPWVLLNAS
EECIINTPSVLMNAS

SEQ ID NO: 255757 - protein, 15 aa, Artificial Sequence
  Description of Artificial Sequence: Synthetic peptide
  Seed: EECLINDPWVLLNAS
EECIINTPSVLVNAS

SEQ ID NO: 255758 - protein, 15 aa, Artificial Sequence
  Description of Artificial Sequence: Synthetic peptide
  Seed: EECLINDPWVLLNAS
EECIINTPSVLYNAS

SEQ ID NO: 255759 - protein, 15 aa, Artificial Sequence
  Description of Artificial Sequence: Synthetic peptide
  Seed: EECLINDPWVLLNAS
EECIINTPTVLFNAS

SEQ ID NO: 255760 - protein, 15 aa, Artificial Sequence
  Description of Artificial Sequence: Synthetic peptide
  Seed: EECLINDPWVLLNAS
EECIINTPTVLINAS

SEQ ID NO: 255761 - protein, 15 aa, Artificial Sequence
  Description of Artificial Sequence: Synthetic peptide
  Seed: EECLINDPWVLLNAS
EECIINTPTVLLNAS

SEQ ID NO: 255762 - protein, 15 aa, Artificial Sequence
  Description of Artificial Sequence: Synthetic peptide
  Seed: EECLINDPWVLLNAS
EECIINTPTVLVNAS

SEQ ID NO: 255763 - protein, 15 aa, Artificial Sequence
  Description of Artificial Sequence: Synthetic peptide
  Seed: EECLINDPWVLLNAS
EECIINTPVVLANAS

SEQ ID NO: 255764 - protein, 15 aa, Artificial Sequence
  Description of Artificial Sequence: Synthetic peptide
  Seed: EECLINDPWVLLNAS
EECIINTPVVLFNAS

SEQ ID NO: 255765 - protein, 15 aa, Artificial Sequence
  Description of Artificial Sequence: Synthetic peptide
  Seed: EECLINDPWVLLNAS
EECIINTPVVLINAS

SEQ ID NO: 255766 - protein, 15 aa, Artificial Sequence
  Description of Artificial Sequence: Synthetic peptide
  Seed: EECLINDPWVLLNAS
EECIINTPVVLLNAS

SEQ ID NO: 255767 - protein, 15 aa, Artificial Sequence
  Description of Artificial Sequence: Synthetic peptide
  Seed: EECLINDPWVLLNAS
EECIINTPVVLMNAS

SEQ ID NO: 255768 - protein, 15 aa, Artificial Sequence
  Description of Artificial Sequence: Synthetic peptide
  Seed: EECLINDPWVLLNAS
EECIINTPVVLVNAS

SEQ ID NO: 255769 - protein, 15 aa, Artificial Sequence
  Description of Artificial Sequence: Synthetic peptide
  Seed: EECLINDPWVLLNAS
EECIINTPVVLYNAS

SEQ ID NO: 255770 - protein, 15 aa, Artificial Sequence
  Description of Artificial Sequence: Synthetic peptide
  Seed: EECLINDPWVLLNAS
EECIINTPYVLLNAS

SEQ ID NO: 255771 - protein, 15 aa, Artificial Sequence
  Description of Artificial Sequence: Synthetic peptide
  Seed: EECLINDPWVLLNAS
EECIINVPAVLANAS

SEQ ID NO: 255772 - protein, 15 aa, Artificial Sequence
  Description of Artificial Sequence: Synthetic peptide
  Seed: EECLINDPWVLLNAS
EECIINVPAVLFNAS

SEQ ID NO: 255773 - protein, 15 aa, Artificial Sequence
  Description of Artificial Sequence: Synthetic peptide
  Seed: EECLINDPWVLLNAS
EECIINVPAVLGNAS

SEQ ID NO: 255774 - protein, 15 aa, Artificial Sequence
  Description of Artificial Sequence: Synthetic peptide
  Seed: EECLINDPWVLLNAS
EECIINVPAVLINAS

SEQ ID NO: 255775 - protein, 15 aa, Artificial Sequence
  Description of Artificial Sequence: Synthetic peptide
  Seed: EECLINDPWVLLNAS
EECIINVPAVLLNAS

SEQ ID NO: 255776 - protein, 15 aa, Artificial Sequence
  Description of Artificial Sequence: Synthetic peptide
  Seed: EECLINDPWVLLNAS
EECIINVPAVLMNAS

SEQ ID NO: 255777 - protein, 15 aa, Artificial Sequence
  Description of Artificial Sequence: Synthetic peptide
  Seed: EECLINDPWVLLNAS
EECIINVPAVLSNAS

SEQ ID NO: 255778 - protein, 15 aa, Artificial Sequence
  Description of Artificial Sequence: Synthetic peptide
  Seed: EECLINDPWVLLNAS
EECIINVPAVLTNAS

SEQ ID NO: 255779 - protein, 15 aa, Artificial Sequence
  Description of Artificial Sequence: Synthetic peptide
  Seed: EECLINDPWVLLNAS
EECIINVPAVLVNAS

SEQ ID NO: 255780 - protein, 15 aa, Artificial Sequence
  Description of Artificial Sequence: Synthetic peptide
  Seed: EECLINDPWVLLNAS
EECIINVPAVLYNAS

SEQ ID NO: 255781 - protein, 15 aa, Artificial Sequence
  Description of Artificial Sequence: Synthetic peptide
  Seed: EECLINDPWVLLNAS
EECIINVPFVLLNAS

SEQ ID NO: 255782 - protein, 15 aa, Artificial Sequence
  Description of Artificial Sequence: Synthetic peptide
  Seed: EECLINDPWVLLNAS
EECIINVPFVLVNAS

SEQ ID NO: 255783 - protein, 15 aa, Artificial Sequence
  Description of Artificial Sequence: Synthetic peptide
  Seed: EECLINDPWVLLNAS
EECIINVPGVLANAS

SEQ ID NO: 255784 - protein, 15 aa, Artificial Sequence
  Description of Artificial Sequence: Synthetic peptide
  Seed: EECLINDPWVLLNAS
EECIINVPGVLGNAS

SEQ ID NO: 255785 - protein, 15 aa, Artificial Sequence
  Description of Artificial Sequence: Synthetic peptide
  Seed: EECLINDPWVLLNAS
EECIINVPGVLINAS

SEQ ID NO: 255786 - protein, 15 aa, Artificial Sequence
  Description of Artificial Sequence: Synthetic peptide
  Seed: EECLINDPWVLLNAS
EECIINVPGVLLNAS

SEQ ID NO: 255787 - protein, 15 aa, Artificial Sequence
  Description of Artificial Sequence: Synthetic peptide
  Seed: EECLINDPWVLLNAS
EECIINVPGVLMNAS

SEQ ID NO: 255788 - protein, 15 aa, Artificial Sequence
  Description of Artificial Sequence: Synthetic peptide
  Seed: EECLINDPWVLLNAS
EECIINVPGVLSNAS

SEQ ID NO: 255789 - protein, 15 aa, Artificial Sequence
  Description of Artificial Sequence: Synthetic peptide
  Seed: EECLINDPWVLLNAS
EECIINVPGVLTNAS

SEQ ID NO: 255790 - protein, 15 aa, Artificial Sequence
  Description of Artificial Sequence: Synthetic peptide
  Seed: EECLINDPWVLLNAS
EECIINVPGVLVNAS

SEQ ID NO: 255791 - protein, 15 aa, Artificial Sequence
  Description of Artificial Sequence: Synthetic peptide
  Seed: EECLINDPWVLLNAS
EECIINVPNVLANAS

SEQ ID NO: 255792 - protein, 15 aa, Artificial Sequence
  Description of Artificial Sequence: Synthetic peptide
  Seed: EECLINDPWVLLNAS
EECIINVPNVLFNAS

SEQ ID NO: 255793 - protein, 15 aa, Artificial Sequence
  Description of Artificial Sequence: Synthetic peptide
  Seed: EECLINDPWVLLNAS
EECIINVPNVLHNAS

SEQ ID NO: 255794 - protein, 15 aa, Artificial Sequence
  Description of Artificial Sequence: Synthetic peptide
  Seed: EECLINDPWVLLNAS
EECIINVPNVLINAS

SEQ ID NO: 255795 - protein, 15 aa, Artificial Sequence
  Description of Artificial Sequence: Synthetic peptide
  Seed: EECLINDPWVLLNAS
EECIINVPNVLKNAS

SEQ ID NO: 255796 - protein, 15 aa, Artificial Sequence
  Description of Artificial Sequence: Synthetic peptide
  Seed: EECLINDPWVLLNAS
EECIINVPNVLLNAS

SEQ ID NO: 255797 - protein, 15 aa, Artificial Sequence
  Description of Artificial Sequence: Synthetic peptide
  Seed: EECLINDPWVLLNAS
EECIINVPNVLMNAS

SEQ ID NO: 255798 - protein, 15 aa, Artificial Sequence
  Description of Artificial Sequence: Synthetic peptide
  Seed: EECLINDPWVLLNAS
EECIINVPNVLNNAS

SEQ ID NO: 255799 - protein, 15 aa, Artificial Sequence
  Description of Artificial Sequence: Synthetic peptide
  Seed: EECLINDPWVLLNAS
EECIINVPNVLRNAS

SEQ ID NO: 255800 - protein, 15 aa, Artificial Sequence
  Description of Artificial Sequence: Synthetic peptide
  Seed: EECLINDPWVLLNAS
EECIINVPNVLSNAS

SEQ ID NO: 255801 - protein, 15 aa, Artificial Sequence
  Description of Artificial Sequence: Synthetic peptide
  Seed: EECLINDPWVLLNAS
EECIINVPNVLTNAS

SEQ ID NO: 255802 - protein, 15 aa, Artificial Sequence
  Description of Artificial Sequence: Synthetic peptide
  Seed: EECLINDPWVLLNAS
EECIINVPNVLVNAS

SEQ ID NO: 255803 - protein, 15 aa, Artificial Sequence
  Description of Artificial Sequence: Synthetic peptide
  Seed: EECLINDPWVLLNAS
EECIINVPNVLWNAS

SEQ ID NO: 255804 - protein, 15 aa, Artificial Sequence
  Description of Artificial Sequence: Synthetic peptide
  Seed: EECLINDPWVLLNAS
EECIINVPNVLYNAS

SEQ ID NO: 255805 - protein, 15 aa, Artificial Sequence
  Description of Artificial Sequence: Synthetic peptide
  Seed: EECLINDPWVLLNAS
EECIINVPPVLANAS

SEQ ID NO: 255806 - protein, 15 aa, Artificial Sequence
  Description of Artificial Sequence: Synthetic peptide
  Seed: EECLINDPWVLLNAS
EECIINVPPVLFNAS

SEQ ID NO: 255807 - protein, 15 aa, Artificial Sequence
  Description of Artificial Sequence: Synthetic peptide
  Seed: EECLINDPWVLLNAS
EECIINVPPVLINAS

SEQ ID NO: 255808 - protein, 15 aa, Artificial Sequence
  Description of Artificial Sequence: Synthetic peptide
  Seed: EECLINDPWVLLNAS
EECIINVPPVLLNAS

SEQ ID NO: 255809 - protein, 15 aa, Artificial Sequence
  Description of Artificial Sequence: Synthetic peptide
  Seed: EECLINDPWVLLNAS
EECIINVPPVLMNAS

SEQ ID NO: 255810 - protein, 15 aa, Artificial Sequence
  Description of Artificial Sequence: Synthetic peptide
  Seed: EECLINDPWVLLNAS
EECIINVPPVLSNAS

SEQ ID NO: 255811 - protein, 15 aa, Artificial Sequence
  Description of Artificial Sequence: Synthetic peptide
  Seed: EECLINDPWVLLNAS
EECIINVPPVLTNAS

SEQ ID NO: 255812 - protein, 15 aa, Artificial Sequence
  Description of Artificial Sequence: Synthetic peptide
  Seed: EECLINDPWVLLNAS
EECIINVPPVLVNAS

SEQ ID NO: 255813 - protein, 15 aa, Artificial Sequence
  Description of Artificial Sequence: Synthetic peptide
  Seed: EECLINDPWVLLNAS
EECIINVPPVLYNAS

SEQ ID NO: 255814 - protein, 15 aa, Artificial Sequence
  Description of Artificial Sequence: Synthetic peptide
  Seed: EECLINDPWVLLNAS
EECIINVPSVLANAS

SEQ ID NO: 255815 - protein, 15 aa, Artificial Sequence
  Description of Artificial Sequence: Synthetic peptide
  Seed: EECLINDPWVLLNAS
EECIINVPSVLFNAS

SEQ ID NO: 255816 - protein, 15 aa, Artificial Sequence
  Description of Artificial Sequence: Synthetic peptide
  Seed: EECLINDPWVLLNAS
EECIINVPSVLGNAS

SEQ ID NO: 255817 - protein, 15 aa, Artificial Sequence
  Description of Artificial Sequence: Synthetic peptide
  Seed: EECLINDPWVLLNAS
EECIINVPSVLINAS

SEQ ID NO: 255818 - protein, 15 aa, Artificial Sequence
  Description of Artificial Sequence: Synthetic peptide
  Seed: EECLINDPWVLLNAS
EECIINVPSVLLNAS

SEQ ID NO: 255819 - protein, 15 aa, Artificial Sequence
  Description of Artificial Sequence: Synthetic peptide
  Seed: EECLINDPWVLLNAS
EECIINVPSVLMNAS

SEQ ID NO: 255820 - protein, 15 aa, Artificial Sequence
  Description of Artificial Sequence: Synthetic peptide
  Seed: EECLINDPWVLLNAS
EECIINVPSVLSNAS

SEQ ID NO: 255821 - protein, 15 aa, Artificial Sequence
  Description of Artificial Sequence: Synthetic peptide
  Seed: EECLINDPWVLLNAS
EECIINVPSVLTNAS

SEQ ID NO: 255822 - protein, 15 aa, Artificial Sequence
  Description of Artificial Sequence: Synthetic peptide
  Seed: EECLINDPWVLLNAS
EECIINVPSVLVNAS

SEQ ID NO: 255823 - protein, 15 aa, Artificial Sequence
  Description of Artificial Sequence: Synthetic peptide
  Seed: EECLINDPWVLLNAS
EECIINVPSVLYNAS

SEQ ID NO: 255824 - protein, 15 aa, Artificial Sequence
  Description of Artificial Sequence: Synthetic peptide
  Seed: EECLINDPWVLLNAS
EECIINVPTVLANAS

SEQ ID NO: 255825 - protein, 15 aa, Artificial Sequence
  Description of Artificial Sequence: Synthetic peptide
  Seed: EECLINDPWVLLNAS
EECIINVPTVLINAS

SEQ ID NO: 255826 - protein, 15 aa, Artificial Sequence
  Description of Artificial Sequence: Synthetic peptide
  Seed: EECLINDPWVLLNAS
EECIINVPTVLLNAS

SEQ ID NO: 255827 - protein, 15 aa, Artificial Sequence
  Description of Artificial Sequence: Synthetic peptide
  Seed: EECLINDPWVLLNAS
EECIINVPTVLTNAS

SEQ ID NO: 255828 - protein, 15 aa, Artificial Sequence
  Description of Artificial Sequence: Synthetic peptide
  Seed: EECLINDPWVLLNAS
EECIINVPTVLVNAS

SEQ ID NO: 255829 - protein, 15 aa, Artificial Sequence
  Description of Artificial Sequence: Synthetic peptide
  Seed: EECLINDPWVLLNAS
EECIINVPVVLVNAS

SEQ ID NO: 255830 - protein, 15 aa, Artificial Sequence
  Description of Artificial Sequence: Synthetic peptide
  Seed: EECLINDPWVLLNAS
EECIINWPAVLINAS

SEQ ID NO: 255831 - protein, 15 aa, Artificial Sequence
  Description of Artificial Sequence: Synthetic peptide
  Seed: EECLINDPWVLLNAS
EECIINWPAVLVNAS

SEQ ID NO: 255832 - protein, 15 aa, Artificial Sequence
  Description of Artificial Sequence: Synthetic peptide
  Seed: EECLINDPWVLLNAS
EECIINWPNVLINAS

SEQ ID NO: 255833 - protein, 15 aa, Artificial Sequence
  Description of Artificial Sequence: Synthetic peptide
  Seed: EECLINDPWVLLNAS
EECIINWPNVLVNAS

SEQ ID NO: 255834 - protein, 15 aa, Artificial Sequence
  Description of Artificial Sequence: Synthetic peptide
  Seed: EECLINDPWVLLNAS
EECIINYPAVLFNAS

SEQ ID NO: 255835 - protein, 15 aa, Artificial Sequence
  Description of Artificial Sequence: Synthetic peptide
  Seed: EECLINDPWVLLNAS
EECIINYPAVLINAS

SEQ ID NO: 255836 - protein, 15 aa, Artificial Sequence
  Description of Artificial Sequence: Synthetic peptide
  Seed: EECLINDPWVLLNAS
EECIINYPAVLLNAS

SEQ ID NO: 255837 - protein, 15 aa, Artificial Sequence
  Description of Artificial Sequence: Synthetic peptide
  Seed: EECLINDPWVLLNAS
EECIINYPAVLVNAS

SEQ ID NO: 255838 - protein, 15 aa, Artificial Sequence
  Description of Artificial Sequence: Synthetic peptide
  Seed: EECLINDPWVLLNAS
EECIINYPNVLANAS

SEQ ID NO: 255839 - protein, 15 aa, Artificial Sequence
  Description of Artificial Sequence: Synthetic peptide
  Seed: EECLINDPWVLLNAS
EECIINYPNVLFNAS

SEQ ID NO: 255840 - protein, 15 aa, Artificial Sequence
  Description of Artificial Sequence: Synthetic peptide
  Seed: EECLINDPWVLLNAS
EECIINYPNVLINAS

SEQ ID NO: 255841 - protein, 15 aa, Artificial Sequence
  Description of Artificial Sequence: Synthetic peptide
  Seed: EECLINDPWVLLNAS
EECIINYPNVLLNAS

SEQ ID NO: 255842 - protein, 15 aa, Artificial Sequence
  Description of Artificial Sequence: Synthetic peptide
  Seed: EECLINDPWVLLNAS
EECIINYPNVLMNAS

SEQ ID NO: 255843 - protein, 15 aa, Artificial Sequence
  Description of Artificial Sequence: Synthetic peptide
  Seed: EECLINDPWVLLNAS
EECIINYPNVLVNAS

SEQ ID NO: 255844 - protein, 15 aa, Artificial Sequence
  Description of Artificial Sequence: Synthetic peptide
  Seed: EECLINDPWVLLNAS
EECIINYPNVLYNAS

SEQ ID NO: 255845 - protein, 15 aa, Artificial Sequence
  Description of Artificial Sequence: Synthetic peptide
  Seed: EECLINDPWVLLNAS
EECLINAPAVLANAS

SEQ ID NO: 255846 - protein, 15 aa, Artificial Sequence
  Description of Artificial Sequence: Synthetic peptide
  Seed: EECLINDPWVLLNAS
EECLINAPAVLCNAS

SEQ ID NO: 255847 - protein, 15 aa, Artificial Sequence
  Description of Artificial Sequence: Synthetic peptide
  Seed: EECLINDPWVLLNAS
EECLINAPAVLFNAS

SEQ ID NO: 255848 - protein, 15 aa, Artificial Sequence
  Description of Artificial Sequence: Synthetic peptide
  Seed: EECLINDPWVLLNAS
EECLINAPAVLGNAS

SEQ ID NO: 255849 - protein, 15 aa, Artificial Sequence
  Description of Artificial Sequence: Synthetic peptide
  Seed: EECLINDPWVLLNAS
EECLINAPAVLINAS

SEQ ID NO: 255850 - protein, 15 aa, Artificial Sequence
  Description of Artificial Sequence: Synthetic peptide
  Seed: EECLINDPWVLLNAS
EECLINAPAVLLNAS

SEQ ID NO: 255851 - protein, 15 aa, Artificial Sequence
  Description of Artificial Sequence: Synthetic peptide
  Seed: EECLINDPWVLLNAS
EECLINAPAVLMNAS

SEQ ID NO: 255852 - protein, 15 aa, Artificial Sequence
  Description of Artificial Sequence: Synthetic peptide
  Seed: EECLINDPWVLLNAS
EECLINAPAVLSNAS

SEQ ID NO: 255853 - protein, 15 aa, Artificial Sequence
  Description of Artificial Sequence: Synthetic peptide
  Seed: EECLINDPWVLLNAS
EECLINAPAVLTNAS

SEQ ID NO: 255854 - protein, 15 aa, Artificial Sequence
  Description of Artificial Sequence: Synthetic peptide
  Seed: EECLINDPWVLLNAS
EECLINAPAVLVNAS

SEQ ID NO: 255855 - protein, 15 aa, Artificial Sequence
  Description of Artificial Sequence: Synthetic peptide
  Seed: EECLINDPWVLLNAS
EECLINAPAVLYNAS

SEQ ID NO: 255856 - protein, 15 aa, Artificial Sequence
  Description of Artificial Sequence: Synthetic peptide
  Seed: EECLINDPWVLLNAS
EECLINAPFVLINAS

SEQ ID NO: 255857 - protein, 15 aa, Artificial Sequence
  Description of Artificial Sequence: Synthetic peptide
  Seed: EECLINDPWVLLNAS
EECLINAPFVLLNAS

SEQ ID NO: 255858 - protein, 15 aa, Artificial Sequence
  Description of Artificial Sequence: Synthetic peptide
  Seed: EECLINDPWVLLNAS
EECLINAPFVLMNAS

SEQ ID NO: 255859 - protein, 15 aa, Artificial Sequence
  Description of Artificial Sequence: Synthetic peptide
  Seed: EECLINDPWVLLNAS
EECLINAPFVLVNAS

SEQ ID NO: 255860 - protein, 15 aa, Artificial Sequence
  Description of Artificial Sequence: Synthetic peptide
  Seed: EECLINDPWVLLNAS
EECLINAPGVLANAS

SEQ ID NO: 255861 - protein, 15 aa, Artificial Sequence
  Description of Artificial Sequence: Synthetic peptide
  Seed: EECLINDPWVLLNAS
EECLINAPGVLGNAS

SEQ ID NO: 255862 - protein, 15 aa, Artificial Sequence
  Description of Artificial Sequence: Synthetic peptide
  Seed: EECLINDPWVLLNAS
EECLINAPGVLINAS

SEQ ID NO: 255863 - protein, 15 aa, Artificial Sequence
  Description of Artificial Sequence: Synthetic peptide
  Seed: EECLINDPWVLLNAS
EECLINAPGVLLNAS

SEQ ID NO: 255864 - protein, 15 aa, Artificial Sequence
  Description of Artificial Sequence: Synthetic peptide
  Seed: EECLINDPWVLLNAS
EECLINAPGVLMNAS

SEQ ID NO: 255865 - protein, 15 aa, Artificial Sequence
  Description of Artificial Sequence: Synthetic peptide
  Seed: EECLINDPWVLLNAS
EECLINAPGVLSNAS

SEQ ID NO: 255866 - protein, 15 aa, Artificial Sequence
  Description of Artificial Sequence: Synthetic peptide
  Seed: EECLINDPWVLLNAS
EECLINAPGVLTNAS

SEQ ID NO: 255867 - protein, 15 aa, Artificial Sequence
  Description of Artificial Sequence: Synthetic peptide
  Seed: EECLINDPWVLLNAS
EECLINAPGVLVNAS

SEQ ID NO: 255868 - protein, 15 aa, Artificial Sequence
  Description of Artificial Sequence: Synthetic peptide
  Seed: EECLINDPWVLLNAS
EECLINAPNVLANAS

SEQ ID NO: 255869 - protein, 15 aa, Artificial Sequence
  Description of Artificial Sequence: Synthetic peptide
  Seed: EECLINDPWVLLNAS
EECLINAPNVLFNAS

SEQ ID NO: 255870 - protein, 15 aa, Artificial Sequence
  Description of Artificial Sequence: Synthetic peptide
  Seed: EECLINDPWVLLNAS
EECLINAPNVLINAS

SEQ ID NO: 255871 - protein, 15 aa, Artificial Sequence
  Description of Artificial Sequence: Synthetic peptide
  Seed: EECLINDPWVLLNAS
EECLINAPNVLLNAS

SEQ ID NO: 255872 - protein, 15 aa, Artificial Sequence
  Description of Artificial Sequence: Synthetic peptide
  Seed: EECLINDPWVLLNAS
EECLINAPNVLMNAS

SEQ ID NO: 255873 - protein, 15 aa, Artificial Sequence
  Description of Artificial Sequence: Synthetic peptide
  Seed: EECLINDPWVLLNAS
EECLINAPNVLSNAS

SEQ ID NO: 255874 - protein, 15 aa, Artificial Sequence
  Description of Artificial Sequence: Synthetic peptide
  Seed: EECLINDPWVLLNAS
EECLINAPNVLVNAS

SEQ ID NO: 255875 - protein, 15 aa, Artificial Sequence
  Description of Artificial Sequence: Synthetic peptide
  Seed: EECLINDPWVLLNAS
EECLINAPNVLYNAS

SEQ ID NO: 255876 - protein, 15 aa, Artificial Sequence
  Description of Artificial Sequence: Synthetic peptide
  Seed: EECLINDPWVLLNAS
EECLINAPPVLANAS

SEQ ID NO: 255877 - protein, 15 aa, Artificial Sequence
  Description of Artificial Sequence: Synthetic peptide
  Seed: EECLINDPWVLLNAS
EECLINAPPVLINAS

SEQ ID NO: 255878 - protein, 15 aa, Artificial Sequence
  Description of Artificial Sequence: Synthetic peptide
  Seed: EECLINDPWVLLNAS
EECLINAPPVLLNAS

SEQ ID NO: 255879 - protein, 15 aa, Artificial Sequence
  Description of Artificial Sequence: Synthetic peptide
  Seed: EECLINDPWVLLNAS
EECLINAPPVLMNAS

SEQ ID NO: 255880 - protein, 15 aa, Artificial Sequence
  Description of Artificial Sequence: Synthetic peptide
  Seed: EECLINDPWVLLNAS
EECLINAPPVLSNAS

SEQ ID NO: 255881 - protein, 15 aa, Artificial Sequence
  Description of Artificial Sequence: Synthetic peptide
  Seed: EECLINDPWVLLNAS
EECLINAPPVLTNAS

SEQ ID NO: 255882 - protein, 15 aa, Artificial Sequence
  Description of Artificial Sequence: Synthetic peptide
  Seed: EECLINDPWVLLNAS
EECLINAPPVLVNAS

SEQ ID NO: 255883 - protein, 15 aa, Artificial Sequence
  Description of Artificial Sequence: Synthetic peptide
  Seed: EECLINDPWVLLNAS
EECLINAPSVLANAS

SEQ ID NO: 255884 - protein, 15 aa, Artificial Sequence
  Description of Artificial Sequence: Synthetic peptide
  Seed: EECLINDPWVLLNAS
EECLINAPSVLGNAS

SEQ ID NO: 255885 - protein, 15 aa, Artificial Sequence
  Description of Artificial Sequence: Synthetic peptide
  Seed: EECLINDPWVLLNAS
EECLINAPSVLINAS

SEQ ID NO: 255886 - protein, 15 aa, Artificial Sequence
  Description of Artificial Sequence: Synthetic peptide
  Seed: EECLINDPWVLLNAS
EECLINAPSVLLNAS

SEQ ID NO: 255887 - protein, 15 aa, Artificial Sequence
  Description of Artificial Sequence: Synthetic peptide
  Seed: EECLINDPWVLLNAS
EECLINAPSVLMNAS

SEQ ID NO: 255888 - protein, 15 aa, Artificial Sequence
  Description of Artificial Sequence: Synthetic peptide
  Seed: EECLINDPWVLLNAS
EECLINAPSVLSNAS

SEQ ID NO: 255889 - protein, 15 aa, Artificial Sequence
  Description of Artificial Sequence: Synthetic peptide
  Seed: EECLINDPWVLLNAS
EECLINAPSVLTNAS

SEQ ID NO: 255890 - protein, 15 aa, Artificial Sequence
  Description of Artificial Sequence: Synthetic peptide
  Seed: EECLINDPWVLLNAS
EECLINAPSVLVNAS

SEQ ID NO: 255891 - protein, 15 aa, Artificial Sequence
  Description of Artificial Sequence: Synthetic peptide
  Seed: EECLINDPWVLLNAS
EECLINAPTVLANAS

SEQ ID NO: 255892 - protein, 15 aa, Artificial Sequence
  Description of Artificial Sequence: Synthetic peptide
  Seed: EECLINDPWVLLNAS
EECLINAPTVLINAS

SEQ ID NO: 255893 - protein, 15 aa, Artificial Sequence
  Description of Artificial Sequence: Synthetic peptide
  Seed: EECLINDPWVLLNAS
EECLINAPTVLLNAS

SEQ ID NO: 255894 - protein, 15 aa, Artificial Sequence
  Description of Artificial Sequence: Synthetic peptide
  Seed: EECLINDPWVLLNAS
EECLINAPTVLSNAS

SEQ ID NO: 255895 - protein, 15 aa, Artificial Sequence
  Description of Artificial Sequence: Synthetic peptide
  Seed: EECLINDPWVLLNAS
EECLINAPTVLTNAS

SEQ ID NO: 255896 - protein, 15 aa, Artificial Sequence
  Description of Artificial Sequence: Synthetic peptide
  Seed: EECLINDPWVLLNAS
EECLINAPTVLVNAS

SEQ ID NO: 255897 - protein, 15 aa, Artificial Sequence
  Description of Artificial Sequence: Synthetic peptide
  Seed: EECLINDPWVLLNAS
EECLINAPVVLANAS

SEQ ID NO: 255898 - protein, 15 aa, Artificial Sequence
  Description of Artificial Sequence: Synthetic peptide
  Seed: EECLINDPWVLLNAS
EECLINAPVVLVNAS

SEQ ID NO: 255899 - protein, 15 aa, Artificial Sequence
  Description of Artificial Sequence: Synthetic peptide
  Seed: EECLINDPWVLLNAS
EECLINDPAVLINAS

SEQ ID NO: 255900 - protein, 15 aa, Artificial Sequence
  Description of Artificial Sequence: Synthetic peptide
  Seed: EECLINDPWVLLNAS
EECLINDPAVLRNAS

SEQ ID NO: 255901 - protein, 15 aa, Artificial Sequence
  Description of Artificial Sequence: Synthetic peptide
  Seed: EECLINDPWVLLNAS
EECLINDPAVLVNAS

SEQ ID NO: 255902 - protein, 15 aa, Artificial Sequence
  Description of Artificial Sequence: Synthetic peptide
  Seed: EECLINDPWVLLNAS
EECLINDPAVLYNAS

SEQ ID NO: 255903 - protein, 15 aa, Artificial Sequence
  Description of Artificial Sequence: Synthetic peptide
  Seed: EECLINDPWVLLNAS
EECLINDPIVLRNAS

SEQ ID NO: 255904 - protein, 15 aa, Artificial Sequence
  Description of Artificial Sequence: Synthetic peptide
  Seed: EECLINDPWVLLNAS
EECLINDPIVLYNAS

SEQ ID NO: 255905 - protein, 15 aa, Artificial Sequence
  Description of Artificial Sequence: Synthetic peptide
  Seed: EECLINDPWVLLNAS
EECLINDPKVLANAS

SEQ ID NO: 255906 - protein, 15 aa, Artificial Sequence
  Description of Artificial Sequence: Synthetic peptide
  Seed: EECLINDPWVLLNAS
EECLINDPKVLFNAS

SEQ ID NO: 255907 - protein, 15 aa, Artificial Sequence
  Description of Artificial Sequence: Synthetic peptide
  Seed: EECLINDPWVLLNAS
EECLINDPKVLLNAS

SEQ ID NO: 255908 - protein, 15 aa, Artificial Sequence
  Description of Artificial Sequence: Synthetic peptide
  Seed: EECLINDPWVLLNAS
EECLINDPKVLMNAS

SEQ ID NO: 255909 - protein, 15 aa, Artificial Sequence
  Description of Artificial Sequence: Synthetic peptide
  Seed: EECLINDPWVLLNAS
EECLINDPKVLQNAS

SEQ ID NO: 255910 - protein, 15 aa, Artificial Sequence
  Description of Artificial Sequence: Synthetic peptide
  Seed: EECLINDPWVLLNAS
EECLINDPKVLRNAS

SEQ ID NO: 255911 - protein, 15 aa, Artificial Sequence
  Description of Artificial Sequence: Synthetic peptide
  Seed: EECLINDPWVLLNAS
EECLINDPKVLSNAS

SEQ ID NO: 255912 - protein, 15 aa, Artificial Sequence
  Description of Artificial Sequence: Synthetic peptide
  Seed: EECLINDPWVLLNAS
EECLINDPKVLYNAS

SEQ ID NO: 255913 - protein, 15 aa, Artificial Sequence
  Description of Artificial Sequence: Synthetic peptide
  Seed: EECLINDPWVLLNAS
EECLINDPPVLRNAS

SEQ ID NO: 255914 - protein, 15 aa, Artificial Sequence
  Description of Artificial Sequence: Synthetic peptide
  Seed: EECLINDPWVLLNAS
EECLINDPPVLYNAS

SEQ ID NO: 255915 - protein, 15 aa, Artificial Sequence
  Description of Artificial Sequence: Synthetic peptide
  Seed: EECLINDPWVLLNAS
EECLINDPRVLANAS

SEQ ID NO: 255916 - protein, 15 aa, Artificial Sequence
  Description of Artificial Sequence: Synthetic peptide
  Seed: EECLINDPWVLLNAS
EECLINDPRVLFNAS

SEQ ID NO: 255917 - protein, 15 aa, Artificial Sequence
  Description of Artificial Sequence: Synthetic peptide
  Seed: EECLINDPWVLLNAS
EECLINDPRVLLNAS

SEQ ID NO: 255918 - protein, 15 aa, Artificial Sequence
  Description of Artificial Sequence: Synthetic peptide
  Seed: EECLINDPWVLLNAS
EECLINDPRVLMNAS

SEQ ID NO: 255919 - protein, 15 aa, Artificial Sequence
  Description of Artificial Sequence: Synthetic peptide
  Seed: EECLINDPWVLLNAS
EECLINDPRVLRNAS

SEQ ID NO: 255920 - protein, 15 aa, Artificial Sequence
  Description of Artificial Sequence: Synthetic peptide
  Seed: EECLINDPWVLLNAS
EECLINDPRVLSNAS

SEQ ID NO: 255921 - protein, 15 aa, Artificial Sequence
  Description of Artificial Sequence: Synthetic peptide
  Seed: EECLINDPWVLLNAS
EECLINDPRVLYNAS

SEQ ID NO: 255922 - protein, 15 aa, Artificial Sequence
  Description of Artificial Sequence: Synthetic peptide
  Seed: EECLINDPWVLLNAS
EECLINDPSVLRNAS

SEQ ID NO: 255923 - protein, 15 aa, Artificial Sequence
  Description of Artificial Sequence: Synthetic peptide
  Seed: EECLINDPWVLLNAS
EECLINDPSVLYNAS

SEQ ID NO: 255924 - protein, 15 aa, Artificial Sequence
  Description of Artificial Sequence: Synthetic peptide
  Seed: EECLINDPWVLLNAS
EECLINDPTVLRNAS

SEQ ID NO: 255925 - protein, 15 aa, Artificial Sequence
  Description of Artificial Sequence: Synthetic peptide
  Seed: EECLINDPWVLLNAS
EECLINDPTVLYNAS

SEQ ID NO: 255926 - protein, 15 aa, Artificial Sequence
  Description of Artificial Sequence: Synthetic peptide
  Seed: EECLINDPWVLLNAS
EECLINDPVVLRNAS

SEQ ID NO: 255927 - protein, 15 aa, Artificial Sequence
  Description of Artificial Sequence: Synthetic peptide
  Seed: EECLINDPWVLLNAS
EECLINDPVVLYNAS

SEQ ID NO: 255928 - protein, 15 aa, Artificial Sequence
  Description of Artificial Sequence: Synthetic peptide
  Seed: EECLINDPWVLLNAS
EECLINEPAVLANAS

SEQ ID NO: 255929 - protein, 15 aa, Artificial Sequence
  Description of Artificial Sequence: Synthetic peptide
  Seed: EECLINDPWVLLNAS
EECLINEPAVLINAS

SEQ ID NO: 255930 - protein, 15 aa, Artificial Sequence
  Description of Artificial Sequence: Synthetic peptide
  Seed: EECLINDPWVLLNAS
EECLINEPAVLLNAS

SEQ ID NO: 255931 - protein, 15 aa, Artificial Sequence
  Description of Artificial Sequence: Synthetic peptide
  Seed: EECLINDPWVLLNAS
EECLINEPAVLVNAS

SEQ ID NO: 255932 - protein, 15 aa, Artificial Sequence
  Description of Artificial Sequence: Synthetic peptide
  Seed: EECLINDPWVLLNAS
EECLINEPFVLINAS

SEQ ID NO: 255933 - protein, 15 aa, Artificial Sequence
  Description of Artificial Sequence: Synthetic peptide
  Seed: EECLINDPWVLLNAS
EECLINEPFVLLNAS

SEQ ID NO: 255934 - protein, 15 aa, Artificial Sequence
  Description of Artificial Sequence: Synthetic peptide
  Seed: EECLINDPWVLLNAS
EECLINEPFVLVNAS

SEQ ID NO: 255935 - protein, 15 aa, Artificial Sequence
  Description of Artificial Sequence: Synthetic peptide
  Seed: EECLINDPWVLLNAS
EECLINEPGVLANAS

SEQ ID NO: 255936 - protein, 15 aa, Artificial Sequence
  Description of Artificial Sequence: Synthetic peptide
  Seed: EECLINDPWVLLNAS
EECLINEPGVLVNAS

SEQ ID NO: 255937 - protein, 15 aa, Artificial Sequence
  Description of Artificial Sequence: Synthetic peptide
  Seed: EECLINDPWVLLNAS
EECLINEPSVLANAS

SEQ ID NO: 255938 - protein, 15 aa, Artificial Sequence
  Description of Artificial Sequence: Synthetic peptide
  Seed: EECLINDPWVLLNAS
EECLINEPSVLVNAS

SEQ ID NO: 255939 - protein, 15 aa, Artificial Sequence
  Description of Artificial Sequence: Synthetic peptide
  Seed: EECLINDPWVLLNAS
EECLINFPAVLANAS

SEQ ID NO: 255940 - protein, 15 aa, Artificial Sequence
  Description of Artificial Sequence: Synthetic peptide
  Seed: EECLINDPWVLLNAS
EECLINFPAVLINAS

SEQ ID NO: 255941 - protein, 15 aa, Artificial Sequence
  Description of Artificial Sequence: Synthetic peptide
  Seed: EECLINDPWVLLNAS
EECLINFPAVLLNAS

SEQ ID NO: 255942 - protein, 15 aa, Artificial Sequence
  Description of Artificial Sequence: Synthetic peptide
  Seed: EECLINDPWVLLNAS
EECLINFPAVLMNAS

SEQ ID NO: 255943 - protein, 15 aa, Artificial Sequence
  Description of Artificial Sequence: Synthetic peptide
  Seed: EECLINDPWVLLNAS
EECLINFPAVLSNAS

SEQ ID NO: 255944 - protein, 15 aa, Artificial Sequence
  Description of Artificial Sequence: Synthetic peptide
  Seed: EECLINDPWVLLNAS
EECLINFPAVLVNAS

SEQ ID NO: 255945 - protein, 15 aa, Artificial Sequence
  Description of Artificial Sequence: Synthetic peptide
  Seed: EECLINDPWVLLNAS
EECLINFPFVLINAS

SEQ ID NO: 255946 - protein, 15 aa, Artificial Sequence
  Description of Artificial Sequence: Synthetic peptide
  Seed: EECLINDPWVLLNAS
EECLINFPFVLLNAS

SEQ ID NO: 255947 - protein, 15 aa, Artificial Sequence
  Description of Artificial Sequence: Synthetic peptide
  Seed: EECLINDPWVLLNAS
EECLINFPFVLVNAS

SEQ ID NO: 255948 - protein, 15 aa, Artificial Sequence
  Description of Artificial Sequence: Synthetic peptide
  Seed: EECLINDPWVLLNAS
EECLINFPGVLANAS

SEQ ID NO: 255949 - protein, 15 aa, Artificial Sequence
  Description of Artificial Sequence: Synthetic peptide
  Seed: EECLINDPWVLLNAS
EECLINFPNVLVNAS

SEQ ID NO: 255950 - protein, 15 aa, Artificial Sequence
  Description of Artificial Sequence: Synthetic peptide
  Seed: EECLINDPWVLLNAS
EECLINFPPVLANAS

SEQ ID NO: 255951 - protein, 15 aa, Artificial Sequence
  Description of Artificial Sequence: Synthetic peptide
  Seed: EECLINDPWVLLNAS
EECLINFPSVLANAS

SEQ ID NO: 255952 - protein, 15 aa, Artificial Sequence
  Description of Artificial Sequence: Synthetic peptide
  Seed: EECLINDPWVLLNAS
EECLINGPAVLANAS

SEQ ID NO: 255953 - protein, 15 aa, Artificial Sequence
  Description of Artificial Sequence: Synthetic peptide
  Seed: EECLINDPWVLLNAS
EECLINGPAVLINAS

SEQ ID NO: 255954 - protein, 15 aa, Artificial Sequence
  Description of Artificial Sequence: Synthetic peptide
  Seed: EECLINDPWVLLNAS
EECLINGPAVLLNAS

SEQ ID NO: 255955 - protein, 15 aa, Artificial Sequence
  Description of Artificial Sequence: Synthetic peptide
  Seed: EECLINDPWVLLNAS
EECLINGPAVLMNAS

SEQ ID NO: 255956 - protein, 15 aa, Artificial Sequence
  Description of Artificial Sequence: Synthetic peptide
  Seed: EECLINDPWVLLNAS
EECLINGPAVLVNAS

SEQ ID NO: 255957 - protein, 15 aa, Artificial Sequence
  Description of Artificial Sequence: Synthetic peptide
  Seed: EECLINDPWVLLNAS
EECLINGPNVLINAS

SEQ ID NO: 255958 - protein, 15 aa, Artificial Sequence
  Description of Artificial Sequence: Synthetic peptide
  Seed: EECLINDPWVLLNAS
EECLINGPNVLVNAS

SEQ ID NO: 255959 - protein, 15 aa, Artificial Sequence
  Description of Artificial Sequence: Synthetic peptide
  Seed: EECLINDPWVLLNAS
EECLINGPSVLLNAS

SEQ ID NO: 255960 - protein, 15 aa, Artificial Sequence
  Description of Artificial Sequence: Synthetic peptide
  Seed: EECLINDPWVLLNAS
EECLINHPAVLANAS

SEQ ID NO: 255961 - protein, 15 aa, Artificial Sequence
  Description of Artificial Sequence: Synthetic peptide
  Seed: EECLINDPWVLLNAS
EECLINHPAVLFNAS

SEQ ID NO: 255962 - protein, 15 aa, Artificial Sequence
  Description of Artificial Sequence: Synthetic peptide
  Seed: EECLINDPWVLLNAS
EECLINHPAVLINAS

SEQ ID NO: 255963 - protein, 15 aa, Artificial Sequence
  Description of Artificial Sequence: Synthetic peptide
  Seed: EECLINDPWVLLNAS
EECLINHPAVLLNAS

SEQ ID NO: 255964 - protein, 15 aa, Artificial Sequence
  Description of Artificial Sequence: Synthetic peptide
  Seed: EECLINDPWVLLNAS
EECLINHPAVLMNAS

SEQ ID NO: 255965 - protein, 15 aa, Artificial Sequence
  Description of Artificial Sequence: Synthetic peptide
  Seed: EECLINDPWVLLNAS
EECLINHPAVLVNAS

SEQ ID NO: 255966 - protein, 15 aa, Artificial Sequence
  Description of Artificial Sequence: Synthetic peptide
  Seed: EECLINDPWVLLNAS
EECLINHPAVLYNAS

SEQ ID NO: 255967 - protein, 15 aa, Artificial Sequence
  Description of Artificial Sequence: Synthetic peptide
  Seed: EECLINDPWVLLNAS
EECLINHPFVLINAS

SEQ ID NO: 255968 - protein, 15 aa, Artificial Sequence
  Description of Artificial Sequence: Synthetic peptide
  Seed: EECLINDPWVLLNAS
EECLINHPFVLLNAS

SEQ ID NO: 255969 - protein, 15 aa, Artificial Sequence
  Description of Artificial Sequence: Synthetic peptide
  Seed: EECLINDPWVLLNAS
EECLINHPFVLVNAS

SEQ ID NO: 255970 - protein, 15 aa, Artificial Sequence
  Description of Artificial Sequence: Synthetic peptide
  Seed: EECLINDPWVLLNAS
EECLINHPIVLINAS

SEQ ID NO: 255971 - protein, 15 aa, Artificial Sequence
  Description of Artificial Sequence: Synthetic peptide
  Seed: EECLINDPWVLLNAS
EECLINHPIVLVNAS

SEQ ID NO: 255972 - protein, 15 aa, Artificial Sequence
  Description of Artificial Sequence: Synthetic peptide
  Seed: EECLINDPWVLLNAS
EECLINHPNVLANAS

SEQ ID NO: 255973 - protein, 15 aa, Artificial Sequence
  Description of Artificial Sequence: Synthetic peptide
  Seed: EECLINDPWVLLNAS
EECLINHPNVLFNAS

SEQ ID NO: 255974 - protein, 15 aa, Artificial Sequence
  Description of Artificial Sequence: Synthetic peptide
  Seed: EECLINDPWVLLNAS
EECLINHPNVLINAS

SEQ ID NO: 255975 - protein, 15 aa, Artificial Sequence
  Description of Artificial Sequence: Synthetic peptide
  Seed: EECLINDPWVLLNAS
EECLINHPNVLLNAS

SEQ ID NO: 255976 - protein, 15 aa, Artificial Sequence
  Description of Artificial Sequence: Synthetic peptide
  Seed: EECLINDPWVLLNAS
EECLINHPNVLMNAS

SEQ ID NO: 255977 - protein, 15 aa, Artificial Sequence
  Description of Artificial Sequence: Synthetic peptide
  Seed: EECLINDPWVLLNAS
EECLINHPNVLVNAS

SEQ ID NO: 255978 - protein, 15 aa, Artificial Sequence
  Description of Artificial Sequence: Synthetic peptide
  Seed: EECLINDPWVLLNAS
EECLINHPNVLYNAS

SEQ ID NO: 255979 - protein, 15 aa, Artificial Sequence
  Description of Artificial Sequence: Synthetic peptide
  Seed: EECLINDPWVLLNAS
EECLINHPPVLINAS

SEQ ID NO: 255980 - protein, 15 aa, Artificial Sequence
  Description of Artificial Sequence: Synthetic peptide
  Seed: EECLINDPWVLLNAS
EECLINHPPVLVNAS

SEQ ID NO: 255981 - protein, 15 aa, Artificial Sequence
  Description of Artificial Sequence: Synthetic peptide
  Seed: EECLINDPWVLLNAS
EECLINHPSVLINAS

SEQ ID NO: 255982 - protein, 15 aa, Artificial Sequence
  Description of Artificial Sequence: Synthetic peptide
  Seed: EECLINDPWVLLNAS
EECLINHPSVLVNAS

SEQ ID NO: 255983 - protein, 15 aa, Artificial Sequence
  Description of Artificial Sequence: Synthetic peptide
  Seed: EECLINDPWVLLNAS
EECLINHPTVLINAS

SEQ ID NO: 255984 - protein, 15 aa, Artificial Sequence
  Description of Artificial Sequence: Synthetic peptide
  Seed: EECLINDPWVLLNAS
EECLINHPTVLVNAS

SEQ ID NO: 255985 - protein, 15 aa, Artificial Sequence
  Description of Artificial Sequence: Synthetic peptide
  Seed: EECLINDPWVLLNAS
EECLINHPVVLFNAS

SEQ ID NO: 255986 - protein, 15 aa, Artificial Sequence
  Description of Artificial Sequence: Synthetic peptide
  Seed: EECLINDPWVLLNAS
EECLINHPVVLINAS

SEQ ID NO: 255987 - protein, 15 aa, Artificial Sequence
  Description of Artificial Sequence: Synthetic peptide
  Seed: EECLINDPWVLLNAS
EECLINHPVVLLNAS

SEQ ID NO: 255988 - protein, 15 aa, Artificial Sequence
  Description of Artificial Sequence: Synthetic peptide
  Seed: EECLINDPWVLLNAS
EECLINHPVVLVNAS

SEQ ID NO: 255989 - protein, 15 aa, Artificial Sequence
  Description of Artificial Sequence: Synthetic peptide
  Seed: EECLINDPWVLLNAS
EECLINHPVVLYNAS

SEQ ID NO: 255990 - protein, 15 aa, Artificial Sequence
  Description of Artificial Sequence: Synthetic peptide
  Seed: EECLINDPWVLLNAS
EECLINIPAVLANAS

SEQ ID NO: 255991 - protein, 15 aa, Artificial Sequence
  Description of Artificial Sequence: Synthetic peptide
  Seed: EECLINDPWVLLNAS
EECLINIPAVLCNAS

SEQ ID NO: 255992 - protein, 15 aa, Artificial Sequence
  Description of Artificial Sequence: Synthetic peptide
  Seed: EECLINDPWVLLNAS
EECLINIPAVLFNAS

SEQ ID NO: 255993 - protein, 15 aa, Artificial Sequence
  Description of Artificial Sequence: Synthetic peptide
  Seed: EECLINDPWVLLNAS
EECLINIPAVLGNAS

SEQ ID NO: 255994 - protein, 15 aa, Artificial Sequence
  Description of Artificial Sequence: Synthetic peptide
  Seed: EECLINDPWVLLNAS
EECLINIPAVLINAS

SEQ ID NO: 255995 - protein, 15 aa, Artificial Sequence
  Description of Artificial Sequence: Synthetic peptide
  Seed: EECLINDPWVLLNAS
EECLINIPAVLLNAS

SEQ ID NO: 255996 - protein, 15 aa, Artificial Sequence
  Description of Artificial Sequence: Synthetic peptide
  Seed: EECLINDPWVLLNAS
EECLINIPAVLMNAS

SEQ ID NO: 255997 - protein, 15 aa, Artificial Sequence
  Description of Artificial Sequence: Synthetic peptide
  Seed: EECLINDPWVLLNAS
EECLINIPAVLNNAS

SEQ ID NO: 255998 - protein, 15 aa, Artificial Sequence
  Description of Artificial Sequence: Synthetic peptide
  Seed: EECLINDPWVLLNAS
EECLINIPAVLSNAS

SEQ ID NO: 255999 - protein, 15 aa, Artificial Sequence
  Description of Artificial Sequence: Synthetic peptide
  Seed: EECLINDPWVLLNAS
EECLINIPAVLTNAS

SEQ ID NO: 256000 - protein, 15 aa, Artificial Sequence
  Description of Artificial Sequence: Synthetic peptide
  Seed: EECLINDPWVLLNAS
EECLINIPAVLVNAS

SEQ ID NO: 256001 - protein, 15 aa, Artificial Sequence
  Description of Artificial Sequence: Synthetic peptide
  Seed: EECLINDPWVLLNAS
EECLINIPAVLYNAS

SEQ ID NO: 256002 - protein, 15 aa, Artificial Sequence
  Description of Artificial Sequence: Synthetic peptide
  Seed: EECLINDPWVLLNAS
EECLINIPFVLINAS

SEQ ID NO: 256003 - protein, 15 aa, Artificial Sequence
  Description of Artificial Sequence: Synthetic peptide
  Seed: EECLINDPWVLLNAS
EECLINIPFVLLNAS

SEQ ID NO: 256004 - protein, 15 aa, Artificial Sequence
  Description of Artificial Sequence: Synthetic peptide
  Seed: EECLINDPWVLLNAS
EECLINIPFVLMNAS

SEQ ID NO: 256005 - protein, 15 aa, Artificial Sequence
  Description of Artificial Sequence: Synthetic peptide
  Seed: EECLINDPWVLLNAS
EECLINIPFVLTNAS

SEQ ID NO: 256006 - protein, 15 aa, Artificial Sequence
  Description of Artificial Sequence: Synthetic peptide
  Seed: EECLINDPWVLLNAS
EECLINIPFVLVNAS

SEQ ID NO: 256007 - protein, 15 aa, Artificial Sequence
  Description of Artificial Sequence: Synthetic peptide
  Seed: EECLINDPWVLLNAS
EECLINIPGVLANAS

SEQ ID NO: 256008 - protein, 15 aa, Artificial Sequence
  Description of Artificial Sequence: Synthetic peptide
  Seed: EECLINDPWVLLNAS
EECLINIPGVLGNAS

SEQ ID NO: 256009 - protein, 15 aa, Artificial Sequence
  Description of Artificial Sequence: Synthetic peptide
  Seed: EECLINDPWVLLNAS
EECLINIPGVLINAS

SEQ ID NO: 256010 - protein, 15 aa, Artificial Sequence
  Description of Artificial Sequence: Synthetic peptide
  Seed: EECLINDPWVLLNAS
EECLINIPGVLLNAS

SEQ ID NO: 256011 - protein, 15 aa, Artificial Sequence
  Description of Artificial Sequence: Synthetic peptide
  Seed: EECLINDPWVLLNAS
EECLINIPGVLMNAS

SEQ ID NO: 256012 - protein, 15 aa, Artificial Sequence
  Description of Artificial Sequence: Synthetic peptide
  Seed: EECLINDPWVLLNAS
EECLINIPGVLSNAS

SEQ ID NO: 256013 - protein, 15 aa, Artificial Sequence
  Description of Artificial Sequence: Synthetic peptide
  Seed: EECLINDPWVLLNAS
EECLINIPGVLTNAS

SEQ ID NO: 256014 - protein, 15 aa, Artificial Sequence
  Description of Artificial Sequence: Synthetic peptide
  Seed: EECLINDPWVLLNAS
EECLINIPGVLVNAS

SEQ ID NO: 256015 - protein, 15 aa, Artificial Sequence
  Description of Artificial Sequence: Synthetic peptide
  Seed: EECLINDPWVLLNAS
EECLINIPNVLANAS

SEQ ID NO: 256016 - protein, 15 aa, Artificial Sequence
  Description of Artificial Sequence: Synthetic peptide
  Seed: EECLINDPWVLLNAS
EECLINIPNVLFNAS

SEQ ID NO: 256017 - protein, 15 aa, Artificial Sequence
  Description of Artificial Sequence: Synthetic peptide
  Seed: EECLINDPWVLLNAS
EECLINIPNVLINAS

SEQ ID NO: 256018 - protein, 15 aa, Artificial Sequence
  Description of Artificial Sequence: Synthetic peptide
  Seed: EECLINDPWVLLNAS
EECLINIPNVLLNAS

SEQ ID NO: 256019 - protein, 15 aa, Artificial Sequence
  Description of Artificial Sequence: Synthetic peptide
  Seed: EECLINDPWVLLNAS
EECLINIPNVLMNAS

SEQ ID NO: 256020 - protein, 15 aa, Artificial Sequence
  Description of Artificial Sequence: Synthetic peptide
  Seed: EECLINDPWVLLNAS
EECLINIPNVLRNAS

SEQ ID NO: 256021 - protein, 15 aa, Artificial Sequence
  Description of Artificial Sequence: Synthetic peptide
  Seed: EECLINDPWVLLNAS
EECLINIPNVLSNAS

SEQ ID NO: 256022 - protein, 15 aa, Artificial Sequence
  Description of Artificial Sequence: Synthetic peptide
  Seed: EECLINDPWVLLNAS
EECLINIPNVLTNAS

SEQ ID NO: 256023 - protein, 15 aa, Artificial Sequence
  Description of Artificial Sequence: Synthetic peptide
  Seed: EECLINDPWVLLNAS
EECLINIPNVLVNAS

SEQ ID NO: 256024 - protein, 15 aa, Artificial Sequence
  Description of Artificial Sequence: Synthetic peptide
  Seed: EECLINDPWVLLNAS
EECLINIPNVLYNAS

SEQ ID NO: 256025 - protein, 15 aa, Artificial Sequence
  Description of Artificial Sequence: Synthetic peptide
  Seed: EECLINDPWVLLNAS
EECLINIPPVLANAS

SEQ ID NO: 256026 - protein, 15 aa, Artificial Sequence
  Description of Artificial Sequence: Synthetic peptide
  Seed: EECLINDPWVLLNAS
EECLINIPPVLINAS

SEQ ID NO: 256027 - protein, 15 aa, Artificial Sequence
  Description of Artificial Sequence: Synthetic peptide
  Seed: EECLINDPWVLLNAS
EECLINIPPVLLNAS

SEQ ID NO: 256028 - protein, 15 aa, Artificial Sequence
  Description of Artificial Sequence: Synthetic peptide
  Seed: EECLINDPWVLLNAS
EECLINIPPVLMNAS

SEQ ID NO: 256029 - protein, 15 aa, Artificial Sequence
  Description of Artificial Sequence: Synthetic peptide
  Seed: EECLINDPWVLLNAS
EECLINIPPVLSNAS

SEQ ID NO: 256030 - protein, 15 aa, Artificial Sequence
  Description of Artificial Sequence: Synthetic peptide
  Seed: EECLINDPWVLLNAS
EECLINIPPVLTNAS

SEQ ID NO: 256031 - protein, 15 aa, Artificial Sequence
  Description of Artificial Sequence: Synthetic peptide
  Seed: EECLINDPWVLLNAS
EECLINIPPVLVNAS

SEQ ID NO: 256032 - protein, 15 aa, Artificial Sequence
  Description of Artificial Sequence: Synthetic peptide
  Seed: EECLINDPWVLLNAS
EECLINIPSVLANAS

SEQ ID NO: 256033 - protein, 15 aa, Artificial Sequence
  Description of Artificial Sequence: Synthetic peptide
  Seed: EECLINDPWVLLNAS
EECLINIPSVLGNAS

SEQ ID NO: 256034 - protein, 15 aa, Artificial Sequence
  Description of Artificial Sequence: Synthetic peptide
  Seed: EECLINDPWVLLNAS
EECLINIPSVLINAS

SEQ ID NO: 256035 - protein, 15 aa, Artificial Sequence
  Description of Artificial Sequence: Synthetic peptide
  Seed: EECLINDPWVLLNAS
EECLINIPSVLLNAS

SEQ ID NO: 256036 - protein, 15 aa, Artificial Sequence
  Description of Artificial Sequence: Synthetic peptide
  Seed: EECLINDPWVLLNAS
EECLINIPSVLMNAS

SEQ ID NO: 256037 - protein, 15 aa, Artificial Sequence
  Description of Artificial Sequence: Synthetic peptide
  Seed: EECLINDPWVLLNAS
EECLINIPSVLSNAS

SEQ ID NO: 256038 - protein, 15 aa, Artificial Sequence
  Description of Artificial Sequence: Synthetic peptide
  Seed: EECLINDPWVLLNAS
EECLINIPSVLTNAS

SEQ ID NO: 256039 - protein, 15 aa, Artificial Sequence
  Description of Artificial Sequence: Synthetic peptide
  Seed: EECLINDPWVLLNAS
EECLINIPSVLVNAS

SEQ ID NO: 256040 - protein, 15 aa, Artificial Sequence
  Description of Artificial Sequence: Synthetic peptide
  Seed: EECLINDPWVLLNAS
EECLINIPTVLANAS

SEQ ID NO: 256041 - protein, 15 aa, Artificial Sequence
  Description of Artificial Sequence: Synthetic peptide
  Seed: EECLINDPWVLLNAS
EECLINIPTVLINAS

SEQ ID NO: 256042 - protein, 15 aa, Artificial Sequence
  Description of Artificial Sequence: Synthetic peptide
  Seed: EECLINDPWVLLNAS
EECLINIPTVLLNAS

SEQ ID NO: 256043 - protein, 15 aa, Artificial Sequence
  Description of Artificial Sequence: Synthetic peptide
  Seed: EECLINDPWVLLNAS
EECLINIPTVLMNAS

SEQ ID NO: 256044 - protein, 15 aa, Artificial Sequence
  Description of Artificial Sequence: Synthetic peptide
  Seed: EECLINDPWVLLNAS
EECLINIPTVLSNAS

SEQ ID NO: 256045 - protein, 15 aa, Artificial Sequence
  Description of Artificial Sequence: Synthetic peptide
  Seed: EECLINDPWVLLNAS
EECLINIPTVLTNAS

SEQ ID NO: 256046 - protein, 15 aa, Artificial Sequence
  Description of Artificial Sequence: Synthetic peptide
  Seed: EECLINDPWVLLNAS
EECLINIPTVLVNAS

SEQ ID NO: 256047 - protein, 15 aa, Artificial Sequence
  Description of Artificial Sequence: Synthetic peptide
  Seed: EECLINDPWVLLNAS
EECLINIPVVLANAS

SEQ ID NO: 256048 - protein, 15 aa, Artificial Sequence
  Description of Artificial Sequence: Synthetic peptide
  Seed: EECLINDPWVLLNAS
EECLINKPAVLINAS

SEQ ID NO: 256049 - protein, 15 aa, Artificial Sequence
  Description of Artificial Sequence: Synthetic peptide
  Seed: EECLINDPWVLLNAS
EECLINKPAVLVNAS

SEQ ID NO: 256050 - protein, 15 aa, Artificial Sequence
  Description of Artificial Sequence: Synthetic peptide
  Seed: EECLINDPWVLLNAS
EECLINKPNVLFNAS

SEQ ID NO: 256051 - protein, 15 aa, Artificial Sequence
  Description of Artificial Sequence: Synthetic peptide
  Seed: EECLINDPWVLLNAS
EECLINKPNVLINAS

SEQ ID NO: 256052 - protein, 15 aa, Artificial Sequence
  Description of Artificial Sequence: Synthetic peptide
  Seed: EECLINDPWVLLNAS
EECLINKPNVLLNAS

SEQ ID NO: 256053 - protein, 15 aa, Artificial Sequence
  Description of Artificial Sequence: Synthetic peptide
  Seed: EECLINDPWVLLNAS
EECLINKPNVLVNAS

SEQ ID NO: 256054 - protein, 15 aa, Artificial Sequence
  Description of Artificial Sequence: Synthetic peptide
  Seed: EECLINDPWVLLNAS
EECLINLPAVLANAS

SEQ ID NO: 256055 - protein, 15 aa, Artificial Sequence
  Description of Artificial Sequence: Synthetic peptide
  Seed: EECLINDPWVLLNAS
EECLINLPAVLCNAS

SEQ ID NO: 256056 - protein, 15 aa, Artificial Sequence
  Description of Artificial Sequence: Synthetic peptide
  Seed: EECLINDPWVLLNAS
EECLINLPAVLFNAS

SEQ ID NO: 256057 - protein, 15 aa, Artificial Sequence
  Description of Artificial Sequence: Synthetic peptide
  Seed: EECLINDPWVLLNAS
EECLINLPAVLGNAS

SEQ ID NO: 256058 - protein, 15 aa, Artificial Sequence
  Description of Artificial Sequence: Synthetic peptide
  Seed: EECLINDPWVLLNAS
EECLINLPAVLHNAS

SEQ ID NO: 256059 - protein, 15 aa, Artificial Sequence
  Description of Artificial Sequence: Synthetic peptide
  Seed: EECLINDPWVLLNAS
EECLINLPAVLINAS

SEQ ID NO: 256060 - protein, 15 aa, Artificial Sequence
  Description of Artificial Sequence: Synthetic peptide
  Seed: EECLINDPWVLLNAS
EECLINLPAVLKNAS

SEQ ID NO: 256061 - protein, 15 aa, Artificial Sequence
  Description of Artificial Sequence: Synthetic peptide
  Seed: EECLINDPWVLLNAS
EECLINLPAVLLNAS

SEQ ID NO: 256062 - protein, 15 aa, Artificial Sequence
  Description of Artificial Sequence: Synthetic peptide
  Seed: EECLINDPWVLLNAS
EECLINLPAVLMNAS

SEQ ID NO: 256063 - protein, 15 aa, Artificial Sequence
  Description of Artificial Sequence: Synthetic peptide
  Seed: EECLINDPWVLLNAS
EECLINLPAVLNNAS

SEQ ID NO: 256064 - protein, 15 aa, Artificial Sequence
  Description of Artificial Sequence: Synthetic peptide
  Seed: EECLINDPWVLLNAS
EECLINLPAVLPNAS

SEQ ID NO: 256065 - protein, 15 aa, Artificial Sequence
  Description of Artificial Sequence: Synthetic peptide
  Seed: EECLINDPWVLLNAS
EECLINLPAVLQNAS

SEQ ID NO: 256066 - protein, 15 aa, Artificial Sequence
  Description of Artificial Sequence: Synthetic peptide
  Seed: EECLINDPWVLLNAS
EECLINLPAVLRNAS

SEQ ID NO: 256067 - protein, 15 aa, Artificial Sequence
  Description of Artificial Sequence: Synthetic peptide
  Seed: EECLINDPWVLLNAS
EECLINLPAVLSNAS

SEQ ID NO: 256068 - protein, 15 aa, Artificial Sequence
  Description of Artificial Sequence: Synthetic peptide
  Seed: EECLINDPWVLLNAS
EECLINLPAVLTNAS

SEQ ID NO: 256069 - protein, 15 aa, Artificial Sequence
  Description of Artificial Sequence: Synthetic peptide
  Seed: EECLINDPWVLLNAS
EECLINLPAVLVNAS

SEQ ID NO: 256070 - protein, 15 aa, Artificial Sequence
  Description of Artificial Sequence: Synthetic peptide
  Seed: EECLINDPWVLLNAS
EECLINLPAVLYNAS

SEQ ID NO: 256071 - protein, 15 aa, Artificial Sequence
  Description of Artificial Sequence: Synthetic peptide
  Seed: EECLINDPWVLLNAS
EECLINLPGVLANAS

SEQ ID NO: 256072 - protein, 15 aa, Artificial Sequence
  Description of Artificial Sequence: Synthetic peptide
  Seed: EECLINDPWVLLNAS
EECLINLPGVLCNAS

SEQ ID NO: 256073 - protein, 15 aa, Artificial Sequence
  Description of Artificial Sequence: Synthetic peptide
  Seed: EECLINDPWVLLNAS
EECLINLPGVLFNAS

SEQ ID NO: 256074 - protein, 15 aa, Artificial Sequence
  Description of Artificial Sequence: Synthetic peptide
  Seed: EECLINDPWVLLNAS
EECLINLPGVLGNAS

SEQ ID NO: 256075 - protein, 15 aa, Artificial Sequence
  Description of Artificial Sequence: Synthetic peptide
  Seed: EECLINDPWVLLNAS
EECLINLPGVLHNAS

SEQ ID NO: 256076 - protein, 15 aa, Artificial Sequence
  Description of Artificial Sequence: Synthetic peptide
  Seed: EECLINDPWVLLNAS
EECLINLPGVLINAS

SEQ ID NO: 256077 - protein, 15 aa, Artificial Sequence
  Description of Artificial Sequence: Synthetic peptide
  Seed: EECLINDPWVLLNAS
EECLINLPGVLLNAS

SEQ ID NO: 256078 - protein, 15 aa, Artificial Sequence
  Description of Artificial Sequence: Synthetic peptide
  Seed: EECLINDPWVLLNAS
EECLINLPGVLMNAS

SEQ ID NO: 256079 - protein, 15 aa, Artificial Sequence
  Description of Artificial Sequence: Synthetic peptide
  Seed: EECLINDPWVLLNAS
EECLINLPGVLNNAS

SEQ ID NO: 256080 - protein, 15 aa, Artificial Sequence
  Description of Artificial Sequence: Synthetic peptide
  Seed: EECLINDPWVLLNAS
EECLINLPGVLPNAS

SEQ ID NO: 256081 - protein, 15 aa, Artificial Sequence
  Description of Artificial Sequence: Synthetic peptide
  Seed: EECLINDPWVLLNAS
EECLINLPGVLQNAS

SEQ ID NO: 256082 - protein, 15 aa, Artificial Sequence
  Description of Artificial Sequence: Synthetic peptide
  Seed: EECLINDPWVLLNAS
EECLINLPGVLSNAS

SEQ ID NO: 256083 - protein, 15 aa, Artificial Sequence
  Description of Artificial Sequence: Synthetic peptide
  Seed: EECLINDPWVLLNAS
EECLINLPGVLTNAS

SEQ ID NO: 256084 - protein, 15 aa, Artificial Sequence
  Description of Artificial Sequence: Synthetic peptide
  Seed: EECLINDPWVLLNAS
EECLINLPGVLVNAS

SEQ ID NO: 256085 - protein, 15 aa, Artificial Sequence
  Description of Artificial Sequence: Synthetic peptide
  Seed: EECLINDPWVLLNAS
EECLINLPIVLANAS

SEQ ID NO: 256086 - protein, 15 aa, Artificial Sequence
  Description of Artificial Sequence: Synthetic peptide
  Seed: EECLINDPWVLLNAS
EECLINLPNVLANAS

SEQ ID NO: 256087 - protein, 15 aa, Artificial Sequence
  Description of Artificial Sequence: Synthetic peptide
  Seed: EECLINDPWVLLNAS
EECLINLPNVLGNAS

SEQ ID NO: 256088 - protein, 15 aa, Artificial Sequence
  Description of Artificial Sequence: Synthetic peptide
  Seed: EECLINDPWVLLNAS
EECLINLPNVLINAS

SEQ ID NO: 256089 - protein, 15 aa, Artificial Sequence
  Description of Artificial Sequence: Synthetic peptide
  Seed: EECLINDPWVLLNAS
EECLINLPNVLLNAS

SEQ ID NO: 256090 - protein, 15 aa, Artificial Sequence
  Description of Artificial Sequence: Synthetic peptide
  Seed: EECLINDPWVLLNAS
EECLINLPNVLMNAS

SEQ ID NO: 256091 - protein, 15 aa, Artificial Sequence
  Description of Artificial Sequence: Synthetic peptide
  Seed: EECLINDPWVLLNAS
EECLINLPNVLSNAS

SEQ ID NO: 256092 - protein, 15 aa, Artificial Sequence
  Description of Artificial Sequence: Synthetic peptide
  Seed: EECLINDPWVLLNAS
EECLINLPNVLTNAS

SEQ ID NO: 256093 - protein, 15 aa, Artificial Sequence
  Description of Artificial Sequence: Synthetic peptide
  Seed: EECLINDPWVLLNAS
EECLINLPNVLVNAS

SEQ ID NO: 256094 - protein, 15 aa, Artificial Sequence
  Description of Artificial Sequence: Synthetic peptide
  Seed: EECLINDPWVLLNAS
EECLINLPPVLANAS

SEQ ID NO: 256095 - protein, 15 aa, Artificial Sequence
  Description of Artificial Sequence: Synthetic peptide
  Seed: EECLINDPWVLLNAS
EECLINLPPVLCNAS

SEQ ID NO: 256096 - protein, 15 aa, Artificial Sequence
  Description of Artificial Sequence: Synthetic peptide
  Seed: EECLINDPWVLLNAS
EECLINLPPVLGNAS

SEQ ID NO: 256097 - protein, 15 aa, Artificial Sequence
  Description of Artificial Sequence: Synthetic peptide
  Seed: EECLINDPWVLLNAS
EECLINLPPVLINAS

SEQ ID NO: 256098 - protein, 15 aa, Artificial Sequence
  Description of Artificial Sequence: Synthetic peptide
  Seed: EECLINDPWVLLNAS
EECLINLPPVLLNAS

SEQ ID NO: 256099 - protein, 15 aa, Artificial Sequence
  Description of Artificial Sequence: Synthetic peptide
  Seed: EECLINDPWVLLNAS
EECLINLPPVLMNAS

SEQ ID NO: 256100 - protein, 15 aa, Artificial Sequence
  Description of Artificial Sequence: Synthetic peptide
  Seed: EECLINDPWVLLNAS
EECLINLPPVLSNAS

SEQ ID NO: 256101 - protein, 15 aa, Artificial Sequence
  Description of Artificial Sequence: Synthetic peptide
  Seed: EECLINDPWVLLNAS
EECLINLPPVLTNAS

SEQ ID NO: 256102 - protein, 15 aa, Artificial Sequence
  Description of Artificial Sequence: Synthetic peptide
  Seed: EECLINDPWVLLNAS
EECLINLPPVLVNAS

SEQ ID NO: 256103 - protein, 15 aa, Artificial Sequence
  Description of Artificial Sequence: Synthetic peptide
  Seed: EECLINDPWVLLNAS
EECLINLPSVLANAS

SEQ ID NO: 256104 - protein, 15 aa, Artificial Sequence
  Description of Artificial Sequence: Synthetic peptide
  Seed: EECLINDPWVLLNAS
EECLINLPSVLCNAS

SEQ ID NO: 256105 - protein, 15 aa, Artificial Sequence
  Description of Artificial Sequence: Synthetic peptide
  Seed: EECLINDPWVLLNAS
EECLINLPSVLFNAS

SEQ ID NO: 256106 - protein, 15 aa, Artificial Sequence
  Description of Artificial Sequence: Synthetic peptide
  Seed: EECLINDPWVLLNAS
EECLINLPSVLGNAS

SEQ ID NO: 256107 - protein, 15 aa, Artificial Sequence
  Description of Artificial Sequence: Synthetic peptide
  Seed: EECLINDPWVLLNAS
EECLINLPSVLHNAS

SEQ ID NO: 256108 - protein, 15 aa, Artificial Sequence
  Description of Artificial Sequence: Synthetic peptide
  Seed: EECLINDPWVLLNAS
EECLINLPSVLINAS

SEQ ID NO: 256109 - protein, 15 aa, Artificial Sequence
  Description of Artificial Sequence: Synthetic peptide
  Seed: EECLINDPWVLLNAS
EECLINLPSVLLNAS

SEQ ID NO: 256110 - protein, 15 aa, Artificial Sequence
  Description of Artificial Sequence: Synthetic peptide
  Seed: EECLINDPWVLLNAS
EECLINLPSVLMNAS

SEQ ID NO: 256111 - protein, 15 aa, Artificial Sequence
  Description of Artificial Sequence: Synthetic peptide
  Seed: EECLINDPWVLLNAS
EECLINLPSVLNNAS

SEQ ID NO: 256112 - protein, 15 aa, Artificial Sequence
  Description of Artificial Sequence: Synthetic peptide
  Seed: EECLINDPWVLLNAS
EECLINLPSVLPNAS

SEQ ID NO: 256113 - protein, 15 aa, Artificial Sequence
  Description of Artificial Sequence: Synthetic peptide
  Seed: EECLINDPWVLLNAS
EECLINLPSVLQNAS

SEQ ID NO: 256114 - protein, 15 aa, Artificial Sequence
  Description of Artificial Sequence: Synthetic peptide
  Seed: EECLINDPWVLLNAS
EECLINLPSVLSNAS

SEQ ID NO: 256115 - protein, 15 aa, Artificial Sequence
  Description of Artificial Sequence: Synthetic peptide
  Seed: EECLINDPWVLLNAS
EECLINLPSVLTNAS

SEQ ID NO: 256116 - protein, 15 aa, Artificial Sequence
  Description of Artificial Sequence: Synthetic peptide
  Seed: EECLINDPWVLLNAS
EECLINLPSVLVNAS

SEQ ID NO: 256117 - protein, 15 aa, Artificial Sequence
  Description of Artificial Sequence: Synthetic peptide
  Seed: EECLINDPWVLLNAS
EECLINLPTVLANAS

SEQ ID NO: 256118 - protein, 15 aa, Artificial Sequence
  Description of Artificial Sequence: Synthetic peptide
  Seed: EECLINDPWVLLNAS
EECLINLPTVLGNAS

SEQ ID NO: 256119 - protein, 15 aa, Artificial Sequence
  Description of Artificial Sequence: Synthetic peptide
  Seed: EECLINDPWVLLNAS
EECLINLPTVLINAS

SEQ ID NO: 256120 - protein, 15 aa, Artificial Sequence
  Description of Artificial Sequence: Synthetic peptide
  Seed: EECLINDPWVLLNAS
EECLINLPTVLLNAS

SEQ ID NO: 256121 - protein, 15 aa, Artificial Sequence
  Description of Artificial Sequence: Synthetic peptide
  Seed: EECLINDPWVLLNAS
EECLINLPTVLMNAS

SEQ ID NO: 256122 - protein, 15 aa, Artificial Sequence
  Description of Artificial Sequence: Synthetic peptide
  Seed: EECLINDPWVLLNAS
EECLINLPTVLNNAS

SEQ ID NO: 256123 - protein, 15 aa, Artificial Sequence
  Description of Artificial Sequence: Synthetic peptide
  Seed: EECLINDPWVLLNAS
EECLINLPTVLSNAS

SEQ ID NO: 256124 - protein, 15 aa, Artificial Sequence
  Description of Artificial Sequence: Synthetic peptide
  Seed: EECLINDPWVLLNAS
EECLINLPTVLTNAS

SEQ ID NO: 256125 - protein, 15 aa, Artificial Sequence
  Description of Artificial Sequence: Synthetic peptide
  Seed: EECLINDPWVLLNAS
EECLINLPTVLVNAS

SEQ ID NO: 256126 - protein, 15 aa, Artificial Sequence
  Description of Artificial Sequence: Synthetic peptide
  Seed: EECLINDPWVLLNAS
EECLINLPVVLANAS

SEQ ID NO: 256127 - protein, 15 aa, Artificial Sequence
  Description of Artificial Sequence: Synthetic peptide
  Seed: EECLINDPWVLLNAS
EECLINLPVVLINAS

SEQ ID NO: 256128 - protein, 15 aa, Artificial Sequence
  Description of Artificial Sequence: Synthetic peptide
  Seed: EECLINDPWVLLNAS
EECLINLPVVLLNAS

SEQ ID NO: 256129 - protein, 15 aa, Artificial Sequence
  Description of Artificial Sequence: Synthetic peptide
  Seed: EECLINDPWVLLNAS
EECLINLPVVLMNAS

SEQ ID NO: 256130 - protein, 15 aa, Artificial Sequence
  Description of Artificial Sequence: Synthetic peptide
  Seed: EECLINDPWVLLNAS
EECLINLPVVLSNAS

SEQ ID NO: 256131 - protein, 15 aa, Artificial Sequence
  Description of Artificial Sequence: Synthetic peptide
  Seed: EECLINDPWVLLNAS
EECLINLPVVLTNAS

SEQ ID NO: 256132 - protein, 15 aa, Artificial Sequence
  Description of Artificial Sequence: Synthetic peptide
  Seed: EECLINDPWVLLNAS
EECLINLPVVLVNAS

SEQ ID NO: 256133 - protein, 15 aa, Artificial Sequence
  Description of Artificial Sequence: Synthetic peptide
  Seed: EECLINDPWVLLNAS
EECLINMPAVLANAS

SEQ ID NO: 256134 - protein, 15 aa, Artificial Sequence
  Description of Artificial Sequence: Synthetic peptide
  Seed: EECLINDPWVLLNAS
EECLINMPAVLCNAS

SEQ ID NO: 256135 - protein, 15 aa, Artificial Sequence
  Description of Artificial Sequence: Synthetic peptide
  Seed: EECLINDPWVLLNAS
EECLINMPAVLFNAS

SEQ ID NO: 256136 - protein, 15 aa, Artificial Sequence
  Description of Artificial Sequence: Synthetic peptide
  Seed: EECLINDPWVLLNAS
EECLINMPAVLGNAS

SEQ ID NO: 256137 - protein, 15 aa, Artificial Sequence
  Description of Artificial Sequence: Synthetic peptide
  Seed: EECLINDPWVLLNAS
EECLINMPAVLHNAS

SEQ ID NO: 256138 - protein, 15 aa, Artificial Sequence
  Description of Artificial Sequence: Synthetic peptide
  Seed: EECLINDPWVLLNAS
EECLINMPAVLINAS

SEQ ID NO: 256139 - protein, 15 aa, Artificial Sequence
  Description of Artificial Sequence: Synthetic peptide
  Seed: EECLINDPWVLLNAS
EECLINMPAVLKNAS

SEQ ID NO: 256140 - protein, 15 aa, Artificial Sequence
  Description of Artificial Sequence: Synthetic peptide
  Seed: EECLINDPWVLLNAS
EECLINMPAVLLNAS

SEQ ID NO: 256141 - protein, 15 aa, Artificial Sequence
  Description of Artificial Sequence: Synthetic peptide
  Seed: EECLINDPWVLLNAS
EECLINMPAVLMNAS

SEQ ID NO: 256142 - protein, 15 aa, Artificial Sequence
  Description of Artificial Sequence: Synthetic peptide
  Seed: EECLINDPWVLLNAS
EECLINMPAVLNNAS

SEQ ID NO: 256143 - protein, 15 aa, Artificial Sequence
  Description of Artificial Sequence: Synthetic peptide
  Seed: EECLINDPWVLLNAS
EECLINMPAVLPNAS

SEQ ID NO: 256144 - protein, 15 aa, Artificial Sequence
  Description of Artificial Sequence: Synthetic peptide
  Seed: EECLINDPWVLLNAS
EECLINMPAVLQNAS

SEQ ID NO: 256145 - protein, 15 aa, Artificial Sequence
  Description of Artificial Sequence: Synthetic peptide
  Seed: EECLINDPWVLLNAS
EECLINMPAVLRNAS

SEQ ID NO: 256146 - protein, 15 aa, Artificial Sequence
  Description of Artificial Sequence: Synthetic peptide
  Seed: EECLINDPWVLLNAS
EECLINMPAVLSNAS

SEQ ID NO: 256147 - protein, 15 aa, Artificial Sequence
  Description of Artificial Sequence: Synthetic peptide
  Seed: EECLINDPWVLLNAS
EECLINMPAVLTNAS

SEQ ID NO: 256148 - protein, 15 aa, Artificial Sequence
  Description of Artificial Sequence: Synthetic peptide
  Seed: EECLINDPWVLLNAS
EECLINMPAVLVNAS

SEQ ID NO: 256149 - protein, 15 aa, Artificial Sequence
  Description of Artificial Sequence: Synthetic peptide
  Seed: EECLINDPWVLLNAS
EECLINMPAVLYNAS

SEQ ID NO: 256150 - protein, 15 aa, Artificial Sequence
  Description of Artificial Sequence: Synthetic peptide
  Seed: EECLINDPWVLLNAS
EECLINMPFVLLNAS

SEQ ID NO: 256151 - protein, 15 aa, Artificial Sequence
  Description of Artificial Sequence: Synthetic peptide
  Seed: EECLINDPWVLLNAS
EECLINMPFVLVNAS

SEQ ID NO: 256152 - protein, 15 aa, Artificial Sequence
  Description of Artificial Sequence: Synthetic peptide
  Seed: EECLINDPWVLLNAS
EECLINMPGVLANAS

SEQ ID NO: 256153 - protein, 15 aa, Artificial Sequence
  Description of Artificial Sequence: Synthetic peptide
  Seed: EECLINDPWVLLNAS
EECLINMPGVLCNAS

SEQ ID NO: 256154 - protein, 15 aa, Artificial Sequence
  Description of Artificial Sequence: Synthetic peptide
  Seed: EECLINDPWVLLNAS
EECLINMPGVLFNAS

SEQ ID NO: 256155 - protein, 15 aa, Artificial Sequence
  Description of Artificial Sequence: Synthetic peptide
  Seed: EECLINDPWVLLNAS
EECLINMPGVLGNAS

SEQ ID NO: 256156 - protein, 15 aa, Artificial Sequence
  Description of Artificial Sequence: Synthetic peptide
  Seed: EECLINDPWVLLNAS
EECLINMPGVLHNAS

SEQ ID NO: 256157 - protein, 15 aa, Artificial Sequence
  Description of Artificial Sequence: Synthetic peptide
  Seed: EECLINDPWVLLNAS
EECLINMPGVLINAS

SEQ ID NO: 256158 - protein, 15 aa, Artificial Sequence
  Description of Artificial Sequence: Synthetic peptide
  Seed: EECLINDPWVLLNAS
EECLINMPGVLLNAS

SEQ ID NO: 256159 - protein, 15 aa, Artificial Sequence
  Description of Artificial Sequence: Synthetic peptide
  Seed: EECLINDPWVLLNAS
EECLINMPGVLMNAS

SEQ ID NO: 256160 - protein, 15 aa, Artificial Sequence
  Description of Artificial Sequence: Synthetic peptide
  Seed: EECLINDPWVLLNAS
EECLINMPGVLNNAS

SEQ ID NO: 256161 - protein, 15 aa, Artificial Sequence
  Description of Artificial Sequence: Synthetic peptide
  Seed: EECLINDPWVLLNAS
EECLINMPGVLPNAS

SEQ ID NO: 256162 - protein, 15 aa, Artificial Sequence
  Description of Artificial Sequence: Synthetic peptide
  Seed: EECLINDPWVLLNAS
EECLINMPGVLQNAS

SEQ ID NO: 256163 - protein, 15 aa, Artificial Sequence
  Description of Artificial Sequence: Synthetic peptide
  Seed: EECLINDPWVLLNAS
EECLINMPGVLSNAS

SEQ ID NO: 256164 - protein, 15 aa, Artificial Sequence
  Description of Artificial Sequence: Synthetic peptide
  Seed: EECLINDPWVLLNAS
EECLINMPGVLTNAS

SEQ ID NO: 256165 - protein, 15 aa, Artificial Sequence
  Description of Artificial Sequence: Synthetic peptide
  Seed: EECLINDPWVLLNAS
EECLINMPGVLVNAS

SEQ ID NO: 256166 - protein, 15 aa, Artificial Sequence
  Description of Artificial Sequence: Synthetic peptide
  Seed: EECLINDPWVLLNAS
EECLINMPIVLANAS

SEQ ID NO: 256167 - protein, 15 aa, Artificial Sequence
  Description of Artificial Sequence: Synthetic peptide
  Seed: EECLINDPWVLLNAS
EECLINMPIVLVNAS

SEQ ID NO: 256168 - protein, 15 aa, Artificial Sequence
  Description of Artificial Sequence: Synthetic peptide
  Seed: EECLINDPWVLLNAS
EECLINMPNVLANAS

SEQ ID NO: 256169 - protein, 15 aa, Artificial Sequence
  Description of Artificial Sequence: Synthetic peptide
  Seed: EECLINDPWVLLNAS
EECLINMPNVLFNAS

SEQ ID NO: 256170 - protein, 15 aa, Artificial Sequence
  Description of Artificial Sequence: Synthetic peptide
  Seed: EECLINDPWVLLNAS
EECLINMPNVLGNAS

SEQ ID NO: 256171 - protein, 15 aa, Artificial Sequence
  Description of Artificial Sequence: Synthetic peptide
  Seed: EECLINDPWVLLNAS
EECLINMPNVLINAS

SEQ ID NO: 256172 - protein, 15 aa, Artificial Sequence
  Description of Artificial Sequence: Synthetic peptide
  Seed: EECLINDPWVLLNAS
EECLINMPNVLLNAS

SEQ ID NO: 256173 - protein, 15 aa, Artificial Sequence
  Description of Artificial Sequence: Synthetic peptide
  Seed: EECLINDPWVLLNAS
EECLINMPNVLMNAS

SEQ ID NO: 256174 - protein, 15 aa, Artificial Sequence
  Description of Artificial Sequence: Synthetic peptide
  Seed: EECLINDPWVLLNAS
EECLINMPNVLSNAS

SEQ ID NO: 256175 - protein, 15 aa, Artificial Sequence
  Description of Artificial Sequence: Synthetic peptide
  Seed: EECLINDPWVLLNAS
EECLINMPNVLTNAS

SEQ ID NO: 256176 - protein, 15 aa, Artificial Sequence
  Description of Artificial Sequence: Synthetic peptide
  Seed: EECLINDPWVLLNAS
EECLINMPNVLVNAS

SEQ ID NO: 256177 - protein, 15 aa, Artificial Sequence
  Description of Artificial Sequence: Synthetic peptide
  Seed: EECLINDPWVLLNAS
EECLINMPNVLYNAS

SEQ ID NO: 256178 - protein, 15 aa, Artificial Sequence
  Description of Artificial Sequence: Synthetic peptide
  Seed: EECLINDPWVLLNAS
EECLINMPPVLANAS

SEQ ID NO: 256179 - protein, 15 aa, Artificial Sequence
  Description of Artificial Sequence: Synthetic peptide
  Seed: EECLINDPWVLLNAS
EECLINMPPVLGNAS

SEQ ID NO: 256180 - protein, 15 aa, Artificial Sequence
  Description of Artificial Sequence: Synthetic peptide
  Seed: EECLINDPWVLLNAS
EECLINMPPVLINAS

SEQ ID NO: 256181 - protein, 15 aa, Artificial Sequence
  Description of Artificial Sequence: Synthetic peptide
  Seed: EECLINDPWVLLNAS
EECLINMPPVLLNAS

SEQ ID NO: 256182 - protein, 15 aa, Artificial Sequence
  Description of Artificial Sequence: Synthetic peptide
  Seed: EECLINDPWVLLNAS
EECLINMPPVLMNAS

SEQ ID NO: 256183 - protein, 15 aa, Artificial Sequence
  Description of Artificial Sequence: Synthetic peptide
  Seed: EECLINDPWVLLNAS
EECLINMPPVLSNAS

SEQ ID NO: 256184 - protein, 15 aa, Artificial Sequence
  Description of Artificial Sequence: Synthetic peptide
  Seed: EECLINDPWVLLNAS
EECLINMPPVLTNAS

SEQ ID NO: 256185 - protein, 15 aa, Artificial Sequence
  Description of Artificial Sequence: Synthetic peptide
  Seed: EECLINDPWVLLNAS
EECLINMPPVLVNAS

SEQ ID NO: 256186 - protein, 15 aa, Artificial Sequence
  Description of Artificial Sequence: Synthetic peptide
  Seed: EECLINDPWVLLNAS
EECLINMPSVLANAS

SEQ ID NO: 256187 - protein, 15 aa, Artificial Sequence
  Description of Artificial Sequence: Synthetic peptide
  Seed: EECLINDPWVLLNAS
EECLINMPSVLCNAS

SEQ ID NO: 256188 - protein, 15 aa, Artificial Sequence
  Description of Artificial Sequence: Synthetic peptide
  Seed: EECLINDPWVLLNAS
EECLINMPSVLFNAS

SEQ ID NO: 256189 - protein, 15 aa, Artificial Sequence
  Description of Artificial Sequence: Synthetic peptide
  Seed: EECLINDPWVLLNAS
EECLINMPSVLGNAS

SEQ ID NO: 256190 - protein, 15 aa, Artificial Sequence
  Description of Artificial Sequence: Synthetic peptide
  Seed: EECLINDPWVLLNAS
EECLINMPSVLHNAS

SEQ ID NO: 256191 - protein, 15 aa, Artificial Sequence
  Description of Artificial Sequence: Synthetic peptide
  Seed: EECLINDPWVLLNAS
EECLINMPSVLINAS

SEQ ID NO: 256192 - protein, 15 aa, Artificial Sequence
  Description of Artificial Sequence: Synthetic peptide
  Seed: EECLINDPWVLLNAS
EECLINMPSVLLNAS

SEQ ID NO: 256193 - protein, 15 aa, Artificial Sequence
  Description of Artificial Sequence: Synthetic peptide
  Seed: EECLINDPWVLLNAS
EECLINMPSVLMNAS

SEQ ID NO: 256194 - protein, 15 aa, Artificial Sequence
  Description of Artificial Sequence: Synthetic peptide
  Seed: EECLINDPWVLLNAS
EECLINMPSVLNNAS

SEQ ID NO: 256195 - protein, 15 aa, Artificial Sequence
  Description of Artificial Sequence: Synthetic peptide
  Seed: EECLINDPWVLLNAS
EECLINMPSVLQNAS

SEQ ID NO: 256196 - protein, 15 aa, Artificial Sequence
  Description of Artificial Sequence: Synthetic peptide
  Seed: EECLINDPWVLLNAS
EECLINMPSVLSNAS

SEQ ID NO: 256197 - protein, 15 aa, Artificial Sequence
  Description of Artificial Sequence: Synthetic peptide
  Seed: EECLINDPWVLLNAS
EECLINMPSVLTNAS

SEQ ID NO: 256198 - protein, 15 aa, Artificial Sequence
  Description of Artificial Sequence: Synthetic peptide
  Seed: EECLINDPWVLLNAS
EECLINMPSVLVNAS

SEQ ID NO: 256199 - protein, 15 aa, Artificial Sequence
  Description of Artificial Sequence: Synthetic peptide
  Seed: EECLINDPWVLLNAS
EECLINMPTVLANAS

SEQ ID NO: 256200 - protein, 15 aa, Artificial Sequence
  Description of Artificial Sequence: Synthetic peptide
  Seed: EECLINDPWVLLNAS
EECLINMPTVLGNAS

SEQ ID NO: 256201 - protein, 15 aa, Artificial Sequence
  Description of Artificial Sequence: Synthetic peptide
  Seed: EECLINDPWVLLNAS
EECLINMPTVLINAS

SEQ ID NO: 256202 - protein, 15 aa, Artificial Sequence
  Description of Artificial Sequence: Synthetic peptide
  Seed: EECLINDPWVLLNAS
EECLINMPTVLLNAS

SEQ ID NO: 256203 - protein, 15 aa, Artificial Sequence
  Description of Artificial Sequence: Synthetic peptide
  Seed: EECLINDPWVLLNAS
EECLINMPTVLMNAS

SEQ ID NO: 256204 - protein, 15 aa, Artificial Sequence
  Description of Artificial Sequence: Synthetic peptide
  Seed: EECLINDPWVLLNAS
EECLINMPTVLSNAS

SEQ ID NO: 256205 - protein, 15 aa, Artificial Sequence
  Description of Artificial Sequence: Synthetic peptide
  Seed: EECLINDPWVLLNAS
EECLINMPTVLTNAS

SEQ ID NO: 256206 - protein, 15 aa, Artificial Sequence
  Description of Artificial Sequence: Synthetic peptide
  Seed: EECLINDPWVLLNAS
EECLINMPTVLVNAS

SEQ ID NO: 256207 - protein, 15 aa, Artificial Sequence
  Description of Artificial Sequence: Synthetic peptide
  Seed: EECLINDPWVLLNAS
EECLINMPVVLANAS

SEQ ID NO: 256208 - protein, 15 aa, Artificial Sequence
  Description of Artificial Sequence: Synthetic peptide
  Seed: EECLINDPWVLLNAS
EECLINMPVVLINAS

SEQ ID NO: 256209 - protein, 15 aa, Artificial Sequence
  Description of Artificial Sequence: Synthetic peptide
  Seed: EECLINDPWVLLNAS
EECLINMPVVLLNAS

SEQ ID NO: 256210 - protein, 15 aa, Artificial Sequence
  Description of Artificial Sequence: Synthetic peptide
  Seed: EECLINDPWVLLNAS
EECLINMPVVLMNAS

SEQ ID NO: 256211 - protein, 15 aa, Artificial Sequence
  Description of Artificial Sequence: Synthetic peptide
  Seed: EECLINDPWVLLNAS
EECLINMPVVLSNAS

SEQ ID NO: 256212 - protein, 15 aa, Artificial Sequence
  Description of Artificial Sequence: Synthetic peptide
  Seed: EECLINDPWVLLNAS
EECLINMPVVLTNAS

SEQ ID NO: 256213 - protein, 15 aa, Artificial Sequence
  Description of Artificial Sequence: Synthetic peptide
  Seed: EECLINDPWVLLNAS
EECLINMPVVLVNAS

SEQ ID NO: 256214 - protein, 15 aa, Artificial Sequence
  Description of Artificial Sequence: Synthetic peptide
  Seed: EECLINDPWVLLNAS
EECLINNPAVLANAS

SEQ ID NO: 256215 - protein, 15 aa, Artificial Sequence
  Description of Artificial Sequence: Synthetic peptide
  Seed: EECLINDPWVLLNAS
EECLINNPAVLFNAS

SEQ ID NO: 256216 - protein, 15 aa, Artificial Sequence
  Description of Artificial Sequence: Synthetic peptide
  Seed: EECLINDPWVLLNAS
EECLINNPAVLGNAS

SEQ ID NO: 256217 - protein, 15 aa, Artificial Sequence
  Description of Artificial Sequence: Synthetic peptide
  Seed: EECLINDPWVLLNAS
EECLINNPAVLHNAS

SEQ ID NO: 256218 - protein, 15 aa, Artificial Sequence
  Description of Artificial Sequence: Synthetic peptide
  Seed: EECLINDPWVLLNAS
EECLINNPAVLINAS

SEQ ID NO: 256219 - protein, 15 aa, Artificial Sequence
  Description of Artificial Sequence: Synthetic peptide
  Seed: EECLINDPWVLLNAS
EECLINNPAVLKNAS

SEQ ID NO: 256220 - protein, 15 aa, Artificial Sequence
  Description of Artificial Sequence: Synthetic peptide
  Seed: EECLINDPWVLLNAS
EECLINNPAVLLNAS

SEQ ID NO: 256221 - protein, 15 aa, Artificial Sequence
  Description of Artificial Sequence: Synthetic peptide
  Seed: EECLINDPWVLLNAS
EECLINNPAVLMNAS

SEQ ID NO: 256222 - protein, 15 aa, Artificial Sequence
  Description of Artificial Sequence: Synthetic peptide
  Seed: EECLINDPWVLLNAS
EECLINNPAVLNNAS

SEQ ID NO: 256223 - protein, 15 aa, Artificial Sequence
  Description of Artificial Sequence: Synthetic peptide
  Seed: EECLINDPWVLLNAS
EECLINNPAVLPNAS

SEQ ID NO: 256224 - protein, 15 aa, Artificial Sequence
  Description of Artificial Sequence: Synthetic peptide
  Seed: EECLINDPWVLLNAS
EECLINNPAVLQNAS

SEQ ID NO: 256225 - protein, 15 aa, Artificial Sequence
  Description of Artificial Sequence: Synthetic peptide
  Seed: EECLINDPWVLLNAS
EECLINNPAVLRNAS

SEQ ID NO: 256226 - protein, 15 aa, Artificial Sequence
  Description of Artificial Sequence: Synthetic peptide
  Seed: EECLINDPWVLLNAS
EECLINNPAVLSNAS

SEQ ID NO: 256227 - protein, 15 aa, Artificial Sequence
  Description of Artificial Sequence: Synthetic peptide
  Seed: EECLINDPWVLLNAS
EECLINNPAVLTNAS

SEQ ID NO: 256228 - protein, 15 aa, Artificial Sequence
  Description of Artificial Sequence: Synthetic peptide
  Seed: EECLINDPWVLLNAS
EECLINNPAVLVNAS

SEQ ID NO: 256229 - protein, 15 aa, Artificial Sequence
  Description of Artificial Sequence: Synthetic peptide
  Seed: EECLINDPWVLLNAS
EECLINNPAVLWNAS

SEQ ID NO: 256230 - protein, 15 aa, Artificial Sequence
  Description of Artificial Sequence: Synthetic peptide
  Seed: EECLINDPWVLLNAS
EECLINNPAVLYNAS

SEQ ID NO: 256231 - protein, 15 aa, Artificial Sequence
  Description of Artificial Sequence: Synthetic peptide
  Seed: EECLINDPWVLLNAS
EECLINNPCVLINAS

SEQ ID NO: 256232 - protein, 15 aa, Artificial Sequence
  Description of Artificial Sequence: Synthetic peptide
  Seed: EECLINDPWVLLNAS
EECLINNPCVLVNAS

SEQ ID NO: 256233 - protein, 15 aa, Artificial Sequence
  Description of Artificial Sequence: Synthetic peptide
  Seed: EECLINDPWVLLNAS
EECLINNPFVLINAS

SEQ ID NO: 256234 - protein, 15 aa, Artificial Sequence
  Description of Artificial Sequence: Synthetic peptide
  Seed: EECLINDPWVLLNAS
EECLINNPFVLVNAS

SEQ ID NO: 256235 - protein, 15 aa, Artificial Sequence
  Description of Artificial Sequence: Synthetic peptide
  Seed: EECLINDPWVLLNAS
EECLINNPGVLANAS

SEQ ID NO: 256236 - protein, 15 aa, Artificial Sequence
  Description of Artificial Sequence: Synthetic peptide
  Seed: EECLINDPWVLLNAS
EECLINNPGVLFNAS

SEQ ID NO: 256237 - protein, 15 aa, Artificial Sequence
  Description of Artificial Sequence: Synthetic peptide
  Seed: EECLINDPWVLLNAS
EECLINNPGVLINAS

SEQ ID NO: 256238 - protein, 15 aa, Artificial Sequence
  Description of Artificial Sequence: Synthetic peptide
  Seed: EECLINDPWVLLNAS
EECLINNPGVLLNAS

SEQ ID NO: 256239 - protein, 15 aa, Artificial Sequence
  Description of Artificial Sequence: Synthetic peptide
  Seed: EECLINDPWVLLNAS
EECLINNPGVLMNAS

SEQ ID NO: 256240 - protein, 15 aa, Artificial Sequence
  Description of Artificial Sequence: Synthetic peptide
  Seed: EECLINDPWVLLNAS
EECLINNPGVLSNAS

SEQ ID NO: 256241 - protein, 15 aa, Artificial Sequence
  Description of Artificial Sequence: Synthetic peptide
  Seed: EECLINDPWVLLNAS
EECLINNPGVLTNAS

SEQ ID NO: 256242 - protein, 15 aa, Artificial Sequence
  Description of Artificial Sequence: Synthetic peptide
  Seed: EECLINDPWVLLNAS
EECLINNPGVLVNAS

SEQ ID NO: 256243 - protein, 15 aa, Artificial Sequence
  Description of Artificial Sequence: Synthetic peptide
  Seed: EECLINDPWVLLNAS
EECLINNPGVLWNAS

SEQ ID NO: 256244 - protein, 15 aa, Artificial Sequence
  Description of Artificial Sequence: Synthetic peptide
  Seed: EECLINDPWVLLNAS
EECLINNPGVLYNAS

SEQ ID NO: 256245 - protein, 15 aa, Artificial Sequence
  Description of Artificial Sequence: Synthetic peptide
  Seed: EECLINDPWVLLNAS
EECLINNPHVLFNAS

SEQ ID NO: 256246 - protein, 15 aa, Artificial Sequence
  Description of Artificial Sequence: Synthetic peptide
  Seed: EECLINDPWVLLNAS
EECLINNPHVLINAS

SEQ ID NO: 256247 - protein, 15 aa, Artificial Sequence
  Description of Artificial Sequence: Synthetic peptide
  Seed: EECLINDPWVLLNAS
EECLINNPHVLLNAS

SEQ ID NO: 256248 - protein, 15 aa, Artificial Sequence
  Description of Artificial Sequence: Synthetic peptide
  Seed: EECLINDPWVLLNAS
EECLINNPHVLMNAS

SEQ ID NO: 256249 - protein, 15 aa, Artificial Sequence
  Description of Artificial Sequence: Synthetic peptide
  Seed: EECLINDPWVLLNAS
EECLINNPHVLVNAS

SEQ ID NO: 256250 - protein, 15 aa, Artificial Sequence
  Description of Artificial Sequence: Synthetic peptide
  Seed: EECLINDPWVLLNAS
EECLINNPHVLYNAS

SEQ ID NO: 256251 - protein, 15 aa, Artificial Sequence
  Description of Artificial Sequence: Synthetic peptide
  Seed: EECLINDPWVLLNAS
EECLINNPIVLANAS

SEQ ID NO: 256252 - protein, 15 aa, Artificial Sequence
  Description of Artificial Sequence: Synthetic peptide
  Seed: EECLINDPWVLLNAS
EECLINNPIVLFNAS

SEQ ID NO: 256253 - protein, 15 aa, Artificial Sequence
  Description of Artificial Sequence: Synthetic peptide
  Seed: EECLINDPWVLLNAS
EECLINNPIVLHNAS

SEQ ID NO: 256254 - protein, 15 aa, Artificial Sequence
  Description of Artificial Sequence: Synthetic peptide
  Seed: EECLINDPWVLLNAS
EECLINNPIVLINAS

SEQ ID NO: 256255 - protein, 15 aa, Artificial Sequence
  Description of Artificial Sequence: Synthetic peptide
  Seed: EECLINDPWVLLNAS
EECLINNPIVLKNAS

SEQ ID NO: 256256 - protein, 15 aa, Artificial Sequence
  Description of Artificial Sequence: Synthetic peptide
  Seed: EECLINDPWVLLNAS
EECLINNPIVLLNAS

SEQ ID NO: 256257 - protein, 15 aa, Artificial Sequence
  Description of Artificial Sequence: Synthetic peptide
  Seed: EECLINDPWVLLNAS
EECLINNPIVLMNAS

SEQ ID NO: 256258 - protein, 15 aa, Artificial Sequence
  Description of Artificial Sequence: Synthetic peptide
  Seed: EECLINDPWVLLNAS
EECLINNPIVLNNAS

SEQ ID NO: 256259 - protein, 15 aa, Artificial Sequence
  Description of Artificial Sequence: Synthetic peptide
  Seed: EECLINDPWVLLNAS
EECLINNPIVLQNAS

SEQ ID NO: 256260 - protein, 15 aa, Artificial Sequence
  Description of Artificial Sequence: Synthetic peptide
  Seed: EECLINDPWVLLNAS
EECLINNPIVLRNAS

SEQ ID NO: 256261 - protein, 15 aa, Artificial Sequence
  Description of Artificial Sequence: Synthetic peptide
  Seed: EECLINDPWVLLNAS
EECLINNPIVLSNAS

SEQ ID NO: 256262 - protein, 15 aa, Artificial Sequence
  Description of Artificial Sequence: Synthetic peptide
  Seed: EECLINDPWVLLNAS
EECLINNPIVLTNAS

SEQ ID NO: 256263 - protein, 15 aa, Artificial Sequence
  Description of Artificial Sequence: Synthetic peptide
  Seed: EECLINDPWVLLNAS
EECLINNPIVLVNAS

SEQ ID NO: 256264 - protein, 15 aa, Artificial Sequence
  Description of Artificial Sequence: Synthetic peptide
  Seed: EECLINDPWVLLNAS
EECLINNPIVLWNAS

SEQ ID NO: 256265 - protein, 15 aa, Artificial Sequence
  Description of Artificial Sequence: Synthetic peptide
  Seed: EECLINDPWVLLNAS
EECLINNPIVLYNAS

SEQ ID NO: 256266 - protein, 15 aa, Artificial Sequence
  Description of Artificial Sequence: Synthetic peptide
  Seed: EECLINDPWVLLNAS
EECLINNPLVLANAS

SEQ ID NO: 256267 - protein, 15 aa, Artificial Sequence
  Description of Artificial Sequence: Synthetic peptide
  Seed: EECLINDPWVLLNAS
EECLINNPLVLFNAS

SEQ ID NO: 256268 - protein, 15 aa, Artificial Sequence
  Description of Artificial Sequence: Synthetic peptide
  Seed: EECLINDPWVLLNAS
EECLINNPLVLINAS

SEQ ID NO: 256269 - protein, 15 aa, Artificial Sequence
  Description of Artificial Sequence: Synthetic peptide
  Seed: EECLINDPWVLLNAS
EECLINNPLVLLNAS

SEQ ID NO: 256270 - protein, 15 aa, Artificial Sequence
  Description of Artificial Sequence: Synthetic peptide
  Seed: EECLINDPWVLLNAS
EECLINNPLVLMNAS

SEQ ID NO: 256271 - protein, 15 aa, Artificial Sequence
  Description of Artificial Sequence: Synthetic peptide
  Seed: EECLINDPWVLLNAS
EECLINNPLVLSNAS

SEQ ID NO: 256272 - protein, 15 aa, Artificial Sequence
  Description of Artificial Sequence: Synthetic peptide
  Seed: EECLINDPWVLLNAS
EECLINNPLVLTNAS

SEQ ID NO: 256273 - protein, 15 aa, Artificial Sequence
  Description of Artificial Sequence: Synthetic peptide
  Seed: EECLINDPWVLLNAS
EECLINNPLVLVNAS

SEQ ID NO: 256274 - protein, 15 aa, Artificial Sequence
  Description of Artificial Sequence: Synthetic peptide
  Seed: EECLINDPWVLLNAS
EECLINNPLVLYNAS

SEQ ID NO: 256275 - protein, 15 aa, Artificial Sequence
  Description of Artificial Sequence: Synthetic peptide
  Seed: EECLINDPWVLLNAS
EECLINNPMVLANAS

SEQ ID NO: 256276 - protein, 15 aa, Artificial Sequence
  Description of Artificial Sequence: Synthetic peptide
  Seed: EECLINDPWVLLNAS
EECLINNPMVLFNAS

SEQ ID NO: 256277 - protein, 15 aa, Artificial Sequence
  Description of Artificial Sequence: Synthetic peptide
  Seed: EECLINDPWVLLNAS
EECLINNPMVLINAS

SEQ ID NO: 256278 - protein, 15 aa, Artificial Sequence
  Description of Artificial Sequence: Synthetic peptide
  Seed: EECLINDPWVLLNAS
EECLINNPMVLLNAS

SEQ ID NO: 256279 - protein, 15 aa, Artificial Sequence
  Description of Artificial Sequence: Synthetic peptide
  Seed: EECLINDPWVLLNAS
EECLINNPMVLMNAS

SEQ ID NO: 256280 - protein, 15 aa, Artificial Sequence
  Description of Artificial Sequence: Synthetic peptide
  Seed: EECLINDPWVLLNAS
EECLINNPMVLSNAS

SEQ ID NO: 256281 - protein, 15 aa, Artificial Sequence
  Description of Artificial Sequence: Synthetic peptide
  Seed: EECLINDPWVLLNAS
EECLINNPMVLTNAS

SEQ ID NO: 256282 - protein, 15 aa, Artificial Sequence
  Description of Artificial Sequence: Synthetic peptide
  Seed: EECLINDPWVLLNAS
EECLINNPMVLVNAS

SEQ ID NO: 256283 - protein, 15 aa, Artificial Sequence
  Description of Artificial Sequence: Synthetic peptide
  Seed: EECLINDPWVLLNAS
EECLINNPMVLWNAS

SEQ ID NO: 256284 - protein, 15 aa, Artificial Sequence
  Description of Artificial Sequence: Synthetic peptide
  Seed: EECLINDPWVLLNAS
EECLINNPMVLYNAS

SEQ ID NO: 256285 - protein, 15 aa, Artificial Sequence
  Description of Artificial Sequence: Synthetic peptide
  Seed: EECLINDPWVLLNAS
EECLINNPNVLANAS

SEQ ID NO: 256286 - protein, 15 aa, Artificial Sequence
  Description of Artificial Sequence: Synthetic peptide
  Seed: EECLINDPWVLLNAS
EECLINNPNVLFNAS

SEQ ID NO: 256287 - protein, 15 aa, Artificial Sequence
  Description of Artificial Sequence: Synthetic peptide
  Seed: EECLINDPWVLLNAS
EECLINNPNVLGNAS

SEQ ID NO: 256288 - protein, 15 aa, Artificial Sequence
  Description of Artificial Sequence: Synthetic peptide
  Seed: EECLINDPWVLLNAS
EECLINNPNVLHNAS

SEQ ID NO: 256289 - protein, 15 aa, Artificial Sequence
  Description of Artificial Sequence: Synthetic peptide
  Seed: EECLINDPWVLLNAS
EECLINNPNVLINAS

SEQ ID NO: 256290 - protein, 15 aa, Artificial Sequence
  Description of Artificial Sequence: Synthetic peptide
  Seed: EECLINDPWVLLNAS
EECLINNPNVLKNAS

SEQ ID NO: 256291 - protein, 15 aa, Artificial Sequence
  Description of Artificial Sequence: Synthetic peptide
  Seed: EECLINDPWVLLNAS
EECLINNPNVLLNAS

SEQ ID NO: 256292 - protein, 15 aa, Artificial Sequence
  Description of Artificial Sequence: Synthetic peptide
  Seed: EECLINDPWVLLNAS
EECLINNPNVLMNAS

SEQ ID NO: 256293 - protein, 15 aa, Artificial Sequence
  Description of Artificial Sequence: Synthetic peptide
  Seed: EECLINDPWVLLNAS
EECLINNPNVLNNAS

SEQ ID NO: 256294 - protein, 15 aa, Artificial Sequence
  Description of Artificial Sequence: Synthetic peptide
  Seed: EECLINDPWVLLNAS
EECLINNPNVLQNAS

SEQ ID NO: 256295 - protein, 15 aa, Artificial Sequence
  Description of Artificial Sequence: Synthetic peptide
  Seed: EECLINDPWVLLNAS
EECLINNPNVLRNAS

SEQ ID NO: 256296 - protein, 15 aa, Artificial Sequence
  Description of Artificial Sequence: Synthetic peptide
  Seed: EECLINDPWVLLNAS
EECLINNPNVLSNAS

SEQ ID NO: 256297 - protein, 15 aa, Artificial Sequence
  Description of Artificial Sequence: Synthetic peptide
  Seed: EECLINDPWVLLNAS
EECLINNPNVLTNAS

SEQ ID NO: 256298 - protein, 15 aa, Artificial Sequence
  Description of Artificial Sequence: Synthetic peptide
  Seed: EECLINDPWVLLNAS
EECLINNPNVLVNAS

SEQ ID NO: 256299 - protein, 15 aa, Artificial Sequence
  Description of Artificial Sequence: Synthetic peptide
  Seed: EECLINDPWVLLNAS
EECLINNPNVLWNAS

SEQ ID NO: 256300 - protein, 15 aa, Artificial Sequence
  Description of Artificial Sequence: Synthetic peptide
  Seed: EECLINDPWVLLNAS
EECLINNPNVLYNAS

SEQ ID NO: 256301 - protein, 15 aa, Artificial Sequence
  Description of Artificial Sequence: Synthetic peptide
  Seed: EECLINDPWVLLNAS
EECLINNPPVLANAS

SEQ ID NO: 256302 - protein, 15 aa, Artificial Sequence
  Description of Artificial Sequence: Synthetic peptide
  Seed: EECLINDPWVLLNAS
EECLINNPPVLFNAS

SEQ ID NO: 256303 - protein, 15 aa, Artificial Sequence
  Description of Artificial Sequence: Synthetic peptide
  Seed: EECLINDPWVLLNAS
EECLINNPPVLINAS

SEQ ID NO: 256304 - protein, 15 aa, Artificial Sequence
  Description of Artificial Sequence: Synthetic peptide
  Seed: EECLINDPWVLLNAS
EECLINNPPVLLNAS

SEQ ID NO: 256305 - protein, 15 aa, Artificial Sequence
  Description of Artificial Sequence: Synthetic peptide
  Seed: EECLINDPWVLLNAS
EECLINNPPVLMNAS

SEQ ID NO: 256306 - protein, 15 aa, Artificial Sequence
  Description of Artificial Sequence: Synthetic peptide
  Seed: EECLINDPWVLLNAS
EECLINNPPVLSNAS

SEQ ID NO: 256307 - protein, 15 aa, Artificial Sequence
  Description of Artificial Sequence: Synthetic peptide
  Seed: EECLINDPWVLLNAS
EECLINNPPVLTNAS

SEQ ID NO: 256308 - protein, 15 aa, Artificial Sequence
  Description of Artificial Sequence: Synthetic peptide
  Seed: EECLINDPWVLLNAS
EECLINNPPVLVNAS

SEQ ID NO: 256309 - protein, 15 aa, Artificial Sequence
  Description of Artificial Sequence: Synthetic peptide
  Seed: EECLINDPWVLLNAS
EECLINNPPVLWNAS

SEQ ID NO: 256310 - protein, 15 aa, Artificial Sequence
  Description of Artificial Sequence: Synthetic peptide
  Seed: EECLINDPWVLLNAS
EECLINNPPVLYNAS

SEQ ID NO: 256311 - protein, 15 aa, Artificial Sequence
  Description of Artificial Sequence: Synthetic peptide
  Seed: EECLINDPWVLLNAS
EECLINNPQVLINAS

SEQ ID NO: 256312 - protein, 15 aa, Artificial Sequence
  Description of Artificial Sequence: Synthetic peptide
  Seed: EECLINDPWVLLNAS
EECLINNPQVLLNAS

SEQ ID NO: 256313 - protein, 15 aa, Artificial Sequence
  Description of Artificial Sequence: Synthetic peptide
  Seed: EECLINDPWVLLNAS
EECLINNPQVLVNAS

SEQ ID NO: 256314 - protein, 15 aa, Artificial Sequence
  Description of Artificial Sequence: Synthetic peptide
  Seed: EECLINDPWVLLNAS
EECLINNPRVLINAS

SEQ ID NO: 256315 - protein, 15 aa, Artificial Sequence
  Description of Artificial Sequence: Synthetic peptide
  Seed: EECLINDPWVLLNAS
EECLINNPRVLVNAS

SEQ ID NO: 256316 - protein, 15 aa, Artificial Sequence
  Description of Artificial Sequence: Synthetic peptide
  Seed: EECLINDPWVLLNAS
EECLINNPSVLANAS

SEQ ID NO: 256317 - protein, 15 aa, Artificial Sequence
  Description of Artificial Sequence: Synthetic peptide
  Seed: EECLINDPWVLLNAS
EECLINNPSVLFNAS

SEQ ID NO: 256318 - protein, 15 aa, Artificial Sequence
  Description of Artificial Sequence: Synthetic peptide
  Seed: EECLINDPWVLLNAS
EECLINNPSVLINAS

SEQ ID NO: 256319 - protein, 15 aa, Artificial Sequence
  Description of Artificial Sequence: Synthetic peptide
  Seed: EECLINDPWVLLNAS
EECLINNPSVLLNAS

SEQ ID NO: 256320 - protein, 15 aa, Artificial Sequence
  Description of Artificial Sequence: Synthetic peptide
  Seed: EECLINDPWVLLNAS
EECLINNPSVLMNAS

SEQ ID NO: 256321 - protein, 15 aa, Artificial Sequence
  Description of Artificial Sequence: Synthetic peptide
  Seed: EECLINDPWVLLNAS
EECLINNPSVLNNAS

SEQ ID NO: 256322 - protein, 15 aa, Artificial Sequence
  Description of Artificial Sequence: Synthetic peptide
  Seed: EECLINDPWVLLNAS
EECLINNPSVLQNAS

SEQ ID NO: 256323 - protein, 15 aa, Artificial Sequence
  Description of Artificial Sequence: Synthetic peptide
  Seed: EECLINDPWVLLNAS
EECLINNPSVLSNAS

SEQ ID NO: 256324 - protein, 15 aa, Artificial Sequence
  Description of Artificial Sequence: Synthetic peptide
  Seed: EECLINDPWVLLNAS
EECLINNPSVLTNAS

SEQ ID NO: 256325 - protein, 15 aa, Artificial Sequence
  Description of Artificial Sequence: Synthetic peptide
  Seed: EECLINDPWVLLNAS
EECLINNPSVLVNAS

SEQ ID NO: 256326 - protein, 15 aa, Artificial Sequence
  Description of Artificial Sequence: Synthetic peptide
  Seed: EECLINDPWVLLNAS
EECLINNPSVLWNAS

SEQ ID NO: 256327 - protein, 15 aa, Artificial Sequence
  Description of Artificial Sequence: Synthetic peptide
  Seed: EECLINDPWVLLNAS
EECLINNPSVLYNAS

SEQ ID NO: 256328 - protein, 15 aa, Artificial Sequence
  Description of Artificial Sequence: Synthetic peptide
  Seed: EECLINDPWVLLNAS
EECLINNPTVLANAS

SEQ ID NO: 256329 - protein, 15 aa, Artificial Sequence
  Description of Artificial Sequence: Synthetic peptide
  Seed: EECLINDPWVLLNAS
EECLINNPTVLFNAS

SEQ ID NO: 256330 - protein, 15 aa, Artificial Sequence
  Description of Artificial Sequence: Synthetic peptide
  Seed: EECLINDPWVLLNAS
EECLINNPTVLINAS

SEQ ID NO: 256331 - protein, 15 aa, Artificial Sequence
  Description of Artificial Sequence: Synthetic peptide
  Seed: EECLINDPWVLLNAS
EECLINNPTVLLNAS

SEQ ID NO: 256332 - protein, 15 aa, Artificial Sequence
  Description of Artificial Sequence: Synthetic peptide
  Seed: EECLINDPWVLLNAS
EECLINNPTVLMNAS

SEQ ID NO: 256333 - protein, 15 aa, Artificial Sequence
  Description of Artificial Sequence: Synthetic peptide
  Seed: EECLINDPWVLLNAS
EECLINNPTVLSNAS

SEQ ID NO: 256334 - protein, 15 aa, Artificial Sequence
  Description of Artificial Sequence: Synthetic peptide
  Seed: EECLINDPWVLLNAS
EECLINNPTVLTNAS

SEQ ID NO: 256335 - protein, 15 aa, Artificial Sequence
  Description of Artificial Sequence: Synthetic peptide
  Seed: EECLINDPWVLLNAS
EECLINNPTVLVNAS

SEQ ID NO: 256336 - protein, 15 aa, Artificial Sequence
  Description of Artificial Sequence: Synthetic peptide
  Seed: EECLINDPWVLLNAS
EECLINNPTVLWNAS

SEQ ID NO: 256337 - protein, 15 aa, Artificial Sequence
  Description of Artificial Sequence: Synthetic peptide
  Seed: EECLINDPWVLLNAS
EECLINNPTVLYNAS

SEQ ID NO: 256338 - protein, 15 aa, Artificial Sequence
  Description of Artificial Sequence: Synthetic peptide
  Seed: EECLINDPWVLLNAS
EECLINNPVVLANAS

SEQ ID NO: 256339 - protein, 15 aa, Artificial Sequence
  Description of Artificial Sequence: Synthetic peptide
  Seed: EECLINDPWVLLNAS
EECLINNPVVLFNAS

SEQ ID NO: 256340 - protein, 15 aa, Artificial Sequence
  Description of Artificial Sequence: Synthetic peptide
  Seed: EECLINDPWVLLNAS
EECLINNPVVLHNAS

SEQ ID NO: 256341 - protein, 15 aa, Artificial Sequence
  Description of Artificial Sequence: Synthetic peptide
  Seed: EECLINDPWVLLNAS
EECLINNPVVLINAS

SEQ ID NO: 256342 - protein, 15 aa, Artificial Sequence
  Description of Artificial Sequence: Synthetic peptide
  Seed: EECLINDPWVLLNAS
EECLINNPVVLKNAS

SEQ ID NO: 256343 - protein, 15 aa, Artificial Sequence
  Description of Artificial Sequence: Synthetic peptide
  Seed: EECLINDPWVLLNAS
EECLINNPVVLLNAS

SEQ ID NO: 256344 - protein, 15 aa, Artificial Sequence
  Description of Artificial Sequence: Synthetic peptide
  Seed: EECLINDPWVLLNAS
EECLINNPVVLMNAS

SEQ ID NO: 256345 - protein, 15 aa, Artificial Sequence
  Description of Artificial Sequence: Synthetic peptide
  Seed: EECLINDPWVLLNAS
EECLINNPVVLNNAS

SEQ ID NO: 256346 - protein, 15 aa, Artificial Sequence
  Description of Artificial Sequence: Synthetic peptide
  Seed: EECLINDPWVLLNAS
EECLINNPVVLQNAS

SEQ ID NO: 256347 - protein, 15 aa, Artificial Sequence
  Description of Artificial Sequence: Synthetic peptide
  Seed: EECLINDPWVLLNAS
EECLINNPVVLRNAS

SEQ ID NO: 256348 - protein, 15 aa, Artificial Sequence
  Description of Artificial Sequence: Synthetic peptide
  Seed: EECLINDPWVLLNAS
EECLINNPVVLSNAS

SEQ ID NO: 256349 - protein, 15 aa, Artificial Sequence
  Description of Artificial Sequence: Synthetic peptide
  Seed: EECLINDPWVLLNAS
EECLINNPVVLTNAS

SEQ ID NO: 256350 - protein, 15 aa, Artificial Sequence
  Description of Artificial Sequence: Synthetic peptide
  Seed: EECLINDPWVLLNAS
EECLINNPVVLVNAS

SEQ ID NO: 256351 - protein, 15 aa, Artificial Sequence
  Description of Artificial Sequence: Synthetic peptide
  Seed: EECLINDPWVLLNAS
EECLINNPVVLWNAS

SEQ ID NO: 256352 - protein, 15 aa, Artificial Sequence
  Description of Artificial Sequence: Synthetic peptide
  Seed: EECLINDPWVLLNAS
EECLINNPVVLYNAS

SEQ ID NO: 256353 - protein, 15 aa, Artificial Sequence
  Description of Artificial Sequence: Synthetic peptide
  Seed: EECLINDPWVLLNAS
EECLINNPYVLINAS

SEQ ID NO: 256354 - protein, 15 aa, Artificial Sequence
  Description of Artificial Sequence: Synthetic peptide
  Seed: EECLINDPWVLLNAS
EECLINNPYVLVNAS

SEQ ID NO: 256355 - protein, 15 aa, Artificial Sequence
  Description of Artificial Sequence: Synthetic peptide
  Seed: EECLINDPWVLLNAS
EECLINQPAVLANAS

SEQ ID NO: 256356 - protein, 15 aa, Artificial Sequence
  Description of Artificial Sequence: Synthetic peptide
  Seed: EECLINDPWVLLNAS
EECLINQPAVLINAS

SEQ ID NO: 256357 - protein, 15 aa, Artificial Sequence
  Description of Artificial Sequence: Synthetic peptide
  Seed: EECLINDPWVLLNAS
EECLINQPAVLLNAS

SEQ ID NO: 256358 - protein, 15 aa, Artificial Sequence
  Description of Artificial Sequence: Synthetic peptide
  Seed: EECLINDPWVLLNAS
EECLINQPAVLMNAS

SEQ ID NO: 256359 - protein, 15 aa, Artificial Sequence
  Description of Artificial Sequence: Synthetic peptide
  Seed: EECLINDPWVLLNAS
EECLINQPAVLSNAS

SEQ ID NO: 256360 - protein, 15 aa, Artificial Sequence
  Description of Artificial Sequence: Synthetic peptide
  Seed: EECLINDPWVLLNAS
EECLINQPAVLTNAS

SEQ ID NO: 256361 - protein, 15 aa, Artificial Sequence
  Description of Artificial Sequence: Synthetic peptide
  Seed: EECLINDPWVLLNAS
EECLINQPAVLVNAS

SEQ ID NO: 256362 - protein, 15 aa, Artificial Sequence
  Description of Artificial Sequence: Synthetic peptide
  Seed: EECLINDPWVLLNAS
EECLINQPFVLINAS

SEQ ID NO: 256363 - protein, 15 aa, Artificial Sequence
  Description of Artificial Sequence: Synthetic peptide
  Seed: EECLINDPWVLLNAS
EECLINQPFVLLNAS

SEQ ID NO: 256364 - protein, 15 aa, Artificial Sequence
  Description of Artificial Sequence: Synthetic peptide
  Seed: EECLINDPWVLLNAS
EECLINQPFVLVNAS

SEQ ID NO: 256365 - protein, 15 aa, Artificial Sequence
  Description of Artificial Sequence: Synthetic peptide
  Seed: EECLINDPWVLLNAS
EECLINQPGVLANAS

SEQ ID NO: 256366 - protein, 15 aa, Artificial Sequence
  Description of Artificial Sequence: Synthetic peptide
  Seed: EECLINDPWVLLNAS
EECLINQPGVLINAS

SEQ ID NO: 256367 - protein, 15 aa, Artificial Sequence
  Description of Artificial Sequence: Synthetic peptide
  Seed: EECLINDPWVLLNAS
EECLINQPGVLLNAS

SEQ ID NO: 256368 - protein, 15 aa, Artificial Sequence
  Description of Artificial Sequence: Synthetic peptide
  Seed: EECLINDPWVLLNAS
EECLINQPGVLMNAS

SEQ ID NO: 256369 - protein, 15 aa, Artificial Sequence
  Description of Artificial Sequence: Synthetic peptide
  Seed: EECLINDPWVLLNAS
EECLINQPGVLSNAS

SEQ ID NO: 256370 - protein, 15 aa, Artificial Sequence
  Description of Artificial Sequence: Synthetic peptide
  Seed: EECLINDPWVLLNAS
EECLINQPGVLTNAS

SEQ ID NO: 256371 - protein, 15 aa, Artificial Sequence
  Description of Artificial Sequence: Synthetic peptide
  Seed: EECLINDPWVLLNAS
EECLINQPGVLVNAS

SEQ ID NO: 256372 - protein, 15 aa, Artificial Sequence
  Description of Artificial Sequence: Synthetic peptide
  Seed: EECLINDPWVLLNAS
EECLINQPNVLANAS

SEQ ID NO: 256373 - protein, 15 aa, Artificial Sequence
  Description of Artificial Sequence: Synthetic peptide
  Seed: EECLINDPWVLLNAS
EECLINQPNVLINAS

SEQ ID NO: 256374 - protein, 15 aa, Artificial Sequence
  Description of Artificial Sequence: Synthetic peptide
  Seed: EECLINDPWVLLNAS
EECLINQPNVLVNAS

SEQ ID NO: 256375 - protein, 15 aa, Artificial Sequence
  Description of Artificial Sequence: Synthetic peptide
  Seed: EECLINDPWVLLNAS
EECLINQPPVLANAS

SEQ ID NO: 256376 - protein, 15 aa, Artificial Sequence
  Description of Artificial Sequence: Synthetic peptide
  Seed: EECLINDPWVLLNAS
EECLINQPPVLLNAS

SEQ ID NO: 256377 - protein, 15 aa, Artificial Sequence
  Description of Artificial Sequence: Synthetic peptide
  Seed: EECLINDPWVLLNAS
EECLINQPPVLVNAS

SEQ ID NO: 256378 - protein, 15 aa, Artificial Sequence
  Description of Artificial Sequence: Synthetic peptide
  Seed: EECLINDPWVLLNAS
EECLINQPSVLANAS

SEQ ID NO: 256379 - protein, 15 aa, Artificial Sequence
  Description of Artificial Sequence: Synthetic peptide
  Seed: EECLINDPWVLLNAS
EECLINQPSVLINAS

SEQ ID NO: 256380 - protein, 15 aa, Artificial Sequence
  Description of Artificial Sequence: Synthetic peptide
  Seed: EECLINDPWVLLNAS
EECLINQPSVLLNAS

SEQ ID NO: 256381 - protein, 15 aa, Artificial Sequence
  Description of Artificial Sequence: Synthetic peptide
  Seed: EECLINDPWVLLNAS
EECLINQPSVLMNAS

SEQ ID NO: 256382 - protein, 15 aa, Artificial Sequence
  Description of Artificial Sequence: Synthetic peptide
  Seed: EECLINDPWVLLNAS
EECLINQPSVLSNAS

SEQ ID NO: 256383 - protein, 15 aa, Artificial Sequence
  Description of Artificial Sequence: Synthetic peptide
  Seed: EECLINDPWVLLNAS
EECLINQPSVLTNAS

SEQ ID NO: 256384 - protein, 15 aa, Artificial Sequence
  Description of Artificial Sequence: Synthetic peptide
  Seed: EECLINDPWVLLNAS
EECLINQPSVLVNAS

SEQ ID NO: 256385 - protein, 15 aa, Artificial Sequence
  Description of Artificial Sequence: Synthetic peptide
  Seed: EECLINDPWVLLNAS
EECLINQPTVLANAS

SEQ ID NO: 256386 - protein, 15 aa, Artificial Sequence
  Description of Artificial Sequence: Synthetic peptide
  Seed: EECLINDPWVLLNAS
EECLINQPTVLLNAS

SEQ ID NO: 256387 - protein, 15 aa, Artificial Sequence
  Description of Artificial Sequence: Synthetic peptide
  Seed: EECLINDPWVLLNAS
EECLINQPTVLVNAS

SEQ ID NO: 256388 - protein, 15 aa, Artificial Sequence
  Description of Artificial Sequence: Synthetic peptide
  Seed: EECLINDPWVLLNAS
EECLINRPAVLINAS

SEQ ID NO: 256389 - protein, 15 aa, Artificial Sequence
  Description of Artificial Sequence: Synthetic peptide
  Seed: EECLINDPWVLLNAS
EECLINRPAVLVNAS

SEQ ID NO: 256390 - protein, 15 aa, Artificial Sequence
  Description of Artificial Sequence: Synthetic peptide
  Seed: EECLINDPWVLLNAS
EECLINRPNVLFNAS

SEQ ID NO: 256391 - protein, 15 aa, Artificial Sequence
  Description of Artificial Sequence: Synthetic peptide
  Seed: EECLINDPWVLLNAS
EECLINRPNVLINAS

SEQ ID NO: 256392 - protein, 15 aa, Artificial Sequence
  Description of Artificial Sequence: Synthetic peptide
  Seed: EECLINDPWVLLNAS
EECLINRPNVLLNAS

SEQ ID NO: 256393 - protein, 15 aa, Artificial Sequence
  Description of Artificial Sequence: Synthetic peptide
  Seed: EECLINDPWVLLNAS
EECLINRPNVLVNAS

SEQ ID NO: 256394 - protein, 15 aa, Artificial Sequence
  Description of Artificial Sequence: Synthetic peptide
  Seed: EECLINDPWVLLNAS
EECLINSPAVLANAS

SEQ ID NO: 256395 - protein, 15 aa, Artificial Sequence
  Description of Artificial Sequence: Synthetic peptide
  Seed: EECLINDPWVLLNAS
EECLINSPAVLFNAS

SEQ ID NO: 256396 - protein, 15 aa, Artificial Sequence
  Description of Artificial Sequence: Synthetic peptide
  Seed: EECLINDPWVLLNAS
EECLINSPAVLINAS

SEQ ID NO: 256397 - protein, 15 aa, Artificial Sequence
  Description of Artificial Sequence: Synthetic peptide
  Seed: EECLINDPWVLLNAS
EECLINSPAVLLNAS

SEQ ID NO: 256398 - protein, 15 aa, Artificial Sequence
  Description of Artificial Sequence: Synthetic peptide
  Seed: EECLINDPWVLLNAS
EECLINSPAVLMNAS

SEQ ID NO: 256399 - protein, 15 aa, Artificial Sequence
  Description of Artificial Sequence: Synthetic peptide
  Seed: EECLINDPWVLLNAS
EECLINSPAVLSNAS

SEQ ID NO: 256400 - protein, 15 aa, Artificial Sequence
  Description of Artificial Sequence: Synthetic peptide
  Seed: EECLINDPWVLLNAS
EECLINSPAVLTNAS

SEQ ID NO: 256401 - protein, 15 aa, Artificial Sequence
  Description of Artificial Sequence: Synthetic peptide
  Seed: EECLINDPWVLLNAS
EECLINSPAVLVNAS

SEQ ID NO: 256402 - protein, 15 aa, Artificial Sequence
  Description of Artificial Sequence: Synthetic peptide
  Seed: EECLINDPWVLLNAS
EECLINSPAVLYNAS

SEQ ID NO: 256403 - protein, 15 aa, Artificial Sequence
  Description of Artificial Sequence: Synthetic peptide
  Seed: EECLINDPWVLLNAS
EECLINSPFVLFNAS

SEQ ID NO: 256404 - protein, 15 aa, Artificial Sequence
  Description of Artificial Sequence: Synthetic peptide
  Seed: EECLINDPWVLLNAS
EECLINSPFVLINAS

SEQ ID NO: 256405 - protein, 15 aa, Artificial Sequence
  Description of Artificial Sequence: Synthetic peptide
  Seed: EECLINDPWVLLNAS
EECLINSPFVLLNAS

SEQ ID NO: 256406 - protein, 15 aa, Artificial Sequence
  Description of Artificial Sequence: Synthetic peptide
  Seed: EECLINDPWVLLNAS
EECLINSPFVLMNAS

SEQ ID NO: 256407 - protein, 15 aa, Artificial Sequence
  Description of Artificial Sequence: Synthetic peptide
  Seed: EECLINDPWVLLNAS
EECLINSPFVLVNAS

SEQ ID NO: 256408 - protein, 15 aa, Artificial Sequence
  Description of Artificial Sequence: Synthetic peptide
  Seed: EECLINDPWVLLNAS
EECLINSPGVLANAS

SEQ ID NO: 256409 - protein, 15 aa, Artificial Sequence
  Description of Artificial Sequence: Synthetic peptide
  Seed: EECLINDPWVLLNAS
EECLINSPGVLINAS

SEQ ID NO: 256410 - protein, 15 aa, Artificial Sequence
  Description of Artificial Sequence: Synthetic peptide
  Seed: EECLINDPWVLLNAS
EECLINSPGVLLNAS

SEQ ID NO: 256411 - protein, 15 aa, Artificial Sequence
  Description of Artificial Sequence: Synthetic peptide
  Seed: EECLINDPWVLLNAS
EECLINSPGVLVNAS

SEQ ID NO: 256412 - protein, 15 aa, Artificial Sequence
  Description of Artificial Sequence: Synthetic peptide
  Seed: EECLINDPWVLLNAS
EECLINSPIVLINAS

SEQ ID NO: 256413 - protein, 15 aa, Artificial Sequence
  Description of Artificial Sequence: Synthetic peptide
  Seed: EECLINDPWVLLNAS
EECLINSPIVLVNAS

SEQ ID NO: 256414 - protein, 15 aa, Artificial Sequence
  Description of Artificial Sequence: Synthetic peptide
  Seed: EECLINDPWVLLNAS
EECLINSPNVLANAS

SEQ ID NO: 256415 - protein, 15 aa, Artificial Sequence
  Description of Artificial Sequence: Synthetic peptide
  Seed: EECLINDPWVLLNAS
EECLINSPNVLFNAS

SEQ ID NO: 256416 - protein, 15 aa, Artificial Sequence
  Description of Artificial Sequence: Synthetic peptide
  Seed: EECLINDPWVLLNAS
EECLINSPNVLINAS

SEQ ID NO: 256417 - protein, 15 aa, Artificial Sequence
  Description of Artificial Sequence: Synthetic peptide
  Seed: EECLINDPWVLLNAS
EECLINSPNVLLNAS

SEQ ID NO: 256418 - protein, 15 aa, Artificial Sequence
  Description of Artificial Sequence: Synthetic peptide
  Seed: EECLINDPWVLLNAS
EECLINSPNVLMNAS

SEQ ID NO: 256419 - protein, 15 aa, Artificial Sequence
  Description of Artificial Sequence: Synthetic peptide
  Seed: EECLINDPWVLLNAS
EECLINSPNVLVNAS

SEQ ID NO: 256420 - protein, 15 aa, Artificial Sequence
  Description of Artificial Sequence: Synthetic peptide
  Seed: EECLINDPWVLLNAS
EECLINSPNVLYNAS

SEQ ID NO: 256421 - protein, 15 aa, Artificial Sequence
  Description of Artificial Sequence: Synthetic peptide
  Seed: EECLINDPWVLLNAS
EECLINSPPVLFNAS

SEQ ID NO: 256422 - protein, 15 aa, Artificial Sequence
  Description of Artificial Sequence: Synthetic peptide
  Seed: EECLINDPWVLLNAS
EECLINSPPVLINAS

SEQ ID NO: 256423 - protein, 15 aa, Artificial Sequence
  Description of Artificial Sequence: Synthetic peptide
  Seed: EECLINDPWVLLNAS
EECLINSPPVLLNAS

SEQ ID NO: 256424 - protein, 15 aa, Artificial Sequence
  Description of Artificial Sequence: Synthetic peptide
  Seed: EECLINDPWVLLNAS
EECLINSPPVLVNAS

SEQ ID NO: 256425 - protein, 15 aa, Artificial Sequence
  Description of Artificial Sequence: Synthetic peptide
  Seed: EECLINDPWVLLNAS
EECLINSPSVLANAS

SEQ ID NO: 256426 - protein, 15 aa, Artificial Sequence
  Description of Artificial Sequence: Synthetic peptide
  Seed: EECLINDPWVLLNAS
EECLINSPSVLFNAS

SEQ ID NO: 256427 - protein, 15 aa, Artificial Sequence
  Description of Artificial Sequence: Synthetic peptide
  Seed: EECLINDPWVLLNAS
EECLINSPSVLINAS

SEQ ID NO: 256428 - protein, 15 aa, Artificial Sequence
  Description of Artificial Sequence: Synthetic peptide
  Seed: EECLINDPWVLLNAS
EECLINSPSVLLNAS

SEQ ID NO: 256429 - protein, 15 aa, Artificial Sequence
  Description of Artificial Sequence: Synthetic peptide
  Seed: EECLINDPWVLLNAS
EECLINSPSVLMNAS

SEQ ID NO: 256430 - protein, 15 aa, Artificial Sequence
  Description of Artificial Sequence: Synthetic peptide
  Seed: EECLINDPWVLLNAS
EECLINSPSVLVNAS

SEQ ID NO: 256431 - protein, 15 aa, Artificial Sequence
  Description of Artificial Sequence: Synthetic peptide
  Seed: EECLINDPWVLLNAS
EECLINSPSVLYNAS

SEQ ID NO: 256432 - protein, 15 aa, Artificial Sequence
  Description of Artificial Sequence: Synthetic peptide
  Seed: EECLINDPWVLLNAS
EECLINSPTVLFNAS

SEQ ID NO: 256433 - protein, 15 aa, Artificial Sequence
  Description of Artificial Sequence: Synthetic peptide
  Seed: EECLINDPWVLLNAS
EECLINSPTVLINAS

SEQ ID NO: 256434 - protein, 15 aa, Artificial Sequence
  Description of Artificial Sequence: Synthetic peptide
  Seed: EECLINDPWVLLNAS
EECLINSPTVLLNAS

SEQ ID NO: 256435 - protein, 15 aa, Artificial Sequence
  Description of Artificial Sequence: Synthetic peptide
  Seed: EECLINDPWVLLNAS
EECLINSPTVLVNAS

SEQ ID NO: 256436 - protein, 15 aa, Artificial Sequence
  Description of Artificial Sequence: Synthetic peptide
  Seed: EECLINDPWVLLNAS
EECLINSPTVLYNAS

SEQ ID NO: 256437 - protein, 15 aa, Artificial Sequence
  Description of Artificial Sequence: Synthetic peptide
  Seed: EECLINDPWVLLNAS
EECLINSPVVLFNAS

SEQ ID NO: 256438 - protein, 15 aa, Artificial Sequence
  Description of Artificial Sequence: Synthetic peptide
  Seed: EECLINDPWVLLNAS
EECLINSPVVLINAS

SEQ ID NO: 256439 - protein, 15 aa, Artificial Sequence
  Description of Artificial Sequence: Synthetic peptide
  Seed: EECLINDPWVLLNAS
EECLINSPVVLLNAS

SEQ ID NO: 256440 - protein, 15 aa, Artificial Sequence
  Description of Artificial Sequence: Synthetic peptide
  Seed: EECLINDPWVLLNAS
EECLINSPVVLVNAS

SEQ ID NO: 256441 - protein, 15 aa, Artificial Sequence
  Description of Artificial Sequence: Synthetic peptide
  Seed: EECLINDPWVLLNAS
EECLINSPVVLYNAS

SEQ ID NO: 256442 - protein, 15 aa, Artificial Sequence
  Description of Artificial Sequence: Synthetic peptide
  Seed: EECLINDPWVLLNAS
EECLINTPAVLANAS

SEQ ID NO: 256443 - protein, 15 aa, Artificial Sequence
  Description of Artificial Sequence: Synthetic peptide
  Seed: EECLINDPWVLLNAS
EECLINTPAVLFNAS

SEQ ID NO: 256444 - protein, 15 aa, Artificial Sequence
  Description of Artificial Sequence: Synthetic peptide
  Seed: EECLINDPWVLLNAS
EECLINTPAVLINAS

SEQ ID NO: 256445 - protein, 15 aa, Artificial Sequence
  Description of Artificial Sequence: Synthetic peptide
  Seed: EECLINDPWVLLNAS
EECLINTPAVLLNAS

SEQ ID NO: 256446 - protein, 15 aa, Artificial Sequence
  Description of Artificial Sequence: Synthetic peptide
  Seed: EECLINDPWVLLNAS
EECLINTPAVLMNAS

SEQ ID NO: 256447 - protein, 15 aa, Artificial Sequence
  Description of Artificial Sequence: Synthetic peptide
  Seed: EECLINDPWVLLNAS
EECLINTPAVLVNAS

SEQ ID NO: 256448 - protein, 15 aa, Artificial Sequence
  Description of Artificial Sequence: Synthetic peptide
  Seed: EECLINDPWVLLNAS
EECLINTPAVLYNAS

SEQ ID NO: 256449 - protein, 15 aa, Artificial Sequence
  Description of Artificial Sequence: Synthetic peptide
  Seed: EECLINDPWVLLNAS
EECLINTPFVLANAS

SEQ ID NO: 256450 - protein, 15 aa, Artificial Sequence
  Description of Artificial Sequence: Synthetic peptide
  Seed: EECLINDPWVLLNAS
EECLINTPFVLFNAS

SEQ ID NO: 256451 - protein, 15 aa, Artificial Sequence
  Description of Artificial Sequence: Synthetic peptide
  Seed: EECLINDPWVLLNAS
EECLINTPFVLINAS

SEQ ID NO: 256452 - protein, 15 aa, Artificial Sequence
  Description of Artificial Sequence: Synthetic peptide
  Seed: EECLINDPWVLLNAS
EECLINTPFVLLNAS

SEQ ID NO: 256453 - protein, 15 aa, Artificial Sequence
  Description of Artificial Sequence: Synthetic peptide
  Seed: EECLINDPWVLLNAS
EECLINTPFVLMNAS

SEQ ID NO: 256454 - protein, 15 aa, Artificial Sequence
  Description of Artificial Sequence: Synthetic peptide
  Seed: EECLINDPWVLLNAS
EECLINTPFVLSNAS

SEQ ID NO: 256455 - protein, 15 aa, Artificial Sequence
  Description of Artificial Sequence: Synthetic peptide
  Seed: EECLINDPWVLLNAS
EECLINTPFVLTNAS

SEQ ID NO: 256456 - protein, 15 aa, Artificial Sequence
  Description of Artificial Sequence: Synthetic peptide
  Seed: EECLINDPWVLLNAS
EECLINTPFVLVNAS

SEQ ID NO: 256457 - protein, 15 aa, Artificial Sequence
  Description of Artificial Sequence: Synthetic peptide
  Seed: EECLINDPWVLLNAS
EECLINTPFVLYNAS

SEQ ID NO: 256458 - protein, 15 aa, Artificial Sequence
  Description of Artificial Sequence: Synthetic peptide
  Seed: EECLINDPWVLLNAS
EECLINTPGVLANAS

SEQ ID NO: 256459 - protein, 15 aa, Artificial Sequence
  Description of Artificial Sequence: Synthetic peptide
  Seed: EECLINDPWVLLNAS
EECLINTPGVLINAS

SEQ ID NO: 256460 - protein, 15 aa, Artificial Sequence
  Description of Artificial Sequence: Synthetic peptide
  Seed: EECLINDPWVLLNAS
EECLINTPGVLLNAS

SEQ ID NO: 256461 - protein, 15 aa, Artificial Sequence
  Description of Artificial Sequence: Synthetic peptide
  Seed: EECLINDPWVLLNAS
EECLINTPGVLVNAS

SEQ ID NO: 256462 - protein, 15 aa, Artificial Sequence
  Description of Artificial Sequence: Synthetic peptide
  Seed: EECLINDPWVLLNAS
EECLINTPNVLFNAS

SEQ ID NO: 256463 - protein, 15 aa, Artificial Sequence
  Description of Artificial Sequence: Synthetic peptide
  Seed: EECLINDPWVLLNAS
EECLINTPNVLINAS

SEQ ID NO: 256464 - protein, 15 aa, Artificial Sequence
  Description of Artificial Sequence: Synthetic peptide
  Seed: EECLINDPWVLLNAS
EECLINTPNVLLNAS

SEQ ID NO: 256465 - protein, 15 aa, Artificial Sequence
  Description of Artificial Sequence: Synthetic peptide
  Seed: EECLINDPWVLLNAS
EECLINTPNVLMNAS

SEQ ID NO: 256466 - protein, 15 aa, Artificial Sequence
  Description of Artificial Sequence: Synthetic peptide
  Seed: EECLINDPWVLLNAS
EECLINTPNVLVNAS

SEQ ID NO: 256467 - protein, 15 aa, Artificial Sequence
  Description of Artificial Sequence: Synthetic peptide
  Seed: EECLINDPWVLLNAS
EECLINTPNVLYNAS

SEQ ID NO: 256468 - protein, 15 aa, Artificial Sequence
  Description of Artificial Sequence: Synthetic peptide
  Seed: EECLINDPWVLLNAS
EECLINTPPVLINAS

SEQ ID NO: 256469 - protein, 15 aa, Artificial Sequence
  Description of Artificial Sequence: Synthetic peptide
  Seed: EECLINDPWVLLNAS
EECLINTPPVLVNAS

SEQ ID NO: 256470 - protein, 15 aa, Artificial Sequence
  Description of Artificial Sequence: Synthetic peptide
  Seed: EECLINDPWVLLNAS
EECLINTPSVLINAS

SEQ ID NO: 256471 - protein, 15 aa, Artificial Sequence
  Description of Artificial Sequence: Synthetic peptide
  Seed: EECLINDPWVLLNAS
EECLINTPSVLVNAS

SEQ ID NO: 256472 - protein, 15 aa, Artificial Sequence
  Description of Artificial Sequence: Synthetic peptide
  Seed: EECLINDPWVLLNAS
EECLINTPTVLINAS

SEQ ID NO: 256473 - protein, 15 aa, Artificial Sequence
  Description of Artificial Sequence: Synthetic peptide
  Seed: EECLINDPWVLLNAS
EECLINTPVVLINAS

SEQ ID NO: 256474 - protein, 15 aa, Artificial Sequence
  Description of Artificial Sequence: Synthetic peptide
  Seed: EECLINDPWVLLNAS
EECLINTPVVLVNAS

SEQ ID NO: 256475 - protein, 15 aa, Artificial Sequence
  Description of Artificial Sequence: Synthetic peptide
  Seed: EECLINDPWVLLNAS
EECLINTPYVLINAS

SEQ ID NO: 256476 - protein, 15 aa, Artificial Sequence
  Description of Artificial Sequence: Synthetic peptide
  Seed: EECLINDPWVLLNAS
EECLINTPYVLLNAS

SEQ ID NO: 256477 - protein, 15 aa, Artificial Sequence
  Description of Artificial Sequence: Synthetic peptide
  Seed: EECLINDPWVLLNAS
EECLINVPAVLANAS

SEQ ID NO: 256478 - protein, 15 aa, Artificial Sequence
  Description of Artificial Sequence: Synthetic peptide
  Seed: EECLINDPWVLLNAS
EECLINVPAVLFNAS

SEQ ID NO: 256479 - protein, 15 aa, Artificial Sequence
  Description of Artificial Sequence: Synthetic peptide
  Seed: EECLINDPWVLLNAS
EECLINVPAVLGNAS

SEQ ID NO: 256480 - protein, 15 aa, Artificial Sequence
  Description of Artificial Sequence: Synthetic peptide
  Seed: EECLINDPWVLLNAS
EECLINVPAVLINAS

SEQ ID NO: 256481 - protein, 15 aa, Artificial Sequence
  Description of Artificial Sequence: Synthetic peptide
  Seed: EECLINDPWVLLNAS
EECLINVPAVLLNAS

SEQ ID NO: 256482 - protein, 15 aa, Artificial Sequence
  Description of Artificial Sequence: Synthetic peptide
  Seed: EECLINDPWVLLNAS
EECLINVPAVLMNAS

SEQ ID NO: 256483 - protein, 15 aa, Artificial Sequence
  Description of Artificial Sequence: Synthetic peptide
  Seed: EECLINDPWVLLNAS
EECLINVPAVLSNAS

SEQ ID NO: 256484 - protein, 15 aa, Artificial Sequence
  Description of Artificial Sequence: Synthetic peptide
  Seed: EECLINDPWVLLNAS
EECLINVPAVLTNAS

SEQ ID NO: 256485 - protein, 15 aa, Artificial Sequence
  Description of Artificial Sequence: Synthetic peptide
  Seed: EECLINDPWVLLNAS
EECLINVPAVLVNAS

SEQ ID NO: 256486 - protein, 15 aa, Artificial Sequence
  Description of Artificial Sequence: Synthetic peptide
  Seed: EECLINDPWVLLNAS
EECLINVPFVLINAS

SEQ ID NO: 256487 - protein, 15 aa, Artificial Sequence
  Description of Artificial Sequence: Synthetic peptide
  Seed: EECLINDPWVLLNAS
EECLINVPFVLLNAS

SEQ ID NO: 256488 - protein, 15 aa, Artificial Sequence
  Description of Artificial Sequence: Synthetic peptide
  Seed: EECLINDPWVLLNAS
EECLINVPFVLMNAS

SEQ ID NO: 256489 - protein, 15 aa, Artificial Sequence
  Description of Artificial Sequence: Synthetic peptide
  Seed: EECLINDPWVLLNAS
EECLINVPFVLVNAS

SEQ ID NO: 256490 - protein, 15 aa, Artificial Sequence
  Description of Artificial Sequence: Synthetic peptide
  Seed: EECLINDPWVLLNAS
EECLINVPGVLANAS

SEQ ID NO: 256491 - protein, 15 aa, Artificial Sequence
  Description of Artificial Sequence: Synthetic peptide
  Seed: EECLINDPWVLLNAS
EECLINVPGVLINAS

SEQ ID NO: 256492 - protein, 15 aa, Artificial Sequence
  Description of Artificial Sequence: Synthetic peptide
  Seed: EECLINDPWVLLNAS
EECLINVPGVLLNAS

SEQ ID NO: 256493 - protein, 15 aa, Artificial Sequence
  Description of Artificial Sequence: Synthetic peptide
  Seed: EECLINDPWVLLNAS
EECLINVPGVLMNAS

SEQ ID NO: 256494 - protein, 15 aa, Artificial Sequence
  Description of Artificial Sequence: Synthetic peptide
  Seed: EECLINDPWVLLNAS
EECLINVPGVLSNAS

SEQ ID NO: 256495 - protein, 15 aa, Artificial Sequence
  Description of Artificial Sequence: Synthetic peptide
  Seed: EECLINDPWVLLNAS
EECLINVPGVLTNAS

SEQ ID NO: 256496 - protein, 15 aa, Artificial Sequence
  Description of Artificial Sequence: Synthetic peptide
  Seed: EECLINDPWVLLNAS
EECLINVPGVLVNAS

SEQ ID NO: 256497 - protein, 15 aa, Artificial Sequence
  Description of Artificial Sequence: Synthetic peptide
  Seed: EECLINDPWVLLNAS
EECLINVPNVLANAS

SEQ ID NO: 256498 - protein, 15 aa, Artificial Sequence
  Description of Artificial Sequence: Synthetic peptide
  Seed: EECLINDPWVLLNAS
EECLINVPNVLFNAS

SEQ ID NO: 256499 - protein, 15 aa, Artificial Sequence
  Description of Artificial Sequence: Synthetic peptide
  Seed: EECLINDPWVLLNAS
EECLINVPNVLINAS

SEQ ID NO: 256500 - protein, 15 aa, Artificial Sequence
  Description of Artificial Sequence: Synthetic peptide
  Seed: EECLINDPWVLLNAS
EECLINVPNVLLNAS

SEQ ID NO: 256501 - protein, 15 aa, Artificial Sequence
  Description of Artificial Sequence: Synthetic peptide
  Seed: EECLINDPWVLLNAS
EECLINVPNVLMNAS

SEQ ID NO: 256502 - protein, 15 aa, Artificial Sequence
  Description of Artificial Sequence: Synthetic peptide
  Seed: EECLINDPWVLLNAS
EECLINVPNVLVNAS

SEQ ID NO: 256503 - protein, 15 aa, Artificial Sequence
  Description of Artificial Sequence: Synthetic peptide
  Seed: EECLINDPWVLLNAS
EECLINVPNVLYNAS

SEQ ID NO: 256504 - protein, 15 aa, Artificial Sequence
  Description of Artificial Sequence: Synthetic peptide
  Seed: EECLINDPWVLLNAS
EECLINVPPVLANAS

SEQ ID NO: 256505 - protein, 15 aa, Artificial Sequence
  Description of Artificial Sequence: Synthetic peptide
  Seed: EECLINDPWVLLNAS
EECLINVPPVLINAS

SEQ ID NO: 256506 - protein, 15 aa, Artificial Sequence
  Description of Artificial Sequence: Synthetic peptide
  Seed: EECLINDPWVLLNAS
EECLINVPPVLLNAS

SEQ ID NO: 256507 - protein, 15 aa, Artificial Sequence
  Description of Artificial Sequence: Synthetic peptide
  Seed: EECLINDPWVLLNAS
EECLINVPPVLVNAS

SEQ ID NO: 256508 - protein, 15 aa, Artificial Sequence
  Description of Artificial Sequence: Synthetic peptide
  Seed: EECLINDPWVLLNAS
EECLINVPSVLANAS

SEQ ID NO: 256509 - protein, 15 aa, Artificial Sequence
  Description of Artificial Sequence: Synthetic peptide
  Seed: EECLINDPWVLLNAS
EECLINVPSVLINAS

SEQ ID NO: 256510 - protein, 15 aa, Artificial Sequence
  Description of Artificial Sequence: Synthetic peptide
  Seed: EECLINDPWVLLNAS
EECLINVPSVLLNAS

SEQ ID NO: 256511 - protein, 15 aa, Artificial Sequence
  Description of Artificial Sequence: Synthetic peptide
  Seed: EECLINDPWVLLNAS
EECLINVPSVLMNAS

SEQ ID NO: 256512 - protein, 15 aa, Artificial Sequence
  Description of Artificial Sequence: Synthetic peptide
  Seed: EECLINDPWVLLNAS
EECLINVPSVLSNAS

SEQ ID NO: 256513 - protein, 15 aa, Artificial Sequence
  Description of Artificial Sequence: Synthetic peptide
  Seed: EECLINDPWVLLNAS
EECLINVPSVLTNAS

SEQ ID NO: 256514 - protein, 15 aa, Artificial Sequence
  Description of Artificial Sequence: Synthetic peptide
  Seed: EECLINDPWVLLNAS
EECLINVPSVLVNAS

SEQ ID NO: 256515 - protein, 15 aa, Artificial Sequence
  Description of Artificial Sequence: Synthetic peptide
  Seed: EECLINDPWVLLNAS
EECLINVPTVLANAS

SEQ ID NO: 256516 - protein, 15 aa, Artificial Sequence
  Description of Artificial Sequence: Synthetic peptide
  Seed: EECLINDPWVLLNAS
EECLINVPTVLINAS

SEQ ID NO: 256517 - protein, 15 aa, Artificial Sequence
  Description of Artificial Sequence: Synthetic peptide
  Seed: EECLINDPWVLLNAS
EECLINVPTVLLNAS

SEQ ID NO: 256518 - protein, 15 aa, Artificial Sequence
  Description of Artificial Sequence: Synthetic peptide
  Seed: EECLINDPWVLLNAS
EECLINVPTVLVNAS

SEQ ID NO: 256519 - protein, 15 aa, Artificial Sequence
  Description of Artificial Sequence: Synthetic peptide
  Seed: EECLINDPWVLLNAS
EECMINAPAVLANAS

SEQ ID NO: 256520 - protein, 15 aa, Artificial Sequence
  Description of Artificial Sequence: Synthetic peptide
  Seed: EECLINDPWVLLNAS
EECMINAPAVLINAS

SEQ ID NO: 256521 - protein, 15 aa, Artificial Sequence
  Description of Artificial Sequence: Synthetic peptide
  Seed: EECLINDPWVLLNAS
EECMINAPAVLLNAS

SEQ ID NO: 256522 - protein, 15 aa, Artificial Sequence
  Description of Artificial Sequence: Synthetic peptide
  Seed: EECLINDPWVLLNAS
EECMINAPAVLMNAS

SEQ ID NO: 256523 - protein, 15 aa, Artificial Sequence
  Description of Artificial Sequence: Synthetic peptide
  Seed: EECLINDPWVLLNAS
EECMINAPAVLSNAS

SEQ ID NO: 256524 - protein, 15 aa, Artificial Sequence
  Description of Artificial Sequence: Synthetic peptide
  Seed: EECLINDPWVLLNAS
EECMINAPAVLTNAS

SEQ ID NO: 256525 - protein, 15 aa, Artificial Sequence
  Description of Artificial Sequence: Synthetic peptide
  Seed: EECLINDPWVLLNAS
EECMINAPAVLVNAS

SEQ ID NO: 256526 - protein, 15 aa, Artificial Sequence
  Description of Artificial Sequence: Synthetic peptide
  Seed: EECLINDPWVLLNAS
EECMINAPFVLLNAS

SEQ ID NO: 256527 - protein, 15 aa, Artificial Sequence
  Description of Artificial Sequence: Synthetic peptide
  Seed: EECLINDPWVLLNAS
EECMINAPGVLANAS

SEQ ID NO: 256528 - protein, 15 aa, Artificial Sequence
  Description of Artificial Sequence: Synthetic peptide
  Seed: EECLINDPWVLLNAS
EECMINAPGVLINAS

SEQ ID NO: 256529 - protein, 15 aa, Artificial Sequence
  Description of Artificial Sequence: Synthetic peptide
  Seed: EECLINDPWVLLNAS
EECMINAPGVLLNAS

SEQ ID NO: 256530 - protein, 15 aa, Artificial Sequence
  Description of Artificial Sequence: Synthetic peptide
  Seed: EECLINDPWVLLNAS
EECMINAPGVLMNAS

SEQ ID NO: 256531 - protein, 15 aa, Artificial Sequence
  Description of Artificial Sequence: Synthetic peptide
  Seed: EECLINDPWVLLNAS
EECMINAPGVLSNAS

SEQ ID NO: 256532 - protein, 15 aa, Artificial Sequence
  Description of Artificial Sequence: Synthetic peptide
  Seed: EECLINDPWVLLNAS
EECMINAPGVLTNAS

SEQ ID NO: 256533 - protein, 15 aa, Artificial Sequence
  Description of Artificial Sequence: Synthetic peptide
  Seed: EECLINDPWVLLNAS
EECMINAPGVLVNAS

SEQ ID NO: 256534 - protein, 15 aa, Artificial Sequence
  Description of Artificial Sequence: Synthetic peptide
  Seed: EECLINDPWVLLNAS
EECMINAPPVLANAS

SEQ ID NO: 256535 - protein, 15 aa, Artificial Sequence
  Description of Artificial Sequence: Synthetic peptide
  Seed: EECLINDPWVLLNAS
EECMINAPPVLINAS

SEQ ID NO: 256536 - protein, 15 aa, Artificial Sequence
  Description of Artificial Sequence: Synthetic peptide
  Seed: EECLINDPWVLLNAS
EECMINAPPVLLNAS

SEQ ID NO: 256537 - protein, 15 aa, Artificial Sequence
  Description of Artificial Sequence: Synthetic peptide
  Seed: EECLINDPWVLLNAS
EECMINAPPVLVNAS

SEQ ID NO: 256538 - protein, 15 aa, Artificial Sequence
  Description of Artificial Sequence: Synthetic peptide
  Seed: EECLINDPWVLLNAS
EECMINAPSVLANAS

SEQ ID NO: 256539 - protein, 15 aa, Artificial Sequence
  Description of Artificial Sequence: Synthetic peptide
  Seed: EECLINDPWVLLNAS
EECMINAPSVLINAS

SEQ ID NO: 256540 - protein, 15 aa, Artificial Sequence
  Description of Artificial Sequence: Synthetic peptide
  Seed: EECLINDPWVLLNAS
EECMINAPSVLLNAS

SEQ ID NO: 256541 - protein, 15 aa, Artificial Sequence
  Description of Artificial Sequence: Synthetic peptide
  Seed: EECLINDPWVLLNAS
EECMINAPSVLMNAS

SEQ ID NO: 256542 - protein, 15 aa, Artificial Sequence
  Description of Artificial Sequence: Synthetic peptide
  Seed: EECLINDPWVLLNAS
EECMINAPSVLSNAS

SEQ ID NO: 256543 - protein, 15 aa, Artificial Sequence
  Description of Artificial Sequence: Synthetic peptide
  Seed: EECLINDPWVLLNAS
EECMINAPSVLTNAS

SEQ ID NO: 256544 - protein, 15 aa, Artificial Sequence
  Description of Artificial Sequence: Synthetic peptide
  Seed: EECLINDPWVLLNAS
EECMINAPSVLVNAS

SEQ ID NO: 256545 - protein, 15 aa, Artificial Sequence
  Description of Artificial Sequence: Synthetic peptide
  Seed: EECLINDPWVLLNAS
EECMINDPAVLRNAS

SEQ ID NO: 256546 - protein, 15 aa, Artificial Sequence
  Description of Artificial Sequence: Synthetic peptide
  Seed: EECLINDPWVLLNAS
EECMINDPIVLRNAS

SEQ ID NO: 256547 - protein, 15 aa, Artificial Sequence
  Description of Artificial Sequence: Synthetic peptide
  Seed: EECLINDPWVLLNAS
EECMINDPKVLFNAS

SEQ ID NO: 256548 - protein, 15 aa, Artificial Sequence
  Description of Artificial Sequence: Synthetic peptide
  Seed: EECLINDPWVLLNAS
EECMINDPKVLMNAS

SEQ ID NO: 256549 - protein, 15 aa, Artificial Sequence
  Description of Artificial Sequence: Synthetic peptide
  Seed: EECLINDPWVLLNAS
EECMINDPKVLYNAS

SEQ ID NO: 256550 - protein, 15 aa, Artificial Sequence
  Description of Artificial Sequence: Synthetic peptide
  Seed: EECLINDPWVLLNAS
EECMINDPRVLFNAS

SEQ ID NO: 256551 - protein, 15 aa, Artificial Sequence
  Description of Artificial Sequence: Synthetic peptide
  Seed: EECLINDPWVLLNAS
EECMINDPRVLMNAS

SEQ ID NO: 256552 - protein, 15 aa, Artificial Sequence
  Description of Artificial Sequence: Synthetic peptide
  Seed: EECLINDPWVLLNAS
EECMINDPRVLYNAS

SEQ ID NO: 256553 - protein, 15 aa, Artificial Sequence
  Description of Artificial Sequence: Synthetic peptide
  Seed: EECLINDPWVLLNAS
EECMINDPTVLRNAS

SEQ ID NO: 256554 - protein, 15 aa, Artificial Sequence
  Description of Artificial Sequence: Synthetic peptide
  Seed: EECLINDPWVLLNAS
EECMINDPVVLRNAS

SEQ ID NO: 256555 - protein, 15 aa, Artificial Sequence
  Description of Artificial Sequence: Synthetic peptide
  Seed: EECLINDPWVLLNAS
EECMINFPAVLANAS

SEQ ID NO: 256556 - protein, 15 aa, Artificial Sequence
  Description of Artificial Sequence: Synthetic peptide
  Seed: EECLINDPWVLLNAS
EECMINFPAVLLNAS

SEQ ID NO: 256557 - protein, 15 aa, Artificial Sequence
  Description of Artificial Sequence: Synthetic peptide
  Seed: EECLINDPWVLLNAS
EECMINFPAVLVNAS

SEQ ID NO: 256558 - protein, 15 aa, Artificial Sequence
  Description of Artificial Sequence: Synthetic peptide
  Seed: EECLINDPWVLLNAS
EECMINGPAVLLNAS

SEQ ID NO: 256559 - protein, 15 aa, Artificial Sequence
  Description of Artificial Sequence: Synthetic peptide
  Seed: EECLINDPWVLLNAS
EECMINHPAVLINAS

SEQ ID NO: 256560 - protein, 15 aa, Artificial Sequence
  Description of Artificial Sequence: Synthetic peptide
  Seed: EECLINDPWVLLNAS
EECMINHPFVLLNAS

SEQ ID NO: 256561 - protein, 15 aa, Artificial Sequence
  Description of Artificial Sequence: Synthetic peptide
  Seed: EECLINDPWVLLNAS
EECMINHPNVLINAS

SEQ ID NO: 256562 - protein, 15 aa, Artificial Sequence
  Description of Artificial Sequence: Synthetic peptide
  Seed: EECLINDPWVLLNAS
EECMINIPAVLANAS

SEQ ID NO: 256563 - protein, 15 aa, Artificial Sequence
  Description of Artificial Sequence: Synthetic peptide
  Seed: EECLINDPWVLLNAS
EECMINIPAVLGNAS

SEQ ID NO: 256564 - protein, 15 aa, Artificial Sequence
  Description of Artificial Sequence: Synthetic peptide
  Seed: EECLINDPWVLLNAS
EECMINIPAVLINAS

SEQ ID NO: 256565 - protein, 15 aa, Artificial Sequence
  Description of Artificial Sequence: Synthetic peptide
  Seed: EECLINDPWVLLNAS
EECMINIPAVLLNAS

SEQ ID NO: 256566 - protein, 15 aa, Artificial Sequence
  Description of Artificial Sequence: Synthetic peptide
  Seed: EECLINDPWVLLNAS
EECMINIPAVLMNAS

SEQ ID NO: 256567 - protein, 15 aa, Artificial Sequence
  Description of Artificial Sequence: Synthetic peptide
  Seed: EECLINDPWVLLNAS
EECMINIPAVLSNAS

SEQ ID NO: 256568 - protein, 15 aa, Artificial Sequence
  Description of Artificial Sequence: Synthetic peptide
  Seed: EECLINDPWVLLNAS
EECMINIPAVLTNAS

SEQ ID NO: 256569 - protein, 15 aa, Artificial Sequence
  Description of Artificial Sequence: Synthetic peptide
  Seed: EECLINDPWVLLNAS
EECMINIPAVLVNAS

SEQ ID NO: 256570 - protein, 15 aa, Artificial Sequence
  Description of Artificial Sequence: Synthetic peptide
  Seed: EECLINDPWVLLNAS
EECMINIPFVLINAS

SEQ ID NO: 256571 - protein, 15 aa, Artificial Sequence
  Description of Artificial Sequence: Synthetic peptide
  Seed: EECLINDPWVLLNAS
EECMINIPFVLLNAS

SEQ ID NO: 256572 - protein, 15 aa, Artificial Sequence
  Description of Artificial Sequence: Synthetic peptide
  Seed: EECLINDPWVLLNAS
EECMINIPFVLVNAS

SEQ ID NO: 256573 - protein, 15 aa, Artificial Sequence
  Description of Artificial Sequence: Synthetic peptide
  Seed: EECLINDPWVLLNAS
EECMINIPGVLANAS

SEQ ID NO: 256574 - protein, 15 aa, Artificial Sequence
  Description of Artificial Sequence: Synthetic peptide
  Seed: EECLINDPWVLLNAS
EECMINIPGVLINAS

SEQ ID NO: 256575 - protein, 15 aa, Artificial Sequence
  Description of Artificial Sequence: Synthetic peptide
  Seed: EECLINDPWVLLNAS
EECMINIPGVLLNAS

SEQ ID NO: 256576 - protein, 15 aa, Artificial Sequence
  Description of Artificial Sequence: Synthetic peptide
  Seed: EECLINDPWVLLNAS
EECMINIPGVLMNAS

SEQ ID NO: 256577 - protein, 15 aa, Artificial Sequence
  Description of Artificial Sequence: Synthetic peptide
  Seed: EECLINDPWVLLNAS
EECMINIPGVLSNAS

SEQ ID NO: 256578 - protein, 15 aa, Artificial Sequence
  Description of Artificial Sequence: Synthetic peptide
  Seed: EECLINDPWVLLNAS
EECMINIPGVLTNAS

SEQ ID NO: 256579 - protein, 15 aa, Artificial Sequence
  Description of Artificial Sequence: Synthetic peptide
  Seed: EECLINDPWVLLNAS
EECMINIPGVLVNAS

SEQ ID NO: 256580 - protein, 15 aa, Artificial Sequence
  Description of Artificial Sequence: Synthetic peptide
  Seed: EECLINDPWVLLNAS
EECMINIPNVLANAS

SEQ ID NO: 256581 - protein, 15 aa, Artificial Sequence
  Description of Artificial Sequence: Synthetic peptide
  Seed: EECLINDPWVLLNAS
EECMINIPNVLINAS

SEQ ID NO: 256582 - protein, 15 aa, Artificial Sequence
  Description of Artificial Sequence: Synthetic peptide
  Seed: EECLINDPWVLLNAS
EECMINIPNVLLNAS

SEQ ID NO: 256583 - protein, 15 aa, Artificial Sequence
  Description of Artificial Sequence: Synthetic peptide
  Seed: EECLINDPWVLLNAS
EECMINIPNVLVNAS

SEQ ID NO: 256584 - protein, 15 aa, Artificial Sequence
  Description of Artificial Sequence: Synthetic peptide
  Seed: EECLINDPWVLLNAS
EECMINIPPVLANAS

SEQ ID NO: 256585 - protein, 15 aa, Artificial Sequence
  Description of Artificial Sequence: Synthetic peptide
  Seed: EECLINDPWVLLNAS
EECMINIPPVLINAS

SEQ ID NO: 256586 - protein, 15 aa, Artificial Sequence
  Description of Artificial Sequence: Synthetic peptide
  Seed: EECLINDPWVLLNAS
EECMINIPPVLLNAS

SEQ ID NO: 256587 - protein, 15 aa, Artificial Sequence
  Description of Artificial Sequence: Synthetic peptide
  Seed: EECLINDPWVLLNAS
EECMINIPPVLVNAS

SEQ ID NO: 256588 - protein, 15 aa, Artificial Sequence
  Description of Artificial Sequence: Synthetic peptide
  Seed: EECLINDPWVLLNAS
EECMINIPSVLANAS

SEQ ID NO: 256589 - protein, 15 aa, Artificial Sequence
  Description of Artificial Sequence: Synthetic peptide
  Seed: EECLINDPWVLLNAS
EECMINIPSVLINAS

SEQ ID NO: 256590 - protein, 15 aa, Artificial Sequence
  Description of Artificial Sequence: Synthetic peptide
  Seed: EECLINDPWVLLNAS
EECMINIPSVLLNAS

SEQ ID NO: 256591 - protein, 15 aa, Artificial Sequence
  Description of Artificial Sequence: Synthetic peptide
  Seed: EECLINDPWVLLNAS
EECMINIPSVLMNAS

SEQ ID NO: 256592 - protein, 15 aa, Artificial Sequence
  Description of Artificial Sequence: Synthetic peptide
  Seed: EECLINDPWVLLNAS
EECMINIPSVLSNAS

SEQ ID NO: 256593 - protein, 15 aa, Artificial Sequence
  Description of Artificial Sequence: Synthetic peptide
  Seed: EECLINDPWVLLNAS
EECMINIPSVLTNAS

SEQ ID NO: 256594 - protein, 15 aa, Artificial Sequence
  Description of Artificial Sequence: Synthetic peptide
  Seed: EECLINDPWVLLNAS
EECMINIPSVLVNAS

SEQ ID NO: 256595 - protein, 15 aa, Artificial Sequence
  Description of Artificial Sequence: Synthetic peptide
  Seed: EECLINDPWVLLNAS
EECMINIPTVLANAS

SEQ ID NO: 256596 - protein, 15 aa, Artificial Sequence
  Description of Artificial Sequence: Synthetic peptide
  Seed: EECLINDPWVLLNAS
EECMINIPTVLLNAS

SEQ ID NO: 256597 - protein, 15 aa, Artificial Sequence
  Description of Artificial Sequence: Synthetic peptide
  Seed: EECLINDPWVLLNAS
EECMINIPTVLVNAS

SEQ ID NO: 256598 - protein, 15 aa, Artificial Sequence
  Description of Artificial Sequence: Synthetic peptide
  Seed: EECLINDPWVLLNAS
EECMINLPAVLANAS

SEQ ID NO: 256599 - protein, 15 aa, Artificial Sequence
  Description of Artificial Sequence: Synthetic peptide
  Seed: EECLINDPWVLLNAS
EECMINLPAVLCNAS

SEQ ID NO: 256600 - protein, 15 aa, Artificial Sequence
  Description of Artificial Sequence: Synthetic peptide
  Seed: EECLINDPWVLLNAS
EECMINLPAVLFNAS

SEQ ID NO: 256601 - protein, 15 aa, Artificial Sequence
  Description of Artificial Sequence: Synthetic peptide
  Seed: EECLINDPWVLLNAS
EECMINLPAVLGNAS

SEQ ID NO: 256602 - protein, 15 aa, Artificial Sequence
  Description of Artificial Sequence: Synthetic peptide
  Seed: EECLINDPWVLLNAS
EECMINLPAVLHNAS

SEQ ID NO: 256603 - protein, 15 aa, Artificial Sequence
  Description of Artificial Sequence: Synthetic peptide
  Seed: EECLINDPWVLLNAS
EECMINLPAVLINAS

SEQ ID NO: 256604 - protein, 15 aa, Artificial Sequence
  Description of Artificial Sequence: Synthetic peptide
  Seed: EECLINDPWVLLNAS
EECMINLPAVLLNAS

SEQ ID NO: 256605 - protein, 15 aa, Artificial Sequence
  Description of Artificial Sequence: Synthetic peptide
  Seed: EECLINDPWVLLNAS
EECMINLPAVLMNAS

SEQ ID NO: 256606 - protein, 15 aa, Artificial Sequence
  Description of Artificial Sequence: Synthetic peptide
  Seed: EECLINDPWVLLNAS
EECMINLPAVLNNAS

SEQ ID NO: 256607 - protein, 15 aa, Artificial Sequence
  Description of Artificial Sequence: Synthetic peptide
  Seed: EECLINDPWVLLNAS
EECMINLPAVLSNAS

SEQ ID NO: 256608 - protein, 15 aa, Artificial Sequence
  Description of Artificial Sequence: Synthetic peptide
  Seed: EECLINDPWVLLNAS
EECMINLPAVLTNAS

SEQ ID NO: 256609 - protein, 15 aa, Artificial Sequence
  Description of Artificial Sequence: Synthetic peptide
  Seed: EECLINDPWVLLNAS
EECMINLPAVLVNAS

SEQ ID NO: 256610 - protein, 15 aa, Artificial Sequence
  Description of Artificial Sequence: Synthetic peptide
  Seed: EECLINDPWVLLNAS
EECMINLPGVLANAS

SEQ ID NO: 256611 - protein, 15 aa, Artificial Sequence
  Description of Artificial Sequence: Synthetic peptide
  Seed: EECLINDPWVLLNAS
EECMINLPGVLCNAS

SEQ ID NO: 256612 - protein, 15 aa, Artificial Sequence
  Description of Artificial Sequence: Synthetic peptide
  Seed: EECLINDPWVLLNAS
EECMINLPGVLGNAS

SEQ ID NO: 256613 - protein, 15 aa, Artificial Sequence
  Description of Artificial Sequence: Synthetic peptide
  Seed: EECLINDPWVLLNAS
EECMINLPGVLINAS

SEQ ID NO: 256614 - protein, 15 aa, Artificial Sequence
  Description of Artificial Sequence: Synthetic peptide
  Seed: EECLINDPWVLLNAS
EECMINLPGVLLNAS

SEQ ID NO: 256615 - protein, 15 aa, Artificial Sequence
  Description of Artificial Sequence: Synthetic peptide
  Seed: EECLINDPWVLLNAS
EECMINLPGVLMNAS

SEQ ID NO: 256616 - protein, 15 aa, Artificial Sequence
  Description of Artificial Sequence: Synthetic peptide
  Seed: EECLINDPWVLLNAS
EECMINLPGVLNNAS

SEQ ID NO: 256617 - protein, 15 aa, Artificial Sequence
  Description of Artificial Sequence: Synthetic peptide
  Seed: EECLINDPWVLLNAS
EECMINLPGVLSNAS

SEQ ID NO: 256618 - protein, 15 aa, Artificial Sequence
  Description of Artificial Sequence: Synthetic peptide
  Seed: EECLINDPWVLLNAS
EECMINLPGVLTNAS

SEQ ID NO: 256619 - protein, 15 aa, Artificial Sequence
  Description of Artificial Sequence: Synthetic peptide
  Seed: EECLINDPWVLLNAS
EECMINLPGVLVNAS

SEQ ID NO: 256620 - protein, 15 aa, Artificial Sequence
  Description of Artificial Sequence: Synthetic peptide
  Seed: EECLINDPWVLLNAS
EECMINLPNVLANAS

SEQ ID NO: 256621 - protein, 15 aa, Artificial Sequence
  Description of Artificial Sequence: Synthetic peptide
  Seed: EECLINDPWVLLNAS
EECMINLPNVLINAS

SEQ ID NO: 256622 - protein, 15 aa, Artificial Sequence
  Description of Artificial Sequence: Synthetic peptide
  Seed: EECLINDPWVLLNAS
EECMINLPNVLLNAS

SEQ ID NO: 256623 - protein, 15 aa, Artificial Sequence
  Description of Artificial Sequence: Synthetic peptide
  Seed: EECLINDPWVLLNAS
EECMINLPNVLMNAS

SEQ ID NO: 256624 - protein, 15 aa, Artificial Sequence
  Description of Artificial Sequence: Synthetic peptide
  Seed: EECLINDPWVLLNAS
EECMINLPNVLSNAS

SEQ ID NO: 256625 - protein, 15 aa, Artificial Sequence
  Description of Artificial Sequence: Synthetic peptide
  Seed: EECLINDPWVLLNAS
EECMINLPNVLTNAS

SEQ ID NO: 256626 - protein, 15 aa, Artificial Sequence
  Description of Artificial Sequence: Synthetic peptide
  Seed: EECLINDPWVLLNAS
EECMINLPNVLVNAS

SEQ ID NO: 256627 - protein, 15 aa, Artificial Sequence
  Description of Artificial Sequence: Synthetic peptide
  Seed: EECLINDPWVLLNAS
EECMINLPPVLANAS

SEQ ID NO: 256628 - protein, 15 aa, Artificial Sequence
  Description of Artificial Sequence: Synthetic peptide
  Seed: EECLINDPWVLLNAS
EECMINLPPVLINAS

SEQ ID NO: 256629 - protein, 15 aa, Artificial Sequence
  Description of Artificial Sequence: Synthetic peptide
  Seed: EECLINDPWVLLNAS
EECMINLPPVLLNAS

SEQ ID NO: 256630 - protein, 15 aa, Artificial Sequence
  Description of Artificial Sequence: Synthetic peptide
  Seed: EECLINDPWVLLNAS
EECMINLPPVLMNAS

SEQ ID NO: 256631 - protein, 15 aa, Artificial Sequence
  Description of Artificial Sequence: Synthetic peptide
  Seed: EECLINDPWVLLNAS
EECMINLPPVLSNAS

SEQ ID NO: 256632 - protein, 15 aa, Artificial Sequence
  Description of Artificial Sequence: Synthetic peptide
  Seed: EECLINDPWVLLNAS
EECMINLPPVLTNAS

SEQ ID NO: 256633 - protein, 15 aa, Artificial Sequence
  Description of Artificial Sequence: Synthetic peptide
  Seed: EECLINDPWVLLNAS
EECMINLPPVLVNAS

SEQ ID NO: 256634 - protein, 15 aa, Artificial Sequence
  Description of Artificial Sequence: Synthetic peptide
  Seed: EECLINDPWVLLNAS
EECMINLPSVLANAS

SEQ ID NO: 256635 - protein, 15 aa, Artificial Sequence
  Description of Artificial Sequence: Synthetic peptide
  Seed: EECLINDPWVLLNAS
EECMINLPSVLCNAS

SEQ ID NO: 256636 - protein, 15 aa, Artificial Sequence
  Description of Artificial Sequence: Synthetic peptide
  Seed: EECLINDPWVLLNAS
EECMINLPSVLGNAS

SEQ ID NO: 256637 - protein, 15 aa, Artificial Sequence
  Description of Artificial Sequence: Synthetic peptide
  Seed: EECLINDPWVLLNAS
EECMINLPSVLINAS

SEQ ID NO: 256638 - protein, 15 aa, Artificial Sequence
  Description of Artificial Sequence: Synthetic peptide
  Seed: EECLINDPWVLLNAS
EECMINLPSVLLNAS

SEQ ID NO: 256639 - protein, 15 aa, Artificial Sequence
  Description of Artificial Sequence: Synthetic peptide
  Seed: EECLINDPWVLLNAS
EECMINLPSVLMNAS

SEQ ID NO: 256640 - protein, 15 aa, Artificial Sequence
  Description of Artificial Sequence: Synthetic peptide
  Seed: EECLINDPWVLLNAS
EECMINLPSVLSNAS

SEQ ID NO: 256641 - protein, 15 aa, Artificial Sequence
  Description of Artificial Sequence: Synthetic peptide
  Seed: EECLINDPWVLLNAS
EECMINLPSVLTNAS

SEQ ID NO: 256642 - protein, 15 aa, Artificial Sequence
  Description of Artificial Sequence: Synthetic peptide
  Seed: EECLINDPWVLLNAS
EECMINLPSVLVNAS

SEQ ID NO: 256643 - protein, 15 aa, Artificial Sequence
  Description of Artificial Sequence: Synthetic peptide
  Seed: EECLINDPWVLLNAS
EECMINLPTVLANAS

SEQ ID NO: 256644 - protein, 15 aa, Artificial Sequence
  Description of Artificial Sequence: Synthetic peptide
  Seed: EECLINDPWVLLNAS
EECMINLPTVLINAS

SEQ ID NO: 256645 - protein, 15 aa, Artificial Sequence
  Description of Artificial Sequence: Synthetic peptide
  Seed: EECLINDPWVLLNAS
EECMINLPTVLLNAS

SEQ ID NO: 256646 - protein, 15 aa, Artificial Sequence
  Description of Artificial Sequence: Synthetic peptide
  Seed: EECLINDPWVLLNAS
EECMINLPTVLMNAS

SEQ ID NO: 256647 - protein, 15 aa, Artificial Sequence
  Description of Artificial Sequence: Synthetic peptide
  Seed: EECLINDPWVLLNAS
EECMINLPTVLSNAS

SEQ ID NO: 256648 - protein, 15 aa, Artificial Sequence
  Description of Artificial Sequence: Synthetic peptide
  Seed: EECLINDPWVLLNAS
EECMINLPTVLTNAS

SEQ ID NO: 256649 - protein, 15 aa, Artificial Sequence
  Description of Artificial Sequence: Synthetic peptide
  Seed: EECLINDPWVLLNAS
EECMINLPTVLVNAS

SEQ ID NO: 256650 - protein, 15 aa, Artificial Sequence
  Description of Artificial Sequence: Synthetic peptide
  Seed: EECLINDPWVLLNAS
EECMINLPVVLANAS

SEQ ID NO: 256651 - protein, 15 aa, Artificial Sequence
  Description of Artificial Sequence: Synthetic peptide
  Seed: EECLINDPWVLLNAS
EECMINLPVVLLNAS

SEQ ID NO: 256652 - protein, 15 aa, Artificial Sequence
  Description of Artificial Sequence: Synthetic peptide
  Seed: EECLINDPWVLLNAS
EECMINLPVVLTNAS

SEQ ID NO: 256653 - protein, 15 aa, Artificial Sequence
  Description of Artificial Sequence: Synthetic peptide
  Seed: EECLINDPWVLLNAS
EECMINLPVVLVNAS

SEQ ID NO: 256654 - protein, 15 aa, Artificial Sequence
  Description of Artificial Sequence: Synthetic peptide
  Seed: EECLINDPWVLLNAS
EECMINMPAVLANAS

SEQ ID NO: 256655 - protein, 15 aa, Artificial Sequence
  Description of Artificial Sequence: Synthetic peptide
  Seed: EECLINDPWVLLNAS
EECMINMPAVLCNAS

SEQ ID NO: 256656 - protein, 15 aa, Artificial Sequence
  Description of Artificial Sequence: Synthetic peptide
  Seed: EECLINDPWVLLNAS
EECMINMPAVLFNAS

SEQ ID NO: 256657 - protein, 15 aa, Artificial Sequence
  Description of Artificial Sequence: Synthetic peptide
  Seed: EECLINDPWVLLNAS
EECMINMPAVLGNAS

SEQ ID NO: 256658 - protein, 15 aa, Artificial Sequence
  Description of Artificial Sequence: Synthetic peptide
  Seed: EECLINDPWVLLNAS
EECMINMPAVLHNAS

SEQ ID NO: 256659 - protein, 15 aa, Artificial Sequence
  Description of Artificial Sequence: Synthetic peptide
  Seed: EECLINDPWVLLNAS
EECMINMPAVLINAS

SEQ ID NO: 256660 - protein, 15 aa, Artificial Sequence
  Description of Artificial Sequence: Synthetic peptide
  Seed: EECLINDPWVLLNAS
EECMINMPAVLLNAS

SEQ ID NO: 256661 - protein, 15 aa, Artificial Sequence
  Description of Artificial Sequence: Synthetic peptide
  Seed: EECLINDPWVLLNAS
EECMINMPAVLMNAS

SEQ ID NO: 256662 - protein, 15 aa, Artificial Sequence
  Description of Artificial Sequence: Synthetic peptide
  Seed: EECLINDPWVLLNAS
EECMINMPAVLNNAS

SEQ ID NO: 256663 - protein, 15 aa, Artificial Sequence
  Description of Artificial Sequence: Synthetic peptide
  Seed: EECLINDPWVLLNAS
EECMINMPAVLQNAS

SEQ ID NO: 256664 - protein, 15 aa, Artificial Sequence
  Description of Artificial Sequence: Synthetic peptide
  Seed: EECLINDPWVLLNAS
EECMINMPAVLSNAS

SEQ ID NO: 256665 - protein, 15 aa, Artificial Sequence
  Description of Artificial Sequence: Synthetic peptide
  Seed: EECLINDPWVLLNAS
EECMINMPAVLTNAS

SEQ ID NO: 256666 - protein, 15 aa, Artificial Sequence
  Description of Artificial Sequence: Synthetic peptide
  Seed: EECLINDPWVLLNAS
EECMINMPAVLVNAS

SEQ ID NO: 256667 - protein, 15 aa, Artificial Sequence
  Description of Artificial Sequence: Synthetic peptide
  Seed: EECLINDPWVLLNAS
EECMINMPGVLANAS

SEQ ID NO: 256668 - protein, 15 aa, Artificial Sequence
  Description of Artificial Sequence: Synthetic peptide
  Seed: EECLINDPWVLLNAS
EECMINMPGVLCNAS

SEQ ID NO: 256669 - protein, 15 aa, Artificial Sequence
  Description of Artificial Sequence: Synthetic peptide
  Seed: EECLINDPWVLLNAS
EECMINMPGVLGNAS

SEQ ID NO: 256670 - protein, 15 aa, Artificial Sequence
  Description of Artificial Sequence: Synthetic peptide
  Seed: EECLINDPWVLLNAS
EECMINMPGVLINAS

SEQ ID NO: 256671 - protein, 15 aa, Artificial Sequence
  Description of Artificial Sequence: Synthetic peptide
  Seed: EECLINDPWVLLNAS
EECMINMPGVLLNAS

SEQ ID NO: 256672 - protein, 15 aa, Artificial Sequence
  Description of Artificial Sequence: Synthetic peptide
  Seed: EECLINDPWVLLNAS
EECMINMPGVLMNAS

SEQ ID NO: 256673 - protein, 15 aa, Artificial Sequence
  Description of Artificial Sequence: Synthetic peptide
  Seed: EECLINDPWVLLNAS
EECMINMPGVLNNAS

SEQ ID NO: 256674 - protein, 15 aa, Artificial Sequence
  Description of Artificial Sequence: Synthetic peptide
  Seed: EECLINDPWVLLNAS
EECMINMPGVLSNAS

SEQ ID NO: 256675 - protein, 15 aa, Artificial Sequence
  Description of Artificial Sequence: Synthetic peptide
  Seed: EECLINDPWVLLNAS
EECMINMPGVLTNAS

SEQ ID NO: 256676 - protein, 15 aa, Artificial Sequence
  Description of Artificial Sequence: Synthetic peptide
  Seed: EECLINDPWVLLNAS
EECMINMPGVLVNAS

SEQ ID NO: 256677 - protein, 15 aa, Artificial Sequence
  Description of Artificial Sequence: Synthetic peptide
  Seed: EECLINDPWVLLNAS
EECMINMPNVLANAS

SEQ ID NO: 256678 - protein, 15 aa, Artificial Sequence
  Description of Artificial Sequence: Synthetic peptide
  Seed: EECLINDPWVLLNAS
EECMINMPNVLINAS

SEQ ID NO: 256679 - protein, 15 aa, Artificial Sequence
  Description of Artificial Sequence: Synthetic peptide
  Seed: EECLINDPWVLLNAS
EECMINMPNVLLNAS

SEQ ID NO: 256680 - protein, 15 aa, Artificial Sequence
  Description of Artificial Sequence: Synthetic peptide
  Seed: EECLINDPWVLLNAS
EECMINMPNVLMNAS

SEQ ID NO: 256681 - protein, 15 aa, Artificial Sequence
  Description of Artificial Sequence: Synthetic peptide
  Seed: EECLINDPWVLLNAS
EECMINMPNVLSNAS

SEQ ID NO: 256682 - protein, 15 aa, Artificial Sequence
  Description of Artificial Sequence: Synthetic peptide
  Seed: EECLINDPWVLLNAS
EECMINMPNVLTNAS

SEQ ID NO: 256683 - protein, 15 aa, Artificial Sequence
  Description of Artificial Sequence: Synthetic peptide
  Seed: EECLINDPWVLLNAS
EECMINMPNVLVNAS

SEQ ID NO: 256684 - protein, 15 aa, Artificial Sequence
  Description of Artificial Sequence: Synthetic peptide
  Seed: EECLINDPWVLLNAS
EECMINMPPVLANAS

SEQ ID NO: 256685 - protein, 15 aa, Artificial Sequence
  Description of Artificial Sequence: Synthetic peptide
  Seed: EECLINDPWVLLNAS
EECMINMPPVLINAS

SEQ ID NO: 256686 - protein, 15 aa, Artificial Sequence
  Description of Artificial Sequence: Synthetic peptide
  Seed: EECLINDPWVLLNAS
EECMINMPPVLLNAS

SEQ ID NO: 256687 - protein, 15 aa, Artificial Sequence
  Description of Artificial Sequence: Synthetic peptide
  Seed: EECLINDPWVLLNAS
EECMINMPPVLMNAS

SEQ ID NO: 256688 - protein, 15 aa, Artificial Sequence
  Description of Artificial Sequence: Synthetic peptide
  Seed: EECLINDPWVLLNAS
EECMINMPPVLSNAS

SEQ ID NO: 256689 - protein, 15 aa, Artificial Sequence
  Description of Artificial Sequence: Synthetic peptide
  Seed: EECLINDPWVLLNAS
EECMINMPPVLTNAS

SEQ ID NO: 256690 - protein, 15 aa, Artificial Sequence
  Description of Artificial Sequence: Synthetic peptide
  Seed: EECLINDPWVLLNAS
EECMINMPPVLVNAS

SEQ ID NO: 256691 - protein, 15 aa, Artificial Sequence
  Description of Artificial Sequence: Synthetic peptide
  Seed: EECLINDPWVLLNAS
EECMINMPSVLANAS

SEQ ID NO: 256692 - protein, 15 aa, Artificial Sequence
  Description of Artificial Sequence: Synthetic peptide
  Seed: EECLINDPWVLLNAS
EECMINMPSVLCNAS

SEQ ID NO: 256693 - protein, 15 aa, Artificial Sequence
  Description of Artificial Sequence: Synthetic peptide
  Seed: EECLINDPWVLLNAS
EECMINMPSVLGNAS

SEQ ID NO: 256694 - protein, 15 aa, Artificial Sequence
  Description of Artificial Sequence: Synthetic peptide
  Seed: EECLINDPWVLLNAS
EECMINMPSVLINAS

SEQ ID NO: 256695 - protein, 15 aa, Artificial Sequence
  Description of Artificial Sequence: Synthetic peptide
  Seed: EECLINDPWVLLNAS
EECMINMPSVLLNAS

SEQ ID NO: 256696 - protein, 15 aa, Artificial Sequence
  Description of Artificial Sequence: Synthetic peptide
  Seed: EECLINDPWVLLNAS
EECMINMPSVLMNAS

SEQ ID NO: 256697 - protein, 15 aa, Artificial Sequence
  Description of Artificial Sequence: Synthetic peptide
  Seed: EECLINDPWVLLNAS
EECMINMPSVLSNAS

SEQ ID NO: 256698 - protein, 15 aa, Artificial Sequence
  Description of Artificial Sequence: Synthetic peptide
  Seed: EECLINDPWVLLNAS
EECMINMPSVLTNAS

SEQ ID NO: 256699 - protein, 15 aa, Artificial Sequence
  Description of Artificial Sequence: Synthetic peptide
  Seed: EECLINDPWVLLNAS
EECMINMPSVLVNAS

SEQ ID NO: 256700 - protein, 15 aa, Artificial Sequence
  Description of Artificial Sequence: Synthetic peptide
  Seed: EECLINDPWVLLNAS
EECMINMPTVLANAS

SEQ ID NO: 256701 - protein, 15 aa, Artificial Sequence
  Description of Artificial Sequence: Synthetic peptide
  Seed: EECLINDPWVLLNAS
EECMINMPTVLINAS

SEQ ID NO: 256702 - protein, 15 aa, Artificial Sequence
  Description of Artificial Sequence: Synthetic peptide
  Seed: EECLINDPWVLLNAS
EECMINMPTVLLNAS

SEQ ID NO: 256703 - protein, 15 aa, Artificial Sequence
  Description of Artificial Sequence: Synthetic peptide
  Seed: EECLINDPWVLLNAS
EECMINMPTVLMNAS

SEQ ID NO: 256704 - protein, 15 aa, Artificial Sequence
  Description of Artificial Sequence: Synthetic peptide
  Seed: EECLINDPWVLLNAS
EECMINMPTVLSNAS

SEQ ID NO: 256705 - protein, 15 aa, Artificial Sequence
  Description of Artificial Sequence: Synthetic peptide
  Seed: EECLINDPWVLLNAS
EECMINMPTVLTNAS

SEQ ID NO: 256706 - protein, 15 aa, Artificial Sequence
  Description of Artificial Sequence: Synthetic peptide
  Seed: EECLINDPWVLLNAS
EECMINMPTVLVNAS

SEQ ID NO: 256707 - protein, 15 aa, Artificial Sequence
  Description of Artificial Sequence: Synthetic peptide
  Seed: EECLINDPWVLLNAS
EECMINMPVVLANAS

SEQ ID NO: 256708 - protein, 15 aa, Artificial Sequence
  Description of Artificial Sequence: Synthetic peptide
  Seed: EECLINDPWVLLNAS
EECMINMPVVLINAS

SEQ ID NO: 256709 - protein, 15 aa, Artificial Sequence
  Description of Artificial Sequence: Synthetic peptide
  Seed: EECLINDPWVLLNAS
EECMINMPVVLLNAS

SEQ ID NO: 256710 - protein, 15 aa, Artificial Sequence
  Description of Artificial Sequence: Synthetic peptide
  Seed: EECLINDPWVLLNAS
EECMINMPVVLSNAS

SEQ ID NO: 256711 - protein, 15 aa, Artificial Sequence
  Description of Artificial Sequence: Synthetic peptide
  Seed: EECLINDPWVLLNAS
EECMINMPVVLTNAS

SEQ ID NO: 256712 - protein, 15 aa, Artificial Sequence
  Description of Artificial Sequence: Synthetic peptide
  Seed: EECLINDPWVLLNAS
EECMINMPVVLVNAS

SEQ ID NO: 256713 - protein, 15 aa, Artificial Sequence
  Description of Artificial Sequence: Synthetic peptide
  Seed: EECLINDPWVLLNAS
EECMINNPAVLANAS

SEQ ID NO: 256714 - protein, 15 aa, Artificial Sequence
  Description of Artificial Sequence: Synthetic peptide
  Seed: EECLINDPWVLLNAS
EECMINNPAVLFNAS

SEQ ID NO: 256715 - protein, 15 aa, Artificial Sequence
  Description of Artificial Sequence: Synthetic peptide
  Seed: EECLINDPWVLLNAS
EECMINNPAVLINAS

SEQ ID NO: 256716 - protein, 15 aa, Artificial Sequence
  Description of Artificial Sequence: Synthetic peptide
  Seed: EECLINDPWVLLNAS
EECMINNPAVLLNAS

SEQ ID NO: 256717 - protein, 15 aa, Artificial Sequence
  Description of Artificial Sequence: Synthetic peptide
  Seed: EECLINDPWVLLNAS
EECMINNPAVLMNAS

SEQ ID NO: 256718 - protein, 15 aa, Artificial Sequence
  Description of Artificial Sequence: Synthetic peptide
  Seed: EECLINDPWVLLNAS
EECMINNPAVLSNAS

SEQ ID NO: 256719 - protein, 15 aa, Artificial Sequence
  Description of Artificial Sequence: Synthetic peptide
  Seed: EECLINDPWVLLNAS
EECMINNPAVLTNAS

SEQ ID NO: 256720 - protein, 15 aa, Artificial Sequence
  Description of Artificial Sequence: Synthetic peptide
  Seed: EECLINDPWVLLNAS
EECMINNPAVLVNAS

SEQ ID NO: 256721 - protein, 15 aa, Artificial Sequence
  Description of Artificial Sequence: Synthetic peptide
  Seed: EECLINDPWVLLNAS
EECMINNPAVLWNAS

SEQ ID NO: 256722 - protein, 15 aa, Artificial Sequence
  Description of Artificial Sequence: Synthetic peptide
  Seed: EECLINDPWVLLNAS
EECMINNPAVLYNAS

SEQ ID NO: 256723 - protein, 15 aa, Artificial Sequence
  Description of Artificial Sequence: Synthetic peptide
  Seed: EECLINDPWVLLNAS
EECMINNPGVLFNAS

SEQ ID NO: 256724 - protein, 15 aa, Artificial Sequence
  Description of Artificial Sequence: Synthetic peptide
  Seed: EECLINDPWVLLNAS
EECMINNPGVLINAS

SEQ ID NO: 256725 - protein, 15 aa, Artificial Sequence
  Description of Artificial Sequence: Synthetic peptide
  Seed: EECLINDPWVLLNAS
EECMINNPGVLLNAS

SEQ ID NO: 256726 - protein, 15 aa, Artificial Sequence
  Description of Artificial Sequence: Synthetic peptide
  Seed: EECLINDPWVLLNAS
EECMINNPGVLMNAS

SEQ ID NO: 256727 - protein, 15 aa, Artificial Sequence
  Description of Artificial Sequence: Synthetic peptide
  Seed: EECLINDPWVLLNAS
EECMINNPGVLVNAS

SEQ ID NO: 256728 - protein, 15 aa, Artificial Sequence
  Description of Artificial Sequence: Synthetic peptide
  Seed: EECLINDPWVLLNAS
EECMINNPGVLYNAS

SEQ ID NO: 256729 - protein, 15 aa, Artificial Sequence
  Description of Artificial Sequence: Synthetic peptide
  Seed: EECLINDPWVLLNAS
EECMINNPIVLANAS

SEQ ID NO: 256730 - protein, 15 aa, Artificial Sequence
  Description of Artificial Sequence: Synthetic peptide
  Seed: EECLINDPWVLLNAS
EECMINNPIVLFNAS

SEQ ID NO: 256731 - protein, 15 aa, Artificial Sequence
  Description of Artificial Sequence: Synthetic peptide
  Seed: EECLINDPWVLLNAS
EECMINNPIVLINAS

SEQ ID NO: 256732 - protein, 15 aa, Artificial Sequence
  Description of Artificial Sequence: Synthetic peptide
  Seed: EECLINDPWVLLNAS
EECMINNPIVLLNAS

SEQ ID NO: 256733 - protein, 15 aa, Artificial Sequence
  Description of Artificial Sequence: Synthetic peptide
  Seed: EECLINDPWVLLNAS
EECMINNPIVLMNAS

SEQ ID NO: 256734 - protein, 15 aa, Artificial Sequence
  Description of Artificial Sequence: Synthetic peptide
  Seed: EECLINDPWVLLNAS
EECMINNPIVLSNAS

SEQ ID NO: 256735 - protein, 15 aa, Artificial Sequence
  Description of Artificial Sequence: Synthetic peptide
  Seed: EECLINDPWVLLNAS
EECMINNPIVLTNAS

SEQ ID NO: 256736 - protein, 15 aa, Artificial Sequence
  Description of Artificial Sequence: Synthetic peptide
  Seed: EECLINDPWVLLNAS
EECMINNPIVLVNAS

SEQ ID NO: 256737 - protein, 15 aa, Artificial Sequence
  Description of Artificial Sequence: Synthetic peptide
  Seed: EECLINDPWVLLNAS
EECMINNPIVLYNAS

SEQ ID NO: 256738 - protein, 15 aa, Artificial Sequence
  Description of Artificial Sequence: Synthetic peptide
  Seed: EECLINDPWVLLNAS
EECMINNPLVLFNAS

SEQ ID NO: 256739 - protein, 15 aa, Artificial Sequence
  Description of Artificial Sequence: Synthetic peptide
  Seed: EECLINDPWVLLNAS
EECMINNPLVLINAS

SEQ ID NO: 256740 - protein, 15 aa, Artificial Sequence
  Description of Artificial Sequence: Synthetic peptide
  Seed: EECLINDPWVLLNAS
EECMINNPLVLLNAS

SEQ ID NO: 256741 - protein, 15 aa, Artificial Sequence
  Description of Artificial Sequence: Synthetic peptide
  Seed: EECLINDPWVLLNAS
EECMINNPLVLMNAS

SEQ ID NO: 256742 - protein, 15 aa, Artificial Sequence
  Description of Artificial Sequence: Synthetic peptide
  Seed: EECLINDPWVLLNAS
EECMINNPLVLVNAS

SEQ ID NO: 256743 - protein, 15 aa, Artificial Sequence
  Description of Artificial Sequence: Synthetic peptide
  Seed: EECLINDPWVLLNAS
EECMINNPLVLYNAS

SEQ ID NO: 256744 - protein, 15 aa, Artificial Sequence
  Description of Artificial Sequence: Synthetic peptide
  Seed: EECLINDPWVLLNAS
EECMINNPMVLFNAS

SEQ ID NO: 256745 - protein, 15 aa, Artificial Sequence
  Description of Artificial Sequence: Synthetic peptide
  Seed: EECLINDPWVLLNAS
EECMINNPMVLINAS

SEQ ID NO: 256746 - protein, 15 aa, Artificial Sequence
  Description of Artificial Sequence: Synthetic peptide
  Seed: EECLINDPWVLLNAS
EECMINNPMVLLNAS

SEQ ID NO: 256747 - protein, 15 aa, Artificial Sequence
  Description of Artificial Sequence: Synthetic peptide
  Seed: EECLINDPWVLLNAS
EECMINNPMVLMNAS

SEQ ID NO: 256748 - protein, 15 aa, Artificial Sequence
  Description of Artificial Sequence: Synthetic peptide
  Seed: EECLINDPWVLLNAS
EECMINNPMVLVNAS

SEQ ID NO: 256749 - protein, 15 aa, Artificial Sequence
  Description of Artificial Sequence: Synthetic peptide
  Seed: EECLINDPWVLLNAS
EECMINNPMVLYNAS

SEQ ID NO: 256750 - protein, 15 aa, Artificial Sequence
  Description of Artificial Sequence: Synthetic peptide
  Seed: EECLINDPWVLLNAS
EECMINNPNVLANAS

SEQ ID NO: 256751 - protein, 15 aa, Artificial Sequence
  Description of Artificial Sequence: Synthetic peptide
  Seed: EECLINDPWVLLNAS
EECMINNPNVLFNAS

SEQ ID NO: 256752 - protein, 15 aa, Artificial Sequence
  Description of Artificial Sequence: Synthetic peptide
  Seed: EECLINDPWVLLNAS
EECMINNPNVLINAS

SEQ ID NO: 256753 - protein, 15 aa, Artificial Sequence
  Description of Artificial Sequence: Synthetic peptide
  Seed: EECLINDPWVLLNAS
EECMINNPNVLLNAS

SEQ ID NO: 256754 - protein, 15 aa, Artificial Sequence
  Description of Artificial Sequence: Synthetic peptide
  Seed: EECLINDPWVLLNAS
EECMINNPNVLMNAS

SEQ ID NO: 256755 - protein, 15 aa, Artificial Sequence
  Description of Artificial Sequence: Synthetic peptide
  Seed: EECLINDPWVLLNAS
EECMINNPNVLVNAS

SEQ ID NO: 256756 - protein, 15 aa, Artificial Sequence
  Description of Artificial Sequence: Synthetic peptide
  Seed: EECLINDPWVLLNAS
EECMINNPNVLYNAS

SEQ ID NO: 256757 - protein, 15 aa, Artificial Sequence
  Description of Artificial Sequence: Synthetic peptide
  Seed: EECLINDPWVLLNAS
EECMINNPPVLFNAS

SEQ ID NO: 256758 - protein, 15 aa, Artificial Sequence
  Description of Artificial Sequence: Synthetic peptide
  Seed: EECLINDPWVLLNAS
EECMINNPPVLINAS

SEQ ID NO: 256759 - protein, 15 aa, Artificial Sequence
  Description of Artificial Sequence: Synthetic peptide
  Seed: EECLINDPWVLLNAS
EECMINNPPVLLNAS

SEQ ID NO: 256760 - protein, 15 aa, Artificial Sequence
  Description of Artificial Sequence: Synthetic peptide
  Seed: EECLINDPWVLLNAS
EECMINNPPVLVNAS

SEQ ID NO: 256761 - protein, 15 aa, Artificial Sequence
  Description of Artificial Sequence: Synthetic peptide
  Seed: EECLINDPWVLLNAS
EECMINNPPVLYNAS

SEQ ID NO: 256762 - protein, 15 aa, Artificial Sequence
  Description of Artificial Sequence: Synthetic peptide
  Seed: EECLINDPWVLLNAS
EECMINNPSVLANAS

SEQ ID NO: 256763 - protein, 15 aa, Artificial Sequence
  Description of Artificial Sequence: Synthetic peptide
  Seed: EECLINDPWVLLNAS
EECMINNPSVLFNAS

SEQ ID NO: 256764 - protein, 15 aa, Artificial Sequence
  Description of Artificial Sequence: Synthetic peptide
  Seed: EECLINDPWVLLNAS
EECMINNPSVLINAS

SEQ ID NO: 256765 - protein, 15 aa, Artificial Sequence
  Description of Artificial Sequence: Synthetic peptide
  Seed: EECLINDPWVLLNAS
EECMINNPSVLLNAS

SEQ ID NO: 256766 - protein, 15 aa, Artificial Sequence
  Description of Artificial Sequence: Synthetic peptide
  Seed: EECLINDPWVLLNAS
EECMINNPSVLMNAS

SEQ ID NO: 256767 - protein, 15 aa, Artificial Sequence
  Description of Artificial Sequence: Synthetic peptide
  Seed: EECLINDPWVLLNAS
EECMINNPSVLVNAS

SEQ ID NO: 256768 - protein, 15 aa, Artificial Sequence
  Description of Artificial Sequence: Synthetic peptide
  Seed: EECLINDPWVLLNAS
EECMINNPSVLYNAS

SEQ ID NO: 256769 - protein, 15 aa, Artificial Sequence
  Description of Artificial Sequence: Synthetic peptide
  Seed: EECLINDPWVLLNAS
EECMINNPTVLFNAS

SEQ ID NO: 256770 - protein, 15 aa, Artificial Sequence
  Description of Artificial Sequence: Synthetic peptide
  Seed: EECLINDPWVLLNAS
EECMINNPTVLINAS

SEQ ID NO: 256771 - protein, 15 aa, Artificial Sequence
  Description of Artificial Sequence: Synthetic peptide
  Seed: EECLINDPWVLLNAS
EECMINNPTVLLNAS

SEQ ID NO: 256772 - protein, 15 aa, Artificial Sequence
  Description of Artificial Sequence: Synthetic peptide
  Seed: EECLINDPWVLLNAS
EECMINNPTVLMNAS

SEQ ID NO: 256773 - protein, 15 aa, Artificial Sequence
  Description of Artificial Sequence: Synthetic peptide
  Seed: EECLINDPWVLLNAS
EECMINNPTVLVNAS

SEQ ID NO: 256774 - protein, 15 aa, Artificial Sequence
  Description of Artificial Sequence: Synthetic peptide
  Seed: EECLINDPWVLLNAS
EECMINNPTVLYNAS

SEQ ID NO: 256775 - protein, 15 aa, Artificial Sequence
  Description of Artificial Sequence: Synthetic peptide
  Seed: EECLINDPWVLLNAS
EECMINNPVVLANAS

SEQ ID NO: 256776 - protein, 15 aa, Artificial Sequence
  Description of Artificial Sequence: Synthetic peptide
  Seed: EECLINDPWVLLNAS
EECMINNPVVLFNAS

SEQ ID NO: 256777 - protein, 15 aa, Artificial Sequence
  Description of Artificial Sequence: Synthetic peptide
  Seed: EECLINDPWVLLNAS
EECMINNPVVLINAS

SEQ ID NO: 256778 - protein, 15 aa, Artificial Sequence
  Description of Artificial Sequence: Synthetic peptide
  Seed: EECLINDPWVLLNAS
EECMINNPVVLLNAS

SEQ ID NO: 256779 - protein, 15 aa, Artificial Sequence
  Description of Artificial Sequence: Synthetic peptide
  Seed: EECLINDPWVLLNAS
EECMINNPVVLMNAS

SEQ ID NO: 256780 - protein, 15 aa, Artificial Sequence
  Description of Artificial Sequence: Synthetic peptide
  Seed: EECLINDPWVLLNAS
EECMINNPVVLVNAS

SEQ ID NO: 256781 - protein, 15 aa, Artificial Sequence
  Description of Artificial Sequence: Synthetic peptide
  Seed: EECLINDPWVLLNAS
EECMINNPVVLYNAS

SEQ ID NO: 256782 - protein, 15 aa, Artificial Sequence
  Description of Artificial Sequence: Synthetic peptide
  Seed: EECLINDPWVLLNAS
EECMINQPAVLANAS

SEQ ID NO: 256783 - protein, 15 aa, Artificial Sequence
  Description of Artificial Sequence: Synthetic peptide
  Seed: EECLINDPWVLLNAS
EECMINQPAVLINAS

SEQ ID NO: 256784 - protein, 15 aa, Artificial Sequence
  Description of Artificial Sequence: Synthetic peptide
  Seed: EECLINDPWVLLNAS
EECMINQPAVLLNAS

SEQ ID NO: 256785 - protein, 15 aa, Artificial Sequence
  Description of Artificial Sequence: Synthetic peptide
  Seed: EECLINDPWVLLNAS
EECMINQPAVLVNAS

SEQ ID NO: 256786 - protein, 15 aa, Artificial Sequence
  Description of Artificial Sequence: Synthetic peptide
  Seed: EECLINDPWVLLNAS
EECMINQPGVLANAS

SEQ ID NO: 256787 - protein, 15 aa, Artificial Sequence
  Description of Artificial Sequence: Synthetic peptide
  Seed: EECLINDPWVLLNAS
EECMINQPGVLINAS

SEQ ID NO: 256788 - protein, 15 aa, Artificial Sequence
  Description of Artificial Sequence: Synthetic peptide
  Seed: EECLINDPWVLLNAS
EECMINQPGVLLNAS

SEQ ID NO: 256789 - protein, 15 aa, Artificial Sequence
  Description of Artificial Sequence: Synthetic peptide
  Seed: EECLINDPWVLLNAS
EECMINQPGVLVNAS

SEQ ID NO: 256790 - protein, 15 aa, Artificial Sequence
  Description of Artificial Sequence: Synthetic peptide
  Seed: EECLINDPWVLLNAS
EECMINQPSVLANAS

SEQ ID NO: 256791 - protein, 15 aa, Artificial Sequence
  Description of Artificial Sequence: Synthetic peptide
  Seed: EECLINDPWVLLNAS
EECMINQPSVLINAS

SEQ ID NO: 256792 - protein, 15 aa, Artificial Sequence
  Description of Artificial Sequence: Synthetic peptide
  Seed: EECLINDPWVLLNAS
EECMINQPSVLLNAS

SEQ ID NO: 256793 - protein, 15 aa, Artificial Sequence
  Description of Artificial Sequence: Synthetic peptide
  Seed: EECLINDPWVLLNAS
EECMINQPSVLVNAS

SEQ ID NO: 256794 - protein, 15 aa, Artificial Sequence
  Description of Artificial Sequence: Synthetic peptide
  Seed: EECLINDPWVLLNAS
EECMINSPAVLANAS

SEQ ID NO: 256795 - protein, 15 aa, Artificial Sequence
  Description of Artificial Sequence: Synthetic peptide
  Seed: EECLINDPWVLLNAS
EECMINSPAVLINAS

SEQ ID NO: 256796 - protein, 15 aa, Artificial Sequence
  Description of Artificial Sequence: Synthetic peptide
  Seed: EECLINDPWVLLNAS
EECMINSPAVLLNAS

SEQ ID NO: 256797 - protein, 15 aa, Artificial Sequence
  Description of Artificial Sequence: Synthetic peptide
  Seed: EECLINDPWVLLNAS
EECMINSPAVLVNAS

SEQ ID NO: 256798 - protein, 15 aa, Artificial Sequence
  Description of Artificial Sequence: Synthetic peptide
  Seed: EECLINDPWVLLNAS
EECMINSPFVLINAS

SEQ ID NO: 256799 - protein, 15 aa, Artificial Sequence
  Description of Artificial Sequence: Synthetic peptide
  Seed: EECLINDPWVLLNAS
EECMINSPFVLLNAS

SEQ ID NO: 256800 - protein, 15 aa, Artificial Sequence
  Description of Artificial Sequence: Synthetic peptide
  Seed: EECLINDPWVLLNAS
EECMINSPFVLVNAS

SEQ ID NO: 256801 - protein, 15 aa, Artificial Sequence
  Description of Artificial Sequence: Synthetic peptide
  Seed: EECLINDPWVLLNAS
EECMINSPNVLINAS

SEQ ID NO: 256802 - protein, 15 aa, Artificial Sequence
  Description of Artificial Sequence: Synthetic peptide
  Seed: EECLINDPWVLLNAS
EECMINSPNVLVNAS

SEQ ID NO: 256803 - protein, 15 aa, Artificial Sequence
  Description of Artificial Sequence: Synthetic peptide
  Seed: EECLINDPWVLLNAS
EECMINSPSVLINAS

SEQ ID NO: 256804 - protein, 15 aa, Artificial Sequence
  Description of Artificial Sequence: Synthetic peptide
  Seed: EECLINDPWVLLNAS
EECMINSPSVLVNAS

SEQ ID NO: 256805 - protein, 15 aa, Artificial Sequence
  Description of Artificial Sequence: Synthetic peptide
  Seed: EECLINDPWVLLNAS
EECMINTPAVLINAS

SEQ ID NO: 256806 - protein, 15 aa, Artificial Sequence
  Description of Artificial Sequence: Synthetic peptide
  Seed: EECLINDPWVLLNAS
EECMINTPAVLLNAS

SEQ ID NO: 256807 - protein, 15 aa, Artificial Sequence
  Description of Artificial Sequence: Synthetic peptide
  Seed: EECLINDPWVLLNAS
EECMINTPFVLINAS

SEQ ID NO: 256808 - protein, 15 aa, Artificial Sequence
  Description of Artificial Sequence: Synthetic peptide
  Seed: EECLINDPWVLLNAS
EECMINTPFVLLNAS

SEQ ID NO: 256809 - protein, 15 aa, Artificial Sequence
  Description of Artificial Sequence: Synthetic peptide
  Seed: EECLINDPWVLLNAS
EECMINTPFVLMNAS

SEQ ID NO: 256810 - protein, 15 aa, Artificial Sequence
  Description of Artificial Sequence: Synthetic peptide
  Seed: EECLINDPWVLLNAS
EECMINTPFVLVNAS

SEQ ID NO: 256811 - protein, 15 aa, Artificial Sequence
  Description of Artificial Sequence: Synthetic peptide
  Seed: EECLINDPWVLLNAS
EECMINVPAVLANAS

SEQ ID NO: 256812 - protein, 15 aa, Artificial Sequence
  Description of Artificial Sequence: Synthetic peptide
  Seed: EECLINDPWVLLNAS
EECMINVPAVLINAS

SEQ ID NO: 256813 - protein, 15 aa, Artificial Sequence
  Description of Artificial Sequence: Synthetic peptide
  Seed: EECLINDPWVLLNAS
EECMINVPAVLLNAS

SEQ ID NO: 256814 - protein, 15 aa, Artificial Sequence
  Description of Artificial Sequence: Synthetic peptide
  Seed: EECLINDPWVLLNAS
EECMINVPAVLSNAS

SEQ ID NO: 256815 - protein, 15 aa, Artificial Sequence
  Description of Artificial Sequence: Synthetic peptide
  Seed: EECLINDPWVLLNAS
EECMINVPAVLTNAS

SEQ ID NO: 256816 - protein, 15 aa, Artificial Sequence
  Description of Artificial Sequence: Synthetic peptide
  Seed: EECLINDPWVLLNAS
EECMINVPAVLVNAS

SEQ ID NO: 256817 - protein, 15 aa, Artificial Sequence
  Description of Artificial Sequence: Synthetic peptide
  Seed: EECLINDPWVLLNAS
EECMINVPFVLLNAS

SEQ ID NO: 256818 - protein, 15 aa, Artificial Sequence
  Description of Artificial Sequence: Synthetic peptide
  Seed: EECLINDPWVLLNAS
EECMINVPFVLVNAS

SEQ ID NO: 256819 - protein, 15 aa, Artificial Sequence
  Description of Artificial Sequence: Synthetic peptide
  Seed: EECLINDPWVLLNAS
EECMINVPGVLANAS

SEQ ID NO: 256820 - protein, 15 aa, Artificial Sequence
  Description of Artificial Sequence: Synthetic peptide
  Seed: EECLINDPWVLLNAS
EECMINVPGVLINAS

SEQ ID NO: 256821 - protein, 15 aa, Artificial Sequence
  Description of Artificial Sequence: Synthetic peptide
  Seed: EECLINDPWVLLNAS
EECMINVPGVLLNAS

SEQ ID NO: 256822 - protein, 15 aa, Artificial Sequence
  Description of Artificial Sequence: Synthetic peptide
  Seed: EECLINDPWVLLNAS
EECMINVPGVLVNAS

SEQ ID NO: 256823 - protein, 15 aa, Artificial Sequence
  Description of Artificial Sequence: Synthetic peptide
  Seed: EECLINDPWVLLNAS
EECMINVPNVLINAS

SEQ ID NO: 256824 - protein, 15 aa, Artificial Sequence
  Description of Artificial Sequence: Synthetic peptide
  Seed: EECLINDPWVLLNAS
EECMINVPNVLVNAS

SEQ ID NO: 256825 - protein, 15 aa, Artificial Sequence
  Description of Artificial Sequence: Synthetic peptide
  Seed: EECLINDPWVLLNAS
EECMINVPSVLANAS

SEQ ID NO: 256826 - protein, 15 aa, Artificial Sequence
  Description of Artificial Sequence: Synthetic peptide
  Seed: EECLINDPWVLLNAS
EECMINVPSVLINAS

SEQ ID NO: 256827 - protein, 15 aa, Artificial Sequence
  Description of Artificial Sequence: Synthetic peptide
  Seed: EECLINDPWVLLNAS
EECMINVPSVLLNAS

SEQ ID NO: 256828 - protein, 15 aa, Artificial Sequence
  Description of Artificial Sequence: Synthetic peptide
  Seed: EECLINDPWVLLNAS
EECMINVPSVLVNAS

SEQ ID NO: 256829 - protein, 15 aa, Artificial Sequence
  Description of Artificial Sequence: Synthetic peptide
  Seed: EECLINDPWVLLNAS
EECVINAPAVLANAS

SEQ ID NO: 256830 - protein, 15 aa, Artificial Sequence
  Description of Artificial Sequence: Synthetic peptide
  Seed: EECLINDPWVLLNAS
EECVINAPAVLINAS

SEQ ID NO: 256831 - protein, 15 aa, Artificial Sequence
  Description of Artificial Sequence: Synthetic peptide
  Seed: EECLINDPWVLLNAS
EECVINAPAVLLNAS

SEQ ID NO: 256832 - protein, 15 aa, Artificial Sequence
  Description of Artificial Sequence: Synthetic peptide
  Seed: EECLINDPWVLLNAS
EECVINAPAVLMNAS

SEQ ID NO: 256833 - protein, 15 aa, Artificial Sequence
  Description of Artificial Sequence: Synthetic peptide
  Seed: EECLINDPWVLLNAS
EECVINAPAVLSNAS

SEQ ID NO: 256834 - protein, 15 aa, Artificial Sequence
  Description of Artificial Sequence: Synthetic peptide
  Seed: EECLINDPWVLLNAS
EECVINAPAVLTNAS

SEQ ID NO: 256835 - protein, 15 aa, Artificial Sequence
  Description of Artificial Sequence: Synthetic peptide
  Seed: EECLINDPWVLLNAS
EECVINAPAVLVNAS

SEQ ID NO: 256836 - protein, 15 aa, Artificial Sequence
  Description of Artificial Sequence: Synthetic peptide
  Seed: EECLINDPWVLLNAS
EECVINAPGVLANAS

SEQ ID NO: 256837 - protein, 15 aa, Artificial Sequence
  Description of Artificial Sequence: Synthetic peptide
  Seed: EECLINDPWVLLNAS
EECVINAPGVLINAS

SEQ ID NO: 256838 - protein, 15 aa, Artificial Sequence
  Description of Artificial Sequence: Synthetic peptide
  Seed: EECLINDPWVLLNAS
EECVINAPGVLLNAS

SEQ ID NO: 256839 - protein, 15 aa, Artificial Sequence
  Description of Artificial Sequence: Synthetic peptide
  Seed: EECLINDPWVLLNAS
EECVINAPGVLMNAS

SEQ ID NO: 256840 - protein, 15 aa, Artificial Sequence
  Description of Artificial Sequence: Synthetic peptide
  Seed: EECLINDPWVLLNAS
EECVINAPGVLVNAS

SEQ ID NO: 256841 - protein, 15 aa, Artificial Sequence
  Description of Artificial Sequence: Synthetic peptide
  Seed: EECLINDPWVLLNAS
EECVINAPNVLFNAS

SEQ ID NO: 256842 - protein, 15 aa, Artificial Sequence
  Description of Artificial Sequence: Synthetic peptide
  Seed: EECLINDPWVLLNAS
EECVINAPNVLINAS

SEQ ID NO: 256843 - protein, 15 aa, Artificial Sequence
  Description of Artificial Sequence: Synthetic peptide
  Seed: EECLINDPWVLLNAS
EECVINAPNVLLNAS

SEQ ID NO: 256844 - protein, 15 aa, Artificial Sequence
  Description of Artificial Sequence: Synthetic peptide
  Seed: EECLINDPWVLLNAS
EECVINAPNVLVNAS

SEQ ID NO: 256845 - protein, 15 aa, Artificial Sequence
  Description of Artificial Sequence: Synthetic peptide
  Seed: EECLINDPWVLLNAS
EECVINAPPVLANAS

SEQ ID NO: 256846 - protein, 15 aa, Artificial Sequence
  Description of Artificial Sequence: Synthetic peptide
  Seed: EECLINDPWVLLNAS
EECVINAPPVLINAS

SEQ ID NO: 256847 - protein, 15 aa, Artificial Sequence
  Description of Artificial Sequence: Synthetic peptide
  Seed: EECLINDPWVLLNAS
EECVINAPPVLLNAS

SEQ ID NO: 256848 - protein, 15 aa, Artificial Sequence
  Description of Artificial Sequence: Synthetic peptide
  Seed: EECLINDPWVLLNAS
EECVINAPPVLVNAS

SEQ ID NO: 256849 - protein, 15 aa, Artificial Sequence
  Description of Artificial Sequence: Synthetic peptide
  Seed: EECLINDPWVLLNAS
EECVINAPSVLANAS

SEQ ID NO: 256850 - protein, 15 aa, Artificial Sequence
  Description of Artificial Sequence: Synthetic peptide
  Seed: EECLINDPWVLLNAS
EECVINAPSVLINAS

SEQ ID NO: 256851 - protein, 15 aa, Artificial Sequence
  Description of Artificial Sequence: Synthetic peptide
  Seed: EECLINDPWVLLNAS
EECVINAPSVLLNAS

SEQ ID NO: 256852 - protein, 15 aa, Artificial Sequence
  Description of Artificial Sequence: Synthetic peptide
  Seed: EECLINDPWVLLNAS
EECVINAPSVLVNAS

SEQ ID NO: 256853 - protein, 15 aa, Artificial Sequence
  Description of Artificial Sequence: Synthetic peptide
  Seed: EECLINDPWVLLNAS
EECVINDPIVLRNAS

SEQ ID NO: 256854 - protein, 15 aa, Artificial Sequence
  Description of Artificial Sequence: Synthetic peptide
  Seed: EECLINDPWVLLNAS
EECVINDPKVLANAS

SEQ ID NO: 256855 - protein, 15 aa, Artificial Sequence
  Description of Artificial Sequence: Synthetic peptide
  Seed: EECLINDPWVLLNAS
EECVINDPKVLFNAS

SEQ ID NO: 256856 - protein, 15 aa, Artificial Sequence
  Description of Artificial Sequence: Synthetic peptide
  Seed: EECLINDPWVLLNAS
EECVINDPKVLMNAS

SEQ ID NO: 256857 - protein, 15 aa, Artificial Sequence
  Description of Artificial Sequence: Synthetic peptide
  Seed: EECLINDPWVLLNAS
EECVINDPRVLANAS

SEQ ID NO: 256858 - protein, 15 aa, Artificial Sequence
  Description of Artificial Sequence: Synthetic peptide
  Seed: EECLINDPWVLLNAS
EECVINDPRVLFNAS

SEQ ID NO: 256859 - protein, 15 aa, Artificial Sequence
  Description of Artificial Sequence: Synthetic peptide
  Seed: EECLINDPWVLLNAS
EECVINDPRVLMNAS

SEQ ID NO: 256860 - protein, 15 aa, Artificial Sequence
  Description of Artificial Sequence: Synthetic peptide
  Seed: EECLINDPWVLLNAS
EECVINDPRVLYNAS

SEQ ID NO: 256861 - protein, 15 aa, Artificial Sequence
  Description of Artificial Sequence: Synthetic peptide
  Seed: EECLINDPWVLLNAS
EECVINDPVVLRNAS

SEQ ID NO: 256862 - protein, 15 aa, Artificial Sequence
  Description of Artificial Sequence: Synthetic peptide
  Seed: EECLINDPWVLLNAS
EECVINFPAVLANAS

SEQ ID NO: 256863 - protein, 15 aa, Artificial Sequence
  Description of Artificial Sequence: Synthetic peptide
  Seed: EECLINDPWVLLNAS
EECVINFPNVLINAS

SEQ ID NO: 256864 - protein, 15 aa, Artificial Sequence
  Description of Artificial Sequence: Synthetic peptide
  Seed: EECLINDPWVLLNAS
EECVINFPNVLVNAS

SEQ ID NO: 256865 - protein, 15 aa, Artificial Sequence
  Description of Artificial Sequence: Synthetic peptide
  Seed: EECLINDPWVLLNAS
EECVINHPAVLFNAS

SEQ ID NO: 256866 - protein, 15 aa, Artificial Sequence
  Description of Artificial Sequence: Synthetic peptide
  Seed: EECLINDPWVLLNAS
EECVINHPAVLINAS

SEQ ID NO: 256867 - protein, 15 aa, Artificial Sequence
  Description of Artificial Sequence: Synthetic peptide
  Seed: EECLINDPWVLLNAS
EECVINHPAVLLNAS

SEQ ID NO: 256868 - protein, 15 aa, Artificial Sequence
  Description of Artificial Sequence: Synthetic peptide
  Seed: EECLINDPWVLLNAS
EECVINHPAVLMNAS

SEQ ID NO: 256869 - protein, 15 aa, Artificial Sequence
  Description of Artificial Sequence: Synthetic peptide
  Seed: EECLINDPWVLLNAS
EECVINHPAVLVNAS

SEQ ID NO: 256870 - protein, 15 aa, Artificial Sequence
  Description of Artificial Sequence: Synthetic peptide
  Seed: EECLINDPWVLLNAS
EECVINHPAVLYNAS

SEQ ID NO: 256871 - protein, 15 aa, Artificial Sequence
  Description of Artificial Sequence: Synthetic peptide
  Seed: EECLINDPWVLLNAS
EECVINHPFVLLNAS

SEQ ID NO: 256872 - protein, 15 aa, Artificial Sequence
  Description of Artificial Sequence: Synthetic peptide
  Seed: EECLINDPWVLLNAS
EECVINHPIVLFNAS

SEQ ID NO: 256873 - protein, 15 aa, Artificial Sequence
  Description of Artificial Sequence: Synthetic peptide
  Seed: EECLINDPWVLLNAS
EECVINHPIVLINAS

SEQ ID NO: 256874 - protein, 15 aa, Artificial Sequence
  Description of Artificial Sequence: Synthetic peptide
  Seed: EECLINDPWVLLNAS
EECVINHPIVLLNAS

SEQ ID NO: 256875 - protein, 15 aa, Artificial Sequence
  Description of Artificial Sequence: Synthetic peptide
  Seed: EECLINDPWVLLNAS
EECVINHPIVLVNAS

SEQ ID NO: 256876 - protein, 15 aa, Artificial Sequence
  Description of Artificial Sequence: Synthetic peptide
  Seed: EECLINDPWVLLNAS
EECVINHPIVLYNAS

SEQ ID NO: 256877 - protein, 15 aa, Artificial Sequence
  Description of Artificial Sequence: Synthetic peptide
  Seed: EECLINDPWVLLNAS
EECVINHPNVLANAS

SEQ ID NO: 256878 - protein, 15 aa, Artificial Sequence
  Description of Artificial Sequence: Synthetic peptide
  Seed: EECLINDPWVLLNAS
EECVINHPNVLFNAS

SEQ ID NO: 256879 - protein, 15 aa, Artificial Sequence
  Description of Artificial Sequence: Synthetic peptide
  Seed: EECLINDPWVLLNAS
EECVINHPNVLINAS

SEQ ID NO: 256880 - protein, 15 aa, Artificial Sequence
  Description of Artificial Sequence: Synthetic peptide
  Seed: EECLINDPWVLLNAS
EECVINHPNVLLNAS

SEQ ID NO: 256881 - protein, 15 aa, Artificial Sequence
  Description of Artificial Sequence: Synthetic peptide
  Seed: EECLINDPWVLLNAS
EECVINHPNVLMNAS

SEQ ID NO: 256882 - protein, 15 aa, Artificial Sequence
  Description of Artificial Sequence: Synthetic peptide
  Seed: EECLINDPWVLLNAS
EECVINHPNVLVNAS

SEQ ID NO: 256883 - protein, 15 aa, Artificial Sequence
  Description of Artificial Sequence: Synthetic peptide
  Seed: EECLINDPWVLLNAS
EECVINHPNVLYNAS

SEQ ID NO: 256884 - protein, 15 aa, Artificial Sequence
  Description of Artificial Sequence: Synthetic peptide
  Seed: EECLINDPWVLLNAS
EECVINHPSVLINAS

SEQ ID NO: 256885 - protein, 15 aa, Artificial Sequence
  Description of Artificial Sequence: Synthetic peptide
  Seed: EECLINDPWVLLNAS
EECVINHPSVLVNAS

SEQ ID NO: 256886 - protein, 15 aa, Artificial Sequence
  Description of Artificial Sequence: Synthetic peptide
  Seed: EECLINDPWVLLNAS
EECVINHPVVLFNAS

SEQ ID NO: 256887 - protein, 15 aa, Artificial Sequence
  Description of Artificial Sequence: Synthetic peptide
  Seed: EECLINDPWVLLNAS
EECVINHPVVLINAS

SEQ ID NO: 256888 - protein, 15 aa, Artificial Sequence
  Description of Artificial Sequence: Synthetic peptide
  Seed: EECLINDPWVLLNAS
EECVINHPVVLLNAS

SEQ ID NO: 256889 - protein, 15 aa, Artificial Sequence
  Description of Artificial Sequence: Synthetic peptide
  Seed: EECLINDPWVLLNAS
EECVINHPVVLMNAS

SEQ ID NO: 256890 - protein, 15 aa, Artificial Sequence
  Description of Artificial Sequence: Synthetic peptide
  Seed: EECLINDPWVLLNAS
EECVINHPVVLVNAS

SEQ ID NO: 256891 - protein, 15 aa, Artificial Sequence
  Description of Artificial Sequence: Synthetic peptide
  Seed: EECLINDPWVLLNAS
EECVINHPVVLYNAS

SEQ ID NO: 256892 - protein, 15 aa, Artificial Sequence
  Description of Artificial Sequence: Synthetic peptide
  Seed: EECLINDPWVLLNAS
EECVINIPAVLANAS

SEQ ID NO: 256893 - protein, 15 aa, Artificial Sequence
  Description of Artificial Sequence: Synthetic peptide
  Seed: EECLINDPWVLLNAS
EECVINIPAVLFNAS

SEQ ID NO: 256894 - protein, 15 aa, Artificial Sequence
  Description of Artificial Sequence: Synthetic peptide
  Seed: EECLINDPWVLLNAS
EECVINIPAVLINAS

SEQ ID NO: 256895 - protein, 15 aa, Artificial Sequence
  Description of Artificial Sequence: Synthetic peptide
  Seed: EECLINDPWVLLNAS
EECVINIPAVLLNAS

SEQ ID NO: 256896 - protein, 15 aa, Artificial Sequence
  Description of Artificial Sequence: Synthetic peptide
  Seed: EECLINDPWVLLNAS
EECVINIPAVLMNAS

SEQ ID NO: 256897 - protein, 15 aa, Artificial Sequence
  Description of Artificial Sequence: Synthetic peptide
  Seed: EECLINDPWVLLNAS
EECVINIPAVLSNAS

SEQ ID NO: 256898 - protein, 15 aa, Artificial Sequence
  Description of Artificial Sequence: Synthetic peptide
  Seed: EECLINDPWVLLNAS
EECVINIPAVLTNAS

SEQ ID NO: 256899 - protein, 15 aa, Artificial Sequence
  Description of Artificial Sequence: Synthetic peptide
  Seed: EECLINDPWVLLNAS
EECVINIPAVLVNAS

SEQ ID NO: 256900 - protein, 15 aa, Artificial Sequence
  Description of Artificial Sequence: Synthetic peptide
  Seed: EECLINDPWVLLNAS
EECVINIPAVLYNAS

SEQ ID NO: 256901 - protein, 15 aa, Artificial Sequence
  Description of Artificial Sequence: Synthetic peptide
  Seed: EECLINDPWVLLNAS
EECVINIPGVLANAS

SEQ ID NO: 256902 - protein, 15 aa, Artificial Sequence
  Description of Artificial Sequence: Synthetic peptide
  Seed: EECLINDPWVLLNAS
EECVINIPGVLINAS

SEQ ID NO: 256903 - protein, 15 aa, Artificial Sequence
  Description of Artificial Sequence: Synthetic peptide
  Seed: EECLINDPWVLLNAS
EECVINIPGVLLNAS

SEQ ID NO: 256904 - protein, 15 aa, Artificial Sequence
  Description of Artificial Sequence: Synthetic peptide
  Seed: EECLINDPWVLLNAS
EECVINIPGVLMNAS

SEQ ID NO: 256905 - protein, 15 aa, Artificial Sequence
  Description of Artificial Sequence: Synthetic peptide
  Seed: EECLINDPWVLLNAS
EECVINIPGVLSNAS

SEQ ID NO: 256906 - protein, 15 aa, Artificial Sequence
  Description of Artificial Sequence: Synthetic peptide
  Seed: EECLINDPWVLLNAS
EECVINIPGVLTNAS

SEQ ID NO: 256907 - protein, 15 aa, Artificial Sequence
  Description of Artificial Sequence: Synthetic peptide
  Seed: EECLINDPWVLLNAS
EECVINIPGVLVNAS

SEQ ID NO: 256908 - protein, 15 aa, Artificial Sequence
  Description of Artificial Sequence: Synthetic peptide
  Seed: EECLINDPWVLLNAS
EECVINIPNVLANAS

SEQ ID NO: 256909 - protein, 15 aa, Artificial Sequence
  Description of Artificial Sequence: Synthetic peptide
  Seed: EECLINDPWVLLNAS
EECVINIPNVLFNAS

SEQ ID NO: 256910 - protein, 15 aa, Artificial Sequence
  Description of Artificial Sequence: Synthetic peptide
  Seed: EECLINDPWVLLNAS
EECVINIPNVLINAS

SEQ ID NO: 256911 - protein, 15 aa, Artificial Sequence
  Description of Artificial Sequence: Synthetic peptide
  Seed: EECLINDPWVLLNAS
EECVINIPNVLLNAS

SEQ ID NO: 256912 - protein, 15 aa, Artificial Sequence
  Description of Artificial Sequence: Synthetic peptide
  Seed: EECLINDPWVLLNAS
EECVINIPNVLMNAS

SEQ ID NO: 256913 - protein, 15 aa, Artificial Sequence
  Description of Artificial Sequence: Synthetic peptide
  Seed: EECLINDPWVLLNAS
EECVINIPNVLRNAS

SEQ ID NO: 256914 - protein, 15 aa, Artificial Sequence
  Description of Artificial Sequence: Synthetic peptide
  Seed: EECLINDPWVLLNAS
EECVINIPNVLSNAS

SEQ ID NO: 256915 - protein, 15 aa, Artificial Sequence
  Description of Artificial Sequence: Synthetic peptide
  Seed: EECLINDPWVLLNAS
EECVINIPNVLTNAS

SEQ ID NO: 256916 - protein, 15 aa, Artificial Sequence
  Description of Artificial Sequence: Synthetic peptide
  Seed: EECLINDPWVLLNAS
EECVINIPNVLVNAS

SEQ ID NO: 256917 - protein, 15 aa, Artificial Sequence
  Description of Artificial Sequence: Synthetic peptide
  Seed: EECLINDPWVLLNAS
EECVINIPNVLYNAS

SEQ ID NO: 256918 - protein, 15 aa, Artificial Sequence
  Description of Artificial Sequence: Synthetic peptide
  Seed: EECLINDPWVLLNAS
EECVINIPPVLANAS

SEQ ID NO: 256919 - protein, 15 aa, Artificial Sequence
  Description of Artificial Sequence: Synthetic peptide
  Seed: EECLINDPWVLLNAS
EECVINIPPVLINAS

SEQ ID NO: 256920 - protein, 15 aa, Artificial Sequence
  Description of Artificial Sequence: Synthetic peptide
  Seed: EECLINDPWVLLNAS
EECVINIPPVLLNAS

SEQ ID NO: 256921 - protein, 15 aa, Artificial Sequence
  Description of Artificial Sequence: Synthetic peptide
  Seed: EECLINDPWVLLNAS
EECVINIPPVLVNAS

SEQ ID NO: 256922 - protein, 15 aa, Artificial Sequence
  Description of Artificial Sequence: Synthetic peptide
  Seed: EECLINDPWVLLNAS
EECVINIPSVLANAS

SEQ ID NO: 256923 - protein, 15 aa, Artificial Sequence
  Description of Artificial Sequence: Synthetic peptide
  Seed: EECLINDPWVLLNAS
EECVINIPSVLINAS

SEQ ID NO: 256924 - protein, 15 aa, Artificial Sequence
  Description of Artificial Sequence: Synthetic peptide
  Seed: EECLINDPWVLLNAS
EECVINIPSVLLNAS

SEQ ID NO: 256925 - protein, 15 aa, Artificial Sequence
  Description of Artificial Sequence: Synthetic peptide
  Seed: EECLINDPWVLLNAS
EECVINIPSVLMNAS

SEQ ID NO: 256926 - protein, 15 aa, Artificial Sequence
  Description of Artificial Sequence: Synthetic peptide
  Seed: EECLINDPWVLLNAS
EECVINIPSVLSNAS

SEQ ID NO: 256927 - protein, 15 aa, Artificial Sequence
  Description of Artificial Sequence: Synthetic peptide
  Seed: EECLINDPWVLLNAS
EECVINIPSVLTNAS

SEQ ID NO: 256928 - protein, 15 aa, Artificial Sequence
  Description of Artificial Sequence: Synthetic peptide
  Seed: EECLINDPWVLLNAS
EECVINIPSVLVNAS

SEQ ID NO: 256929 - protein, 15 aa, Artificial Sequence
  Description of Artificial Sequence: Synthetic peptide
  Seed: EECLINDPWVLLNAS
EECVINIPTVLANAS

SEQ ID NO: 256930 - protein, 15 aa, Artificial Sequence
  Description of Artificial Sequence: Synthetic peptide
  Seed: EECLINDPWVLLNAS
EECVINIPTVLINAS

SEQ ID NO: 256931 - protein, 15 aa, Artificial Sequence
  Description of Artificial Sequence: Synthetic peptide
  Seed: EECLINDPWVLLNAS
EECVINIPTVLLNAS

SEQ ID NO: 256932 - protein, 15 aa, Artificial Sequence
  Description of Artificial Sequence: Synthetic peptide
  Seed: EECLINDPWVLLNAS
EECVINIPTVLVNAS

SEQ ID NO: 256933 - protein, 15 aa, Artificial Sequence
  Description of Artificial Sequence: Synthetic peptide
  Seed: EECLINDPWVLLNAS
EECVINKPAVLINAS

SEQ ID NO: 256934 - protein, 15 aa, Artificial Sequence
  Description of Artificial Sequence: Synthetic peptide
  Seed: EECLINDPWVLLNAS
EECVINKPAVLVNAS

SEQ ID NO: 256935 - protein, 15 aa, Artificial Sequence
  Description of Artificial Sequence: Synthetic peptide
  Seed: EECLINDPWVLLNAS
EECVINKPNVLFNAS

SEQ ID NO: 256936 - protein, 15 aa, Artificial Sequence
  Description of Artificial Sequence: Synthetic peptide
  Seed: EECLINDPWVLLNAS
EECVINKPNVLINAS

SEQ ID NO: 256937 - protein, 15 aa, Artificial Sequence
  Description of Artificial Sequence: Synthetic peptide
  Seed: EECLINDPWVLLNAS
EECVINKPNVLLNAS

SEQ ID NO: 256938 - protein, 15 aa, Artificial Sequence
  Description of Artificial Sequence: Synthetic peptide
  Seed: EECLINDPWVLLNAS
EECVINKPNVLMNAS

SEQ ID NO: 256939 - protein, 15 aa, Artificial Sequence
  Description of Artificial Sequence: Synthetic peptide
  Seed: EECLINDPWVLLNAS
EECVINKPNVLVNAS

SEQ ID NO: 256940 - protein, 15 aa, Artificial Sequence
  Description of Artificial Sequence: Synthetic peptide
  Seed: EECLINDPWVLLNAS
EECVINLPAVLANAS

SEQ ID NO: 256941 - protein, 15 aa, Artificial Sequence
  Description of Artificial Sequence: Synthetic peptide
  Seed: EECLINDPWVLLNAS
EECVINLPAVLFNAS

SEQ ID NO: 256942 - protein, 15 aa, Artificial Sequence
  Description of Artificial Sequence: Synthetic peptide
  Seed: EECLINDPWVLLNAS
EECVINLPAVLGNAS

SEQ ID NO: 256943 - protein, 15 aa, Artificial Sequence
  Description of Artificial Sequence: Synthetic peptide
  Seed: EECLINDPWVLLNAS
EECVINLPAVLHNAS

SEQ ID NO: 256944 - protein, 15 aa, Artificial Sequence
  Description of Artificial Sequence: Synthetic peptide
  Seed: EECLINDPWVLLNAS
EECVINLPAVLINAS

SEQ ID NO: 256945 - protein, 15 aa, Artificial Sequence
  Description of Artificial Sequence: Synthetic peptide
  Seed: EECLINDPWVLLNAS
EECVINLPAVLLNAS

SEQ ID NO: 256946 - protein, 15 aa, Artificial Sequence
  Description of Artificial Sequence: Synthetic peptide
  Seed: EECLINDPWVLLNAS
EECVINLPAVLMNAS

SEQ ID NO: 256947 - protein, 15 aa, Artificial Sequence
  Description of Artificial Sequence: Synthetic peptide
  Seed: EECLINDPWVLLNAS
EECVINLPAVLNNAS

SEQ ID NO: 256948 - protein, 15 aa, Artificial Sequence
  Description of Artificial Sequence: Synthetic peptide
  Seed: EECLINDPWVLLNAS
EECVINLPAVLSNAS

SEQ ID NO: 256949 - protein, 15 aa, Artificial Sequence
  Description of Artificial Sequence: Synthetic peptide
  Seed: EECLINDPWVLLNAS
EECVINLPAVLTNAS

SEQ ID NO: 256950 - protein, 15 aa, Artificial Sequence
  Description of Artificial Sequence: Synthetic peptide
  Seed: EECLINDPWVLLNAS
EECVINLPAVLVNAS

SEQ ID NO: 256951 - protein, 15 aa, Artificial Sequence
  Description of Artificial Sequence: Synthetic peptide
  Seed: EECLINDPWVLLNAS
EECVINLPGVLANAS

SEQ ID NO: 256952 - protein, 15 aa, Artificial Sequence
  Description of Artificial Sequence: Synthetic peptide
  Seed: EECLINDPWVLLNAS
EECVINLPGVLGNAS

SEQ ID NO: 256953 - protein, 15 aa, Artificial Sequence
  Description of Artificial Sequence: Synthetic peptide
  Seed: EECLINDPWVLLNAS
EECVINLPGVLINAS

SEQ ID NO: 256954 - protein, 15 aa, Artificial Sequence
  Description of Artificial Sequence: Synthetic peptide
  Seed: EECLINDPWVLLNAS
EECVINLPGVLLNAS

SEQ ID NO: 256955 - protein, 15 aa, Artificial Sequence
  Description of Artificial Sequence: Synthetic peptide
  Seed: EECLINDPWVLLNAS
EECVINLPGVLMNAS

SEQ ID NO: 256956 - protein, 15 aa, Artificial Sequence
  Description of Artificial Sequence: Synthetic peptide
  Seed: EECLINDPWVLLNAS
EECVINLPGVLSNAS

SEQ ID NO: 256957 - protein, 15 aa, Artificial Sequence
  Description of Artificial Sequence: Synthetic peptide
  Seed: EECLINDPWVLLNAS
EECVINLPGVLTNAS

SEQ ID NO: 256958 - protein, 15 aa, Artificial Sequence
  Description of Artificial Sequence: Synthetic peptide
  Seed: EECLINDPWVLLNAS
EECVINLPGVLVNAS

SEQ ID NO: 256959 - protein, 15 aa, Artificial Sequence
  Description of Artificial Sequence: Synthetic peptide
  Seed: EECLINDPWVLLNAS
EECVINLPNVLANAS

SEQ ID NO: 256960 - protein, 15 aa, Artificial Sequence
  Description of Artificial Sequence: Synthetic peptide
  Seed: EECLINDPWVLLNAS
EECVINLPNVLFNAS

SEQ ID NO: 256961 - protein, 15 aa, Artificial Sequence
  Description of Artificial Sequence: Synthetic peptide
  Seed: EECLINDPWVLLNAS
EECVINLPNVLINAS

SEQ ID NO: 256962 - protein, 15 aa, Artificial Sequence
  Description of Artificial Sequence: Synthetic peptide
  Seed: EECLINDPWVLLNAS
EECVINLPNVLLNAS

SEQ ID NO: 256963 - protein, 15 aa, Artificial Sequence
  Description of Artificial Sequence: Synthetic peptide
  Seed: EECLINDPWVLLNAS
EECVINLPNVLMNAS

SEQ ID NO: 256964 - protein, 15 aa, Artificial Sequence
  Description of Artificial Sequence: Synthetic peptide
  Seed: EECLINDPWVLLNAS
EECVINLPNVLSNAS

SEQ ID NO: 256965 - protein, 15 aa, Artificial Sequence
  Description of Artificial Sequence: Synthetic peptide
  Seed: EECLINDPWVLLNAS
EECVINLPNVLTNAS

SEQ ID NO: 256966 - protein, 15 aa, Artificial Sequence
  Description of Artificial Sequence: Synthetic peptide
  Seed: EECLINDPWVLLNAS
EECVINLPNVLVNAS

SEQ ID NO: 256967 - protein, 15 aa, Artificial Sequence
  Description of Artificial Sequence: Synthetic peptide
  Seed: EECLINDPWVLLNAS
EECVINLPPVLANAS

SEQ ID NO: 256968 - protein, 15 aa, Artificial Sequence
  Description of Artificial Sequence: Synthetic peptide
  Seed: EECLINDPWVLLNAS
EECVINLPPVLINAS

SEQ ID NO: 256969 - protein, 15 aa, Artificial Sequence
  Description of Artificial Sequence: Synthetic peptide
  Seed: EECLINDPWVLLNAS
EECVINLPPVLLNAS

SEQ ID NO: 256970 - protein, 15 aa, Artificial Sequence
  Description of Artificial Sequence: Synthetic peptide
  Seed: EECLINDPWVLLNAS
EECVINLPPVLMNAS

SEQ ID NO: 256971 - protein, 15 aa, Artificial Sequence
  Description of Artificial Sequence: Synthetic peptide
  Seed: EECLINDPWVLLNAS
EECVINLPPVLSNAS

SEQ ID NO: 256972 - protein, 15 aa, Artificial Sequence
  Description of Artificial Sequence: Synthetic peptide
  Seed: EECLINDPWVLLNAS
EECVINLPPVLTNAS

SEQ ID NO: 256973 - protein, 15 aa, Artificial Sequence
  Description of Artificial Sequence: Synthetic peptide
  Seed: EECLINDPWVLLNAS
EECVINLPPVLVNAS

SEQ ID NO: 256974 - protein, 15 aa, Artificial Sequence
  Description of Artificial Sequence: Synthetic peptide
  Seed: EECLINDPWVLLNAS
EECVINLPSVLANAS

SEQ ID NO: 256975 - protein, 15 aa, Artificial Sequence
  Description of Artificial Sequence: Synthetic peptide
  Seed: EECLINDPWVLLNAS
EECVINLPSVLGNAS

SEQ ID NO: 256976 - protein, 15 aa, Artificial Sequence
  Description of Artificial Sequence: Synthetic peptide
  Seed: EECLINDPWVLLNAS
EECVINLPSVLINAS

SEQ ID NO: 256977 - protein, 15 aa, Artificial Sequence
  Description of Artificial Sequence: Synthetic peptide
  Seed: EECLINDPWVLLNAS
EECVINLPSVLLNAS

SEQ ID NO: 256978 - protein, 15 aa, Artificial Sequence
  Description of Artificial Sequence: Synthetic peptide
  Seed: EECLINDPWVLLNAS
EECVINLPSVLMNAS

SEQ ID NO: 256979 - protein, 15 aa, Artificial Sequence
  Description of Artificial Sequence: Synthetic peptide
  Seed: EECLINDPWVLLNAS
EECVINLPSVLSNAS

SEQ ID NO: 256980 - protein, 15 aa, Artificial Sequence
  Description of Artificial Sequence: Synthetic peptide
  Seed: EECLINDPWVLLNAS
EECVINLPSVLTNAS

SEQ ID NO: 256981 - protein, 15 aa, Artificial Sequence
  Description of Artificial Sequence: Synthetic peptide
  Seed: EECLINDPWVLLNAS
EECVINLPSVLVNAS

SEQ ID NO: 256982 - protein, 15 aa, Artificial Sequence
  Description of Artificial Sequence: Synthetic peptide
  Seed: EECLINDPWVLLNAS
EECVINLPTVLANAS

SEQ ID NO: 256983 - protein, 15 aa, Artificial Sequence
  Description of Artificial Sequence: Synthetic peptide
  Seed: EECLINDPWVLLNAS
EECVINLPTVLINAS

SEQ ID NO: 256984 - protein, 15 aa, Artificial Sequence
  Description of Artificial Sequence: Synthetic peptide
  Seed: EECLINDPWVLLNAS
EECVINLPTVLLNAS

SEQ ID NO: 256985 - protein, 15 aa, Artificial Sequence
  Description of Artificial Sequence: Synthetic peptide
  Seed: EECLINDPWVLLNAS
EECVINLPTVLMNAS

SEQ ID NO: 256986 - protein, 15 aa, Artificial Sequence
  Description of Artificial Sequence: Synthetic peptide
  Seed: EECLINDPWVLLNAS
EECVINLPTVLSNAS

SEQ ID NO: 256987 - protein, 15 aa, Artificial Sequence
  Description of Artificial Sequence: Synthetic peptide
  Seed: EECLINDPWVLLNAS
EECVINLPTVLTNAS

SEQ ID NO: 256988 - protein, 15 aa, Artificial Sequence
  Description of Artificial Sequence: Synthetic peptide
  Seed: EECLINDPWVLLNAS
EECVINLPTVLVNAS

SEQ ID NO: 256989 - protein, 15 aa, Artificial Sequence
  Description of Artificial Sequence: Synthetic peptide
  Seed: EECLINDPWVLLNAS
EECVINLPVVLANAS

SEQ ID NO: 256990 - protein, 15 aa, Artificial Sequence
  Description of Artificial Sequence: Synthetic peptide
  Seed: EECLINDPWVLLNAS
EECVINLPVVLVNAS

SEQ ID NO: 256991 - protein, 15 aa, Artificial Sequence
  Description of Artificial Sequence: Synthetic peptide
  Seed: EECLINDPWVLLNAS
EECVINMPAVLANAS

SEQ ID NO: 256992 - protein, 15 aa, Artificial Sequence
  Description of Artificial Sequence: Synthetic peptide
  Seed: EECLINDPWVLLNAS
EECVINMPAVLFNAS

SEQ ID NO: 256993 - protein, 15 aa, Artificial Sequence
  Description of Artificial Sequence: Synthetic peptide
  Seed: EECLINDPWVLLNAS
EECVINMPAVLGNAS

SEQ ID NO: 256994 - protein, 15 aa, Artificial Sequence
  Description of Artificial Sequence: Synthetic peptide
  Seed: EECLINDPWVLLNAS
EECVINMPAVLHNAS

SEQ ID NO: 256995 - protein, 15 aa, Artificial Sequence
  Description of Artificial Sequence: Synthetic peptide
  Seed: EECLINDPWVLLNAS
EECVINMPAVLINAS

SEQ ID NO: 256996 - protein, 15 aa, Artificial Sequence
  Description of Artificial Sequence: Synthetic peptide
  Seed: EECLINDPWVLLNAS
EECVINMPAVLLNAS

SEQ ID NO: 256997 - protein, 15 aa, Artificial Sequence
  Description of Artificial Sequence: Synthetic peptide
  Seed: EECLINDPWVLLNAS
EECVINMPAVLMNAS

SEQ ID NO: 256998 - protein, 15 aa, Artificial Sequence
  Description of Artificial Sequence: Synthetic peptide
  Seed: EECLINDPWVLLNAS
EECVINMPAVLSNAS

SEQ ID NO: 256999 - protein, 15 aa, Artificial Sequence
  Description of Artificial Sequence: Synthetic peptide
  Seed: EECLINDPWVLLNAS
EECVINMPAVLTNAS

SEQ ID NO: 257000 - protein, 15 aa, Artificial Sequence
  Description of Artificial Sequence: Synthetic peptide
  Seed: EECLINDPWVLLNAS
EECVINMPAVLVNAS

SEQ ID NO: 257001 - protein, 15 aa, Artificial Sequence
  Description of Artificial Sequence: Synthetic peptide
  Seed: EECLINDPWVLLNAS
EECVINMPGVLANAS

SEQ ID NO: 257002 - protein, 15 aa, Artificial Sequence
  Description of Artificial Sequence: Synthetic peptide
  Seed: EECLINDPWVLLNAS
EECVINMPGVLGNAS

SEQ ID NO: 257003 - protein, 15 aa, Artificial Sequence
  Description of Artificial Sequence: Synthetic peptide
  Seed: EECLINDPWVLLNAS
EECVINMPGVLINAS

SEQ ID NO: 257004 - protein, 15 aa, Artificial Sequence
  Description of Artificial Sequence: Synthetic peptide
  Seed: EECLINDPWVLLNAS
EECVINMPGVLLNAS

SEQ ID NO: 257005 - protein, 15 aa, Artificial Sequence
  Description of Artificial Sequence: Synthetic peptide
  Seed: EECLINDPWVLLNAS
EECVINMPGVLMNAS

SEQ ID NO: 257006 - protein, 15 aa, Artificial Sequence
  Description of Artificial Sequence: Synthetic peptide
  Seed: EECLINDPWVLLNAS
EECVINMPGVLSNAS

SEQ ID NO: 257007 - protein, 15 aa, Artificial Sequence
  Description of Artificial Sequence: Synthetic peptide
  Seed: EECLINDPWVLLNAS
EECVINMPGVLTNAS

SEQ ID NO: 257008 - protein, 15 aa, Artificial Sequence
  Description of Artificial Sequence: Synthetic peptide
  Seed: EECLINDPWVLLNAS
EECVINMPGVLVNAS

SEQ ID NO: 257009 - protein, 15 aa, Artificial Sequence
  Description of Artificial Sequence: Synthetic peptide
  Seed: EECLINDPWVLLNAS
EECVINMPNVLANAS

SEQ ID NO: 257010 - protein, 15 aa, Artificial Sequence
  Description of Artificial Sequence: Synthetic peptide
  Seed: EECLINDPWVLLNAS
EECVINMPNVLFNAS

SEQ ID NO: 257011 - protein, 15 aa, Artificial Sequence
  Description of Artificial Sequence: Synthetic peptide
  Seed: EECLINDPWVLLNAS
EECVINMPNVLINAS

SEQ ID NO: 257012 - protein, 15 aa, Artificial Sequence
  Description of Artificial Sequence: Synthetic peptide
  Seed: EECLINDPWVLLNAS
EECVINMPNVLLNAS

SEQ ID NO: 257013 - protein, 15 aa, Artificial Sequence
  Description of Artificial Sequence: Synthetic peptide
  Seed: EECLINDPWVLLNAS
EECVINMPNVLMNAS

SEQ ID NO: 257014 - protein, 15 aa, Artificial Sequence
  Description of Artificial Sequence: Synthetic peptide
  Seed: EECLINDPWVLLNAS
EECVINMPNVLRNAS

SEQ ID NO: 257015 - protein, 15 aa, Artificial Sequence
  Description of Artificial Sequence: Synthetic peptide
  Seed: EECLINDPWVLLNAS
EECVINMPNVLSNAS

SEQ ID NO: 257016 - protein, 15 aa, Artificial Sequence
  Description of Artificial Sequence: Synthetic peptide
  Seed: EECLINDPWVLLNAS
EECVINMPNVLTNAS

SEQ ID NO: 257017 - protein, 15 aa, Artificial Sequence
  Description of Artificial Sequence: Synthetic peptide
  Seed: EECLINDPWVLLNAS
EECVINMPNVLVNAS

SEQ ID NO: 257018 - protein, 15 aa, Artificial Sequence
  Description of Artificial Sequence: Synthetic peptide
  Seed: EECLINDPWVLLNAS
EECVINMPNVLYNAS

SEQ ID NO: 257019 - protein, 15 aa, Artificial Sequence
  Description of Artificial Sequence: Synthetic peptide
  Seed: EECLINDPWVLLNAS
EECVINMPPVLANAS

SEQ ID NO: 257020 - protein, 15 aa, Artificial Sequence
  Description of Artificial Sequence: Synthetic peptide
  Seed: EECLINDPWVLLNAS
EECVINMPPVLINAS

SEQ ID NO: 257021 - protein, 15 aa, Artificial Sequence
  Description of Artificial Sequence: Synthetic peptide
  Seed: EECLINDPWVLLNAS
EECVINMPPVLLNAS

SEQ ID NO: 257022 - protein, 15 aa, Artificial Sequence
  Description of Artificial Sequence: Synthetic peptide
  Seed: EECLINDPWVLLNAS
EECVINMPPVLMNAS

SEQ ID NO: 257023 - protein, 15 aa, Artificial Sequence
  Description of Artificial Sequence: Synthetic peptide
  Seed: EECLINDPWVLLNAS
EECVINMPPVLSNAS

SEQ ID NO: 257024 - protein, 15 aa, Artificial Sequence
  Description of Artificial Sequence: Synthetic peptide
  Seed: EECLINDPWVLLNAS
EECVINMPPVLTNAS

SEQ ID NO: 257025 - protein, 15 aa, Artificial Sequence
  Description of Artificial Sequence: Synthetic peptide
  Seed: EECLINDPWVLLNAS
EECVINMPPVLVNAS

SEQ ID NO: 257026 - protein, 15 aa, Artificial Sequence
  Description of Artificial Sequence: Synthetic peptide
  Seed: EECLINDPWVLLNAS
EECVINMPSVLANAS

SEQ ID NO: 257027 - protein, 15 aa, Artificial Sequence
  Description of Artificial Sequence: Synthetic peptide
  Seed: EECLINDPWVLLNAS
EECVINMPSVLGNAS

SEQ ID NO: 257028 - protein, 15 aa, Artificial Sequence
  Description of Artificial Sequence: Synthetic peptide
  Seed: EECLINDPWVLLNAS
EECVINMPSVLINAS

SEQ ID NO: 257029 - protein, 15 aa, Artificial Sequence
  Description of Artificial Sequence: Synthetic peptide
  Seed: EECLINDPWVLLNAS
EECVINMPSVLLNAS

SEQ ID NO: 257030 - protein, 15 aa, Artificial Sequence
  Description of Artificial Sequence: Synthetic peptide
  Seed: EECLINDPWVLLNAS
EECVINMPSVLMNAS

SEQ ID NO: 257031 - protein, 15 aa, Artificial Sequence
  Description of Artificial Sequence: Synthetic peptide
  Seed: EECLINDPWVLLNAS
EECVINMPSVLSNAS

SEQ ID NO: 257032 - protein, 15 aa, Artificial Sequence
  Description of Artificial Sequence: Synthetic peptide
  Seed: EECLINDPWVLLNAS
EECVINMPSVLTNAS

SEQ ID NO: 257033 - protein, 15 aa, Artificial Sequence
  Description of Artificial Sequence: Synthetic peptide
  Seed: EECLINDPWVLLNAS
EECVINMPSVLVNAS

SEQ ID NO: 257034 - protein, 15 aa, Artificial Sequence
  Description of Artificial Sequence: Synthetic peptide
  Seed: EECLINDPWVLLNAS
EECVINMPTVLANAS

SEQ ID NO: 257035 - protein, 15 aa, Artificial Sequence
  Description of Artificial Sequence: Synthetic peptide
  Seed: EECLINDPWVLLNAS
EECVINMPTVLINAS

SEQ ID NO: 257036 - protein, 15 aa, Artificial Sequence
  Description of Artificial Sequence: Synthetic peptide
  Seed: EECLINDPWVLLNAS
EECVINMPTVLLNAS

SEQ ID NO: 257037 - protein, 15 aa, Artificial Sequence
  Description of Artificial Sequence: Synthetic peptide
  Seed: EECLINDPWVLLNAS
EECVINMPTVLMNAS

SEQ ID NO: 257038 - protein, 15 aa, Artificial Sequence
  Description of Artificial Sequence: Synthetic peptide
  Seed: EECLINDPWVLLNAS
EECVINMPTVLSNAS

SEQ ID NO: 257039 - protein, 15 aa, Artificial Sequence
  Description of Artificial Sequence: Synthetic peptide
  Seed: EECLINDPWVLLNAS
EECVINMPTVLTNAS

SEQ ID NO: 257040 - protein, 15 aa, Artificial Sequence
  Description of Artificial Sequence: Synthetic peptide
  Seed: EECLINDPWVLLNAS
EECVINMPTVLVNAS

SEQ ID NO: 257041 - protein, 15 aa, Artificial Sequence
  Description of Artificial Sequence: Synthetic peptide
  Seed: EECLINDPWVLLNAS
EECVINMPVVLANAS

SEQ ID NO: 257042 - protein, 15 aa, Artificial Sequence
  Description of Artificial Sequence: Synthetic peptide
  Seed: EECLINDPWVLLNAS
EECVINMPVVLLNAS

SEQ ID NO: 257043 - protein, 15 aa, Artificial Sequence
  Description of Artificial Sequence: Synthetic peptide
  Seed: EECLINDPWVLLNAS
EECVINMPVVLVNAS

SEQ ID NO: 257044 - protein, 15 aa, Artificial Sequence
  Description of Artificial Sequence: Synthetic peptide
  Seed: EECLINDPWVLLNAS
EECVINNPAVLANAS

SEQ ID NO: 257045 - protein, 15 aa, Artificial Sequence
  Description of Artificial Sequence: Synthetic peptide
  Seed: EECLINDPWVLLNAS
EECVINNPAVLFNAS

SEQ ID NO: 257046 - protein, 15 aa, Artificial Sequence
  Description of Artificial Sequence: Synthetic peptide
  Seed: EECLINDPWVLLNAS
EECVINNPAVLHNAS

SEQ ID NO: 257047 - protein, 15 aa, Artificial Sequence
  Description of Artificial Sequence: Synthetic peptide
  Seed: EECLINDPWVLLNAS
EECVINNPAVLINAS

SEQ ID NO: 257048 - protein, 15 aa, Artificial Sequence
  Description of Artificial Sequence: Synthetic peptide
  Seed: EECLINDPWVLLNAS
EECVINNPAVLKNAS

SEQ ID NO: 257049 - protein, 15 aa, Artificial Sequence
  Description of Artificial Sequence: Synthetic peptide
  Seed: EECLINDPWVLLNAS
EECVINNPAVLLNAS

SEQ ID NO: 257050 - protein, 15 aa, Artificial Sequence
  Description of Artificial Sequence: Synthetic peptide
  Seed: EECLINDPWVLLNAS
EECVINNPAVLMNAS

SEQ ID NO: 257051 - protein, 15 aa, Artificial Sequence
  Description of Artificial Sequence: Synthetic peptide
  Seed: EECLINDPWVLLNAS
EECVINNPAVLNNAS

SEQ ID NO: 257052 - protein, 15 aa, Artificial Sequence
  Description of Artificial Sequence: Synthetic peptide
  Seed: EECLINDPWVLLNAS
EECVINNPAVLQNAS

SEQ ID NO: 257053 - protein, 15 aa, Artificial Sequence
  Description of Artificial Sequence: Synthetic peptide
  Seed: EECLINDPWVLLNAS
EECVINNPAVLRNAS

SEQ ID NO: 257054 - protein, 15 aa, Artificial Sequence
  Description of Artificial Sequence: Synthetic peptide
  Seed: EECLINDPWVLLNAS
EECVINNPAVLSNAS

SEQ ID NO: 257055 - protein, 15 aa, Artificial Sequence
  Description of Artificial Sequence: Synthetic peptide
  Seed: EECLINDPWVLLNAS
EECVINNPAVLTNAS

SEQ ID NO: 257056 - protein, 15 aa, Artificial Sequence
  Description of Artificial Sequence: Synthetic peptide
  Seed: EECLINDPWVLLNAS
EECVINNPAVLVNAS

SEQ ID NO: 257057 - protein, 15 aa, Artificial Sequence
  Description of Artificial Sequence: Synthetic peptide
  Seed: EECLINDPWVLLNAS
EECVINNPAVLWNAS

SEQ ID NO: 257058 - protein, 15 aa, Artificial Sequence
  Description of Artificial Sequence: Synthetic peptide
  Seed: EECLINDPWVLLNAS
EECVINNPAVLYNAS

SEQ ID NO: 257059 - protein, 15 aa, Artificial Sequence
  Description of Artificial Sequence: Synthetic peptide
  Seed: EECLINDPWVLLNAS
EECVINNPFVLINAS

SEQ ID NO: 257060 - protein, 15 aa, Artificial Sequence
  Description of Artificial Sequence: Synthetic peptide
  Seed: EECLINDPWVLLNAS
EECVINNPGVLANAS

SEQ ID NO: 257061 - protein, 15 aa, Artificial Sequence
  Description of Artificial Sequence: Synthetic peptide
  Seed: EECLINDPWVLLNAS
EECVINNPGVLFNAS

SEQ ID NO: 257062 - protein, 15 aa, Artificial Sequence
  Description of Artificial Sequence: Synthetic peptide
  Seed: EECLINDPWVLLNAS
EECVINNPGVLINAS

SEQ ID NO: 257063 - protein, 15 aa, Artificial Sequence
  Description of Artificial Sequence: Synthetic peptide
  Seed: EECLINDPWVLLNAS
EECVINNPGVLLNAS

SEQ ID NO: 257064 - protein, 15 aa, Artificial Sequence
  Description of Artificial Sequence: Synthetic peptide
  Seed: EECLINDPWVLLNAS
EECVINNPGVLMNAS

SEQ ID NO: 257065 - protein, 15 aa, Artificial Sequence
  Description of Artificial Sequence: Synthetic peptide
  Seed: EECLINDPWVLLNAS
EECVINNPGVLVNAS

SEQ ID NO: 257066 - protein, 15 aa, Artificial Sequence
  Description of Artificial Sequence: Synthetic peptide
  Seed: EECLINDPWVLLNAS
EECVINNPGVLYNAS

SEQ ID NO: 257067 - protein, 15 aa, Artificial Sequence
  Description of Artificial Sequence: Synthetic peptide
  Seed: EECLINDPWVLLNAS
EECVINNPHVLINAS

SEQ ID NO: 257068 - protein, 15 aa, Artificial Sequence
  Description of Artificial Sequence: Synthetic peptide
  Seed: EECLINDPWVLLNAS
EECVINNPHVLLNAS

SEQ ID NO: 257069 - protein, 15 aa, Artificial Sequence
  Description of Artificial Sequence: Synthetic peptide
  Seed: EECLINDPWVLLNAS
EECVINNPHVLVNAS

SEQ ID NO: 257070 - protein, 15 aa, Artificial Sequence
  Description of Artificial Sequence: Synthetic peptide
  Seed: EECLINDPWVLLNAS
EECVINNPIVLANAS

SEQ ID NO: 257071 - protein, 15 aa, Artificial Sequence
  Description of Artificial Sequence: Synthetic peptide
  Seed: EECLINDPWVLLNAS
EECVINNPIVLFNAS

SEQ ID NO: 257072 - protein, 15 aa, Artificial Sequence
  Description of Artificial Sequence: Synthetic peptide
  Seed: EECLINDPWVLLNAS
EECVINNPIVLHNAS

SEQ ID NO: 257073 - protein, 15 aa, Artificial Sequence
  Description of Artificial Sequence: Synthetic peptide
  Seed: EECLINDPWVLLNAS
EECVINNPIVLINAS

SEQ ID NO: 257074 - protein, 15 aa, Artificial Sequence
  Description of Artificial Sequence: Synthetic peptide
  Seed: EECLINDPWVLLNAS
EECVINNPIVLKNAS

SEQ ID NO: 257075 - protein, 15 aa, Artificial Sequence
  Description of Artificial Sequence: Synthetic peptide
  Seed: EECLINDPWVLLNAS
EECVINNPIVLLNAS

SEQ ID NO: 257076 - protein, 15 aa, Artificial Sequence
  Description of Artificial Sequence: Synthetic peptide
  Seed: EECLINDPWVLLNAS
EECVINNPIVLMNAS

SEQ ID NO: 257077 - protein, 15 aa, Artificial Sequence
  Description of Artificial Sequence: Synthetic peptide
  Seed: EECLINDPWVLLNAS
EECVINNPIVLNNAS

SEQ ID NO: 257078 - protein, 15 aa, Artificial Sequence
  Description of Artificial Sequence: Synthetic peptide
  Seed: EECLINDPWVLLNAS
EECVINNPIVLQNAS

SEQ ID NO: 257079 - protein, 15 aa, Artificial Sequence
  Description of Artificial Sequence: Synthetic peptide
  Seed: EECLINDPWVLLNAS
EECVINNPIVLRNAS

SEQ ID NO: 257080 - protein, 15 aa, Artificial Sequence
  Description of Artificial Sequence: Synthetic peptide
  Seed: EECLINDPWVLLNAS
EECVINNPIVLSNAS

SEQ ID NO: 257081 - protein, 15 aa, Artificial Sequence
  Description of Artificial Sequence: Synthetic peptide
  Seed: EECLINDPWVLLNAS
EECVINNPIVLTNAS

SEQ ID NO: 257082 - protein, 15 aa, Artificial Sequence
  Description of Artificial Sequence: Synthetic peptide
  Seed: EECLINDPWVLLNAS
EECVINNPIVLVNAS

SEQ ID NO: 257083 - protein, 15 aa, Artificial Sequence
  Description of Artificial Sequence: Synthetic peptide
  Seed: EECLINDPWVLLNAS
EECVINNPIVLWNAS

SEQ ID NO: 257084 - protein, 15 aa, Artificial Sequence
  Description of Artificial Sequence: Synthetic peptide
  Seed: EECLINDPWVLLNAS
EECVINNPIVLYNAS

SEQ ID NO: 257085 - protein, 15 aa, Artificial Sequence
  Description of Artificial Sequence: Synthetic peptide
  Seed: EECLINDPWVLLNAS
EECVINNPLVLANAS

SEQ ID NO: 257086 - protein, 15 aa, Artificial Sequence
  Description of Artificial Sequence: Synthetic peptide
  Seed: EECLINDPWVLLNAS
EECVINNPLVLFNAS

SEQ ID NO: 257087 - protein, 15 aa, Artificial Sequence
  Description of Artificial Sequence: Synthetic peptide
  Seed: EECLINDPWVLLNAS
EECVINNPLVLINAS

SEQ ID NO: 257088 - protein, 15 aa, Artificial Sequence
  Description of Artificial Sequence: Synthetic peptide
  Seed: EECLINDPWVLLNAS
EECVINNPLVLLNAS

SEQ ID NO: 257089 - protein, 15 aa, Artificial Sequence
  Description of Artificial Sequence: Synthetic peptide
  Seed: EECLINDPWVLLNAS
EECVINNPLVLMNAS

SEQ ID NO: 257090 - protein, 15 aa, Artificial Sequence
  Description of Artificial Sequence: Synthetic peptide
  Seed: EECLINDPWVLLNAS
EECVINNPLVLSNAS

SEQ ID NO: 257091 - protein, 15 aa, Artificial Sequence
  Description of Artificial Sequence: Synthetic peptide
  Seed: EECLINDPWVLLNAS
EECVINNPLVLTNAS

SEQ ID NO: 257092 - protein, 15 aa, Artificial Sequence
  Description of Artificial Sequence: Synthetic peptide
  Seed: EECLINDPWVLLNAS
EECVINNPLVLVNAS

SEQ ID NO: 257093 - protein, 15 aa, Artificial Sequence
  Description of Artificial Sequence: Synthetic peptide
  Seed: EECLINDPWVLLNAS
EECVINNPLVLWNAS

SEQ ID NO: 257094 - protein, 15 aa, Artificial Sequence
  Description of Artificial Sequence: Synthetic peptide
  Seed: EECLINDPWVLLNAS
EECVINNPLVLYNAS

SEQ ID NO: 257095 - protein, 15 aa, Artificial Sequence
  Description of Artificial Sequence: Synthetic peptide
  Seed: EECLINDPWVLLNAS
EECVINNPMVLANAS

SEQ ID NO: 257096 - protein, 15 aa, Artificial Sequence
  Description of Artificial Sequence: Synthetic peptide
  Seed: EECLINDPWVLLNAS
EECVINNPMVLFNAS

SEQ ID NO: 257097 - protein, 15 aa, Artificial Sequence
  Description of Artificial Sequence: Synthetic peptide
  Seed: EECLINDPWVLLNAS
EECVINNPMVLINAS

SEQ ID NO: 257098 - protein, 15 aa, Artificial Sequence
  Description of Artificial Sequence: Synthetic peptide
  Seed: EECLINDPWVLLNAS
EECVINNPMVLLNAS

SEQ ID NO: 257099 - protein, 15 aa, Artificial Sequence
  Description of Artificial Sequence: Synthetic peptide
  Seed: EECLINDPWVLLNAS
EECVINNPMVLMNAS

SEQ ID NO: 257100 - protein, 15 aa, Artificial Sequence
  Description of Artificial Sequence: Synthetic peptide
  Seed: EECLINDPWVLLNAS
EECVINNPMVLSNAS

SEQ ID NO: 257101 - protein, 15 aa, Artificial Sequence
  Description of Artificial Sequence: Synthetic peptide
  Seed: EECLINDPWVLLNAS
EECVINNPMVLTNAS

SEQ ID NO: 257102 - protein, 15 aa, Artificial Sequence
  Description of Artificial Sequence: Synthetic peptide
  Seed: EECLINDPWVLLNAS
EECVINNPMVLVNAS

SEQ ID NO: 257103 - protein, 15 aa, Artificial Sequence
  Description of Artificial Sequence: Synthetic peptide
  Seed: EECLINDPWVLLNAS
EECVINNPMVLWNAS

SEQ ID NO: 257104 - protein, 15 aa, Artificial Sequence
  Description of Artificial Sequence: Synthetic peptide
  Seed: EECLINDPWVLLNAS
EECVINNPMVLYNAS

SEQ ID NO: 257105 - protein, 15 aa, Artificial Sequence
  Description of Artificial Sequence: Synthetic peptide
  Seed: EECLINDPWVLLNAS
EECVINNPNVLANAS

SEQ ID NO: 257106 - protein, 15 aa, Artificial Sequence
  Description of Artificial Sequence: Synthetic peptide
  Seed: EECLINDPWVLLNAS
EECVINNPNVLFNAS

SEQ ID NO: 257107 - protein, 15 aa, Artificial Sequence
  Description of Artificial Sequence: Synthetic peptide
  Seed: EECLINDPWVLLNAS
EECVINNPNVLINAS

SEQ ID NO: 257108 - protein, 15 aa, Artificial Sequence
  Description of Artificial Sequence: Synthetic peptide
  Seed: EECLINDPWVLLNAS
EECVINNPNVLLNAS

SEQ ID NO: 257109 - protein, 15 aa, Artificial Sequence
  Description of Artificial Sequence: Synthetic peptide
  Seed: EECLINDPWVLLNAS
EECVINNPNVLMNAS

SEQ ID NO: 257110 - protein, 15 aa, Artificial Sequence
  Description of Artificial Sequence: Synthetic peptide
  Seed: EECLINDPWVLLNAS
EECVINNPNVLSNAS

SEQ ID NO: 257111 - protein, 15 aa, Artificial Sequence
  Description of Artificial Sequence: Synthetic peptide
  Seed: EECLINDPWVLLNAS
EECVINNPNVLTNAS

SEQ ID NO: 257112 - protein, 15 aa, Artificial Sequence
  Description of Artificial Sequence: Synthetic peptide
  Seed: EECLINDPWVLLNAS
EECVINNPNVLVNAS

SEQ ID NO: 257113 - protein, 15 aa, Artificial Sequence
  Description of Artificial Sequence: Synthetic peptide
  Seed: EECLINDPWVLLNAS
EECVINNPNVLWNAS

SEQ ID NO: 257114 - protein, 15 aa, Artificial Sequence
  Description of Artificial Sequence: Synthetic peptide
  Seed: EECLINDPWVLLNAS
EECVINNPNVLYNAS

SEQ ID NO: 257115 - protein, 15 aa, Artificial Sequence
  Description of Artificial Sequence: Synthetic peptide
  Seed: EECLINDPWVLLNAS
EECVINNPPVLANAS

SEQ ID NO: 257116 - protein, 15 aa, Artificial Sequence
  Description of Artificial Sequence: Synthetic peptide
  Seed: EECLINDPWVLLNAS
EECVINNPPVLFNAS

SEQ ID NO: 257117 - protein, 15 aa, Artificial Sequence
  Description of Artificial Sequence: Synthetic peptide
  Seed: EECLINDPWVLLNAS
EECVINNPPVLINAS

SEQ ID NO: 257118 - protein, 15 aa, Artificial Sequence
  Description of Artificial Sequence: Synthetic peptide
  Seed: EECLINDPWVLLNAS
EECVINNPPVLLNAS

SEQ ID NO: 257119 - protein, 15 aa, Artificial Sequence
  Description of Artificial Sequence: Synthetic peptide
  Seed: EECLINDPWVLLNAS
EECVINNPPVLMNAS

SEQ ID NO: 257120 - protein, 15 aa, Artificial Sequence
  Description of Artificial Sequence: Synthetic peptide
  Seed: EECLINDPWVLLNAS
EECVINNPPVLVNAS

SEQ ID NO: 257121 - protein, 15 aa, Artificial Sequence
  Description of Artificial Sequence: Synthetic peptide
  Seed: EECLINDPWVLLNAS
EECVINNPPVLYNAS

SEQ ID NO: 257122 - protein, 15 aa, Artificial Sequence
  Description of Artificial Sequence: Synthetic peptide
  Seed: EECLINDPWVLLNAS
EECVINNPQVLINAS

SEQ ID NO: 257123 - protein, 15 aa, Artificial Sequence
  Description of Artificial Sequence: Synthetic peptide
  Seed: EECLINDPWVLLNAS
EECVINNPQVLVNAS

SEQ ID NO: 257124 - protein, 15 aa, Artificial Sequence
  Description of Artificial Sequence: Synthetic peptide
  Seed: EECLINDPWVLLNAS
EECVINNPRVLINAS

SEQ ID NO: 257125 - protein, 15 aa, Artificial Sequence
  Description of Artificial Sequence: Synthetic peptide
  Seed: EECLINDPWVLLNAS
EECVINNPRVLVNAS

SEQ ID NO: 257126 - protein, 15 aa, Artificial Sequence
  Description of Artificial Sequence: Synthetic peptide
  Seed: EECLINDPWVLLNAS
EECVINNPSVLANAS

SEQ ID NO: 257127 - protein, 15 aa, Artificial Sequence
  Description of Artificial Sequence: Synthetic peptide
  Seed: EECLINDPWVLLNAS
EECVINNPSVLFNAS

SEQ ID NO: 257128 - protein, 15 aa, Artificial Sequence
  Description of Artificial Sequence: Synthetic peptide
  Seed: EECLINDPWVLLNAS
EECVINNPSVLINAS

SEQ ID NO: 257129 - protein, 15 aa, Artificial Sequence
  Description of Artificial Sequence: Synthetic peptide
  Seed: EECLINDPWVLLNAS
EECVINNPSVLLNAS

SEQ ID NO: 257130 - protein, 15 aa, Artificial Sequence
  Description of Artificial Sequence: Synthetic peptide
  Seed: EECLINDPWVLLNAS
EECVINNPSVLMNAS

SEQ ID NO: 257131 - protein, 15 aa, Artificial Sequence
  Description of Artificial Sequence: Synthetic peptide
  Seed: EECLINDPWVLLNAS
EECVINNPSVLSNAS

SEQ ID NO: 257132 - protein, 15 aa, Artificial Sequence
  Description of Artificial Sequence: Synthetic peptide
  Seed: EECLINDPWVLLNAS
EECVINNPSVLTNAS

SEQ ID NO: 257133 - protein, 15 aa, Artificial Sequence
  Description of Artificial Sequence: Synthetic peptide
  Seed: EECLINDPWVLLNAS
EECVINNPSVLVNAS

SEQ ID NO: 257134 - protein, 15 aa, Artificial Sequence
  Description of Artificial Sequence: Synthetic peptide
  Seed: EECLINDPWVLLNAS
EECVINNPSVLWNAS

SEQ ID NO: 257135 - protein, 15 aa, Artificial Sequence
  Description of Artificial Sequence: Synthetic peptide
  Seed: EECLINDPWVLLNAS
EECVINNPSVLYNAS

SEQ ID NO: 257136 - protein, 15 aa, Artificial Sequence
  Description of Artificial Sequence: Synthetic peptide
  Seed: EECLINDPWVLLNAS
EECVINNPTVLANAS

SEQ ID NO: 257137 - protein, 15 aa, Artificial Sequence
  Description of Artificial Sequence: Synthetic peptide
  Seed: EECLINDPWVLLNAS
EECVINNPTVLFNAS

SEQ ID NO: 257138 - protein, 15 aa, Artificial Sequence
  Description of Artificial Sequence: Synthetic peptide
  Seed: EECLINDPWVLLNAS
EECVINNPTVLINAS

SEQ ID NO: 257139 - protein, 15 aa, Artificial Sequence
  Description of Artificial Sequence: Synthetic peptide
  Seed: EECLINDPWVLLNAS
EECVINNPTVLLNAS

SEQ ID NO: 257140 - protein, 15 aa, Artificial Sequence
  Description of Artificial Sequence: Synthetic peptide
  Seed: EECLINDPWVLLNAS
EECVINNPTVLMNAS

SEQ ID NO: 257141 - protein, 15 aa, Artificial Sequence
  Description of Artificial Sequence: Synthetic peptide
  Seed: EECLINDPWVLLNAS
EECVINNPTVLVNAS

SEQ ID NO: 257142 - protein, 15 aa, Artificial Sequence
  Description of Artificial Sequence: Synthetic peptide
  Seed: EECLINDPWVLLNAS
EECVINNPTVLYNAS

SEQ ID NO: 257143 - protein, 15 aa, Artificial Sequence
  Description of Artificial Sequence: Synthetic peptide
  Seed: EECLINDPWVLLNAS
EECVINNPVVLANAS

SEQ ID NO: 257144 - protein, 15 aa, Artificial Sequence
  Description of Artificial Sequence: Synthetic peptide
  Seed: EECLINDPWVLLNAS
EECVINNPVVLFNAS

SEQ ID NO: 257145 - protein, 15 aa, Artificial Sequence
  Description of Artificial Sequence: Synthetic peptide
  Seed: EECLINDPWVLLNAS
EECVINNPVVLINAS

SEQ ID NO: 257146 - protein, 15 aa, Artificial Sequence
  Description of Artificial Sequence: Synthetic peptide
  Seed: EECLINDPWVLLNAS
EECVINNPVVLKNAS

SEQ ID NO: 257147 - protein, 15 aa, Artificial Sequence
  Description of Artificial Sequence: Synthetic peptide
  Seed: EECLINDPWVLLNAS
EECVINNPVVLLNAS

SEQ ID NO: 257148 - protein, 15 aa, Artificial Sequence
  Description of Artificial Sequence: Synthetic peptide
  Seed: EECLINDPWVLLNAS
EECVINNPVVLMNAS

SEQ ID NO: 257149 - protein, 15 aa, Artificial Sequence
  Description of Artificial Sequence: Synthetic peptide
  Seed: EECLINDPWVLLNAS
EECVINNPVVLRNAS

SEQ ID NO: 257150 - protein, 15 aa, Artificial Sequence
  Description of Artificial Sequence: Synthetic peptide
  Seed: EECLINDPWVLLNAS
EECVINNPVVLSNAS

SEQ ID NO: 257151 - protein, 15 aa, Artificial Sequence
  Description of Artificial Sequence: Synthetic peptide
  Seed: EECLINDPWVLLNAS
EECVINNPVVLTNAS

SEQ ID NO: 257152 - protein, 15 aa, Artificial Sequence
  Description of Artificial Sequence: Synthetic peptide
  Seed: EECLINDPWVLLNAS
EECVINNPVVLVNAS

SEQ ID NO: 257153 - protein, 15 aa, Artificial Sequence
  Description of Artificial Sequence: Synthetic peptide
  Seed: EECLINDPWVLLNAS
EECVINNPVVLWNAS

SEQ ID NO: 257154 - protein, 15 aa, Artificial Sequence
  Description of Artificial Sequence: Synthetic peptide
  Seed: EECLINDPWVLLNAS
EECVINNPVVLYNAS

SEQ ID NO: 257155 - protein, 15 aa, Artificial Sequence
  Description of Artificial Sequence: Synthetic peptide
  Seed: EECLINDPWVLLNAS
EECVINNPYVLINAS

SEQ ID NO: 257156 - protein, 15 aa, Artificial Sequence
  Description of Artificial Sequence: Synthetic peptide
  Seed: EECLINDPWVLLNAS
EECVINNPYVLVNAS

SEQ ID NO: 257157 - protein, 15 aa, Artificial Sequence
  Description of Artificial Sequence: Synthetic peptide
  Seed: EECLINDPWVLLNAS
EECVINQPAVLANAS

SEQ ID NO: 257158 - protein, 15 aa, Artificial Sequence
  Description of Artificial Sequence: Synthetic peptide
  Seed: EECLINDPWVLLNAS
EECVINQPAVLINAS

SEQ ID NO: 257159 - protein, 15 aa, Artificial Sequence
  Description of Artificial Sequence: Synthetic peptide
  Seed: EECLINDPWVLLNAS
EECVINQPAVLLNAS

SEQ ID NO: 257160 - protein, 15 aa, Artificial Sequence
  Description of Artificial Sequence: Synthetic peptide
  Seed: EECLINDPWVLLNAS
EECVINQPAVLVNAS

SEQ ID NO: 257161 - protein, 15 aa, Artificial Sequence
  Description of Artificial Sequence: Synthetic peptide
  Seed: EECLINDPWVLLNAS
EECVINQPGVLANAS

SEQ ID NO: 257162 - protein, 15 aa, Artificial Sequence
  Description of Artificial Sequence: Synthetic peptide
  Seed: EECLINDPWVLLNAS
EECVINQPGVLINAS

SEQ ID NO: 257163 - protein, 15 aa, Artificial Sequence
  Description of Artificial Sequence: Synthetic peptide
  Seed: EECLINDPWVLLNAS
EECVINQPGVLLNAS

SEQ ID NO: 257164 - protein, 15 aa, Artificial Sequence
  Description of Artificial Sequence: Synthetic peptide
  Seed: EECLINDPWVLLNAS
EECVINQPGVLVNAS

SEQ ID NO: 257165 - protein, 15 aa, Artificial Sequence
  Description of Artificial Sequence: Synthetic peptide
  Seed: EECLINDPWVLLNAS
EECVINQPNVLINAS

SEQ ID NO: 257166 - protein, 15 aa, Artificial Sequence
  Description of Artificial Sequence: Synthetic peptide
  Seed: EECLINDPWVLLNAS
EECVINQPNVLVNAS

SEQ ID NO: 257167 - protein, 15 aa, Artificial Sequence
  Description of Artificial Sequence: Synthetic peptide
  Seed: EECLINDPWVLLNAS
EECVINQPSVLANAS

SEQ ID NO: 257168 - protein, 15 aa, Artificial Sequence
  Description of Artificial Sequence: Synthetic peptide
  Seed: EECLINDPWVLLNAS
EECVINQPSVLINAS

SEQ ID NO: 257169 - protein, 15 aa, Artificial Sequence
  Description of Artificial Sequence: Synthetic peptide
  Seed: EECLINDPWVLLNAS
EECVINQPSVLLNAS

SEQ ID NO: 257170 - protein, 15 aa, Artificial Sequence
  Description of Artificial Sequence: Synthetic peptide
  Seed: EECLINDPWVLLNAS
EECVINQPSVLVNAS

SEQ ID NO: 257171 - protein, 15 aa, Artificial Sequence
  Description of Artificial Sequence: Synthetic peptide
  Seed: EECLINDPWVLLNAS
EECVINRPAVLINAS

SEQ ID NO: 257172 - protein, 15 aa, Artificial Sequence
  Description of Artificial Sequence: Synthetic peptide
  Seed: EECLINDPWVLLNAS
EECVINRPAVLLNAS

SEQ ID NO: 257173 - protein, 15 aa, Artificial Sequence
  Description of Artificial Sequence: Synthetic peptide
  Seed: EECLINDPWVLLNAS
EECVINRPAVLVNAS

SEQ ID NO: 257174 - protein, 15 aa, Artificial Sequence
  Description of Artificial Sequence: Synthetic peptide
  Seed: EECLINDPWVLLNAS
EECVINRPNVLFNAS

SEQ ID NO: 257175 - protein, 15 aa, Artificial Sequence
  Description of Artificial Sequence: Synthetic peptide
  Seed: EECLINDPWVLLNAS
EECVINRPNVLINAS

SEQ ID NO: 257176 - protein, 15 aa, Artificial Sequence
  Description of Artificial Sequence: Synthetic peptide
  Seed: EECLINDPWVLLNAS
EECVINRPNVLLNAS

SEQ ID NO: 257177 - protein, 15 aa, Artificial Sequence
  Description of Artificial Sequence: Synthetic peptide
  Seed: EECLINDPWVLLNAS
EECVINRPNVLMNAS

SEQ ID NO: 257178 - protein, 15 aa, Artificial Sequence
  Description of Artificial Sequence: Synthetic peptide
  Seed: EECLINDPWVLLNAS
EECVINRPNVLVNAS

SEQ ID NO: 257179 - protein, 15 aa, Artificial Sequence
  Description of Artificial Sequence: Synthetic peptide
  Seed: EECLINDPWVLLNAS
EECVINRPVVLINAS

SEQ ID NO: 257180 - protein, 15 aa, Artificial Sequence
  Description of Artificial Sequence: Synthetic peptide
  Seed: EECLINDPWVLLNAS
EECVINRPVVLVNAS

SEQ ID NO: 257181 - protein, 15 aa, Artificial Sequence
  Description of Artificial Sequence: Synthetic peptide
  Seed: EECLINDPWVLLNAS
EECVINSPAVLFNAS

SEQ ID NO: 257182 - protein, 15 aa, Artificial Sequence
  Description of Artificial Sequence: Synthetic peptide
  Seed: EECLINDPWVLLNAS
EECVINSPAVLINAS

SEQ ID NO: 257183 - protein, 15 aa, Artificial Sequence
  Description of Artificial Sequence: Synthetic peptide
  Seed: EECLINDPWVLLNAS
EECVINSPAVLLNAS

SEQ ID NO: 257184 - protein, 15 aa, Artificial Sequence
  Description of Artificial Sequence: Synthetic peptide
  Seed: EECLINDPWVLLNAS
EECVINSPAVLMNAS

SEQ ID NO: 257185 - protein, 15 aa, Artificial Sequence
  Description of Artificial Sequence: Synthetic peptide
  Seed: EECLINDPWVLLNAS
EECVINSPAVLVNAS

SEQ ID NO: 257186 - protein, 15 aa, Artificial Sequence
  Description of Artificial Sequence: Synthetic peptide
  Seed: EECLINDPWVLLNAS
EECVINSPAVLYNAS

SEQ ID NO: 257187 - protein, 15 aa, Artificial Sequence
  Description of Artificial Sequence: Synthetic peptide
  Seed: EECLINDPWVLLNAS
EECVINSPFVLINAS

SEQ ID NO: 257188 - protein, 15 aa, Artificial Sequence
  Description of Artificial Sequence: Synthetic peptide
  Seed: EECLINDPWVLLNAS
EECVINSPFVLLNAS

SEQ ID NO: 257189 - protein, 15 aa, Artificial Sequence
  Description of Artificial Sequence: Synthetic peptide
  Seed: EECLINDPWVLLNAS
EECVINSPFVLVNAS

SEQ ID NO: 257190 - protein, 15 aa, Artificial Sequence
  Description of Artificial Sequence: Synthetic peptide
  Seed: EECLINDPWVLLNAS
EECVINSPGVLINAS

SEQ ID NO: 257191 - protein, 15 aa, Artificial Sequence
  Description of Artificial Sequence: Synthetic peptide
  Seed: EECLINDPWVLLNAS
EECVINSPGVLVNAS

SEQ ID NO: 257192 - protein, 15 aa, Artificial Sequence
  Description of Artificial Sequence: Synthetic peptide
  Seed: EECLINDPWVLLNAS
EECVINSPIVLINAS

SEQ ID NO: 257193 - protein, 15 aa, Artificial Sequence
  Description of Artificial Sequence: Synthetic peptide
  Seed: EECLINDPWVLLNAS
EECVINSPIVLVNAS

SEQ ID NO: 257194 - protein, 15 aa, Artificial Sequence
  Description of Artificial Sequence: Synthetic peptide
  Seed: EECLINDPWVLLNAS
EECVINSPNVLFNAS

SEQ ID NO: 257195 - protein, 15 aa, Artificial Sequence
  Description of Artificial Sequence: Synthetic peptide
  Seed: EECLINDPWVLLNAS
EECVINSPNVLINAS

SEQ ID NO: 257196 - protein, 15 aa, Artificial Sequence
  Description of Artificial Sequence: Synthetic peptide
  Seed: EECLINDPWVLLNAS
EECVINSPNVLLNAS

SEQ ID NO: 257197 - protein, 15 aa, Artificial Sequence
  Description of Artificial Sequence: Synthetic peptide
  Seed: EECLINDPWVLLNAS
EECVINSPNVLMNAS

SEQ ID NO: 257198 - protein, 15 aa, Artificial Sequence
  Description of Artificial Sequence: Synthetic peptide
  Seed: EECLINDPWVLLNAS
EECVINSPNVLVNAS

SEQ ID NO: 257199 - protein, 15 aa, Artificial Sequence
  Description of Artificial Sequence: Synthetic peptide
  Seed: EECLINDPWVLLNAS
EECVINSPNVLYNAS

SEQ ID NO: 257200 - protein, 15 aa, Artificial Sequence
  Description of Artificial Sequence: Synthetic peptide
  Seed: EECLINDPWVLLNAS
EECVINSPPVLINAS

SEQ ID NO: 257201 - protein, 15 aa, Artificial Sequence
  Description of Artificial Sequence: Synthetic peptide
  Seed: EECLINDPWVLLNAS
EECVINSPPVLVNAS

SEQ ID NO: 257202 - protein, 15 aa, Artificial Sequence
  Description of Artificial Sequence: Synthetic peptide
  Seed: EECLINDPWVLLNAS
EECVINSPSVLINAS

SEQ ID NO: 257203 - protein, 15 aa, Artificial Sequence
  Description of Artificial Sequence: Synthetic peptide
  Seed: EECLINDPWVLLNAS
EECVINSPSVLLNAS

SEQ ID NO: 257204 - protein, 15 aa, Artificial Sequence
  Description of Artificial Sequence: Synthetic peptide
  Seed: EECLINDPWVLLNAS
EECVINSPSVLVNAS

SEQ ID NO: 257205 - protein, 15 aa, Artificial Sequence
  Description of Artificial Sequence: Synthetic peptide
  Seed: EECLINDPWVLLNAS
EECVINSPTVLINAS

SEQ ID NO: 257206 - protein, 15 aa, Artificial Sequence
  Description of Artificial Sequence: Synthetic peptide
  Seed: EECLINDPWVLLNAS
EECVINSPTVLVNAS

SEQ ID NO: 257207 - protein, 15 aa, Artificial Sequence
  Description of Artificial Sequence: Synthetic peptide
  Seed: EECLINDPWVLLNAS
EECVINSPVVLINAS

SEQ ID NO: 257208 - protein, 15 aa, Artificial Sequence
  Description of Artificial Sequence: Synthetic peptide
  Seed: EECLINDPWVLLNAS
EECVINSPVVLVNAS

SEQ ID NO: 257209 - protein, 15 aa, Artificial Sequence
  Description of Artificial Sequence: Synthetic peptide
  Seed: EECLINDPWVLLNAS
EECVINTPAVLFNAS

SEQ ID NO: 257210 - protein, 15 aa, Artificial Sequence
  Description of Artificial Sequence: Synthetic peptide
  Seed: EECLINDPWVLLNAS
EECVINTPAVLINAS

SEQ ID NO: 257211 - protein, 15 aa, Artificial Sequence
  Description of Artificial Sequence: Synthetic peptide
  Seed: EECLINDPWVLLNAS
EECVINTPAVLLNAS

SEQ ID NO: 257212 - protein, 15 aa, Artificial Sequence
  Description of Artificial Sequence: Synthetic peptide
  Seed: EECLINDPWVLLNAS
EECVINTPAVLMNAS

SEQ ID NO: 257213 - protein, 15 aa, Artificial Sequence
  Description of Artificial Sequence: Synthetic peptide
  Seed: EECLINDPWVLLNAS
EECVINTPAVLVNAS

SEQ ID NO: 257214 - protein, 15 aa, Artificial Sequence
  Description of Artificial Sequence: Synthetic peptide
  Seed: EECLINDPWVLLNAS
EECVINTPFVLINAS

SEQ ID NO: 257215 - protein, 15 aa, Artificial Sequence
  Description of Artificial Sequence: Synthetic peptide
  Seed: EECLINDPWVLLNAS
EECVINTPFVLLNAS

SEQ ID NO: 257216 - protein, 15 aa, Artificial Sequence
  Description of Artificial Sequence: Synthetic peptide
  Seed: EECLINDPWVLLNAS
EECVINTPFVLMNAS

SEQ ID NO: 257217 - protein, 15 aa, Artificial Sequence
  Description of Artificial Sequence: Synthetic peptide
  Seed: EECLINDPWVLLNAS
EECVINTPFVLVNAS

SEQ ID NO: 257218 - protein, 15 aa, Artificial Sequence
  Description of Artificial Sequence: Synthetic peptide
  Seed: EECLINDPWVLLNAS
EECVINTPNVLFNAS

SEQ ID NO: 257219 - protein, 15 aa, Artificial Sequence
  Description of Artificial Sequence: Synthetic peptide
  Seed: EECLINDPWVLLNAS
EECVINTPNVLINAS

SEQ ID NO: 257220 - protein, 15 aa, Artificial Sequence
  Description of Artificial Sequence: Synthetic peptide
  Seed: EECLINDPWVLLNAS
EECVINTPNVLLNAS

SEQ ID NO: 257221 - protein, 15 aa, Artificial Sequence
  Description of Artificial Sequence: Synthetic peptide
  Seed: EECLINDPWVLLNAS
EECVINTPNVLMNAS

SEQ ID NO: 257222 - protein, 15 aa, Artificial Sequence
  Description of Artificial Sequence: Synthetic peptide
  Seed: EECLINDPWVLLNAS
EECVINTPNVLVNAS

SEQ ID NO: 257223 - protein, 15 aa, Artificial Sequence
  Description of Artificial Sequence: Synthetic peptide
  Seed: EECLINDPWVLLNAS
EECVINTPSVLINAS

SEQ ID NO: 257224 - protein, 15 aa, Artificial Sequence
  Description of Artificial Sequence: Synthetic peptide
  Seed: EECLINDPWVLLNAS
EECVINTPVVLINAS

SEQ ID NO: 257225 - protein, 15 aa, Artificial Sequence
  Description of Artificial Sequence: Synthetic peptide
  Seed: EECLINDPWVLLNAS
EECVINVPAVLANAS

SEQ ID NO: 257226 - protein, 15 aa, Artificial Sequence
  Description of Artificial Sequence: Synthetic peptide
  Seed: EECLINDPWVLLNAS
EECVINVPAVLINAS

SEQ ID NO: 257227 - protein, 15 aa, Artificial Sequence
  Description of Artificial Sequence: Synthetic peptide
  Seed: EECLINDPWVLLNAS
EECVINVPAVLLNAS

SEQ ID NO: 257228 - protein, 15 aa, Artificial Sequence
  Description of Artificial Sequence: Synthetic peptide
  Seed: EECLINDPWVLLNAS
EECVINVPAVLTNAS

SEQ ID NO: 257229 - protein, 15 aa, Artificial Sequence
  Description of Artificial Sequence: Synthetic peptide
  Seed: EECLINDPWVLLNAS
EECVINVPAVLVNAS

SEQ ID NO: 257230 - protein, 15 aa, Artificial Sequence
  Description of Artificial Sequence: Synthetic peptide
  Seed: EECLINDPWVLLNAS
EECVINVPGVLANAS

SEQ ID NO: 257231 - protein, 15 aa, Artificial Sequence
  Description of Artificial Sequence: Synthetic peptide
  Seed: EECLINDPWVLLNAS
EECVINVPGVLINAS

SEQ ID NO: 257232 - protein, 15 aa, Artificial Sequence
  Description of Artificial Sequence: Synthetic peptide
  Seed: EECLINDPWVLLNAS
EECVINVPGVLLNAS

SEQ ID NO: 257233 - protein, 15 aa, Artificial Sequence
  Description of Artificial Sequence: Synthetic peptide
  Seed: EECLINDPWVLLNAS
EECVINVPGVLVNAS

SEQ ID NO: 257234 - protein, 15 aa, Artificial Sequence
  Description of Artificial Sequence: Synthetic peptide
  Seed: EECLINDPWVLLNAS
EECVINVPNVLANAS

SEQ ID NO: 257235 - protein, 15 aa, Artificial Sequence
  Description of Artificial Sequence: Synthetic peptide
  Seed: EECLINDPWVLLNAS
EECVINVPNVLFNAS

SEQ ID NO: 257236 - protein, 15 aa, Artificial Sequence
  Description of Artificial Sequence: Synthetic peptide
  Seed: EECLINDPWVLLNAS
EECVINVPNVLINAS

SEQ ID NO: 257237 - protein, 15 aa, Artificial Sequence
  Description of Artificial Sequence: Synthetic peptide
  Seed: EECLINDPWVLLNAS
EECVINVPNVLLNAS

SEQ ID NO: 257238 - protein, 15 aa, Artificial Sequence
  Description of Artificial Sequence: Synthetic peptide
  Seed: EECLINDPWVLLNAS
EECVINVPNVLMNAS

SEQ ID NO: 257239 - protein, 15 aa, Artificial Sequence
  Description of Artificial Sequence: Synthetic peptide
  Seed: EECLINDPWVLLNAS
EECVINVPNVLVNAS

SEQ ID NO: 257240 - protein, 15 aa, Artificial Sequence
  Description of Artificial Sequence: Synthetic peptide
  Seed: EECLINDPWVLLNAS
EECVINVPNVLYNAS

SEQ ID NO: 257241 - protein, 15 aa, Artificial Sequence
  Description of Artificial Sequence: Synthetic peptide
  Seed: EECLINDPWVLLNAS
EECVINVPPVLINAS

SEQ ID NO: 257242 - protein, 15 aa, Artificial Sequence
  Description of Artificial Sequence: Synthetic peptide
  Seed: EECLINDPWVLLNAS
EECVINVPPVLVNAS

SEQ ID NO: 257243 - protein, 15 aa, Artificial Sequence
  Description of Artificial Sequence: Synthetic peptide
  Seed: EECLINDPWVLLNAS
EECVINVPSVLANAS

SEQ ID NO: 257244 - protein, 15 aa, Artificial Sequence
  Description of Artificial Sequence: Synthetic peptide
  Seed: EECLINDPWVLLNAS
EECVINVPSVLINAS

SEQ ID NO: 257245 - protein, 15 aa, Artificial Sequence
  Description of Artificial Sequence: Synthetic peptide
  Seed: EECLINDPWVLLNAS
EECVINVPSVLLNAS

SEQ ID NO: 257246 - protein, 15 aa, Artificial Sequence
  Description of Artificial Sequence: Synthetic peptide
  Seed: EECLINDPWVLLNAS
EECVINVPSVLVNAS

SEQ ID NO: 257247 - protein, 15 aa, Artificial Sequence
  Description of Artificial Sequence: Synthetic peptide
  Seed: EECLINDPWVLLNAS
EECVINYPNVLVNAS

SEQ ID NO: 257248 - protein, 15 aa, Artificial Sequence
  Description of Artificial Sequence: Synthetic peptide
  Seed: EECLINDPWVLLNAS
EECWINAPAVLANAS

SEQ ID NO: 257249 - protein, 15 aa, Artificial Sequence
  Description of Artificial Sequence: Synthetic peptide
  Seed: EECLINDPWVLLNAS
EECWINAPAVLFNAS

SEQ ID NO: 257250 - protein, 15 aa, Artificial Sequence
  Description of Artificial Sequence: Synthetic peptide
  Seed: EECLINDPWVLLNAS
EECWINAPAVLGNAS

SEQ ID NO: 257251 - protein, 15 aa, Artificial Sequence
  Description of Artificial Sequence: Synthetic peptide
  Seed: EECLINDPWVLLNAS
EECWINAPAVLINAS

SEQ ID NO: 257252 - protein, 15 aa, Artificial Sequence
  Description of Artificial Sequence: Synthetic peptide
  Seed: EECLINDPWVLLNAS
EECWINAPAVLLNAS

SEQ ID NO: 257253 - protein, 15 aa, Artificial Sequence
  Description of Artificial Sequence: Synthetic peptide
  Seed: EECLINDPWVLLNAS
EECWINAPAVLMNAS

SEQ ID NO: 257254 - protein, 15 aa, Artificial Sequence
  Description of Artificial Sequence: Synthetic peptide
  Seed: EECLINDPWVLLNAS
EECWINAPAVLSNAS

SEQ ID NO: 257255 - protein, 15 aa, Artificial Sequence
  Description of Artificial Sequence: Synthetic peptide
  Seed: EECLINDPWVLLNAS
EECWINAPAVLTNAS

SEQ ID NO: 257256 - protein, 15 aa, Artificial Sequence
  Description of Artificial Sequence: Synthetic peptide
  Seed: EECLINDPWVLLNAS
EECWINAPAVLVNAS

SEQ ID NO: 257257 - protein, 15 aa, Artificial Sequence
  Description of Artificial Sequence: Synthetic peptide
  Seed: EECLINDPWVLLNAS
EECWINAPFVLINAS

SEQ ID NO: 257258 - protein, 15 aa, Artificial Sequence
  Description of Artificial Sequence: Synthetic peptide
  Seed: EECLINDPWVLLNAS
EECWINAPFVLLNAS

SEQ ID NO: 257259 - protein, 15 aa, Artificial Sequence
  Description of Artificial Sequence: Synthetic peptide
  Seed: EECLINDPWVLLNAS
EECWINAPFVLVNAS

SEQ ID NO: 257260 - protein, 15 aa, Artificial Sequence
  Description of Artificial Sequence: Synthetic peptide
  Seed: EECLINDPWVLLNAS
EECWINAPGVLANAS

SEQ ID NO: 257261 - protein, 15 aa, Artificial Sequence
  Description of Artificial Sequence: Synthetic peptide
  Seed: EECLINDPWVLLNAS
EECWINAPGVLGNAS

SEQ ID NO: 257262 - protein, 15 aa, Artificial Sequence
  Description of Artificial Sequence: Synthetic peptide
  Seed: EECLINDPWVLLNAS
EECWINAPGVLINAS

SEQ ID NO: 257263 - protein, 15 aa, Artificial Sequence
  Description of Artificial Sequence: Synthetic peptide
  Seed: EECLINDPWVLLNAS
EECWINAPGVLLNAS

SEQ ID NO: 257264 - protein, 15 aa, Artificial Sequence
  Description of Artificial Sequence: Synthetic peptide
  Seed: EECLINDPWVLLNAS
EECWINAPGVLMNAS

SEQ ID NO: 257265 - protein, 15 aa, Artificial Sequence
  Description of Artificial Sequence: Synthetic peptide
  Seed: EECLINDPWVLLNAS
EECWINAPGVLSNAS

SEQ ID NO: 257266 - protein, 15 aa, Artificial Sequence
  Description of Artificial Sequence: Synthetic peptide
  Seed: EECLINDPWVLLNAS
EECWINAPGVLTNAS

SEQ ID NO: 257267 - protein, 15 aa, Artificial Sequence
  Description of Artificial Sequence: Synthetic peptide
  Seed: EECLINDPWVLLNAS
EECWINAPGVLVNAS

SEQ ID NO: 257268 - protein, 15 aa, Artificial Sequence
  Description of Artificial Sequence: Synthetic peptide
  Seed: EECLINDPWVLLNAS
EECWINAPNVLANAS

SEQ ID NO: 257269 - protein, 15 aa, Artificial Sequence
  Description of Artificial Sequence: Synthetic peptide
  Seed: EECLINDPWVLLNAS
EECWINAPNVLINAS

SEQ ID NO: 257270 - protein, 15 aa, Artificial Sequence
  Description of Artificial Sequence: Synthetic peptide
  Seed: EECLINDPWVLLNAS
EECWINAPNVLLNAS

SEQ ID NO: 257271 - protein, 15 aa, Artificial Sequence
  Description of Artificial Sequence: Synthetic peptide
  Seed: EECLINDPWVLLNAS
EECWINAPNVLMNAS

SEQ ID NO: 257272 - protein, 15 aa, Artificial Sequence
  Description of Artificial Sequence: Synthetic peptide
  Seed: EECLINDPWVLLNAS
EECWINAPNVLSNAS

SEQ ID NO: 257273 - protein, 15 aa, Artificial Sequence
  Description of Artificial Sequence: Synthetic peptide
  Seed: EECLINDPWVLLNAS
EECWINAPNVLTNAS

SEQ ID NO: 257274 - protein, 15 aa, Artificial Sequence
  Description of Artificial Sequence: Synthetic peptide
  Seed: EECLINDPWVLLNAS
EECWINAPNVLVNAS

SEQ ID NO: 257275 - protein, 15 aa, Artificial Sequence
  Description of Artificial Sequence: Synthetic peptide
  Seed: EECLINDPWVLLNAS
EECWINAPPVLANAS

SEQ ID NO: 257276 - protein, 15 aa, Artificial Sequence
  Description of Artificial Sequence: Synthetic peptide
  Seed: EECLINDPWVLLNAS
EECWINAPPVLINAS

SEQ ID NO: 257277 - protein, 15 aa, Artificial Sequence
  Description of Artificial Sequence: Synthetic peptide
  Seed: EECLINDPWVLLNAS
EECWINAPPVLLNAS

SEQ ID NO: 257278 - protein, 15 aa, Artificial Sequence
  Description of Artificial Sequence: Synthetic peptide
  Seed: EECLINDPWVLLNAS
EECWINAPPVLMNAS

SEQ ID NO: 257279 - protein, 15 aa, Artificial Sequence
  Description of Artificial Sequence: Synthetic peptide
  Seed: EECLINDPWVLLNAS
EECWINAPPVLSNAS

SEQ ID NO: 257280 - protein, 15 aa, Artificial Sequence
  Description of Artificial Sequence: Synthetic peptide
  Seed: EECLINDPWVLLNAS
EECWINAPPVLTNAS

SEQ ID NO: 257281 - protein, 15 aa, Artificial Sequence
  Description of Artificial Sequence: Synthetic peptide
  Seed: EECLINDPWVLLNAS
EECWINAPPVLVNAS

SEQ ID NO: 257282 - protein, 15 aa, Artificial Sequence
  Description of Artificial Sequence: Synthetic peptide
  Seed: EECLINDPWVLLNAS
EECWINAPSVLANAS

SEQ ID NO: 257283 - protein, 15 aa, Artificial Sequence
  Description of Artificial Sequence: Synthetic peptide
  Seed: EECLINDPWVLLNAS
EECWINAPSVLGNAS

SEQ ID NO: 257284 - protein, 15 aa, Artificial Sequence
  Description of Artificial Sequence: Synthetic peptide
  Seed: EECLINDPWVLLNAS
EECWINAPSVLINAS

SEQ ID NO: 257285 - protein, 15 aa, Artificial Sequence
  Description of Artificial Sequence: Synthetic peptide
  Seed: EECLINDPWVLLNAS
EECWINAPSVLLNAS

SEQ ID NO: 257286 - protein, 15 aa, Artificial Sequence
  Description of Artificial Sequence: Synthetic peptide
  Seed: EECLINDPWVLLNAS
EECWINAPSVLMNAS

SEQ ID NO: 257287 - protein, 15 aa, Artificial Sequence
  Description of Artificial Sequence: Synthetic peptide
  Seed: EECLINDPWVLLNAS
EECWINAPSVLSNAS

SEQ ID NO: 257288 - protein, 15 aa, Artificial Sequence
  Description of Artificial Sequence: Synthetic peptide
  Seed: EECLINDPWVLLNAS
EECWINAPSVLTNAS

SEQ ID NO: 257289 - protein, 15 aa, Artificial Sequence
  Description of Artificial Sequence: Synthetic peptide
  Seed: EECLINDPWVLLNAS
EECWINAPSVLVNAS

SEQ ID NO: 257290 - protein, 15 aa, Artificial Sequence
  Description of Artificial Sequence: Synthetic peptide
  Seed: EECLINDPWVLLNAS
EECWINAPTVLANAS

SEQ ID NO: 257291 - protein, 15 aa, Artificial Sequence
  Description of Artificial Sequence: Synthetic peptide
  Seed: EECLINDPWVLLNAS
EECWINAPTVLINAS

SEQ ID NO: 257292 - protein, 15 aa, Artificial Sequence
  Description of Artificial Sequence: Synthetic peptide
  Seed: EECLINDPWVLLNAS
EECWINAPTVLLNAS

SEQ ID NO: 257293 - protein, 15 aa, Artificial Sequence
  Description of Artificial Sequence: Synthetic peptide
  Seed: EECLINDPWVLLNAS
EECWINAPTVLMNAS

SEQ ID NO: 257294 - protein, 15 aa, Artificial Sequence
  Description of Artificial Sequence: Synthetic peptide
  Seed: EECLINDPWVLLNAS
EECWINAPTVLSNAS

SEQ ID NO: 257295 - protein, 15 aa, Artificial Sequence
  Description of Artificial Sequence: Synthetic peptide
  Seed: EECLINDPWVLLNAS
EECWINAPTVLTNAS

SEQ ID NO: 257296 - protein, 15 aa, Artificial Sequence
  Description of Artificial Sequence: Synthetic peptide
  Seed: EECLINDPWVLLNAS
EECWINAPTVLVNAS

SEQ ID NO: 257297 - protein, 15 aa, Artificial Sequence
  Description of Artificial Sequence: Synthetic peptide
  Seed: EECLINDPWVLLNAS
EECWINAPVVLANAS

SEQ ID NO: 257298 - protein, 15 aa, Artificial Sequence
  Description of Artificial Sequence: Synthetic peptide
  Seed: EECLINDPWVLLNAS
EECWINAPVVLLNAS

SEQ ID NO: 257299 - protein, 15 aa, Artificial Sequence
  Description of Artificial Sequence: Synthetic peptide
  Seed: EECLINDPWVLLNAS
EECWINAPVVLVNAS

SEQ ID NO: 257300 - protein, 15 aa, Artificial Sequence
  Description of Artificial Sequence: Synthetic peptide
  Seed: EECLINDPWVLLNAS
EECWINEPAVLANAS

SEQ ID NO: 257301 - protein, 15 aa, Artificial Sequence
  Description of Artificial Sequence: Synthetic peptide
  Seed: EECLINDPWVLLNAS
EECWINEPAVLINAS

SEQ ID NO: 257302 - protein, 15 aa, Artificial Sequence
  Description of Artificial Sequence: Synthetic peptide
  Seed: EECLINDPWVLLNAS
EECWINEPAVLLNAS

SEQ ID NO: 257303 - protein, 15 aa, Artificial Sequence
  Description of Artificial Sequence: Synthetic peptide
  Seed: EECLINDPWVLLNAS
EECWINEPAVLVNAS

SEQ ID NO: 257304 - protein, 15 aa, Artificial Sequence
  Description of Artificial Sequence: Synthetic peptide
  Seed: EECLINDPWVLLNAS
EECWINEPFVLINAS

SEQ ID NO: 257305 - protein, 15 aa, Artificial Sequence
  Description of Artificial Sequence: Synthetic peptide
  Seed: EECLINDPWVLLNAS
EECWINEPFVLLNAS

SEQ ID NO: 257306 - protein, 15 aa, Artificial Sequence
  Description of Artificial Sequence: Synthetic peptide
  Seed: EECLINDPWVLLNAS
EECWINEPFVLVNAS

SEQ ID NO: 257307 - protein, 15 aa, Artificial Sequence
  Description of Artificial Sequence: Synthetic peptide
  Seed: EECLINDPWVLLNAS
EECWINEPGVLANAS

SEQ ID NO: 257308 - protein, 15 aa, Artificial Sequence
  Description of Artificial Sequence: Synthetic peptide
  Seed: EECLINDPWVLLNAS
EECWINEPGVLINAS

SEQ ID NO: 257309 - protein, 15 aa, Artificial Sequence
  Description of Artificial Sequence: Synthetic peptide
  Seed: EECLINDPWVLLNAS
EECWINEPGVLLNAS

SEQ ID NO: 257310 - protein, 15 aa, Artificial Sequence
  Description of Artificial Sequence: Synthetic peptide
  Seed: EECLINDPWVLLNAS
EECWINEPGVLVNAS

SEQ ID NO: 257311 - protein, 15 aa, Artificial Sequence
  Description of Artificial Sequence: Synthetic peptide
  Seed: EECLINDPWVLLNAS
EECWINEPSVLANAS

SEQ ID NO: 257312 - protein, 15 aa, Artificial Sequence
  Description of Artificial Sequence: Synthetic peptide
  Seed: EECLINDPWVLLNAS
EECWINEPSVLINAS

SEQ ID NO: 257313 - protein, 15 aa, Artificial Sequence
  Description of Artificial Sequence: Synthetic peptide
  Seed: EECLINDPWVLLNAS
EECWINEPSVLLNAS

SEQ ID NO: 257314 - protein, 15 aa, Artificial Sequence
  Description of Artificial Sequence: Synthetic peptide
  Seed: EECLINDPWVLLNAS
EECWINEPSVLVNAS

SEQ ID NO: 257315 - protein, 15 aa, Artificial Sequence
  Description of Artificial Sequence: Synthetic peptide
  Seed: EECLINDPWVLLNAS
EECWINFPAVLANAS

SEQ ID NO: 257316 - protein, 15 aa, Artificial Sequence
  Description of Artificial Sequence: Synthetic peptide
  Seed: EECLINDPWVLLNAS
EECWINFPAVLINAS

SEQ ID NO: 257317 - protein, 15 aa, Artificial Sequence
  Description of Artificial Sequence: Synthetic peptide
  Seed: EECLINDPWVLLNAS
EECWINFPAVLLNAS

SEQ ID NO: 257318 - protein, 15 aa, Artificial Sequence
  Description of Artificial Sequence: Synthetic peptide
  Seed: EECLINDPWVLLNAS
EECWINFPAVLMNAS

SEQ ID NO: 257319 - protein, 15 aa, Artificial Sequence
  Description of Artificial Sequence: Synthetic peptide
  Seed: EECLINDPWVLLNAS
EECWINFPAVLTNAS

SEQ ID NO: 257320 - protein, 15 aa, Artificial Sequence
  Description of Artificial Sequence: Synthetic peptide
  Seed: EECLINDPWVLLNAS
EECWINFPAVLVNAS

SEQ ID NO: 257321 - protein, 15 aa, Artificial Sequence
  Description of Artificial Sequence: Synthetic peptide
  Seed: EECLINDPWVLLNAS
EECWINFPGVLANAS

SEQ ID NO: 257322 - protein, 15 aa, Artificial Sequence
  Description of Artificial Sequence: Synthetic peptide
  Seed: EECLINDPWVLLNAS
EECWINFPGVLLNAS

SEQ ID NO: 257323 - protein, 15 aa, Artificial Sequence
  Description of Artificial Sequence: Synthetic peptide
  Seed: EECLINDPWVLLNAS
EECWINFPGVLVNAS

SEQ ID NO: 257324 - protein, 15 aa, Artificial Sequence
  Description of Artificial Sequence: Synthetic peptide
  Seed: EECLINDPWVLLNAS
EECWINFPPVLANAS

SEQ ID NO: 257325 - protein, 15 aa, Artificial Sequence
  Description of Artificial Sequence: Synthetic peptide
  Seed: EECLINDPWVLLNAS
EECWINFPPVLVNAS

SEQ ID NO: 257326 - protein, 15 aa, Artificial Sequence
  Description of Artificial Sequence: Synthetic peptide
  Seed: EECLINDPWVLLNAS
EECWINFPSVLANAS

SEQ ID NO: 257327 - protein, 15 aa, Artificial Sequence
  Description of Artificial Sequence: Synthetic peptide
  Seed: EECLINDPWVLLNAS
EECWINFPSVLVNAS

SEQ ID NO: 257328 - protein, 15 aa, Artificial Sequence
  Description of Artificial Sequence: Synthetic peptide
  Seed: EECLINDPWVLLNAS
EECWINGPAVLANAS

SEQ ID NO: 257329 - protein, 15 aa, Artificial Sequence
  Description of Artificial Sequence: Synthetic peptide
  Seed: EECLINDPWVLLNAS
EECWINGPAVLINAS

SEQ ID NO: 257330 - protein, 15 aa, Artificial Sequence
  Description of Artificial Sequence: Synthetic peptide
  Seed: EECLINDPWVLLNAS
EECWINGPAVLLNAS

SEQ ID NO: 257331 - protein, 15 aa, Artificial Sequence
  Description of Artificial Sequence: Synthetic peptide
  Seed: EECLINDPWVLLNAS
EECWINGPAVLMNAS

SEQ ID NO: 257332 - protein, 15 aa, Artificial Sequence
  Description of Artificial Sequence: Synthetic peptide
  Seed: EECLINDPWVLLNAS
EECWINGPAVLVNAS

SEQ ID NO: 257333 - protein, 15 aa, Artificial Sequence
  Description of Artificial Sequence: Synthetic peptide
  Seed: EECLINDPWVLLNAS
EECWINGPGVLLNAS

SEQ ID NO: 257334 - protein, 15 aa, Artificial Sequence
  Description of Artificial Sequence: Synthetic peptide
  Seed: EECLINDPWVLLNAS
EECWINGPSVLINAS

SEQ ID NO: 257335 - protein, 15 aa, Artificial Sequence
  Description of Artificial Sequence: Synthetic peptide
  Seed: EECLINDPWVLLNAS
EECWINGPSVLLNAS

SEQ ID NO: 257336 - protein, 15 aa, Artificial Sequence
  Description of Artificial Sequence: Synthetic peptide
  Seed: EECLINDPWVLLNAS
EECWINGPSVLVNAS

SEQ ID NO: 257337 - protein, 15 aa, Artificial Sequence
  Description of Artificial Sequence: Synthetic peptide
  Seed: EECLINDPWVLLNAS
EECWINHPAVLANAS

SEQ ID NO: 257338 - protein, 15 aa, Artificial Sequence
  Description of Artificial Sequence: Synthetic peptide
  Seed: EECLINDPWVLLNAS
EECWINHPAVLLNAS

SEQ ID NO: 257339 - protein, 15 aa, Artificial Sequence
  Description of Artificial Sequence: Synthetic peptide
  Seed: EECLINDPWVLLNAS
EECWINHPAVLVNAS

SEQ ID NO: 257340 - protein, 15 aa, Artificial Sequence
  Description of Artificial Sequence: Synthetic peptide
  Seed: EECLINDPWVLLNAS
EECWINHPFVLINAS

SEQ ID NO: 257341 - protein, 15 aa, Artificial Sequence
  Description of Artificial Sequence: Synthetic peptide
  Seed: EECLINDPWVLLNAS
EECWINHPFVLLNAS

SEQ ID NO: 257342 - protein, 15 aa, Artificial Sequence
  Description of Artificial Sequence: Synthetic peptide
  Seed: EECLINDPWVLLNAS
EECWINHPFVLVNAS

SEQ ID NO: 257343 - protein, 15 aa, Artificial Sequence
  Description of Artificial Sequence: Synthetic peptide
  Seed: EECLINDPWVLLNAS
EECWINIPAVLANAS

SEQ ID NO: 257344 - protein, 15 aa, Artificial Sequence
  Description of Artificial Sequence: Synthetic peptide
  Seed: EECLINDPWVLLNAS
EECWINIPAVLGNAS

SEQ ID NO: 257345 - protein, 15 aa, Artificial Sequence
  Description of Artificial Sequence: Synthetic peptide
  Seed: EECLINDPWVLLNAS
EECWINIPAVLHNAS

SEQ ID NO: 257346 - protein, 15 aa, Artificial Sequence
  Description of Artificial Sequence: Synthetic peptide
  Seed: EECLINDPWVLLNAS
EECWINIPAVLINAS

SEQ ID NO: 257347 - protein, 15 aa, Artificial Sequence
  Description of Artificial Sequence: Synthetic peptide
  Seed: EECLINDPWVLLNAS
EECWINIPAVLLNAS

SEQ ID NO: 257348 - protein, 15 aa, Artificial Sequence
  Description of Artificial Sequence: Synthetic peptide
  Seed: EECLINDPWVLLNAS
EECWINIPAVLMNAS

SEQ ID NO: 257349 - protein, 15 aa, Artificial Sequence
  Description of Artificial Sequence: Synthetic peptide
  Seed: EECLINDPWVLLNAS
EECWINIPAVLNNAS

SEQ ID NO: 257350 - protein, 15 aa, Artificial Sequence
  Description of Artificial Sequence: Synthetic peptide
  Seed: EECLINDPWVLLNAS
EECWINIPAVLSNAS

SEQ ID NO: 257351 - protein, 15 aa, Artificial Sequence
  Description of Artificial Sequence: Synthetic peptide
  Seed: EECLINDPWVLLNAS
EECWINIPAVLTNAS

SEQ ID NO: 257352 - protein, 15 aa, Artificial Sequence
  Description of Artificial Sequence: Synthetic peptide
  Seed: EECLINDPWVLLNAS
EECWINIPAVLVNAS

SEQ ID NO: 257353 - protein, 15 aa, Artificial Sequence
  Description of Artificial Sequence: Synthetic peptide
  Seed: EECLINDPWVLLNAS
EECWINIPFVLINAS

SEQ ID NO: 257354 - protein, 15 aa, Artificial Sequence
  Description of Artificial Sequence: Synthetic peptide
  Seed: EECLINDPWVLLNAS
EECWINIPFVLLNAS

SEQ ID NO: 257355 - protein, 15 aa, Artificial Sequence
  Description of Artificial Sequence: Synthetic peptide
  Seed: EECLINDPWVLLNAS
EECWINIPFVLVNAS

SEQ ID NO: 257356 - protein, 15 aa, Artificial Sequence
  Description of Artificial Sequence: Synthetic peptide
  Seed: EECLINDPWVLLNAS
EECWINIPGVLANAS

SEQ ID NO: 257357 - protein, 15 aa, Artificial Sequence
  Description of Artificial Sequence: Synthetic peptide
  Seed: EECLINDPWVLLNAS
EECWINIPGVLGNAS

SEQ ID NO: 257358 - protein, 15 aa, Artificial Sequence
  Description of Artificial Sequence: Synthetic peptide
  Seed: EECLINDPWVLLNAS
EECWINIPGVLINAS

SEQ ID NO: 257359 - protein, 15 aa, Artificial Sequence
  Description of Artificial Sequence: Synthetic peptide
  Seed: EECLINDPWVLLNAS
EECWINIPGVLLNAS

SEQ ID NO: 257360 - protein, 15 aa, Artificial Sequence
  Description of Artificial Sequence: Synthetic peptide
  Seed: EECLINDPWVLLNAS
EECWINIPGVLMNAS

SEQ ID NO: 257361 - protein, 15 aa, Artificial Sequence
  Description of Artificial Sequence: Synthetic peptide
  Seed: EECLINDPWVLLNAS
EECWINIPGVLNNAS

SEQ ID NO: 257362 - protein, 15 aa, Artificial Sequence
  Description of Artificial Sequence: Synthetic peptide
  Seed: EECLINDPWVLLNAS
EECWINIPGVLSNAS

SEQ ID NO: 257363 - protein, 15 aa, Artificial Sequence
  Description of Artificial Sequence: Synthetic peptide
  Seed: EECLINDPWVLLNAS
EECWINIPGVLTNAS

SEQ ID NO: 257364 - protein, 15 aa, Artificial Sequence
  Description of Artificial Sequence: Synthetic peptide
  Seed: EECLINDPWVLLNAS
EECWINIPGVLVNAS

SEQ ID NO: 257365 - protein, 15 aa, Artificial Sequence
  Description of Artificial Sequence: Synthetic peptide
  Seed: EECLINDPWVLLNAS
EECWINIPNVLANAS

SEQ ID NO: 257366 - protein, 15 aa, Artificial Sequence
  Description of Artificial Sequence: Synthetic peptide
  Seed: EECLINDPWVLLNAS
EECWINIPNVLINAS

SEQ ID NO: 257367 - protein, 15 aa, Artificial Sequence
  Description of Artificial Sequence: Synthetic peptide
  Seed: EECLINDPWVLLNAS
EECWINIPNVLLNAS

SEQ ID NO: 257368 - protein, 15 aa, Artificial Sequence
  Description of Artificial Sequence: Synthetic peptide
  Seed: EECLINDPWVLLNAS
EECWINIPNVLMNAS

SEQ ID NO: 257369 - protein, 15 aa, Artificial Sequence
  Description of Artificial Sequence: Synthetic peptide
  Seed: EECLINDPWVLLNAS
EECWINIPNVLSNAS

SEQ ID NO: 257370 - protein, 15 aa, Artificial Sequence
  Description of Artificial Sequence: Synthetic peptide
  Seed: EECLINDPWVLLNAS
EECWINIPNVLTNAS

SEQ ID NO: 257371 - protein, 15 aa, Artificial Sequence
  Description of Artificial Sequence: Synthetic peptide
  Seed: EECLINDPWVLLNAS
EECWINIPNVLVNAS

SEQ ID NO: 257372 - protein, 15 aa, Artificial Sequence
  Description of Artificial Sequence: Synthetic peptide
  Seed: EECLINDPWVLLNAS
EECWINIPPVLANAS

SEQ ID NO: 257373 - protein, 15 aa, Artificial Sequence
  Description of Artificial Sequence: Synthetic peptide
  Seed: EECLINDPWVLLNAS
EECWINIPPVLGNAS

SEQ ID NO: 257374 - protein, 15 aa, Artificial Sequence
  Description of Artificial Sequence: Synthetic peptide
  Seed: EECLINDPWVLLNAS
EECWINIPPVLINAS

SEQ ID NO: 257375 - protein, 15 aa, Artificial Sequence
  Description of Artificial Sequence: Synthetic peptide
  Seed: EECLINDPWVLLNAS
EECWINIPPVLLNAS

SEQ ID NO: 257376 - protein, 15 aa, Artificial Sequence
  Description of Artificial Sequence: Synthetic peptide
  Seed: EECLINDPWVLLNAS
EECWINIPPVLMNAS

SEQ ID NO: 257377 - protein, 15 aa, Artificial Sequence
  Description of Artificial Sequence: Synthetic peptide
  Seed: EECLINDPWVLLNAS
EECWINIPPVLSNAS

SEQ ID NO: 257378 - protein, 15 aa, Artificial Sequence
  Description of Artificial Sequence: Synthetic peptide
  Seed: EECLINDPWVLLNAS
EECWINIPPVLTNAS

SEQ ID NO: 257379 - protein, 15 aa, Artificial Sequence
  Description of Artificial Sequence: Synthetic peptide
  Seed: EECLINDPWVLLNAS
EECWINIPPVLVNAS

SEQ ID NO: 257380 - protein, 15 aa, Artificial Sequence
  Description of Artificial Sequence: Synthetic peptide
  Seed: EECLINDPWVLLNAS
EECWINIPSVLANAS

SEQ ID NO: 257381 - protein, 15 aa, Artificial Sequence
  Description of Artificial Sequence: Synthetic peptide
  Seed: EECLINDPWVLLNAS
EECWINIPSVLGNAS

SEQ ID NO: 257382 - protein, 15 aa, Artificial Sequence
  Description of Artificial Sequence: Synthetic peptide
  Seed: EECLINDPWVLLNAS
EECWINIPSVLINAS

SEQ ID NO: 257383 - protein, 15 aa, Artificial Sequence
  Description of Artificial Sequence: Synthetic peptide
  Seed: EECLINDPWVLLNAS
EECWINIPSVLLNAS

SEQ ID NO: 257384 - protein, 15 aa, Artificial Sequence
  Description of Artificial Sequence: Synthetic peptide
  Seed: EECLINDPWVLLNAS
EECWINIPSVLMNAS

SEQ ID NO: 257385 - protein, 15 aa, Artificial Sequence
  Description of Artificial Sequence: Synthetic peptide
  Seed: EECLINDPWVLLNAS
EECWINIPSVLNNAS

SEQ ID NO: 257386 - protein, 15 aa, Artificial Sequence
  Description of Artificial Sequence: Synthetic peptide
  Seed: EECLINDPWVLLNAS
EECWINIPSVLSNAS

SEQ ID NO: 257387 - protein, 15 aa, Artificial Sequence
  Description of Artificial Sequence: Synthetic peptide
  Seed: EECLINDPWVLLNAS
EECWINIPSVLTNAS

SEQ ID NO: 257388 - protein, 15 aa, Artificial Sequence
  Description of Artificial Sequence: Synthetic peptide
  Seed: EECLINDPWVLLNAS
EECWINIPSVLVNAS

SEQ ID NO: 257389 - protein, 15 aa, Artificial Sequence
  Description of Artificial Sequence: Synthetic peptide
  Seed: EECLINDPWVLLNAS
EECWINIPTVLANAS

SEQ ID NO: 257390 - protein, 15 aa, Artificial Sequence
  Description of Artificial Sequence: Synthetic peptide
  Seed: EECLINDPWVLLNAS
EECWINIPTVLGNAS

SEQ ID NO: 257391 - protein, 15 aa, Artificial Sequence
  Description of Artificial Sequence: Synthetic peptide
  Seed: EECLINDPWVLLNAS
EECWINIPTVLINAS

SEQ ID NO: 257392 - protein, 15 aa, Artificial Sequence
  Description of Artificial Sequence: Synthetic peptide
  Seed: EECLINDPWVLLNAS
EECWINIPTVLLNAS

SEQ ID NO: 257393 - protein, 15 aa, Artificial Sequence
  Description of Artificial Sequence: Synthetic peptide
  Seed: EECLINDPWVLLNAS
EECWINIPTVLMNAS

SEQ ID NO: 257394 - protein, 15 aa, Artificial Sequence
  Description of Artificial Sequence: Synthetic peptide
  Seed: EECLINDPWVLLNAS
EECWINIPTVLSNAS

SEQ ID NO: 257395 - protein, 15 aa, Artificial Sequence
  Description of Artificial Sequence: Synthetic peptide
  Seed: EECLINDPWVLLNAS
EECWINIPTVLTNAS

SEQ ID NO: 257396 - protein, 15 aa, Artificial Sequence
  Description of Artificial Sequence: Synthetic peptide
  Seed: EECLINDPWVLLNAS
EECWINIPTVLVNAS

SEQ ID NO: 257397 - protein, 15 aa, Artificial Sequence
  Description of Artificial Sequence: Synthetic peptide
  Seed: EECLINDPWVLLNAS
EECWINIPVVLANAS

SEQ ID NO: 257398 - protein, 15 aa, Artificial Sequence
  Description of Artificial Sequence: Synthetic peptide
  Seed: EECLINDPWVLLNAS
EECWINLPAVLANAS

SEQ ID NO: 257399 - protein, 15 aa, Artificial Sequence
  Description of Artificial Sequence: Synthetic peptide
  Seed: EECLINDPWVLLNAS
EECWINLPAVLCNAS

SEQ ID NO: 257400 - protein, 15 aa, Artificial Sequence
  Description of Artificial Sequence: Synthetic peptide
  Seed: EECLINDPWVLLNAS
EECWINLPAVLFNAS

SEQ ID NO: 257401 - protein, 15 aa, Artificial Sequence
  Description of Artificial Sequence: Synthetic peptide
  Seed: EECLINDPWVLLNAS
EECWINLPAVLGNAS

SEQ ID NO: 257402 - protein, 15 aa, Artificial Sequence
  Description of Artificial Sequence: Synthetic peptide
  Seed: EECLINDPWVLLNAS
EECWINLPAVLHNAS

SEQ ID NO: 257403 - protein, 15 aa, Artificial Sequence
  Description of Artificial Sequence: Synthetic peptide
  Seed: EECLINDPWVLLNAS
EECWINLPAVLINAS

SEQ ID NO: 257404 - protein, 15 aa, Artificial Sequence
  Description of Artificial Sequence: Synthetic peptide
  Seed: EECLINDPWVLLNAS
EECWINLPAVLKNAS

SEQ ID NO: 257405 - protein, 15 aa, Artificial Sequence
  Description of Artificial Sequence: Synthetic peptide
  Seed: EECLINDPWVLLNAS
EECWINLPAVLLNAS

SEQ ID NO: 257406 - protein, 15 aa, Artificial Sequence
  Description of Artificial Sequence: Synthetic peptide
  Seed: EECLINDPWVLLNAS
EECWINLPAVLMNAS

SEQ ID NO: 257407 - protein, 15 aa, Artificial Sequence
  Description of Artificial Sequence: Synthetic peptide
  Seed: EECLINDPWVLLNAS
EECWINLPAVLNNAS

SEQ ID NO: 257408 - protein, 15 aa, Artificial Sequence
  Description of Artificial Sequence: Synthetic peptide
  Seed: EECLINDPWVLLNAS
EECWINLPAVLPNAS

SEQ ID NO: 257409 - protein, 15 aa, Artificial Sequence
  Description of Artificial Sequence: Synthetic peptide
  Seed: EECLINDPWVLLNAS
EECWINLPAVLQNAS

SEQ ID NO: 257410 - protein, 15 aa, Artificial Sequence
  Description of Artificial Sequence: Synthetic peptide
  Seed: EECLINDPWVLLNAS
EECWINLPAVLRNAS

SEQ ID NO: 257411 - protein, 15 aa, Artificial Sequence
  Description of Artificial Sequence: Synthetic peptide
  Seed: EECLINDPWVLLNAS
EECWINLPAVLSNAS

SEQ ID NO: 257412 - protein, 15 aa, Artificial Sequence
  Description of Artificial Sequence: Synthetic peptide
  Seed: EECLINDPWVLLNAS
EECWINLPAVLTNAS

SEQ ID NO: 257413 - protein, 15 aa, Artificial Sequence
  Description of Artificial Sequence: Synthetic peptide
  Seed: EECLINDPWVLLNAS
EECWINLPAVLVNAS

SEQ ID NO: 257414 - protein, 15 aa, Artificial Sequence
  Description of Artificial Sequence: Synthetic peptide
  Seed: EECLINDPWVLLNAS
EECWINLPAVLYNAS

SEQ ID NO: 257415 - protein, 15 aa, Artificial Sequence
  Description of Artificial Sequence: Synthetic peptide
  Seed: EECLINDPWVLLNAS
EECWINLPGVLANAS

SEQ ID NO: 257416 - protein, 15 aa, Artificial Sequence
  Description of Artificial Sequence: Synthetic peptide
  Seed: EECLINDPWVLLNAS
EECWINLPGVLCNAS

SEQ ID NO: 257417 - protein, 15 aa, Artificial Sequence
  Description of Artificial Sequence: Synthetic peptide
  Seed: EECLINDPWVLLNAS
EECWINLPGVLFNAS

SEQ ID NO: 257418 - protein, 15 aa, Artificial Sequence
  Description of Artificial Sequence: Synthetic peptide
  Seed: EECLINDPWVLLNAS
EECWINLPGVLGNAS

SEQ ID NO: 257419 - protein, 15 aa, Artificial Sequence
  Description of Artificial Sequence: Synthetic peptide
  Seed: EECLINDPWVLLNAS
EECWINLPGVLHNAS

SEQ ID NO: 257420 - protein, 15 aa, Artificial Sequence
  Description of Artificial Sequence: Synthetic peptide
  Seed: EECLINDPWVLLNAS
EECWINLPGVLINAS

SEQ ID NO: 257421 - protein, 15 aa, Artificial Sequence
  Description of Artificial Sequence: Synthetic peptide
  Seed: EECLINDPWVLLNAS
EECWINLPGVLLNAS

SEQ ID NO: 257422 - protein, 15 aa, Artificial Sequence
  Description of Artificial Sequence: Synthetic peptide
  Seed: EECLINDPWVLLNAS
EECWINLPGVLMNAS

SEQ ID NO: 257423 - protein, 15 aa, Artificial Sequence
  Description of Artificial Sequence: Synthetic peptide
  Seed: EECLINDPWVLLNAS
EECWINLPGVLNNAS

SEQ ID NO: 257424 - protein, 15 aa, Artificial Sequence
  Description of Artificial Sequence: Synthetic peptide
  Seed: EECLINDPWVLLNAS
EECWINLPGVLPNAS

SEQ ID NO: 257425 - protein, 15 aa, Artificial Sequence
  Description of Artificial Sequence: Synthetic peptide
  Seed: EECLINDPWVLLNAS
EECWINLPGVLQNAS

SEQ ID NO: 257426 - protein, 15 aa, Artificial Sequence
  Description of Artificial Sequence: Synthetic peptide
  Seed: EECLINDPWVLLNAS
EECWINLPGVLSNAS

SEQ ID NO: 257427 - protein, 15 aa, Artificial Sequence
  Description of Artificial Sequence: Synthetic peptide
  Seed: EECLINDPWVLLNAS
EECWINLPGVLTNAS

SEQ ID NO: 257428 - protein, 15 aa, Artificial Sequence
  Description of Artificial Sequence: Synthetic peptide
  Seed: EECLINDPWVLLNAS
EECWINLPGVLVNAS

SEQ ID NO: 257429 - protein, 15 aa, Artificial Sequence
  Description of Artificial Sequence: Synthetic peptide
  Seed: EECLINDPWVLLNAS
EECWINLPIVLANAS

SEQ ID NO: 257430 - protein, 15 aa, Artificial Sequence
  Description of Artificial Sequence: Synthetic peptide
  Seed: EECLINDPWVLLNAS
EECWINLPNVLANAS

SEQ ID NO: 257431 - protein, 15 aa, Artificial Sequence
  Description of Artificial Sequence: Synthetic peptide
  Seed: EECLINDPWVLLNAS
EECWINLPNVLGNAS

SEQ ID NO: 257432 - protein, 15 aa, Artificial Sequence
  Description of Artificial Sequence: Synthetic peptide
  Seed: EECLINDPWVLLNAS
EECWINLPNVLINAS

SEQ ID NO: 257433 - protein, 15 aa, Artificial Sequence
  Description of Artificial Sequence: Synthetic peptide
  Seed: EECLINDPWVLLNAS
EECWINLPNVLLNAS

SEQ ID NO: 257434 - protein, 15 aa, Artificial Sequence
  Description of Artificial Sequence: Synthetic peptide
  Seed: EECLINDPWVLLNAS
EECWINLPNVLMNAS

SEQ ID NO: 257435 - protein, 15 aa, Artificial Sequence
  Description of Artificial Sequence: Synthetic peptide
  Seed: EECLINDPWVLLNAS
EECWINLPNVLSNAS

SEQ ID NO: 257436 - protein, 15 aa, Artificial Sequence
  Description of Artificial Sequence: Synthetic peptide
  Seed: EECLINDPWVLLNAS
EECWINLPNVLTNAS

SEQ ID NO: 257437 - protein, 15 aa, Artificial Sequence
  Description of Artificial Sequence: Synthetic peptide
  Seed: EECLINDPWVLLNAS
EECWINLPNVLVNAS

SEQ ID NO: 257438 - protein, 15 aa, Artificial Sequence
  Description of Artificial Sequence: Synthetic peptide
  Seed: EECLINDPWVLLNAS
EECWINLPPVLANAS

SEQ ID NO: 257439 - protein, 15 aa, Artificial Sequence
  Description of Artificial Sequence: Synthetic peptide
  Seed: EECLINDPWVLLNAS
EECWINLPPVLGNAS

SEQ ID NO: 257440 - protein, 15 aa, Artificial Sequence
  Description of Artificial Sequence: Synthetic peptide
  Seed: EECLINDPWVLLNAS
EECWINLPPVLINAS

SEQ ID NO: 257441 - protein, 15 aa, Artificial Sequence
  Description of Artificial Sequence: Synthetic peptide
  Seed: EECLINDPWVLLNAS
EECWINLPPVLLNAS

SEQ ID NO: 257442 - protein, 15 aa, Artificial Sequence
  Description of Artificial Sequence: Synthetic peptide
  Seed: EECLINDPWVLLNAS
EECWINLPPVLMNAS

SEQ ID NO: 257443 - protein, 15 aa, Artificial Sequence
  Description of Artificial Sequence: Synthetic peptide
  Seed: EECLINDPWVLLNAS
EECWINLPPVLNNAS

SEQ ID NO: 257444 - protein, 15 aa, Artificial Sequence
  Description of Artificial Sequence: Synthetic peptide
  Seed: EECLINDPWVLLNAS
EECWINLPPVLSNAS

SEQ ID NO: 257445 - protein, 15 aa, Artificial Sequence
  Description of Artificial Sequence: Synthetic peptide
  Seed: EECLINDPWVLLNAS
EECWINLPPVLTNAS

SEQ ID NO: 257446 - protein, 15 aa, Artificial Sequence
  Description of Artificial Sequence: Synthetic peptide
  Seed: EECLINDPWVLLNAS
EECWINLPPVLVNAS

SEQ ID NO: 257447 - protein, 15 aa, Artificial Sequence
  Description of Artificial Sequence: Synthetic peptide
  Seed: EECLINDPWVLLNAS
EECWINLPSVLANAS

SEQ ID NO: 257448 - protein, 15 aa, Artificial Sequence
  Description of Artificial Sequence: Synthetic peptide
  Seed: EECLINDPWVLLNAS
EECWINLPSVLCNAS

SEQ ID NO: 257449 - protein, 15 aa, Artificial Sequence
  Description of Artificial Sequence: Synthetic peptide
  Seed: EECLINDPWVLLNAS
EECWINLPSVLFNAS

SEQ ID NO: 257450 - protein, 15 aa, Artificial Sequence
  Description of Artificial Sequence: Synthetic peptide
  Seed: EECLINDPWVLLNAS
EECWINLPSVLGNAS

SEQ ID NO: 257451 - protein, 15 aa, Artificial Sequence
  Description of Artificial Sequence: Synthetic peptide
  Seed: EECLINDPWVLLNAS
EECWINLPSVLHNAS

SEQ ID NO: 257452 - protein, 15 aa, Artificial Sequence
  Description of Artificial Sequence: Synthetic peptide
  Seed: EECLINDPWVLLNAS
EECWINLPSVLINAS

SEQ ID NO: 257453 - protein, 15 aa, Artificial Sequence
  Description of Artificial Sequence: Synthetic peptide
  Seed: EECLINDPWVLLNAS
EECWINLPSVLLNAS

SEQ ID NO: 257454 - protein, 15 aa, Artificial Sequence
  Description of Artificial Sequence: Synthetic peptide
  Seed: EECLINDPWVLLNAS
EECWINLPSVLMNAS

SEQ ID NO: 257455 - protein, 15 aa, Artificial Sequence
  Description of Artificial Sequence: Synthetic peptide
  Seed: EECLINDPWVLLNAS
EECWINLPSVLNNAS

SEQ ID NO: 257456 - protein, 15 aa, Artificial Sequence
  Description of Artificial Sequence: Synthetic peptide
  Seed: EECLINDPWVLLNAS
EECWINLPSVLPNAS

SEQ ID NO: 257457 - protein, 15 aa, Artificial Sequence
  Description of Artificial Sequence: Synthetic peptide
  Seed: EECLINDPWVLLNAS
EECWINLPSVLQNAS

SEQ ID NO: 257458 - protein, 15 aa, Artificial Sequence
  Description of Artificial Sequence: Synthetic peptide
  Seed: EECLINDPWVLLNAS
EECWINLPSVLSNAS

SEQ ID NO: 257459 - protein, 15 aa, Artificial Sequence
  Description of Artificial Sequence: Synthetic peptide
  Seed: EECLINDPWVLLNAS
EECWINLPSVLTNAS

SEQ ID NO: 257460 - protein, 15 aa, Artificial Sequence
  Description of Artificial Sequence: Synthetic peptide
  Seed: EECLINDPWVLLNAS
EECWINLPSVLVNAS

SEQ ID NO: 257461 - protein, 15 aa, Artificial Sequence
  Description of Artificial Sequence: Synthetic peptide
  Seed: EECLINDPWVLLNAS
EECWINLPTVLANAS

SEQ ID NO: 257462 - protein, 15 aa, Artificial Sequence
  Description of Artificial Sequence: Synthetic peptide
  Seed: EECLINDPWVLLNAS
EECWINLPTVLGNAS

SEQ ID NO: 257463 - protein, 15 aa, Artificial Sequence
  Description of Artificial Sequence: Synthetic peptide
  Seed: EECLINDPWVLLNAS
EECWINLPTVLINAS

SEQ ID NO: 257464 - protein, 15 aa, Artificial Sequence
  Description of Artificial Sequence: Synthetic peptide
  Seed: EECLINDPWVLLNAS
EECWINLPTVLLNAS

SEQ ID NO: 257465 - protein, 15 aa, Artificial Sequence
  Description of Artificial Sequence: Synthetic peptide
  Seed: EECLINDPWVLLNAS
EECWINLPTVLMNAS

SEQ ID NO: 257466 - protein, 15 aa, Artificial Sequence
  Description of Artificial Sequence: Synthetic peptide
  Seed: EECLINDPWVLLNAS
EECWINLPTVLNNAS

SEQ ID NO: 257467 - protein, 15 aa, Artificial Sequence
  Description of Artificial Sequence: Synthetic peptide
  Seed: EECLINDPWVLLNAS
EECWINLPTVLSNAS

SEQ ID NO: 257468 - protein, 15 aa, Artificial Sequence
  Description of Artificial Sequence: Synthetic peptide
  Seed: EECLINDPWVLLNAS
EECWINLPTVLTNAS

SEQ ID NO: 257469 - protein, 15 aa, Artificial Sequence
  Description of Artificial Sequence: Synthetic peptide
  Seed: EECLINDPWVLLNAS
EECWINLPTVLVNAS

SEQ ID NO: 257470 - protein, 15 aa, Artificial Sequence
  Description of Artificial Sequence: Synthetic peptide
  Seed: EECLINDPWVLLNAS
EECWINLPVVLANAS

SEQ ID NO: 257471 - protein, 15 aa, Artificial Sequence
  Description of Artificial Sequence: Synthetic peptide
  Seed: EECLINDPWVLLNAS
EECWINLPVVLINAS

SEQ ID NO: 257472 - protein, 15 aa, Artificial Sequence
  Description of Artificial Sequence: Synthetic peptide
  Seed: EECLINDPWVLLNAS
EECWINLPVVLLNAS

SEQ ID NO: 257473 - protein, 15 aa, Artificial Sequence
  Description of Artificial Sequence: Synthetic peptide
  Seed: EECLINDPWVLLNAS
EECWINLPVVLMNAS

SEQ ID NO: 257474 - protein, 15 aa, Artificial Sequence
  Description of Artificial Sequence: Synthetic peptide
  Seed: EECLINDPWVLLNAS
EECWINLPVVLSNAS

SEQ ID NO: 257475 - protein, 15 aa, Artificial Sequence
  Description of Artificial Sequence: Synthetic peptide
  Seed: EECLINDPWVLLNAS
EECWINLPVVLTNAS

SEQ ID NO: 257476 - protein, 15 aa, Artificial Sequence
  Description of Artificial Sequence: Synthetic peptide
  Seed: EECLINDPWVLLNAS
EECWINLPVVLVNAS

SEQ ID NO: 257477 - protein, 15 aa, Artificial Sequence
  Description of Artificial Sequence: Synthetic peptide
  Seed: EECLINDPWVLLNAS
EECWINMPAVLANAS

SEQ ID NO: 257478 - protein, 15 aa, Artificial Sequence
  Description of Artificial Sequence: Synthetic peptide
  Seed: EECLINDPWVLLNAS
EECWINMPAVLCNAS

SEQ ID NO: 257479 - protein, 15 aa, Artificial Sequence
  Description of Artificial Sequence: Synthetic peptide
  Seed: EECLINDPWVLLNAS
EECWINMPAVLFNAS

SEQ ID NO: 257480 - protein, 15 aa, Artificial Sequence
  Description of Artificial Sequence: Synthetic peptide
  Seed: EECLINDPWVLLNAS
EECWINMPAVLGNAS

SEQ ID NO: 257481 - protein, 15 aa, Artificial Sequence
  Description of Artificial Sequence: Synthetic peptide
  Seed: EECLINDPWVLLNAS
EECWINMPAVLHNAS

SEQ ID NO: 257482 - protein, 15 aa, Artificial Sequence
  Description of Artificial Sequence: Synthetic peptide
  Seed: EECLINDPWVLLNAS
EECWINMPAVLINAS

SEQ ID NO: 257483 - protein, 15 aa, Artificial Sequence
  Description of Artificial Sequence: Synthetic peptide
  Seed: EECLINDPWVLLNAS
EECWINMPAVLKNAS

SEQ ID NO: 257484 - protein, 15 aa, Artificial Sequence
  Description of Artificial Sequence: Synthetic peptide
  Seed: EECLINDPWVLLNAS
EECWINMPAVLLNAS

SEQ ID NO: 257485 - protein, 15 aa, Artificial Sequence
  Description of Artificial Sequence: Synthetic peptide
  Seed: EECLINDPWVLLNAS
EECWINMPAVLMNAS

SEQ ID NO: 257486 - protein, 15 aa, Artificial Sequence
  Description of Artificial Sequence: Synthetic peptide
  Seed: EECLINDPWVLLNAS
EECWINMPAVLNNAS

SEQ ID NO: 257487 - protein, 15 aa, Artificial Sequence
  Description of Artificial Sequence: Synthetic peptide
  Seed: EECLINDPWVLLNAS
EECWINMPAVLPNAS

SEQ ID NO: 257488 - protein, 15 aa, Artificial Sequence
  Description of Artificial Sequence: Synthetic peptide
  Seed: EECLINDPWVLLNAS
EECWINMPAVLQNAS

SEQ ID NO: 257489 - protein, 15 aa, Artificial Sequence
  Description of Artificial Sequence: Synthetic peptide
  Seed: EECLINDPWVLLNAS
EECWINMPAVLRNAS

SEQ ID NO: 257490 - protein, 15 aa, Artificial Sequence
  Description of Artificial Sequence: Synthetic peptide
  Seed: EECLINDPWVLLNAS
EECWINMPAVLSNAS

SEQ ID NO: 257491 - protein, 15 aa, Artificial Sequence
  Description of Artificial Sequence: Synthetic peptide
  Seed: EECLINDPWVLLNAS
EECWINMPAVLTNAS

SEQ ID NO: 257492 - protein, 15 aa, Artificial Sequence
  Description of Artificial Sequence: Synthetic peptide
  Seed: EECLINDPWVLLNAS
EECWINMPAVLVNAS

SEQ ID NO: 257493 - protein, 15 aa, Artificial Sequence
  Description of Artificial Sequence: Synthetic peptide
  Seed: EECLINDPWVLLNAS
EECWINMPAVLYNAS

SEQ ID NO: 257494 - protein, 15 aa, Artificial Sequence
  Description of Artificial Sequence: Synthetic peptide
  Seed: EECLINDPWVLLNAS
EECWINMPGVLANAS

SEQ ID NO: 257495 - protein, 15 aa, Artificial Sequence
  Description of Artificial Sequence: Synthetic peptide
  Seed: EECLINDPWVLLNAS
EECWINMPGVLCNAS

SEQ ID NO: 257496 - protein, 15 aa, Artificial Sequence
  Description of Artificial Sequence: Synthetic peptide
  Seed: EECLINDPWVLLNAS
EECWINMPGVLFNAS

SEQ ID NO: 257497 - protein, 15 aa, Artificial Sequence
  Description of Artificial Sequence: Synthetic peptide
  Seed: EECLINDPWVLLNAS
EECWINMPGVLGNAS

SEQ ID NO: 257498 - protein, 15 aa, Artificial Sequence
  Description of Artificial Sequence: Synthetic peptide
  Seed: EECLINDPWVLLNAS
EECWINMPGVLHNAS

SEQ ID NO: 257499 - protein, 15 aa, Artificial Sequence
  Description of Artificial Sequence: Synthetic peptide
  Seed: EECLINDPWVLLNAS
EECWINMPGVLINAS

SEQ ID NO: 257500 - protein, 15 aa, Artificial Sequence
  Description of Artificial Sequence: Synthetic peptide
  Seed: EECLINDPWVLLNAS
EECWINMPGVLLNAS

SEQ ID NO: 257501 - protein, 15 aa, Artificial Sequence
  Description of Artificial Sequence: Synthetic peptide
  Seed: EECLINDPWVLLNAS
EECWINMPGVLMNAS

SEQ ID NO: 257502 - protein, 15 aa, Artificial Sequence
  Description of Artificial Sequence: Synthetic peptide
  Seed: EECLINDPWVLLNAS
EECWINMPGVLNNAS

SEQ ID NO: 257503 - protein, 15 aa, Artificial Sequence
  Description of Artificial Sequence: Synthetic peptide
  Seed: EECLINDPWVLLNAS
EECWINMPGVLPNAS

SEQ ID NO: 257504 - protein, 15 aa, Artificial Sequence
  Description of Artificial Sequence: Synthetic peptide
  Seed: EECLINDPWVLLNAS
EECWINMPGVLQNAS

SEQ ID NO: 257505 - protein, 15 aa, Artificial Sequence
  Description of Artificial Sequence: Synthetic peptide
  Seed: EECLINDPWVLLNAS
EECWINMPGVLSNAS

SEQ ID NO: 257506 - protein, 15 aa, Artificial Sequence
  Description of Artificial Sequence: Synthetic peptide
  Seed: EECLINDPWVLLNAS
EECWINMPGVLTNAS

SEQ ID NO: 257507 - protein, 15 aa, Artificial Sequence
  Description of Artificial Sequence: Synthetic peptide
  Seed: EECLINDPWVLLNAS
EECWINMPGVLVNAS

SEQ ID NO: 257508 - protein, 15 aa, Artificial Sequence
  Description of Artificial Sequence: Synthetic peptide
  Seed: EECLINDPWVLLNAS
EECWINMPIVLANAS

SEQ ID NO: 257509 - protein, 15 aa, Artificial Sequence
  Description of Artificial Sequence: Synthetic peptide
  Seed: EECLINDPWVLLNAS
EECWINMPNVLANAS

SEQ ID NO: 257510 - protein, 15 aa, Artificial Sequence
  Description of Artificial Sequence: Synthetic peptide
  Seed: EECLINDPWVLLNAS
EECWINMPNVLGNAS

SEQ ID NO: 257511 - protein, 15 aa, Artificial Sequence
  Description of Artificial Sequence: Synthetic peptide
  Seed: EECLINDPWVLLNAS
EECWINMPNVLINAS

SEQ ID NO: 257512 - protein, 15 aa, Artificial Sequence
  Description of Artificial Sequence: Synthetic peptide
  Seed: EECLINDPWVLLNAS
EECWINMPNVLLNAS

SEQ ID NO: 257513 - protein, 15 aa, Artificial Sequence
  Description of Artificial Sequence: Synthetic peptide
  Seed: EECLINDPWVLLNAS
EECWINMPNVLMNAS

SEQ ID NO: 257514 - protein, 15 aa, Artificial Sequence
  Description of Artificial Sequence: Synthetic peptide
  Seed: EECLINDPWVLLNAS
EECWINMPNVLSNAS

SEQ ID NO: 257515 - protein, 15 aa, Artificial Sequence
  Description of Artificial Sequence: Synthetic peptide
  Seed: EECLINDPWVLLNAS
EECWINMPNVLTNAS

SEQ ID NO: 257516 - protein, 15 aa, Artificial Sequence
  Description of Artificial Sequence: Synthetic peptide
  Seed: EECLINDPWVLLNAS
EECWINMPNVLVNAS

SEQ ID NO: 257517 - protein, 15 aa, Artificial Sequence
  Description of Artificial Sequence: Synthetic peptide
  Seed: EECLINDPWVLLNAS
EECWINMPPVLANAS

SEQ ID NO: 257518 - protein, 15 aa, Artificial Sequence
  Description of Artificial Sequence: Synthetic peptide
  Seed: EECLINDPWVLLNAS
EECWINMPPVLGNAS

SEQ ID NO: 257519 - protein, 15 aa, Artificial Sequence
  Description of Artificial Sequence: Synthetic peptide
  Seed: EECLINDPWVLLNAS
EECWINMPPVLINAS

SEQ ID NO: 257520 - protein, 15 aa, Artificial Sequence
  Description of Artificial Sequence: Synthetic peptide
  Seed: EECLINDPWVLLNAS
EECWINMPPVLLNAS

SEQ ID NO: 257521 - protein, 15 aa, Artificial Sequence
  Description of Artificial Sequence: Synthetic peptide
  Seed: EECLINDPWVLLNAS
EECWINMPPVLMNAS

SEQ ID NO: 257522 - protein, 15 aa, Artificial Sequence
  Description of Artificial Sequence: Synthetic peptide
  Seed: EECLINDPWVLLNAS
EECWINMPPVLNNAS

SEQ ID NO: 257523 - protein, 15 aa, Artificial Sequence
  Description of Artificial Sequence: Synthetic peptide
  Seed: EECLINDPWVLLNAS
EECWINMPPVLSNAS

SEQ ID NO: 257524 - protein, 15 aa, Artificial Sequence
  Description of Artificial Sequence: Synthetic peptide
  Seed: EECLINDPWVLLNAS
EECWINMPPVLTNAS

SEQ ID NO: 257525 - protein, 15 aa, Artificial Sequence
  Description of Artificial Sequence: Synthetic peptide
  Seed: EECLINDPWVLLNAS
EECWINMPPVLVNAS

SEQ ID NO: 257526 - protein, 15 aa, Artificial Sequence
  Description of Artificial Sequence: Synthetic peptide
  Seed: EECLINDPWVLLNAS
EECWINMPSVLANAS

SEQ ID NO: 257527 - protein, 15 aa, Artificial Sequence
  Description of Artificial Sequence: Synthetic peptide
  Seed: EECLINDPWVLLNAS
EECWINMPSVLCNAS

SEQ ID NO: 257528 - protein, 15 aa, Artificial Sequence
  Description of Artificial Sequence: Synthetic peptide
  Seed: EECLINDPWVLLNAS
EECWINMPSVLFNAS

SEQ ID NO: 257529 - protein, 15 aa, Artificial Sequence
  Description of Artificial Sequence: Synthetic peptide
  Seed: EECLINDPWVLLNAS
EECWINMPSVLGNAS

SEQ ID NO: 257530 - protein, 15 aa, Artificial Sequence
  Description of Artificial Sequence: Synthetic peptide
  Seed: EECLINDPWVLLNAS
EECWINMPSVLHNAS

SEQ ID NO: 257531 - protein, 15 aa, Artificial Sequence
  Description of Artificial Sequence: Synthetic peptide
  Seed: EECLINDPWVLLNAS
EECWINMPSVLINAS

SEQ ID NO: 257532 - protein, 15 aa, Artificial Sequence
  Description of Artificial Sequence: Synthetic peptide
  Seed: EECLINDPWVLLNAS
EECWINMPSVLKNAS

SEQ ID NO: 257533 - protein, 15 aa, Artificial Sequence
  Description of Artificial Sequence: Synthetic peptide
  Seed: EECLINDPWVLLNAS
EECWINMPSVLLNAS

SEQ ID NO: 257534 - protein, 15 aa, Artificial Sequence
  Description of Artificial Sequence: Synthetic peptide
  Seed: EECLINDPWVLLNAS
EECWINMPSVLMNAS

SEQ ID NO: 257535 - protein, 15 aa, Artificial Sequence
  Description of Artificial Sequence: Synthetic peptide
  Seed: EECLINDPWVLLNAS
EECWINMPSVLNNAS

SEQ ID NO: 257536 - protein, 15 aa, Artificial Sequence
  Description of Artificial Sequence: Synthetic peptide
  Seed: EECLINDPWVLLNAS
EECWINMPSVLPNAS

SEQ ID NO: 257537 - protein, 15 aa, Artificial Sequence
  Description of Artificial Sequence: Synthetic peptide
  Seed: EECLINDPWVLLNAS
EECWINMPSVLQNAS

SEQ ID NO: 257538 - protein, 15 aa, Artificial Sequence
  Description of Artificial Sequence: Synthetic peptide
  Seed: EECLINDPWVLLNAS
EECWINMPSVLRNAS

SEQ ID NO: 257539 - protein, 15 aa, Artificial Sequence
  Description of Artificial Sequence: Synthetic peptide
  Seed: EECLINDPWVLLNAS
EECWINMPSVLSNAS

SEQ ID NO: 257540 - protein, 15 aa, Artificial Sequence
  Description of Artificial Sequence: Synthetic peptide
  Seed: EECLINDPWVLLNAS
EECWINMPSVLTNAS

SEQ ID NO: 257541 - protein, 15 aa, Artificial Sequence
  Description of Artificial Sequence: Synthetic peptide
  Seed: EECLINDPWVLLNAS
EECWINMPSVLVNAS

SEQ ID NO: 257542 - protein, 15 aa, Artificial Sequence
  Description of Artificial Sequence: Synthetic peptide
  Seed: EECLINDPWVLLNAS
EECWINMPTVLANAS

SEQ ID NO: 257543 - protein, 15 aa, Artificial Sequence
  Description of Artificial Sequence: Synthetic peptide
  Seed: EECLINDPWVLLNAS
EECWINMPTVLGNAS

SEQ ID NO: 257544 - protein, 15 aa, Artificial Sequence
  Description of Artificial Sequence: Synthetic peptide
  Seed: EECLINDPWVLLNAS
EECWINMPTVLINAS

SEQ ID NO: 257545 - protein, 15 aa, Artificial Sequence
  Description of Artificial Sequence: Synthetic peptide
  Seed: EECLINDPWVLLNAS
EECWINMPTVLLNAS

SEQ ID NO: 257546 - protein, 15 aa, Artificial Sequence
  Description of Artificial Sequence: Synthetic peptide
  Seed: EECLINDPWVLLNAS
EECWINMPTVLMNAS

SEQ ID NO: 257547 - protein, 15 aa, Artificial Sequence
  Description of Artificial Sequence: Synthetic peptide
  Seed: EECLINDPWVLLNAS
EECWINMPTVLNNAS

SEQ ID NO: 257548 - protein, 15 aa, Artificial Sequence
  Description of Artificial Sequence: Synthetic peptide
  Seed: EECLINDPWVLLNAS
EECWINMPTVLSNAS

SEQ ID NO: 257549 - protein, 15 aa, Artificial Sequence
  Description of Artificial Sequence: Synthetic peptide
  Seed: EECLINDPWVLLNAS
EECWINMPTVLTNAS

SEQ ID NO: 257550 - protein, 15 aa, Artificial Sequence
  Description of Artificial Sequence: Synthetic peptide
  Seed: EECLINDPWVLLNAS
EECWINMPTVLVNAS

SEQ ID NO: 257551 - protein, 15 aa, Artificial Sequence
  Description of Artificial Sequence: Synthetic peptide
  Seed: EECLINDPWVLLNAS
EECWINMPVVLANAS

SEQ ID NO: 257552 - protein, 15 aa, Artificial Sequence
  Description of Artificial Sequence: Synthetic peptide
  Seed: EECLINDPWVLLNAS
EECWINMPVVLINAS

SEQ ID NO: 257553 - protein, 15 aa, Artificial Sequence
  Description of Artificial Sequence: Synthetic peptide
  Seed: EECLINDPWVLLNAS
EECWINMPVVLLNAS

SEQ ID NO: 257554 - protein, 15 aa, Artificial Sequence
  Description of Artificial Sequence: Synthetic peptide
  Seed: EECLINDPWVLLNAS
EECWINMPVVLMNAS

SEQ ID NO: 257555 - protein, 15 aa, Artificial Sequence
  Description of Artificial Sequence: Synthetic peptide
  Seed: EECLINDPWVLLNAS
EECWINMPVVLSNAS

SEQ ID NO: 257556 - protein, 15 aa, Artificial Sequence
  Description of Artificial Sequence: Synthetic peptide
  Seed: EECLINDPWVLLNAS
EECWINMPVVLTNAS

SEQ ID NO: 257557 - protein, 15 aa, Artificial Sequence
  Description of Artificial Sequence: Synthetic peptide
  Seed: EECLINDPWVLLNAS
EECWINMPVVLVNAS

SEQ ID NO: 257558 - protein, 15 aa, Artificial Sequence
  Description of Artificial Sequence: Synthetic peptide
  Seed: EECLINDPWVLLNAS
EECWINNPAVLANAS

SEQ ID NO: 257559 - protein, 15 aa, Artificial Sequence
  Description of Artificial Sequence: Synthetic peptide
  Seed: EECLINDPWVLLNAS
EECWINNPAVLFNAS

SEQ ID NO: 257560 - protein, 15 aa, Artificial Sequence
  Description of Artificial Sequence: Synthetic peptide
  Seed: EECLINDPWVLLNAS
EECWINNPAVLINAS

SEQ ID NO: 257561 - protein, 15 aa, Artificial Sequence
  Description of Artificial Sequence: Synthetic peptide
  Seed: EECLINDPWVLLNAS
EECWINNPAVLLNAS

SEQ ID NO: 257562 - protein, 15 aa, Artificial Sequence
  Description of Artificial Sequence: Synthetic peptide
  Seed: EECLINDPWVLLNAS
EECWINNPAVLMNAS

SEQ ID NO: 257563 - protein, 15 aa, Artificial Sequence
  Description of Artificial Sequence: Synthetic peptide
  Seed: EECLINDPWVLLNAS
EECWINNPAVLVNAS

SEQ ID NO: 257564 - protein, 15 aa, Artificial Sequence
  Description of Artificial Sequence: Synthetic peptide
  Seed: EECLINDPWVLLNAS
EECWINNPAVLYNAS

SEQ ID NO: 257565 - protein, 15 aa, Artificial Sequence
  Description of Artificial Sequence: Synthetic peptide
  Seed: EECLINDPWVLLNAS
EECWINNPGVLINAS

SEQ ID NO: 257566 - protein, 15 aa, Artificial Sequence
  Description of Artificial Sequence: Synthetic peptide
  Seed: EECLINDPWVLLNAS
EECWINNPGVLVNAS

SEQ ID NO: 257567 - protein, 15 aa, Artificial Sequence
  Description of Artificial Sequence: Synthetic peptide
  Seed: EECLINDPWVLLNAS
EECWINNPIVLFNAS

SEQ ID NO: 257568 - protein, 15 aa, Artificial Sequence
  Description of Artificial Sequence: Synthetic peptide
  Seed: EECLINDPWVLLNAS
EECWINNPIVLINAS

SEQ ID NO: 257569 - protein, 15 aa, Artificial Sequence
  Description of Artificial Sequence: Synthetic peptide
  Seed: EECLINDPWVLLNAS
EECWINNPIVLLNAS

SEQ ID NO: 257570 - protein, 15 aa, Artificial Sequence
  Description of Artificial Sequence: Synthetic peptide
  Seed: EECLINDPWVLLNAS
EECWINNPIVLVNAS

SEQ ID NO: 257571 - protein, 15 aa, Artificial Sequence
  Description of Artificial Sequence: Synthetic peptide
  Seed: EECLINDPWVLLNAS
EECWINNPIVLYNAS

SEQ ID NO: 257572 - protein, 15 aa, Artificial Sequence
  Description of Artificial Sequence: Synthetic peptide
  Seed: EECLINDPWVLLNAS
EECWINNPMVLINAS

SEQ ID NO: 257573 - protein, 15 aa, Artificial Sequence
  Description of Artificial Sequence: Synthetic peptide
  Seed: EECLINDPWVLLNAS
EECWINNPMVLVNAS

SEQ ID NO: 257574 - protein, 15 aa, Artificial Sequence
  Description of Artificial Sequence: Synthetic peptide
  Seed: EECLINDPWVLLNAS
EECWINNPNVLFNAS

SEQ ID NO: 257575 - protein, 15 aa, Artificial Sequence
  Description of Artificial Sequence: Synthetic peptide
  Seed: EECLINDPWVLLNAS
EECWINNPNVLINAS

SEQ ID NO: 257576 - protein, 15 aa, Artificial Sequence
  Description of Artificial Sequence: Synthetic peptide
  Seed: EECLINDPWVLLNAS
EECWINNPNVLLNAS

SEQ ID NO: 257577 - protein, 15 aa, Artificial Sequence
  Description of Artificial Sequence: Synthetic peptide
  Seed: EECLINDPWVLLNAS
EECWINNPNVLMNAS

SEQ ID NO: 257578 - protein, 15 aa, Artificial Sequence
  Description of Artificial Sequence: Synthetic peptide
  Seed: EECLINDPWVLLNAS
EECWINNPNVLVNAS

SEQ ID NO: 257579 - protein, 15 aa, Artificial Sequence
  Description of Artificial Sequence: Synthetic peptide
  Seed: EECLINDPWVLLNAS
EECWINNPNVLYNAS

SEQ ID NO: 257580 - protein, 15 aa, Artificial Sequence
  Description of Artificial Sequence: Synthetic peptide
  Seed: EECLINDPWVLLNAS
EECWINNPPVLINAS

SEQ ID NO: 257581 - protein, 15 aa, Artificial Sequence
  Description of Artificial Sequence: Synthetic peptide
  Seed: EECLINDPWVLLNAS
EECWINNPSVLFNAS

SEQ ID NO: 257582 - protein, 15 aa, Artificial Sequence
  Description of Artificial Sequence: Synthetic peptide
  Seed: EECLINDPWVLLNAS
EECWINNPSVLINAS

SEQ ID NO: 257583 - protein, 15 aa, Artificial Sequence
  Description of Artificial Sequence: Synthetic peptide
  Seed: EECLINDPWVLLNAS
EECWINNPSVLLNAS

SEQ ID NO: 257584 - protein, 15 aa, Artificial Sequence
  Description of Artificial Sequence: Synthetic peptide
  Seed: EECLINDPWVLLNAS
EECWINNPSVLVNAS

SEQ ID NO: 257585 - protein, 15 aa, Artificial Sequence
  Description of Artificial Sequence: Synthetic peptide
  Seed: EECLINDPWVLLNAS
EECWINNPTVLINAS

SEQ ID NO: 257586 - protein, 15 aa, Artificial Sequence
  Description of Artificial Sequence: Synthetic peptide
  Seed: EECLINDPWVLLNAS
EECWINNPTVLLNAS

SEQ ID NO: 257587 - protein, 15 aa, Artificial Sequence
  Description of Artificial Sequence: Synthetic peptide
  Seed: EECLINDPWVLLNAS
EECWINNPTVLVNAS

SEQ ID NO: 257588 - protein, 15 aa, Artificial Sequence
  Description of Artificial Sequence: Synthetic peptide
  Seed: EECLINDPWVLLNAS
EECWINNPVVLFNAS

SEQ ID NO: 257589 - protein, 15 aa, Artificial Sequence
  Description of Artificial Sequence: Synthetic peptide
  Seed: EECLINDPWVLLNAS
EECWINNPVVLINAS

SEQ ID NO: 257590 - protein, 15 aa, Artificial Sequence
  Description of Artificial Sequence: Synthetic peptide
  Seed: EECLINDPWVLLNAS
EECWINNPVVLLNAS

SEQ ID NO: 257591 - protein, 15 aa, Artificial Sequence
  Description of Artificial Sequence: Synthetic peptide
  Seed: EECLINDPWVLLNAS
EECWINNPVVLMNAS

SEQ ID NO: 257592 - protein, 15 aa, Artificial Sequence
  Description of Artificial Sequence: Synthetic peptide
  Seed: EECLINDPWVLLNAS
EECWINNPVVLVNAS

SEQ ID NO: 257593 - protein, 15 aa, Artificial Sequence
  Description of Artificial Sequence: Synthetic peptide
  Seed: EECLINDPWVLLNAS
EECWINNPVVLYNAS

SEQ ID NO: 257594 - protein, 15 aa, Artificial Sequence
  Description of Artificial Sequence: Synthetic peptide
  Seed: EECLINDPWVLLNAS
EECWINQPAVLANAS

SEQ ID NO: 257595 - protein, 15 aa, Artificial Sequence
  Description of Artificial Sequence: Synthetic peptide
  Seed: EECLINDPWVLLNAS
EECWINQPAVLGNAS

SEQ ID NO: 257596 - protein, 15 aa, Artificial Sequence
  Description of Artificial Sequence: Synthetic peptide
  Seed: EECLINDPWVLLNAS
EECWINQPAVLINAS

SEQ ID NO: 257597 - protein, 15 aa, Artificial Sequence
  Description of Artificial Sequence: Synthetic peptide
  Seed: EECLINDPWVLLNAS
EECWINQPAVLLNAS

SEQ ID NO: 257598 - protein, 15 aa, Artificial Sequence
  Description of Artificial Sequence: Synthetic peptide
  Seed: EECLINDPWVLLNAS
EECWINQPAVLMNAS

SEQ ID NO: 257599 - protein, 15 aa, Artificial Sequence
  Description of Artificial Sequence: Synthetic peptide
  Seed: EECLINDPWVLLNAS
EECWINQPAVLSNAS

SEQ ID NO: 257600 - protein, 15 aa, Artificial Sequence
  Description of Artificial Sequence: Synthetic peptide
  Seed: EECLINDPWVLLNAS
EECWINQPAVLTNAS

SEQ ID NO: 257601 - protein, 15 aa, Artificial Sequence
  Description of Artificial Sequence: Synthetic peptide
  Seed: EECLINDPWVLLNAS
EECWINQPAVLVNAS

SEQ ID NO: 257602 - protein, 15 aa, Artificial Sequence
  Description of Artificial Sequence: Synthetic peptide
  Seed: EECLINDPWVLLNAS
EECWINQPGVLANAS

SEQ ID NO: 257603 - protein, 15 aa, Artificial Sequence
  Description of Artificial Sequence: Synthetic peptide
  Seed: EECLINDPWVLLNAS
EECWINQPGVLINAS

SEQ ID NO: 257604 - protein, 15 aa, Artificial Sequence
  Description of Artificial Sequence: Synthetic peptide
  Seed: EECLINDPWVLLNAS
EECWINQPGVLLNAS

SEQ ID NO: 257605 - protein, 15 aa, Artificial Sequence
  Description of Artificial Sequence: Synthetic peptide
  Seed: EECLINDPWVLLNAS
EECWINQPGVLMNAS

SEQ ID NO: 257606 - protein, 15 aa, Artificial Sequence
  Description of Artificial Sequence: Synthetic peptide
  Seed: EECLINDPWVLLNAS
EECWINQPGVLSNAS

SEQ ID NO: 257607 - protein, 15 aa, Artificial Sequence
  Description of Artificial Sequence: Synthetic peptide
  Seed: EECLINDPWVLLNAS
EECWINQPGVLTNAS

SEQ ID NO: 257608 - protein, 15 aa, Artificial Sequence
  Description of Artificial Sequence: Synthetic peptide
  Seed: EECLINDPWVLLNAS
EECWINQPGVLVNAS

SEQ ID NO: 257609 - protein, 15 aa, Artificial Sequence
  Description of Artificial Sequence: Synthetic peptide
  Seed: EECLINDPWVLLNAS
EECWINQPNVLANAS

SEQ ID NO: 257610 - protein, 15 aa, Artificial Sequence
  Description of Artificial Sequence: Synthetic peptide
  Seed: EECLINDPWVLLNAS
EECWINQPNVLLNAS

SEQ ID NO: 257611 - protein, 15 aa, Artificial Sequence
  Description of Artificial Sequence: Synthetic peptide
  Seed: EECLINDPWVLLNAS
EECWINQPNVLVNAS

SEQ ID NO: 257612 - protein, 15 aa, Artificial Sequence
  Description of Artificial Sequence: Synthetic peptide
  Seed: EECLINDPWVLLNAS
EECWINQPPVLANAS

SEQ ID NO: 257613 - protein, 15 aa, Artificial Sequence
  Description of Artificial Sequence: Synthetic peptide
  Seed: EECLINDPWVLLNAS
EECWINQPPVLINAS

SEQ ID NO: 257614 - protein, 15 aa, Artificial Sequence
  Description of Artificial Sequence: Synthetic peptide
  Seed: EECLINDPWVLLNAS
EECWINQPPVLLNAS

SEQ ID NO: 257615 - protein, 15 aa, Artificial Sequence
  Description of Artificial Sequence: Synthetic peptide
  Seed: EECLINDPWVLLNAS
EECWINQPPVLVNAS

SEQ ID NO: 257616 - protein, 15 aa, Artificial Sequence
  Description of Artificial Sequence: Synthetic peptide
  Seed: EECLINDPWVLLNAS
EECWINQPSVLANAS

SEQ ID NO: 257617 - protein, 15 aa, Artificial Sequence
  Description of Artificial Sequence: Synthetic peptide
  Seed: EECLINDPWVLLNAS
EECWINQPSVLINAS

SEQ ID NO: 257618 - protein, 15 aa, Artificial Sequence
  Description of Artificial Sequence: Synthetic peptide
  Seed: EECLINDPWVLLNAS
EECWINQPSVLLNAS

SEQ ID NO: 257619 - protein, 15 aa, Artificial Sequence
  Description of Artificial Sequence: Synthetic peptide
  Seed: EECLINDPWVLLNAS
EECWINQPSVLMNAS

SEQ ID NO: 257620 - protein, 15 aa, Artificial Sequence
  Description of Artificial Sequence: Synthetic peptide
  Seed: EECLINDPWVLLNAS
EECWINQPSVLSNAS

SEQ ID NO: 257621 - protein, 15 aa, Artificial Sequence
  Description of Artificial Sequence: Synthetic peptide
  Seed: EECLINDPWVLLNAS
EECWINQPSVLTNAS

SEQ ID NO: 257622 - protein, 15 aa, Artificial Sequence
  Description of Artificial Sequence: Synthetic peptide
  Seed: EECLINDPWVLLNAS
EECWINQPSVLVNAS

SEQ ID NO: 257623 - protein, 15 aa, Artificial Sequence
  Description of Artificial Sequence: Synthetic peptide
  Seed: EECLINDPWVLLNAS
EECWINQPTVLANAS

SEQ ID NO: 257624 - protein, 15 aa, Artificial Sequence
  Description of Artificial Sequence: Synthetic peptide
  Seed: EECLINDPWVLLNAS
EECWINQPTVLINAS

SEQ ID NO: 257625 - protein, 15 aa, Artificial Sequence
  Description of Artificial Sequence: Synthetic peptide
  Seed: EECLINDPWVLLNAS
EECWINQPTVLLNAS

SEQ ID NO: 257626 - protein, 15 aa, Artificial Sequence
  Description of Artificial Sequence: Synthetic peptide
  Seed: EECLINDPWVLLNAS
EECWINQPTVLVNAS

SEQ ID NO: 257627 - protein, 15 aa, Artificial Sequence
  Description of Artificial Sequence: Synthetic peptide
  Seed: EECLINDPWVLLNAS
EECWINSPAVLANAS

SEQ ID NO: 257628 - protein, 15 aa, Artificial Sequence
  Description of Artificial Sequence: Synthetic peptide
  Seed: EECLINDPWVLLNAS
EECWINSPAVLINAS

SEQ ID NO: 257629 - protein, 15 aa, Artificial Sequence
  Description of Artificial Sequence: Synthetic peptide
  Seed: EECLINDPWVLLNAS
EECWINSPAVLLNAS

SEQ ID NO: 257630 - protein, 15 aa, Artificial Sequence
  Description of Artificial Sequence: Synthetic peptide
  Seed: EECLINDPWVLLNAS
EECWINSPAVLMNAS

SEQ ID NO: 257631 - protein, 15 aa, Artificial Sequence
  Description of Artificial Sequence: Synthetic peptide
  Seed: EECLINDPWVLLNAS
EECWINSPAVLSNAS

SEQ ID NO: 257632 - protein, 15 aa, Artificial Sequence
  Description of Artificial Sequence: Synthetic peptide
  Seed: EECLINDPWVLLNAS
EECWINSPAVLTNAS

SEQ ID NO: 257633 - protein, 15 aa, Artificial Sequence
  Description of Artificial Sequence: Synthetic peptide
  Seed: EECLINDPWVLLNAS
EECWINSPAVLVNAS

SEQ ID NO: 257634 - protein, 15 aa, Artificial Sequence
  Description of Artificial Sequence: Synthetic peptide
  Seed: EECLINDPWVLLNAS
EECWINSPFVLINAS

SEQ ID NO: 257635 - protein, 15 aa, Artificial Sequence
  Description of Artificial Sequence: Synthetic peptide
  Seed: EECLINDPWVLLNAS
EECWINSPFVLLNAS

SEQ ID NO: 257636 - protein, 15 aa, Artificial Sequence
  Description of Artificial Sequence: Synthetic peptide
  Seed: EECLINDPWVLLNAS
EECWINSPFVLVNAS

SEQ ID NO: 257637 - protein, 15 aa, Artificial Sequence
  Description of Artificial Sequence: Synthetic peptide
  Seed: EECLINDPWVLLNAS
EECWINSPGVLANAS

SEQ ID NO: 257638 - protein, 15 aa, Artificial Sequence
  Description of Artificial Sequence: Synthetic peptide
  Seed: EECLINDPWVLLNAS
EECWINSPGVLINAS

SEQ ID NO: 257639 - protein, 15 aa, Artificial Sequence
  Description of Artificial Sequence: Synthetic peptide
  Seed: EECLINDPWVLLNAS
EECWINSPGVLLNAS

SEQ ID NO: 257640 - protein, 15 aa, Artificial Sequence
  Description of Artificial Sequence: Synthetic peptide
  Seed: EECLINDPWVLLNAS
EECWINSPGVLVNAS

SEQ ID NO: 257641 - protein, 15 aa, Artificial Sequence
  Description of Artificial Sequence: Synthetic peptide
  Seed: EECLINDPWVLLNAS
EECWINSPSVLANAS

SEQ ID NO: 257642 - protein, 15 aa, Artificial Sequence
  Description of Artificial Sequence: Synthetic peptide
  Seed: EECLINDPWVLLNAS
EECWINSPSVLINAS

SEQ ID NO: 257643 - protein, 15 aa, Artificial Sequence
  Description of Artificial Sequence: Synthetic peptide
  Seed: EECLINDPWVLLNAS
EECWINSPSVLLNAS

SEQ ID NO: 257644 - protein, 15 aa, Artificial Sequence
  Description of Artificial Sequence: Synthetic peptide
  Seed: EECLINDPWVLLNAS
EECWINSPSVLVNAS

SEQ ID NO: 257645 - protein, 15 aa, Artificial Sequence
  Description of Artificial Sequence: Synthetic peptide
  Seed: EECLINDPWVLLNAS
EECWINTPAVLANAS

SEQ ID NO: 257646 - protein, 15 aa, Artificial Sequence
  Description of Artificial Sequence: Synthetic peptide
  Seed: EECLINDPWVLLNAS
EECWINTPAVLINAS

SEQ ID NO: 257647 - protein, 15 aa, Artificial Sequence
  Description of Artificial Sequence: Synthetic peptide
  Seed: EECLINDPWVLLNAS
EECWINTPAVLLNAS

SEQ ID NO: 257648 - protein, 15 aa, Artificial Sequence
  Description of Artificial Sequence: Synthetic peptide
  Seed: EECLINDPWVLLNAS
EECWINTPAVLVNAS

SEQ ID NO: 257649 - protein, 15 aa, Artificial Sequence
  Description of Artificial Sequence: Synthetic peptide
  Seed: EECLINDPWVLLNAS
EECWINTPFVLINAS

SEQ ID NO: 257650 - protein, 15 aa, Artificial Sequence
  Description of Artificial Sequence: Synthetic peptide
  Seed: EECLINDPWVLLNAS
EECWINTPFVLLNAS

SEQ ID NO: 257651 - protein, 15 aa, Artificial Sequence
  Description of Artificial Sequence: Synthetic peptide
  Seed: EECLINDPWVLLNAS
EECWINTPFVLMNAS

SEQ ID NO: 257652 - protein, 15 aa, Artificial Sequence
  Description of Artificial Sequence: Synthetic peptide
  Seed: EECLINDPWVLLNAS
EECWINTPFVLVNAS

SEQ ID NO: 257653 - protein, 15 aa, Artificial Sequence
  Description of Artificial Sequence: Synthetic peptide
  Seed: EECLINDPWVLLNAS
EECWINTPGVLANAS

SEQ ID NO: 257654 - protein, 15 aa, Artificial Sequence
  Description of Artificial Sequence: Synthetic peptide
  Seed: EECLINDPWVLLNAS
EECWINTPGVLLNAS

SEQ ID NO: 257655 - protein, 15 aa, Artificial Sequence
  Description of Artificial Sequence: Synthetic peptide
  Seed: EECLINDPWVLLNAS
EECWINTPGVLVNAS

SEQ ID NO: 257656 - protein, 15 aa, Artificial Sequence
  Description of Artificial Sequence: Synthetic peptide
  Seed: EECLINDPWVLLNAS
EECWINTPSVLANAS

SEQ ID NO: 257657 - protein, 15 aa, Artificial Sequence
  Description of Artificial Sequence: Synthetic peptide
  Seed: EECLINDPWVLLNAS
EECWINTPSVLLNAS

SEQ ID NO: 257658 - protein, 15 aa, Artificial Sequence
  Description of Artificial Sequence: Synthetic peptide
  Seed: EECLINDPWVLLNAS
EECWINTPSVLVNAS

SEQ ID NO: 257659 - protein, 15 aa, Artificial Sequence
  Description of Artificial Sequence: Synthetic peptide
  Seed: EECLINDPWVLLNAS
EECWINVPAVLANAS

SEQ ID NO: 257660 - protein, 15 aa, Artificial Sequence
  Description of Artificial Sequence: Synthetic peptide
  Seed: EECLINDPWVLLNAS
EECWINVPAVLGNAS

SEQ ID NO: 257661 - protein, 15 aa, Artificial Sequence
  Description of Artificial Sequence: Synthetic peptide
  Seed: EECLINDPWVLLNAS
EECWINVPAVLINAS

SEQ ID NO: 257662 - protein, 15 aa, Artificial Sequence
  Description of Artificial Sequence: Synthetic peptide
  Seed: EECLINDPWVLLNAS
EECWINVPAVLLNAS

SEQ ID NO: 257663 - protein, 15 aa, Artificial Sequence
  Description of Artificial Sequence: Synthetic peptide
  Seed: EECLINDPWVLLNAS
EECWINVPAVLMNAS

SEQ ID NO: 257664 - protein, 15 aa, Artificial Sequence
  Description of Artificial Sequence: Synthetic peptide
  Seed: EECLINDPWVLLNAS
EECWINVPAVLSNAS

SEQ ID NO: 257665 - protein, 15 aa, Artificial Sequence
  Description of Artificial Sequence: Synthetic peptide
  Seed: EECLINDPWVLLNAS
EECWINVPAVLTNAS

SEQ ID NO: 257666 - protein, 15 aa, Artificial Sequence
  Description of Artificial Sequence: Synthetic peptide
  Seed: EECLINDPWVLLNAS
EECWINVPAVLVNAS

SEQ ID NO: 257667 - protein, 15 aa, Artificial Sequence
  Description of Artificial Sequence: Synthetic peptide
  Seed: EECLINDPWVLLNAS
EECWINVPFVLLNAS

SEQ ID NO: 257668 - protein, 15 aa, Artificial Sequence
  Description of Artificial Sequence: Synthetic peptide
  Seed: EECLINDPWVLLNAS
EECWINVPFVLVNAS

SEQ ID NO: 257669 - protein, 15 aa, Artificial Sequence
  Description of Artificial Sequence: Synthetic peptide
  Seed: EECLINDPWVLLNAS
EECWINVPGVLANAS

SEQ ID NO: 257670 - protein, 15 aa, Artificial Sequence
  Description of Artificial Sequence: Synthetic peptide
  Seed: EECLINDPWVLLNAS
EECWINVPGVLGNAS

SEQ ID NO: 257671 - protein, 15 aa, Artificial Sequence
  Description of Artificial Sequence: Synthetic peptide
  Seed: EECLINDPWVLLNAS
EECWINVPGVLINAS

SEQ ID NO: 257672 - protein, 15 aa, Artificial Sequence
  Description of Artificial Sequence: Synthetic peptide
  Seed: EECLINDPWVLLNAS
EECWINVPGVLLNAS

SEQ ID NO: 257673 - protein, 15 aa, Artificial Sequence
  Description of Artificial Sequence: Synthetic peptide
  Seed: EECLINDPWVLLNAS
EECWINVPGVLMNAS

SEQ ID NO: 257674 - protein, 15 aa, Artificial Sequence
  Description of Artificial Sequence: Synthetic peptide
  Seed: EECLINDPWVLLNAS
EECWINVPGVLSNAS

SEQ ID NO: 257675 - protein, 15 aa, Artificial Sequence
  Description of Artificial Sequence: Synthetic peptide
  Seed: EECLINDPWVLLNAS
EECWINVPGVLTNAS

SEQ ID NO: 257676 - protein, 15 aa, Artificial Sequence
  Description of Artificial Sequence: Synthetic peptide
  Seed: EECLINDPWVLLNAS
EECWINVPGVLVNAS

SEQ ID NO: 257677 - protein, 15 aa, Artificial Sequence
  Description of Artificial Sequence: Synthetic peptide
  Seed: EECLINDPWVLLNAS
EECWINVPNVLANAS

SEQ ID NO: 257678 - protein, 15 aa, Artificial Sequence
  Description of Artificial Sequence: Synthetic peptide
  Seed: EECLINDPWVLLNAS
EECWINVPNVLINAS

SEQ ID NO: 257679 - protein, 15 aa, Artificial Sequence
  Description of Artificial Sequence: Synthetic peptide
  Seed: EECLINDPWVLLNAS
EECWINVPNVLLNAS

SEQ ID NO: 257680 - protein, 15 aa, Artificial Sequence
  Description of Artificial Sequence: Synthetic peptide
  Seed: EECLINDPWVLLNAS
EECWINVPNVLVNAS

SEQ ID NO: 257681 - protein, 15 aa, Artificial Sequence
  Description of Artificial Sequence: Synthetic peptide
  Seed: EECLINDPWVLLNAS
EECWINVPPVLANAS

SEQ ID NO: 257682 - protein, 15 aa, Artificial Sequence
  Description of Artificial Sequence: Synthetic peptide
  Seed: EECLINDPWVLLNAS
EECWINVPPVLINAS

SEQ ID NO: 257683 - protein, 15 aa, Artificial Sequence
  Description of Artificial Sequence: Synthetic peptide
  Seed: EECLINDPWVLLNAS
EECWINVPPVLLNAS

SEQ ID NO: 257684 - protein, 15 aa, Artificial Sequence
  Description of Artificial Sequence: Synthetic peptide
  Seed: EECLINDPWVLLNAS
EECWINVPPVLMNAS

SEQ ID NO: 257685 - protein, 15 aa, Artificial Sequence
  Description of Artificial Sequence: Synthetic peptide
  Seed: EECLINDPWVLLNAS
EECWINVPPVLSNAS

SEQ ID NO: 257686 - protein, 15 aa, Artificial Sequence
  Description of Artificial Sequence: Synthetic peptide
  Seed: EECLINDPWVLLNAS
EECWINVPPVLTNAS

SEQ ID NO: 257687 - protein, 15 aa, Artificial Sequence
  Description of Artificial Sequence: Synthetic peptide
  Seed: EECLINDPWVLLNAS
EECWINVPPVLVNAS

SEQ ID NO: 257688 - protein, 15 aa, Artificial Sequence
  Description of Artificial Sequence: Synthetic peptide
  Seed: EECLINDPWVLLNAS
EECWINVPSVLANAS

SEQ ID NO: 257689 - protein, 15 aa, Artificial Sequence
  Description of Artificial Sequence: Synthetic peptide
  Seed: EECLINDPWVLLNAS
EECWINVPSVLGNAS

SEQ ID NO: 257690 - protein, 15 aa, Artificial Sequence
  Description of Artificial Sequence: Synthetic peptide
  Seed: EECLINDPWVLLNAS
EECWINVPSVLINAS

SEQ ID NO: 257691 - protein, 15 aa, Artificial Sequence
  Description of Artificial Sequence: Synthetic peptide
  Seed: EECLINDPWVLLNAS
EECWINVPSVLLNAS

SEQ ID NO: 257692 - protein, 15 aa, Artificial Sequence
  Description of Artificial Sequence: Synthetic peptide
  Seed: EECLINDPWVLLNAS
EECWINVPSVLMNAS

SEQ ID NO: 257693 - protein, 15 aa, Artificial Sequence
  Description of Artificial Sequence: Synthetic peptide
  Seed: EECLINDPWVLLNAS
EECWINVPSVLSNAS

SEQ ID NO: 257694 - protein, 15 aa, Artificial Sequence
  Description of Artificial Sequence: Synthetic peptide
  Seed: EECLINDPWVLLNAS
EECWINVPSVLTNAS

SEQ ID NO: 257695 - protein, 15 aa, Artificial Sequence
  Description of Artificial Sequence: Synthetic peptide
  Seed: EECLINDPWVLLNAS
EECWINVPSVLVNAS

SEQ ID NO: 257696 - protein, 15 aa, Artificial Sequence
  Description of Artificial Sequence: Synthetic peptide
  Seed: EECLINDPWVLLNAS
EECWINVPTVLANAS

SEQ ID NO: 257697 - protein, 15 aa, Artificial Sequence
  Description of Artificial Sequence: Synthetic peptide
  Seed: EECLINDPWVLLNAS
EECWINVPTVLINAS

SEQ ID NO: 257698 - protein, 15 aa, Artificial Sequence
  Description of Artificial Sequence: Synthetic peptide
  Seed: EECLINDPWVLLNAS
EECWINVPTVLLNAS

SEQ ID NO: 257699 - protein, 15 aa, Artificial Sequence
  Description of Artificial Sequence: Synthetic peptide
  Seed: EECLINDPWVLLNAS
EECWINVPTVLTNAS

SEQ ID NO: 257700 - protein, 15 aa, Artificial Sequence
  Description of Artificial Sequence: Synthetic peptide
  Seed: EECLINDPWVLLNAS
EECWINVPTVLVNAS

SEQ ID NO: 257701 - protein, 15 aa, Artificial Sequence
  Description of Artificial Sequence: Synthetic peptide
  Seed: EECLINDPWVLLNAS
EECYINAPAVLANAS

SEQ ID NO: 257702 - protein, 15 aa, Artificial Sequence
  Description of Artificial Sequence: Synthetic peptide
  Seed: EECLINDPWVLLNAS
EECYINAPAVLCNAS

SEQ ID NO: 257703 - protein, 15 aa, Artificial Sequence
  Description of Artificial Sequence: Synthetic peptide
  Seed: EECLINDPWVLLNAS
EECYINAPAVLFNAS

SEQ ID NO: 257704 - protein, 15 aa, Artificial Sequence
  Description of Artificial Sequence: Synthetic peptide
  Seed: EECLINDPWVLLNAS
EECYINAPAVLGNAS

SEQ ID NO: 257705 - protein, 15 aa, Artificial Sequence
  Description of Artificial Sequence: Synthetic peptide
  Seed: EECLINDPWVLLNAS
EECYINAPAVLHNAS

SEQ ID NO: 257706 - protein, 15 aa, Artificial Sequence
  Description of Artificial Sequence: Synthetic peptide
  Seed: EECLINDPWVLLNAS
EECYINAPAVLINAS

SEQ ID NO: 257707 - protein, 15 aa, Artificial Sequence
  Description of Artificial Sequence: Synthetic peptide
  Seed: EECLINDPWVLLNAS
EECYINAPAVLKNAS

SEQ ID NO: 257708 - protein, 15 aa, Artificial Sequence
  Description of Artificial Sequence: Synthetic peptide
  Seed: EECLINDPWVLLNAS
EECYINAPAVLLNAS

SEQ ID NO: 257709 - protein, 15 aa, Artificial Sequence
  Description of Artificial Sequence: Synthetic peptide
  Seed: EECLINDPWVLLNAS
EECYINAPAVLMNAS

SEQ ID NO: 257710 - protein, 15 aa, Artificial Sequence
  Description of Artificial Sequence: Synthetic peptide
  Seed: EECLINDPWVLLNAS
EECYINAPAVLNNAS

SEQ ID NO: 257711 - protein, 15 aa, Artificial Sequence
  Description of Artificial Sequence: Synthetic peptide
  Seed: EECLINDPWVLLNAS
EECYINAPAVLPNAS

SEQ ID NO: 257712 - protein, 15 aa, Artificial Sequence
  Description of Artificial Sequence: Synthetic peptide
  Seed: EECLINDPWVLLNAS
EECYINAPAVLQNAS

SEQ ID NO: 257713 - protein, 15 aa, Artificial Sequence
  Description of Artificial Sequence: Synthetic peptide
  Seed: EECLINDPWVLLNAS
EECYINAPAVLRNAS

SEQ ID NO: 257714 - protein, 15 aa, Artificial Sequence
  Description of Artificial Sequence: Synthetic peptide
  Seed: EECLINDPWVLLNAS
EECYINAPAVLSNAS

SEQ ID NO: 257715 - protein, 15 aa, Artificial Sequence
  Description of Artificial Sequence: Synthetic peptide
  Seed: EECLINDPWVLLNAS
EECYINAPAVLTNAS

SEQ ID NO: 257716 - protein, 15 aa, Artificial Sequence
  Description of Artificial Sequence: Synthetic peptide
  Seed: EECLINDPWVLLNAS
EECYINAPAVLVNAS

SEQ ID NO: 257717 - protein, 15 aa, Artificial Sequence
  Description of Artificial Sequence: Synthetic peptide
  Seed: EECLINDPWVLLNAS
EECYINAPAVLWNAS

SEQ ID NO: 257718 - protein, 15 aa, Artificial Sequence
  Description of Artificial Sequence: Synthetic peptide
  Seed: EECLINDPWVLLNAS
EECYINAPAVLYNAS

SEQ ID NO: 257719 - protein, 15 aa, Artificial Sequence
  Description of Artificial Sequence: Synthetic peptide
  Seed: EECLINDPWVLLNAS
EECYINAPFVLFNAS

SEQ ID NO: 257720 - protein, 15 aa, Artificial Sequence
  Description of Artificial Sequence: Synthetic peptide
  Seed: EECLINDPWVLLNAS
EECYINAPFVLINAS

SEQ ID NO: 257721 - protein, 15 aa, Artificial Sequence
  Description of Artificial Sequence: Synthetic peptide
  Seed: EECLINDPWVLLNAS
EECYINAPFVLLNAS

SEQ ID NO: 257722 - protein, 15 aa, Artificial Sequence
  Description of Artificial Sequence: Synthetic peptide
  Seed: EECLINDPWVLLNAS
EECYINAPFVLMNAS

SEQ ID NO: 257723 - protein, 15 aa, Artificial Sequence
  Description of Artificial Sequence: Synthetic peptide
  Seed: EECLINDPWVLLNAS
EECYINAPFVLVNAS

SEQ ID NO: 257724 - protein, 15 aa, Artificial Sequence
  Description of Artificial Sequence: Synthetic peptide
  Seed: EECLINDPWVLLNAS
EECYINAPGVLANAS

SEQ ID NO: 257725 - protein, 15 aa, Artificial Sequence
  Description of Artificial Sequence: Synthetic peptide
  Seed: EECLINDPWVLLNAS
EECYINAPGVLCNAS

SEQ ID NO: 257726 - protein, 15 aa, Artificial Sequence
  Description of Artificial Sequence: Synthetic peptide
  Seed: EECLINDPWVLLNAS
EECYINAPGVLFNAS

SEQ ID NO: 257727 - protein, 15 aa, Artificial Sequence
  Description of Artificial Sequence: Synthetic peptide
  Seed: EECLINDPWVLLNAS
EECYINAPGVLGNAS

SEQ ID NO: 257728 - protein, 15 aa, Artificial Sequence
  Description of Artificial Sequence: Synthetic peptide
  Seed: EECLINDPWVLLNAS
EECYINAPGVLHNAS

SEQ ID NO: 257729 - protein, 15 aa, Artificial Sequence
  Description of Artificial Sequence: Synthetic peptide
  Seed: EECLINDPWVLLNAS
EECYINAPGVLINAS

SEQ ID NO: 257730 - protein, 15 aa, Artificial Sequence
  Description of Artificial Sequence: Synthetic peptide
  Seed: EECLINDPWVLLNAS
EECYINAPGVLLNAS

SEQ ID NO: 257731 - protein, 15 aa, Artificial Sequence
  Description of Artificial Sequence: Synthetic peptide
  Seed: EECLINDPWVLLNAS
EECYINAPGVLMNAS

SEQ ID NO: 257732 - protein, 15 aa, Artificial Sequence
  Description of Artificial Sequence: Synthetic peptide
  Seed: EECLINDPWVLLNAS
EECYINAPGVLNNAS

SEQ ID NO: 257733 - protein, 15 aa, Artificial Sequence
  Description of Artificial Sequence: Synthetic peptide
  Seed: EECLINDPWVLLNAS
EECYINAPGVLPNAS

SEQ ID NO: 257734 - protein, 15 aa, Artificial Sequence
  Description of Artificial Sequence: Synthetic peptide
  Seed: EECLINDPWVLLNAS
EECYINAPGVLQNAS

SEQ ID NO: 257735 - protein, 15 aa, Artificial Sequence
  Description of Artificial Sequence: Synthetic peptide
  Seed: EECLINDPWVLLNAS
EECYINAPGVLSNAS

SEQ ID NO: 257736 - protein, 15 aa, Artificial Sequence
  Description of Artificial Sequence: Synthetic peptide
  Seed: EECLINDPWVLLNAS
EECYINAPGVLTNAS

SEQ ID NO: 257737 - protein, 15 aa, Artificial Sequence
  Description of Artificial Sequence: Synthetic peptide
  Seed: EECLINDPWVLLNAS
EECYINAPGVLVNAS

SEQ ID NO: 257738 - protein, 15 aa, Artificial Sequence
  Description of Artificial Sequence: Synthetic peptide
  Seed: EECLINDPWVLLNAS
EECYINAPHVLLNAS

SEQ ID NO: 257739 - protein, 15 aa, Artificial Sequence
  Description of Artificial Sequence: Synthetic peptide
  Seed: EECLINDPWVLLNAS
EECYINAPIVLANAS

SEQ ID NO: 257740 - protein, 15 aa, Artificial Sequence
  Description of Artificial Sequence: Synthetic peptide
  Seed: EECLINDPWVLLNAS
EECYINAPIVLINAS

SEQ ID NO: 257741 - protein, 15 aa, Artificial Sequence
  Description of Artificial Sequence: Synthetic peptide
  Seed: EECLINDPWVLLNAS
EECYINAPIVLLNAS

SEQ ID NO: 257742 - protein, 15 aa, Artificial Sequence
  Description of Artificial Sequence: Synthetic peptide
  Seed: EECLINDPWVLLNAS
EECYINAPIVLMNAS

SEQ ID NO: 257743 - protein, 15 aa, Artificial Sequence
  Description of Artificial Sequence: Synthetic peptide
  Seed: EECLINDPWVLLNAS
EECYINAPIVLSNAS

SEQ ID NO: 257744 - protein, 15 aa, Artificial Sequence
  Description of Artificial Sequence: Synthetic peptide
  Seed: EECLINDPWVLLNAS
EECYINAPIVLTNAS

SEQ ID NO: 257745 - protein, 15 aa, Artificial Sequence
  Description of Artificial Sequence: Synthetic peptide
  Seed: EECLINDPWVLLNAS
EECYINAPIVLVNAS

SEQ ID NO: 257746 - protein, 15 aa, Artificial Sequence
  Description of Artificial Sequence: Synthetic peptide
  Seed: EECLINDPWVLLNAS
EECYINAPMVLANAS

SEQ ID NO: 257747 - protein, 15 aa, Artificial Sequence
  Description of Artificial Sequence: Synthetic peptide
  Seed: EECLINDPWVLLNAS
EECYINAPMVLLNAS

SEQ ID NO: 257748 - protein, 15 aa, Artificial Sequence
  Description of Artificial Sequence: Synthetic peptide
  Seed: EECLINDPWVLLNAS
EECYINAPMVLVNAS

SEQ ID NO: 257749 - protein, 15 aa, Artificial Sequence
  Description of Artificial Sequence: Synthetic peptide
  Seed: EECLINDPWVLLNAS
EECYINAPNVLANAS

SEQ ID NO: 257750 - protein, 15 aa, Artificial Sequence
  Description of Artificial Sequence: Synthetic peptide
  Seed: EECLINDPWVLLNAS
EECYINAPNVLGNAS

SEQ ID NO: 257751 - protein, 15 aa, Artificial Sequence
  Description of Artificial Sequence: Synthetic peptide
  Seed: EECLINDPWVLLNAS
EECYINAPNVLINAS

SEQ ID NO: 257752 - protein, 15 aa, Artificial Sequence
  Description of Artificial Sequence: Synthetic peptide
  Seed: EECLINDPWVLLNAS
EECYINAPNVLLNAS

SEQ ID NO: 257753 - protein, 15 aa, Artificial Sequence
  Description of Artificial Sequence: Synthetic peptide
  Seed: EECLINDPWVLLNAS
EECYINAPNVLMNAS

SEQ ID NO: 257754 - protein, 15 aa, Artificial Sequence
  Description of Artificial Sequence: Synthetic peptide
  Seed: EECLINDPWVLLNAS
EECYINAPNVLSNAS

SEQ ID NO: 257755 - protein, 15 aa, Artificial Sequence
  Description of Artificial Sequence: Synthetic peptide
  Seed: EECLINDPWVLLNAS
EECYINAPNVLTNAS

SEQ ID NO: 257756 - protein, 15 aa, Artificial Sequence
  Description of Artificial Sequence: Synthetic peptide
  Seed: EECLINDPWVLLNAS
EECYINAPNVLVNAS

SEQ ID NO: 257757 - protein, 15 aa, Artificial Sequence
  Description of Artificial Sequence: Synthetic peptide
  Seed: EECLINDPWVLLNAS
EECYINAPPVLANAS

SEQ ID NO: 257758 - protein, 15 aa, Artificial Sequence
  Description of Artificial Sequence: Synthetic peptide
  Seed: EECLINDPWVLLNAS
EECYINAPPVLFNAS

SEQ ID NO: 257759 - protein, 15 aa, Artificial Sequence
  Description of Artificial Sequence: Synthetic peptide
  Seed: EECLINDPWVLLNAS
EECYINAPPVLGNAS

SEQ ID NO: 257760 - protein, 15 aa, Artificial Sequence
  Description of Artificial Sequence: Synthetic peptide
  Seed: EECLINDPWVLLNAS
EECYINAPPVLINAS

SEQ ID NO: 257761 - protein, 15 aa, Artificial Sequence
  Description of Artificial Sequence: Synthetic peptide
  Seed: EECLINDPWVLLNAS
EECYINAPPVLLNAS

SEQ ID NO: 257762 - protein, 15 aa, Artificial Sequence
  Description of Artificial Sequence: Synthetic peptide
  Seed: EECLINDPWVLLNAS
EECYINAPPVLMNAS

SEQ ID NO: 257763 - protein, 15 aa, Artificial Sequence
  Description of Artificial Sequence: Synthetic peptide
  Seed: EECLINDPWVLLNAS
EECYINAPPVLNNAS

SEQ ID NO: 257764 - protein, 15 aa, Artificial Sequence
  Description of Artificial Sequence: Synthetic peptide
  Seed: EECLINDPWVLLNAS
EECYINAPPVLSNAS

SEQ ID NO: 257765 - protein, 15 aa, Artificial Sequence
  Description of Artificial Sequence: Synthetic peptide
  Seed: EECLINDPWVLLNAS
EECYINAPPVLTNAS

SEQ ID NO: 257766 - protein, 15 aa, Artificial Sequence
  Description of Artificial Sequence: Synthetic peptide
  Seed: EECLINDPWVLLNAS
EECYINAPPVLVNAS

SEQ ID NO: 257767 - protein, 15 aa, Artificial Sequence
  Description of Artificial Sequence: Synthetic peptide
  Seed: EECLINDPWVLLNAS
EECYINAPQVLLNAS

SEQ ID NO: 257768 - protein, 15 aa, Artificial Sequence
  Description of Artificial Sequence: Synthetic peptide
  Seed: EECLINDPWVLLNAS
EECYINAPQVLVNAS

SEQ ID NO: 257769 - protein, 15 aa, Artificial Sequence
  Description of Artificial Sequence: Synthetic peptide
  Seed: EECLINDPWVLLNAS
EECYINAPSVLANAS

SEQ ID NO: 257770 - protein, 15 aa, Artificial Sequence
  Description of Artificial Sequence: Synthetic peptide
  Seed: EECLINDPWVLLNAS
EECYINAPSVLCNAS

SEQ ID NO: 257771 - protein, 15 aa, Artificial Sequence
  Description of Artificial Sequence: Synthetic peptide
  Seed: EECLINDPWVLLNAS
EECYINAPSVLFNAS

SEQ ID NO: 257772 - protein, 15 aa, Artificial Sequence
  Description of Artificial Sequence: Synthetic peptide
  Seed: EECLINDPWVLLNAS
EECYINAPSVLGNAS

SEQ ID NO: 257773 - protein, 15 aa, Artificial Sequence
  Description of Artificial Sequence: Synthetic peptide
  Seed: EECLINDPWVLLNAS
EECYINAPSVLHNAS

SEQ ID NO: 257774 - protein, 15 aa, Artificial Sequence
  Description of Artificial Sequence: Synthetic peptide
  Seed: EECLINDPWVLLNAS
EECYINAPSVLINAS

SEQ ID NO: 257775 - protein, 15 aa, Artificial Sequence
  Description of Artificial Sequence: Synthetic peptide
  Seed: EECLINDPWVLLNAS
EECYINAPSVLLNAS

SEQ ID NO: 257776 - protein, 15 aa, Artificial Sequence
  Description of Artificial Sequence: Synthetic peptide
  Seed: EECLINDPWVLLNAS
EECYINAPSVLMNAS

SEQ ID NO: 257777 - protein, 15 aa, Artificial Sequence
  Description of Artificial Sequence: Synthetic peptide
  Seed: EECLINDPWVLLNAS
EECYINAPSVLNNAS

SEQ ID NO: 257778 - protein, 15 aa, Artificial Sequence
  Description of Artificial Sequence: Synthetic peptide
  Seed: EECLINDPWVLLNAS
EECYINAPSVLPNAS

SEQ ID NO: 257779 - protein, 15 aa, Artificial Sequence
  Description of Artificial Sequence: Synthetic peptide
  Seed: EECLINDPWVLLNAS
EECYINAPSVLQNAS

SEQ ID NO: 257780 - protein, 15 aa, Artificial Sequence
  Description of Artificial Sequence: Synthetic peptide
  Seed: EECLINDPWVLLNAS
EECYINAPSVLSNAS

SEQ ID NO: 257781 - protein, 15 aa, Artificial Sequence
  Description of Artificial Sequence: Synthetic peptide
  Seed: EECLINDPWVLLNAS
EECYINAPSVLTNAS

SEQ ID NO: 257782 - protein, 15 aa, Artificial Sequence
  Description of Artificial Sequence: Synthetic peptide
  Seed: EECLINDPWVLLNAS
EECYINAPSVLVNAS

SEQ ID NO: 257783 - protein, 15 aa, Artificial Sequence
  Description of Artificial Sequence: Synthetic peptide
  Seed: EECLINDPWVLLNAS
EECYINAPSVLYNAS

SEQ ID NO: 257784 - protein, 15 aa, Artificial Sequence
  Description of Artificial Sequence: Synthetic peptide
  Seed: EECLINDPWVLLNAS
EECYINAPTVLANAS

SEQ ID NO: 257785 - protein, 15 aa, Artificial Sequence
  Description of Artificial Sequence: Synthetic peptide
  Seed: EECLINDPWVLLNAS
EECYINAPTVLGNAS

SEQ ID NO: 257786 - protein, 15 aa, Artificial Sequence
  Description of Artificial Sequence: Synthetic peptide
  Seed: EECLINDPWVLLNAS
EECYINAPTVLINAS

SEQ ID NO: 257787 - protein, 15 aa, Artificial Sequence
  Description of Artificial Sequence: Synthetic peptide
  Seed: EECLINDPWVLLNAS
EECYINAPTVLLNAS

SEQ ID NO: 257788 - protein, 15 aa, Artificial Sequence
  Description of Artificial Sequence: Synthetic peptide
  Seed: EECLINDPWVLLNAS
EECYINAPTVLMNAS

SEQ ID NO: 257789 - protein, 15 aa, Artificial Sequence
  Description of Artificial Sequence: Synthetic peptide
  Seed: EECLINDPWVLLNAS
EECYINAPTVLSNAS

SEQ ID NO: 257790 - protein, 15 aa, Artificial Sequence
  Description of Artificial Sequence: Synthetic peptide
  Seed: EECLINDPWVLLNAS
EECYINAPTVLTNAS

SEQ ID NO: 257791 - protein, 15 aa, Artificial Sequence
  Description of Artificial Sequence: Synthetic peptide
  Seed: EECLINDPWVLLNAS
EECYINAPTVLVNAS

SEQ ID NO: 257792 - protein, 15 aa, Artificial Sequence
  Description of Artificial Sequence: Synthetic peptide
  Seed: EECLINDPWVLLNAS
EECYINAPVVLANAS

SEQ ID NO: 257793 - protein, 15 aa, Artificial Sequence
  Description of Artificial Sequence: Synthetic peptide
  Seed: EECLINDPWVLLNAS
EECYINAPVVLGNAS

SEQ ID NO: 257794 - protein, 15 aa, Artificial Sequence
  Description of Artificial Sequence: Synthetic peptide
  Seed: EECLINDPWVLLNAS
EECYINAPVVLINAS

SEQ ID NO: 257795 - protein, 15 aa, Artificial Sequence
  Description of Artificial Sequence: Synthetic peptide
  Seed: EECLINDPWVLLNAS
EECYINAPVVLLNAS

SEQ ID NO: 257796 - protein, 15 aa, Artificial Sequence
  Description of Artificial Sequence: Synthetic peptide
  Seed: EECLINDPWVLLNAS
EECYINAPVVLMNAS

SEQ ID NO: 257797 - protein, 15 aa, Artificial Sequence
  Description of Artificial Sequence: Synthetic peptide
  Seed: EECLINDPWVLLNAS
EECYINAPVVLSNAS

SEQ ID NO: 257798 - protein, 15 aa, Artificial Sequence
  Description of Artificial Sequence: Synthetic peptide
  Seed: EECLINDPWVLLNAS
EECYINAPVVLTNAS

SEQ ID NO: 257799 - protein, 15 aa, Artificial Sequence
  Description of Artificial Sequence: Synthetic peptide
  Seed: EECLINDPWVLLNAS
EECYINAPVVLVNAS

SEQ ID NO: 257800 - protein, 15 aa, Artificial Sequence
  Description of Artificial Sequence: Synthetic peptide
  Seed: EECLINDPWVLLNAS
EECYINCPAVLANAS

SEQ ID NO: 257801 - protein, 15 aa, Artificial Sequence
  Description of Artificial Sequence: Synthetic peptide
  Seed: EECLINDPWVLLNAS
EECYINCPAVLINAS

SEQ ID NO: 257802 - protein, 15 aa, Artificial Sequence
  Description of Artificial Sequence: Synthetic peptide
  Seed: EECLINDPWVLLNAS
EECYINCPAVLLNAS

SEQ ID NO: 257803 - protein, 15 aa, Artificial Sequence
  Description of Artificial Sequence: Synthetic peptide
  Seed: EECLINDPWVLLNAS
EECYINCPAVLMNAS

SEQ ID NO: 257804 - protein, 15 aa, Artificial Sequence
  Description of Artificial Sequence: Synthetic peptide
  Seed: EECLINDPWVLLNAS
EECYINCPAVLVNAS

SEQ ID NO: 257805 - protein, 15 aa, Artificial Sequence
  Description of Artificial Sequence: Synthetic peptide
  Seed: EECLINDPWVLLNAS
EECYINCPGVLANAS

SEQ ID NO: 257806 - protein, 15 aa, Artificial Sequence
  Description of Artificial Sequence: Synthetic peptide
  Seed: EECLINDPWVLLNAS
EECYINCPGVLINAS

SEQ ID NO: 257807 - protein, 15 aa, Artificial Sequence
  Description of Artificial Sequence: Synthetic peptide
  Seed: EECLINDPWVLLNAS
EECYINCPGVLLNAS

SEQ ID NO: 257808 - protein, 15 aa, Artificial Sequence
  Description of Artificial Sequence: Synthetic peptide
  Seed: EECLINDPWVLLNAS
EECYINCPGVLVNAS

SEQ ID NO: 257809 - protein, 15 aa, Artificial Sequence
  Description of Artificial Sequence: Synthetic peptide
  Seed: EECLINDPWVLLNAS
EECYINCPSVLANAS

SEQ ID NO: 257810 - protein, 15 aa, Artificial Sequence
  Description of Artificial Sequence: Synthetic peptide
  Seed: EECLINDPWVLLNAS
EECYINCPSVLINAS

SEQ ID NO: 257811 - protein, 15 aa, Artificial Sequence
  Description of Artificial Sequence: Synthetic peptide
  Seed: EECLINDPWVLLNAS
EECYINCPSVLLNAS

SEQ ID NO: 257812 - protein, 15 aa, Artificial Sequence
  Description of Artificial Sequence: Synthetic peptide
  Seed: EECLINDPWVLLNAS
EECYINCPSVLVNAS

SEQ ID NO: 257813 - protein, 15 aa, Artificial Sequence
  Description of Artificial Sequence: Synthetic peptide
  Seed: EECLINDPWVLLNAS
EECYINEPAVLANAS

SEQ ID NO: 257814 - protein, 15 aa, Artificial Sequence
  Description of Artificial Sequence: Synthetic peptide
  Seed: EECLINDPWVLLNAS
EECYINEPAVLGNAS

SEQ ID NO: 257815 - protein, 15 aa, Artificial Sequence
  Description of Artificial Sequence: Synthetic peptide
  Seed: EECLINDPWVLLNAS
EECYINEPAVLINAS

SEQ ID NO: 257816 - protein, 15 aa, Artificial Sequence
  Description of Artificial Sequence: Synthetic peptide
  Seed: EECLINDPWVLLNAS
EECYINEPAVLLNAS

SEQ ID NO: 257817 - protein, 15 aa, Artificial Sequence
  Description of Artificial Sequence: Synthetic peptide
  Seed: EECLINDPWVLLNAS
EECYINEPAVLMNAS

SEQ ID NO: 257818 - protein, 15 aa, Artificial Sequence
  Description of Artificial Sequence: Synthetic peptide
  Seed: EECLINDPWVLLNAS
EECYINEPAVLSNAS

SEQ ID NO: 257819 - protein, 15 aa, Artificial Sequence
  Description of Artificial Sequence: Synthetic peptide
  Seed: EECLINDPWVLLNAS
EECYINEPAVLTNAS

SEQ ID NO: 257820 - protein, 15 aa, Artificial Sequence
  Description of Artificial Sequence: Synthetic peptide
  Seed: EECLINDPWVLLNAS
EECYINEPAVLVNAS

SEQ ID NO: 257821 - protein, 15 aa, Artificial Sequence
  Description of Artificial Sequence: Synthetic peptide
  Seed: EECLINDPWVLLNAS
EECYINEPFVLFNAS

SEQ ID NO: 257822 - protein, 15 aa, Artificial Sequence
  Description of Artificial Sequence: Synthetic peptide
  Seed: EECLINDPWVLLNAS
EECYINEPFVLINAS

SEQ ID NO: 257823 - protein, 15 aa, Artificial Sequence
  Description of Artificial Sequence: Synthetic peptide
  Seed: EECLINDPWVLLNAS
EECYINEPFVLLNAS

SEQ ID NO: 257824 - protein, 15 aa, Artificial Sequence
  Description of Artificial Sequence: Synthetic peptide
  Seed: EECLINDPWVLLNAS
EECYINEPFVLVNAS

SEQ ID NO: 257825 - protein, 15 aa, Artificial Sequence
  Description of Artificial Sequence: Synthetic peptide
  Seed: EECLINDPWVLLNAS
EECYINEPGVLANAS

SEQ ID NO: 257826 - protein, 15 aa, Artificial Sequence
  Description of Artificial Sequence: Synthetic peptide
  Seed: EECLINDPWVLLNAS
EECYINEPGVLINAS

SEQ ID NO: 257827 - protein, 15 aa, Artificial Sequence
  Description of Artificial Sequence: Synthetic peptide
  Seed: EECLINDPWVLLNAS
EECYINEPGVLLNAS

SEQ ID NO: 257828 - protein, 15 aa, Artificial Sequence
  Description of Artificial Sequence: Synthetic peptide
  Seed: EECLINDPWVLLNAS
EECYINEPGVLMNAS

SEQ ID NO: 257829 - protein, 15 aa, Artificial Sequence
  Description of Artificial Sequence: Synthetic peptide
  Seed: EECLINDPWVLLNAS
EECYINEPGVLSNAS

SEQ ID NO: 257830 - protein, 15 aa, Artificial Sequence
  Description of Artificial Sequence: Synthetic peptide
  Seed: EECLINDPWVLLNAS
EECYINEPGVLTNAS

SEQ ID NO: 257831 - protein, 15 aa, Artificial Sequence
  Description of Artificial Sequence: Synthetic peptide
  Seed: EECLINDPWVLLNAS
EECYINEPGVLVNAS

SEQ ID NO: 257832 - protein, 15 aa, Artificial Sequence
  Description of Artificial Sequence: Synthetic peptide
  Seed: EECLINDPWVLLNAS
EECYINEPNVLANAS

SEQ ID NO: 257833 - protein, 15 aa, Artificial Sequence
  Description of Artificial Sequence: Synthetic peptide
  Seed: EECLINDPWVLLNAS
EECYINEPNVLLNAS

SEQ ID NO: 257834 - protein, 15 aa, Artificial Sequence
  Description of Artificial Sequence: Synthetic peptide
  Seed: EECLINDPWVLLNAS
EECYINEPNVLVNAS

SEQ ID NO: 257835 - protein, 15 aa, Artificial Sequence
  Description of Artificial Sequence: Synthetic peptide
  Seed: EECLINDPWVLLNAS
EECYINEPPVLANAS

SEQ ID NO: 257836 - protein, 15 aa, Artificial Sequence
  Description of Artificial Sequence: Synthetic peptide
  Seed: EECLINDPWVLLNAS
EECYINEPPVLINAS

SEQ ID NO: 257837 - protein, 15 aa, Artificial Sequence
  Description of Artificial Sequence: Synthetic peptide
  Seed: EECLINDPWVLLNAS
EECYINEPPVLLNAS

SEQ ID NO: 257838 - protein, 15 aa, Artificial Sequence
  Description of Artificial Sequence: Synthetic peptide
  Seed: EECLINDPWVLLNAS
EECYINEPPVLVNAS

SEQ ID NO: 257839 - protein, 15 aa, Artificial Sequence
  Description of Artificial Sequence: Synthetic peptide
  Seed: EECLINDPWVLLNAS
EECYINEPSVLANAS

SEQ ID NO: 257840 - protein, 15 aa, Artificial Sequence
  Description of Artificial Sequence: Synthetic peptide
  Seed: EECLINDPWVLLNAS
EECYINEPSVLINAS

SEQ ID NO: 257841 - protein, 15 aa, Artificial Sequence
  Description of Artificial Sequence: Synthetic peptide
  Seed: EECLINDPWVLLNAS
EECYINEPSVLLNAS

SEQ ID NO: 257842 - protein, 15 aa, Artificial Sequence
  Description of Artificial Sequence: Synthetic peptide
  Seed: EECLINDPWVLLNAS
EECYINEPSVLMNAS

SEQ ID NO: 257843 - protein, 15 aa, Artificial Sequence
  Description of Artificial Sequence: Synthetic peptide
  Seed: EECLINDPWVLLNAS
EECYINEPSVLSNAS

SEQ ID NO: 257844 - protein, 15 aa, Artificial Sequence
  Description of Artificial Sequence: Synthetic peptide
  Seed: EECLINDPWVLLNAS
EECYINEPSVLTNAS

SEQ ID NO: 257845 - protein, 15 aa, Artificial Sequence
  Description of Artificial Sequence: Synthetic peptide
  Seed: EECLINDPWVLLNAS
EECYINEPSVLVNAS

SEQ ID NO: 257846 - protein, 15 aa, Artificial Sequence
  Description of Artificial Sequence: Synthetic peptide
  Seed: EECLINDPWVLLNAS
EECYINEPTVLANAS

SEQ ID NO: 257847 - protein, 15 aa, Artificial Sequence
  Description of Artificial Sequence: Synthetic peptide
  Seed: EECLINDPWVLLNAS
EECYINEPTVLINAS

SEQ ID NO: 257848 - protein, 15 aa, Artificial Sequence
  Description of Artificial Sequence: Synthetic peptide
  Seed: EECLINDPWVLLNAS
EECYINEPTVLLNAS

SEQ ID NO: 257849 - protein, 15 aa, Artificial Sequence
  Description of Artificial Sequence: Synthetic peptide
  Seed: EECLINDPWVLLNAS
EECYINEPTVLVNAS

SEQ ID NO: 257850 - protein, 15 aa, Artificial Sequence
  Description of Artificial Sequence: Synthetic peptide
  Seed: EECLINDPWVLLNAS
EECYINFPAVLANAS

SEQ ID NO: 257851 - protein, 15 aa, Artificial Sequence
  Description of Artificial Sequence: Synthetic peptide
  Seed: EECLINDPWVLLNAS
EECYINFPAVLGNAS

SEQ ID NO: 257852 - protein, 15 aa, Artificial Sequence
  Description of Artificial Sequence: Synthetic peptide
  Seed: EECLINDPWVLLNAS
EECYINFPAVLINAS

SEQ ID NO: 257853 - protein, 15 aa, Artificial Sequence
  Description of Artificial Sequence: Synthetic peptide
  Seed: EECLINDPWVLLNAS
EECYINFPAVLLNAS

SEQ ID NO: 257854 - protein, 15 aa, Artificial Sequence
  Description of Artificial Sequence: Synthetic peptide
  Seed: EECLINDPWVLLNAS
EECYINFPAVLMNAS

SEQ ID NO: 257855 - protein, 15 aa, Artificial Sequence
  Description of Artificial Sequence: Synthetic peptide
  Seed: EECLINDPWVLLNAS
EECYINFPAVLSNAS

SEQ ID NO: 257856 - protein, 15 aa, Artificial Sequence
  Description of Artificial Sequence: Synthetic peptide
  Seed: EECLINDPWVLLNAS
EECYINFPAVLTNAS

SEQ ID NO: 257857 - protein, 15 aa, Artificial Sequence
  Description of Artificial Sequence: Synthetic peptide
  Seed: EECLINDPWVLLNAS
EECYINFPAVLVNAS

SEQ ID NO: 257858 - protein, 15 aa, Artificial Sequence
  Description of Artificial Sequence: Synthetic peptide
  Seed: EECLINDPWVLLNAS
EECYINFPFVLFNAS

SEQ ID NO: 257859 - protein, 15 aa, Artificial Sequence
  Description of Artificial Sequence: Synthetic peptide
  Seed: EECLINDPWVLLNAS
EECYINFPFVLINAS

SEQ ID NO: 257860 - protein, 15 aa, Artificial Sequence
  Description of Artificial Sequence: Synthetic peptide
  Seed: EECLINDPWVLLNAS
EECYINFPFVLLNAS

SEQ ID NO: 257861 - protein, 15 aa, Artificial Sequence
  Description of Artificial Sequence: Synthetic peptide
  Seed: EECLINDPWVLLNAS
EECYINFPFVLMNAS

SEQ ID NO: 257862 - protein, 15 aa, Artificial Sequence
  Description of Artificial Sequence: Synthetic peptide
  Seed: EECLINDPWVLLNAS
EECYINFPFVLVNAS

SEQ ID NO: 257863 - protein, 15 aa, Artificial Sequence
  Description of Artificial Sequence: Synthetic peptide
  Seed: EECLINDPWVLLNAS
EECYINFPGVLANAS

SEQ ID NO: 257864 - protein, 15 aa, Artificial Sequence
  Description of Artificial Sequence: Synthetic peptide
  Seed: EECLINDPWVLLNAS
EECYINFPGVLGNAS

SEQ ID NO: 257865 - protein, 15 aa, Artificial Sequence
  Description of Artificial Sequence: Synthetic peptide
  Seed: EECLINDPWVLLNAS
EECYINFPGVLINAS

SEQ ID NO: 257866 - protein, 15 aa, Artificial Sequence
  Description of Artificial Sequence: Synthetic peptide
  Seed: EECLINDPWVLLNAS
EECYINFPGVLLNAS

SEQ ID NO: 257867 - protein, 15 aa, Artificial Sequence
  Description of Artificial Sequence: Synthetic peptide
  Seed: EECLINDPWVLLNAS
EECYINFPGVLMNAS

SEQ ID NO: 257868 - protein, 15 aa, Artificial Sequence
  Description of Artificial Sequence: Synthetic peptide
  Seed: EECLINDPWVLLNAS
EECYINFPGVLSNAS

SEQ ID NO: 257869 - protein, 15 aa, Artificial Sequence
  Description of Artificial Sequence: Synthetic peptide
  Seed: EECLINDPWVLLNAS
EECYINFPGVLTNAS

SEQ ID NO: 257870 - protein, 15 aa, Artificial Sequence
  Description of Artificial Sequence: Synthetic peptide
  Seed: EECLINDPWVLLNAS
EECYINFPGVLVNAS

SEQ ID NO: 257871 - protein, 15 aa, Artificial Sequence
  Description of Artificial Sequence: Synthetic peptide
  Seed: EECLINDPWVLLNAS
EECYINFPNVLANAS

SEQ ID NO: 257872 - protein, 15 aa, Artificial Sequence
  Description of Artificial Sequence: Synthetic peptide
  Seed: EECLINDPWVLLNAS
EECYINFPNVLINAS

SEQ ID NO: 257873 - protein, 15 aa, Artificial Sequence
  Description of Artificial Sequence: Synthetic peptide
  Seed: EECLINDPWVLLNAS
EECYINFPNVLLNAS

SEQ ID NO: 257874 - protein, 15 aa, Artificial Sequence
  Description of Artificial Sequence: Synthetic peptide
  Seed: EECLINDPWVLLNAS
EECYINFPNVLMNAS

SEQ ID NO: 257875 - protein, 15 aa, Artificial Sequence
  Description of Artificial Sequence: Synthetic peptide
  Seed: EECLINDPWVLLNAS
EECYINFPNVLVNAS

SEQ ID NO: 257876 - protein, 15 aa, Artificial Sequence
  Description of Artificial Sequence: Synthetic peptide
  Seed: EECLINDPWVLLNAS
EECYINFPPVLANAS

SEQ ID NO: 257877 - protein, 15 aa, Artificial Sequence
  Description of Artificial Sequence: Synthetic peptide
  Seed: EECLINDPWVLLNAS
EECYINFPPVLINAS

SEQ ID NO: 257878 - protein, 15 aa, Artificial Sequence
  Description of Artificial Sequence: Synthetic peptide
  Seed: EECLINDPWVLLNAS
EECYINFPPVLLNAS

SEQ ID NO: 257879 - protein, 15 aa, Artificial Sequence
  Description of Artificial Sequence: Synthetic peptide
  Seed: EECLINDPWVLLNAS
EECYINFPPVLMNAS

SEQ ID NO: 257880 - protein, 15 aa, Artificial Sequence
  Description of Artificial Sequence: Synthetic peptide
  Seed: EECLINDPWVLLNAS
EECYINFPPVLSNAS

SEQ ID NO: 257881 - protein, 15 aa, Artificial Sequence
  Description of Artificial Sequence: Synthetic peptide
  Seed: EECLINDPWVLLNAS
EECYINFPPVLTNAS

SEQ ID NO: 257882 - protein, 15 aa, Artificial Sequence
  Description of Artificial Sequence: Synthetic peptide
  Seed: EECLINDPWVLLNAS
EECYINFPPVLVNAS

SEQ ID NO: 257883 - protein, 15 aa, Artificial Sequence
  Description of Artificial Sequence: Synthetic peptide
  Seed: EECLINDPWVLLNAS
EECYINFPSVLANAS

SEQ ID NO: 257884 - protein, 15 aa, Artificial Sequence
  Description of Artificial Sequence: Synthetic peptide
  Seed: EECLINDPWVLLNAS
EECYINFPSVLGNAS

SEQ ID NO: 257885 - protein, 15 aa, Artificial Sequence
  Description of Artificial Sequence: Synthetic peptide
  Seed: EECLINDPWVLLNAS
EECYINFPSVLINAS

SEQ ID NO: 257886 - protein, 15 aa, Artificial Sequence
  Description of Artificial Sequence: Synthetic peptide
  Seed: EECLINDPWVLLNAS
EECYINFPSVLLNAS

SEQ ID NO: 257887 - protein, 15 aa, Artificial Sequence
  Description of Artificial Sequence: Synthetic peptide
  Seed: EECLINDPWVLLNAS
EECYINFPSVLMNAS

SEQ ID NO: 257888 - protein, 15 aa, Artificial Sequence
  Description of Artificial Sequence: Synthetic peptide
  Seed: EECLINDPWVLLNAS
EECYINFPSVLSNAS

SEQ ID NO: 257889 - protein, 15 aa, Artificial Sequence
  Description of Artificial Sequence: Synthetic peptide
  Seed: EECLINDPWVLLNAS
EECYINFPSVLTNAS

SEQ ID NO: 257890 - protein, 15 aa, Artificial Sequence
  Description of Artificial Sequence: Synthetic peptide
  Seed: EECLINDPWVLLNAS
EECYINFPSVLVNAS

SEQ ID NO: 257891 - protein, 15 aa, Artificial Sequence
  Description of Artificial Sequence: Synthetic peptide
  Seed: EECLINDPWVLLNAS
EECYINFPTVLANAS

SEQ ID NO: 257892 - protein, 15 aa, Artificial Sequence
  Description of Artificial Sequence: Synthetic peptide
  Seed: EECLINDPWVLLNAS
EECYINFPTVLINAS

SEQ ID NO: 257893 - protein, 15 aa, Artificial Sequence
  Description of Artificial Sequence: Synthetic peptide
  Seed: EECLINDPWVLLNAS
EECYINFPTVLLNAS

SEQ ID NO: 257894 - protein, 15 aa, Artificial Sequence
  Description of Artificial Sequence: Synthetic peptide
  Seed: EECLINDPWVLLNAS
EECYINFPTVLMNAS

SEQ ID NO: 257895 - protein, 15 aa, Artificial Sequence
  Description of Artificial Sequence: Synthetic peptide
  Seed: EECLINDPWVLLNAS
EECYINFPTVLSNAS

SEQ ID NO: 257896 - protein, 15 aa, Artificial Sequence
  Description of Artificial Sequence: Synthetic peptide
  Seed: EECLINDPWVLLNAS
EECYINFPTVLTNAS

SEQ ID NO: 257897 - protein, 15 aa, Artificial Sequence
  Description of Artificial Sequence: Synthetic peptide
  Seed: EECLINDPWVLLNAS
EECYINFPTVLVNAS

SEQ ID NO: 257898 - protein, 15 aa, Artificial Sequence
  Description of Artificial Sequence: Synthetic peptide
  Seed: EECLINDPWVLLNAS
EECYINFPVVLANAS

SEQ ID NO: 257899 - protein, 15 aa, Artificial Sequence
  Description of Artificial Sequence: Synthetic peptide
  Seed: EECLINDPWVLLNAS
EECYINGPAVLANAS

SEQ ID NO: 257900 - protein, 15 aa, Artificial Sequence
  Description of Artificial Sequence: Synthetic peptide
  Seed: EECLINDPWVLLNAS
EECYINGPAVLINAS

SEQ ID NO: 257901 - protein, 15 aa, Artificial Sequence
  Description of Artificial Sequence: Synthetic peptide
  Seed: EECLINDPWVLLNAS
EECYINGPAVLLNAS

SEQ ID NO: 257902 - protein, 15 aa, Artificial Sequence
  Description of Artificial Sequence: Synthetic peptide
  Seed: EECLINDPWVLLNAS
EECYINGPAVLMNAS

SEQ ID NO: 257903 - protein, 15 aa, Artificial Sequence
  Description of Artificial Sequence: Synthetic peptide
  Seed: EECLINDPWVLLNAS
EECYINGPAVLSNAS

SEQ ID NO: 257904 - protein, 15 aa, Artificial Sequence
  Description of Artificial Sequence: Synthetic peptide
  Seed: EECLINDPWVLLNAS
EECYINGPAVLTNAS

SEQ ID NO: 257905 - protein, 15 aa, Artificial Sequence
  Description of Artificial Sequence: Synthetic peptide
  Seed: EECLINDPWVLLNAS
EECYINGPAVLVNAS

SEQ ID NO: 257906 - protein, 15 aa, Artificial Sequence
  Description of Artificial Sequence: Synthetic peptide
  Seed: EECLINDPWVLLNAS
EECYINGPGVLANAS

SEQ ID NO: 257907 - protein, 15 aa, Artificial Sequence
  Description of Artificial Sequence: Synthetic peptide
  Seed: EECLINDPWVLLNAS
EECYINGPGVLINAS

SEQ ID NO: 257908 - protein, 15 aa, Artificial Sequence
  Description of Artificial Sequence: Synthetic peptide
  Seed: EECLINDPWVLLNAS
EECYINGPGVLLNAS

SEQ ID NO: 257909 - protein, 15 aa, Artificial Sequence
  Description of Artificial Sequence: Synthetic peptide
  Seed: EECLINDPWVLLNAS
EECYINGPGVLMNAS

SEQ ID NO: 257910 - protein, 15 aa, Artificial Sequence
  Description of Artificial Sequence: Synthetic peptide
  Seed: EECLINDPWVLLNAS
EECYINGPGVLVNAS

SEQ ID NO: 257911 - protein, 15 aa, Artificial Sequence
  Description of Artificial Sequence: Synthetic peptide
  Seed: EECLINDPWVLLNAS
EECYINGPNVLANAS

SEQ ID NO: 257912 - protein, 15 aa, Artificial Sequence
  Description of Artificial Sequence: Synthetic peptide
  Seed: EECLINDPWVLLNAS
EECYINGPNVLINAS

SEQ ID NO: 257913 - protein, 15 aa, Artificial Sequence
  Description of Artificial Sequence: Synthetic peptide
  Seed: EECLINDPWVLLNAS
EECYINGPNVLLNAS

SEQ ID NO: 257914 - protein, 15 aa, Artificial Sequence
  Description of Artificial Sequence: Synthetic peptide
  Seed: EECLINDPWVLLNAS
EECYINGPNVLVNAS

SEQ ID NO: 257915 - protein, 15 aa, Artificial Sequence
  Description of Artificial Sequence: Synthetic peptide
  Seed: EECLINDPWVLLNAS
EECYINGPPVLANAS

SEQ ID NO: 257916 - protein, 15 aa, Artificial Sequence
  Description of Artificial Sequence: Synthetic peptide
  Seed: EECLINDPWVLLNAS
EECYINGPPVLINAS

SEQ ID NO: 257917 - protein, 15 aa, Artificial Sequence
  Description of Artificial Sequence: Synthetic peptide
  Seed: EECLINDPWVLLNAS
EECYINGPPVLLNAS

SEQ ID NO: 257918 - protein, 15 aa, Artificial Sequence
  Description of Artificial Sequence: Synthetic peptide
  Seed: EECLINDPWVLLNAS
EECYINGPPVLMNAS

SEQ ID NO: 257919 - protein, 15 aa, Artificial Sequence
  Description of Artificial Sequence: Synthetic peptide
  Seed: EECLINDPWVLLNAS
EECYINGPPVLVNAS

SEQ ID NO: 257920 - protein, 15 aa, Artificial Sequence
  Description of Artificial Sequence: Synthetic peptide
  Seed: EECLINDPWVLLNAS
EECYINGPSVLANAS

SEQ ID NO: 257921 - protein, 15 aa, Artificial Sequence
  Description of Artificial Sequence: Synthetic peptide
  Seed: EECLINDPWVLLNAS
EECYINGPSVLINAS

SEQ ID NO: 257922 - protein, 15 aa, Artificial Sequence
  Description of Artificial Sequence: Synthetic peptide
  Seed: EECLINDPWVLLNAS
EECYINGPSVLLNAS

SEQ ID NO: 257923 - protein, 15 aa, Artificial Sequence
  Description of Artificial Sequence: Synthetic peptide
  Seed: EECLINDPWVLLNAS
EECYINGPSVLMNAS

SEQ ID NO: 257924 - protein, 15 aa, Artificial Sequence
  Description of Artificial Sequence: Synthetic peptide
  Seed: EECLINDPWVLLNAS
EECYINGPSVLSNAS

SEQ ID NO: 257925 - protein, 15 aa, Artificial Sequence
  Description of Artificial Sequence: Synthetic peptide
  Seed: EECLINDPWVLLNAS
EECYINGPSVLTNAS

SEQ ID NO: 257926 - protein, 15 aa, Artificial Sequence
  Description of Artificial Sequence: Synthetic peptide
  Seed: EECLINDPWVLLNAS
EECYINGPSVLVNAS

SEQ ID NO: 257927 - protein, 15 aa, Artificial Sequence
  Description of Artificial Sequence: Synthetic peptide
  Seed: EECLINDPWVLLNAS
EECYINGPTVLANAS

SEQ ID NO: 257928 - protein, 15 aa, Artificial Sequence
  Description of Artificial Sequence: Synthetic peptide
  Seed: EECLINDPWVLLNAS
EECYINGPTVLINAS

SEQ ID NO: 257929 - protein, 15 aa, Artificial Sequence
  Description of Artificial Sequence: Synthetic peptide
  Seed: EECLINDPWVLLNAS
EECYINGPTVLLNAS

SEQ ID NO: 257930 - protein, 15 aa, Artificial Sequence
  Description of Artificial Sequence: Synthetic peptide
  Seed: EECLINDPWVLLNAS
EECYINGPTVLVNAS

SEQ ID NO: 257931 - protein, 15 aa, Artificial Sequence
  Description of Artificial Sequence: Synthetic peptide
  Seed: EECLINDPWVLLNAS
EECYINGPVVLINAS

SEQ ID NO: 257932 - protein, 15 aa, Artificial Sequence
  Description of Artificial Sequence: Synthetic peptide
  Seed: EECLINDPWVLLNAS
EECYINGPVVLLNAS

SEQ ID NO: 257933 - protein, 15 aa, Artificial Sequence
  Description of Artificial Sequence: Synthetic peptide
  Seed: EECLINDPWVLLNAS
EECYINGPVVLVNAS

SEQ ID NO: 257934 - protein, 15 aa, Artificial Sequence
  Description of Artificial Sequence: Synthetic peptide
  Seed: EECLINDPWVLLNAS
EECYINHPAVLANAS

SEQ ID NO: 257935 - protein, 15 aa, Artificial Sequence
  Description of Artificial Sequence: Synthetic peptide
  Seed: EECLINDPWVLLNAS
EECYINHPAVLINAS

SEQ ID NO: 257936 - protein, 15 aa, Artificial Sequence
  Description of Artificial Sequence: Synthetic peptide
  Seed: EECLINDPWVLLNAS
EECYINHPAVLLNAS

SEQ ID NO: 257937 - protein, 15 aa, Artificial Sequence
  Description of Artificial Sequence: Synthetic peptide
  Seed: EECLINDPWVLLNAS
EECYINHPAVLMNAS

SEQ ID NO: 257938 - protein, 15 aa, Artificial Sequence
  Description of Artificial Sequence: Synthetic peptide
  Seed: EECLINDPWVLLNAS
EECYINHPAVLSNAS

SEQ ID NO: 257939 - protein, 15 aa, Artificial Sequence
  Description of Artificial Sequence: Synthetic peptide
  Seed: EECLINDPWVLLNAS
EECYINHPAVLTNAS

SEQ ID NO: 257940 - protein, 15 aa, Artificial Sequence
  Description of Artificial Sequence: Synthetic peptide
  Seed: EECLINDPWVLLNAS
EECYINHPAVLVNAS

SEQ ID NO: 257941 - protein, 15 aa, Artificial Sequence
  Description of Artificial Sequence: Synthetic peptide
  Seed: EECLINDPWVLLNAS
EECYINHPFVLINAS

SEQ ID NO: 257942 - protein, 15 aa, Artificial Sequence
  Description of Artificial Sequence: Synthetic peptide
  Seed: EECLINDPWVLLNAS
EECYINHPFVLLNAS

SEQ ID NO: 257943 - protein, 15 aa, Artificial Sequence
  Description of Artificial Sequence: Synthetic peptide
  Seed: EECLINDPWVLLNAS
EECYINHPFVLVNAS

SEQ ID NO: 257944 - protein, 15 aa, Artificial Sequence
  Description of Artificial Sequence: Synthetic peptide
  Seed: EECLINDPWVLLNAS
EECYINHPGVLANAS

SEQ ID NO: 257945 - protein, 15 aa, Artificial Sequence
  Description of Artificial Sequence: Synthetic peptide
  Seed: EECLINDPWVLLNAS
EECYINHPGVLINAS

SEQ ID NO: 257946 - protein, 15 aa, Artificial Sequence
  Description of Artificial Sequence: Synthetic peptide
  Seed: EECLINDPWVLLNAS
EECYINHPGVLLNAS

SEQ ID NO: 257947 - protein, 15 aa, Artificial Sequence
  Description of Artificial Sequence: Synthetic peptide
  Seed: EECLINDPWVLLNAS
EECYINHPGVLVNAS

SEQ ID NO: 257948 - protein, 15 aa, Artificial Sequence
  Description of Artificial Sequence: Synthetic peptide
  Seed: EECLINDPWVLLNAS
EECYINHPPVLLNAS

SEQ ID NO: 257949 - protein, 15 aa, Artificial Sequence
  Description of Artificial Sequence: Synthetic peptide
  Seed: EECLINDPWVLLNAS
EECYINHPSVLANAS

SEQ ID NO: 257950 - protein, 15 aa, Artificial Sequence
  Description of Artificial Sequence: Synthetic peptide
  Seed: EECLINDPWVLLNAS
EECYINHPSVLINAS

SEQ ID NO: 257951 - protein, 15 aa, Artificial Sequence
  Description of Artificial Sequence: Synthetic peptide
  Seed: EECLINDPWVLLNAS
EECYINHPSVLLNAS

SEQ ID NO: 257952 - protein, 15 aa, Artificial Sequence
  Description of Artificial Sequence: Synthetic peptide
  Seed: EECLINDPWVLLNAS
EECYINHPSVLVNAS

SEQ ID NO: 257953 - protein, 15 aa, Artificial Sequence
  Description of Artificial Sequence: Synthetic peptide
  Seed: EECLINDPWVLLNAS
EECYINIPAVLANAS

SEQ ID NO: 257954 - protein, 15 aa, Artificial Sequence
  Description of Artificial Sequence: Synthetic peptide
  Seed: EECLINDPWVLLNAS
EECYINIPAVLCNAS

SEQ ID NO: 257955 - protein, 15 aa, Artificial Sequence
  Description of Artificial Sequence: Synthetic peptide
  Seed: EECLINDPWVLLNAS
EECYINIPAVLFNAS

SEQ ID NO: 257956 - protein, 15 aa, Artificial Sequence
  Description of Artificial Sequence: Synthetic peptide
  Seed: EECLINDPWVLLNAS
EECYINIPAVLGNAS

SEQ ID NO: 257957 - protein, 15 aa, Artificial Sequence
  Description of Artificial Sequence: Synthetic peptide
  Seed: EECLINDPWVLLNAS
EECYINIPAVLHNAS

SEQ ID NO: 257958 - protein, 15 aa, Artificial Sequence
  Description of Artificial Sequence: Synthetic peptide
  Seed: EECLINDPWVLLNAS
EECYINIPAVLINAS

SEQ ID NO: 257959 - protein, 15 aa, Artificial Sequence
  Description of Artificial Sequence: Synthetic peptide
  Seed: EECLINDPWVLLNAS
EECYINIPAVLKNAS

SEQ ID NO: 257960 - protein, 15 aa, Artificial Sequence
  Description of Artificial Sequence: Synthetic peptide
  Seed: EECLINDPWVLLNAS
EECYINIPAVLLNAS

SEQ ID NO: 257961 - protein, 15 aa, Artificial Sequence
  Description of Artificial Sequence: Synthetic peptide
  Seed: EECLINDPWVLLNAS
EECYINIPAVLMNAS

SEQ ID NO: 257962 - protein, 15 aa, Artificial Sequence
  Description of Artificial Sequence: Synthetic peptide
  Seed: EECLINDPWVLLNAS
EECYINIPAVLNNAS

SEQ ID NO: 257963 - protein, 15 aa, Artificial Sequence
  Description of Artificial Sequence: Synthetic peptide
  Seed: EECLINDPWVLLNAS
EECYINIPAVLPNAS

SEQ ID NO: 257964 - protein, 15 aa, Artificial Sequence
  Description of Artificial Sequence: Synthetic peptide
  Seed: EECLINDPWVLLNAS
EECYINIPAVLQNAS

SEQ ID NO: 257965 - protein, 15 aa, Artificial Sequence
  Description of Artificial Sequence: Synthetic peptide
  Seed: EECLINDPWVLLNAS
EECYINIPAVLRNAS

SEQ ID NO: 257966 - protein, 15 aa, Artificial Sequence
  Description of Artificial Sequence: Synthetic peptide
  Seed: EECLINDPWVLLNAS
EECYINIPAVLSNAS

SEQ ID NO: 257967 - protein, 15 aa, Artificial Sequence
  Description of Artificial Sequence: Synthetic peptide
  Seed: EECLINDPWVLLNAS
EECYINIPAVLTNAS

SEQ ID NO: 257968 - protein, 15 aa, Artificial Sequence
  Description of Artificial Sequence: Synthetic peptide
  Seed: EECLINDPWVLLNAS
EECYINIPAVLVNAS

SEQ ID NO: 257969 - protein, 15 aa, Artificial Sequence
  Description of Artificial Sequence: Synthetic peptide
  Seed: EECLINDPWVLLNAS
EECYINIPAVLYNAS

SEQ ID NO: 257970 - protein, 15 aa, Artificial Sequence
  Description of Artificial Sequence: Synthetic peptide
  Seed: EECLINDPWVLLNAS
EECYINIPEVLLNAS

SEQ ID NO: 257971 - protein, 15 aa, Artificial Sequence
  Description of Artificial Sequence: Synthetic peptide
  Seed: EECLINDPWVLLNAS
EECYINIPFVLFNAS

SEQ ID NO: 257972 - protein, 15 aa, Artificial Sequence
  Description of Artificial Sequence: Synthetic peptide
  Seed: EECLINDPWVLLNAS
EECYINIPFVLINAS

SEQ ID NO: 257973 - protein, 15 aa, Artificial Sequence
  Description of Artificial Sequence: Synthetic peptide
  Seed: EECLINDPWVLLNAS
EECYINIPFVLLNAS

SEQ ID NO: 257974 - protein, 15 aa, Artificial Sequence
  Description of Artificial Sequence: Synthetic peptide
  Seed: EECLINDPWVLLNAS
EECYINIPFVLMNAS

SEQ ID NO: 257975 - protein, 15 aa, Artificial Sequence
  Description of Artificial Sequence: Synthetic peptide
  Seed: EECLINDPWVLLNAS
EECYINIPFVLVNAS

SEQ ID NO: 257976 - protein, 15 aa, Artificial Sequence
  Description of Artificial Sequence: Synthetic peptide
  Seed: EECLINDPWVLLNAS
EECYINIPGVLANAS

SEQ ID NO: 257977 - protein, 15 aa, Artificial Sequence
  Description of Artificial Sequence: Synthetic peptide
  Seed: EECLINDPWVLLNAS
EECYINIPGVLCNAS

SEQ ID NO: 257978 - protein, 15 aa, Artificial Sequence
  Description of Artificial Sequence: Synthetic peptide
  Seed: EECLINDPWVLLNAS
EECYINIPGVLFNAS

SEQ ID NO: 257979 - protein, 15 aa, Artificial Sequence
  Description of Artificial Sequence: Synthetic peptide
  Seed: EECLINDPWVLLNAS
EECYINIPGVLGNAS

SEQ ID NO: 257980 - protein, 15 aa, Artificial Sequence
  Description of Artificial Sequence: Synthetic peptide
  Seed: EECLINDPWVLLNAS
EECYINIPGVLHNAS

SEQ ID NO: 257981 - protein, 15 aa, Artificial Sequence
  Description of Artificial Sequence: Synthetic peptide
  Seed: EECLINDPWVLLNAS
EECYINIPGVLINAS

SEQ ID NO: 257982 - protein, 15 aa, Artificial Sequence
  Description of Artificial Sequence: Synthetic peptide
  Seed: EECLINDPWVLLNAS
EECYINIPGVLKNAS

SEQ ID NO: 257983 - protein, 15 aa, Artificial Sequence
  Description of Artificial Sequence: Synthetic peptide
  Seed: EECLINDPWVLLNAS
EECYINIPGVLLNAS

SEQ ID NO: 257984 - protein, 15 aa, Artificial Sequence
  Description of Artificial Sequence: Synthetic peptide
  Seed: EECLINDPWVLLNAS
EECYINIPGVLMNAS

SEQ ID NO: 257985 - protein, 15 aa, Artificial Sequence
  Description of Artificial Sequence: Synthetic peptide
  Seed: EECLINDPWVLLNAS
EECYINIPGVLNNAS

SEQ ID NO: 257986 - protein, 15 aa, Artificial Sequence
  Description of Artificial Sequence: Synthetic peptide
  Seed: EECLINDPWVLLNAS
EECYINIPGVLPNAS

SEQ ID NO: 257987 - protein, 15 aa, Artificial Sequence
  Description of Artificial Sequence: Synthetic peptide
  Seed: EECLINDPWVLLNAS
EECYINIPGVLQNAS

SEQ ID NO: 257988 - protein, 15 aa, Artificial Sequence
  Description of Artificial Sequence: Synthetic peptide
  Seed: EECLINDPWVLLNAS
EECYINIPGVLRNAS

SEQ ID NO: 257989 - protein, 15 aa, Artificial Sequence
  Description of Artificial Sequence: Synthetic peptide
  Seed: EECLINDPWVLLNAS
EECYINIPGVLSNAS

SEQ ID NO: 257990 - protein, 15 aa, Artificial Sequence
  Description of Artificial Sequence: Synthetic peptide
  Seed: EECLINDPWVLLNAS
EECYINIPGVLTNAS

SEQ ID NO: 257991 - protein, 15 aa, Artificial Sequence
  Description of Artificial Sequence: Synthetic peptide
  Seed: EECLINDPWVLLNAS
EECYINIPGVLVNAS

SEQ ID NO: 257992 - protein, 15 aa, Artificial Sequence
  Description of Artificial Sequence: Synthetic peptide
  Seed: EECLINDPWVLLNAS
EECYINIPGVLYNAS

SEQ ID NO: 257993 - protein, 15 aa, Artificial Sequence
  Description of Artificial Sequence: Synthetic peptide
  Seed: EECLINDPWVLLNAS
EECYINIPHVLANAS

SEQ ID NO: 257994 - protein, 15 aa, Artificial Sequence
  Description of Artificial Sequence: Synthetic peptide
  Seed: EECLINDPWVLLNAS
EECYINIPHVLINAS

SEQ ID NO: 257995 - protein, 15 aa, Artificial Sequence
  Description of Artificial Sequence: Synthetic peptide
  Seed: EECLINDPWVLLNAS
EECYINIPHVLLNAS

SEQ ID NO: 257996 - protein, 15 aa, Artificial Sequence
  Description of Artificial Sequence: Synthetic peptide
  Seed: EECLINDPWVLLNAS
EECYINIPHVLVNAS

SEQ ID NO: 257997 - protein, 15 aa, Artificial Sequence
  Description of Artificial Sequence: Synthetic peptide
  Seed: EECLINDPWVLLNAS
EECYINIPIVLANAS

SEQ ID NO: 257998 - protein, 15 aa, Artificial Sequence
  Description of Artificial Sequence: Synthetic peptide
  Seed: EECLINDPWVLLNAS
EECYINIPIVLINAS

SEQ ID NO: 257999 - protein, 15 aa, Artificial Sequence
  Description of Artificial Sequence: Synthetic peptide
  Seed: EECLINDPWVLLNAS
EECYINIPIVLLNAS

SEQ ID NO: 258000 - protein, 15 aa, Artificial Sequence
  Description of Artificial Sequence: Synthetic peptide
  Seed: EECLINDPWVLLNAS
EECYINIPIVLSNAS

SEQ ID NO: 258001 - protein, 15 aa, Artificial Sequence
  Description of Artificial Sequence: Synthetic peptide
  Seed: EECLINDPWVLLNAS
EECYINIPIVLTNAS

SEQ ID NO: 258002 - protein, 15 aa, Artificial Sequence
  Description of Artificial Sequence: Synthetic peptide
  Seed: EECLINDPWVLLNAS
EECYINIPIVLVNAS

SEQ ID NO: 258003 - protein, 15 aa, Artificial Sequence
  Description of Artificial Sequence: Synthetic peptide
  Seed: EECLINDPWVLLNAS
EECYINIPMVLANAS

SEQ ID NO: 258004 - protein, 15 aa, Artificial Sequence
  Description of Artificial Sequence: Synthetic peptide
  Seed: EECLINDPWVLLNAS
EECYINIPMVLVNAS

SEQ ID NO: 258005 - protein, 15 aa, Artificial Sequence
  Description of Artificial Sequence: Synthetic peptide
  Seed: EECLINDPWVLLNAS
EECYINIPNVLANAS

SEQ ID NO: 258006 - protein, 15 aa, Artificial Sequence
  Description of Artificial Sequence: Synthetic peptide
  Seed: EECLINDPWVLLNAS
EECYINIPNVLCNAS

SEQ ID NO: 258007 - protein, 15 aa, Artificial Sequence
  Description of Artificial Sequence: Synthetic peptide
  Seed: EECLINDPWVLLNAS
EECYINIPNVLFNAS

SEQ ID NO: 258008 - protein, 15 aa, Artificial Sequence
  Description of Artificial Sequence: Synthetic peptide
  Seed: EECLINDPWVLLNAS
EECYINIPNVLGNAS

SEQ ID NO: 258009 - protein, 15 aa, Artificial Sequence
  Description of Artificial Sequence: Synthetic peptide
  Seed: EECLINDPWVLLNAS
EECYINIPNVLINAS

SEQ ID NO: 258010 - protein, 15 aa, Artificial Sequence
  Description of Artificial Sequence: Synthetic peptide
  Seed: EECLINDPWVLLNAS
EECYINIPNVLLNAS

SEQ ID NO: 258011 - protein, 15 aa, Artificial Sequence
  Description of Artificial Sequence: Synthetic peptide
  Seed: EECLINDPWVLLNAS
EECYINIPNVLMNAS

SEQ ID NO: 258012 - protein, 15 aa, Artificial Sequence
  Description of Artificial Sequence: Synthetic peptide
  Seed: EECLINDPWVLLNAS
EECYINIPNVLNNAS

SEQ ID NO: 258013 - protein, 15 aa, Artificial Sequence
  Description of Artificial Sequence: Synthetic peptide
  Seed: EECLINDPWVLLNAS
EECYINIPNVLSNAS

SEQ ID NO: 258014 - protein, 15 aa, Artificial Sequence
  Description of Artificial Sequence: Synthetic peptide
  Seed: EECLINDPWVLLNAS
EECYINIPNVLTNAS

SEQ ID NO: 258015 - protein, 15 aa, Artificial Sequence
  Description of Artificial Sequence: Synthetic peptide
  Seed: EECLINDPWVLLNAS
EECYINIPNVLVNAS

SEQ ID NO: 258016 - protein, 15 aa, Artificial Sequence
  Description of Artificial Sequence: Synthetic peptide
  Seed: EECLINDPWVLLNAS
EECYINIPPVLANAS

SEQ ID NO: 258017 - protein, 15 aa, Artificial Sequence
  Description of Artificial Sequence: Synthetic peptide
  Seed: EECLINDPWVLLNAS
EECYINIPPVLCNAS

SEQ ID NO: 258018 - protein, 15 aa, Artificial Sequence
  Description of Artificial Sequence: Synthetic peptide
  Seed: EECLINDPWVLLNAS
EECYINIPPVLFNAS

SEQ ID NO: 258019 - protein, 15 aa, Artificial Sequence
  Description of Artificial Sequence: Synthetic peptide
  Seed: EECLINDPWVLLNAS
EECYINIPPVLGNAS

SEQ ID NO: 258020 - protein, 15 aa, Artificial Sequence
  Description of Artificial Sequence: Synthetic peptide
  Seed: EECLINDPWVLLNAS
EECYINIPPVLHNAS

SEQ ID NO: 258021 - protein, 15 aa, Artificial Sequence
  Description of Artificial Sequence: Synthetic peptide
  Seed: EECLINDPWVLLNAS
EECYINIPPVLINAS

SEQ ID NO: 258022 - protein, 15 aa, Artificial Sequence
  Description of Artificial Sequence: Synthetic peptide
  Seed: EECLINDPWVLLNAS
EECYINIPPVLLNAS

SEQ ID NO: 258023 - protein, 15 aa, Artificial Sequence
  Description of Artificial Sequence: Synthetic peptide
  Seed: EECLINDPWVLLNAS
EECYINIPPVLMNAS

SEQ ID NO: 258024 - protein, 15 aa, Artificial Sequence
  Description of Artificial Sequence: Synthetic peptide
  Seed: EECLINDPWVLLNAS
EECYINIPPVLNNAS

SEQ ID NO: 258025 - protein, 15 aa, Artificial Sequence
  Description of Artificial Sequence: Synthetic peptide
  Seed: EECLINDPWVLLNAS
EECYINIPPVLPNAS

SEQ ID NO: 258026 - protein, 15 aa, Artificial Sequence
  Description of Artificial Sequence: Synthetic peptide
  Seed: EECLINDPWVLLNAS
EECYINIPPVLQNAS

SEQ ID NO: 258027 - protein, 15 aa, Artificial Sequence
  Description of Artificial Sequence: Synthetic peptide
  Seed: EECLINDPWVLLNAS
EECYINIPPVLSNAS

SEQ ID NO: 258028 - protein, 15 aa, Artificial Sequence
  Description of Artificial Sequence: Synthetic peptide
  Seed: EECLINDPWVLLNAS
EECYINIPPVLTNAS

SEQ ID NO: 258029 - protein, 15 aa, Artificial Sequence
  Description of Artificial Sequence: Synthetic peptide
  Seed: EECLINDPWVLLNAS
EECYINIPPVLVNAS

SEQ ID NO: 258030 - protein, 15 aa, Artificial Sequence
  Description of Artificial Sequence: Synthetic peptide
  Seed: EECLINDPWVLLNAS
EECYINIPQVLANAS

SEQ ID NO: 258031 - protein, 15 aa, Artificial Sequence
  Description of Artificial Sequence: Synthetic peptide
  Seed: EECLINDPWVLLNAS
EECYINIPQVLLNAS

SEQ ID NO: 258032 - protein, 15 aa, Artificial Sequence
  Description of Artificial Sequence: Synthetic peptide
  Seed: EECLINDPWVLLNAS
EECYINIPQVLVNAS

SEQ ID NO: 258033 - protein, 15 aa, Artificial Sequence
  Description of Artificial Sequence: Synthetic peptide
  Seed: EECLINDPWVLLNAS
EECYINIPSVLANAS

SEQ ID NO: 258034 - protein, 15 aa, Artificial Sequence
  Description of Artificial Sequence: Synthetic peptide
  Seed: EECLINDPWVLLNAS
EECYINIPSVLCNAS

SEQ ID NO: 258035 - protein, 15 aa, Artificial Sequence
  Description of Artificial Sequence: Synthetic peptide
  Seed: EECLINDPWVLLNAS
EECYINIPSVLFNAS

SEQ ID NO: 258036 - protein, 15 aa, Artificial Sequence
  Description of Artificial Sequence: Synthetic peptide
  Seed: EECLINDPWVLLNAS
EECYINIPSVLGNAS

SEQ ID NO: 258037 - protein, 15 aa, Artificial Sequence
  Description of Artificial Sequence: Synthetic peptide
  Seed: EECLINDPWVLLNAS
EECYINIPSVLHNAS

SEQ ID NO: 258038 - protein, 15 aa, Artificial Sequence
  Description of Artificial Sequence: Synthetic peptide
  Seed: EECLINDPWVLLNAS
EECYINIPSVLINAS

SEQ ID NO: 258039 - protein, 15 aa, Artificial Sequence
  Description of Artificial Sequence: Synthetic peptide
  Seed: EECLINDPWVLLNAS
EECYINIPSVLKNAS

SEQ ID NO: 258040 - protein, 15 aa, Artificial Sequence
  Description of Artificial Sequence: Synthetic peptide
  Seed: EECLINDPWVLLNAS
EECYINIPSVLLNAS

SEQ ID NO: 258041 - protein, 15 aa, Artificial Sequence
  Description of Artificial Sequence: Synthetic peptide
  Seed: EECLINDPWVLLNAS
EECYINIPSVLMNAS

SEQ ID NO: 258042 - protein, 15 aa, Artificial Sequence
  Description of Artificial Sequence: Synthetic peptide
  Seed: EECLINDPWVLLNAS
EECYINIPSVLNNAS

SEQ ID NO: 258043 - protein, 15 aa, Artificial Sequence
  Description of Artificial Sequence: Synthetic peptide
  Seed: EECLINDPWVLLNAS
EECYINIPSVLPNAS

SEQ ID NO: 258044 - protein, 15 aa, Artificial Sequence
  Description of Artificial Sequence: Synthetic peptide
  Seed: EECLINDPWVLLNAS
EECYINIPSVLQNAS

SEQ ID NO: 258045 - protein, 15 aa, Artificial Sequence
  Description of Artificial Sequence: Synthetic peptide
  Seed: EECLINDPWVLLNAS
EECYINIPSVLRNAS

SEQ ID NO: 258046 - protein, 15 aa, Artificial Sequence
  Description of Artificial Sequence: Synthetic peptide
  Seed: EECLINDPWVLLNAS
EECYINIPSVLSNAS

SEQ ID NO: 258047 - protein, 15 aa, Artificial Sequence
  Description of Artificial Sequence: Synthetic peptide
  Seed: EECLINDPWVLLNAS
EECYINIPSVLTNAS

SEQ ID NO: 258048 - protein, 15 aa, Artificial Sequence
  Description of Artificial Sequence: Synthetic peptide
  Seed: EECLINDPWVLLNAS
EECYINIPSVLVNAS

SEQ ID NO: 258049 - protein, 15 aa, Artificial Sequence
  Description of Artificial Sequence: Synthetic peptide
  Seed: EECLINDPWVLLNAS
EECYINIPSVLYNAS

SEQ ID NO: 258050 - protein, 15 aa, Artificial Sequence
  Description of Artificial Sequence: Synthetic peptide
  Seed: EECLINDPWVLLNAS
EECYINIPTVLANAS

SEQ ID NO: 258051 - protein, 15 aa, Artificial Sequence
  Description of Artificial Sequence: Synthetic peptide
  Seed: EECLINDPWVLLNAS
EECYINIPTVLCNAS

SEQ ID NO: 258052 - protein, 15 aa, Artificial Sequence
  Description of Artificial Sequence: Synthetic peptide
  Seed: EECLINDPWVLLNAS
EECYINIPTVLFNAS

SEQ ID NO: 258053 - protein, 15 aa, Artificial Sequence
  Description of Artificial Sequence: Synthetic peptide
  Seed: EECLINDPWVLLNAS
EECYINIPTVLGNAS

SEQ ID NO: 258054 - protein, 15 aa, Artificial Sequence
  Description of Artificial Sequence: Synthetic peptide
  Seed: EECLINDPWVLLNAS
EECYINIPTVLHNAS

SEQ ID NO: 258055 - protein, 15 aa, Artificial Sequence
  Description of Artificial Sequence: Synthetic peptide
  Seed: EECLINDPWVLLNAS
EECYINIPTVLINAS

SEQ ID NO: 258056 - protein, 15 aa, Artificial Sequence
  Description of Artificial Sequence: Synthetic peptide
  Seed: EECLINDPWVLLNAS
EECYINIPTVLLNAS

SEQ ID NO: 258057 - protein, 15 aa, Artificial Sequence
  Description of Artificial Sequence: Synthetic peptide
  Seed: EECLINDPWVLLNAS
EECYINIPTVLMNAS

SEQ ID NO: 258058 - protein, 15 aa, Artificial Sequence
  Description of Artificial Sequence: Synthetic peptide
  Seed: EECLINDPWVLLNAS
EECYINIPTVLNNAS

SEQ ID NO: 258059 - protein, 15 aa, Artificial Sequence
  Description of Artificial Sequence: Synthetic peptide
  Seed: EECLINDPWVLLNAS
EECYINIPTVLQNAS

SEQ ID NO: 258060 - protein, 15 aa, Artificial Sequence
  Description of Artificial Sequence: Synthetic peptide
  Seed: EECLINDPWVLLNAS
EECYINIPTVLSNAS

SEQ ID NO: 258061 - protein, 15 aa, Artificial Sequence
  Description of Artificial Sequence: Synthetic peptide
  Seed: EECLINDPWVLLNAS
EECYINIPTVLTNAS

SEQ ID NO: 258062 - protein, 15 aa, Artificial Sequence
  Description of Artificial Sequence: Synthetic peptide
  Seed: EECLINDPWVLLNAS
EECYINIPTVLVNAS

SEQ ID NO: 258063 - protein, 15 aa, Artificial Sequence
  Description of Artificial Sequence: Synthetic peptide
  Seed: EECLINDPWVLLNAS
EECYINIPVVLANAS

SEQ ID NO: 258064 - protein, 15 aa, Artificial Sequence
  Description of Artificial Sequence: Synthetic peptide
  Seed: EECLINDPWVLLNAS
EECYINIPVVLGNAS

SEQ ID NO: 258065 - protein, 15 aa, Artificial Sequence
  Description of Artificial Sequence: Synthetic peptide
  Seed: EECLINDPWVLLNAS
EECYINIPVVLINAS

SEQ ID NO: 258066 - protein, 15 aa, Artificial Sequence
  Description of Artificial Sequence: Synthetic peptide
  Seed: EECLINDPWVLLNAS
EECYINIPVVLLNAS

SEQ ID NO: 258067 - protein, 15 aa, Artificial Sequence
  Description of Artificial Sequence: Synthetic peptide
  Seed: EECLINDPWVLLNAS
EECYINIPVVLMNAS

SEQ ID NO: 258068 - protein, 15 aa, Artificial Sequence
  Description of Artificial Sequence: Synthetic peptide
  Seed: EECLINDPWVLLNAS
EECYINIPVVLSNAS

SEQ ID NO: 258069 - protein, 15 aa, Artificial Sequence
  Description of Artificial Sequence: Synthetic peptide
  Seed: EECLINDPWVLLNAS
EECYINIPVVLTNAS

SEQ ID NO: 258070 - protein, 15 aa, Artificial Sequence
  Description of Artificial Sequence: Synthetic peptide
  Seed: EECLINDPWVLLNAS
EECYINIPVVLVNAS

SEQ ID NO: 258071 - protein, 15 aa, Artificial Sequence
  Description of Artificial Sequence: Synthetic peptide
  Seed: EECLINDPWVLLNAS
EECYINKPAVLANAS

SEQ ID NO: 258072 - protein, 15 aa, Artificial Sequence
  Description of Artificial Sequence: Synthetic peptide
  Seed: EECLINDPWVLLNAS
EECYINKPAVLINAS

SEQ ID NO: 258073 - protein, 15 aa, Artificial Sequence
  Description of Artificial Sequence: Synthetic peptide
  Seed: EECLINDPWVLLNAS
EECYINKPAVLLNAS

SEQ ID NO: 258074 - protein, 15 aa, Artificial Sequence
  Description of Artificial Sequence: Synthetic peptide
  Seed: EECLINDPWVLLNAS
EECYINKPAVLVNAS

SEQ ID NO: 258075 - protein, 15 aa, Artificial Sequence
  Description of Artificial Sequence: Synthetic peptide
  Seed: EECLINDPWVLLNAS
EECYINKPSVLLNAS

SEQ ID NO: 258076 - protein, 15 aa, Artificial Sequence
  Description of Artificial Sequence: Synthetic peptide
  Seed: EECLINDPWVLLNAS
EECYINLPAVLANAS

SEQ ID NO: 258077 - protein, 15 aa, Artificial Sequence
  Description of Artificial Sequence: Synthetic peptide
  Seed: EECLINDPWVLLNAS
EECYINLPAVLCNAS

SEQ ID NO: 258078 - protein, 15 aa, Artificial Sequence
  Description of Artificial Sequence: Synthetic peptide
  Seed: EECLINDPWVLLNAS
EECYINLPAVLDNAS

SEQ ID NO: 258079 - protein, 15 aa, Artificial Sequence
  Description of Artificial Sequence: Synthetic peptide
  Seed: EECLINDPWVLLNAS
EECYINLPAVLENAS

SEQ ID NO: 258080 - protein, 15 aa, Artificial Sequence
  Description of Artificial Sequence: Synthetic peptide
  Seed: EECLINDPWVLLNAS
EECYINLPAVLFNAS

SEQ ID NO: 258081 - protein, 15 aa, Artificial Sequence
  Description of Artificial Sequence: Synthetic peptide
  Seed: EECLINDPWVLLNAS
EECYINLPAVLGNAS

SEQ ID NO: 258082 - protein, 15 aa, Artificial Sequence
  Description of Artificial Sequence: Synthetic peptide
  Seed: EECLINDPWVLLNAS
EECYINLPAVLHNAS

SEQ ID NO: 258083 - protein, 15 aa, Artificial Sequence
  Description of Artificial Sequence: Synthetic peptide
  Seed: EECLINDPWVLLNAS
EECYINLPAVLINAS

SEQ ID NO: 258084 - protein, 15 aa, Artificial Sequence
  Description of Artificial Sequence: Synthetic peptide
  Seed: EECLINDPWVLLNAS
EECYINLPAVLKNAS

SEQ ID NO: 258085 - protein, 15 aa, Artificial Sequence
  Description of Artificial Sequence: Synthetic peptide
  Seed: EECLINDPWVLLNAS
EECYINLPAVLLNAS

SEQ ID NO: 258086 - protein, 15 aa, Artificial Sequence
  Description of Artificial Sequence: Synthetic peptide
  Seed: EECLINDPWVLLNAS
EECYINLPAVLMNAS

SEQ ID NO: 258087 - protein, 15 aa, Artificial Sequence
  Description of Artificial Sequence: Synthetic peptide
  Seed: EECLINDPWVLLNAS
EECYINLPAVLNNAS

SEQ ID NO: 258088 - protein, 15 aa, Artificial Sequence
  Description of Artificial Sequence: Synthetic peptide
  Seed: EECLINDPWVLLNAS
EECYINLPAVLPNAS

SEQ ID NO: 258089 - protein, 15 aa, Artificial Sequence
  Description of Artificial Sequence: Synthetic peptide
  Seed: EECLINDPWVLLNAS
EECYINLPAVLQNAS

SEQ ID NO: 258090 - protein, 15 aa, Artificial Sequence
  Description of Artificial Sequence: Synthetic peptide
  Seed: EECLINDPWVLLNAS
EECYINLPAVLRNAS

SEQ ID NO: 258091 - protein, 15 aa, Artificial Sequence
  Description of Artificial Sequence: Synthetic peptide
  Seed: EECLINDPWVLLNAS
EECYINLPAVLSNAS

SEQ ID NO: 258092 - protein, 15 aa, Artificial Sequence
  Description of Artificial Sequence: Synthetic peptide
  Seed: EECLINDPWVLLNAS
EECYINLPAVLTNAS

SEQ ID NO: 258093 - protein, 15 aa, Artificial Sequence
  Description of Artificial Sequence: Synthetic peptide
  Seed: EECLINDPWVLLNAS
EECYINLPAVLVNAS

SEQ ID NO: 258094 - protein, 15 aa, Artificial Sequence
  Description of Artificial Sequence: Synthetic peptide
  Seed: EECLINDPWVLLNAS
EECYINLPAVLWNAS

SEQ ID NO: 258095 - protein, 15 aa, Artificial Sequence
  Description of Artificial Sequence: Synthetic peptide
  Seed: EECLINDPWVLLNAS
EECYINLPAVLYNAS

SEQ ID NO: 258096 - protein, 15 aa, Artificial Sequence
  Description of Artificial Sequence: Synthetic peptide
  Seed: EECLINDPWVLLNAS
EECYINLPCVLANAS

SEQ ID NO: 258097 - protein, 15 aa, Artificial Sequence
  Description of Artificial Sequence: Synthetic peptide
  Seed: EECLINDPWVLLNAS
EECYINLPCVLINAS

SEQ ID NO: 258098 - protein, 15 aa, Artificial Sequence
  Description of Artificial Sequence: Synthetic peptide
  Seed: EECLINDPWVLLNAS
EECYINLPCVLLNAS

SEQ ID NO: 258099 - protein, 15 aa, Artificial Sequence
  Description of Artificial Sequence: Synthetic peptide
  Seed: EECLINDPWVLLNAS
EECYINLPCVLVNAS

SEQ ID NO: 258100 - protein, 15 aa, Artificial Sequence
  Description of Artificial Sequence: Synthetic peptide
  Seed: EECLINDPWVLLNAS
EECYINLPDVLANAS

SEQ ID NO: 258101 - protein, 15 aa, Artificial Sequence
  Description of Artificial Sequence: Synthetic peptide
  Seed: EECLINDPWVLLNAS
EECYINLPDVLINAS

SEQ ID NO: 258102 - protein, 15 aa, Artificial Sequence
  Description of Artificial Sequence: Synthetic peptide
  Seed: EECLINDPWVLLNAS
EECYINLPDVLLNAS

SEQ ID NO: 258103 - protein, 15 aa, Artificial Sequence
  Description of Artificial Sequence: Synthetic peptide
  Seed: EECLINDPWVLLNAS
EECYINLPDVLVNAS

SEQ ID NO: 258104 - protein, 15 aa, Artificial Sequence
  Description of Artificial Sequence: Synthetic peptide
  Seed: EECLINDPWVLLNAS
EECYINLPEVLANAS

SEQ ID NO: 258105 - protein, 15 aa, Artificial Sequence
  Description of Artificial Sequence: Synthetic peptide
  Seed: EECLINDPWVLLNAS
EECYINLPEVLINAS

SEQ ID NO: 258106 - protein, 15 aa, Artificial Sequence
  Description of Artificial Sequence: Synthetic peptide
  Seed: EECLINDPWVLLNAS
EECYINLPEVLLNAS

SEQ ID NO: 258107 - protein, 15 aa, Artificial Sequence
  Description of Artificial Sequence: Synthetic peptide
  Seed: EECLINDPWVLLNAS
EECYINLPEVLVNAS

SEQ ID NO: 258108 - protein, 15 aa, Artificial Sequence
  Description of Artificial Sequence: Synthetic peptide
  Seed: EECLINDPWVLLNAS
EECYINLPFVLINAS

SEQ ID NO: 258109 - protein, 15 aa, Artificial Sequence
  Description of Artificial Sequence: Synthetic peptide
  Seed: EECLINDPWVLLNAS
EECYINLPFVLLNAS

SEQ ID NO: 258110 - protein, 15 aa, Artificial Sequence
  Description of Artificial Sequence: Synthetic peptide
  Seed: EECLINDPWVLLNAS
EECYINLPFVLVNAS

SEQ ID NO: 258111 - protein, 15 aa, Artificial Sequence
  Description of Artificial Sequence: Synthetic peptide
  Seed: EECLINDPWVLLNAS
EECYINLPGVLANAS

SEQ ID NO: 258112 - protein, 15 aa, Artificial Sequence
  Description of Artificial Sequence: Synthetic peptide
  Seed: EECLINDPWVLLNAS
EECYINLPGVLCNAS

SEQ ID NO: 258113 - protein, 15 aa, Artificial Sequence
  Description of Artificial Sequence: Synthetic peptide
  Seed: EECLINDPWVLLNAS
EECYINLPGVLDNAS

SEQ ID NO: 258114 - protein, 15 aa, Artificial Sequence
  Description of Artificial Sequence: Synthetic peptide
  Seed: EECLINDPWVLLNAS
EECYINLPGVLENAS

SEQ ID NO: 258115 - protein, 15 aa, Artificial Sequence
  Description of Artificial Sequence: Synthetic peptide
  Seed: EECLINDPWVLLNAS
EECYINLPGVLFNAS

SEQ ID NO: 258116 - protein, 15 aa, Artificial Sequence
  Description of Artificial Sequence: Synthetic peptide
  Seed: EECLINDPWVLLNAS
EECYINLPGVLGNAS

SEQ ID NO: 258117 - protein, 15 aa, Artificial Sequence
  Description of Artificial Sequence: Synthetic peptide
  Seed: EECLINDPWVLLNAS
EECYINLPGVLHNAS

SEQ ID NO: 258118 - protein, 15 aa, Artificial Sequence
  Description of Artificial Sequence: Synthetic peptide
  Seed: EECLINDPWVLLNAS
EECYINLPGVLINAS

SEQ ID NO: 258119 - protein, 15 aa, Artificial Sequence
  Description of Artificial Sequence: Synthetic peptide
  Seed: EECLINDPWVLLNAS
EECYINLPGVLKNAS

SEQ ID NO: 258120 - protein, 15 aa, Artificial Sequence
  Description of Artificial Sequence: Synthetic peptide
  Seed: EECLINDPWVLLNAS
EECYINLPGVLLNAS

SEQ ID NO: 258121 - protein, 15 aa, Artificial Sequence
  Description of Artificial Sequence: Synthetic peptide
  Seed: EECLINDPWVLLNAS
EECYINLPGVLMNAS

SEQ ID NO: 258122 - protein, 15 aa, Artificial Sequence
  Description of Artificial Sequence: Synthetic peptide
  Seed: EECLINDPWVLLNAS
EECYINLPGVLNNAS

SEQ ID NO: 258123 - protein, 15 aa, Artificial Sequence
  Description of Artificial Sequence: Synthetic peptide
  Seed: EECLINDPWVLLNAS
EECYINLPGVLPNAS

SEQ ID NO: 258124 - protein, 15 aa, Artificial Sequence
  Description of Artificial Sequence: Synthetic peptide
  Seed: EECLINDPWVLLNAS
EECYINLPGVLQNAS

SEQ ID NO: 258125 - protein, 15 aa, Artificial Sequence
  Description of Artificial Sequence: Synthetic peptide
  Seed: EECLINDPWVLLNAS
EECYINLPGVLRNAS

SEQ ID NO: 258126 - protein, 15 aa, Artificial Sequence
  Description of Artificial Sequence: Synthetic peptide
  Seed: EECLINDPWVLLNAS
EECYINLPGVLSNAS

SEQ ID NO: 258127 - protein, 15 aa, Artificial Sequence
  Description of Artificial Sequence: Synthetic peptide
  Seed: EECLINDPWVLLNAS
EECYINLPGVLTNAS

SEQ ID NO: 258128 - protein, 15 aa, Artificial Sequence
  Description of Artificial Sequence: Synthetic peptide
  Seed: EECLINDPWVLLNAS
EECYINLPGVLVNAS

SEQ ID NO: 258129 - protein, 15 aa, Artificial Sequence
  Description of Artificial Sequence: Synthetic peptide
  Seed: EECLINDPWVLLNAS
EECYINLPGVLWNAS

SEQ ID NO: 258130 - protein, 15 aa, Artificial Sequence
  Description of Artificial Sequence: Synthetic peptide
  Seed: EECLINDPWVLLNAS
EECYINLPGVLYNAS

SEQ ID NO: 258131 - protein, 15 aa, Artificial Sequence
  Description of Artificial Sequence: Synthetic peptide
  Seed: EECLINDPWVLLNAS
EECYINLPHVLANAS

SEQ ID NO: 258132 - protein, 15 aa, Artificial Sequence
  Description of Artificial Sequence: Synthetic peptide
  Seed: EECLINDPWVLLNAS
EECYINLPHVLINAS

SEQ ID NO: 258133 - protein, 15 aa, Artificial Sequence
  Description of Artificial Sequence: Synthetic peptide
  Seed: EECLINDPWVLLNAS
EECYINLPHVLLNAS

SEQ ID NO: 258134 - protein, 15 aa, Artificial Sequence
  Description of Artificial Sequence: Synthetic peptide
  Seed: EECLINDPWVLLNAS
EECYINLPHVLMNAS

SEQ ID NO: 258135 - protein, 15 aa, Artificial Sequence
  Description of Artificial Sequence: Synthetic peptide
  Seed: EECLINDPWVLLNAS
EECYINLPHVLSNAS

SEQ ID NO: 258136 - protein, 15 aa, Artificial Sequence
  Description of Artificial Sequence: Synthetic peptide
  Seed: EECLINDPWVLLNAS
EECYINLPHVLTNAS

SEQ ID NO: 258137 - protein, 15 aa, Artificial Sequence
  Description of Artificial Sequence: Synthetic peptide
  Seed: EECLINDPWVLLNAS
EECYINLPHVLVNAS

SEQ ID NO: 258138 - protein, 15 aa, Artificial Sequence
  Description of Artificial Sequence: Synthetic peptide
  Seed: EECLINDPWVLLNAS
EECYINLPIVLANAS

SEQ ID NO: 258139 - protein, 15 aa, Artificial Sequence
  Description of Artificial Sequence: Synthetic peptide
  Seed: EECLINDPWVLLNAS
EECYINLPIVLGNAS

SEQ ID NO: 258140 - protein, 15 aa, Artificial Sequence
  Description of Artificial Sequence: Synthetic peptide
  Seed: EECLINDPWVLLNAS
EECYINLPIVLINAS

SEQ ID NO: 258141 - protein, 15 aa, Artificial Sequence
  Description of Artificial Sequence: Synthetic peptide
  Seed: EECLINDPWVLLNAS
EECYINLPIVLLNAS

SEQ ID NO: 258142 - protein, 15 aa, Artificial Sequence
  Description of Artificial Sequence: Synthetic peptide
  Seed: EECLINDPWVLLNAS
EECYINLPIVLMNAS

SEQ ID NO: 258143 - protein, 15 aa, Artificial Sequence
  Description of Artificial Sequence: Synthetic peptide
  Seed: EECLINDPWVLLNAS
EECYINLPIVLNNAS

SEQ ID NO: 258144 - protein, 15 aa, Artificial Sequence
  Description of Artificial Sequence: Synthetic peptide
  Seed: EECLINDPWVLLNAS
EECYINLPIVLSNAS

SEQ ID NO: 258145 - protein, 15 aa, Artificial Sequence
  Description of Artificial Sequence: Synthetic peptide
  Seed: EECLINDPWVLLNAS
EECYINLPIVLTNAS

SEQ ID NO: 258146 - protein, 15 aa, Artificial Sequence
  Description of Artificial Sequence: Synthetic peptide
  Seed: EECLINDPWVLLNAS
EECYINLPIVLVNAS

SEQ ID NO: 258147 - protein, 15 aa, Artificial Sequence
  Description of Artificial Sequence: Synthetic peptide
  Seed: EECLINDPWVLLNAS
EECYINLPLVLANAS

SEQ ID NO: 258148 - protein, 15 aa, Artificial Sequence
  Description of Artificial Sequence: Synthetic peptide
  Seed: EECLINDPWVLLNAS
EECYINLPLVLSNAS

SEQ ID NO: 258149 - protein, 15 aa, Artificial Sequence
  Description of Artificial Sequence: Synthetic peptide
  Seed: EECLINDPWVLLNAS
EECYINLPLVLVNAS

SEQ ID NO: 258150 - protein, 15 aa, Artificial Sequence
  Description of Artificial Sequence: Synthetic peptide
  Seed: EECLINDPWVLLNAS
EECYINLPMVLANAS

SEQ ID NO: 258151 - protein, 15 aa, Artificial Sequence
  Description of Artificial Sequence: Synthetic peptide
  Seed: EECLINDPWVLLNAS
EECYINLPMVLINAS

SEQ ID NO: 258152 - protein, 15 aa, Artificial Sequence
  Description of Artificial Sequence: Synthetic peptide
  Seed: EECLINDPWVLLNAS
EECYINLPMVLLNAS

SEQ ID NO: 258153 - protein, 15 aa, Artificial Sequence
  Description of Artificial Sequence: Synthetic peptide
  Seed: EECLINDPWVLLNAS
EECYINLPMVLMNAS

SEQ ID NO: 258154 - protein, 15 aa, Artificial Sequence
  Description of Artificial Sequence: Synthetic peptide
  Seed: EECLINDPWVLLNAS
EECYINLPMVLSNAS

SEQ ID NO: 258155 - protein, 15 aa, Artificial Sequence
  Description of Artificial Sequence: Synthetic peptide
  Seed: EECLINDPWVLLNAS
EECYINLPMVLTNAS

SEQ ID NO: 258156 - protein, 15 aa, Artificial Sequence
  Description of Artificial Sequence: Synthetic peptide
  Seed: EECLINDPWVLLNAS
EECYINLPMVLVNAS

SEQ ID NO: 258157 - protein, 15 aa, Artificial Sequence
  Description of Artificial Sequence: Synthetic peptide
  Seed: EECLINDPWVLLNAS
EECYINLPNVLANAS

SEQ ID NO: 258158 - protein, 15 aa, Artificial Sequence
  Description of Artificial Sequence: Synthetic peptide
  Seed: EECLINDPWVLLNAS
EECYINLPNVLCNAS

SEQ ID NO: 258159 - protein, 15 aa, Artificial Sequence
  Description of Artificial Sequence: Synthetic peptide
  Seed: EECLINDPWVLLNAS
EECYINLPNVLFNAS

SEQ ID NO: 258160 - protein, 15 aa, Artificial Sequence
  Description of Artificial Sequence: Synthetic peptide
  Seed: EECLINDPWVLLNAS
EECYINLPNVLGNAS

SEQ ID NO: 258161 - protein, 15 aa, Artificial Sequence
  Description of Artificial Sequence: Synthetic peptide
  Seed: EECLINDPWVLLNAS
EECYINLPNVLHNAS

SEQ ID NO: 258162 - protein, 15 aa, Artificial Sequence
  Description of Artificial Sequence: Synthetic peptide
  Seed: EECLINDPWVLLNAS
EECYINLPNVLINAS

SEQ ID NO: 258163 - protein, 15 aa, Artificial Sequence
  Description of Artificial Sequence: Synthetic peptide
  Seed: EECLINDPWVLLNAS
EECYINLPNVLKNAS

SEQ ID NO: 258164 - protein, 15 aa, Artificial Sequence
  Description of Artificial Sequence: Synthetic peptide
  Seed: EECLINDPWVLLNAS
EECYINLPNVLLNAS

SEQ ID NO: 258165 - protein, 15 aa, Artificial Sequence
  Description of Artificial Sequence: Synthetic peptide
  Seed: EECLINDPWVLLNAS
EECYINLPNVLMNAS

SEQ ID NO: 258166 - protein, 15 aa, Artificial Sequence
  Description of Artificial Sequence: Synthetic peptide
  Seed: EECLINDPWVLLNAS
EECYINLPNVLNNAS

SEQ ID NO: 258167 - protein, 15 aa, Artificial Sequence
  Description of Artificial Sequence: Synthetic peptide
  Seed: EECLINDPWVLLNAS
EECYINLPNVLPNAS

SEQ ID NO: 258168 - protein, 15 aa, Artificial Sequence
  Description of Artificial Sequence: Synthetic peptide
  Seed: EECLINDPWVLLNAS
EECYINLPNVLQNAS

SEQ ID NO: 258169 - protein, 15 aa, Artificial Sequence
  Description of Artificial Sequence: Synthetic peptide
  Seed: EECLINDPWVLLNAS
EECYINLPNVLRNAS

SEQ ID NO: 258170 - protein, 15 aa, Artificial Sequence
  Description of Artificial Sequence: Synthetic peptide
  Seed: EECLINDPWVLLNAS
EECYINLPNVLSNAS

SEQ ID NO: 258171 - protein, 15 aa, Artificial Sequence
  Description of Artificial Sequence: Synthetic peptide
  Seed: EECLINDPWVLLNAS
EECYINLPNVLTNAS

SEQ ID NO: 258172 - protein, 15 aa, Artificial Sequence
  Description of Artificial Sequence: Synthetic peptide
  Seed: EECLINDPWVLLNAS
EECYINLPNVLVNAS

SEQ ID NO: 258173 - protein, 15 aa, Artificial Sequence
  Description of Artificial Sequence: Synthetic peptide
  Seed: EECLINDPWVLLNAS
EECYINLPNVLYNAS

SEQ ID NO: 258174 - protein, 15 aa, Artificial Sequence
  Description of Artificial Sequence: Synthetic peptide
  Seed: EECLINDPWVLLNAS
EECYINLPPVLANAS

SEQ ID NO: 258175 - protein, 15 aa, Artificial Sequence
  Description of Artificial Sequence: Synthetic peptide
  Seed: EECLINDPWVLLNAS
EECYINLPPVLCNAS

SEQ ID NO: 258176 - protein, 15 aa, Artificial Sequence
  Description of Artificial Sequence: Synthetic peptide
  Seed: EECLINDPWVLLNAS
EECYINLPPVLFNAS

SEQ ID NO: 258177 - protein, 15 aa, Artificial Sequence
  Description of Artificial Sequence: Synthetic peptide
  Seed: EECLINDPWVLLNAS
EECYINLPPVLGNAS

SEQ ID NO: 258178 - protein, 15 aa, Artificial Sequence
  Description of Artificial Sequence: Synthetic peptide
  Seed: EECLINDPWVLLNAS
EECYINLPPVLHNAS

SEQ ID NO: 258179 - protein, 15 aa, Artificial Sequence
  Description of Artificial Sequence: Synthetic peptide
  Seed: EECLINDPWVLLNAS
EECYINLPPVLINAS

SEQ ID NO: 258180 - protein, 15 aa, Artificial Sequence
  Description of Artificial Sequence: Synthetic peptide
  Seed: EECLINDPWVLLNAS
EECYINLPPVLKNAS

SEQ ID NO: 258181 - protein, 15 aa, Artificial Sequence
  Description of Artificial Sequence: Synthetic peptide
  Seed: EECLINDPWVLLNAS
EECYINLPPVLLNAS

SEQ ID NO: 258182 - protein, 15 aa, Artificial Sequence
  Description of Artificial Sequence: Synthetic peptide
  Seed: EECLINDPWVLLNAS
EECYINLPPVLMNAS

SEQ ID NO: 258183 - protein, 15 aa, Artificial Sequence
  Description of Artificial Sequence: Synthetic peptide
  Seed: EECLINDPWVLLNAS
EECYINLPPVLNNAS

SEQ ID NO: 258184 - protein, 15 aa, Artificial Sequence
  Description of Artificial Sequence: Synthetic peptide
  Seed: EECLINDPWVLLNAS
EECYINLPPVLPNAS

SEQ ID NO: 258185 - protein, 15 aa, Artificial Sequence
  Description of Artificial Sequence: Synthetic peptide
  Seed: EECLINDPWVLLNAS
EECYINLPPVLQNAS

SEQ ID NO: 258186 - protein, 15 aa, Artificial Sequence
  Description of Artificial Sequence: Synthetic peptide
  Seed: EECLINDPWVLLNAS
EECYINLPPVLRNAS

SEQ ID NO: 258187 - protein, 15 aa, Artificial Sequence
  Description of Artificial Sequence: Synthetic peptide
  Seed: EECLINDPWVLLNAS
EECYINLPPVLSNAS

SEQ ID NO: 258188 - protein, 15 aa, Artificial Sequence
  Description of Artificial Sequence: Synthetic peptide
  Seed: EECLINDPWVLLNAS
EECYINLPPVLTNAS

SEQ ID NO: 258189 - protein, 15 aa, Artificial Sequence
  Description of Artificial Sequence: Synthetic peptide
  Seed: EECLINDPWVLLNAS
EECYINLPPVLVNAS

SEQ ID NO: 258190 - protein, 15 aa, Artificial Sequence
  Description of Artificial Sequence: Synthetic peptide
  Seed: EECLINDPWVLLNAS
EECYINLPPVLWNAS

SEQ ID NO: 258191 - protein, 15 aa, Artificial Sequence
  Description of Artificial Sequence: Synthetic peptide
  Seed: EECLINDPWVLLNAS
EECYINLPPVLYNAS

SEQ ID NO: 258192 - protein, 15 aa, Artificial Sequence
  Description of Artificial Sequence: Synthetic peptide
  Seed: EECLINDPWVLLNAS
EECYINLPQVLANAS

SEQ ID NO: 258193 - protein, 15 aa, Artificial Sequence
  Description of Artificial Sequence: Synthetic peptide
  Seed: EECLINDPWVLLNAS
EECYINLPQVLINAS

SEQ ID NO: 258194 - protein, 15 aa, Artificial Sequence
  Description of Artificial Sequence: Synthetic peptide
  Seed: EECLINDPWVLLNAS
EECYINLPQVLLNAS

SEQ ID NO: 258195 - protein, 15 aa, Artificial Sequence
  Description of Artificial Sequence: Synthetic peptide
  Seed: EECLINDPWVLLNAS
EECYINLPQVLMNAS

SEQ ID NO: 258196 - protein, 15 aa, Artificial Sequence
  Description of Artificial Sequence: Synthetic peptide
  Seed: EECLINDPWVLLNAS
EECYINLPQVLSNAS

SEQ ID NO: 258197 - protein, 15 aa, Artificial Sequence
  Description of Artificial Sequence: Synthetic peptide
  Seed: EECLINDPWVLLNAS
EECYINLPQVLTNAS

SEQ ID NO: 258198 - protein, 15 aa, Artificial Sequence
  Description of Artificial Sequence: Synthetic peptide
  Seed: EECLINDPWVLLNAS
EECYINLPQVLVNAS

SEQ ID NO: 258199 - protein, 15 aa, Artificial Sequence
  Description of Artificial Sequence: Synthetic peptide
  Seed: EECLINDPWVLLNAS
EECYINLPSVLANAS

SEQ ID NO: 258200 - protein, 15 aa, Artificial Sequence
  Description of Artificial Sequence: Synthetic peptide
  Seed: EECLINDPWVLLNAS
EECYINLPSVLCNAS

SEQ ID NO: 258201 - protein, 15 aa, Artificial Sequence
  Description of Artificial Sequence: Synthetic peptide
  Seed: EECLINDPWVLLNAS
EECYINLPSVLENAS

SEQ ID NO: 258202 - protein, 15 aa, Artificial Sequence
  Description of Artificial Sequence: Synthetic peptide
  Seed: EECLINDPWVLLNAS
EECYINLPSVLFNAS

SEQ ID NO: 258203 - protein, 15 aa, Artificial Sequence
  Description of Artificial Sequence: Synthetic peptide
  Seed: EECLINDPWVLLNAS
EECYINLPSVLGNAS

SEQ ID NO: 258204 - protein, 15 aa, Artificial Sequence
  Description of Artificial Sequence: Synthetic peptide
  Seed: EECLINDPWVLLNAS
EECYINLPSVLHNAS

SEQ ID NO: 258205 - protein, 15 aa, Artificial Sequence
  Description of Artificial Sequence: Synthetic peptide
  Seed: EECLINDPWVLLNAS
EECYINLPSVLINAS

SEQ ID NO: 258206 - protein, 15 aa, Artificial Sequence
  Description of Artificial Sequence: Synthetic peptide
  Seed: EECLINDPWVLLNAS
EECYINLPSVLKNAS

SEQ ID NO: 258207 - protein, 15 aa, Artificial Sequence
  Description of Artificial Sequence: Synthetic peptide
  Seed: EECLINDPWVLLNAS
EECYINLPSVLLNAS

SEQ ID NO: 258208 - protein, 15 aa, Artificial Sequence
  Description of Artificial Sequence: Synthetic peptide
  Seed: EECLINDPWVLLNAS
EECYINLPSVLMNAS

SEQ ID NO: 258209 - protein, 15 aa, Artificial Sequence
  Description of Artificial Sequence: Synthetic peptide
  Seed: EECLINDPWVLLNAS
EECYINLPSVLNNAS

SEQ ID NO: 258210 - protein, 15 aa, Artificial Sequence
  Description of Artificial Sequence: Synthetic peptide
  Seed: EECLINDPWVLLNAS
EECYINLPSVLPNAS

SEQ ID NO: 258211 - protein, 15 aa, Artificial Sequence
  Description of Artificial Sequence: Synthetic peptide
  Seed: EECLINDPWVLLNAS
EECYINLPSVLQNAS

SEQ ID NO: 258212 - protein, 15 aa, Artificial Sequence
  Description of Artificial Sequence: Synthetic peptide
  Seed: EECLINDPWVLLNAS
EECYINLPSVLRNAS

SEQ ID NO: 258213 - protein, 15 aa, Artificial Sequence
  Description of Artificial Sequence: Synthetic peptide
  Seed: EECLINDPWVLLNAS
EECYINLPSVLSNAS

SEQ ID NO: 258214 - protein, 15 aa, Artificial Sequence
  Description of Artificial Sequence: Synthetic peptide
  Seed: EECLINDPWVLLNAS
EECYINLPSVLTNAS

SEQ ID NO: 258215 - protein, 15 aa, Artificial Sequence
  Description of Artificial Sequence: Synthetic peptide
  Seed: EECLINDPWVLLNAS
EECYINLPSVLVNAS

SEQ ID NO: 258216 - protein, 15 aa, Artificial Sequence
  Description of Artificial Sequence: Synthetic peptide
  Seed: EECLINDPWVLLNAS
EECYINLPSVLWNAS

SEQ ID NO: 258217 - protein, 15 aa, Artificial Sequence
  Description of Artificial Sequence: Synthetic peptide
  Seed: EECLINDPWVLLNAS
EECYINLPSVLYNAS

SEQ ID NO: 258218 - protein, 15 aa, Artificial Sequence
  Description of Artificial Sequence: Synthetic peptide
  Seed: EECLINDPWVLLNAS
EECYINLPTVLANAS

SEQ ID NO: 258219 - protein, 15 aa, Artificial Sequence
  Description of Artificial Sequence: Synthetic peptide
  Seed: EECLINDPWVLLNAS
EECYINLPTVLCNAS

SEQ ID NO: 258220 - protein, 15 aa, Artificial Sequence
  Description of Artificial Sequence: Synthetic peptide
  Seed: EECLINDPWVLLNAS
EECYINLPTVLFNAS

SEQ ID NO: 258221 - protein, 15 aa, Artificial Sequence
  Description of Artificial Sequence: Synthetic peptide
  Seed: EECLINDPWVLLNAS
EECYINLPTVLGNAS

SEQ ID NO: 258222 - protein, 15 aa, Artificial Sequence
  Description of Artificial Sequence: Synthetic peptide
  Seed: EECLINDPWVLLNAS
EECYINLPTVLHNAS

SEQ ID NO: 258223 - protein, 15 aa, Artificial Sequence
  Description of Artificial Sequence: Synthetic peptide
  Seed: EECLINDPWVLLNAS
EECYINLPTVLINAS

SEQ ID NO: 258224 - protein, 15 aa, Artificial Sequence
  Description of Artificial Sequence: Synthetic peptide
  Seed: EECLINDPWVLLNAS
EECYINLPTVLKNAS

SEQ ID NO: 258225 - protein, 15 aa, Artificial Sequence
  Description of Artificial Sequence: Synthetic peptide
  Seed: EECLINDPWVLLNAS
EECYINLPTVLLNAS

SEQ ID NO: 258226 - protein, 15 aa, Artificial Sequence
  Description of Artificial Sequence: Synthetic peptide
  Seed: EECLINDPWVLLNAS
EECYINLPTVLMNAS

SEQ ID NO: 258227 - protein, 15 aa, Artificial Sequence
  Description of Artificial Sequence: Synthetic peptide
  Seed: EECLINDPWVLLNAS
EECYINLPTVLNNAS

SEQ ID NO: 258228 - protein, 15 aa, Artificial Sequence
  Description of Artificial Sequence: Synthetic peptide
  Seed: EECLINDPWVLLNAS
EECYINLPTVLPNAS

SEQ ID NO: 258229 - protein, 15 aa, Artificial Sequence
  Description of Artificial Sequence: Synthetic peptide
  Seed: EECLINDPWVLLNAS
EECYINLPTVLQNAS

SEQ ID NO: 258230 - protein, 15 aa, Artificial Sequence
  Description of Artificial Sequence: Synthetic peptide
  Seed: EECLINDPWVLLNAS
EECYINLPTVLRNAS

SEQ ID NO: 258231 - protein, 15 aa, Artificial Sequence
  Description of Artificial Sequence: Synthetic peptide
  Seed: EECLINDPWVLLNAS
EECYINLPTVLSNAS

SEQ ID NO: 258232 - protein, 15 aa, Artificial Sequence
  Description of Artificial Sequence: Synthetic peptide
  Seed: EECLINDPWVLLNAS
EECYINLPTVLTNAS

SEQ ID NO: 258233 - protein, 15 aa, Artificial Sequence
  Description of Artificial Sequence: Synthetic peptide
  Seed: EECLINDPWVLLNAS
EECYINLPTVLVNAS

SEQ ID NO: 258234 - protein, 15 aa, Artificial Sequence
  Description of Artificial Sequence: Synthetic peptide
  Seed: EECLINDPWVLLNAS
EECYINLPTVLYNAS

SEQ ID NO: 258235 - protein, 15 aa, Artificial Sequence
  Description of Artificial Sequence: Synthetic peptide
  Seed: EECLINDPWVLLNAS
EECYINLPVVLANAS

SEQ ID NO: 258236 - protein, 15 aa, Artificial Sequence
  Description of Artificial Sequence: Synthetic peptide
  Seed: EECLINDPWVLLNAS
EECYINLPVVLGNAS

SEQ ID NO: 258237 - protein, 15 aa, Artificial Sequence
  Description of Artificial Sequence: Synthetic peptide
  Seed: EECLINDPWVLLNAS
EECYINLPVVLHNAS

SEQ ID NO: 258238 - protein, 15 aa, Artificial Sequence
  Description of Artificial Sequence: Synthetic peptide
  Seed: EECLINDPWVLLNAS
EECYINLPVVLINAS

SEQ ID NO: 258239 - protein, 15 aa, Artificial Sequence
  Description of Artificial Sequence: Synthetic peptide
  Seed: EECLINDPWVLLNAS
EECYINLPVVLKNAS

SEQ ID NO: 258240 - protein, 15 aa, Artificial Sequence
  Description of Artificial Sequence: Synthetic peptide
  Seed: EECLINDPWVLLNAS
EECYINLPVVLLNAS

SEQ ID NO: 258241 - protein, 15 aa, Artificial Sequence
  Description of Artificial Sequence: Synthetic peptide
  Seed: EECLINDPWVLLNAS
EECYINLPVVLMNAS

SEQ ID NO: 258242 - protein, 15 aa, Artificial Sequence
  Description of Artificial Sequence: Synthetic peptide
  Seed: EECLINDPWVLLNAS
EECYINLPVVLNNAS

SEQ ID NO: 258243 - protein, 15 aa, Artificial Sequence
  Description of Artificial Sequence: Synthetic peptide
  Seed: EECLINDPWVLLNAS
EECYINLPVVLPNAS

SEQ ID NO: 258244 - protein, 15 aa, Artificial Sequence
  Description of Artificial Sequence: Synthetic peptide
  Seed: EECLINDPWVLLNAS
EECYINLPVVLRNAS

SEQ ID NO: 258245 - protein, 15 aa, Artificial Sequence
  Description of Artificial Sequence: Synthetic peptide
  Seed: EECLINDPWVLLNAS
EECYINLPVVLSNAS

SEQ ID NO: 258246 - protein, 15 aa, Artificial Sequence
  Description of Artificial Sequence: Synthetic peptide
  Seed: EECLINDPWVLLNAS
EECYINLPVVLTNAS

SEQ ID NO: 258247 - protein, 15 aa, Artificial Sequence
  Description of Artificial Sequence: Synthetic peptide
  Seed: EECLINDPWVLLNAS
EECYINLPVVLVNAS

SEQ ID NO: 258248 - protein, 15 aa, Artificial Sequence
  Description of Artificial Sequence: Synthetic peptide
  Seed: EECLINDPWVLLNAS
EECYINMPAVLANAS

SEQ ID NO: 258249 - protein, 15 aa, Artificial Sequence
  Description of Artificial Sequence: Synthetic peptide
  Seed: EECLINDPWVLLNAS
EECYINMPAVLCNAS

SEQ ID NO: 258250 - protein, 15 aa, Artificial Sequence
  Description of Artificial Sequence: Synthetic peptide
  Seed: EECLINDPWVLLNAS
EECYINMPAVLDNAS

SEQ ID NO: 258251 - protein, 15 aa, Artificial Sequence
  Description of Artificial Sequence: Synthetic peptide
  Seed: EECLINDPWVLLNAS
EECYINMPAVLENAS

SEQ ID NO: 258252 - protein, 15 aa, Artificial Sequence
  Description of Artificial Sequence: Synthetic peptide
  Seed: EECLINDPWVLLNAS
EECYINMPAVLFNAS

SEQ ID NO: 258253 - protein, 15 aa, Artificial Sequence
  Description of Artificial Sequence: Synthetic peptide
  Seed: EECLINDPWVLLNAS
EECYINMPAVLGNAS

SEQ ID NO: 258254 - protein, 15 aa, Artificial Sequence
  Description of Artificial Sequence: Synthetic peptide
  Seed: EECLINDPWVLLNAS
EECYINMPAVLHNAS

SEQ ID NO: 258255 - protein, 15 aa, Artificial Sequence
  Description of Artificial Sequence: Synthetic peptide
  Seed: EECLINDPWVLLNAS
EECYINMPAVLINAS

SEQ ID NO: 258256 - protein, 15 aa, Artificial Sequence
  Description of Artificial Sequence: Synthetic peptide
  Seed: EECLINDPWVLLNAS
EECYINMPAVLKNAS

SEQ ID NO: 258257 - protein, 15 aa, Artificial Sequence
  Description of Artificial Sequence: Synthetic peptide
  Seed: EECLINDPWVLLNAS
EECYINMPAVLLNAS

SEQ ID NO: 258258 - protein, 15 aa, Artificial Sequence
  Description of Artificial Sequence: Synthetic peptide
  Seed: EECLINDPWVLLNAS
EECYINMPAVLMNAS

SEQ ID NO: 258259 - protein, 15 aa, Artificial Sequence
  Description of Artificial Sequence: Synthetic peptide
  Seed: EECLINDPWVLLNAS
EECYINMPAVLNNAS

SEQ ID NO: 258260 - protein, 15 aa, Artificial Sequence
  Description of Artificial Sequence: Synthetic peptide
  Seed: EECLINDPWVLLNAS
EECYINMPAVLPNAS

SEQ ID NO: 258261 - protein, 15 aa, Artificial Sequence
  Description of Artificial Sequence: Synthetic peptide
  Seed: EECLINDPWVLLNAS
EECYINMPAVLQNAS

SEQ ID NO: 258262 - protein, 15 aa, Artificial Sequence
  Description of Artificial Sequence: Synthetic peptide
  Seed: EECLINDPWVLLNAS
EECYINMPAVLRNAS

SEQ ID NO: 258263 - protein, 15 aa, Artificial Sequence
  Description of Artificial Sequence: Synthetic peptide
  Seed: EECLINDPWVLLNAS
EECYINMPAVLSNAS

SEQ ID NO: 258264 - protein, 15 aa, Artificial Sequence
  Description of Artificial Sequence: Synthetic peptide
  Seed: EECLINDPWVLLNAS
EECYINMPAVLTNAS

SEQ ID NO: 258265 - protein, 15 aa, Artificial Sequence
  Description of Artificial Sequence: Synthetic peptide
  Seed: EECLINDPWVLLNAS
EECYINMPAVLVNAS

SEQ ID NO: 258266 - protein, 15 aa, Artificial Sequence
  Description of Artificial Sequence: Synthetic peptide
  Seed: EECLINDPWVLLNAS
EECYINMPAVLWNAS

SEQ ID NO: 258267 - protein, 15 aa, Artificial Sequence
  Description of Artificial Sequence: Synthetic peptide
  Seed: EECLINDPWVLLNAS
EECYINMPAVLYNAS

SEQ ID NO: 258268 - protein, 15 aa, Artificial Sequence
  Description of Artificial Sequence: Synthetic peptide
  Seed: EECLINDPWVLLNAS
EECYINMPCVLANAS

SEQ ID NO: 258269 - protein, 15 aa, Artificial Sequence
  Description of Artificial Sequence: Synthetic peptide
  Seed: EECLINDPWVLLNAS
EECYINMPCVLINAS

SEQ ID NO: 258270 - protein, 15 aa, Artificial Sequence
  Description of Artificial Sequence: Synthetic peptide
  Seed: EECLINDPWVLLNAS
EECYINMPCVLLNAS

SEQ ID NO: 258271 - protein, 15 aa, Artificial Sequence
  Description of Artificial Sequence: Synthetic peptide
  Seed: EECLINDPWVLLNAS
EECYINMPCVLVNAS

SEQ ID NO: 258272 - protein, 15 aa, Artificial Sequence
  Description of Artificial Sequence: Synthetic peptide
  Seed: EECLINDPWVLLNAS
EECYINMPDVLINAS

SEQ ID NO: 258273 - protein, 15 aa, Artificial Sequence
  Description of Artificial Sequence: Synthetic peptide
  Seed: EECLINDPWVLLNAS
EECYINMPDVLLNAS

SEQ ID NO: 258274 - protein, 15 aa, Artificial Sequence
  Description of Artificial Sequence: Synthetic peptide
  Seed: EECLINDPWVLLNAS
EECYINMPDVLVNAS

SEQ ID NO: 258275 - protein, 15 aa, Artificial Sequence
  Description of Artificial Sequence: Synthetic peptide
  Seed: EECLINDPWVLLNAS
EECYINMPEVLANAS

SEQ ID NO: 258276 - protein, 15 aa, Artificial Sequence
  Description of Artificial Sequence: Synthetic peptide
  Seed: EECLINDPWVLLNAS
EECYINMPEVLINAS

SEQ ID NO: 258277 - protein, 15 aa, Artificial Sequence
  Description of Artificial Sequence: Synthetic peptide
  Seed: EECLINDPWVLLNAS
EECYINMPEVLLNAS

SEQ ID NO: 258278 - protein, 15 aa, Artificial Sequence
  Description of Artificial Sequence: Synthetic peptide
  Seed: EECLINDPWVLLNAS
EECYINMPEVLVNAS

SEQ ID NO: 258279 - protein, 15 aa, Artificial Sequence
  Description of Artificial Sequence: Synthetic peptide
  Seed: EECLINDPWVLLNAS
EECYINMPFVLINAS

SEQ ID NO: 258280 - protein, 15 aa, Artificial Sequence
  Description of Artificial Sequence: Synthetic peptide
  Seed: EECLINDPWVLLNAS
EECYINMPFVLLNAS

SEQ ID NO: 258281 - protein, 15 aa, Artificial Sequence
  Description of Artificial Sequence: Synthetic peptide
  Seed: EECLINDPWVLLNAS
EECYINMPFVLVNAS

SEQ ID NO: 258282 - protein, 15 aa, Artificial Sequence
  Description of Artificial Sequence: Synthetic peptide
  Seed: EECLINDPWVLLNAS
EECYINMPGVLANAS

SEQ ID NO: 258283 - protein, 15 aa, Artificial Sequence
  Description of Artificial Sequence: Synthetic peptide
  Seed: EECLINDPWVLLNAS
EECYINMPGVLCNAS

SEQ ID NO: 258284 - protein, 15 aa, Artificial Sequence
  Description of Artificial Sequence: Synthetic peptide
  Seed: EECLINDPWVLLNAS
EECYINMPGVLENAS

SEQ ID NO: 258285 - protein, 15 aa, Artificial Sequence
  Description of Artificial Sequence: Synthetic peptide
  Seed: EECLINDPWVLLNAS
EECYINMPGVLFNAS

SEQ ID NO: 258286 - protein, 15 aa, Artificial Sequence
  Description of Artificial Sequence: Synthetic peptide
  Seed: EECLINDPWVLLNAS
EECYINMPGVLGNAS

SEQ ID NO: 258287 - protein, 15 aa, Artificial Sequence
  Description of Artificial Sequence: Synthetic peptide
  Seed: EECLINDPWVLLNAS
EECYINMPGVLHNAS

SEQ ID NO: 258288 - protein, 15 aa, Artificial Sequence
  Description of Artificial Sequence: Synthetic peptide
  Seed: EECLINDPWVLLNAS
EECYINMPGVLINAS

SEQ ID NO: 258289 - protein, 15 aa, Artificial Sequence
  Description of Artificial Sequence: Synthetic peptide
  Seed: EECLINDPWVLLNAS
EECYINMPGVLKNAS

SEQ ID NO: 258290 - protein, 15 aa, Artificial Sequence
  Description of Artificial Sequence: Synthetic peptide
  Seed: EECLINDPWVLLNAS
EECYINMPGVLLNAS

SEQ ID NO: 258291 - protein, 15 aa, Artificial Sequence
  Description of Artificial Sequence: Synthetic peptide
  Seed: EECLINDPWVLLNAS
EECYINMPGVLMNAS

SEQ ID NO: 258292 - protein, 15 aa, Artificial Sequence
  Description of Artificial Sequence: Synthetic peptide
  Seed: EECLINDPWVLLNAS
EECYINMPGVLNNAS

SEQ ID NO: 258293 - protein, 15 aa, Artificial Sequence
  Description of Artificial Sequence: Synthetic peptide
  Seed: EECLINDPWVLLNAS
EECYINMPGVLPNAS

SEQ ID NO: 258294 - protein, 15 aa, Artificial Sequence
  Description of Artificial Sequence: Synthetic peptide
  Seed: EECLINDPWVLLNAS
EECYINMPGVLQNAS

SEQ ID NO: 258295 - protein, 15 aa, Artificial Sequence
  Description of Artificial Sequence: Synthetic peptide
  Seed: EECLINDPWVLLNAS
EECYINMPGVLRNAS

SEQ ID NO: 258296 - protein, 15 aa, Artificial Sequence
  Description of Artificial Sequence: Synthetic peptide
  Seed: EECLINDPWVLLNAS
EECYINMPGVLSNAS

SEQ ID NO: 258297 - protein, 15 aa, Artificial Sequence
  Description of Artificial Sequence: Synthetic peptide
  Seed: EECLINDPWVLLNAS
EECYINMPGVLTNAS

SEQ ID NO: 258298 - protein, 15 aa, Artificial Sequence
  Description of Artificial Sequence: Synthetic peptide
  Seed: EECLINDPWVLLNAS
EECYINMPGVLVNAS

SEQ ID NO: 258299 - protein, 15 aa, Artificial Sequence
  Description of Artificial Sequence: Synthetic peptide
  Seed: EECLINDPWVLLNAS
EECYINMPGVLWNAS

SEQ ID NO: 258300 - protein, 15 aa, Artificial Sequence
  Description of Artificial Sequence: Synthetic peptide
  Seed: EECLINDPWVLLNAS
EECYINMPGVLYNAS

SEQ ID NO: 258301 - protein, 15 aa, Artificial Sequence
  Description of Artificial Sequence: Synthetic peptide
  Seed: EECLINDPWVLLNAS
EECYINMPHVLANAS

SEQ ID NO: 258302 - protein, 15 aa, Artificial Sequence
  Description of Artificial Sequence: Synthetic peptide
  Seed: EECLINDPWVLLNAS
EECYINMPHVLINAS

SEQ ID NO: 258303 - protein, 15 aa, Artificial Sequence
  Description of Artificial Sequence: Synthetic peptide
  Seed: EECLINDPWVLLNAS
EECYINMPHVLLNAS

SEQ ID NO: 258304 - protein, 15 aa, Artificial Sequence
  Description of Artificial Sequence: Synthetic peptide
  Seed: EECLINDPWVLLNAS
EECYINMPHVLMNAS

SEQ ID NO: 258305 - protein, 15 aa, Artificial Sequence
  Description of Artificial Sequence: Synthetic peptide
  Seed: EECLINDPWVLLNAS
EECYINMPHVLSNAS

SEQ ID NO: 258306 - protein, 15 aa, Artificial Sequence
  Description of Artificial Sequence: Synthetic peptide
  Seed: EECLINDPWVLLNAS
EECYINMPHVLTNAS

SEQ ID NO: 258307 - protein, 15 aa, Artificial Sequence
  Description of Artificial Sequence: Synthetic peptide
  Seed: EECLINDPWVLLNAS
EECYINMPHVLVNAS

SEQ ID NO: 258308 - protein, 15 aa, Artificial Sequence
  Description of Artificial Sequence: Synthetic peptide
  Seed: EECLINDPWVLLNAS
EECYINMPIVLANAS

SEQ ID NO: 258309 - protein, 15 aa, Artificial Sequence
  Description of Artificial Sequence: Synthetic peptide
  Seed: EECLINDPWVLLNAS
EECYINMPIVLGNAS

SEQ ID NO: 258310 - protein, 15 aa, Artificial Sequence
  Description of Artificial Sequence: Synthetic peptide
  Seed: EECLINDPWVLLNAS
EECYINMPIVLINAS

SEQ ID NO: 258311 - protein, 15 aa, Artificial Sequence
  Description of Artificial Sequence: Synthetic peptide
  Seed: EECLINDPWVLLNAS
EECYINMPIVLLNAS

SEQ ID NO: 258312 - protein, 15 aa, Artificial Sequence
  Description of Artificial Sequence: Synthetic peptide
  Seed: EECLINDPWVLLNAS
EECYINMPIVLMNAS

SEQ ID NO: 258313 - protein, 15 aa, Artificial Sequence
  Description of Artificial Sequence: Synthetic peptide
  Seed: EECLINDPWVLLNAS
EECYINMPIVLNNAS

SEQ ID NO: 258314 - protein, 15 aa, Artificial Sequence
  Description of Artificial Sequence: Synthetic peptide
  Seed: EECLINDPWVLLNAS
EECYINMPIVLSNAS

SEQ ID NO: 258315 - protein, 15 aa, Artificial Sequence
  Description of Artificial Sequence: Synthetic peptide
  Seed: EECLINDPWVLLNAS
EECYINMPIVLTNAS

SEQ ID NO: 258316 - protein, 15 aa, Artificial Sequence
  Description of Artificial Sequence: Synthetic peptide
  Seed: EECLINDPWVLLNAS
EECYINMPIVLVNAS

SEQ ID NO: 258317 - protein, 15 aa, Artificial Sequence
  Description of Artificial Sequence: Synthetic peptide
  Seed: EECLINDPWVLLNAS
EECYINMPLVLANAS

SEQ ID NO: 258318 - protein, 15 aa, Artificial Sequence
  Description of Artificial Sequence: Synthetic peptide
  Seed: EECLINDPWVLLNAS
EECYINMPLVLINAS

SEQ ID NO: 258319 - protein, 15 aa, Artificial Sequence
  Description of Artificial Sequence: Synthetic peptide
  Seed: EECLINDPWVLLNAS
EECYINMPLVLLNAS

SEQ ID NO: 258320 - protein, 15 aa, Artificial Sequence
  Description of Artificial Sequence: Synthetic peptide
  Seed: EECLINDPWVLLNAS
EECYINMPLVLSNAS

SEQ ID NO: 258321 - protein, 15 aa, Artificial Sequence
  Description of Artificial Sequence: Synthetic peptide
  Seed: EECLINDPWVLLNAS
EECYINMPLVLTNAS

SEQ ID NO: 258322 - protein, 15 aa, Artificial Sequence
  Description of Artificial Sequence: Synthetic peptide
  Seed: EECLINDPWVLLNAS
EECYINMPLVLVNAS

SEQ ID NO: 258323 - protein, 15 aa, Artificial Sequence
  Description of Artificial Sequence: Synthetic peptide
  Seed: EECLINDPWVLLNAS
EECYINMPMVLANAS

SEQ ID NO: 258324 - protein, 15 aa, Artificial Sequence
  Description of Artificial Sequence: Synthetic peptide
  Seed: EECLINDPWVLLNAS
EECYINMPMVLINAS

SEQ ID NO: 258325 - protein, 15 aa, Artificial Sequence
  Description of Artificial Sequence: Synthetic peptide
  Seed: EECLINDPWVLLNAS
EECYINMPMVLLNAS

SEQ ID NO: 258326 - protein, 15 aa, Artificial Sequence
  Description of Artificial Sequence: Synthetic peptide
  Seed: EECLINDPWVLLNAS
EECYINMPMVLMNAS

SEQ ID NO: 258327 - protein, 15 aa, Artificial Sequence
  Description of Artificial Sequence: Synthetic peptide
  Seed: EECLINDPWVLLNAS
EECYINMPMVLSNAS

SEQ ID NO: 258328 - protein, 15 aa, Artificial Sequence
  Description of Artificial Sequence: Synthetic peptide
  Seed: EECLINDPWVLLNAS
EECYINMPMVLTNAS

SEQ ID NO: 258329 - protein, 15 aa, Artificial Sequence
  Description of Artificial Sequence: Synthetic peptide
  Seed: EECLINDPWVLLNAS
EECYINMPMVLVNAS

SEQ ID NO: 258330 - protein, 15 aa, Artificial Sequence
  Description of Artificial Sequence: Synthetic peptide
  Seed: EECLINDPWVLLNAS
EECYINMPNVLANAS

SEQ ID NO: 258331 - protein, 15 aa, Artificial Sequence
  Description of Artificial Sequence: Synthetic peptide
  Seed: EECLINDPWVLLNAS
EECYINMPNVLCNAS

SEQ ID NO: 258332 - protein, 15 aa, Artificial Sequence
  Description of Artificial Sequence: Synthetic peptide
  Seed: EECLINDPWVLLNAS
EECYINMPNVLFNAS

SEQ ID NO: 258333 - protein, 15 aa, Artificial Sequence
  Description of Artificial Sequence: Synthetic peptide
  Seed: EECLINDPWVLLNAS
EECYINMPNVLGNAS

SEQ ID NO: 258334 - protein, 15 aa, Artificial Sequence
  Description of Artificial Sequence: Synthetic peptide
  Seed: EECLINDPWVLLNAS
EECYINMPNVLHNAS

SEQ ID NO: 258335 - protein, 15 aa, Artificial Sequence
  Description of Artificial Sequence: Synthetic peptide
  Seed: EECLINDPWVLLNAS
EECYINMPNVLINAS

SEQ ID NO: 258336 - protein, 15 aa, Artificial Sequence
  Description of Artificial Sequence: Synthetic peptide
  Seed: EECLINDPWVLLNAS
EECYINMPNVLKNAS

SEQ ID NO: 258337 - protein, 15 aa, Artificial Sequence
  Description of Artificial Sequence: Synthetic peptide
  Seed: EECLINDPWVLLNAS
EECYINMPNVLLNAS

SEQ ID NO: 258338 - protein, 15 aa, Artificial Sequence
  Description of Artificial Sequence: Synthetic peptide
  Seed: EECLINDPWVLLNAS
EECYINMPNVLMNAS

SEQ ID NO: 258339 - protein, 15 aa, Artificial Sequence
  Description of Artificial Sequence: Synthetic peptide
  Seed: EECLINDPWVLLNAS
EECYINMPNVLNNAS

SEQ ID NO: 258340 - protein, 15 aa, Artificial Sequence
  Description of Artificial Sequence: Synthetic peptide
  Seed: EECLINDPWVLLNAS
EECYINMPNVLPNAS

SEQ ID NO: 258341 - protein, 15 aa, Artificial Sequence
  Description of Artificial Sequence: Synthetic peptide
  Seed: EECLINDPWVLLNAS
EECYINMPNVLQNAS

SEQ ID NO: 258342 - protein, 15 aa, Artificial Sequence
  Description of Artificial Sequence: Synthetic peptide
  Seed: EECLINDPWVLLNAS
EECYINMPNVLRNAS

SEQ ID NO: 258343 - protein, 15 aa, Artificial Sequence
  Description of Artificial Sequence: Synthetic peptide
  Seed: EECLINDPWVLLNAS
EECYINMPNVLSNAS

SEQ ID NO: 258344 - protein, 15 aa, Artificial Sequence
  Description of Artificial Sequence: Synthetic peptide
  Seed: EECLINDPWVLLNAS
EECYINMPNVLTNAS

SEQ ID NO: 258345 - protein, 15 aa, Artificial Sequence
  Description of Artificial Sequence: Synthetic peptide
  Seed: EECLINDPWVLLNAS
EECYINMPNVLVNAS

SEQ ID NO: 258346 - protein, 15 aa, Artificial Sequence
  Description of Artificial Sequence: Synthetic peptide
  Seed: EECLINDPWVLLNAS
EECYINMPNVLYNAS

SEQ ID NO: 258347 - protein, 15 aa, Artificial Sequence
  Description of Artificial Sequence: Synthetic peptide
  Seed: EECLINDPWVLLNAS
EECYINMPPVLANAS

SEQ ID NO: 258348 - protein, 15 aa, Artificial Sequence
  Description of Artificial Sequence: Synthetic peptide
  Seed: EECLINDPWVLLNAS
EECYINMPPVLCNAS

SEQ ID NO: 258349 - protein, 15 aa, Artificial Sequence
  Description of Artificial Sequence: Synthetic peptide
  Seed: EECLINDPWVLLNAS
EECYINMPPVLFNAS

SEQ ID NO: 258350 - protein, 15 aa, Artificial Sequence
  Description of Artificial Sequence: Synthetic peptide
  Seed: EECLINDPWVLLNAS
EECYINMPPVLGNAS

SEQ ID NO: 258351 - protein, 15 aa, Artificial Sequence
  Description of Artificial Sequence: Synthetic peptide
  Seed: EECLINDPWVLLNAS
EECYINMPPVLHNAS

SEQ ID NO: 258352 - protein, 15 aa, Artificial Sequence
  Description of Artificial Sequence: Synthetic peptide
  Seed: EECLINDPWVLLNAS
EECYINMPPVLINAS

SEQ ID NO: 258353 - protein, 15 aa, Artificial Sequence
  Description of Artificial Sequence: Synthetic peptide
  Seed: EECLINDPWVLLNAS
EECYINMPPVLKNAS

SEQ ID NO: 258354 - protein, 15 aa, Artificial Sequence
  Description of Artificial Sequence: Synthetic peptide
  Seed: EECLINDPWVLLNAS
EECYINMPPVLLNAS

SEQ ID NO: 258355 - protein, 15 aa, Artificial Sequence
  Description of Artificial Sequence: Synthetic peptide
  Seed: EECLINDPWVLLNAS
EECYINMPPVLMNAS

SEQ ID NO: 258356 - protein, 15 aa, Artificial Sequence
  Description of Artificial Sequence: Synthetic peptide
  Seed: EECLINDPWVLLNAS
EECYINMPPVLNNAS

SEQ ID NO: 258357 - protein, 15 aa, Artificial Sequence
  Description of Artificial Sequence: Synthetic peptide
  Seed: EECLINDPWVLLNAS
EECYINMPPVLPNAS

SEQ ID NO: 258358 - protein, 15 aa, Artificial Sequence
  Description of Artificial Sequence: Synthetic peptide
  Seed: EECLINDPWVLLNAS
EECYINMPPVLQNAS

SEQ ID NO: 258359 - protein, 15 aa, Artificial Sequence
  Description of Artificial Sequence: Synthetic peptide
  Seed: EECLINDPWVLLNAS
EECYINMPPVLRNAS

SEQ ID NO: 258360 - protein, 15 aa, Artificial Sequence
  Description of Artificial Sequence: Synthetic peptide
  Seed: EECLINDPWVLLNAS
EECYINMPPVLSNAS

SEQ ID NO: 258361 - protein, 15 aa, Artificial Sequence
  Description of Artificial Sequence: Synthetic peptide
  Seed: EECLINDPWVLLNAS
EECYINMPPVLTNAS

SEQ ID NO: 258362 - protein, 15 aa, Artificial Sequence
  Description of Artificial Sequence: Synthetic peptide
  Seed: EECLINDPWVLLNAS
EECYINMPPVLVNAS

SEQ ID NO: 258363 - protein, 15 aa, Artificial Sequence
  Description of Artificial Sequence: Synthetic peptide
  Seed: EECLINDPWVLLNAS
EECYINMPPVLWNAS

SEQ ID NO: 258364 - protein, 15 aa, Artificial Sequence
  Description of Artificial Sequence: Synthetic peptide
  Seed: EECLINDPWVLLNAS
EECYINMPPVLYNAS

SEQ ID NO: 258365 - protein, 15 aa, Artificial Sequence
  Description of Artificial Sequence: Synthetic peptide
  Seed: EECLINDPWVLLNAS
EECYINMPQVLANAS

SEQ ID NO: 258366 - protein, 15 aa, Artificial Sequence
  Description of Artificial Sequence: Synthetic peptide
  Seed: EECLINDPWVLLNAS
EECYINMPQVLINAS

SEQ ID NO: 258367 - protein, 15 aa, Artificial Sequence
  Description of Artificial Sequence: Synthetic peptide
  Seed: EECLINDPWVLLNAS
EECYINMPQVLLNAS

SEQ ID NO: 258368 - protein, 15 aa, Artificial Sequence
  Description of Artificial Sequence: Synthetic peptide
  Seed: EECLINDPWVLLNAS
EECYINMPQVLMNAS

SEQ ID NO: 258369 - protein, 15 aa, Artificial Sequence
  Description of Artificial Sequence: Synthetic peptide
  Seed: EECLINDPWVLLNAS
EECYINMPQVLTNAS

SEQ ID NO: 258370 - protein, 15 aa, Artificial Sequence
  Description of Artificial Sequence: Synthetic peptide
  Seed: EECLINDPWVLLNAS
EECYINMPQVLVNAS

SEQ ID NO: 258371 - protein, 15 aa, Artificial Sequence
  Description of Artificial Sequence: Synthetic peptide
  Seed: EECLINDPWVLLNAS
EECYINMPSVLANAS

SEQ ID NO: 258372 - protein, 15 aa, Artificial Sequence
  Description of Artificial Sequence: Synthetic peptide
  Seed: EECLINDPWVLLNAS
EECYINMPSVLCNAS

SEQ ID NO: 258373 - protein, 15 aa, Artificial Sequence
  Description of Artificial Sequence: Synthetic peptide
  Seed: EECLINDPWVLLNAS
EECYINMPSVLENAS

SEQ ID NO: 258374 - protein, 15 aa, Artificial Sequence
  Description of Artificial Sequence: Synthetic peptide
  Seed: EECLINDPWVLLNAS
EECYINMPSVLFNAS

SEQ ID NO: 258375 - protein, 15 aa, Artificial Sequence
  Description of Artificial Sequence: Synthetic peptide
  Seed: EECLINDPWVLLNAS
EECYINMPSVLGNAS

SEQ ID NO: 258376 - protein, 15 aa, Artificial Sequence
  Description of Artificial Sequence: Synthetic peptide
  Seed: EECLINDPWVLLNAS
EECYINMPSVLHNAS

SEQ ID NO: 258377 - protein, 15 aa, Artificial Sequence
  Description of Artificial Sequence: Synthetic peptide
  Seed: EECLINDPWVLLNAS
EECYINMPSVLINAS

SEQ ID NO: 258378 - protein, 15 aa, Artificial Sequence
  Description of Artificial Sequence: Synthetic peptide
  Seed: EECLINDPWVLLNAS
EECYINMPSVLKNAS

SEQ ID NO: 258379 - protein, 15 aa, Artificial Sequence
  Description of Artificial Sequence: Synthetic peptide
  Seed: EECLINDPWVLLNAS
EECYINMPSVLLNAS

SEQ ID NO: 258380 - protein, 15 aa, Artificial Sequence
  Description of Artificial Sequence: Synthetic peptide
  Seed: EECLINDPWVLLNAS
EECYINMPSVLMNAS

SEQ ID NO: 258381 - protein, 15 aa, Artificial Sequence
  Description of Artificial Sequence: Synthetic peptide
  Seed: EECLINDPWVLLNAS
EECYINMPSVLNNAS

SEQ ID NO: 258382 - protein, 15 aa, Artificial Sequence
  Description of Artificial Sequence: Synthetic peptide
  Seed: EECLINDPWVLLNAS
EECYINMPSVLPNAS

SEQ ID NO: 258383 - protein, 15 aa, Artificial Sequence
  Description of Artificial Sequence: Synthetic peptide
  Seed: EECLINDPWVLLNAS
EECYINMPSVLQNAS

SEQ ID NO: 258384 - protein, 15 aa, Artificial Sequence
  Description of Artificial Sequence: Synthetic peptide
  Seed: EECLINDPWVLLNAS
EECYINMPSVLRNAS

SEQ ID NO: 258385 - protein, 15 aa, Artificial Sequence
  Description of Artificial Sequence: Synthetic peptide
  Seed: EECLINDPWVLLNAS
EECYINMPSVLSNAS

SEQ ID NO: 258386 - protein, 15 aa, Artificial Sequence
  Description of Artificial Sequence: Synthetic peptide
  Seed: EECLINDPWVLLNAS
EECYINMPSVLTNAS

SEQ ID NO: 258387 - protein, 15 aa, Artificial Sequence
  Description of Artificial Sequence: Synthetic peptide
  Seed: EECLINDPWVLLNAS
EECYINMPSVLVNAS

SEQ ID NO: 258388 - protein, 15 aa, Artificial Sequence
  Description of Artificial Sequence: Synthetic peptide
  Seed: EECLINDPWVLLNAS
EECYINMPSVLWNAS

SEQ ID NO: 258389 - protein, 15 aa, Artificial Sequence
  Description of Artificial Sequence: Synthetic peptide
  Seed: EECLINDPWVLLNAS
EECYINMPSVLYNAS

SEQ ID NO: 258390 - protein, 15 aa, Artificial Sequence
  Description of Artificial Sequence: Synthetic peptide
  Seed: EECLINDPWVLLNAS
EECYINMPTVLANAS

SEQ ID NO: 258391 - protein, 15 aa, Artificial Sequence
  Description of Artificial Sequence: Synthetic peptide
  Seed: EECLINDPWVLLNAS
EECYINMPTVLCNAS

SEQ ID NO: 258392 - protein, 15 aa, Artificial Sequence
  Description of Artificial Sequence: Synthetic peptide
  Seed: EECLINDPWVLLNAS
EECYINMPTVLFNAS

SEQ ID NO: 258393 - protein, 15 aa, Artificial Sequence
  Description of Artificial Sequence: Synthetic peptide
  Seed: EECLINDPWVLLNAS
EECYINMPTVLGNAS

SEQ ID NO: 258394 - protein, 15 aa, Artificial Sequence
  Description of Artificial Sequence: Synthetic peptide
  Seed: EECLINDPWVLLNAS
EECYINMPTVLHNAS

SEQ ID NO: 258395 - protein, 15 aa, Artificial Sequence
  Description of Artificial Sequence: Synthetic peptide
  Seed: EECLINDPWVLLNAS
EECYINMPTVLINAS

SEQ ID NO: 258396 - protein, 15 aa, Artificial Sequence
  Description of Artificial Sequence: Synthetic peptide
  Seed: EECLINDPWVLLNAS
EECYINMPTVLKNAS

SEQ ID NO: 258397 - protein, 15 aa, Artificial Sequence
  Description of Artificial Sequence: Synthetic peptide
  Seed: EECLINDPWVLLNAS
EECYINMPTVLLNAS

SEQ ID NO: 258398 - protein, 15 aa, Artificial Sequence
  Description of Artificial Sequence: Synthetic peptide
  Seed: EECLINDPWVLLNAS
EECYINMPTVLMNAS

SEQ ID NO: 258399 - protein, 15 aa, Artificial Sequence
  Description of Artificial Sequence: Synthetic peptide
  Seed: EECLINDPWVLLNAS
EECYINMPTVLNNAS

SEQ ID NO: 258400 - protein, 15 aa, Artificial Sequence
  Description of Artificial Sequence: Synthetic peptide
  Seed: EECLINDPWVLLNAS
EECYINMPTVLPNAS

SEQ ID NO: 258401 - protein, 15 aa, Artificial Sequence
  Description of Artificial Sequence: Synthetic peptide
  Seed: EECLINDPWVLLNAS
EECYINMPTVLQNAS

SEQ ID NO: 258402 - protein, 15 aa, Artificial Sequence
  Description of Artificial Sequence: Synthetic peptide
  Seed: EECLINDPWVLLNAS
EECYINMPTVLRNAS

SEQ ID NO: 258403 - protein, 15 aa, Artificial Sequence
  Description of Artificial Sequence: Synthetic peptide
  Seed: EECLINDPWVLLNAS
EECYINMPTVLSNAS

SEQ ID NO: 258404 - protein, 15 aa, Artificial Sequence
  Description of Artificial Sequence: Synthetic peptide
  Seed: EECLINDPWVLLNAS
EECYINMPTVLTNAS

SEQ ID NO: 258405 - protein, 15 aa, Artificial Sequence
  Description of Artificial Sequence: Synthetic peptide
  Seed: EECLINDPWVLLNAS
EECYINMPTVLVNAS

SEQ ID NO: 258406 - protein, 15 aa, Artificial Sequence
  Description of Artificial Sequence: Synthetic peptide
  Seed: EECLINDPWVLLNAS
EECYINMPTVLYNAS

SEQ ID NO: 258407 - protein, 15 aa, Artificial Sequence
  Description of Artificial Sequence: Synthetic peptide
  Seed: EECLINDPWVLLNAS
EECYINMPVVLANAS

SEQ ID NO: 258408 - protein, 15 aa, Artificial Sequence
  Description of Artificial Sequence: Synthetic peptide
  Seed: EECLINDPWVLLNAS
EECYINMPVVLGNAS

SEQ ID NO: 258409 - protein, 15 aa, Artificial Sequence
  Description of Artificial Sequence: Synthetic peptide
  Seed: EECLINDPWVLLNAS
EECYINMPVVLHNAS

SEQ ID NO: 258410 - protein, 15 aa, Artificial Sequence
  Description of Artificial Sequence: Synthetic peptide
  Seed: EECLINDPWVLLNAS
EECYINMPVVLINAS

SEQ ID NO: 258411 - protein, 15 aa, Artificial Sequence
  Description of Artificial Sequence: Synthetic peptide
  Seed: EECLINDPWVLLNAS
EECYINMPVVLKNAS

SEQ ID NO: 258412 - protein, 15 aa, Artificial Sequence
  Description of Artificial Sequence: Synthetic peptide
  Seed: EECLINDPWVLLNAS
EECYINMPVVLLNAS

SEQ ID NO: 258413 - protein, 15 aa, Artificial Sequence
  Description of Artificial Sequence: Synthetic peptide
  Seed: EECLINDPWVLLNAS
EECYINMPVVLMNAS

SEQ ID NO: 258414 - protein, 15 aa, Artificial Sequence
  Description of Artificial Sequence: Synthetic peptide
  Seed: EECLINDPWVLLNAS
EECYINMPVVLNNAS

SEQ ID NO: 258415 - protein, 15 aa, Artificial Sequence
  Description of Artificial Sequence: Synthetic peptide
  Seed: EECLINDPWVLLNAS
EECYINMPVVLQNAS

SEQ ID NO: 258416 - protein, 15 aa, Artificial Sequence
  Description of Artificial Sequence: Synthetic peptide
  Seed: EECLINDPWVLLNAS
EECYINMPVVLRNAS

SEQ ID NO: 258417 - protein, 15 aa, Artificial Sequence
  Description of Artificial Sequence: Synthetic peptide
  Seed: EECLINDPWVLLNAS
EECYINMPVVLSNAS

SEQ ID NO: 258418 - protein, 15 aa, Artificial Sequence
  Description of Artificial Sequence: Synthetic peptide
  Seed: EECLINDPWVLLNAS
EECYINMPVVLTNAS

SEQ ID NO: 258419 - protein, 15 aa, Artificial Sequence
  Description of Artificial Sequence: Synthetic peptide
  Seed: EECLINDPWVLLNAS
EECYINMPVVLVNAS

SEQ ID NO: 258420 - protein, 15 aa, Artificial Sequence
  Description of Artificial Sequence: Synthetic peptide
  Seed: EECLINDPWVLLNAS
EECYINNPAVLANAS

SEQ ID NO: 258421 - protein, 15 aa, Artificial Sequence
  Description of Artificial Sequence: Synthetic peptide
  Seed: EECLINDPWVLLNAS
EECYINNPAVLFNAS

SEQ ID NO: 258422 - protein, 15 aa, Artificial Sequence
  Description of Artificial Sequence: Synthetic peptide
  Seed: EECLINDPWVLLNAS
EECYINNPAVLINAS

SEQ ID NO: 258423 - protein, 15 aa, Artificial Sequence
  Description of Artificial Sequence: Synthetic peptide
  Seed: EECLINDPWVLLNAS
EECYINNPAVLLNAS

SEQ ID NO: 258424 - protein, 15 aa, Artificial Sequence
  Description of Artificial Sequence: Synthetic peptide
  Seed: EECLINDPWVLLNAS
EECYINNPAVLMNAS

SEQ ID NO: 258425 - protein, 15 aa, Artificial Sequence
  Description of Artificial Sequence: Synthetic peptide
  Seed: EECLINDPWVLLNAS
EECYINNPAVLSNAS

SEQ ID NO: 258426 - protein, 15 aa, Artificial Sequence
  Description of Artificial Sequence: Synthetic peptide
  Seed: EECLINDPWVLLNAS
EECYINNPAVLTNAS

SEQ ID NO: 258427 - protein, 15 aa, Artificial Sequence
  Description of Artificial Sequence: Synthetic peptide
  Seed: EECLINDPWVLLNAS
EECYINNPAVLVNAS

SEQ ID NO: 258428 - protein, 15 aa, Artificial Sequence
  Description of Artificial Sequence: Synthetic peptide
  Seed: EECLINDPWVLLNAS
EECYINNPAVLWNAS

SEQ ID NO: 258429 - protein, 15 aa, Artificial Sequence
  Description of Artificial Sequence: Synthetic peptide
  Seed: EECLINDPWVLLNAS
EECYINNPAVLYNAS

SEQ ID NO: 258430 - protein, 15 aa, Artificial Sequence
  Description of Artificial Sequence: Synthetic peptide
  Seed: EECLINDPWVLLNAS
EECYINNPGVLANAS

SEQ ID NO: 258431 - protein, 15 aa, Artificial Sequence
  Description of Artificial Sequence: Synthetic peptide
  Seed: EECLINDPWVLLNAS
EECYINNPGVLFNAS

SEQ ID NO: 258432 - protein, 15 aa, Artificial Sequence
  Description of Artificial Sequence: Synthetic peptide
  Seed: EECLINDPWVLLNAS
EECYINNPGVLINAS

SEQ ID NO: 258433 - protein, 15 aa, Artificial Sequence
  Description of Artificial Sequence: Synthetic peptide
  Seed: EECLINDPWVLLNAS
EECYINNPGVLLNAS

SEQ ID NO: 258434 - protein, 15 aa, Artificial Sequence
  Description of Artificial Sequence: Synthetic peptide
  Seed: EECLINDPWVLLNAS
EECYINNPGVLMNAS

SEQ ID NO: 258435 - protein, 15 aa, Artificial Sequence
  Description of Artificial Sequence: Synthetic peptide
  Seed: EECLINDPWVLLNAS
EECYINNPGVLVNAS

SEQ ID NO: 258436 - protein, 15 aa, Artificial Sequence
  Description of Artificial Sequence: Synthetic peptide
  Seed: EECLINDPWVLLNAS
EECYINNPIVLANAS

SEQ ID NO: 258437 - protein, 15 aa, Artificial Sequence
  Description of Artificial Sequence: Synthetic peptide
  Seed: EECLINDPWVLLNAS
EECYINNPIVLFNAS

SEQ ID NO: 258438 - protein, 15 aa, Artificial Sequence
  Description of Artificial Sequence: Synthetic peptide
  Seed: EECLINDPWVLLNAS
EECYINNPIVLINAS

SEQ ID NO: 258439 - protein, 15 aa, Artificial Sequence
  Description of Artificial Sequence: Synthetic peptide
  Seed: EECLINDPWVLLNAS
EECYINNPIVLLNAS

SEQ ID NO: 258440 - protein, 15 aa, Artificial Sequence
  Description of Artificial Sequence: Synthetic peptide
  Seed: EECLINDPWVLLNAS
EECYINNPIVLMNAS

SEQ ID NO: 258441 - protein, 15 aa, Artificial Sequence
  Description of Artificial Sequence: Synthetic peptide
  Seed: EECLINDPWVLLNAS
EECYINNPIVLVNAS

SEQ ID NO: 258442 - protein, 15 aa, Artificial Sequence
  Description of Artificial Sequence: Synthetic peptide
  Seed: EECLINDPWVLLNAS
EECYINNPIVLYNAS

SEQ ID NO: 258443 - protein, 15 aa, Artificial Sequence
  Description of Artificial Sequence: Synthetic peptide
  Seed: EECLINDPWVLLNAS
EECYINNPLVLINAS

SEQ ID NO: 258444 - protein, 15 aa, Artificial Sequence
  Description of Artificial Sequence: Synthetic peptide
  Seed: EECLINDPWVLLNAS
EECYINNPLVLVNAS

SEQ ID NO: 258445 - protein, 15 aa, Artificial Sequence
  Description of Artificial Sequence: Synthetic peptide
  Seed: EECLINDPWVLLNAS
EECYINNPMVLINAS

SEQ ID NO: 258446 - protein, 15 aa, Artificial Sequence
  Description of Artificial Sequence: Synthetic peptide
  Seed: EECLINDPWVLLNAS
EECYINNPMVLLNAS

SEQ ID NO: 258447 - protein, 15 aa, Artificial Sequence
  Description of Artificial Sequence: Synthetic peptide
  Seed: EECLINDPWVLLNAS
EECYINNPMVLVNAS

SEQ ID NO: 258448 - protein, 15 aa, Artificial Sequence
  Description of Artificial Sequence: Synthetic peptide
  Seed: EECLINDPWVLLNAS
EECYINNPNVLFNAS

SEQ ID NO: 258449 - protein, 15 aa, Artificial Sequence
  Description of Artificial Sequence: Synthetic peptide
  Seed: EECLINDPWVLLNAS
EECYINNPNVLINAS

SEQ ID NO: 258450 - protein, 15 aa, Artificial Sequence
  Description of Artificial Sequence: Synthetic peptide
  Seed: EECLINDPWVLLNAS
EECYINNPNVLLNAS

SEQ ID NO: 258451 - protein, 15 aa, Artificial Sequence
  Description of Artificial Sequence: Synthetic peptide
  Seed: EECLINDPWVLLNAS
EECYINNPNVLMNAS

SEQ ID NO: 258452 - protein, 15 aa, Artificial Sequence
  Description of Artificial Sequence: Synthetic peptide
  Seed: EECLINDPWVLLNAS
EECYINNPNVLVNAS

SEQ ID NO: 258453 - protein, 15 aa, Artificial Sequence
  Description of Artificial Sequence: Synthetic peptide
  Seed: EECLINDPWVLLNAS
EECYINNPNVLYNAS

SEQ ID NO: 258454 - protein, 15 aa, Artificial Sequence
  Description of Artificial Sequence: Synthetic peptide
  Seed: EECLINDPWVLLNAS
EECYINNPPVLFNAS

SEQ ID NO: 258455 - protein, 15 aa, Artificial Sequence
  Description of Artificial Sequence: Synthetic peptide
  Seed: EECLINDPWVLLNAS
EECYINNPPVLINAS

SEQ ID NO: 258456 - protein, 15 aa, Artificial Sequence
  Description of Artificial Sequence: Synthetic peptide
  Seed: EECLINDPWVLLNAS
EECYINNPPVLLNAS

SEQ ID NO: 258457 - protein, 15 aa, Artificial Sequence
  Description of Artificial Sequence: Synthetic peptide
  Seed: EECLINDPWVLLNAS
EECYINNPPVLVNAS

SEQ ID NO: 258458 - protein, 15 aa, Artificial Sequence
  Description of Artificial Sequence: Synthetic peptide
  Seed: EECLINDPWVLLNAS
EECYINNPSVLANAS

SEQ ID NO: 258459 - protein, 15 aa, Artificial Sequence
  Description of Artificial Sequence: Synthetic peptide
  Seed: EECLINDPWVLLNAS
EECYINNPSVLFNAS

SEQ ID NO: 258460 - protein, 15 aa, Artificial Sequence
  Description of Artificial Sequence: Synthetic peptide
  Seed: EECLINDPWVLLNAS
EECYINNPSVLINAS

SEQ ID NO: 258461 - protein, 15 aa, Artificial Sequence
  Description of Artificial Sequence: Synthetic peptide
  Seed: EECLINDPWVLLNAS
EECYINNPSVLLNAS

SEQ ID NO: 258462 - protein, 15 aa, Artificial Sequence
  Description of Artificial Sequence: Synthetic peptide
  Seed: EECLINDPWVLLNAS
EECYINNPSVLMNAS

SEQ ID NO: 258463 - protein, 15 aa, Artificial Sequence
  Description of Artificial Sequence: Synthetic peptide
  Seed: EECLINDPWVLLNAS
EECYINNPSVLVNAS

SEQ ID NO: 258464 - protein, 15 aa, Artificial Sequence
  Description of Artificial Sequence: Synthetic peptide
  Seed: EECLINDPWVLLNAS
EECYINNPSVLYNAS

SEQ ID NO: 258465 - protein, 15 aa, Artificial Sequence
  Description of Artificial Sequence: Synthetic peptide
  Seed: EECLINDPWVLLNAS
EECYINNPTVLFNAS

SEQ ID NO: 258466 - protein, 15 aa, Artificial Sequence
  Description of Artificial Sequence: Synthetic peptide
  Seed: EECLINDPWVLLNAS
EECYINNPTVLINAS

SEQ ID NO: 258467 - protein, 15 aa, Artificial Sequence
  Description of Artificial Sequence: Synthetic peptide
  Seed: EECLINDPWVLLNAS
EECYINNPTVLLNAS

SEQ ID NO: 258468 - protein, 15 aa, Artificial Sequence
  Description of Artificial Sequence: Synthetic peptide
  Seed: EECLINDPWVLLNAS
EECYINNPTVLVNAS

SEQ ID NO: 258469 - protein, 15 aa, Artificial Sequence
  Description of Artificial Sequence: Synthetic peptide
  Seed: EECLINDPWVLLNAS
EECYINNPTVLYNAS

SEQ ID NO: 258470 - protein, 15 aa, Artificial Sequence
  Description of Artificial Sequence: Synthetic peptide
  Seed: EECLINDPWVLLNAS
EECYINNPVVLANAS

SEQ ID NO: 258471 - protein, 15 aa, Artificial Sequence
  Description of Artificial Sequence: Synthetic peptide
  Seed: EECLINDPWVLLNAS
EECYINNPVVLFNAS

SEQ ID NO: 258472 - protein, 15 aa, Artificial Sequence
  Description of Artificial Sequence: Synthetic peptide
  Seed: EECLINDPWVLLNAS
EECYINNPVVLINAS

SEQ ID NO: 258473 - protein, 15 aa, Artificial Sequence
  Description of Artificial Sequence: Synthetic peptide
  Seed: EECLINDPWVLLNAS
EECYINNPVVLLNAS

SEQ ID NO: 258474 - protein, 15 aa, Artificial Sequence
  Description of Artificial Sequence: Synthetic peptide
  Seed: EECLINDPWVLLNAS
EECYINNPVVLMNAS

SEQ ID NO: 258475 - protein, 15 aa, Artificial Sequence
  Description of Artificial Sequence: Synthetic peptide
  Seed: EECLINDPWVLLNAS
EECYINNPVVLVNAS

SEQ ID NO: 258476 - protein, 15 aa, Artificial Sequence
  Description of Artificial Sequence: Synthetic peptide
  Seed: EECLINDPWVLLNAS
EECYINNPVVLYNAS

SEQ ID NO: 258477 - protein, 15 aa, Artificial Sequence
  Description of Artificial Sequence: Synthetic peptide
  Seed: EECLINDPWVLLNAS
EECYINQPAVLANAS

SEQ ID NO: 258478 - protein, 15 aa, Artificial Sequence
  Description of Artificial Sequence: Synthetic peptide
  Seed: EECLINDPWVLLNAS
EECYINQPAVLCNAS

SEQ ID NO: 258479 - protein, 15 aa, Artificial Sequence
  Description of Artificial Sequence: Synthetic peptide
  Seed: EECLINDPWVLLNAS
EECYINQPAVLFNAS

SEQ ID NO: 258480 - protein, 15 aa, Artificial Sequence
  Description of Artificial Sequence: Synthetic peptide
  Seed: EECLINDPWVLLNAS
EECYINQPAVLGNAS

SEQ ID NO: 258481 - protein, 15 aa, Artificial Sequence
  Description of Artificial Sequence: Synthetic peptide
  Seed: EECLINDPWVLLNAS
EECYINQPAVLINAS

SEQ ID NO: 258482 - protein, 15 aa, Artificial Sequence
  Description of Artificial Sequence: Synthetic peptide
  Seed: EECLINDPWVLLNAS
EECYINQPAVLLNAS

SEQ ID NO: 258483 - protein, 15 aa, Artificial Sequence
  Description of Artificial Sequence: Synthetic peptide
  Seed: EECLINDPWVLLNAS
EECYINQPAVLMNAS

SEQ ID NO: 258484 - protein, 15 aa, Artificial Sequence
  Description of Artificial Sequence: Synthetic peptide
  Seed: EECLINDPWVLLNAS
EECYINQPAVLNNAS

SEQ ID NO: 258485 - protein, 15 aa, Artificial Sequence
  Description of Artificial Sequence: Synthetic peptide
  Seed: EECLINDPWVLLNAS
EECYINQPAVLSNAS

SEQ ID NO: 258486 - protein, 15 aa, Artificial Sequence
  Description of Artificial Sequence: Synthetic peptide
  Seed: EECLINDPWVLLNAS
EECYINQPAVLTNAS

SEQ ID NO: 258487 - protein, 15 aa, Artificial Sequence
  Description of Artificial Sequence: Synthetic peptide
  Seed: EECLINDPWVLLNAS
EECYINQPAVLVNAS

SEQ ID NO: 258488 - protein, 15 aa, Artificial Sequence
  Description of Artificial Sequence: Synthetic peptide
  Seed: EECLINDPWVLLNAS
EECYINQPFVLINAS

SEQ ID NO: 258489 - protein, 15 aa, Artificial Sequence
  Description of Artificial Sequence: Synthetic peptide
  Seed: EECLINDPWVLLNAS
EECYINQPFVLLNAS

SEQ ID NO: 258490 - protein, 15 aa, Artificial Sequence
  Description of Artificial Sequence: Synthetic peptide
  Seed: EECLINDPWVLLNAS
EECYINQPFVLVNAS

SEQ ID NO: 258491 - protein, 15 aa, Artificial Sequence
  Description of Artificial Sequence: Synthetic peptide
  Seed: EECLINDPWVLLNAS
EECYINQPGVLANAS

SEQ ID NO: 258492 - protein, 15 aa, Artificial Sequence
  Description of Artificial Sequence: Synthetic peptide
  Seed: EECLINDPWVLLNAS
EECYINQPGVLGNAS

SEQ ID NO: 258493 - protein, 15 aa, Artificial Sequence
  Description of Artificial Sequence: Synthetic peptide
  Seed: EECLINDPWVLLNAS
EECYINQPGVLINAS

SEQ ID NO: 258494 - protein, 15 aa, Artificial Sequence
  Description of Artificial Sequence: Synthetic peptide
  Seed: EECLINDPWVLLNAS
EECYINQPGVLLNAS

SEQ ID NO: 258495 - protein, 15 aa, Artificial Sequence
  Description of Artificial Sequence: Synthetic peptide
  Seed: EECLINDPWVLLNAS
EECYINQPGVLMNAS

SEQ ID NO: 258496 - protein, 15 aa, Artificial Sequence
  Description of Artificial Sequence: Synthetic peptide
  Seed: EECLINDPWVLLNAS
EECYINQPGVLSNAS

SEQ ID NO: 258497 - protein, 15 aa, Artificial Sequence
  Description of Artificial Sequence: Synthetic peptide
  Seed: EECLINDPWVLLNAS
EECYINQPGVLTNAS

SEQ ID NO: 258498 - protein, 15 aa, Artificial Sequence
  Description of Artificial Sequence: Synthetic peptide
  Seed: EECLINDPWVLLNAS
EECYINQPGVLVNAS

SEQ ID NO: 258499 - protein, 15 aa, Artificial Sequence
  Description of Artificial Sequence: Synthetic peptide
  Seed: EECLINDPWVLLNAS
EECYINQPNVLANAS

SEQ ID NO: 258500 - protein, 15 aa, Artificial Sequence
  Description of Artificial Sequence: Synthetic peptide
  Seed: EECLINDPWVLLNAS
EECYINQPNVLINAS

SEQ ID NO: 258501 - protein, 15 aa, Artificial Sequence
  Description of Artificial Sequence: Synthetic peptide
  Seed: EECLINDPWVLLNAS
EECYINQPNVLLNAS

SEQ ID NO: 258502 - protein, 15 aa, Artificial Sequence
  Description of Artificial Sequence: Synthetic peptide
  Seed: EECLINDPWVLLNAS
EECYINQPNVLMNAS

SEQ ID NO: 258503 - protein, 15 aa, Artificial Sequence
  Description of Artificial Sequence: Synthetic peptide
  Seed: EECLINDPWVLLNAS
EECYINQPNVLSNAS

SEQ ID NO: 258504 - protein, 15 aa, Artificial Sequence
  Description of Artificial Sequence: Synthetic peptide
  Seed: EECLINDPWVLLNAS
EECYINQPNVLTNAS

SEQ ID NO: 258505 - protein, 15 aa, Artificial Sequence
  Description of Artificial Sequence: Synthetic peptide
  Seed: EECLINDPWVLLNAS
EECYINQPNVLVNAS

SEQ ID NO: 258506 - protein, 15 aa, Artificial Sequence
  Description of Artificial Sequence: Synthetic peptide
  Seed: EECLINDPWVLLNAS
EECYINQPPVLANAS

SEQ ID NO: 258507 - protein, 15 aa, Artificial Sequence
  Description of Artificial Sequence: Synthetic peptide
  Seed: EECLINDPWVLLNAS
EECYINQPPVLINAS

SEQ ID NO: 258508 - protein, 15 aa, Artificial Sequence
  Description of Artificial Sequence: Synthetic peptide
  Seed: EECLINDPWVLLNAS
EECYINQPPVLLNAS

SEQ ID NO: 258509 - protein, 15 aa, Artificial Sequence
  Description of Artificial Sequence: Synthetic peptide
  Seed: EECLINDPWVLLNAS
EECYINQPPVLMNAS

SEQ ID NO: 258510 - protein, 15 aa, Artificial Sequence
  Description of Artificial Sequence: Synthetic peptide
  Seed: EECLINDPWVLLNAS
EECYINQPPVLSNAS

SEQ ID NO: 258511 - protein, 15 aa, Artificial Sequence
  Description of Artificial Sequence: Synthetic peptide
  Seed: EECLINDPWVLLNAS
EECYINQPPVLTNAS

SEQ ID NO: 258512 - protein, 15 aa, Artificial Sequence
  Description of Artificial Sequence: Synthetic peptide
  Seed: EECLINDPWVLLNAS
EECYINQPPVLVNAS

SEQ ID NO: 258513 - protein, 15 aa, Artificial Sequence
  Description of Artificial Sequence: Synthetic peptide
  Seed: EECLINDPWVLLNAS
EECYINQPSVLANAS

SEQ ID NO: 258514 - protein, 15 aa, Artificial Sequence
  Description of Artificial Sequence: Synthetic peptide
  Seed: EECLINDPWVLLNAS
EECYINQPSVLGNAS

SEQ ID NO: 258515 - protein, 15 aa, Artificial Sequence
  Description of Artificial Sequence: Synthetic peptide
  Seed: EECLINDPWVLLNAS
EECYINQPSVLINAS

SEQ ID NO: 258516 - protein, 15 aa, Artificial Sequence
  Description of Artificial Sequence: Synthetic peptide
  Seed: EECLINDPWVLLNAS
EECYINQPSVLLNAS

SEQ ID NO: 258517 - protein, 15 aa, Artificial Sequence
  Description of Artificial Sequence: Synthetic peptide
  Seed: EECLINDPWVLLNAS
EECYINQPSVLMNAS

SEQ ID NO: 258518 - protein, 15 aa, Artificial Sequence
  Description of Artificial Sequence: Synthetic peptide
  Seed: EECLINDPWVLLNAS
EECYINQPSVLSNAS

SEQ ID NO: 258519 - protein, 15 aa, Artificial Sequence
  Description of Artificial Sequence: Synthetic peptide
  Seed: EECLINDPWVLLNAS
EECYINQPSVLTNAS

SEQ ID NO: 258520 - protein, 15 aa, Artificial Sequence
  Description of Artificial Sequence: Synthetic peptide
  Seed: EECLINDPWVLLNAS
EECYINQPSVLVNAS

SEQ ID NO: 258521 - protein, 15 aa, Artificial Sequence
  Description of Artificial Sequence: Synthetic peptide
  Seed: EECLINDPWVLLNAS
EECYINQPTVLANAS

SEQ ID NO: 258522 - protein, 15 aa, Artificial Sequence
  Description of Artificial Sequence: Synthetic peptide
  Seed: EECLINDPWVLLNAS
EECYINQPTVLINAS

SEQ ID NO: 258523 - protein, 15 aa, Artificial Sequence
  Description of Artificial Sequence: Synthetic peptide
  Seed: EECLINDPWVLLNAS
EECYINQPTVLLNAS

SEQ ID NO: 258524 - protein, 15 aa, Artificial Sequence
  Description of Artificial Sequence: Synthetic peptide
  Seed: EECLINDPWVLLNAS
EECYINQPTVLMNAS

SEQ ID NO: 258525 - protein, 15 aa, Artificial Sequence
  Description of Artificial Sequence: Synthetic peptide
  Seed: EECLINDPWVLLNAS
EECYINQPTVLSNAS

SEQ ID NO: 258526 - protein, 15 aa, Artificial Sequence
  Description of Artificial Sequence: Synthetic peptide
  Seed: EECLINDPWVLLNAS
EECYINQPTVLTNAS

SEQ ID NO: 258527 - protein, 15 aa, Artificial Sequence
  Description of Artificial Sequence: Synthetic peptide
  Seed: EECLINDPWVLLNAS
EECYINQPTVLVNAS

SEQ ID NO: 258528 - protein, 15 aa, Artificial Sequence
  Description of Artificial Sequence: Synthetic peptide
  Seed: EECLINDPWVLLNAS
EECYINQPVVLANAS

SEQ ID NO: 258529 - protein, 15 aa, Artificial Sequence
  Description of Artificial Sequence: Synthetic peptide
  Seed: EECLINDPWVLLNAS
EECYINQPVVLINAS

SEQ ID NO: 258530 - protein, 15 aa, Artificial Sequence
  Description of Artificial Sequence: Synthetic peptide
  Seed: EECLINDPWVLLNAS
EECYINQPVVLLNAS

SEQ ID NO: 258531 - protein, 15 aa, Artificial Sequence
  Description of Artificial Sequence: Synthetic peptide
  Seed: EECLINDPWVLLNAS
EECYINQPVVLVNAS

SEQ ID NO: 258532 - protein, 15 aa, Artificial Sequence
  Description of Artificial Sequence: Synthetic peptide
  Seed: EECLINDPWVLLNAS
EECYINRPAVLLNAS

SEQ ID NO: 258533 - protein, 15 aa, Artificial Sequence
  Description of Artificial Sequence: Synthetic peptide
  Seed: EECLINDPWVLLNAS
EECYINSPAVLANAS

SEQ ID NO: 258534 - protein, 15 aa, Artificial Sequence
  Description of Artificial Sequence: Synthetic peptide
  Seed: EECLINDPWVLLNAS
EECYINSPAVLFNAS

SEQ ID NO: 258535 - protein, 15 aa, Artificial Sequence
  Description of Artificial Sequence: Synthetic peptide
  Seed: EECLINDPWVLLNAS
EECYINSPAVLGNAS

SEQ ID NO: 258536 - protein, 15 aa, Artificial Sequence
  Description of Artificial Sequence: Synthetic peptide
  Seed: EECLINDPWVLLNAS
EECYINSPAVLINAS

SEQ ID NO: 258537 - protein, 15 aa, Artificial Sequence
  Description of Artificial Sequence: Synthetic peptide
  Seed: EECLINDPWVLLNAS
EECYINSPAVLLNAS

SEQ ID NO: 258538 - protein, 15 aa, Artificial Sequence
  Description of Artificial Sequence: Synthetic peptide
  Seed: EECLINDPWVLLNAS
EECYINSPAVLMNAS

SEQ ID NO: 258539 - protein, 15 aa, Artificial Sequence
  Description of Artificial Sequence: Synthetic peptide
  Seed: EECLINDPWVLLNAS
EECYINSPAVLSNAS

SEQ ID NO: 258540 - protein, 15 aa, Artificial Sequence
  Description of Artificial Sequence: Synthetic peptide
  Seed: EECLINDPWVLLNAS
EECYINSPAVLTNAS

SEQ ID NO: 258541 - protein, 15 aa, Artificial Sequence
  Description of Artificial Sequence: Synthetic peptide
  Seed: EECLINDPWVLLNAS
EECYINSPAVLVNAS

SEQ ID NO: 258542 - protein, 15 aa, Artificial Sequence
  Description of Artificial Sequence: Synthetic peptide
  Seed: EECLINDPWVLLNAS
EECYINSPFVLFNAS

SEQ ID NO: 258543 - protein, 15 aa, Artificial Sequence
  Description of Artificial Sequence: Synthetic peptide
  Seed: EECLINDPWVLLNAS
EECYINSPFVLINAS

SEQ ID NO: 258544 - protein, 15 aa, Artificial Sequence
  Description of Artificial Sequence: Synthetic peptide
  Seed: EECLINDPWVLLNAS
EECYINSPFVLLNAS

SEQ ID NO: 258545 - protein, 15 aa, Artificial Sequence
  Description of Artificial Sequence: Synthetic peptide
  Seed: EECLINDPWVLLNAS
EECYINSPFVLMNAS

SEQ ID NO: 258546 - protein, 15 aa, Artificial Sequence
  Description of Artificial Sequence: Synthetic peptide
  Seed: EECLINDPWVLLNAS
EECYINSPFVLVNAS

SEQ ID NO: 258547 - protein, 15 aa, Artificial Sequence
  Description of Artificial Sequence: Synthetic peptide
  Seed: EECLINDPWVLLNAS
EECYINSPGVLANAS

SEQ ID NO: 258548 - protein, 15 aa, Artificial Sequence
  Description of Artificial Sequence: Synthetic peptide
  Seed: EECLINDPWVLLNAS
EECYINSPGVLGNAS

SEQ ID NO: 258549 - protein, 15 aa, Artificial Sequence
  Description of Artificial Sequence: Synthetic peptide
  Seed: EECLINDPWVLLNAS
EECYINSPGVLINAS

SEQ ID NO: 258550 - protein, 15 aa, Artificial Sequence
  Description of Artificial Sequence: Synthetic peptide
  Seed: EECLINDPWVLLNAS
EECYINSPGVLLNAS

SEQ ID NO: 258551 - protein, 15 aa, Artificial Sequence
  Description of Artificial Sequence: Synthetic peptide
  Seed: EECLINDPWVLLNAS
EECYINSPGVLMNAS

SEQ ID NO: 258552 - protein, 15 aa, Artificial Sequence
  Description of Artificial Sequence: Synthetic peptide
  Seed: EECLINDPWVLLNAS
EECYINSPGVLSNAS

SEQ ID NO: 258553 - protein, 15 aa, Artificial Sequence
  Description of Artificial Sequence: Synthetic peptide
  Seed: EECLINDPWVLLNAS
EECYINSPGVLTNAS

SEQ ID NO: 258554 - protein, 15 aa, Artificial Sequence
  Description of Artificial Sequence: Synthetic peptide
  Seed: EECLINDPWVLLNAS
EECYINSPGVLVNAS

SEQ ID NO: 258555 - protein, 15 aa, Artificial Sequence
  Description of Artificial Sequence: Synthetic peptide
  Seed: EECLINDPWVLLNAS
EECYINSPNVLANAS

SEQ ID NO: 258556 - protein, 15 aa, Artificial Sequence
  Description of Artificial Sequence: Synthetic peptide
  Seed: EECLINDPWVLLNAS
EECYINSPNVLINAS

SEQ ID NO: 258557 - protein, 15 aa, Artificial Sequence
  Description of Artificial Sequence: Synthetic peptide
  Seed: EECLINDPWVLLNAS
EECYINSPNVLLNAS

SEQ ID NO: 258558 - protein, 15 aa, Artificial Sequence
  Description of Artificial Sequence: Synthetic peptide
  Seed: EECLINDPWVLLNAS
EECYINSPNVLVNAS

SEQ ID NO: 258559 - protein, 15 aa, Artificial Sequence
  Description of Artificial Sequence: Synthetic peptide
  Seed: EECLINDPWVLLNAS
EECYINSPPVLANAS

SEQ ID NO: 258560 - protein, 15 aa, Artificial Sequence
  Description of Artificial Sequence: Synthetic peptide
  Seed: EECLINDPWVLLNAS
EECYINSPPVLINAS

SEQ ID NO: 258561 - protein, 15 aa, Artificial Sequence
  Description of Artificial Sequence: Synthetic peptide
  Seed: EECLINDPWVLLNAS
EECYINSPPVLLNAS

SEQ ID NO: 258562 - protein, 15 aa, Artificial Sequence
  Description of Artificial Sequence: Synthetic peptide
  Seed: EECLINDPWVLLNAS
EECYINSPPVLMNAS

SEQ ID NO: 258563 - protein, 15 aa, Artificial Sequence
  Description of Artificial Sequence: Synthetic peptide
  Seed: EECLINDPWVLLNAS
EECYINSPPVLSNAS

SEQ ID NO: 258564 - protein, 15 aa, Artificial Sequence
  Description of Artificial Sequence: Synthetic peptide
  Seed: EECLINDPWVLLNAS
EECYINSPPVLTNAS

SEQ ID NO: 258565 - protein, 15 aa, Artificial Sequence
  Description of Artificial Sequence: Synthetic peptide
  Seed: EECLINDPWVLLNAS
EECYINSPPVLVNAS

SEQ ID NO: 258566 - protein, 15 aa, Artificial Sequence
  Description of Artificial Sequence: Synthetic peptide
  Seed: EECLINDPWVLLNAS
EECYINSPSVLANAS

SEQ ID NO: 258567 - protein, 15 aa, Artificial Sequence
  Description of Artificial Sequence: Synthetic peptide
  Seed: EECLINDPWVLLNAS
EECYINSPSVLGNAS

SEQ ID NO: 258568 - protein, 15 aa, Artificial Sequence
  Description of Artificial Sequence: Synthetic peptide
  Seed: EECLINDPWVLLNAS
EECYINSPSVLINAS

SEQ ID NO: 258569 - protein, 15 aa, Artificial Sequence
  Description of Artificial Sequence: Synthetic peptide
  Seed: EECLINDPWVLLNAS
EECYINSPSVLLNAS

SEQ ID NO: 258570 - protein, 15 aa, Artificial Sequence
  Description of Artificial Sequence: Synthetic peptide
  Seed: EECLINDPWVLLNAS
EECYINSPSVLMNAS

SEQ ID NO: 258571 - protein, 15 aa, Artificial Sequence
  Description of Artificial Sequence: Synthetic peptide
  Seed: EECLINDPWVLLNAS
EECYINSPSVLSNAS

SEQ ID NO: 258572 - protein, 15 aa, Artificial Sequence
  Description of Artificial Sequence: Synthetic peptide
  Seed: EECLINDPWVLLNAS
EECYINSPSVLTNAS

SEQ ID NO: 258573 - protein, 15 aa, Artificial Sequence
  Description of Artificial Sequence: Synthetic peptide
  Seed: EECLINDPWVLLNAS
EECYINSPSVLVNAS

SEQ ID NO: 258574 - protein, 15 aa, Artificial Sequence
  Description of Artificial Sequence: Synthetic peptide
  Seed: EECLINDPWVLLNAS
EECYINSPTVLANAS

SEQ ID NO: 258575 - protein, 15 aa, Artificial Sequence
  Description of Artificial Sequence: Synthetic peptide
  Seed: EECLINDPWVLLNAS
EECYINSPTVLINAS

SEQ ID NO: 258576 - protein, 15 aa, Artificial Sequence
  Description of Artificial Sequence: Synthetic peptide
  Seed: EECLINDPWVLLNAS
EECYINSPTVLLNAS

SEQ ID NO: 258577 - protein, 15 aa, Artificial Sequence
  Description of Artificial Sequence: Synthetic peptide
  Seed: EECLINDPWVLLNAS
EECYINSPTVLMNAS

SEQ ID NO: 258578 - protein, 15 aa, Artificial Sequence
  Description of Artificial Sequence: Synthetic peptide
  Seed: EECLINDPWVLLNAS
EECYINSPTVLVNAS

SEQ ID NO: 258579 - protein, 15 aa, Artificial Sequence
  Description of Artificial Sequence: Synthetic peptide
  Seed: EECLINDPWVLLNAS
EECYINSPVVLANAS

SEQ ID NO: 258580 - protein, 15 aa, Artificial Sequence
  Description of Artificial Sequence: Synthetic peptide
  Seed: EECLINDPWVLLNAS
EECYINSPVVLINAS

SEQ ID NO: 258581 - protein, 15 aa, Artificial Sequence
  Description of Artificial Sequence: Synthetic peptide
  Seed: EECLINDPWVLLNAS
EECYINSPVVLLNAS

SEQ ID NO: 258582 - protein, 15 aa, Artificial Sequence
  Description of Artificial Sequence: Synthetic peptide
  Seed: EECLINDPWVLLNAS
EECYINSPVVLVNAS

SEQ ID NO: 258583 - protein, 15 aa, Artificial Sequence
  Description of Artificial Sequence: Synthetic peptide
  Seed: EECLINDPWVLLNAS
EECYINTPAVLANAS

SEQ ID NO: 258584 - protein, 15 aa, Artificial Sequence
  Description of Artificial Sequence: Synthetic peptide
  Seed: EECLINDPWVLLNAS
EECYINTPAVLGNAS

SEQ ID NO: 258585 - protein, 15 aa, Artificial Sequence
  Description of Artificial Sequence: Synthetic peptide
  Seed: EECLINDPWVLLNAS
EECYINTPAVLINAS

SEQ ID NO: 258586 - protein, 15 aa, Artificial Sequence
  Description of Artificial Sequence: Synthetic peptide
  Seed: EECLINDPWVLLNAS
EECYINTPAVLLNAS

SEQ ID NO: 258587 - protein, 15 aa, Artificial Sequence
  Description of Artificial Sequence: Synthetic peptide
  Seed: EECLINDPWVLLNAS
EECYINTPAVLMNAS

SEQ ID NO: 258588 - protein, 15 aa, Artificial Sequence
  Description of Artificial Sequence: Synthetic peptide
  Seed: EECLINDPWVLLNAS
EECYINTPAVLSNAS

SEQ ID NO: 258589 - protein, 15 aa, Artificial Sequence
  Description of Artificial Sequence: Synthetic peptide
  Seed: EECLINDPWVLLNAS
EECYINTPAVLTNAS

SEQ ID NO: 258590 - protein, 15 aa, Artificial Sequence
  Description of Artificial Sequence: Synthetic peptide
  Seed: EECLINDPWVLLNAS
EECYINTPAVLVNAS

SEQ ID NO: 258591 - protein, 15 aa, Artificial Sequence
  Description of Artificial Sequence: Synthetic peptide
  Seed: EECLINDPWVLLNAS
EECYINTPFVLANAS

SEQ ID NO: 258592 - protein, 15 aa, Artificial Sequence
  Description of Artificial Sequence: Synthetic peptide
  Seed: EECLINDPWVLLNAS
EECYINTPFVLFNAS

SEQ ID NO: 258593 - protein, 15 aa, Artificial Sequence
  Description of Artificial Sequence: Synthetic peptide
  Seed: EECLINDPWVLLNAS
EECYINTPFVLINAS

SEQ ID NO: 258594 - protein, 15 aa, Artificial Sequence
  Description of Artificial Sequence: Synthetic peptide
  Seed: EECLINDPWVLLNAS
EECYINTPFVLLNAS

SEQ ID NO: 258595 - protein, 15 aa, Artificial Sequence
  Description of Artificial Sequence: Synthetic peptide
  Seed: EECLINDPWVLLNAS
EECYINTPFVLMNAS

SEQ ID NO: 258596 - protein, 15 aa, Artificial Sequence
  Description of Artificial Sequence: Synthetic peptide
  Seed: EECLINDPWVLLNAS
EECYINTPFVLVNAS

SEQ ID NO: 258597 - protein, 15 aa, Artificial Sequence
  Description of Artificial Sequence: Synthetic peptide
  Seed: EECLINDPWVLLNAS
EECYINTPGVLANAS

SEQ ID NO: 258598 - protein, 15 aa, Artificial Sequence
  Description of Artificial Sequence: Synthetic peptide
  Seed: EECLINDPWVLLNAS
EECYINTPGVLINAS

SEQ ID NO: 258599 - protein, 15 aa, Artificial Sequence
  Description of Artificial Sequence: Synthetic peptide
  Seed: EECLINDPWVLLNAS
EECYINTPGVLLNAS

SEQ ID NO: 258600 - protein, 15 aa, Artificial Sequence
  Description of Artificial Sequence: Synthetic peptide
  Seed: EECLINDPWVLLNAS
EECYINTPGVLMNAS

SEQ ID NO: 258601 - protein, 15 aa, Artificial Sequence
  Description of Artificial Sequence: Synthetic peptide
  Seed: EECLINDPWVLLNAS
EECYINTPGVLSNAS

SEQ ID NO: 258602 - protein, 15 aa, Artificial Sequence
  Description of Artificial Sequence: Synthetic peptide
  Seed: EECLINDPWVLLNAS
EECYINTPGVLTNAS

SEQ ID NO: 258603 - protein, 15 aa, Artificial Sequence
  Description of Artificial Sequence: Synthetic peptide
  Seed: EECLINDPWVLLNAS
EECYINTPGVLVNAS

SEQ ID NO: 258604 - protein, 15 aa, Artificial Sequence
  Description of Artificial Sequence: Synthetic peptide
  Seed: EECLINDPWVLLNAS
EECYINTPNVLANAS

SEQ ID NO: 258605 - protein, 15 aa, Artificial Sequence
  Description of Artificial Sequence: Synthetic peptide
  Seed: EECLINDPWVLLNAS
EECYINTPNVLLNAS

SEQ ID NO: 258606 - protein, 15 aa, Artificial Sequence
  Description of Artificial Sequence: Synthetic peptide
  Seed: EECLINDPWVLLNAS
EECYINTPNVLVNAS

SEQ ID NO: 258607 - protein, 15 aa, Artificial Sequence
  Description of Artificial Sequence: Synthetic peptide
  Seed: EECLINDPWVLLNAS
EECYINTPPVLANAS

SEQ ID NO: 258608 - protein, 15 aa, Artificial Sequence
  Description of Artificial Sequence: Synthetic peptide
  Seed: EECLINDPWVLLNAS
EECYINTPPVLINAS

SEQ ID NO: 258609 - protein, 15 aa, Artificial Sequence
  Description of Artificial Sequence: Synthetic peptide
  Seed: EECLINDPWVLLNAS
EECYINTPPVLLNAS

SEQ ID NO: 258610 - protein, 15 aa, Artificial Sequence
  Description of Artificial Sequence: Synthetic peptide
  Seed: EECLINDPWVLLNAS
EECYINTPPVLVNAS

SEQ ID NO: 258611 - protein, 15 aa, Artificial Sequence
  Description of Artificial Sequence: Synthetic peptide
  Seed: EECLINDPWVLLNAS
EECYINTPSVLANAS

SEQ ID NO: 258612 - protein, 15 aa, Artificial Sequence
  Description of Artificial Sequence: Synthetic peptide
  Seed: EECLINDPWVLLNAS
EECYINTPSVLINAS

SEQ ID NO: 258613 - protein, 15 aa, Artificial Sequence
  Description of Artificial Sequence: Synthetic peptide
  Seed: EECLINDPWVLLNAS
EECYINTPSVLLNAS

SEQ ID NO: 258614 - protein, 15 aa, Artificial Sequence
  Description of Artificial Sequence: Synthetic peptide
  Seed: EECLINDPWVLLNAS
EECYINTPSVLMNAS

SEQ ID NO: 258615 - protein, 15 aa, Artificial Sequence
  Description of Artificial Sequence: Synthetic peptide
  Seed: EECLINDPWVLLNAS
EECYINTPSVLSNAS

SEQ ID NO: 258616 - protein, 15 aa, Artificial Sequence
  Description of Artificial Sequence: Synthetic peptide
  Seed: EECLINDPWVLLNAS
EECYINTPSVLTNAS

SEQ ID NO: 258617 - protein, 15 aa, Artificial Sequence
  Description of Artificial Sequence: Synthetic peptide
  Seed: EECLINDPWVLLNAS
EECYINTPSVLVNAS

SEQ ID NO: 258618 - protein, 15 aa, Artificial Sequence
  Description of Artificial Sequence: Synthetic peptide
  Seed: EECLINDPWVLLNAS
EECYINTPTVLANAS

SEQ ID NO: 258619 - protein, 15 aa, Artificial Sequence
  Description of Artificial Sequence: Synthetic peptide
  Seed: EECLINDPWVLLNAS
EECYINTPTVLINAS

SEQ ID NO: 258620 - protein, 15 aa, Artificial Sequence
  Description of Artificial Sequence: Synthetic peptide
  Seed: EECLINDPWVLLNAS
EECYINTPTVLLNAS

SEQ ID NO: 258621 - protein, 15 aa, Artificial Sequence
  Description of Artificial Sequence: Synthetic peptide
  Seed: EECLINDPWVLLNAS
EECYINTPTVLVNAS

SEQ ID NO: 258622 - protein, 15 aa, Artificial Sequence
  Description of Artificial Sequence: Synthetic peptide
  Seed: EECLINDPWVLLNAS
EECYINVPAVLANAS

SEQ ID NO: 258623 - protein, 15 aa, Artificial Sequence
  Description of Artificial Sequence: Synthetic peptide
  Seed: EECLINDPWVLLNAS
EECYINVPAVLCNAS

SEQ ID NO: 258624 - protein, 15 aa, Artificial Sequence
  Description of Artificial Sequence: Synthetic peptide
  Seed: EECLINDPWVLLNAS
EECYINVPAVLFNAS

SEQ ID NO: 258625 - protein, 15 aa, Artificial Sequence
  Description of Artificial Sequence: Synthetic peptide
  Seed: EECLINDPWVLLNAS
EECYINVPAVLGNAS

SEQ ID NO: 258626 - protein, 15 aa, Artificial Sequence
  Description of Artificial Sequence: Synthetic peptide
  Seed: EECLINDPWVLLNAS
EECYINVPAVLHNAS

SEQ ID NO: 258627 - protein, 15 aa, Artificial Sequence
  Description of Artificial Sequence: Synthetic peptide
  Seed: EECLINDPWVLLNAS
EECYINVPAVLINAS

SEQ ID NO: 258628 - protein, 15 aa, Artificial Sequence
  Description of Artificial Sequence: Synthetic peptide
  Seed: EECLINDPWVLLNAS
EECYINVPAVLKNAS

SEQ ID NO: 258629 - protein, 15 aa, Artificial Sequence
  Description of Artificial Sequence: Synthetic peptide
  Seed: EECLINDPWVLLNAS
EECYINVPAVLLNAS

SEQ ID NO: 258630 - protein, 15 aa, Artificial Sequence
  Description of Artificial Sequence: Synthetic peptide
  Seed: EECLINDPWVLLNAS
EECYINVPAVLMNAS

SEQ ID NO: 258631 - protein, 15 aa, Artificial Sequence
  Description of Artificial Sequence: Synthetic peptide
  Seed: EECLINDPWVLLNAS
EECYINVPAVLNNAS

SEQ ID NO: 258632 - protein, 15 aa, Artificial Sequence
  Description of Artificial Sequence: Synthetic peptide
  Seed: EECLINDPWVLLNAS
EECYINVPAVLPNAS

SEQ ID NO: 258633 - protein, 15 aa, Artificial Sequence
  Description of Artificial Sequence: Synthetic peptide
  Seed: EECLINDPWVLLNAS
EECYINVPAVLQNAS

SEQ ID NO: 258634 - protein, 15 aa, Artificial Sequence
  Description of Artificial Sequence: Synthetic peptide
  Seed: EECLINDPWVLLNAS
EECYINVPAVLRNAS

SEQ ID NO: 258635 - protein, 15 aa, Artificial Sequence
  Description of Artificial Sequence: Synthetic peptide
  Seed: EECLINDPWVLLNAS
EECYINVPAVLSNAS

SEQ ID NO: 258636 - protein, 15 aa, Artificial Sequence
  Description of Artificial Sequence: Synthetic peptide
  Seed: EECLINDPWVLLNAS
EECYINVPAVLTNAS

SEQ ID NO: 258637 - protein, 15 aa, Artificial Sequence
  Description of Artificial Sequence: Synthetic peptide
  Seed: EECLINDPWVLLNAS
EECYINVPAVLVNAS

SEQ ID NO: 258638 - protein, 15 aa, Artificial Sequence
  Description of Artificial Sequence: Synthetic peptide
  Seed: EECLINDPWVLLNAS
EECYINVPAVLYNAS

SEQ ID NO: 258639 - protein, 15 aa, Artificial Sequence
  Description of Artificial Sequence: Synthetic peptide
  Seed: EECLINDPWVLLNAS
EECYINVPFVLINAS

SEQ ID NO: 258640 - protein, 15 aa, Artificial Sequence
  Description of Artificial Sequence: Synthetic peptide
  Seed: EECLINDPWVLLNAS
EECYINVPFVLLNAS

SEQ ID NO: 258641 - protein, 15 aa, Artificial Sequence
  Description of Artificial Sequence: Synthetic peptide
  Seed: EECLINDPWVLLNAS
EECYINVPFVLMNAS

SEQ ID NO: 258642 - protein, 15 aa, Artificial Sequence
  Description of Artificial Sequence: Synthetic peptide
  Seed: EECLINDPWVLLNAS
EECYINVPFVLVNAS

SEQ ID NO: 258643 - protein, 15 aa, Artificial Sequence
  Description of Artificial Sequence: Synthetic peptide
  Seed: EECLINDPWVLLNAS
EECYINVPGVLANAS

SEQ ID NO: 258644 - protein, 15 aa, Artificial Sequence
  Description of Artificial Sequence: Synthetic peptide
  Seed: EECLINDPWVLLNAS
EECYINVPGVLCNAS

SEQ ID NO: 258645 - protein, 15 aa, Artificial Sequence
  Description of Artificial Sequence: Synthetic peptide
  Seed: EECLINDPWVLLNAS
EECYINVPGVLFNAS

SEQ ID NO: 258646 - protein, 15 aa, Artificial Sequence
  Description of Artificial Sequence: Synthetic peptide
  Seed: EECLINDPWVLLNAS
EECYINVPGVLGNAS

SEQ ID NO: 258647 - protein, 15 aa, Artificial Sequence
  Description of Artificial Sequence: Synthetic peptide
  Seed: EECLINDPWVLLNAS
EECYINVPGVLINAS

SEQ ID NO: 258648 - protein, 15 aa, Artificial Sequence
  Description of Artificial Sequence: Synthetic peptide
  Seed: EECLINDPWVLLNAS
EECYINVPGVLLNAS

SEQ ID NO: 258649 - protein, 15 aa, Artificial Sequence
  Description of Artificial Sequence: Synthetic peptide
  Seed: EECLINDPWVLLNAS
EECYINVPGVLMNAS

SEQ ID NO: 258650 - protein, 15 aa, Artificial Sequence
  Description of Artificial Sequence: Synthetic peptide
  Seed: EECLINDPWVLLNAS
EECYINVPGVLNNAS

SEQ ID NO: 258651 - protein, 15 aa, Artificial Sequence
  Description of Artificial Sequence: Synthetic peptide
  Seed: EECLINDPWVLLNAS
EECYINVPGVLSNAS

SEQ ID NO: 258652 - protein, 15 aa, Artificial Sequence
  Description of Artificial Sequence: Synthetic peptide
  Seed: EECLINDPWVLLNAS
EECYINVPGVLTNAS

SEQ ID NO: 258653 - protein, 15 aa, Artificial Sequence
  Description of Artificial Sequence: Synthetic peptide
  Seed: EECLINDPWVLLNAS
EECYINVPGVLVNAS

SEQ ID NO: 258654 - protein, 15 aa, Artificial Sequence
  Description of Artificial Sequence: Synthetic peptide
  Seed: EECLINDPWVLLNAS
EECYINVPIVLANAS

SEQ ID NO: 258655 - protein, 15 aa, Artificial Sequence
  Description of Artificial Sequence: Synthetic peptide
  Seed: EECLINDPWVLLNAS
EECYINVPNVLANAS

SEQ ID NO: 258656 - protein, 15 aa, Artificial Sequence
  Description of Artificial Sequence: Synthetic peptide
  Seed: EECLINDPWVLLNAS
EECYINVPNVLGNAS

SEQ ID NO: 258657 - protein, 15 aa, Artificial Sequence
  Description of Artificial Sequence: Synthetic peptide
  Seed: EECLINDPWVLLNAS
EECYINVPNVLINAS

SEQ ID NO: 258658 - protein, 15 aa, Artificial Sequence
  Description of Artificial Sequence: Synthetic peptide
  Seed: EECLINDPWVLLNAS
EECYINVPNVLLNAS

SEQ ID NO: 258659 - protein, 15 aa, Artificial Sequence
  Description of Artificial Sequence: Synthetic peptide
  Seed: EECLINDPWVLLNAS
EECYINVPNVLMNAS

SEQ ID NO: 258660 - protein, 15 aa, Artificial Sequence
  Description of Artificial Sequence: Synthetic peptide
  Seed: EECLINDPWVLLNAS
EECYINVPNVLSNAS

SEQ ID NO: 258661 - protein, 15 aa, Artificial Sequence
  Description of Artificial Sequence: Synthetic peptide
  Seed: EECLINDPWVLLNAS
EECYINVPNVLTNAS

SEQ ID NO: 258662 - protein, 15 aa, Artificial Sequence
  Description of Artificial Sequence: Synthetic peptide
  Seed: EECLINDPWVLLNAS
EECYINVPNVLVNAS

SEQ ID NO: 258663 - protein, 15 aa, Artificial Sequence
  Description of Artificial Sequence: Synthetic peptide
  Seed: EECLINDPWVLLNAS
EECYINVPPVLANAS

SEQ ID NO: 258664 - protein, 15 aa, Artificial Sequence
  Description of Artificial Sequence: Synthetic peptide
  Seed: EECLINDPWVLLNAS
EECYINVPPVLGNAS

SEQ ID NO: 258665 - protein, 15 aa, Artificial Sequence
  Description of Artificial Sequence: Synthetic peptide
  Seed: EECLINDPWVLLNAS
EECYINVPPVLINAS

SEQ ID NO: 258666 - protein, 15 aa, Artificial Sequence
  Description of Artificial Sequence: Synthetic peptide
  Seed: EECLINDPWVLLNAS
EECYINVPPVLLNAS

SEQ ID NO: 258667 - protein, 15 aa, Artificial Sequence
  Description of Artificial Sequence: Synthetic peptide
  Seed: EECLINDPWVLLNAS
EECYINVPPVLMNAS

SEQ ID NO: 258668 - protein, 15 aa, Artificial Sequence
  Description of Artificial Sequence: Synthetic peptide
  Seed: EECLINDPWVLLNAS
EECYINVPPVLSNAS

SEQ ID NO: 258669 - protein, 15 aa, Artificial Sequence
  Description of Artificial Sequence: Synthetic peptide
  Seed: EECLINDPWVLLNAS
EECYINVPPVLTNAS

SEQ ID NO: 258670 - protein, 15 aa, Artificial Sequence
  Description of Artificial Sequence: Synthetic peptide
  Seed: EECLINDPWVLLNAS
EECYINVPPVLVNAS

SEQ ID NO: 258671 - protein, 15 aa, Artificial Sequence
  Description of Artificial Sequence: Synthetic peptide
  Seed: EECLINDPWVLLNAS
EECYINVPSVLANAS

SEQ ID NO: 258672 - protein, 15 aa, Artificial Sequence
  Description of Artificial Sequence: Synthetic peptide
  Seed: EECLINDPWVLLNAS
EECYINVPSVLCNAS

SEQ ID NO: 258673 - protein, 15 aa, Artificial Sequence
  Description of Artificial Sequence: Synthetic peptide
  Seed: EECLINDPWVLLNAS
EECYINVPSVLFNAS

SEQ ID NO: 258674 - protein, 15 aa, Artificial Sequence
  Description of Artificial Sequence: Synthetic peptide
  Seed: EECLINDPWVLLNAS
EECYINVPSVLGNAS

SEQ ID NO: 258675 - protein, 15 aa, Artificial Sequence
  Description of Artificial Sequence: Synthetic peptide
  Seed: EECLINDPWVLLNAS
EECYINVPSVLHNAS

SEQ ID NO: 258676 - protein, 15 aa, Artificial Sequence
  Description of Artificial Sequence: Synthetic peptide
  Seed: EECLINDPWVLLNAS
EECYINVPSVLINAS

SEQ ID NO: 258677 - protein, 15 aa, Artificial Sequence
  Description of Artificial Sequence: Synthetic peptide
  Seed: EECLINDPWVLLNAS
EECYINVPSVLLNAS

SEQ ID NO: 258678 - protein, 15 aa, Artificial Sequence
  Description of Artificial Sequence: Synthetic peptide
  Seed: EECLINDPWVLLNAS
EECYINVPSVLMNAS

SEQ ID NO: 258679 - protein, 15 aa, Artificial Sequence
  Description of Artificial Sequence: Synthetic peptide
  Seed: EECLINDPWVLLNAS
EECYINVPSVLNNAS

SEQ ID NO: 258680 - protein, 15 aa, Artificial Sequence
  Description of Artificial Sequence: Synthetic peptide
  Seed: EECLINDPWVLLNAS
EECYINVPSVLSNAS

SEQ ID NO: 258681 - protein, 15 aa, Artificial Sequence
  Description of Artificial Sequence: Synthetic peptide
  Seed: EECLINDPWVLLNAS
EECYINVPSVLTNAS

SEQ ID NO: 258682 - protein, 15 aa, Artificial Sequence
  Description of Artificial Sequence: Synthetic peptide
  Seed: EECLINDPWVLLNAS
EECYINVPSVLVNAS

SEQ ID NO: 258683 - protein, 15 aa, Artificial Sequence
  Description of Artificial Sequence: Synthetic peptide
  Seed: EECLINDPWVLLNAS
EECYINVPTVLANAS

SEQ ID NO: 258684 - protein, 15 aa, Artificial Sequence
  Description of Artificial Sequence: Synthetic peptide
  Seed: EECLINDPWVLLNAS
EECYINVPTVLGNAS

SEQ ID NO: 258685 - protein, 15 aa, Artificial Sequence
  Description of Artificial Sequence: Synthetic peptide
  Seed: EECLINDPWVLLNAS
EECYINVPTVLINAS

SEQ ID NO: 258686 - protein, 15 aa, Artificial Sequence
  Description of Artificial Sequence: Synthetic peptide
  Seed: EECLINDPWVLLNAS
EECYINVPTVLLNAS

SEQ ID NO: 258687 - protein, 15 aa, Artificial Sequence
  Description of Artificial Sequence: Synthetic peptide
  Seed: EECLINDPWVLLNAS
EECYINVPTVLMNAS

SEQ ID NO: 258688 - protein, 15 aa, Artificial Sequence
  Description of Artificial Sequence: Synthetic peptide
  Seed: EECLINDPWVLLNAS
EECYINVPTVLSNAS

SEQ ID NO: 258689 - protein, 15 aa, Artificial Sequence
  Description of Artificial Sequence: Synthetic peptide
  Seed: EECLINDPWVLLNAS
EECYINVPTVLTNAS

SEQ ID NO: 258690 - protein, 15 aa, Artificial Sequence
  Description of Artificial Sequence: Synthetic peptide
  Seed: EECLINDPWVLLNAS
EECYINVPTVLVNAS

SEQ ID NO: 258691 - protein, 15 aa, Artificial Sequence
  Description of Artificial Sequence: Synthetic peptide
  Seed: EECLINDPWVLLNAS
EECYINVPVVLANAS

SEQ ID NO: 258692 - protein, 15 aa, Artificial Sequence
  Description of Artificial Sequence: Synthetic peptide
  Seed: EECLINDPWVLLNAS
EECYINVPVVLINAS

SEQ ID NO: 258693 - protein, 15 aa, Artificial Sequence
  Description of Artificial Sequence: Synthetic peptide
  Seed: EECLINDPWVLLNAS
EECYINVPVVLLNAS

SEQ ID NO: 258694 - protein, 15 aa, Artificial Sequence
  Description of Artificial Sequence: Synthetic peptide
  Seed: EECLINDPWVLLNAS
EECYINVPVVLSNAS

SEQ ID NO: 258695 - protein, 15 aa, Artificial Sequence
  Description of Artificial Sequence: Synthetic peptide
  Seed: EECLINDPWVLLNAS
EECYINVPVVLTNAS

SEQ ID NO: 258696 - protein, 15 aa, Artificial Sequence
  Description of Artificial Sequence: Synthetic peptide
  Seed: EECLINDPWVLLNAS
EECYINVPVVLVNAS

SEQ ID NO: 258697 - protein, 15 aa, Artificial Sequence
  Description of Artificial Sequence: Synthetic peptide
  Seed: EECLINDPWVLLNAS
EECYINWPAVLANAS

SEQ ID NO: 258698 - protein, 15 aa, Artificial Sequence
  Description of Artificial Sequence: Synthetic peptide
  Seed: EECLINDPWVLLNAS
EECYINWPAVLINAS

SEQ ID NO: 258699 - protein, 15 aa, Artificial Sequence
  Description of Artificial Sequence: Synthetic peptide
  Seed: EECLINDPWVLLNAS
EECYINWPAVLLNAS

SEQ ID NO: 258700 - protein, 15 aa, Artificial Sequence
  Description of Artificial Sequence: Synthetic peptide
  Seed: EECLINDPWVLLNAS
EECYINWPAVLVNAS

SEQ ID NO: 258701 - protein, 15 aa, Artificial Sequence
  Description of Artificial Sequence: Synthetic peptide
  Seed: SIGKVCRTLLAKSVF
SIGKVCRTFLFKSIF

SEQ ID NO: 258702 - protein, 15 aa, Artificial Sequence
  Description of Artificial Sequence: Synthetic peptide
  Seed: SIGKVCRTLLAKSVF
SIGKVCRTFLFKSVF

SEQ ID NO: 258703 - protein, 15 aa, Artificial Sequence
  Description of Artificial Sequence: Synthetic peptide
  Seed: SIGKVCRTLLAKSVF
SIGKVCRTILFKSIF

SEQ ID NO: 258704 - protein, 15 aa, Artificial Sequence
  Description of Artificial Sequence: Synthetic peptide
  Seed: SIGKVCRTLLAKSVF
SIGKVCRTILFKSLF

SEQ ID NO: 258705 - protein, 15 aa, Artificial Sequence
  Description of Artificial Sequence: Synthetic peptide
  Seed: SIGKVCRTLLAKSVF
SIGKVCRTILFKSVF

SEQ ID NO: 258706 - protein, 15 aa, Artificial Sequence
  Description of Artificial Sequence: Synthetic peptide
  Seed: SIGKVCRTLLAKSVF
SIGKVCRTLLAKSIF

SEQ ID NO: 258707 - protein, 15 aa, Artificial Sequence
  Description of Artificial Sequence: Synthetic peptide
  Seed: SIGKVCRTLLAKSVF
SIGKVCRTLLAKSLF

SEQ ID NO: 258708 - protein, 15 aa, Artificial Sequence
  Description of Artificial Sequence: Synthetic peptide
  Seed: SIGKVCRTLLAKSVF
SIGKVCRTLLGKSIF

SEQ ID NO: 258709 - protein, 15 aa, Artificial Sequence
  Description of Artificial Sequence: Synthetic peptide
  Seed: SIGKVCRTLLAKSVF
SIGKVCRTLLGKSVF

SEQ ID NO: 258710 - protein, 15 aa, Artificial Sequence
  Description of Artificial Sequence: Synthetic peptide
  Seed: SIGKVCRTLLAKSVF
SIGKVCRTLLSKSIF

SEQ ID NO: 258711 - protein, 15 aa, Artificial Sequence
  Description of Artificial Sequence: Synthetic peptide
  Seed: SIGKVCRTLLAKSVF
SIGKVCRTLLSKSLF

SEQ ID NO: 258712 - protein, 15 aa, Artificial Sequence
  Description of Artificial Sequence: Synthetic peptide
  Seed: SIGKVCRTLLAKSVF
SIGKVCRTLLSKSVF

SEQ ID NO: 258713 - protein, 15 aa, Artificial Sequence
  Description of Artificial Sequence: Synthetic peptide
  Seed: SIGKVCRTLLAKSVF
SIGKVCRTMLAKSIF

SEQ ID NO: 258714 - protein, 15 aa, Artificial Sequence
  Description of Artificial Sequence: Synthetic peptide
  Seed: SIGKVCRTLLAKSVF
SIGKVCRTMLAKSLF

SEQ ID NO: 258715 - protein, 15 aa, Artificial Sequence
  Description of Artificial Sequence: Synthetic peptide
  Seed: SIGKVCRTLLAKSVF
SIGKVCRTMLAKSVF

SEQ ID NO: 258716 - protein, 15 aa, Artificial Sequence
  Description of Artificial Sequence: Synthetic peptide
  Seed: SIGKVCRTLLAKSVF
SIGKVCRTMLGKSIF

SEQ ID NO: 258717 - protein, 15 aa, Artificial Sequence
  Description of Artificial Sequence: Synthetic peptide
  Seed: SIGKVCRTLLAKSVF
SIGKVCRTMLGKSLF

SEQ ID NO: 258718 - protein, 15 aa, Artificial Sequence
  Description of Artificial Sequence: Synthetic peptide
  Seed: SIGKVCRTLLAKSVF
SIGKVCRTMLGKSVF

SEQ ID NO: 258719 - protein, 15 aa, Artificial Sequence
  Description of Artificial Sequence: Synthetic peptide
  Seed: SIGKVCRTLLAKSVF
SIGKVCRTMLSKSIF

SEQ ID NO: 258720 - protein, 15 aa, Artificial Sequence
  Description of Artificial Sequence: Synthetic peptide
  Seed: SIGKVCRTLLAKSVF
SIGKVCRTMLSKSLF

SEQ ID NO: 258721 - protein, 15 aa, Artificial Sequence
  Description of Artificial Sequence: Synthetic peptide
  Seed: SIGKVCRTLLAKSVF
SIGKVCRTMLSKSVF

SEQ ID NO: 258722 - protein, 15 aa, Artificial Sequence
  Description of Artificial Sequence: Synthetic peptide
  Seed: SIGKVCRTLLAKSVF
SIGKVCRTSLFKSIF

SEQ ID NO: 258723 - protein, 15 aa, Artificial Sequence
  Description of Artificial Sequence: Synthetic peptide
  Seed: SIGKVCRTLLAKSVF
SIGKVCRTTLFKSIF

SEQ ID NO: 258724 - protein, 15 aa, Artificial Sequence
  Description of Artificial Sequence: Synthetic peptide
  Seed: SIGKVCRTLLAKSVF
SIGKVCRTTLFKSLF

SEQ ID NO: 258725 - protein, 15 aa, Artificial Sequence
  Description of Artificial Sequence: Synthetic peptide
  Seed: SIGKVCRTLLAKSVF
SIGKVCRTTLFKSVF

SEQ ID NO: 258726 - protein, 15 aa, Artificial Sequence
  Description of Artificial Sequence: Synthetic peptide
  Seed: SIGKVCRTLLAKSVF
SIGKVCRTTLSKSIF

SEQ ID NO: 258727 - protein, 15 aa, Artificial Sequence
  Description of Artificial Sequence: Synthetic peptide
  Seed: SIGKVCRTLLAKSVF
SIGKVCRTVLFKSIF

SEQ ID NO: 258728 - protein, 15 aa, Artificial Sequence
  Description of Artificial Sequence: Synthetic peptide
  Seed: SIGKVCRTLLAKSVF
SIGKVCRTVLFKSLF

SEQ ID NO: 258729 - protein, 15 aa, Artificial Sequence
  Description of Artificial Sequence: Synthetic peptide
  Seed: SIGKVCRTLLAKSVF
SIGKVCRTVLFKSVF

SEQ ID NO: 258730 - protein, 15 aa, Artificial Sequence
  Description of Artificial Sequence: Synthetic peptide
  Seed: SIGKVCRTLLAKSVF
SIGKVFRTALAKSAF

SEQ ID NO: 258731 - protein, 15 aa, Artificial Sequence
  Description of Artificial Sequence: Synthetic peptide
  Seed: SIGKVCRTLLAKSVF
SIGKVFRTALAKSCF

SEQ ID NO: 258732 - protein, 15 aa, Artificial Sequence
  Description of Artificial Sequence: Synthetic peptide
  Seed: SIGKVCRTLLAKSVF
SIGKVFRTALAKSDF

SEQ ID NO: 258733 - protein, 15 aa, Artificial Sequence
  Description of Artificial Sequence: Synthetic peptide
  Seed: SIGKVCRTLLAKSVF
SIGKVFRTALAKSEF

SEQ ID NO: 258734 - protein, 15 aa, Artificial Sequence
  Description of Artificial Sequence: Synthetic peptide
  Seed: SIGKVCRTLLAKSVF
SIGKVFRTALAKSFF

SEQ ID NO: 258735 - protein, 15 aa, Artificial Sequence
  Description of Artificial Sequence: Synthetic peptide
  Seed: SIGKVCRTLLAKSVF
SIGKVFRTALAKSGF

SEQ ID NO: 258736 - protein, 15 aa, Artificial Sequence
  Description of Artificial Sequence: Synthetic peptide
  Seed: SIGKVCRTLLAKSVF
SIGKVFRTALAKSHF

SEQ ID NO: 258737 - protein, 15 aa, Artificial Sequence
  Description of Artificial Sequence: Synthetic peptide
  Seed: SIGKVCRTLLAKSVF
SIGKVFRTALAKSIF

SEQ ID NO: 258738 - protein, 15 aa, Artificial Sequence
  Description of Artificial Sequence: Synthetic peptide
  Seed: SIGKVCRTLLAKSVF
SIGKVFRTALAKSLF

SEQ ID NO: 258739 - protein, 15 aa, Artificial Sequence
  Description of Artificial Sequence: Synthetic peptide
  Seed: SIGKVCRTLLAKSVF
SIGKVFRTALAKSMF

SEQ ID NO: 258740 - protein, 15 aa, Artificial Sequence
  Description of Artificial Sequence: Synthetic peptide
  Seed: SIGKVCRTLLAKSVF
SIGKVFRTALAKSNF

SEQ ID NO: 258741 - protein, 15 aa, Artificial Sequence
  Description of Artificial Sequence: Synthetic peptide
  Seed: SIGKVCRTLLAKSVF
SIGKVFRTALAKSPF

SEQ ID NO: 258742 - protein, 15 aa, Artificial Sequence
  Description of Artificial Sequence: Synthetic peptide
  Seed: SIGKVCRTLLAKSVF
SIGKVFRTALAKSQF

SEQ ID NO: 258743 - protein, 15 aa, Artificial Sequence
  Description of Artificial Sequence: Synthetic peptide
  Seed: SIGKVCRTLLAKSVF
SIGKVFRTALAKSSF

SEQ ID NO: 258744 - protein, 15 aa, Artificial Sequence
  Description of Artificial Sequence: Synthetic peptide
  Seed: SIGKVCRTLLAKSVF
SIGKVFRTALAKSTF

SEQ ID NO: 258745 - protein, 15 aa, Artificial Sequence
  Description of Artificial Sequence: Synthetic peptide
  Seed: SIGKVCRTLLAKSVF
SIGKVFRTALAKSVF

SEQ ID NO: 258746 - protein, 15 aa, Artificial Sequence
  Description of Artificial Sequence: Synthetic peptide
  Seed: SIGKVCRTLLAKSVF
SIGKVFRTALAKSWF

SEQ ID NO: 258747 - protein, 15 aa, Artificial Sequence
  Description of Artificial Sequence: Synthetic peptide
  Seed: SIGKVCRTLLAKSVF
SIGKVFRTALAKSYF

SEQ ID NO: 258748 - protein, 15 aa, Artificial Sequence
  Description of Artificial Sequence: Synthetic peptide
  Seed: SIGKVCRTLLAKSVF
SIGKVFRTALFKSAF

SEQ ID NO: 258749 - protein, 15 aa, Artificial Sequence
  Description of Artificial Sequence: Synthetic peptide
  Seed: SIGKVCRTLLAKSVF
SIGKVFRTALFKSCF

SEQ ID NO: 258750 - protein, 15 aa, Artificial Sequence
  Description of Artificial Sequence: Synthetic peptide
  Seed: SIGKVCRTLLAKSVF
SIGKVFRTALFKSDF

SEQ ID NO: 258751 - protein, 15 aa, Artificial Sequence
  Description of Artificial Sequence: Synthetic peptide
  Seed: SIGKVCRTLLAKSVF
SIGKVFRTALFKSEF

SEQ ID NO: 258752 - protein, 15 aa, Artificial Sequence
  Description of Artificial Sequence: Synthetic peptide
  Seed: SIGKVCRTLLAKSVF
SIGKVFRTALFKSFF

SEQ ID NO: 258753 - protein, 15 aa, Artificial Sequence
  Description of Artificial Sequence: Synthetic peptide
  Seed: SIGKVCRTLLAKSVF
SIGKVFRTALFKSHF

SEQ ID NO: 258754 - protein, 15 aa, Artificial Sequence
  Description of Artificial Sequence: Synthetic peptide
  Seed: SIGKVCRTLLAKSVF
SIGKVFRTALFKSLF

SEQ ID NO: 258755 - protein, 15 aa, Artificial Sequence
  Description of Artificial Sequence: Synthetic peptide
  Seed: SIGKVCRTLLAKSVF
SIGKVFRTALFKSMF

SEQ ID NO: 258756 - protein, 15 aa, Artificial Sequence
  Description of Artificial Sequence: Synthetic peptide
  Seed: SIGKVCRTLLAKSVF
SIGKVFRTALFKSNF

SEQ ID NO: 258757 - protein, 15 aa, Artificial Sequence
  Description of Artificial Sequence: Synthetic peptide
  Seed: SIGKVCRTLLAKSVF
SIGKVFRTALFKSPF

SEQ ID NO: 258758 - protein, 15 aa, Artificial Sequence
  Description of Artificial Sequence: Synthetic peptide
  Seed: SIGKVCRTLLAKSVF
SIGKVFRTALFKSQF

SEQ ID NO: 258759 - protein, 15 aa, Artificial Sequence
  Description of Artificial Sequence: Synthetic peptide
  Seed: SIGKVCRTLLAKSVF
SIGKVFRTALFKSSF

SEQ ID NO: 258760 - protein, 15 aa, Artificial Sequence
  Description of Artificial Sequence: Synthetic peptide
  Seed: SIGKVCRTLLAKSVF
SIGKVFRTALFKSTF

SEQ ID NO: 258761 - protein, 15 aa, Artificial Sequence
  Description of Artificial Sequence: Synthetic peptide
  Seed: SIGKVCRTLLAKSVF
SIGKVFRTALFKSWF

SEQ ID NO: 258762 - protein, 15 aa, Artificial Sequence
  Description of Artificial Sequence: Synthetic peptide
  Seed: SIGKVCRTLLAKSVF
SIGKVFRTALFKSYF

SEQ ID NO: 258763 - protein, 15 aa, Artificial Sequence
  Description of Artificial Sequence: Synthetic peptide
  Seed: SIGKVCRTLLAKSVF
SIGKVFRTALGKSAF

SEQ ID NO: 258764 - protein, 15 aa, Artificial Sequence
  Description of Artificial Sequence: Synthetic peptide
  Seed: SIGKVCRTLLAKSVF
SIGKVFRTALGKSCF

SEQ ID NO: 258765 - protein, 15 aa, Artificial Sequence
  Description of Artificial Sequence: Synthetic peptide
  Seed: SIGKVCRTLLAKSVF
SIGKVFRTALGKSFF

SEQ ID NO: 258766 - protein, 15 aa, Artificial Sequence
  Description of Artificial Sequence: Synthetic peptide
  Seed: SIGKVCRTLLAKSVF
SIGKVFRTALGKSGF

SEQ ID NO: 258767 - protein, 15 aa, Artificial Sequence
  Description of Artificial Sequence: Synthetic peptide
  Seed: SIGKVCRTLLAKSVF
SIGKVFRTALGKSIF

SEQ ID NO: 258768 - protein, 15 aa, Artificial Sequence
  Description of Artificial Sequence: Synthetic peptide
  Seed: SIGKVCRTLLAKSVF
SIGKVFRTALGKSLF

SEQ ID NO: 258769 - protein, 15 aa, Artificial Sequence
  Description of Artificial Sequence: Synthetic peptide
  Seed: SIGKVCRTLLAKSVF
SIGKVFRTALGKSMF

SEQ ID NO: 258770 - protein, 15 aa, Artificial Sequence
  Description of Artificial Sequence: Synthetic peptide
  Seed: SIGKVCRTLLAKSVF
SIGKVFRTALGKSNF

SEQ ID NO: 258771 - protein, 15 aa, Artificial Sequence
  Description of Artificial Sequence: Synthetic peptide
  Seed: SIGKVCRTLLAKSVF
SIGKVFRTALGKSSF

SEQ ID NO: 258772 - protein, 15 aa, Artificial Sequence
  Description of Artificial Sequence: Synthetic peptide
  Seed: SIGKVCRTLLAKSVF
SIGKVFRTALGKSTF

SEQ ID NO: 258773 - protein, 15 aa, Artificial Sequence
  Description of Artificial Sequence: Synthetic peptide
  Seed: SIGKVCRTLLAKSVF
SIGKVFRTALGKSVF

SEQ ID NO: 258774 - protein, 15 aa, Artificial Sequence
  Description of Artificial Sequence: Synthetic peptide
  Seed: SIGKVCRTLLAKSVF
SIGKVFRTALIKSAF

SEQ ID NO: 258775 - protein, 15 aa, Artificial Sequence
  Description of Artificial Sequence: Synthetic peptide
  Seed: SIGKVCRTLLAKSVF
SIGKVFRTALIKSIF

SEQ ID NO: 258776 - protein, 15 aa, Artificial Sequence
  Description of Artificial Sequence: Synthetic peptide
  Seed: SIGKVCRTLLAKSVF
SIGKVFRTALIKSLF

SEQ ID NO: 258777 - protein, 15 aa, Artificial Sequence
  Description of Artificial Sequence: Synthetic peptide
  Seed: SIGKVCRTLLAKSVF
SIGKVFRTALIKSNF

SEQ ID NO: 258778 - protein, 15 aa, Artificial Sequence
  Description of Artificial Sequence: Synthetic peptide
  Seed: SIGKVCRTLLAKSVF
SIGKVFRTALIKSSF

SEQ ID NO: 258779 - protein, 15 aa, Artificial Sequence
  Description of Artificial Sequence: Synthetic peptide
  Seed: SIGKVCRTLLAKSVF
SIGKVFRTALIKSTF

SEQ ID NO: 258780 - protein, 15 aa, Artificial Sequence
  Description of Artificial Sequence: Synthetic peptide
  Seed: SIGKVCRTLLAKSVF
SIGKVFRTALIKSVF

SEQ ID NO: 258781 - protein, 15 aa, Artificial Sequence
  Description of Artificial Sequence: Synthetic peptide
  Seed: SIGKVCRTLLAKSVF
SIGKVFRTALLKSFF

SEQ ID NO: 258782 - protein, 15 aa, Artificial Sequence
  Description of Artificial Sequence: Synthetic peptide
  Seed: SIGKVCRTLLAKSVF
SIGKVFRTALLKSIF

SEQ ID NO: 258783 - protein, 15 aa, Artificial Sequence
  Description of Artificial Sequence: Synthetic peptide
  Seed: SIGKVCRTLLAKSVF
SIGKVFRTALLKSLF

SEQ ID NO: 258784 - protein, 15 aa, Artificial Sequence
  Description of Artificial Sequence: Synthetic peptide
  Seed: SIGKVCRTLLAKSVF
SIGKVFRTALLKSMF

SEQ ID NO: 258785 - protein, 15 aa, Artificial Sequence
  Description of Artificial Sequence: Synthetic peptide
  Seed: SIGKVCRTLLAKSVF
SIGKVFRTALLKSNF

SEQ ID NO: 258786 - protein, 15 aa, Artificial Sequence
  Description of Artificial Sequence: Synthetic peptide
  Seed: SIGKVCRTLLAKSVF
SIGKVFRTALLKSVF

SEQ ID NO: 258787 - protein, 15 aa, Artificial Sequence
  Description of Artificial Sequence: Synthetic peptide
  Seed: SIGKVCRTLLAKSVF
SIGKVFRTALMKSIF

SEQ ID NO: 258788 - protein, 15 aa, Artificial Sequence
  Description of Artificial Sequence: Synthetic peptide
  Seed: SIGKVCRTLLAKSVF
SIGKVFRTALMKSLF

SEQ ID NO: 258789 - protein, 15 aa, Artificial Sequence
  Description of Artificial Sequence: Synthetic peptide
  Seed: SIGKVCRTLLAKSVF
SIGKVFRTALMKSNF

SEQ ID NO: 258790 - protein, 15 aa, Artificial Sequence
  Description of Artificial Sequence: Synthetic peptide
  Seed: SIGKVCRTLLAKSVF
SIGKVFRTALMKSVF

SEQ ID NO: 258791 - protein, 15 aa, Artificial Sequence
  Description of Artificial Sequence: Synthetic peptide
  Seed: SIGKVCRTLLAKSVF
SIGKVFRTALNKSAF

SEQ ID NO: 258792 - protein, 15 aa, Artificial Sequence
  Description of Artificial Sequence: Synthetic peptide
  Seed: SIGKVCRTLLAKSVF
SIGKVFRTALNKSIF

SEQ ID NO: 258793 - protein, 15 aa, Artificial Sequence
  Description of Artificial Sequence: Synthetic peptide
  Seed: SIGKVCRTLLAKSVF
SIGKVFRTALNKSLF

SEQ ID NO: 258794 - protein, 15 aa, Artificial Sequence
  Description of Artificial Sequence: Synthetic peptide
  Seed: SIGKVCRTLLAKSVF
SIGKVFRTALNKSMF

SEQ ID NO: 258795 - protein, 15 aa, Artificial Sequence
  Description of Artificial Sequence: Synthetic peptide
  Seed: SIGKVCRTLLAKSVF
SIGKVFRTALNKSNF

SEQ ID NO: 258796 - protein, 15 aa, Artificial Sequence
  Description of Artificial Sequence: Synthetic peptide
  Seed: SIGKVCRTLLAKSVF
SIGKVFRTALNKSSF

SEQ ID NO: 258797 - protein, 15 aa, Artificial Sequence
  Description of Artificial Sequence: Synthetic peptide
  Seed: SIGKVCRTLLAKSVF
SIGKVFRTALNKSTF

SEQ ID NO: 258798 - protein, 15 aa, Artificial Sequence
  Description of Artificial Sequence: Synthetic peptide
  Seed: SIGKVCRTLLAKSVF
SIGKVFRTALNKSVF

SEQ ID NO: 258799 - protein, 15 aa, Artificial Sequence
  Description of Artificial Sequence: Synthetic peptide
  Seed: SIGKVCRTLLAKSVF
SIGKVFRTALPKSAF

SEQ ID NO: 258800 - protein, 15 aa, Artificial Sequence
  Description of Artificial Sequence: Synthetic peptide
  Seed: SIGKVCRTLLAKSVF
SIGKVFRTALPKSFF

SEQ ID NO: 258801 - protein, 15 aa, Artificial Sequence
  Description of Artificial Sequence: Synthetic peptide
  Seed: SIGKVCRTLLAKSVF
SIGKVFRTALPKSGF

SEQ ID NO: 258802 - protein, 15 aa, Artificial Sequence
  Description of Artificial Sequence: Synthetic peptide
  Seed: SIGKVCRTLLAKSVF
SIGKVFRTALPKSHF

SEQ ID NO: 258803 - protein, 15 aa, Artificial Sequence
  Description of Artificial Sequence: Synthetic peptide
  Seed: SIGKVCRTLLAKSVF
SIGKVFRTALPKSIF

SEQ ID NO: 258804 - protein, 15 aa, Artificial Sequence
  Description of Artificial Sequence: Synthetic peptide
  Seed: SIGKVCRTLLAKSVF
SIGKVFRTALPKSLF

SEQ ID NO: 258805 - protein, 15 aa, Artificial Sequence
  Description of Artificial Sequence: Synthetic peptide
  Seed: SIGKVCRTLLAKSVF
SIGKVFRTALPKSMF

SEQ ID NO: 258806 - protein, 15 aa, Artificial Sequence
  Description of Artificial Sequence: Synthetic peptide
  Seed: SIGKVCRTLLAKSVF
SIGKVFRTALPKSNF

SEQ ID NO: 258807 - protein, 15 aa, Artificial Sequence
  Description of Artificial Sequence: Synthetic peptide
  Seed: SIGKVCRTLLAKSVF
SIGKVFRTALPKSQF

SEQ ID NO: 258808 - protein, 15 aa, Artificial Sequence
  Description of Artificial Sequence: Synthetic peptide
  Seed: SIGKVCRTLLAKSVF
SIGKVFRTALPKSSF

SEQ ID NO: 258809 - protein, 15 aa, Artificial Sequence
  Description of Artificial Sequence: Synthetic peptide
  Seed: SIGKVCRTLLAKSVF
SIGKVFRTALPKSTF

SEQ ID NO: 258810 - protein, 15 aa, Artificial Sequence
  Description of Artificial Sequence: Synthetic peptide
  Seed: SIGKVCRTLLAKSVF
SIGKVFRTALPKSVF

SEQ ID NO: 258811 - protein, 15 aa, Artificial Sequence
  Description of Artificial Sequence: Synthetic peptide
  Seed: SIGKVCRTLLAKSVF
SIGKVFRTALSKSAF

SEQ ID NO: 258812 - protein, 15 aa, Artificial Sequence
  Description of Artificial Sequence: Synthetic peptide
  Seed: SIGKVCRTLLAKSVF
SIGKVFRTALSKSCF

SEQ ID NO: 258813 - protein, 15 aa, Artificial Sequence
  Description of Artificial Sequence: Synthetic peptide
  Seed: SIGKVCRTLLAKSVF
SIGKVFRTALSKSDF

SEQ ID NO: 258814 - protein, 15 aa, Artificial Sequence
  Description of Artificial Sequence: Synthetic peptide
  Seed: SIGKVCRTLLAKSVF
SIGKVFRTALSKSFF

SEQ ID NO: 258815 - protein, 15 aa, Artificial Sequence
  Description of Artificial Sequence: Synthetic peptide
  Seed: SIGKVCRTLLAKSVF
SIGKVFRTALSKSGF

SEQ ID NO: 258816 - protein, 15 aa, Artificial Sequence
  Description of Artificial Sequence: Synthetic peptide
  Seed: SIGKVCRTLLAKSVF
SIGKVFRTALSKSHF

SEQ ID NO: 258817 - protein, 15 aa, Artificial Sequence
  Description of Artificial Sequence: Synthetic peptide
  Seed: SIGKVCRTLLAKSVF
SIGKVFRTALSKSIF

SEQ ID NO: 258818 - protein, 15 aa, Artificial Sequence
  Description of Artificial Sequence: Synthetic peptide
  Seed: SIGKVCRTLLAKSVF
SIGKVFRTALSKSLF

SEQ ID NO: 258819 - protein, 15 aa, Artificial Sequence
  Description of Artificial Sequence: Synthetic peptide
  Seed: SIGKVCRTLLAKSVF
SIGKVFRTALSKSMF

SEQ ID NO: 258820 - protein, 15 aa, Artificial Sequence
  Description of Artificial Sequence: Synthetic peptide
  Seed: SIGKVCRTLLAKSVF
SIGKVFRTALSKSNF

SEQ ID NO: 258821 - protein, 15 aa, Artificial Sequence
  Description of Artificial Sequence: Synthetic peptide
  Seed: SIGKVCRTLLAKSVF
SIGKVFRTALSKSPF

SEQ ID NO: 258822 - protein, 15 aa, Artificial Sequence
  Description of Artificial Sequence: Synthetic peptide
  Seed: SIGKVCRTLLAKSVF
SIGKVFRTALSKSQF

SEQ ID NO: 258823 - protein, 15 aa, Artificial Sequence
  Description of Artificial Sequence: Synthetic peptide
  Seed: SIGKVCRTLLAKSVF
SIGKVFRTALSKSSF

SEQ ID NO: 258824 - protein, 15 aa, Artificial Sequence
  Description of Artificial Sequence: Synthetic peptide
  Seed: SIGKVCRTLLAKSVF
SIGKVFRTALSKSTF

SEQ ID NO: 258825 - protein, 15 aa, Artificial Sequence
  Description of Artificial Sequence: Synthetic peptide
  Seed: SIGKVCRTLLAKSVF
SIGKVFRTALSKSVF

SEQ ID NO: 258826 - protein, 15 aa, Artificial Sequence
  Description of Artificial Sequence: Synthetic peptide
  Seed: SIGKVCRTLLAKSVF
SIGKVFRTALSKSWF

SEQ ID NO: 258827 - protein, 15 aa, Artificial Sequence
  Description of Artificial Sequence: Synthetic peptide
  Seed: SIGKVCRTLLAKSVF
SIGKVFRTALSKSYF

SEQ ID NO: 258828 - protein, 15 aa, Artificial Sequence
  Description of Artificial Sequence: Synthetic peptide
  Seed: SIGKVCRTLLAKSVF
SIGKVFRTALTKSAF

SEQ ID NO: 258829 - protein, 15 aa, Artificial Sequence
  Description of Artificial Sequence: Synthetic peptide
  Seed: SIGKVCRTLLAKSVF
SIGKVFRTALTKSFF

SEQ ID NO: 258830 - protein, 15 aa, Artificial Sequence
  Description of Artificial Sequence: Synthetic peptide
  Seed: SIGKVCRTLLAKSVF
SIGKVFRTALTKSGF

SEQ ID NO: 258831 - protein, 15 aa, Artificial Sequence
  Description of Artificial Sequence: Synthetic peptide
  Seed: SIGKVCRTLLAKSVF
SIGKVFRTALTKSHF

SEQ ID NO: 258832 - protein, 15 aa, Artificial Sequence
  Description of Artificial Sequence: Synthetic peptide
  Seed: SIGKVCRTLLAKSVF
SIGKVFRTALTKSIF

SEQ ID NO: 258833 - protein, 15 aa, Artificial Sequence
  Description of Artificial Sequence: Synthetic peptide
  Seed: SIGKVCRTLLAKSVF
SIGKVFRTALTKSLF

SEQ ID NO: 258834 - protein, 15 aa, Artificial Sequence
  Description of Artificial Sequence: Synthetic peptide
  Seed: SIGKVCRTLLAKSVF
SIGKVFRTALTKSMF

SEQ ID NO: 258835 - protein, 15 aa, Artificial Sequence
  Description of Artificial Sequence: Synthetic peptide
  Seed: SIGKVCRTLLAKSVF
SIGKVFRTALTKSNF

SEQ ID NO: 258836 - protein, 15 aa, Artificial Sequence
  Description of Artificial Sequence: Synthetic peptide
  Seed: SIGKVCRTLLAKSVF
SIGKVFRTALTKSQF

SEQ ID NO: 258837 - protein, 15 aa, Artificial Sequence
  Description of Artificial Sequence: Synthetic peptide
  Seed: SIGKVCRTLLAKSVF
SIGKVFRTALTKSSF

SEQ ID NO: 258838 - protein, 15 aa, Artificial Sequence
  Description of Artificial Sequence: Synthetic peptide
  Seed: SIGKVCRTLLAKSVF
SIGKVFRTALTKSTF

SEQ ID NO: 258839 - protein, 15 aa, Artificial Sequence
  Description of Artificial Sequence: Synthetic peptide
  Seed: SIGKVCRTLLAKSVF
SIGKVFRTALTKSVF

SEQ ID NO: 258840 - protein, 15 aa, Artificial Sequence
  Description of Artificial Sequence: Synthetic peptide
  Seed: SIGKVCRTLLAKSVF
SIGKVFRTALVKSAF

SEQ ID NO: 258841 - protein, 15 aa, Artificial Sequence
  Description of Artificial Sequence: Synthetic peptide
  Seed: SIGKVCRTLLAKSVF
SIGKVFRTALVKSGF

SEQ ID NO: 258842 - protein, 15 aa, Artificial Sequence
  Description of Artificial Sequence: Synthetic peptide
  Seed: SIGKVCRTLLAKSVF
SIGKVFRTALVKSHF

SEQ ID NO: 258843 - protein, 15 aa, Artificial Sequence
  Description of Artificial Sequence: Synthetic peptide
  Seed: SIGKVCRTLLAKSVF
SIGKVFRTALVKSIF

SEQ ID NO: 258844 - protein, 15 aa, Artificial Sequence
  Description of Artificial Sequence: Synthetic peptide
  Seed: SIGKVCRTLLAKSVF
SIGKVFRTALVKSLF

SEQ ID NO: 258845 - protein, 15 aa, Artificial Sequence
  Description of Artificial Sequence: Synthetic peptide
  Seed: SIGKVCRTLLAKSVF
SIGKVFRTALVKSMF

SEQ ID NO: 258846 - protein, 15 aa, Artificial Sequence
  Description of Artificial Sequence: Synthetic peptide
  Seed: SIGKVCRTLLAKSVF
SIGKVFRTALVKSNF

SEQ ID NO: 258847 - protein, 15 aa, Artificial Sequence
  Description of Artificial Sequence: Synthetic peptide
  Seed: SIGKVCRTLLAKSVF
SIGKVFRTALVKSSF

SEQ ID NO: 258848 - protein, 15 aa, Artificial Sequence
  Description of Artificial Sequence: Synthetic peptide
  Seed: SIGKVCRTLLAKSVF
SIGKVFRTALVKSTF

SEQ ID NO: 258849 - protein, 15 aa, Artificial Sequence
  Description of Artificial Sequence: Synthetic peptide
  Seed: SIGKVCRTLLAKSVF
SIGKVFRTALVKSVF

SEQ ID NO: 258850 - protein, 15 aa, Artificial Sequence
  Description of Artificial Sequence: Synthetic peptide
  Seed: SIGKVCRTLLAKSVF
SIGKVFRTALWKSFF

SEQ ID NO: 258851 - protein, 15 aa, Artificial Sequence
  Description of Artificial Sequence: Synthetic peptide
  Seed: SIGKVCRTLLAKSVF
SIGKVFRTALWKSIF

SEQ ID NO: 258852 - protein, 15 aa, Artificial Sequence
  Description of Artificial Sequence: Synthetic peptide
  Seed: SIGKVCRTLLAKSVF
SIGKVFRTALWKSLF

SEQ ID NO: 258853 - protein, 15 aa, Artificial Sequence
  Description of Artificial Sequence: Synthetic peptide
  Seed: SIGKVCRTLLAKSVF
SIGKVFRTALWKSVF

SEQ ID NO: 258854 - protein, 15 aa, Artificial Sequence
  Description of Artificial Sequence: Synthetic peptide
  Seed: SIGKVCRTLLAKSVF
SIGKVFRTALYKSFF

SEQ ID NO: 258855 - protein, 15 aa, Artificial Sequence
  Description of Artificial Sequence: Synthetic peptide
  Seed: SIGKVCRTLLAKSVF
SIGKVFRTALYKSIF

SEQ ID NO: 258856 - protein, 15 aa, Artificial Sequence
  Description of Artificial Sequence: Synthetic peptide
  Seed: SIGKVCRTLLAKSVF
SIGKVFRTALYKSLF

SEQ ID NO: 258857 - protein, 15 aa, Artificial Sequence
  Description of Artificial Sequence: Synthetic peptide
  Seed: SIGKVCRTLLAKSVF
SIGKVFRTALYKSMF

SEQ ID NO: 258858 - protein, 15 aa, Artificial Sequence
  Description of Artificial Sequence: Synthetic peptide
  Seed: SIGKVCRTLLAKSVF
SIGKVFRTALYKSVF

SEQ ID NO: 258859 - protein, 15 aa, Artificial Sequence
  Description of Artificial Sequence: Synthetic peptide
  Seed: SIGKVCRTLLAKSVF
SIGKVFRTCLAKSIF

SEQ ID NO: 258860 - protein, 15 aa, Artificial Sequence
  Description of Artificial Sequence: Synthetic peptide
  Seed: SIGKVCRTLLAKSVF
SIGKVFRTCLAKSLF

SEQ ID NO: 258861 - protein, 15 aa, Artificial Sequence
  Description of Artificial Sequence: Synthetic peptide
  Seed: SIGKVCRTLLAKSVF
SIGKVFRTCLAKSVF

SEQ ID NO: 258862 - protein, 15 aa, Artificial Sequence
  Description of Artificial Sequence: Synthetic peptide
  Seed: SIGKVCRTLLAKSVF
SIGKVFRTCLFKSFF

SEQ ID NO: 258863 - protein, 15 aa, Artificial Sequence
  Description of Artificial Sequence: Synthetic peptide
  Seed: SIGKVCRTLLAKSVF
SIGKVFRTCLFKSIF

SEQ ID NO: 258864 - protein, 15 aa, Artificial Sequence
  Description of Artificial Sequence: Synthetic peptide
  Seed: SIGKVCRTLLAKSVF
SIGKVFRTCLFKSLF

SEQ ID NO: 258865 - protein, 15 aa, Artificial Sequence
  Description of Artificial Sequence: Synthetic peptide
  Seed: SIGKVCRTLLAKSVF
SIGKVFRTCLFKSMF

SEQ ID NO: 258866 - protein, 15 aa, Artificial Sequence
  Description of Artificial Sequence: Synthetic peptide
  Seed: SIGKVCRTLLAKSVF
SIGKVFRTCLFKSVF

SEQ ID NO: 258867 - protein, 15 aa, Artificial Sequence
  Description of Artificial Sequence: Synthetic peptide
  Seed: SIGKVCRTLLAKSVF
SIGKVFRTDLFKSFF

SEQ ID NO: 258868 - protein, 15 aa, Artificial Sequence
  Description of Artificial Sequence: Synthetic peptide
  Seed: SIGKVCRTLLAKSVF
SIGKVFRTDLFKSIF

SEQ ID NO: 258869 - protein, 15 aa, Artificial Sequence
  Description of Artificial Sequence: Synthetic peptide
  Seed: SIGKVCRTLLAKSVF
SIGKVFRTDLFKSLF

SEQ ID NO: 258870 - protein, 15 aa, Artificial Sequence
  Description of Artificial Sequence: Synthetic peptide
  Seed: SIGKVCRTLLAKSVF
SIGKVFRTDLFKSMF

SEQ ID NO: 258871 - protein, 15 aa, Artificial Sequence
  Description of Artificial Sequence: Synthetic peptide
  Seed: SIGKVCRTLLAKSVF
SIGKVFRTDLFKSVF

SEQ ID NO: 258872 - protein, 15 aa, Artificial Sequence
  Description of Artificial Sequence: Synthetic peptide
  Seed: SIGKVCRTLLAKSVF
SIGKVFRTELAKSAF

SEQ ID NO: 258873 - protein, 15 aa, Artificial Sequence
  Description of Artificial Sequence: Synthetic peptide
  Seed: SIGKVCRTLLAKSVF
SIGKVFRTELAKSIF

SEQ ID NO: 258874 - protein, 15 aa, Artificial Sequence
  Description of Artificial Sequence: Synthetic peptide
  Seed: SIGKVCRTLLAKSVF
SIGKVFRTELAKSLF

SEQ ID NO: 258875 - protein, 15 aa, Artificial Sequence
  Description of Artificial Sequence: Synthetic peptide
  Seed: SIGKVCRTLLAKSVF
SIGKVFRTELAKSMF

SEQ ID NO: 258876 - protein, 15 aa, Artificial Sequence
  Description of Artificial Sequence: Synthetic peptide
  Seed: SIGKVCRTLLAKSVF
SIGKVFRTELAKSNF

SEQ ID NO: 258877 - protein, 15 aa, Artificial Sequence
  Description of Artificial Sequence: Synthetic peptide
  Seed: SIGKVCRTLLAKSVF
SIGKVFRTELAKSSF

SEQ ID NO: 258878 - protein, 15 aa, Artificial Sequence
  Description of Artificial Sequence: Synthetic peptide
  Seed: SIGKVCRTLLAKSVF
SIGKVFRTELAKSTF

SEQ ID NO: 258879 - protein, 15 aa, Artificial Sequence
  Description of Artificial Sequence: Synthetic peptide
  Seed: SIGKVCRTLLAKSVF
SIGKVFRTELAKSVF

SEQ ID NO: 258880 - protein, 15 aa, Artificial Sequence
  Description of Artificial Sequence: Synthetic peptide
  Seed: SIGKVCRTLLAKSVF
SIGKVFRTELFKSAF

SEQ ID NO: 258881 - protein, 15 aa, Artificial Sequence
  Description of Artificial Sequence: Synthetic peptide
  Seed: SIGKVCRTLLAKSVF
SIGKVFRTELFKSCF

SEQ ID NO: 258882 - protein, 15 aa, Artificial Sequence
  Description of Artificial Sequence: Synthetic peptide
  Seed: SIGKVCRTLLAKSVF
SIGKVFRTELFKSDF

SEQ ID NO: 258883 - protein, 15 aa, Artificial Sequence
  Description of Artificial Sequence: Synthetic peptide
  Seed: SIGKVCRTLLAKSVF
SIGKVFRTELFKSEF

SEQ ID NO: 258884 - protein, 15 aa, Artificial Sequence
  Description of Artificial Sequence: Synthetic peptide
  Seed: SIGKVCRTLLAKSVF
SIGKVFRTELFKSFF

SEQ ID NO: 258885 - protein, 15 aa, Artificial Sequence
  Description of Artificial Sequence: Synthetic peptide
  Seed: SIGKVCRTLLAKSVF
SIGKVFRTELFKSHF

SEQ ID NO: 258886 - protein, 15 aa, Artificial Sequence
  Description of Artificial Sequence: Synthetic peptide
  Seed: SIGKVCRTLLAKSVF
SIGKVFRTELFKSIF

SEQ ID NO: 258887 - protein, 15 aa, Artificial Sequence
  Description of Artificial Sequence: Synthetic peptide
  Seed: SIGKVCRTLLAKSVF
SIGKVFRTELFKSLF

SEQ ID NO: 258888 - protein, 15 aa, Artificial Sequence
  Description of Artificial Sequence: Synthetic peptide
  Seed: SIGKVCRTLLAKSVF
SIGKVFRTELFKSMF

SEQ ID NO: 258889 - protein, 15 aa, Artificial Sequence
  Description of Artificial Sequence: Synthetic peptide
  Seed: SIGKVCRTLLAKSVF
SIGKVFRTELFKSNF

SEQ ID NO: 258890 - protein, 15 aa, Artificial Sequence
  Description of Artificial Sequence: Synthetic peptide
  Seed: SIGKVCRTLLAKSVF
SIGKVFRTELFKSPF

SEQ ID NO: 258891 - protein, 15 aa, Artificial Sequence
  Description of Artificial Sequence: Synthetic peptide
  Seed: SIGKVCRTLLAKSVF
SIGKVFRTELFKSQF

SEQ ID NO: 258892 - protein, 15 aa, Artificial Sequence
  Description of Artificial Sequence: Synthetic peptide
  Seed: SIGKVCRTLLAKSVF
SIGKVFRTELFKSSF

SEQ ID NO: 258893 - protein, 15 aa, Artificial Sequence
  Description of Artificial Sequence: Synthetic peptide
  Seed: SIGKVCRTLLAKSVF
SIGKVFRTELFKSTF

SEQ ID NO: 258894 - protein, 15 aa, Artificial Sequence
  Description of Artificial Sequence: Synthetic peptide
  Seed: SIGKVCRTLLAKSVF
SIGKVFRTELFKSVF

SEQ ID NO: 258895 - protein, 15 aa, Artificial Sequence
  Description of Artificial Sequence: Synthetic peptide
  Seed: SIGKVCRTLLAKSVF
SIGKVFRTELFKSWF

SEQ ID NO: 258896 - protein, 15 aa, Artificial Sequence
  Description of Artificial Sequence: Synthetic peptide
  Seed: SIGKVCRTLLAKSVF
SIGKVFRTELFKSYF

SEQ ID NO: 258897 - protein, 15 aa, Artificial Sequence
  Description of Artificial Sequence: Synthetic peptide
  Seed: SIGKVCRTLLAKSVF
SIGKVFRTELGKSAF

SEQ ID NO: 258898 - protein, 15 aa, Artificial Sequence
  Description of Artificial Sequence: Synthetic peptide
  Seed: SIGKVCRTLLAKSVF
SIGKVFRTELGKSIF

SEQ ID NO: 258899 - protein, 15 aa, Artificial Sequence
  Description of Artificial Sequence: Synthetic peptide
  Seed: SIGKVCRTLLAKSVF
SIGKVFRTELGKSLF

SEQ ID NO: 258900 - protein, 15 aa, Artificial Sequence
  Description of Artificial Sequence: Synthetic peptide
  Seed: SIGKVCRTLLAKSVF
SIGKVFRTELGKSVF

SEQ ID NO: 258901 - protein, 15 aa, Artificial Sequence
  Description of Artificial Sequence: Synthetic peptide
  Seed: SIGKVCRTLLAKSVF
SIGKVFRTELIKSIF

SEQ ID NO: 258902 - protein, 15 aa, Artificial Sequence
  Description of Artificial Sequence: Synthetic peptide
  Seed: SIGKVCRTLLAKSVF
SIGKVFRTELIKSLF

SEQ ID NO: 258903 - protein, 15 aa, Artificial Sequence
  Description of Artificial Sequence: Synthetic peptide
  Seed: SIGKVCRTLLAKSVF
SIGKVFRTELIKSVF

SEQ ID NO: 258904 - protein, 15 aa, Artificial Sequence
  Description of Artificial Sequence: Synthetic peptide
  Seed: SIGKVCRTLLAKSVF
SIGKVFRTELLKSFF

SEQ ID NO: 258905 - protein, 15 aa, Artificial Sequence
  Description of Artificial Sequence: Synthetic peptide
  Seed: SIGKVCRTLLAKSVF
SIGKVFRTELLKSIF

SEQ ID NO: 258906 - protein, 15 aa, Artificial Sequence
  Description of Artificial Sequence: Synthetic peptide
  Seed: SIGKVCRTLLAKSVF
SIGKVFRTELLKSLF

SEQ ID NO: 258907 - protein, 15 aa, Artificial Sequence
  Description of Artificial Sequence: Synthetic peptide
  Seed: SIGKVCRTLLAKSVF
SIGKVFRTELLKSMF

SEQ ID NO: 258908 - protein, 15 aa, Artificial Sequence
  Description of Artificial Sequence: Synthetic peptide
  Seed: SIGKVCRTLLAKSVF
SIGKVFRTELLKSVF

SEQ ID NO: 258909 - protein, 15 aa, Artificial Sequence
  Description of Artificial Sequence: Synthetic peptide
  Seed: SIGKVCRTLLAKSVF
SIGKVFRTELLKSYF

SEQ ID NO: 258910 - protein, 15 aa, Artificial Sequence
  Description of Artificial Sequence: Synthetic peptide
  Seed: SIGKVCRTLLAKSVF
SIGKVFRTELMKSIF

SEQ ID NO: 258911 - protein, 15 aa, Artificial Sequence
  Description of Artificial Sequence: Synthetic peptide
  Seed: SIGKVCRTLLAKSVF
SIGKVFRTELMKSLF

SEQ ID NO: 258912 - protein, 15 aa, Artificial Sequence
  Description of Artificial Sequence: Synthetic peptide
  Seed: SIGKVCRTLLAKSVF
SIGKVFRTELMKSVF

SEQ ID NO: 258913 - protein, 15 aa, Artificial Sequence
  Description of Artificial Sequence: Synthetic peptide
  Seed: SIGKVCRTLLAKSVF
SIGKVFRTELPKSIF

SEQ ID NO: 258914 - protein, 15 aa, Artificial Sequence
  Description of Artificial Sequence: Synthetic peptide
  Seed: SIGKVCRTLLAKSVF
SIGKVFRTELPKSLF

SEQ ID NO: 258915 - protein, 15 aa, Artificial Sequence
  Description of Artificial Sequence: Synthetic peptide
  Seed: SIGKVCRTLLAKSVF
SIGKVFRTELPKSVF

SEQ ID NO: 258916 - protein, 15 aa, Artificial Sequence
  Description of Artificial Sequence: Synthetic peptide
  Seed: SIGKVCRTLLAKSVF
SIGKVFRTELSKSAF

SEQ ID NO: 258917 - protein, 15 aa, Artificial Sequence
  Description of Artificial Sequence: Synthetic peptide
  Seed: SIGKVCRTLLAKSVF
SIGKVFRTELSKSIF

SEQ ID NO: 258918 - protein, 15 aa, Artificial Sequence
  Description of Artificial Sequence: Synthetic peptide
  Seed: SIGKVCRTLLAKSVF
SIGKVFRTELSKSLF

SEQ ID NO: 258919 - protein, 15 aa, Artificial Sequence
  Description of Artificial Sequence: Synthetic peptide
  Seed: SIGKVCRTLLAKSVF
SIGKVFRTELSKSVF

SEQ ID NO: 258920 - protein, 15 aa, Artificial Sequence
  Description of Artificial Sequence: Synthetic peptide
  Seed: SIGKVCRTLLAKSVF
SIGKVFRTELWKSFF

SEQ ID NO: 258921 - protein, 15 aa, Artificial Sequence
  Description of Artificial Sequence: Synthetic peptide
  Seed: SIGKVCRTLLAKSVF
SIGKVFRTELWKSIF

SEQ ID NO: 258922 - protein, 15 aa, Artificial Sequence
  Description of Artificial Sequence: Synthetic peptide
  Seed: SIGKVCRTLLAKSVF
SIGKVFRTELWKSLF

SEQ ID NO: 258923 - protein, 15 aa, Artificial Sequence
  Description of Artificial Sequence: Synthetic peptide
  Seed: SIGKVCRTLLAKSVF
SIGKVFRTELWKSVF

SEQ ID NO: 258924 - protein, 15 aa, Artificial Sequence
  Description of Artificial Sequence: Synthetic peptide
  Seed: SIGKVCRTLLAKSVF
SIGKVFRTELYKSFF

SEQ ID NO: 258925 - protein, 15 aa, Artificial Sequence
  Description of Artificial Sequence: Synthetic peptide
  Seed: SIGKVCRTLLAKSVF
SIGKVFRTELYKSIF

SEQ ID NO: 258926 - protein, 15 aa, Artificial Sequence
  Description of Artificial Sequence: Synthetic peptide
  Seed: SIGKVCRTLLAKSVF
SIGKVFRTELYKSLF

SEQ ID NO: 258927 - protein, 15 aa, Artificial Sequence
  Description of Artificial Sequence: Synthetic peptide
  Seed: SIGKVCRTLLAKSVF
SIGKVFRTELYKSMF

SEQ ID NO: 258928 - protein, 15 aa, Artificial Sequence
  Description of Artificial Sequence: Synthetic peptide
  Seed: SIGKVCRTLLAKSVF
SIGKVFRTELYKSVF

SEQ ID NO: 258929 - protein, 15 aa, Artificial Sequence
  Description of Artificial Sequence: Synthetic peptide
  Seed: SIGKVCRTLLAKSVF
SIGKVFRTFLAKSAF

SEQ ID NO: 258930 - protein, 15 aa, Artificial Sequence
  Description of Artificial Sequence: Synthetic peptide
  Seed: SIGKVCRTLLAKSVF
SIGKVFRTFLAKSFF

SEQ ID NO: 258931 - protein, 15 aa, Artificial Sequence
  Description of Artificial Sequence: Synthetic peptide
  Seed: SIGKVCRTLLAKSVF
SIGKVFRTFLAKSIF

SEQ ID NO: 258932 - protein, 15 aa, Artificial Sequence
  Description of Artificial Sequence: Synthetic peptide
  Seed: SIGKVCRTLLAKSVF
SIGKVFRTFLAKSLF

SEQ ID NO: 258933 - protein, 15 aa, Artificial Sequence
  Description of Artificial Sequence: Synthetic peptide
  Seed: SIGKVCRTLLAKSVF
SIGKVFRTFLAKSMF

SEQ ID NO: 258934 - protein, 15 aa, Artificial Sequence
  Description of Artificial Sequence: Synthetic peptide
  Seed: SIGKVCRTLLAKSVF
SIGKVFRTFLAKSNF

SEQ ID NO: 258935 - protein, 15 aa, Artificial Sequence
  Description of Artificial Sequence: Synthetic peptide
  Seed: SIGKVCRTLLAKSVF
SIGKVFRTFLAKSRF

SEQ ID NO: 258936 - protein, 15 aa, Artificial Sequence
  Description of Artificial Sequence: Synthetic peptide
  Seed: SIGKVCRTLLAKSVF
SIGKVFRTFLAKSSF

SEQ ID NO: 258937 - protein, 15 aa, Artificial Sequence
  Description of Artificial Sequence: Synthetic peptide
  Seed: SIGKVCRTLLAKSVF
SIGKVFRTFLAKSTF

SEQ ID NO: 258938 - protein, 15 aa, Artificial Sequence
  Description of Artificial Sequence: Synthetic peptide
  Seed: SIGKVCRTLLAKSVF
SIGKVFRTFLAKSVF

SEQ ID NO: 258939 - protein, 15 aa, Artificial Sequence
  Description of Artificial Sequence: Synthetic peptide
  Seed: SIGKVCRTLLAKSVF
SIGKVFRTFLFKSAF

SEQ ID NO: 258940 - protein, 15 aa, Artificial Sequence
  Description of Artificial Sequence: Synthetic peptide
  Seed: SIGKVCRTLLAKSVF
SIGKVFRTFLFKSCF

SEQ ID NO: 258941 - protein, 15 aa, Artificial Sequence
  Description of Artificial Sequence: Synthetic peptide
  Seed: SIGKVCRTLLAKSVF
SIGKVFRTFLFKSDF

SEQ ID NO: 258942 - protein, 15 aa, Artificial Sequence
  Description of Artificial Sequence: Synthetic peptide
  Seed: SIGKVCRTLLAKSVF
SIGKVFRTFLFKSEF

SEQ ID NO: 258943 - protein, 15 aa, Artificial Sequence
  Description of Artificial Sequence: Synthetic peptide
  Seed: SIGKVCRTLLAKSVF
SIGKVFRTFLFKSFF

SEQ ID NO: 258944 - protein, 15 aa, Artificial Sequence
  Description of Artificial Sequence: Synthetic peptide
  Seed: SIGKVCRTLLAKSVF
SIGKVFRTFLFKSGF

SEQ ID NO: 258945 - protein, 15 aa, Artificial Sequence
  Description of Artificial Sequence: Synthetic peptide
  Seed: SIGKVCRTLLAKSVF
SIGKVFRTFLFKSHF

SEQ ID NO: 258946 - protein, 15 aa, Artificial Sequence
  Description of Artificial Sequence: Synthetic peptide
  Seed: SIGKVCRTLLAKSVF
SIGKVFRTFLFKSIF

SEQ ID NO: 258947 - protein, 15 aa, Artificial Sequence
  Description of Artificial Sequence: Synthetic peptide
  Seed: SIGKVCRTLLAKSVF
SIGKVFRTFLFKSKF

SEQ ID NO: 258948 - protein, 15 aa, Artificial Sequence
  Description of Artificial Sequence: Synthetic peptide
  Seed: SIGKVCRTLLAKSVF
SIGKVFRTFLFKSLF

SEQ ID NO: 258949 - protein, 15 aa, Artificial Sequence
  Description of Artificial Sequence: Synthetic peptide
  Seed: SIGKVCRTLLAKSVF
SIGKVFRTFLFKSMF

SEQ ID NO: 258950 - protein, 15 aa, Artificial Sequence
  Description of Artificial Sequence: Synthetic peptide
  Seed: SIGKVCRTLLAKSVF
SIGKVFRTFLFKSNF

SEQ ID NO: 258951 - protein, 15 aa, Artificial Sequence
  Description of Artificial Sequence: Synthetic peptide
  Seed: SIGKVCRTLLAKSVF
SIGKVFRTFLFKSPF

SEQ ID NO: 258952 - protein, 15 aa, Artificial Sequence
  Description of Artificial Sequence: Synthetic peptide
  Seed: SIGKVCRTLLAKSVF
SIGKVFRTFLFKSQF

SEQ ID NO: 258953 - protein, 15 aa, Artificial Sequence
  Description of Artificial Sequence: Synthetic peptide
  Seed: SIGKVCRTLLAKSVF
SIGKVFRTFLFKSRF

SEQ ID NO: 258954 - protein, 15 aa, Artificial Sequence
  Description of Artificial Sequence: Synthetic peptide
  Seed: SIGKVCRTLLAKSVF
SIGKVFRTFLFKSSF

SEQ ID NO: 258955 - protein, 15 aa, Artificial Sequence
  Description of Artificial Sequence: Synthetic peptide
  Seed: SIGKVCRTLLAKSVF
SIGKVFRTFLFKSTF

SEQ ID NO: 258956 - protein, 15 aa, Artificial Sequence
  Description of Artificial Sequence: Synthetic peptide
  Seed: SIGKVCRTLLAKSVF
SIGKVFRTFLFKSVF

SEQ ID NO: 258957 - protein, 15 aa, Artificial Sequence
  Description of Artificial Sequence: Synthetic peptide
  Seed: SIGKVCRTLLAKSVF
SIGKVFRTFLFKSWF

SEQ ID NO: 258958 - protein, 15 aa, Artificial Sequence
  Description of Artificial Sequence: Synthetic peptide
  Seed: SIGKVCRTLLAKSVF
SIGKVFRTFLFKSYF

SEQ ID NO: 258959 - protein, 15 aa, Artificial Sequence
  Description of Artificial Sequence: Synthetic peptide
  Seed: SIGKVCRTLLAKSVF
SIGKVFRTFLGKSAF

SEQ ID NO: 258960 - protein, 15 aa, Artificial Sequence
  Description of Artificial Sequence: Synthetic peptide
  Seed: SIGKVCRTLLAKSVF
SIGKVFRTFLGKSIF

SEQ ID NO: 258961 - protein, 15 aa, Artificial Sequence
  Description of Artificial Sequence: Synthetic peptide
  Seed: SIGKVCRTLLAKSVF
SIGKVFRTFLGKSLF

SEQ ID NO: 258962 - protein, 15 aa, Artificial Sequence
  Description of Artificial Sequence: Synthetic peptide
  Seed: SIGKVCRTLLAKSVF
SIGKVFRTFLGKSVF

SEQ ID NO: 258963 - protein, 15 aa, Artificial Sequence
  Description of Artificial Sequence: Synthetic peptide
  Seed: SIGKVCRTLLAKSVF
SIGKVFRTFLIKSFF

SEQ ID NO: 258964 - protein, 15 aa, Artificial Sequence
  Description of Artificial Sequence: Synthetic peptide
  Seed: SIGKVCRTLLAKSVF
SIGKVFRTFLIKSIF

SEQ ID NO: 258965 - protein, 15 aa, Artificial Sequence
  Description of Artificial Sequence: Synthetic peptide
  Seed: SIGKVCRTLLAKSVF
SIGKVFRTFLIKSLF

SEQ ID NO: 258966 - protein, 15 aa, Artificial Sequence
  Description of Artificial Sequence: Synthetic peptide
  Seed: SIGKVCRTLLAKSVF
SIGKVFRTFLIKSMF

SEQ ID NO: 258967 - protein, 15 aa, Artificial Sequence
  Description of Artificial Sequence: Synthetic peptide
  Seed: SIGKVCRTLLAKSVF
SIGKVFRTFLIKSVF

SEQ ID NO: 258968 - protein, 15 aa, Artificial Sequence
  Description of Artificial Sequence: Synthetic peptide
  Seed: SIGKVCRTLLAKSVF
SIGKVFRTFLIKSYF

SEQ ID NO: 258969 - protein, 15 aa, Artificial Sequence
  Description of Artificial Sequence: Synthetic peptide
  Seed: SIGKVCRTLLAKSVF
SIGKVFRTFLLKSAF

SEQ ID NO: 258970 - protein, 15 aa, Artificial Sequence
  Description of Artificial Sequence: Synthetic peptide
  Seed: SIGKVCRTLLAKSVF
SIGKVFRTFLLKSDF

SEQ ID NO: 258971 - protein, 15 aa, Artificial Sequence
  Description of Artificial Sequence: Synthetic peptide
  Seed: SIGKVCRTLLAKSVF
SIGKVFRTFLLKSEF

SEQ ID NO: 258972 - protein, 15 aa, Artificial Sequence
  Description of Artificial Sequence: Synthetic peptide
  Seed: SIGKVCRTLLAKSVF
SIGKVFRTFLLKSFF

SEQ ID NO: 258973 - protein, 15 aa, Artificial Sequence
  Description of Artificial Sequence: Synthetic peptide
  Seed: SIGKVCRTLLAKSVF
SIGKVFRTFLLKSHF

SEQ ID NO: 258974 - protein, 15 aa, Artificial Sequence
  Description of Artificial Sequence: Synthetic peptide
  Seed: SIGKVCRTLLAKSVF
SIGKVFRTFLLKSIF

SEQ ID NO: 258975 - protein, 15 aa, Artificial Sequence
  Description of Artificial Sequence: Synthetic peptide
  Seed: SIGKVCRTLLAKSVF
SIGKVFRTFLLKSLF

SEQ ID NO: 258976 - protein, 15 aa, Artificial Sequence
  Description of Artificial Sequence: Synthetic peptide
  Seed: SIGKVCRTLLAKSVF
SIGKVFRTFLLKSMF

SEQ ID NO: 258977 - protein, 15 aa, Artificial Sequence
  Description of Artificial Sequence: Synthetic peptide
  Seed: SIGKVCRTLLAKSVF
SIGKVFRTFLLKSNF

SEQ ID NO: 258978 - protein, 15 aa, Artificial Sequence
  Description of Artificial Sequence: Synthetic peptide
  Seed: SIGKVCRTLLAKSVF
SIGKVFRTFLLKSSF

SEQ ID NO: 258979 - protein, 15 aa, Artificial Sequence
  Description of Artificial Sequence: Synthetic peptide
  Seed: SIGKVCRTLLAKSVF
SIGKVFRTFLLKSTF

SEQ ID NO: 258980 - protein, 15 aa, Artificial Sequence
  Description of Artificial Sequence: Synthetic peptide
  Seed: SIGKVCRTLLAKSVF
SIGKVFRTFLLKSVF

SEQ ID NO: 258981 - protein, 15 aa, Artificial Sequence
  Description of Artificial Sequence: Synthetic peptide
  Seed: SIGKVCRTLLAKSVF
SIGKVFRTFLLKSYF

SEQ ID NO: 258982 - protein, 15 aa, Artificial Sequence
  Description of Artificial Sequence: Synthetic peptide
  Seed: SIGKVCRTLLAKSVF
SIGKVFRTFLMKSFF

SEQ ID NO: 258983 - protein, 15 aa, Artificial Sequence
  Description of Artificial Sequence: Synthetic peptide
  Seed: SIGKVCRTLLAKSVF
SIGKVFRTFLMKSIF

SEQ ID NO: 258984 - protein, 15 aa, Artificial Sequence
  Description of Artificial Sequence: Synthetic peptide
  Seed: SIGKVCRTLLAKSVF
SIGKVFRTFLMKSLF

SEQ ID NO: 258985 - protein, 15 aa, Artificial Sequence
  Description of Artificial Sequence: Synthetic peptide
  Seed: SIGKVCRTLLAKSVF
SIGKVFRTFLMKSMF

SEQ ID NO: 258986 - protein, 15 aa, Artificial Sequence
  Description of Artificial Sequence: Synthetic peptide
  Seed: SIGKVCRTLLAKSVF
SIGKVFRTFLMKSVF

SEQ ID NO: 258987 - protein, 15 aa, Artificial Sequence
  Description of Artificial Sequence: Synthetic peptide
  Seed: SIGKVCRTLLAKSVF
SIGKVFRTFLMKSYF

SEQ ID NO: 258988 - protein, 15 aa, Artificial Sequence
  Description of Artificial Sequence: Synthetic peptide
  Seed: SIGKVCRTLLAKSVF
SIGKVFRTFLNKSIF

SEQ ID NO: 258989 - protein, 15 aa, Artificial Sequence
  Description of Artificial Sequence: Synthetic peptide
  Seed: SIGKVCRTLLAKSVF
SIGKVFRTFLNKSLF

SEQ ID NO: 258990 - protein, 15 aa, Artificial Sequence
  Description of Artificial Sequence: Synthetic peptide
  Seed: SIGKVCRTLLAKSVF
SIGKVFRTFLNKSVF

SEQ ID NO: 258991 - protein, 15 aa, Artificial Sequence
  Description of Artificial Sequence: Synthetic peptide
  Seed: SIGKVCRTLLAKSVF
SIGKVFRTFLPKSAF

SEQ ID NO: 258992 - protein, 15 aa, Artificial Sequence
  Description of Artificial Sequence: Synthetic peptide
  Seed: SIGKVCRTLLAKSVF
SIGKVFRTFLPKSIF

SEQ ID NO: 258993 - protein, 15 aa, Artificial Sequence
  Description of Artificial Sequence: Synthetic peptide
  Seed: SIGKVCRTLLAKSVF
SIGKVFRTFLPKSLF

SEQ ID NO: 258994 - protein, 15 aa, Artificial Sequence
  Description of Artificial Sequence: Synthetic peptide
  Seed: SIGKVCRTLLAKSVF
SIGKVFRTFLPKSNF

SEQ ID NO: 258995 - protein, 15 aa, Artificial Sequence
  Description of Artificial Sequence: Synthetic peptide
  Seed: SIGKVCRTLLAKSVF
SIGKVFRTFLPKSSF

SEQ ID NO: 258996 - protein, 15 aa, Artificial Sequence
  Description of Artificial Sequence: Synthetic peptide
  Seed: SIGKVCRTLLAKSVF
SIGKVFRTFLPKSVF

SEQ ID NO: 258997 - protein, 15 aa, Artificial Sequence
  Description of Artificial Sequence: Synthetic peptide
  Seed: SIGKVCRTLLAKSVF
SIGKVFRTFLSKSAF

SEQ ID NO: 258998 - protein, 15 aa, Artificial Sequence
  Description of Artificial Sequence: Synthetic peptide
  Seed: SIGKVCRTLLAKSVF
SIGKVFRTFLSKSFF

SEQ ID NO: 258999 - protein, 15 aa, Artificial Sequence
  Description of Artificial Sequence: Synthetic peptide
  Seed: SIGKVCRTLLAKSVF
SIGKVFRTFLSKSIF

SEQ ID NO: 259000 - protein, 15 aa, Artificial Sequence
  Description of Artificial Sequence: Synthetic peptide
  Seed: SIGKVCRTLLAKSVF
SIGKVFRTFLSKSLF

SEQ ID NO: 259001 - protein, 15 aa, Artificial Sequence
  Description of Artificial Sequence: Synthetic peptide
  Seed: SIGKVCRTLLAKSVF
SIGKVFRTFLSKSMF

SEQ ID NO: 259002 - protein, 15 aa, Artificial Sequence
  Description of Artificial Sequence: Synthetic peptide
  Seed: SIGKVCRTLLAKSVF
SIGKVFRTFLSKSNF

SEQ ID NO: 259003 - protein, 15 aa, Artificial Sequence
  Description of Artificial Sequence: Synthetic peptide
  Seed: SIGKVCRTLLAKSVF
SIGKVFRTFLSKSRF

SEQ ID NO: 259004 - protein, 15 aa, Artificial Sequence
  Description of Artificial Sequence: Synthetic peptide
  Seed: SIGKVCRTLLAKSVF
SIGKVFRTFLSKSSF

SEQ ID NO: 259005 - protein, 15 aa, Artificial Sequence
  Description of Artificial Sequence: Synthetic peptide
  Seed: SIGKVCRTLLAKSVF
SIGKVFRTFLSKSTF

SEQ ID NO: 259006 - protein, 15 aa, Artificial Sequence
  Description of Artificial Sequence: Synthetic peptide
  Seed: SIGKVCRTLLAKSVF
SIGKVFRTFLSKSVF

SEQ ID NO: 259007 - protein, 15 aa, Artificial Sequence
  Description of Artificial Sequence: Synthetic peptide
  Seed: SIGKVCRTLLAKSVF
SIGKVFRTFLTKSIF

SEQ ID NO: 259008 - protein, 15 aa, Artificial Sequence
  Description of Artificial Sequence: Synthetic peptide
  Seed: SIGKVCRTLLAKSVF
SIGKVFRTFLTKSLF

SEQ ID NO: 259009 - protein, 15 aa, Artificial Sequence
  Description of Artificial Sequence: Synthetic peptide
  Seed: SIGKVCRTLLAKSVF
SIGKVFRTFLTKSNF

SEQ ID NO: 259010 - protein, 15 aa, Artificial Sequence
  Description of Artificial Sequence: Synthetic peptide
  Seed: SIGKVCRTLLAKSVF
SIGKVFRTFLTKSVF

SEQ ID NO: 259011 - protein, 15 aa, Artificial Sequence
  Description of Artificial Sequence: Synthetic peptide
  Seed: SIGKVCRTLLAKSVF
SIGKVFRTFLVKSFF

SEQ ID NO: 259012 - protein, 15 aa, Artificial Sequence
  Description of Artificial Sequence: Synthetic peptide
  Seed: SIGKVCRTLLAKSVF
SIGKVFRTFLVKSIF

SEQ ID NO: 259013 - protein, 15 aa, Artificial Sequence
  Description of Artificial Sequence: Synthetic peptide
  Seed: SIGKVCRTLLAKSVF
SIGKVFRTFLVKSLF

SEQ ID NO: 259014 - protein, 15 aa, Artificial Sequence
  Description of Artificial Sequence: Synthetic peptide
  Seed: SIGKVCRTLLAKSVF
SIGKVFRTFLVKSVF

SEQ ID NO: 259015 - protein, 15 aa, Artificial Sequence
  Description of Artificial Sequence: Synthetic peptide
  Seed: SIGKVCRTLLAKSVF
SIGKVFRTFLWKSFF

SEQ ID NO: 259016 - protein, 15 aa, Artificial Sequence
  Description of Artificial Sequence: Synthetic peptide
  Seed: SIGKVCRTLLAKSVF
SIGKVFRTFLWKSIF

SEQ ID NO: 259017 - protein, 15 aa, Artificial Sequence
  Description of Artificial Sequence: Synthetic peptide
  Seed: SIGKVCRTLLAKSVF
SIGKVFRTFLWKSLF

SEQ ID NO: 259018 - protein, 15 aa, Artificial Sequence
  Description of Artificial Sequence: Synthetic peptide
  Seed: SIGKVCRTLLAKSVF
SIGKVFRTFLWKSMF

SEQ ID NO: 259019 - protein, 15 aa, Artificial Sequence
  Description of Artificial Sequence: Synthetic peptide
  Seed: SIGKVCRTLLAKSVF
SIGKVFRTFLWKSVF

SEQ ID NO: 259020 - protein, 15 aa, Artificial Sequence
  Description of Artificial Sequence: Synthetic peptide
  Seed: SIGKVCRTLLAKSVF
SIGKVFRTFLYKSAF

SEQ ID NO: 259021 - protein, 15 aa, Artificial Sequence
  Description of Artificial Sequence: Synthetic peptide
  Seed: SIGKVCRTLLAKSVF
SIGKVFRTFLYKSFF

SEQ ID NO: 259022 - protein, 15 aa, Artificial Sequence
  Description of Artificial Sequence: Synthetic peptide
  Seed: SIGKVCRTLLAKSVF
SIGKVFRTFLYKSIF

SEQ ID NO: 259023 - protein, 15 aa, Artificial Sequence
  Description of Artificial Sequence: Synthetic peptide
  Seed: SIGKVCRTLLAKSVF
SIGKVFRTFLYKSLF

SEQ ID NO: 259024 - protein, 15 aa, Artificial Sequence
  Description of Artificial Sequence: Synthetic peptide
  Seed: SIGKVCRTLLAKSVF
SIGKVFRTFLYKSMF

SEQ ID NO: 259025 - protein, 15 aa, Artificial Sequence
  Description of Artificial Sequence: Synthetic peptide
  Seed: SIGKVCRTLLAKSVF
SIGKVFRTFLYKSTF

SEQ ID NO: 259026 - protein, 15 aa, Artificial Sequence
  Description of Artificial Sequence: Synthetic peptide
  Seed: SIGKVCRTLLAKSVF
SIGKVFRTFLYKSVF

SEQ ID NO: 259027 - protein, 15 aa, Artificial Sequence
  Description of Artificial Sequence: Synthetic peptide
  Seed: SIGKVCRTLLAKSVF
SIGKVFRTFLYKSYF

SEQ ID NO: 259028 - protein, 15 aa, Artificial Sequence
  Description of Artificial Sequence: Synthetic peptide
  Seed: SIGKVCRTLLAKSVF
SIGKVFRTGLAKSAF

SEQ ID NO: 259029 - protein, 15 aa, Artificial Sequence
  Description of Artificial Sequence: Synthetic peptide
  Seed: SIGKVCRTLLAKSVF
SIGKVFRTGLAKSFF

SEQ ID NO: 259030 - protein, 15 aa, Artificial Sequence
  Description of Artificial Sequence: Synthetic peptide
  Seed: SIGKVCRTLLAKSVF
SIGKVFRTGLAKSIF

SEQ ID NO: 259031 - protein, 15 aa, Artificial Sequence
  Description of Artificial Sequence: Synthetic peptide
  Seed: SIGKVCRTLLAKSVF
SIGKVFRTGLAKSLF

SEQ ID NO: 259032 - protein, 15 aa, Artificial Sequence
  Description of Artificial Sequence: Synthetic peptide
  Seed: SIGKVCRTLLAKSVF
SIGKVFRTGLAKSMF

SEQ ID NO: 259033 - protein, 15 aa, Artificial Sequence
  Description of Artificial Sequence: Synthetic peptide
  Seed: SIGKVCRTLLAKSVF
SIGKVFRTGLAKSSF

SEQ ID NO: 259034 - protein, 15 aa, Artificial Sequence
  Description of Artificial Sequence: Synthetic peptide
  Seed: SIGKVCRTLLAKSVF
SIGKVFRTGLAKSTF

SEQ ID NO: 259035 - protein, 15 aa, Artificial Sequence
  Description of Artificial Sequence: Synthetic peptide
  Seed: SIGKVCRTLLAKSVF
SIGKVFRTGLAKSVF

SEQ ID NO: 259036 - protein, 15 aa, Artificial Sequence
  Description of Artificial Sequence: Synthetic peptide
  Seed: SIGKVCRTLLAKSVF
SIGKVFRTGLFKSAF

SEQ ID NO: 259037 - protein, 15 aa, Artificial Sequence
  Description of Artificial Sequence: Synthetic peptide
  Seed: SIGKVCRTLLAKSVF
SIGKVFRTGLFKSFF

SEQ ID NO: 259038 - protein, 15 aa, Artificial Sequence
  Description of Artificial Sequence: Synthetic peptide
  Seed: SIGKVCRTLLAKSVF
SIGKVFRTGLFKSIF

SEQ ID NO: 259039 - protein, 15 aa, Artificial Sequence
  Description of Artificial Sequence: Synthetic peptide
  Seed: SIGKVCRTLLAKSVF
SIGKVFRTGLFKSLF

SEQ ID NO: 259040 - protein, 15 aa, Artificial Sequence
  Description of Artificial Sequence: Synthetic peptide
  Seed: SIGKVCRTLLAKSVF
SIGKVFRTGLFKSMF

SEQ ID NO: 259041 - protein, 15 aa, Artificial Sequence
  Description of Artificial Sequence: Synthetic peptide
  Seed: SIGKVCRTLLAKSVF
SIGKVFRTGLFKSVF

SEQ ID NO: 259042 - protein, 15 aa, Artificial Sequence
  Description of Artificial Sequence: Synthetic peptide
  Seed: SIGKVCRTLLAKSVF
SIGKVFRTGLGKSAF

SEQ ID NO: 259043 - protein, 15 aa, Artificial Sequence
  Description of Artificial Sequence: Synthetic peptide
  Seed: SIGKVCRTLLAKSVF
SIGKVFRTGLGKSIF

SEQ ID NO: 259044 - protein, 15 aa, Artificial Sequence
  Description of Artificial Sequence: Synthetic peptide
  Seed: SIGKVCRTLLAKSVF
SIGKVFRTGLGKSLF

SEQ ID NO: 259045 - protein, 15 aa, Artificial Sequence
  Description of Artificial Sequence: Synthetic peptide
  Seed: SIGKVCRTLLAKSVF
SIGKVFRTGLGKSMF

SEQ ID NO: 259046 - protein, 15 aa, Artificial Sequence
  Description of Artificial Sequence: Synthetic peptide
  Seed: SIGKVCRTLLAKSVF
SIGKVFRTGLGKSVF

SEQ ID NO: 259047 - protein, 15 aa, Artificial Sequence
  Description of Artificial Sequence: Synthetic peptide
  Seed: SIGKVCRTLLAKSVF
SIGKVFRTGLNKSIF

SEQ ID NO: 259048 - protein, 15 aa, Artificial Sequence
  Description of Artificial Sequence: Synthetic peptide
  Seed: SIGKVCRTLLAKSVF
SIGKVFRTGLNKSLF

SEQ ID NO: 259049 - protein, 15 aa, Artificial Sequence
  Description of Artificial Sequence: Synthetic peptide
  Seed: SIGKVCRTLLAKSVF
SIGKVFRTGLNKSVF

SEQ ID NO: 259050 - protein, 15 aa, Artificial Sequence
  Description of Artificial Sequence: Synthetic peptide
  Seed: SIGKVCRTLLAKSVF
SIGKVFRTGLPKSIF

SEQ ID NO: 259051 - protein, 15 aa, Artificial Sequence
  Description of Artificial Sequence: Synthetic peptide
  Seed: SIGKVCRTLLAKSVF
SIGKVFRTGLPKSLF

SEQ ID NO: 259052 - protein, 15 aa, Artificial Sequence
  Description of Artificial Sequence: Synthetic peptide
  Seed: SIGKVCRTLLAKSVF
SIGKVFRTGLPKSVF

SEQ ID NO: 259053 - protein, 15 aa, Artificial Sequence
  Description of Artificial Sequence: Synthetic peptide
  Seed: SIGKVCRTLLAKSVF
SIGKVFRTGLSKSAF

SEQ ID NO: 259054 - protein, 15 aa, Artificial Sequence
  Description of Artificial Sequence: Synthetic peptide
  Seed: SIGKVCRTLLAKSVF
SIGKVFRTGLSKSIF

SEQ ID NO: 259055 - protein, 15 aa, Artificial Sequence
  Description of Artificial Sequence: Synthetic peptide
  Seed: SIGKVCRTLLAKSVF
SIGKVFRTGLSKSLF

SEQ ID NO: 259056 - protein, 15 aa, Artificial Sequence
  Description of Artificial Sequence: Synthetic peptide
  Seed: SIGKVCRTLLAKSVF
SIGKVFRTGLSKSMF

SEQ ID NO: 259057 - protein, 15 aa, Artificial Sequence
  Description of Artificial Sequence: Synthetic peptide
  Seed: SIGKVCRTLLAKSVF
SIGKVFRTGLSKSTF

SEQ ID NO: 259058 - protein, 15 aa, Artificial Sequence
  Description of Artificial Sequence: Synthetic peptide
  Seed: SIGKVCRTLLAKSVF
SIGKVFRTGLSKSVF

SEQ ID NO: 259059 - protein, 15 aa, Artificial Sequence
  Description of Artificial Sequence: Synthetic peptide
  Seed: SIGKVCRTLLAKSVF
SIGKVFRTGLTKSIF

SEQ ID NO: 259060 - protein, 15 aa, Artificial Sequence
  Description of Artificial Sequence: Synthetic peptide
  Seed: SIGKVCRTLLAKSVF
SIGKVFRTGLTKSLF

SEQ ID NO: 259061 - protein, 15 aa, Artificial Sequence
  Description of Artificial Sequence: Synthetic peptide
  Seed: SIGKVCRTLLAKSVF
SIGKVFRTGLTKSVF

SEQ ID NO: 259062 - protein, 15 aa, Artificial Sequence
  Description of Artificial Sequence: Synthetic peptide
  Seed: SIGKVCRTLLAKSVF
SIGKVFRTGLVKSIF

SEQ ID NO: 259063 - protein, 15 aa, Artificial Sequence
  Description of Artificial Sequence: Synthetic peptide
  Seed: SIGKVCRTLLAKSVF
SIGKVFRTGLVKSVF

SEQ ID NO: 259064 - protein, 15 aa, Artificial Sequence
  Description of Artificial Sequence: Synthetic peptide
  Seed: SIGKVCRTLLAKSVF
SIGKVFRTHLAKSFF

SEQ ID NO: 259065 - protein, 15 aa, Artificial Sequence
  Description of Artificial Sequence: Synthetic peptide
  Seed: SIGKVCRTLLAKSVF
SIGKVFRTHLAKSIF

SEQ ID NO: 259066 - protein, 15 aa, Artificial Sequence
  Description of Artificial Sequence: Synthetic peptide
  Seed: SIGKVCRTLLAKSVF
SIGKVFRTHLAKSLF

SEQ ID NO: 259067 - protein, 15 aa, Artificial Sequence
  Description of Artificial Sequence: Synthetic peptide
  Seed: SIGKVCRTLLAKSVF
SIGKVFRTHLAKSVF

SEQ ID NO: 259068 - protein, 15 aa, Artificial Sequence
  Description of Artificial Sequence: Synthetic peptide
  Seed: SIGKVCRTLLAKSVF
SIGKVFRTHLFKSAF

SEQ ID NO: 259069 - protein, 15 aa, Artificial Sequence
  Description of Artificial Sequence: Synthetic peptide
  Seed: SIGKVCRTLLAKSVF
SIGKVFRTHLFKSCF

SEQ ID NO: 259070 - protein, 15 aa, Artificial Sequence
  Description of Artificial Sequence: Synthetic peptide
  Seed: SIGKVCRTLLAKSVF
SIGKVFRTHLFKSDF

SEQ ID NO: 259071 - protein, 15 aa, Artificial Sequence
  Description of Artificial Sequence: Synthetic peptide
  Seed: SIGKVCRTLLAKSVF
SIGKVFRTHLFKSEF

SEQ ID NO: 259072 - protein, 15 aa, Artificial Sequence
  Description of Artificial Sequence: Synthetic peptide
  Seed: SIGKVCRTLLAKSVF
SIGKVFRTHLFKSFF

SEQ ID NO: 259073 - protein, 15 aa, Artificial Sequence
  Description of Artificial Sequence: Synthetic peptide
  Seed: SIGKVCRTLLAKSVF
SIGKVFRTHLFKSHF

SEQ ID NO: 259074 - protein, 15 aa, Artificial Sequence
  Description of Artificial Sequence: Synthetic peptide
  Seed: SIGKVCRTLLAKSVF
SIGKVFRTHLFKSIF

SEQ ID NO: 259075 - protein, 15 aa, Artificial Sequence
  Description of Artificial Sequence: Synthetic peptide
  Seed: SIGKVCRTLLAKSVF
SIGKVFRTHLFKSMF

SEQ ID NO: 259076 - protein, 15 aa, Artificial Sequence
  Description of Artificial Sequence: Synthetic peptide
  Seed: SIGKVCRTLLAKSVF
SIGKVFRTHLFKSNF

SEQ ID NO: 259077 - protein, 15 aa, Artificial Sequence
  Description of Artificial Sequence: Synthetic peptide
  Seed: SIGKVCRTLLAKSVF
SIGKVFRTHLFKSPF

SEQ ID NO: 259078 - protein, 15 aa, Artificial Sequence
  Description of Artificial Sequence: Synthetic peptide
  Seed: SIGKVCRTLLAKSVF
SIGKVFRTHLFKSQF

SEQ ID NO: 259079 - protein, 15 aa, Artificial Sequence
  Description of Artificial Sequence: Synthetic peptide
  Seed: SIGKVCRTLLAKSVF
SIGKVFRTHLFKSSF

SEQ ID NO: 259080 - protein, 15 aa, Artificial Sequence
  Description of Artificial Sequence: Synthetic peptide
  Seed: SIGKVCRTLLAKSVF
SIGKVFRTHLFKSTF

SEQ ID NO: 259081 - protein, 15 aa, Artificial Sequence
  Description of Artificial Sequence: Synthetic peptide
  Seed: SIGKVCRTLLAKSVF
SIGKVFRTHLFKSVF

SEQ ID NO: 259082 - protein, 15 aa, Artificial Sequence
  Description of Artificial Sequence: Synthetic peptide
  Seed: SIGKVCRTLLAKSVF
SIGKVFRTHLFKSWF

SEQ ID NO: 259083 - protein, 15 aa, Artificial Sequence
  Description of Artificial Sequence: Synthetic peptide
  Seed: SIGKVCRTLLAKSVF
SIGKVFRTHLFKSYF

SEQ ID NO: 259084 - protein, 15 aa, Artificial Sequence
  Description of Artificial Sequence: Synthetic peptide
  Seed: SIGKVCRTLLAKSVF
SIGKVFRTHLGKSIF

SEQ ID NO: 259085 - protein, 15 aa, Artificial Sequence
  Description of Artificial Sequence: Synthetic peptide
  Seed: SIGKVCRTLLAKSVF
SIGKVFRTHLGKSLF

SEQ ID NO: 259086 - protein, 15 aa, Artificial Sequence
  Description of Artificial Sequence: Synthetic peptide
  Seed: SIGKVCRTLLAKSVF
SIGKVFRTHLGKSVF

SEQ ID NO: 259087 - protein, 15 aa, Artificial Sequence
  Description of Artificial Sequence: Synthetic peptide
  Seed: SIGKVCRTLLAKSVF
SIGKVFRTHLIKSFF

SEQ ID NO: 259088 - protein, 15 aa, Artificial Sequence
  Description of Artificial Sequence: Synthetic peptide
  Seed: SIGKVCRTLLAKSVF
SIGKVFRTHLIKSIF

SEQ ID NO: 259089 - protein, 15 aa, Artificial Sequence
  Description of Artificial Sequence: Synthetic peptide
  Seed: SIGKVCRTLLAKSVF
SIGKVFRTHLIKSLF

SEQ ID NO: 259090 - protein, 15 aa, Artificial Sequence
  Description of Artificial Sequence: Synthetic peptide
  Seed: SIGKVCRTLLAKSVF
SIGKVFRTHLIKSVF

SEQ ID NO: 259091 - protein, 15 aa, Artificial Sequence
  Description of Artificial Sequence: Synthetic peptide
  Seed: SIGKVCRTLLAKSVF
SIGKVFRTHLLKSAF

SEQ ID NO: 259092 - protein, 15 aa, Artificial Sequence
  Description of Artificial Sequence: Synthetic peptide
  Seed: SIGKVCRTLLAKSVF
SIGKVFRTHLLKSFF

SEQ ID NO: 259093 - protein, 15 aa, Artificial Sequence
  Description of Artificial Sequence: Synthetic peptide
  Seed: SIGKVCRTLLAKSVF
SIGKVFRTHLLKSIF

SEQ ID NO: 259094 - protein, 15 aa, Artificial Sequence
  Description of Artificial Sequence: Synthetic peptide
  Seed: SIGKVCRTLLAKSVF
SIGKVFRTHLLKSLF

SEQ ID NO: 259095 - protein, 15 aa, Artificial Sequence
  Description of Artificial Sequence: Synthetic peptide
  Seed: SIGKVCRTLLAKSVF
SIGKVFRTHLLKSMF

SEQ ID NO: 259096 - protein, 15 aa, Artificial Sequence
  Description of Artificial Sequence: Synthetic peptide
  Seed: SIGKVCRTLLAKSVF
SIGKVFRTHLLKSTF

SEQ ID NO: 259097 - protein, 15 aa, Artificial Sequence
  Description of Artificial Sequence: Synthetic peptide
  Seed: SIGKVCRTLLAKSVF
SIGKVFRTHLLKSVF

SEQ ID NO: 259098 - protein, 15 aa, Artificial Sequence
  Description of Artificial Sequence: Synthetic peptide
  Seed: SIGKVCRTLLAKSVF
SIGKVFRTHLLKSWF

SEQ ID NO: 259099 - protein, 15 aa, Artificial Sequence
  Description of Artificial Sequence: Synthetic peptide
  Seed: SIGKVCRTLLAKSVF
SIGKVFRTHLLKSYF

SEQ ID NO: 259100 - protein, 15 aa, Artificial Sequence
  Description of Artificial Sequence: Synthetic peptide
  Seed: SIGKVCRTLLAKSVF
SIGKVFRTHLMKSFF

SEQ ID NO: 259101 - protein, 15 aa, Artificial Sequence
  Description of Artificial Sequence: Synthetic peptide
  Seed: SIGKVCRTLLAKSVF
SIGKVFRTHLMKSIF

SEQ ID NO: 259102 - protein, 15 aa, Artificial Sequence
  Description of Artificial Sequence: Synthetic peptide
  Seed: SIGKVCRTLLAKSVF
SIGKVFRTHLMKSLF

SEQ ID NO: 259103 - protein, 15 aa, Artificial Sequence
  Description of Artificial Sequence: Synthetic peptide
  Seed: SIGKVCRTLLAKSVF
SIGKVFRTHLMKSVF

SEQ ID NO: 259104 - protein, 15 aa, Artificial Sequence
  Description of Artificial Sequence: Synthetic peptide
  Seed: SIGKVCRTLLAKSVF
SIGKVFRTHLPKSIF

SEQ ID NO: 259105 - protein, 15 aa, Artificial Sequence
  Description of Artificial Sequence: Synthetic peptide
  Seed: SIGKVCRTLLAKSVF
SIGKVFRTHLSKSFF

SEQ ID NO: 259106 - protein, 15 aa, Artificial Sequence
  Description of Artificial Sequence: Synthetic peptide
  Seed: SIGKVCRTLLAKSVF
SIGKVFRTHLSKSIF

SEQ ID NO: 259107 - protein, 15 aa, Artificial Sequence
  Description of Artificial Sequence: Synthetic peptide
  Seed: SIGKVCRTLLAKSVF
SIGKVFRTHLSKSLF

SEQ ID NO: 259108 - protein, 15 aa, Artificial Sequence
  Description of Artificial Sequence: Synthetic peptide
  Seed: SIGKVCRTLLAKSVF
SIGKVFRTHLSKSMF

SEQ ID NO: 259109 - protein, 15 aa, Artificial Sequence
  Description of Artificial Sequence: Synthetic peptide
  Seed: SIGKVCRTLLAKSVF
SIGKVFRTHLSKSVF

SEQ ID NO: 259110 - protein, 15 aa, Artificial Sequence
  Description of Artificial Sequence: Synthetic peptide
  Seed: SIGKVCRTLLAKSVF
SIGKVFRTHLTKSIF

SEQ ID NO: 259111 - protein, 15 aa, Artificial Sequence
  Description of Artificial Sequence: Synthetic peptide
  Seed: SIGKVCRTLLAKSVF
SIGKVFRTHLWKSFF

SEQ ID NO: 259112 - protein, 15 aa, Artificial Sequence
  Description of Artificial Sequence: Synthetic peptide
  Seed: SIGKVCRTLLAKSVF
SIGKVFRTHLWKSIF

SEQ ID NO: 259113 - protein, 15 aa, Artificial Sequence
  Description of Artificial Sequence: Synthetic peptide
  Seed: SIGKVCRTLLAKSVF
SIGKVFRTHLWKSLF

SEQ ID NO: 259114 - protein, 15 aa, Artificial Sequence
  Description of Artificial Sequence: Synthetic peptide
  Seed: SIGKVCRTLLAKSVF
SIGKVFRTHLWKSMF

SEQ ID NO: 259115 - protein, 15 aa, Artificial Sequence
  Description of Artificial Sequence: Synthetic peptide
  Seed: SIGKVCRTLLAKSVF
SIGKVFRTHLWKSVF

SEQ ID NO: 259116 - protein, 15 aa, Artificial Sequence
  Description of Artificial Sequence: Synthetic peptide
  Seed: SIGKVCRTLLAKSVF
SIGKVFRTHLYKSFF

SEQ ID NO: 259117 - protein, 15 aa, Artificial Sequence
  Description of Artificial Sequence: Synthetic peptide
  Seed: SIGKVCRTLLAKSVF
SIGKVFRTHLYKSIF

SEQ ID NO: 259118 - protein, 15 aa, Artificial Sequence
  Description of Artificial Sequence: Synthetic peptide
  Seed: SIGKVCRTLLAKSVF
SIGKVFRTHLYKSLF

SEQ ID NO: 259119 - protein, 15 aa, Artificial Sequence
  Description of Artificial Sequence: Synthetic peptide
  Seed: SIGKVCRTLLAKSVF
SIGKVFRTHLYKSMF

SEQ ID NO: 259120 - protein, 15 aa, Artificial Sequence
  Description of Artificial Sequence: Synthetic peptide
  Seed: SIGKVCRTLLAKSVF
SIGKVFRTHLYKSVF

SEQ ID NO: 259121 - protein, 15 aa, Artificial Sequence
  Description of Artificial Sequence: Synthetic peptide
  Seed: SIGKVCRTLLAKSVF
SIGKVFRTILAKSAF

SEQ ID NO: 259122 - protein, 15 aa, Artificial Sequence
  Description of Artificial Sequence: Synthetic peptide
  Seed: SIGKVCRTLLAKSVF
SIGKVFRTILAKSCF

SEQ ID NO: 259123 - protein, 15 aa, Artificial Sequence
  Description of Artificial Sequence: Synthetic peptide
  Seed: SIGKVCRTLLAKSVF
SIGKVFRTILAKSDF

SEQ ID NO: 259124 - protein, 15 aa, Artificial Sequence
  Description of Artificial Sequence: Synthetic peptide
  Seed: SIGKVCRTLLAKSVF
SIGKVFRTILAKSEF

SEQ ID NO: 259125 - protein, 15 aa, Artificial Sequence
  Description of Artificial Sequence: Synthetic peptide
  Seed: SIGKVCRTLLAKSVF
SIGKVFRTILAKSFF

SEQ ID NO: 259126 - protein, 15 aa, Artificial Sequence
  Description of Artificial Sequence: Synthetic peptide
  Seed: SIGKVCRTLLAKSVF
SIGKVFRTILAKSGF

SEQ ID NO: 259127 - protein, 15 aa, Artificial Sequence
  Description of Artificial Sequence: Synthetic peptide
  Seed: SIGKVCRTLLAKSVF
SIGKVFRTILAKSHF

SEQ ID NO: 259128 - protein, 15 aa, Artificial Sequence
  Description of Artificial Sequence: Synthetic peptide
  Seed: SIGKVCRTLLAKSVF
SIGKVFRTILAKSIF

SEQ ID NO: 259129 - protein, 15 aa, Artificial Sequence
  Description of Artificial Sequence: Synthetic peptide
  Seed: SIGKVCRTLLAKSVF
SIGKVFRTILAKSLF

SEQ ID NO: 259130 - protein, 15 aa, Artificial Sequence
  Description of Artificial Sequence: Synthetic peptide
  Seed: SIGKVCRTLLAKSVF
SIGKVFRTILAKSMF

SEQ ID NO: 259131 - protein, 15 aa, Artificial Sequence
  Description of Artificial Sequence: Synthetic peptide
  Seed: SIGKVCRTLLAKSVF
SIGKVFRTILAKSNF

SEQ ID NO: 259132 - protein, 15 aa, Artificial Sequence
  Description of Artificial Sequence: Synthetic peptide
  Seed: SIGKVCRTLLAKSVF
SIGKVFRTILAKSPF

SEQ ID NO: 259133 - protein, 15 aa, Artificial Sequence
  Description of Artificial Sequence: Synthetic peptide
  Seed: SIGKVCRTLLAKSVF
SIGKVFRTILAKSQF

SEQ ID NO: 259134 - protein, 15 aa, Artificial Sequence
  Description of Artificial Sequence: Synthetic peptide
  Seed: SIGKVCRTLLAKSVF
SIGKVFRTILAKSSF

SEQ ID NO: 259135 - protein, 15 aa, Artificial Sequence
  Description of Artificial Sequence: Synthetic peptide
  Seed: SIGKVCRTLLAKSVF
SIGKVFRTILAKSTF

SEQ ID NO: 259136 - protein, 15 aa, Artificial Sequence
  Description of Artificial Sequence: Synthetic peptide
  Seed: SIGKVCRTLLAKSVF
SIGKVFRTILAKSVF

SEQ ID NO: 259137 - protein, 15 aa, Artificial Sequence
  Description of Artificial Sequence: Synthetic peptide
  Seed: SIGKVCRTLLAKSVF
SIGKVFRTILAKSWF

SEQ ID NO: 259138 - protein, 15 aa, Artificial Sequence
  Description of Artificial Sequence: Synthetic peptide
  Seed: SIGKVCRTLLAKSVF
SIGKVFRTILAKSYF

SEQ ID NO: 259139 - protein, 15 aa, Artificial Sequence
  Description of Artificial Sequence: Synthetic peptide
  Seed: SIGKVCRTLLAKSVF
SIGKVFRTILFKSAF

SEQ ID NO: 259140 - protein, 15 aa, Artificial Sequence
  Description of Artificial Sequence: Synthetic peptide
  Seed: SIGKVCRTLLAKSVF
SIGKVFRTILFKSCF

SEQ ID NO: 259141 - protein, 15 aa, Artificial Sequence
  Description of Artificial Sequence: Synthetic peptide
  Seed: SIGKVCRTLLAKSVF
SIGKVFRTILFKSDF

SEQ ID NO: 259142 - protein, 15 aa, Artificial Sequence
  Description of Artificial Sequence: Synthetic peptide
  Seed: SIGKVCRTLLAKSVF
SIGKVFRTILFKSEF

SEQ ID NO: 259143 - protein, 15 aa, Artificial Sequence
  Description of Artificial Sequence: Synthetic peptide
  Seed: SIGKVCRTLLAKSVF
SIGKVFRTILFKSFF

SEQ ID NO: 259144 - protein, 15 aa, Artificial Sequence
  Description of Artificial Sequence: Synthetic peptide
  Seed: SIGKVCRTLLAKSVF
SIGKVFRTILFKSGF

SEQ ID NO: 259145 - protein, 15 aa, Artificial Sequence
  Description of Artificial Sequence: Synthetic peptide
  Seed: SIGKVCRTLLAKSVF
SIGKVFRTILFKSHF

SEQ ID NO: 259146 - protein, 15 aa, Artificial Sequence
  Description of Artificial Sequence: Synthetic peptide
  Seed: SIGKVCRTLLAKSVF
SIGKVFRTILFKSIF

SEQ ID NO: 259147 - protein, 15 aa, Artificial Sequence
  Description of Artificial Sequence: Synthetic peptide
  Seed: SIGKVCRTLLAKSVF
SIGKVFRTILFKSLF

SEQ ID NO: 259148 - protein, 15 aa, Artificial Sequence
  Description of Artificial Sequence: Synthetic peptide
  Seed: SIGKVCRTLLAKSVF
SIGKVFRTILFKSMF

SEQ ID NO: 259149 - protein, 15 aa, Artificial Sequence
  Description of Artificial Sequence: Synthetic peptide
  Seed: SIGKVCRTLLAKSVF
SIGKVFRTILFKSNF

SEQ ID NO: 259150 - protein, 15 aa, Artificial Sequence
  Description of Artificial Sequence: Synthetic peptide
  Seed: SIGKVCRTLLAKSVF
SIGKVFRTILFKSPF

SEQ ID NO: 259151 - protein, 15 aa, Artificial Sequence
  Description of Artificial Sequence: Synthetic peptide
  Seed: SIGKVCRTLLAKSVF
SIGKVFRTILFKSQF

SEQ ID NO: 259152 - protein, 15 aa, Artificial Sequence
  Description of Artificial Sequence: Synthetic peptide
  Seed: SIGKVCRTLLAKSVF
SIGKVFRTILFKSRF

SEQ ID NO: 259153 - protein, 15 aa, Artificial Sequence
  Description of Artificial Sequence: Synthetic peptide
  Seed: SIGKVCRTLLAKSVF
SIGKVFRTILFKSSF

SEQ ID NO: 259154 - protein, 15 aa, Artificial Sequence
  Description of Artificial Sequence: Synthetic peptide
  Seed: SIGKVCRTLLAKSVF
SIGKVFRTILFKSTF

SEQ ID NO: 259155 - protein, 15 aa, Artificial Sequence
  Description of Artificial Sequence: Synthetic peptide
  Seed: SIGKVCRTLLAKSVF
SIGKVFRTILFKSVF

SEQ ID NO: 259156 - protein, 15 aa, Artificial Sequence
  Description of Artificial Sequence: Synthetic peptide
  Seed: SIGKVCRTLLAKSVF
SIGKVFRTILFKSWF

SEQ ID NO: 259157 - protein, 15 aa, Artificial Sequence
  Description of Artificial Sequence: Synthetic peptide
  Seed: SIGKVCRTLLAKSVF
SIGKVFRTILFKSYF

SEQ ID NO: 259158 - protein, 15 aa, Artificial Sequence
  Description of Artificial Sequence: Synthetic peptide
  Seed: SIGKVCRTLLAKSVF
SIGKVFRTILGKSAF

SEQ ID NO: 259159 - protein, 15 aa, Artificial Sequence
  Description of Artificial Sequence: Synthetic peptide
  Seed: SIGKVCRTLLAKSVF
SIGKVFRTILGKSCF

SEQ ID NO: 259160 - protein, 15 aa, Artificial Sequence
  Description of Artificial Sequence: Synthetic peptide
  Seed: SIGKVCRTLLAKSVF
SIGKVFRTILGKSFF

SEQ ID NO: 259161 - protein, 15 aa, Artificial Sequence
  Description of Artificial Sequence: Synthetic peptide
  Seed: SIGKVCRTLLAKSVF
SIGKVFRTILGKSGF

SEQ ID NO: 259162 - protein, 15 aa, Artificial Sequence
  Description of Artificial Sequence: Synthetic peptide
  Seed: SIGKVCRTLLAKSVF
SIGKVFRTILGKSIF

SEQ ID NO: 259163 - protein, 15 aa, Artificial Sequence
  Description of Artificial Sequence: Synthetic peptide
  Seed: SIGKVCRTLLAKSVF
SIGKVFRTILGKSLF

SEQ ID NO: 259164 - protein, 15 aa, Artificial Sequence
  Description of Artificial Sequence: Synthetic peptide
  Seed: SIGKVCRTLLAKSVF
SIGKVFRTILGKSMF

SEQ ID NO: 259165 - protein, 15 aa, Artificial Sequence
  Description of Artificial Sequence: Synthetic peptide
  Seed: SIGKVCRTLLAKSVF
SIGKVFRTILGKSNF

SEQ ID NO: 259166 - protein, 15 aa, Artificial Sequence
  Description of Artificial Sequence: Synthetic peptide
  Seed: SIGKVCRTLLAKSVF
SIGKVFRTILGKSSF

SEQ ID NO: 259167 - protein, 15 aa, Artificial Sequence
  Description of Artificial Sequence: Synthetic peptide
  Seed: SIGKVCRTLLAKSVF
SIGKVFRTILGKSTF

SEQ ID NO: 259168 - protein, 15 aa, Artificial Sequence
  Description of Artificial Sequence: Synthetic peptide
  Seed: SIGKVCRTLLAKSVF
SIGKVFRTILGKSVF

SEQ ID NO: 259169 - protein, 15 aa, Artificial Sequence
  Description of Artificial Sequence: Synthetic peptide
  Seed: SIGKVCRTLLAKSVF
SIGKVFRTILIKSAF

SEQ ID NO: 259170 - protein, 15 aa, Artificial Sequence
  Description of Artificial Sequence: Synthetic peptide
  Seed: SIGKVCRTLLAKSVF
SIGKVFRTILIKSFF

SEQ ID NO: 259171 - protein, 15 aa, Artificial Sequence
  Description of Artificial Sequence: Synthetic peptide
  Seed: SIGKVCRTLLAKSVF
SIGKVFRTILIKSIF

SEQ ID NO: 259172 - protein, 15 aa, Artificial Sequence
  Description of Artificial Sequence: Synthetic peptide
  Seed: SIGKVCRTLLAKSVF
SIGKVFRTILIKSLF

SEQ ID NO: 259173 - protein, 15 aa, Artificial Sequence
  Description of Artificial Sequence: Synthetic peptide
  Seed: SIGKVCRTLLAKSVF
SIGKVFRTILIKSMF

SEQ ID NO: 259174 - protein, 15 aa, Artificial Sequence
  Description of Artificial Sequence: Synthetic peptide
  Seed: SIGKVCRTLLAKSVF
SIGKVFRTILIKSNF

SEQ ID NO: 259175 - protein, 15 aa, Artificial Sequence
  Description of Artificial Sequence: Synthetic peptide
  Seed: SIGKVCRTLLAKSVF
SIGKVFRTILIKSSF

SEQ ID NO: 259176 - protein, 15 aa, Artificial Sequence
  Description of Artificial Sequence: Synthetic peptide
  Seed: SIGKVCRTLLAKSVF
SIGKVFRTILIKSTF

SEQ ID NO: 259177 - protein, 15 aa, Artificial Sequence
  Description of Artificial Sequence: Synthetic peptide
  Seed: SIGKVCRTLLAKSVF
SIGKVFRTILIKSVF

SEQ ID NO: 259178 - protein, 15 aa, Artificial Sequence
  Description of Artificial Sequence: Synthetic peptide
  Seed: SIGKVCRTLLAKSVF
SIGKVFRTILLKSFF

SEQ ID NO: 259179 - protein, 15 aa, Artificial Sequence
  Description of Artificial Sequence: Synthetic peptide
  Seed: SIGKVCRTLLAKSVF
SIGKVFRTILLKSIF

SEQ ID NO: 259180 - protein, 15 aa, Artificial Sequence
  Description of Artificial Sequence: Synthetic peptide
  Seed: SIGKVCRTLLAKSVF
SIGKVFRTILLKSLF

SEQ ID NO: 259181 - protein, 15 aa, Artificial Sequence
  Description of Artificial Sequence: Synthetic peptide
  Seed: SIGKVCRTLLAKSVF
SIGKVFRTILLKSMF

SEQ ID NO: 259182 - protein, 15 aa, Artificial Sequence
  Description of Artificial Sequence: Synthetic peptide
  Seed: SIGKVCRTLLAKSVF
SIGKVFRTILLKSTF

SEQ ID NO: 259183 - protein, 15 aa, Artificial Sequence
  Description of Artificial Sequence: Synthetic peptide
  Seed: SIGKVCRTLLAKSVF
SIGKVFRTILLKSVF

SEQ ID NO: 259184 - protein, 15 aa, Artificial Sequence
  Description of Artificial Sequence: Synthetic peptide
  Seed: SIGKVCRTLLAKSVF
SIGKVFRTILLKSYF

SEQ ID NO: 259185 - protein, 15 aa, Artificial Sequence
  Description of Artificial Sequence: Synthetic peptide
  Seed: SIGKVCRTLLAKSVF
SIGKVFRTILMKSAF

SEQ ID NO: 259186 - protein, 15 aa, Artificial Sequence
  Description of Artificial Sequence: Synthetic peptide
  Seed: SIGKVCRTLLAKSVF
SIGKVFRTILMKSFF

SEQ ID NO: 259187 - protein, 15 aa, Artificial Sequence
  Description of Artificial Sequence: Synthetic peptide
  Seed: SIGKVCRTLLAKSVF
SIGKVFRTILMKSIF

SEQ ID NO: 259188 - protein, 15 aa, Artificial Sequence
  Description of Artificial Sequence: Synthetic peptide
  Seed: SIGKVCRTLLAKSVF
SIGKVFRTILMKSLF

SEQ ID NO: 259189 - protein, 15 aa, Artificial Sequence
  Description of Artificial Sequence: Synthetic peptide
  Seed: SIGKVCRTLLAKSVF
SIGKVFRTILMKSMF

SEQ ID NO: 259190 - protein, 15 aa, Artificial Sequence
  Description of Artificial Sequence: Synthetic peptide
  Seed: SIGKVCRTLLAKSVF
SIGKVFRTILMKSNF

SEQ ID NO: 259191 - protein, 15 aa, Artificial Sequence
  Description of Artificial Sequence: Synthetic peptide
  Seed: SIGKVCRTLLAKSVF
SIGKVFRTILMKSVF

SEQ ID NO: 259192 - protein, 15 aa, Artificial Sequence
  Description of Artificial Sequence: Synthetic peptide
  Seed: SIGKVCRTLLAKSVF
SIGKVFRTILNKSAF

SEQ ID NO: 259193 - protein, 15 aa, Artificial Sequence
  Description of Artificial Sequence: Synthetic peptide
  Seed: SIGKVCRTLLAKSVF
SIGKVFRTILNKSIF

SEQ ID NO: 259194 - protein, 15 aa, Artificial Sequence
  Description of Artificial Sequence: Synthetic peptide
  Seed: SIGKVCRTLLAKSVF
SIGKVFRTILNKSLF

SEQ ID NO: 259195 - protein, 15 aa, Artificial Sequence
  Description of Artificial Sequence: Synthetic peptide
  Seed: SIGKVCRTLLAKSVF
SIGKVFRTILNKSMF

SEQ ID NO: 259196 - protein, 15 aa, Artificial Sequence
  Description of Artificial Sequence: Synthetic peptide
  Seed: SIGKVCRTLLAKSVF
SIGKVFRTILNKSNF

SEQ ID NO: 259197 - protein, 15 aa, Artificial Sequence
  Description of Artificial Sequence: Synthetic peptide
  Seed: SIGKVCRTLLAKSVF
SIGKVFRTILNKSSF

SEQ ID NO: 259198 - protein, 15 aa, Artificial Sequence
  Description of Artificial Sequence: Synthetic peptide
  Seed: SIGKVCRTLLAKSVF
SIGKVFRTILNKSTF

SEQ ID NO: 259199 - protein, 15 aa, Artificial Sequence
  Description of Artificial Sequence: Synthetic peptide
  Seed: SIGKVCRTLLAKSVF
SIGKVFRTILNKSVF

SEQ ID NO: 259200 - protein, 15 aa, Artificial Sequence
  Description of Artificial Sequence: Synthetic peptide
  Seed: SIGKVCRTLLAKSVF
SIGKVFRTILPKSAF

SEQ ID NO: 259201 - protein, 15 aa, Artificial Sequence
  Description of Artificial Sequence: Synthetic peptide
  Seed: SIGKVCRTLLAKSVF
SIGKVFRTILPKSDF

SEQ ID NO: 259202 - protein, 15 aa, Artificial Sequence
  Description of Artificial Sequence: Synthetic peptide
  Seed: SIGKVCRTLLAKSVF
SIGKVFRTILPKSFF

SEQ ID NO: 259203 - protein, 15 aa, Artificial Sequence
  Description of Artificial Sequence: Synthetic peptide
  Seed: SIGKVCRTLLAKSVF
SIGKVFRTILPKSGF

SEQ ID NO: 259204 - protein, 15 aa, Artificial Sequence
  Description of Artificial Sequence: Synthetic peptide
  Seed: SIGKVCRTLLAKSVF
SIGKVFRTILPKSHF

SEQ ID NO: 259205 - protein, 15 aa, Artificial Sequence
  Description of Artificial Sequence: Synthetic peptide
  Seed: SIGKVCRTLLAKSVF
SIGKVFRTILPKSIF

SEQ ID NO: 259206 - protein, 15 aa, Artificial Sequence
  Description of Artificial Sequence: Synthetic peptide
  Seed: SIGKVCRTLLAKSVF
SIGKVFRTILPKSLF

SEQ ID NO: 259207 - protein, 15 aa, Artificial Sequence
  Description of Artificial Sequence: Synthetic peptide
  Seed: SIGKVCRTLLAKSVF
SIGKVFRTILPKSMF

SEQ ID NO: 259208 - protein, 15 aa, Artificial Sequence
  Description of Artificial Sequence: Synthetic peptide
  Seed: SIGKVCRTLLAKSVF
SIGKVFRTILPKSNF

SEQ ID NO: 259209 - protein, 15 aa, Artificial Sequence
  Description of Artificial Sequence: Synthetic peptide
  Seed: SIGKVCRTLLAKSVF
SIGKVFRTILPKSPF

SEQ ID NO: 259210 - protein, 15 aa, Artificial Sequence
  Description of Artificial Sequence: Synthetic peptide
  Seed: SIGKVCRTLLAKSVF
SIGKVFRTILPKSQF

SEQ ID NO: 259211 - protein, 15 aa, Artificial Sequence
  Description of Artificial Sequence: Synthetic peptide
  Seed: SIGKVCRTLLAKSVF
SIGKVFRTILPKSSF

SEQ ID NO: 259212 - protein, 15 aa, Artificial Sequence
  Description of Artificial Sequence: Synthetic peptide
  Seed: SIGKVCRTLLAKSVF
SIGKVFRTILPKSTF

SEQ ID NO: 259213 - protein, 15 aa, Artificial Sequence
  Description of Artificial Sequence: Synthetic peptide
  Seed: SIGKVCRTLLAKSVF
SIGKVFRTILPKSVF

SEQ ID NO: 259214 - protein, 15 aa, Artificial Sequence
  Description of Artificial Sequence: Synthetic peptide
  Seed: SIGKVCRTLLAKSVF
SIGKVFRTILSKSAF

SEQ ID NO: 259215 - protein, 15 aa, Artificial Sequence
  Description of Artificial Sequence: Synthetic peptide
  Seed: SIGKVCRTLLAKSVF
SIGKVFRTILSKSCF

SEQ ID NO: 259216 - protein, 15 aa, Artificial Sequence
  Description of Artificial Sequence: Synthetic peptide
  Seed: SIGKVCRTLLAKSVF
SIGKVFRTILSKSDF

SEQ ID NO: 259217 - protein, 15 aa, Artificial Sequence
  Description of Artificial Sequence: Synthetic peptide
  Seed: SIGKVCRTLLAKSVF
SIGKVFRTILSKSFF

SEQ ID NO: 259218 - protein, 15 aa, Artificial Sequence
  Description of Artificial Sequence: Synthetic peptide
  Seed: SIGKVCRTLLAKSVF
SIGKVFRTILSKSGF

SEQ ID NO: 259219 - protein, 15 aa, Artificial Sequence
  Description of Artificial Sequence: Synthetic peptide
  Seed: SIGKVCRTLLAKSVF
SIGKVFRTILSKSHF

SEQ ID NO: 259220 - protein, 15 aa, Artificial Sequence
  Description of Artificial Sequence: Synthetic peptide
  Seed: SIGKVCRTLLAKSVF
SIGKVFRTILSKSIF

SEQ ID NO: 259221 - protein, 15 aa, Artificial Sequence
  Description of Artificial Sequence: Synthetic peptide
  Seed: SIGKVCRTLLAKSVF
SIGKVFRTILSKSLF

SEQ ID NO: 259222 - protein, 15 aa, Artificial Sequence
  Description of Artificial Sequence: Synthetic peptide
  Seed: SIGKVCRTLLAKSVF
SIGKVFRTILSKSMF

SEQ ID NO: 259223 - protein, 15 aa, Artificial Sequence
  Description of Artificial Sequence: Synthetic peptide
  Seed: SIGKVCRTLLAKSVF
SIGKVFRTILSKSNF

SEQ ID NO: 259224 - protein, 15 aa, Artificial Sequence
  Description of Artificial Sequence: Synthetic peptide
  Seed: SIGKVCRTLLAKSVF
SIGKVFRTILSKSPF

SEQ ID NO: 259225 - protein, 15 aa, Artificial Sequence
  Description of Artificial Sequence: Synthetic peptide
  Seed: SIGKVCRTLLAKSVF
SIGKVFRTILSKSQF

SEQ ID NO: 259226 - protein, 15 aa, Artificial Sequence
  Description of Artificial Sequence: Synthetic peptide
  Seed: SIGKVCRTLLAKSVF
SIGKVFRTILSKSSF

SEQ ID NO: 259227 - protein, 15 aa, Artificial Sequence
  Description of Artificial Sequence: Synthetic peptide
  Seed: SIGKVCRTLLAKSVF
SIGKVFRTILSKSTF

SEQ ID NO: 259228 - protein, 15 aa, Artificial Sequence
  Description of Artificial Sequence: Synthetic peptide
  Seed: SIGKVCRTLLAKSVF
SIGKVFRTILSKSVF

SEQ ID NO: 259229 - protein, 15 aa, Artificial Sequence
  Description of Artificial Sequence: Synthetic peptide
  Seed: SIGKVCRTLLAKSVF
SIGKVFRTILSKSYF

SEQ ID NO: 259230 - protein, 15 aa, Artificial Sequence
  Description of Artificial Sequence: Synthetic peptide
  Seed: SIGKVCRTLLAKSVF
SIGKVFRTILTKSAF

SEQ ID NO: 259231 - protein, 15 aa, Artificial Sequence
  Description of Artificial Sequence: Synthetic peptide
  Seed: SIGKVCRTLLAKSVF
SIGKVFRTILTKSFF

SEQ ID NO: 259232 - protein, 15 aa, Artificial Sequence
  Description of Artificial Sequence: Synthetic peptide
  Seed: SIGKVCRTLLAKSVF
SIGKVFRTILTKSGF

SEQ ID NO: 259233 - protein, 15 aa, Artificial Sequence
  Description of Artificial Sequence: Synthetic peptide
  Seed: SIGKVCRTLLAKSVF
SIGKVFRTILTKSHF

SEQ ID NO: 259234 - protein, 15 aa, Artificial Sequence
  Description of Artificial Sequence: Synthetic peptide
  Seed: SIGKVCRTLLAKSVF
SIGKVFRTILTKSIF

SEQ ID NO: 259235 - protein, 15 aa, Artificial Sequence
  Description of Artificial Sequence: Synthetic peptide
  Seed: SIGKVCRTLLAKSVF
SIGKVFRTILTKSLF

SEQ ID NO: 259236 - protein, 15 aa, Artificial Sequence
  Description of Artificial Sequence: Synthetic peptide
  Seed: SIGKVCRTLLAKSVF
SIGKVFRTILTKSMF

SEQ ID NO: 259237 - protein, 15 aa, Artificial Sequence
  Description of Artificial Sequence: Synthetic peptide
  Seed: SIGKVCRTLLAKSVF
SIGKVFRTILTKSNF

SEQ ID NO: 259238 - protein, 15 aa, Artificial Sequence
  Description of Artificial Sequence: Synthetic peptide
  Seed: SIGKVCRTLLAKSVF
SIGKVFRTILTKSQF

SEQ ID NO: 259239 - protein, 15 aa, Artificial Sequence
  Description of Artificial Sequence: Synthetic peptide
  Seed: SIGKVCRTLLAKSVF
SIGKVFRTILTKSSF

SEQ ID NO: 259240 - protein, 15 aa, Artificial Sequence
  Description of Artificial Sequence: Synthetic peptide
  Seed: SIGKVCRTLLAKSVF
SIGKVFRTILTKSTF

SEQ ID NO: 259241 - protein, 15 aa, Artificial Sequence
  Description of Artificial Sequence: Synthetic peptide
  Seed: SIGKVCRTLLAKSVF
SIGKVFRTILTKSVF

SEQ ID NO: 259242 - protein, 15 aa, Artificial Sequence
  Description of Artificial Sequence: Synthetic peptide
  Seed: SIGKVCRTLLAKSVF
SIGKVFRTILVKSAF

SEQ ID NO: 259243 - protein, 15 aa, Artificial Sequence
  Description of Artificial Sequence: Synthetic peptide
  Seed: SIGKVCRTLLAKSVF
SIGKVFRTILVKSGF

SEQ ID NO: 259244 - protein, 15 aa, Artificial Sequence
  Description of Artificial Sequence: Synthetic peptide
  Seed: SIGKVCRTLLAKSVF
SIGKVFRTILVKSHF

SEQ ID NO: 259245 - protein, 15 aa, Artificial Sequence
  Description of Artificial Sequence: Synthetic peptide
  Seed: SIGKVCRTLLAKSVF
SIGKVFRTILVKSIF

SEQ ID NO: 259246 - protein, 15 aa, Artificial Sequence
  Description of Artificial Sequence: Synthetic peptide
  Seed: SIGKVCRTLLAKSVF
SIGKVFRTILVKSLF

SEQ ID NO: 259247 - protein, 15 aa, Artificial Sequence
  Description of Artificial Sequence: Synthetic peptide
  Seed: SIGKVCRTLLAKSVF
SIGKVFRTILVKSMF

SEQ ID NO: 259248 - protein, 15 aa, Artificial Sequence
  Description of Artificial Sequence: Synthetic peptide
  Seed: SIGKVCRTLLAKSVF
SIGKVFRTILVKSNF

SEQ ID NO: 259249 - protein, 15 aa, Artificial Sequence
  Description of Artificial Sequence: Synthetic peptide
  Seed: SIGKVCRTLLAKSVF
SIGKVFRTILVKSSF

SEQ ID NO: 259250 - protein, 15 aa, Artificial Sequence
  Description of Artificial Sequence: Synthetic peptide
  Seed: SIGKVCRTLLAKSVF
SIGKVFRTILVKSTF

SEQ ID NO: 259251 - protein, 15 aa, Artificial Sequence
  Description of Artificial Sequence: Synthetic peptide
  Seed: SIGKVCRTLLAKSVF
SIGKVFRTILVKSVF

SEQ ID NO: 259252 - protein, 15 aa, Artificial Sequence
  Description of Artificial Sequence: Synthetic peptide
  Seed: SIGKVCRTLLAKSVF
SIGKVFRTILWKSFF

SEQ ID NO: 259253 - protein, 15 aa, Artificial Sequence
  Description of Artificial Sequence: Synthetic peptide
  Seed: SIGKVCRTLLAKSVF
SIGKVFRTILWKSIF

SEQ ID NO: 259254 - protein, 15 aa, Artificial Sequence
  Description of Artificial Sequence: Synthetic peptide
  Seed: SIGKVCRTLLAKSVF
SIGKVFRTILWKSLF

SEQ ID NO: 259255 - protein, 15 aa, Artificial Sequence
  Description of Artificial Sequence: Synthetic peptide
  Seed: SIGKVCRTLLAKSVF
SIGKVFRTILWKSMF

SEQ ID NO: 259256 - protein, 15 aa, Artificial Sequence
  Description of Artificial Sequence: Synthetic peptide
  Seed: SIGKVCRTLLAKSVF
SIGKVFRTILWKSVF

SEQ ID NO: 259257 - protein, 15 aa, Artificial Sequence
  Description of Artificial Sequence: Synthetic peptide
  Seed: SIGKVCRTLLAKSVF
SIGKVFRTILYKSAF

SEQ ID NO: 259258 - protein, 15 aa, Artificial Sequence
  Description of Artificial Sequence: Synthetic peptide
  Seed: SIGKVCRTLLAKSVF
SIGKVFRTILYKSFF

SEQ ID NO: 259259 - protein, 15 aa, Artificial Sequence
  Description of Artificial Sequence: Synthetic peptide
  Seed: SIGKVCRTLLAKSVF
SIGKVFRTILYKSIF

SEQ ID NO: 259260 - protein, 15 aa, Artificial Sequence
  Description of Artificial Sequence: Synthetic peptide
  Seed: SIGKVCRTLLAKSVF
SIGKVFRTILYKSLF

SEQ ID NO: 259261 - protein, 15 aa, Artificial Sequence
  Description of Artificial Sequence: Synthetic peptide
  Seed: SIGKVCRTLLAKSVF
SIGKVFRTILYKSMF

SEQ ID NO: 259262 - protein, 15 aa, Artificial Sequence
  Description of Artificial Sequence: Synthetic peptide
  Seed: SIGKVCRTLLAKSVF
SIGKVFRTILYKSTF

SEQ ID NO: 259263 - protein, 15 aa, Artificial Sequence
  Description of Artificial Sequence: Synthetic peptide
  Seed: SIGKVCRTLLAKSVF
SIGKVFRTILYKSVF

SEQ ID NO: 259264 - protein, 15 aa, Artificial Sequence
  Description of Artificial Sequence: Synthetic peptide
  Seed: SIGKVCRTLLAKSVF
SIGKVFRTILYKSYF

SEQ ID NO: 259265 - protein, 15 aa, Artificial Sequence
  Description of Artificial Sequence: Synthetic peptide
  Seed: SIGKVCRTLLAKSVF
SIGKVFRTKLFKSAF

SEQ ID NO: 259266 - protein, 15 aa, Artificial Sequence
  Description of Artificial Sequence: Synthetic peptide
  Seed: SIGKVCRTLLAKSVF
SIGKVFRTKLFKSFF

SEQ ID NO: 259267 - protein, 15 aa, Artificial Sequence
  Description of Artificial Sequence: Synthetic peptide
  Seed: SIGKVCRTLLAKSVF
SIGKVFRTKLFKSIF

SEQ ID NO: 259268 - protein, 15 aa, Artificial Sequence
  Description of Artificial Sequence: Synthetic peptide
  Seed: SIGKVCRTLLAKSVF
SIGKVFRTKLFKSLF

SEQ ID NO: 259269 - protein, 15 aa, Artificial Sequence
  Description of Artificial Sequence: Synthetic peptide
  Seed: SIGKVCRTLLAKSVF
SIGKVFRTKLFKSMF

SEQ ID NO: 259270 - protein, 15 aa, Artificial Sequence
  Description of Artificial Sequence: Synthetic peptide
  Seed: SIGKVCRTLLAKSVF
SIGKVFRTKLFKSSF

SEQ ID NO: 259271 - protein, 15 aa, Artificial Sequence
  Description of Artificial Sequence: Synthetic peptide
  Seed: SIGKVCRTLLAKSVF
SIGKVFRTKLFKSTF

SEQ ID NO: 259272 - protein, 15 aa, Artificial Sequence
  Description of Artificial Sequence: Synthetic peptide
  Seed: SIGKVCRTLLAKSVF
SIGKVFRTKLFKSVF

SEQ ID NO: 259273 - protein, 15 aa, Artificial Sequence
  Description of Artificial Sequence: Synthetic peptide
  Seed: SIGKVCRTLLAKSVF
SIGKVFRTKLFKSYF

SEQ ID NO: 259274 - protein, 15 aa, Artificial Sequence
  Description of Artificial Sequence: Synthetic peptide
  Seed: SIGKVCRTLLAKSVF
SIGKVFRTKLLKSFF

SEQ ID NO: 259275 - protein, 15 aa, Artificial Sequence
  Description of Artificial Sequence: Synthetic peptide
  Seed: SIGKVCRTLLAKSVF
SIGKVFRTKLLKSIF

SEQ ID NO: 259276 - protein, 15 aa, Artificial Sequence
  Description of Artificial Sequence: Synthetic peptide
  Seed: SIGKVCRTLLAKSVF
SIGKVFRTKLLKSLF

SEQ ID NO: 259277 - protein, 15 aa, Artificial Sequence
  Description of Artificial Sequence: Synthetic peptide
  Seed: SIGKVCRTLLAKSVF
SIGKVFRTKLLKSVF

SEQ ID NO: 259278 - protein, 15 aa, Artificial Sequence
  Description of Artificial Sequence: Synthetic peptide
  Seed: SIGKVCRTLLAKSVF
SIGKVFRTKLYKSIF

SEQ ID NO: 259279 - protein, 15 aa, Artificial Sequence
  Description of Artificial Sequence: Synthetic peptide
  Seed: SIGKVCRTLLAKSVF
SIGKVFRTKLYKSLF

SEQ ID NO: 259280 - protein, 15 aa, Artificial Sequence
  Description of Artificial Sequence: Synthetic peptide
  Seed: SIGKVCRTLLAKSVF
SIGKVFRTLLAKSAF

SEQ ID NO: 259281 - protein, 15 aa, Artificial Sequence
  Description of Artificial Sequence: Synthetic peptide
  Seed: SIGKVCRTLLAKSVF
SIGKVFRTLLAKSCF

SEQ ID NO: 259282 - protein, 15 aa, Artificial Sequence
  Description of Artificial Sequence: Synthetic peptide
  Seed: SIGKVCRTLLAKSVF
SIGKVFRTLLAKSDF

SEQ ID NO: 259283 - protein, 15 aa, Artificial Sequence
  Description of Artificial Sequence: Synthetic peptide
  Seed: SIGKVCRTLLAKSVF
SIGKVFRTLLAKSEF

SEQ ID NO: 259284 - protein, 15 aa, Artificial Sequence
  Description of Artificial Sequence: Synthetic peptide
  Seed: SIGKVCRTLLAKSVF
SIGKVFRTLLAKSFF

SEQ ID NO: 259285 - protein, 15 aa, Artificial Sequence
  Description of Artificial Sequence: Synthetic peptide
  Seed: SIGKVCRTLLAKSVF
SIGKVFRTLLAKSGF

SEQ ID NO: 259286 - protein, 15 aa, Artificial Sequence
  Description of Artificial Sequence: Synthetic peptide
  Seed: SIGKVCRTLLAKSVF
SIGKVFRTLLAKSHF

SEQ ID NO: 259287 - protein, 15 aa, Artificial Sequence
  Description of Artificial Sequence: Synthetic peptide
  Seed: SIGKVCRTLLAKSVF
SIGKVFRTLLAKSIF

SEQ ID NO: 259288 - protein, 15 aa, Artificial Sequence
  Description of Artificial Sequence: Synthetic peptide
  Seed: SIGKVCRTLLAKSVF
SIGKVFRTLLAKSKF

SEQ ID NO: 259289 - protein, 15 aa, Artificial Sequence
  Description of Artificial Sequence: Synthetic peptide
  Seed: SIGKVCRTLLAKSVF
SIGKVFRTLLAKSLF

SEQ ID NO: 259290 - protein, 15 aa, Artificial Sequence
  Description of Artificial Sequence: Synthetic peptide
  Seed: SIGKVCRTLLAKSVF
SIGKVFRTLLAKSMF

SEQ ID NO: 259291 - protein, 15 aa, Artificial Sequence
  Description of Artificial Sequence: Synthetic peptide
  Seed: SIGKVCRTLLAKSVF
SIGKVFRTLLAKSNF

SEQ ID NO: 259292 - protein, 15 aa, Artificial Sequence
  Description of Artificial Sequence: Synthetic peptide
  Seed: SIGKVCRTLLAKSVF
SIGKVFRTLLAKSPF

SEQ ID NO: 259293 - protein, 15 aa, Artificial Sequence
  Description of Artificial Sequence: Synthetic peptide
  Seed: SIGKVCRTLLAKSVF
SIGKVFRTLLAKSQF

SEQ ID NO: 259294 - protein, 15 aa, Artificial Sequence
  Description of Artificial Sequence: Synthetic peptide
  Seed: SIGKVCRTLLAKSVF
SIGKVFRTLLAKSRF

SEQ ID NO: 259295 - protein, 15 aa, Artificial Sequence
  Description of Artificial Sequence: Synthetic peptide
  Seed: SIGKVCRTLLAKSVF
SIGKVFRTLLAKSSF

SEQ ID NO: 259296 - protein, 15 aa, Artificial Sequence
  Description of Artificial Sequence: Synthetic peptide
  Seed: SIGKVCRTLLAKSVF
SIGKVFRTLLAKSTF

SEQ ID NO: 259297 - protein, 15 aa, Artificial Sequence
  Description of Artificial Sequence: Synthetic peptide
  Seed: SIGKVCRTLLAKSVF
SIGKVFRTLLAKSVF

SEQ ID NO: 259298 - protein, 15 aa, Artificial Sequence
  Description of Artificial Sequence: Synthetic peptide
  Seed: SIGKVCRTLLAKSVF
SIGKVFRTLLAKSWF

SEQ ID NO: 259299 - protein, 15 aa, Artificial Sequence
  Description of Artificial Sequence: Synthetic peptide
  Seed: SIGKVCRTLLAKSVF
SIGKVFRTLLAKSYF

SEQ ID NO: 259300 - protein, 15 aa, Artificial Sequence
  Description of Artificial Sequence: Synthetic peptide
  Seed: SIGKVCRTLLAKSVF
SIGKVFRTLLFKSAF

SEQ ID NO: 259301 - protein, 15 aa, Artificial Sequence
  Description of Artificial Sequence: Synthetic peptide
  Seed: SIGKVCRTLLAKSVF
SIGKVFRTLLFKSCF

SEQ ID NO: 259302 - protein, 15 aa, Artificial Sequence
  Description of Artificial Sequence: Synthetic peptide
  Seed: SIGKVCRTLLAKSVF
SIGKVFRTLLFKSDF

SEQ ID NO: 259303 - protein, 15 aa, Artificial Sequence
  Description of Artificial Sequence: Synthetic peptide
  Seed: SIGKVCRTLLAKSVF
SIGKVFRTLLFKSEF

SEQ ID NO: 259304 - protein, 15 aa, Artificial Sequence
  Description of Artificial Sequence: Synthetic peptide
  Seed: SIGKVCRTLLAKSVF
SIGKVFRTLLFKSFF

SEQ ID NO: 259305 - protein, 15 aa, Artificial Sequence
  Description of Artificial Sequence: Synthetic peptide
  Seed: SIGKVCRTLLAKSVF
SIGKVFRTLLFKSGF

SEQ ID NO: 259306 - protein, 15 aa, Artificial Sequence
  Description of Artificial Sequence: Synthetic peptide
  Seed: SIGKVCRTLLAKSVF
SIGKVFRTLLFKSHF

SEQ ID NO: 259307 - protein, 15 aa, Artificial Sequence
  Description of Artificial Sequence: Synthetic peptide
  Seed: SIGKVCRTLLAKSVF
SIGKVFRTLLFKSIF

SEQ ID NO: 259308 - protein, 15 aa, Artificial Sequence
  Description of Artificial Sequence: Synthetic peptide
  Seed: SIGKVCRTLLAKSVF
SIGKVFRTLLFKSLF

SEQ ID NO: 259309 - protein, 15 aa, Artificial Sequence
  Description of Artificial Sequence: Synthetic peptide
  Seed: SIGKVCRTLLAKSVF
SIGKVFRTLLFKSMF

SEQ ID NO: 259310 - protein, 15 aa, Artificial Sequence
  Description of Artificial Sequence: Synthetic peptide
  Seed: SIGKVCRTLLAKSVF
SIGKVFRTLLFKSNF

SEQ ID NO: 259311 - protein, 15 aa, Artificial Sequence
  Description of Artificial Sequence: Synthetic peptide
  Seed: SIGKVCRTLLAKSVF
SIGKVFRTLLFKSPF

SEQ ID NO: 259312 - protein, 15 aa, Artificial Sequence
  Description of Artificial Sequence: Synthetic peptide
  Seed: SIGKVCRTLLAKSVF
SIGKVFRTLLFKSQF

SEQ ID NO: 259313 - protein, 15 aa, Artificial Sequence
  Description of Artificial Sequence: Synthetic peptide
  Seed: SIGKVCRTLLAKSVF
SIGKVFRTLLFKSRF

SEQ ID NO: 259314 - protein, 15 aa, Artificial Sequence
  Description of Artificial Sequence: Synthetic peptide
  Seed: SIGKVCRTLLAKSVF
SIGKVFRTLLFKSSF

SEQ ID NO: 259315 - protein, 15 aa, Artificial Sequence
  Description of Artificial Sequence: Synthetic peptide
  Seed: SIGKVCRTLLAKSVF
SIGKVFRTLLFKSTF

SEQ ID NO: 259316 - protein, 15 aa, Artificial Sequence
  Description of Artificial Sequence: Synthetic peptide
  Seed: SIGKVCRTLLAKSVF
SIGKVFRTLLFKSVF

SEQ ID NO: 259317 - protein, 15 aa, Artificial Sequence
  Description of Artificial Sequence: Synthetic peptide
  Seed: SIGKVCRTLLAKSVF
SIGKVFRTLLFKSWF

SEQ ID NO: 259318 - protein, 15 aa, Artificial Sequence
  Description of Artificial Sequence: Synthetic peptide
  Seed: SIGKVCRTLLAKSVF
SIGKVFRTLLFKSYF

SEQ ID NO: 259319 - protein, 15 aa, Artificial Sequence
  Description of Artificial Sequence: Synthetic peptide
  Seed: SIGKVCRTLLAKSVF
SIGKVFRTLLGKSAF

SEQ ID NO: 259320 - protein, 15 aa, Artificial Sequence
  Description of Artificial Sequence: Synthetic peptide
  Seed: SIGKVCRTLLAKSVF
SIGKVFRTLLGKSCF

SEQ ID NO: 259321 - protein, 15 aa, Artificial Sequence
  Description of Artificial Sequence: Synthetic peptide
  Seed: SIGKVCRTLLAKSVF
SIGKVFRTLLGKSDF

SEQ ID NO: 259322 - protein, 15 aa, Artificial Sequence
  Description of Artificial Sequence: Synthetic peptide
  Seed: SIGKVCRTLLAKSVF
SIGKVFRTLLGKSFF

SEQ ID NO: 259323 - protein, 15 aa, Artificial Sequence
  Description of Artificial Sequence: Synthetic peptide
  Seed: SIGKVCRTLLAKSVF
SIGKVFRTLLGKSGF

SEQ ID NO: 259324 - protein, 15 aa, Artificial Sequence
  Description of Artificial Sequence: Synthetic peptide
  Seed: SIGKVCRTLLAKSVF
SIGKVFRTLLGKSHF

SEQ ID NO: 259325 - protein, 15 aa, Artificial Sequence
  Description of Artificial Sequence: Synthetic peptide
  Seed: SIGKVCRTLLAKSVF
SIGKVFRTLLGKSIF

SEQ ID NO: 259326 - protein, 15 aa, Artificial Sequence
  Description of Artificial Sequence: Synthetic peptide
  Seed: SIGKVCRTLLAKSVF
SIGKVFRTLLGKSLF

SEQ ID NO: 259327 - protein, 15 aa, Artificial Sequence
  Description of Artificial Sequence: Synthetic peptide
  Seed: SIGKVCRTLLAKSVF
SIGKVFRTLLGKSMF

SEQ ID NO: 259328 - protein, 15 aa, Artificial Sequence
  Description of Artificial Sequence: Synthetic peptide
  Seed: SIGKVCRTLLAKSVF
SIGKVFRTLLGKSNF

SEQ ID NO: 259329 - protein, 15 aa, Artificial Sequence
  Description of Artificial Sequence: Synthetic peptide
  Seed: SIGKVCRTLLAKSVF
SIGKVFRTLLGKSPF

SEQ ID NO: 259330 - protein, 15 aa, Artificial Sequence
  Description of Artificial Sequence: Synthetic peptide
  Seed: SIGKVCRTLLAKSVF
SIGKVFRTLLGKSQF

SEQ ID NO: 259331 - protein, 15 aa, Artificial Sequence
  Description of Artificial Sequence: Synthetic peptide
  Seed: SIGKVCRTLLAKSVF
SIGKVFRTLLGKSSF

SEQ ID NO: 259332 - protein, 15 aa, Artificial Sequence
  Description of Artificial Sequence: Synthetic peptide
  Seed: SIGKVCRTLLAKSVF
SIGKVFRTLLGKSTF

SEQ ID NO: 259333 - protein, 15 aa, Artificial Sequence
  Description of Artificial Sequence: Synthetic peptide
  Seed: SIGKVCRTLLAKSVF
SIGKVFRTLLGKSVF

SEQ ID NO: 259334 - protein, 15 aa, Artificial Sequence
  Description of Artificial Sequence: Synthetic peptide
  Seed: SIGKVCRTLLAKSVF
SIGKVFRTLLGKSWF

SEQ ID NO: 259335 - protein, 15 aa, Artificial Sequence
  Description of Artificial Sequence: Synthetic peptide
  Seed: SIGKVCRTLLAKSVF
SIGKVFRTLLGKSYF

SEQ ID NO: 259336 - protein, 15 aa, Artificial Sequence
  Description of Artificial Sequence: Synthetic peptide
  Seed: SIGKVCRTLLAKSVF
SIGKVFRTLLHKSIF

SEQ ID NO: 259337 - protein, 15 aa, Artificial Sequence
  Description of Artificial Sequence: Synthetic peptide
  Seed: SIGKVCRTLLAKSVF
SIGKVFRTLLHKSLF

SEQ ID NO: 259338 - protein, 15 aa, Artificial Sequence
  Description of Artificial Sequence: Synthetic peptide
  Seed: SIGKVCRTLLAKSVF
SIGKVFRTLLHKSVF

SEQ ID NO: 259339 - protein, 15 aa, Artificial Sequence
  Description of Artificial Sequence: Synthetic peptide
  Seed: SIGKVCRTLLAKSVF
SIGKVFRTLLIKSAF

SEQ ID NO: 259340 - protein, 15 aa, Artificial Sequence
  Description of Artificial Sequence: Synthetic peptide
  Seed: SIGKVCRTLLAKSVF
SIGKVFRTLLIKSFF

SEQ ID NO: 259341 - protein, 15 aa, Artificial Sequence
  Description of Artificial Sequence: Synthetic peptide
  Seed: SIGKVCRTLLAKSVF
SIGKVFRTLLIKSGF

SEQ ID NO: 259342 - protein, 15 aa, Artificial Sequence
  Description of Artificial Sequence: Synthetic peptide
  Seed: SIGKVCRTLLAKSVF
SIGKVFRTLLIKSHF

SEQ ID NO: 259343 - protein, 15 aa, Artificial Sequence
  Description of Artificial Sequence: Synthetic peptide
  Seed: SIGKVCRTLLAKSVF
SIGKVFRTLLIKSIF

SEQ ID NO: 259344 - protein, 15 aa, Artificial Sequence
  Description of Artificial Sequence: Synthetic peptide
  Seed: SIGKVCRTLLAKSVF
SIGKVFRTLLIKSLF

SEQ ID NO: 259345 - protein, 15 aa, Artificial Sequence
  Description of Artificial Sequence: Synthetic peptide
  Seed: SIGKVCRTLLAKSVF
SIGKVFRTLLIKSMF

SEQ ID NO: 259346 - protein, 15 aa, Artificial Sequence
  Description of Artificial Sequence: Synthetic peptide
  Seed: SIGKVCRTLLAKSVF
SIGKVFRTLLIKSNF

SEQ ID NO: 259347 - protein, 15 aa, Artificial Sequence
  Description of Artificial Sequence: Synthetic peptide
  Seed: SIGKVCRTLLAKSVF
SIGKVFRTLLIKSSF

SEQ ID NO: 259348 - protein, 15 aa, Artificial Sequence
  Description of Artificial Sequence: Synthetic peptide
  Seed: SIGKVCRTLLAKSVF
SIGKVFRTLLIKSTF

SEQ ID NO: 259349 - protein, 15 aa, Artificial Sequence
  Description of Artificial Sequence: Synthetic peptide
  Seed: SIGKVCRTLLAKSVF
SIGKVFRTLLIKSVF

SEQ ID NO: 259350 - protein, 15 aa, Artificial Sequence
  Description of Artificial Sequence: Synthetic peptide
  Seed: SIGKVCRTLLAKSVF
SIGKVFRTLLLKSAF

SEQ ID NO: 259351 - protein, 15 aa, Artificial Sequence
  Description of Artificial Sequence: Synthetic peptide
  Seed: SIGKVCRTLLAKSVF
SIGKVFRTLLLKSFF

SEQ ID NO: 259352 - protein, 15 aa, Artificial Sequence
  Description of Artificial Sequence: Synthetic peptide
  Seed: SIGKVCRTLLAKSVF
SIGKVFRTLLLKSIF

SEQ ID NO: 259353 - protein, 15 aa, Artificial Sequence
  Description of Artificial Sequence: Synthetic peptide
  Seed: SIGKVCRTLLAKSVF
SIGKVFRTLLLKSLF

SEQ ID NO: 259354 - protein, 15 aa, Artificial Sequence
  Description of Artificial Sequence: Synthetic peptide
  Seed: SIGKVCRTLLAKSVF
SIGKVFRTLLLKSMF

SEQ ID NO: 259355 - protein, 15 aa, Artificial Sequence
  Description of Artificial Sequence: Synthetic peptide
  Seed: SIGKVCRTLLAKSVF
SIGKVFRTLLLKSNF

SEQ ID NO: 259356 - protein, 15 aa, Artificial Sequence
  Description of Artificial Sequence: Synthetic peptide
  Seed: SIGKVCRTLLAKSVF
SIGKVFRTLLLKSSF

SEQ ID NO: 259357 - protein, 15 aa, Artificial Sequence
  Description of Artificial Sequence: Synthetic peptide
  Seed: SIGKVCRTLLAKSVF
SIGKVFRTLLLKSTF

SEQ ID NO: 259358 - protein, 15 aa, Artificial Sequence
  Description of Artificial Sequence: Synthetic peptide
  Seed: SIGKVCRTLLAKSVF
SIGKVFRTLLLKSVF

SEQ ID NO: 259359 - protein, 15 aa, Artificial Sequence
  Description of Artificial Sequence: Synthetic peptide
  Seed: SIGKVCRTLLAKSVF
SIGKVFRTLLMKSAF

SEQ ID NO: 259360 - protein, 15 aa, Artificial Sequence
  Description of Artificial Sequence: Synthetic peptide
  Seed: SIGKVCRTLLAKSVF
SIGKVFRTLLMKSFF

SEQ ID NO: 259361 - protein, 15 aa, Artificial Sequence
  Description of Artificial Sequence: Synthetic peptide
  Seed: SIGKVCRTLLAKSVF
SIGKVFRTLLMKSIF

SEQ ID NO: 259362 - protein, 15 aa, Artificial Sequence
  Description of Artificial Sequence: Synthetic peptide
  Seed: SIGKVCRTLLAKSVF
SIGKVFRTLLMKSLF

SEQ ID NO: 259363 - protein, 15 aa, Artificial Sequence
  Description of Artificial Sequence: Synthetic peptide
  Seed: SIGKVCRTLLAKSVF
SIGKVFRTLLMKSNF

SEQ ID NO: 259364 - protein, 15 aa, Artificial Sequence
  Description of Artificial Sequence: Synthetic peptide
  Seed: SIGKVCRTLLAKSVF
SIGKVFRTLLMKSSF

SEQ ID NO: 259365 - protein, 15 aa, Artificial Sequence
  Description of Artificial Sequence: Synthetic peptide
  Seed: SIGKVCRTLLAKSVF
SIGKVFRTLLMKSTF

SEQ ID NO: 259366 - protein, 15 aa, Artificial Sequence
  Description of Artificial Sequence: Synthetic peptide
  Seed: SIGKVCRTLLAKSVF
SIGKVFRTLLMKSVF

SEQ ID NO: 259367 - protein, 15 aa, Artificial Sequence
  Description of Artificial Sequence: Synthetic peptide
  Seed: SIGKVCRTLLAKSVF
SIGKVFRTLLNKSAF

SEQ ID NO: 259368 - protein, 15 aa, Artificial Sequence
  Description of Artificial Sequence: Synthetic peptide
  Seed: SIGKVCRTLLAKSVF
SIGKVFRTLLNKSCF

SEQ ID NO: 259369 - protein, 15 aa, Artificial Sequence
  Description of Artificial Sequence: Synthetic peptide
  Seed: SIGKVCRTLLAKSVF
SIGKVFRTLLNKSFF

SEQ ID NO: 259370 - protein, 15 aa, Artificial Sequence
  Description of Artificial Sequence: Synthetic peptide
  Seed: SIGKVCRTLLAKSVF
SIGKVFRTLLNKSGF

SEQ ID NO: 259371 - protein, 15 aa, Artificial Sequence
  Description of Artificial Sequence: Synthetic peptide
  Seed: SIGKVCRTLLAKSVF
SIGKVFRTLLNKSIF

SEQ ID NO: 259372 - protein, 15 aa, Artificial Sequence
  Description of Artificial Sequence: Synthetic peptide
  Seed: SIGKVCRTLLAKSVF
SIGKVFRTLLNKSLF

SEQ ID NO: 259373 - protein, 15 aa, Artificial Sequence
  Description of Artificial Sequence: Synthetic peptide
  Seed: SIGKVCRTLLAKSVF
SIGKVFRTLLNKSMF

SEQ ID NO: 259374 - protein, 15 aa, Artificial Sequence
  Description of Artificial Sequence: Synthetic peptide
  Seed: SIGKVCRTLLAKSVF
SIGKVFRTLLNKSNF

SEQ ID NO: 259375 - protein, 15 aa, Artificial Sequence
  Description of Artificial Sequence: Synthetic peptide
  Seed: SIGKVCRTLLAKSVF
SIGKVFRTLLNKSSF

SEQ ID NO: 259376 - protein, 15 aa, Artificial Sequence
  Description of Artificial Sequence: Synthetic peptide
  Seed: SIGKVCRTLLAKSVF
SIGKVFRTLLNKSTF

SEQ ID NO: 259377 - protein, 15 aa, Artificial Sequence
  Description of Artificial Sequence: Synthetic peptide
  Seed: SIGKVCRTLLAKSVF
SIGKVFRTLLNKSVF

SEQ ID NO: 259378 - protein, 15 aa, Artificial Sequence
  Description of Artificial Sequence: Synthetic peptide
  Seed: SIGKVCRTLLAKSVF
SIGKVFRTLLPKSAF

SEQ ID NO: 259379 - protein, 15 aa, Artificial Sequence
  Description of Artificial Sequence: Synthetic peptide
  Seed: SIGKVCRTLLAKSVF
SIGKVFRTLLPKSCF

SEQ ID NO: 259380 - protein, 15 aa, Artificial Sequence
  Description of Artificial Sequence: Synthetic peptide
  Seed: SIGKVCRTLLAKSVF
SIGKVFRTLLPKSDF

SEQ ID NO: 259381 - protein, 15 aa, Artificial Sequence
  Description of Artificial Sequence: Synthetic peptide
  Seed: SIGKVCRTLLAKSVF
SIGKVFRTLLPKSEF

SEQ ID NO: 259382 - protein, 15 aa, Artificial Sequence
  Description of Artificial Sequence: Synthetic peptide
  Seed: SIGKVCRTLLAKSVF
SIGKVFRTLLPKSFF

SEQ ID NO: 259383 - protein, 15 aa, Artificial Sequence
  Description of Artificial Sequence: Synthetic peptide
  Seed: SIGKVCRTLLAKSVF
SIGKVFRTLLPKSGF

SEQ ID NO: 259384 - protein, 15 aa, Artificial Sequence
  Description of Artificial Sequence: Synthetic peptide
  Seed: SIGKVCRTLLAKSVF
SIGKVFRTLLPKSHF

SEQ ID NO: 259385 - protein, 15 aa, Artificial Sequence
  Description of Artificial Sequence: Synthetic peptide
  Seed: SIGKVCRTLLAKSVF
SIGKVFRTLLPKSIF

SEQ ID NO: 259386 - protein, 15 aa, Artificial Sequence
  Description of Artificial Sequence: Synthetic peptide
  Seed: SIGKVCRTLLAKSVF
SIGKVFRTLLPKSLF

SEQ ID NO: 259387 - protein, 15 aa, Artificial Sequence
  Description of Artificial Sequence: Synthetic peptide
  Seed: SIGKVCRTLLAKSVF
SIGKVFRTLLPKSMF

SEQ ID NO: 259388 - protein, 15 aa, Artificial Sequence
  Description of Artificial Sequence: Synthetic peptide
  Seed: SIGKVCRTLLAKSVF
SIGKVFRTLLPKSNF

SEQ ID NO: 259389 - protein, 15 aa, Artificial Sequence
  Description of Artificial Sequence: Synthetic peptide
  Seed: SIGKVCRTLLAKSVF
SIGKVFRTLLPKSPF

SEQ ID NO: 259390 - protein, 15 aa, Artificial Sequence
  Description of Artificial Sequence: Synthetic peptide
  Seed: SIGKVCRTLLAKSVF
SIGKVFRTLLPKSQF

SEQ ID NO: 259391 - protein, 15 aa, Artificial Sequence
  Description of Artificial Sequence: Synthetic peptide
  Seed: SIGKVCRTLLAKSVF
SIGKVFRTLLPKSSF

SEQ ID NO: 259392 - protein, 15 aa, Artificial Sequence
  Description of Artificial Sequence: Synthetic peptide
  Seed: SIGKVCRTLLAKSVF
SIGKVFRTLLPKSTF

SEQ ID NO: 259393 - protein, 15 aa, Artificial Sequence
  Description of Artificial Sequence: Synthetic peptide
  Seed: SIGKVCRTLLAKSVF
SIGKVFRTLLPKSVF

SEQ ID NO: 259394 - protein, 15 aa, Artificial Sequence
  Description of Artificial Sequence: Synthetic peptide
  Seed: SIGKVCRTLLAKSVF
SIGKVFRTLLPKSWF

SEQ ID NO: 259395 - protein, 15 aa, Artificial Sequence
  Description of Artificial Sequence: Synthetic peptide
  Seed: SIGKVCRTLLAKSVF
SIGKVFRTLLPKSYF

SEQ ID NO: 259396 - protein, 15 aa, Artificial Sequence
  Description of Artificial Sequence: Synthetic peptide
  Seed: SIGKVCRTLLAKSVF
SIGKVFRTLLQKSIF

SEQ ID NO: 259397 - protein, 15 aa, Artificial Sequence
  Description of Artificial Sequence: Synthetic peptide
  Seed: SIGKVCRTLLAKSVF
SIGKVFRTLLQKSLF

SEQ ID NO: 259398 - protein, 15 aa, Artificial Sequence
  Description of Artificial Sequence: Synthetic peptide
  Seed: SIGKVCRTLLAKSVF
SIGKVFRTLLQKSVF

SEQ ID NO: 259399 - protein, 15 aa, Artificial Sequence
  Description of Artificial Sequence: Synthetic peptide
  Seed: SIGKVCRTLLAKSVF
SIGKVFRTLLSKSAF

SEQ ID NO: 259400 - protein, 15 aa, Artificial Sequence
  Description of Artificial Sequence: Synthetic peptide
  Seed: SIGKVCRTLLAKSVF
SIGKVFRTLLSKSCF

SEQ ID NO: 259401 - protein, 15 aa, Artificial Sequence
  Description of Artificial Sequence: Synthetic peptide
  Seed: SIGKVCRTLLAKSVF
SIGKVFRTLLSKSDF

SEQ ID NO: 259402 - protein, 15 aa, Artificial Sequence
  Description of Artificial Sequence: Synthetic peptide
  Seed: SIGKVCRTLLAKSVF
SIGKVFRTLLSKSEF

SEQ ID NO: 259403 - protein, 15 aa, Artificial Sequence
  Description of Artificial Sequence: Synthetic peptide
  Seed: SIGKVCRTLLAKSVF
SIGKVFRTLLSKSFF

SEQ ID NO: 259404 - protein, 15 aa, Artificial Sequence
  Description of Artificial Sequence: Synthetic peptide
  Seed: SIGKVCRTLLAKSVF
SIGKVFRTLLSKSGF

SEQ ID NO: 259405 - protein, 15 aa, Artificial Sequence
  Description of Artificial Sequence: Synthetic peptide
  Seed: SIGKVCRTLLAKSVF
SIGKVFRTLLSKSHF

SEQ ID NO: 259406 - protein, 15 aa, Artificial Sequence
  Description of Artificial Sequence: Synthetic peptide
  Seed: SIGKVCRTLLAKSVF
SIGKVFRTLLSKSIF

SEQ ID NO: 259407 - protein, 15 aa, Artificial Sequence
  Description of Artificial Sequence: Synthetic peptide
  Seed: SIGKVCRTLLAKSVF
SIGKVFRTLLSKSLF

SEQ ID NO: 259408 - protein, 15 aa, Artificial Sequence
  Description of Artificial Sequence: Synthetic peptide
  Seed: SIGKVCRTLLAKSVF
SIGKVFRTLLSKSMF

SEQ ID NO: 259409 - protein, 15 aa, Artificial Sequence
  Description of Artificial Sequence: Synthetic peptide
  Seed: SIGKVCRTLLAKSVF
SIGKVFRTLLSKSNF

SEQ ID NO: 259410 - protein, 15 aa, Artificial Sequence
  Description of Artificial Sequence: Synthetic peptide
  Seed: SIGKVCRTLLAKSVF
SIGKVFRTLLSKSPF

SEQ ID NO: 259411 - protein, 15 aa, Artificial Sequence
  Description of Artificial Sequence: Synthetic peptide
  Seed: SIGKVCRTLLAKSVF
SIGKVFRTLLSKSQF

SEQ ID NO: 259412 - protein, 15 aa, Artificial Sequence
  Description of Artificial Sequence: Synthetic peptide
  Seed: SIGKVCRTLLAKSVF
SIGKVFRTLLSKSRF

SEQ ID NO: 259413 - protein, 15 aa, Artificial Sequence
  Description of Artificial Sequence: Synthetic peptide
  Seed: SIGKVCRTLLAKSVF
SIGKVFRTLLSKSSF

SEQ ID NO: 259414 - protein, 15 aa, Artificial Sequence
  Description of Artificial Sequence: Synthetic peptide
  Seed: SIGKVCRTLLAKSVF
SIGKVFRTLLSKSTF

SEQ ID NO: 259415 - protein, 15 aa, Artificial Sequence
  Description of Artificial Sequence: Synthetic peptide
  Seed: SIGKVCRTLLAKSVF
SIGKVFRTLLSKSVF

SEQ ID NO: 259416 - protein, 15 aa, Artificial Sequence
  Description of Artificial Sequence: Synthetic peptide
  Seed: SIGKVCRTLLAKSVF
SIGKVFRTLLSKSWF

SEQ ID NO: 259417 - protein, 15 aa, Artificial Sequence
  Description of Artificial Sequence: Synthetic peptide
  Seed: SIGKVCRTLLAKSVF
SIGKVFRTLLSKSYF

SEQ ID NO: 259418 - protein, 15 aa, Artificial Sequence
  Description of Artificial Sequence: Synthetic peptide
  Seed: SIGKVCRTLLAKSVF
SIGKVFRTLLTKSAF

SEQ ID NO: 259419 - protein, 15 aa, Artificial Sequence
  Description of Artificial Sequence: Synthetic peptide
  Seed: SIGKVCRTLLAKSVF
SIGKVFRTLLTKSCF

SEQ ID NO: 259420 - protein, 15 aa, Artificial Sequence
  Description of Artificial Sequence: Synthetic peptide
  Seed: SIGKVCRTLLAKSVF
SIGKVFRTLLTKSDF

SEQ ID NO: 259421 - protein, 15 aa, Artificial Sequence
  Description of Artificial Sequence: Synthetic peptide
  Seed: SIGKVCRTLLAKSVF
SIGKVFRTLLTKSEF

SEQ ID NO: 259422 - protein, 15 aa, Artificial Sequence
  Description of Artificial Sequence: Synthetic peptide
  Seed: SIGKVCRTLLAKSVF
SIGKVFRTLLTKSFF

SEQ ID NO: 259423 - protein, 15 aa, Artificial Sequence
  Description of Artificial Sequence: Synthetic peptide
  Seed: SIGKVCRTLLAKSVF
SIGKVFRTLLTKSGF

SEQ ID NO: 259424 - protein, 15 aa, Artificial Sequence
  Description of Artificial Sequence: Synthetic peptide
  Seed: SIGKVCRTLLAKSVF
SIGKVFRTLLTKSHF

SEQ ID NO: 259425 - protein, 15 aa, Artificial Sequence
  Description of Artificial Sequence: Synthetic peptide
  Seed: SIGKVCRTLLAKSVF
SIGKVFRTLLTKSIF

SEQ ID NO: 259426 - protein, 15 aa, Artificial Sequence
  Description of Artificial Sequence: Synthetic peptide
  Seed: SIGKVCRTLLAKSVF
SIGKVFRTLLTKSLF

SEQ ID NO: 259427 - protein, 15 aa, Artificial Sequence
  Description of Artificial Sequence: Synthetic peptide
  Seed: SIGKVCRTLLAKSVF
SIGKVFRTLLTKSMF

SEQ ID NO: 259428 - protein, 15 aa, Artificial Sequence
  Description of Artificial Sequence: Synthetic peptide
  Seed: SIGKVCRTLLAKSVF
SIGKVFRTLLTKSNF

SEQ ID NO: 259429 - protein, 15 aa, Artificial Sequence
  Description of Artificial Sequence: Synthetic peptide
  Seed: SIGKVCRTLLAKSVF
SIGKVFRTLLTKSPF

SEQ ID NO: 259430 - protein, 15 aa, Artificial Sequence
  Description of Artificial Sequence: Synthetic peptide
  Seed: SIGKVCRTLLAKSVF
SIGKVFRTLLTKSQF

SEQ ID NO: 259431 - protein, 15 aa, Artificial Sequence
  Description of Artificial Sequence: Synthetic peptide
  Seed: SIGKVCRTLLAKSVF
SIGKVFRTLLTKSSF

SEQ ID NO: 259432 - protein, 15 aa, Artificial Sequence
  Description of Artificial Sequence: Synthetic peptide
  Seed: SIGKVCRTLLAKSVF
SIGKVFRTLLTKSTF

SEQ ID NO: 259433 - protein, 15 aa, Artificial Sequence
  Description of Artificial Sequence: Synthetic peptide
  Seed: SIGKVCRTLLAKSVF
SIGKVFRTLLTKSVF

SEQ ID NO: 259434 - protein, 15 aa, Artificial Sequence
  Description of Artificial Sequence: Synthetic peptide
  Seed: SIGKVCRTLLAKSVF
SIGKVFRTLLVKSAF

SEQ ID NO: 259435 - protein, 15 aa, Artificial Sequence
  Description of Artificial Sequence: Synthetic peptide
  Seed: SIGKVCRTLLAKSVF
SIGKVFRTLLVKSDF

SEQ ID NO: 259436 - protein, 15 aa, Artificial Sequence
  Description of Artificial Sequence: Synthetic peptide
  Seed: SIGKVCRTLLAKSVF
SIGKVFRTLLVKSGF

SEQ ID NO: 259437 - protein, 15 aa, Artificial Sequence
  Description of Artificial Sequence: Synthetic peptide
  Seed: SIGKVCRTLLAKSVF
SIGKVFRTLLVKSHF

SEQ ID NO: 259438 - protein, 15 aa, Artificial Sequence
  Description of Artificial Sequence: Synthetic peptide
  Seed: SIGKVCRTLLAKSVF
SIGKVFRTLLVKSIF

SEQ ID NO: 259439 - protein, 15 aa, Artificial Sequence
  Description of Artificial Sequence: Synthetic peptide
  Seed: SIGKVCRTLLAKSVF
SIGKVFRTLLVKSLF

SEQ ID NO: 259440 - protein, 15 aa, Artificial Sequence
  Description of Artificial Sequence: Synthetic peptide
  Seed: SIGKVCRTLLAKSVF
SIGKVFRTLLVKSMF

SEQ ID NO: 259441 - protein, 15 aa, Artificial Sequence
  Description of Artificial Sequence: Synthetic peptide
  Seed: SIGKVCRTLLAKSVF
SIGKVFRTLLVKSNF

SEQ ID NO: 259442 - protein, 15 aa, Artificial Sequence
  Description of Artificial Sequence: Synthetic peptide
  Seed: SIGKVCRTLLAKSVF
SIGKVFRTLLVKSPF

SEQ ID NO: 259443 - protein, 15 aa, Artificial Sequence
  Description of Artificial Sequence: Synthetic peptide
  Seed: SIGKVCRTLLAKSVF
SIGKVFRTLLVKSQF

SEQ ID NO: 259444 - protein, 15 aa, Artificial Sequence
  Description of Artificial Sequence: Synthetic peptide
  Seed: SIGKVCRTLLAKSVF
SIGKVFRTLLVKSSF

SEQ ID NO: 259445 - protein, 15 aa, Artificial Sequence
  Description of Artificial Sequence: Synthetic peptide
  Seed: SIGKVCRTLLAKSVF
SIGKVFRTLLVKSTF

SEQ ID NO: 259446 - protein, 15 aa, Artificial Sequence
  Description of Artificial Sequence: Synthetic peptide
  Seed: SIGKVCRTLLAKSVF
SIGKVFRTLLVKSVF

SEQ ID NO: 259447 - protein, 15 aa, Artificial Sequence
  Description of Artificial Sequence: Synthetic peptide
  Seed: SIGKVCRTLLAKSVF
SIGKVFRTLLWKSFF

SEQ ID NO: 259448 - protein, 15 aa, Artificial Sequence
  Description of Artificial Sequence: Synthetic peptide
  Seed: SIGKVCRTLLAKSVF
SIGKVFRTLLWKSIF

SEQ ID NO: 259449 - protein, 15 aa, Artificial Sequence
  Description of Artificial Sequence: Synthetic peptide
  Seed: SIGKVCRTLLAKSVF
SIGKVFRTLLWKSLF

SEQ ID NO: 259450 - protein, 15 aa, Artificial Sequence
  Description of Artificial Sequence: Synthetic peptide
  Seed: SIGKVCRTLLAKSVF
SIGKVFRTLLWKSMF

SEQ ID NO: 259451 - protein, 15 aa, Artificial Sequence
  Description of Artificial Sequence: Synthetic peptide
  Seed: SIGKVCRTLLAKSVF
SIGKVFRTLLWKSVF

SEQ ID NO: 259452 - protein, 15 aa, Artificial Sequence
  Description of Artificial Sequence: Synthetic peptide
  Seed: SIGKVCRTLLAKSVF
SIGKVFRTLLYKSFF

SEQ ID NO: 259453 - protein, 15 aa, Artificial Sequence
  Description of Artificial Sequence: Synthetic peptide
  Seed: SIGKVCRTLLAKSVF
SIGKVFRTLLYKSIF

SEQ ID NO: 259454 - protein, 15 aa, Artificial Sequence
  Description of Artificial Sequence: Synthetic peptide
  Seed: SIGKVCRTLLAKSVF
SIGKVFRTLLYKSLF

SEQ ID NO: 259455 - protein, 15 aa, Artificial Sequence
  Description of Artificial Sequence: Synthetic peptide
  Seed: SIGKVCRTLLAKSVF
SIGKVFRTLLYKSMF

SEQ ID NO: 259456 - protein, 15 aa, Artificial Sequence
  Description of Artificial Sequence: Synthetic peptide
  Seed: SIGKVCRTLLAKSVF
SIGKVFRTLLYKSTF

SEQ ID NO: 259457 - protein, 15 aa, Artificial Sequence
  Description of Artificial Sequence: Synthetic peptide
  Seed: SIGKVCRTLLAKSVF
SIGKVFRTLLYKSVF

SEQ ID NO: 259458 - protein, 15 aa, Artificial Sequence
  Description of Artificial Sequence: Synthetic peptide
  Seed: SIGKVCRTLLAKSVF
SIGKVFRTLLYKSYF

SEQ ID NO: 259459 - protein, 15 aa, Artificial Sequence
  Description of Artificial Sequence: Synthetic peptide
  Seed: SIGKVCRTLLAKSVF
SIGKVFRTMLAKSAF

SEQ ID NO: 259460 - protein, 15 aa, Artificial Sequence
  Description of Artificial Sequence: Synthetic peptide
  Seed: SIGKVCRTLLAKSVF
SIGKVFRTMLAKSCF

SEQ ID NO: 259461 - protein, 15 aa, Artificial Sequence
  Description of Artificial Sequence: Synthetic peptide
  Seed: SIGKVCRTLLAKSVF
SIGKVFRTMLAKSDF

SEQ ID NO: 259462 - protein, 15 aa, Artificial Sequence
  Description of Artificial Sequence: Synthetic peptide
  Seed: SIGKVCRTLLAKSVF
SIGKVFRTMLAKSEF

SEQ ID NO: 259463 - protein, 15 aa, Artificial Sequence
  Description of Artificial Sequence: Synthetic peptide
  Seed: SIGKVCRTLLAKSVF
SIGKVFRTMLAKSFF

SEQ ID NO: 259464 - protein, 15 aa, Artificial Sequence
  Description of Artificial Sequence: Synthetic peptide
  Seed: SIGKVCRTLLAKSVF
SIGKVFRTMLAKSGF

SEQ ID NO: 259465 - protein, 15 aa, Artificial Sequence
  Description of Artificial Sequence: Synthetic peptide
  Seed: SIGKVCRTLLAKSVF
SIGKVFRTMLAKSHF

SEQ ID NO: 259466 - protein, 15 aa, Artificial Sequence
  Description of Artificial Sequence: Synthetic peptide
  Seed: SIGKVCRTLLAKSVF
SIGKVFRTMLAKSIF

SEQ ID NO: 259467 - protein, 15 aa, Artificial Sequence
  Description of Artificial Sequence: Synthetic peptide
  Seed: SIGKVCRTLLAKSVF
SIGKVFRTMLAKSKF

SEQ ID NO: 259468 - protein, 15 aa, Artificial Sequence
  Description of Artificial Sequence: Synthetic peptide
  Seed: SIGKVCRTLLAKSVF
SIGKVFRTMLAKSLF

SEQ ID NO: 259469 - protein, 15 aa, Artificial Sequence
  Description of Artificial Sequence: Synthetic peptide
  Seed: SIGKVCRTLLAKSVF
SIGKVFRTMLAKSMF

SEQ ID NO: 259470 - protein, 15 aa, Artificial Sequence
  Description of Artificial Sequence: Synthetic peptide
  Seed: SIGKVCRTLLAKSVF
SIGKVFRTMLAKSNF

SEQ ID NO: 259471 - protein, 15 aa, Artificial Sequence
  Description of Artificial Sequence: Synthetic peptide
  Seed: SIGKVCRTLLAKSVF
SIGKVFRTMLAKSPF

SEQ ID NO: 259472 - protein, 15 aa, Artificial Sequence
  Description of Artificial Sequence: Synthetic peptide
  Seed: SIGKVCRTLLAKSVF
SIGKVFRTMLAKSQF

SEQ ID NO: 259473 - protein, 15 aa, Artificial Sequence
  Description of Artificial Sequence: Synthetic peptide
  Seed: SIGKVCRTLLAKSVF
SIGKVFRTMLAKSRF

SEQ ID NO: 259474 - protein, 15 aa, Artificial Sequence
  Description of Artificial Sequence: Synthetic peptide
  Seed: SIGKVCRTLLAKSVF
SIGKVFRTMLAKSSF

SEQ ID NO: 259475 - protein, 15 aa, Artificial Sequence
  Description of Artificial Sequence: Synthetic peptide
  Seed: SIGKVCRTLLAKSVF
SIGKVFRTMLAKSTF

SEQ ID NO: 259476 - protein, 15 aa, Artificial Sequence
  Description of Artificial Sequence: Synthetic peptide
  Seed: SIGKVCRTLLAKSVF
SIGKVFRTMLAKSVF

SEQ ID NO: 259477 - protein, 15 aa, Artificial Sequence
  Description of Artificial Sequence: Synthetic peptide
  Seed: SIGKVCRTLLAKSVF
SIGKVFRTMLAKSWF

SEQ ID NO: 259478 - protein, 15 aa, Artificial Sequence
  Description of Artificial Sequence: Synthetic peptide
  Seed: SIGKVCRTLLAKSVF
SIGKVFRTMLAKSYF

SEQ ID NO: 259479 - protein, 15 aa, Artificial Sequence
  Description of Artificial Sequence: Synthetic peptide
  Seed: SIGKVCRTLLAKSVF
SIGKVFRTMLCKSVF

SEQ ID NO: 259480 - protein, 15 aa, Artificial Sequence
  Description of Artificial Sequence: Synthetic peptide
  Seed: SIGKVCRTLLAKSVF
SIGKVFRTMLEKSVF

SEQ ID NO: 259481 - protein, 15 aa, Artificial Sequence
  Description of Artificial Sequence: Synthetic peptide
  Seed: SIGKVCRTLLAKSVF
SIGKVFRTMLFKSAF

SEQ ID NO: 259482 - protein, 15 aa, Artificial Sequence
  Description of Artificial Sequence: Synthetic peptide
  Seed: SIGKVCRTLLAKSVF
SIGKVFRTMLFKSCF

SEQ ID NO: 259483 - protein, 15 aa, Artificial Sequence
  Description of Artificial Sequence: Synthetic peptide
  Seed: SIGKVCRTLLAKSVF
SIGKVFRTMLFKSDF

SEQ ID NO: 259484 - protein, 15 aa, Artificial Sequence
  Description of Artificial Sequence: Synthetic peptide
  Seed: SIGKVCRTLLAKSVF
SIGKVFRTMLFKSEF

SEQ ID NO: 259485 - protein, 15 aa, Artificial Sequence
  Description of Artificial Sequence: Synthetic peptide
  Seed: SIGKVCRTLLAKSVF
SIGKVFRTMLFKSFF

SEQ ID NO: 259486 - protein, 15 aa, Artificial Sequence
  Description of Artificial Sequence: Synthetic peptide
  Seed: SIGKVCRTLLAKSVF
SIGKVFRTMLFKSHF

SEQ ID NO: 259487 - protein, 15 aa, Artificial Sequence
  Description of Artificial Sequence: Synthetic peptide
  Seed: SIGKVCRTLLAKSVF
SIGKVFRTMLFKSIF

SEQ ID NO: 259488 - protein, 15 aa, Artificial Sequence
  Description of Artificial Sequence: Synthetic peptide
  Seed: SIGKVCRTLLAKSVF
SIGKVFRTMLFKSLF

SEQ ID NO: 259489 - protein, 15 aa, Artificial Sequence
  Description of Artificial Sequence: Synthetic peptide
  Seed: SIGKVCRTLLAKSVF
SIGKVFRTMLFKSMF

SEQ ID NO: 259490 - protein, 15 aa, Artificial Sequence
  Description of Artificial Sequence: Synthetic peptide
  Seed: SIGKVCRTLLAKSVF
SIGKVFRTMLFKSNF

SEQ ID NO: 259491 - protein, 15 aa, Artificial Sequence
  Description of Artificial Sequence: Synthetic peptide
  Seed: SIGKVCRTLLAKSVF
SIGKVFRTMLFKSPF

SEQ ID NO: 259492 - protein, 15 aa, Artificial Sequence
  Description of Artificial Sequence: Synthetic peptide
  Seed: SIGKVCRTLLAKSVF
SIGKVFRTMLFKSSF

SEQ ID NO: 259493 - protein, 15 aa, Artificial Sequence
  Description of Artificial Sequence: Synthetic peptide
  Seed: SIGKVCRTLLAKSVF
SIGKVFRTMLFKSTF

SEQ ID NO: 259494 - protein, 15 aa, Artificial Sequence
  Description of Artificial Sequence: Synthetic peptide
  Seed: SIGKVCRTLLAKSVF
SIGKVFRTMLFKSVF

SEQ ID NO: 259495 - protein, 15 aa, Artificial Sequence
  Description of Artificial Sequence: Synthetic peptide
  Seed: SIGKVCRTLLAKSVF
SIGKVFRTMLFKSWF

SEQ ID NO: 259496 - protein, 15 aa, Artificial Sequence
  Description of Artificial Sequence: Synthetic peptide
  Seed: SIGKVCRTLLAKSVF
SIGKVFRTMLFKSYF

SEQ ID NO: 259497 - protein, 15 aa, Artificial Sequence
  Description of Artificial Sequence: Synthetic peptide
  Seed: SIGKVCRTLLAKSVF
SIGKVFRTMLGKSAF

SEQ ID NO: 259498 - protein, 15 aa, Artificial Sequence
  Description of Artificial Sequence: Synthetic peptide
  Seed: SIGKVCRTLLAKSVF
SIGKVFRTMLGKSCF

SEQ ID NO: 259499 - protein, 15 aa, Artificial Sequence
  Description of Artificial Sequence: Synthetic peptide
  Seed: SIGKVCRTLLAKSVF
SIGKVFRTMLGKSDF

SEQ ID NO: 259500 - protein, 15 aa, Artificial Sequence
  Description of Artificial Sequence: Synthetic peptide
  Seed: SIGKVCRTLLAKSVF
SIGKVFRTMLGKSFF

SEQ ID NO: 259501 - protein, 15 aa, Artificial Sequence
  Description of Artificial Sequence: Synthetic peptide
  Seed: SIGKVCRTLLAKSVF
SIGKVFRTMLGKSGF

SEQ ID NO: 259502 - protein, 15 aa, Artificial Sequence
  Description of Artificial Sequence: Synthetic peptide
  Seed: SIGKVCRTLLAKSVF
SIGKVFRTMLGKSHF

SEQ ID NO: 259503 - protein, 15 aa, Artificial Sequence
  Description of Artificial Sequence: Synthetic peptide
  Seed: SIGKVCRTLLAKSVF
SIGKVFRTMLGKSIF

SEQ ID NO: 259504 - protein, 15 aa, Artificial Sequence
  Description of Artificial Sequence: Synthetic peptide
  Seed: SIGKVCRTLLAKSVF
SIGKVFRTMLGKSLF

SEQ ID NO: 259505 - protein, 15 aa, Artificial Sequence
  Description of Artificial Sequence: Synthetic peptide
  Seed: SIGKVCRTLLAKSVF
SIGKVFRTMLGKSMF

SEQ ID NO: 259506 - protein, 15 aa, Artificial Sequence
  Description of Artificial Sequence: Synthetic peptide
  Seed: SIGKVCRTLLAKSVF
SIGKVFRTMLGKSNF

SEQ ID NO: 259507 - protein, 15 aa, Artificial Sequence
  Description of Artificial Sequence: Synthetic peptide
  Seed: SIGKVCRTLLAKSVF
SIGKVFRTMLGKSPF

SEQ ID NO: 259508 - protein, 15 aa, Artificial Sequence
  Description of Artificial Sequence: Synthetic peptide
  Seed: SIGKVCRTLLAKSVF
SIGKVFRTMLGKSQF

SEQ ID NO: 259509 - protein, 15 aa, Artificial Sequence
  Description of Artificial Sequence: Synthetic peptide
  Seed: SIGKVCRTLLAKSVF
SIGKVFRTMLGKSRF

SEQ ID NO: 259510 - protein, 15 aa, Artificial Sequence
  Description of Artificial Sequence: Synthetic peptide
  Seed: SIGKVCRTLLAKSVF
SIGKVFRTMLGKSSF

SEQ ID NO: 259511 - protein, 15 aa, Artificial Sequence
  Description of Artificial Sequence: Synthetic peptide
  Seed: SIGKVCRTLLAKSVF
SIGKVFRTMLGKSTF

SEQ ID NO: 259512 - protein, 15 aa, Artificial Sequence
  Description of Artificial Sequence: Synthetic peptide
  Seed: SIGKVCRTLLAKSVF
SIGKVFRTMLGKSVF

SEQ ID NO: 259513 - protein, 15 aa, Artificial Sequence
  Description of Artificial Sequence: Synthetic peptide
  Seed: SIGKVCRTLLAKSVF
SIGKVFRTMLGKSWF

SEQ ID NO: 259514 - protein, 15 aa, Artificial Sequence
  Description of Artificial Sequence: Synthetic peptide
  Seed: SIGKVCRTLLAKSVF
SIGKVFRTMLGKSYF

SEQ ID NO: 259515 - protein, 15 aa, Artificial Sequence
  Description of Artificial Sequence: Synthetic peptide
  Seed: SIGKVCRTLLAKSVF
SIGKVFRTMLHKSAF

SEQ ID NO: 259516 - protein, 15 aa, Artificial Sequence
  Description of Artificial Sequence: Synthetic peptide
  Seed: SIGKVCRTLLAKSVF
SIGKVFRTMLHKSIF

SEQ ID NO: 259517 - protein, 15 aa, Artificial Sequence
  Description of Artificial Sequence: Synthetic peptide
  Seed: SIGKVCRTLLAKSVF
SIGKVFRTMLHKSLF

SEQ ID NO: 259518 - protein, 15 aa, Artificial Sequence
  Description of Artificial Sequence: Synthetic peptide
  Seed: SIGKVCRTLLAKSVF
SIGKVFRTMLHKSVF

SEQ ID NO: 259519 - protein, 15 aa, Artificial Sequence
  Description of Artificial Sequence: Synthetic peptide
  Seed: SIGKVCRTLLAKSVF
SIGKVFRTMLIKSAF

SEQ ID NO: 259520 - protein, 15 aa, Artificial Sequence
  Description of Artificial Sequence: Synthetic peptide
  Seed: SIGKVCRTLLAKSVF
SIGKVFRTMLIKSDF

SEQ ID NO: 259521 - protein, 15 aa, Artificial Sequence
  Description of Artificial Sequence: Synthetic peptide
  Seed: SIGKVCRTLLAKSVF
SIGKVFRTMLIKSGF

SEQ ID NO: 259522 - protein, 15 aa, Artificial Sequence
  Description of Artificial Sequence: Synthetic peptide
  Seed: SIGKVCRTLLAKSVF
SIGKVFRTMLIKSHF

SEQ ID NO: 259523 - protein, 15 aa, Artificial Sequence
  Description of Artificial Sequence: Synthetic peptide
  Seed: SIGKVCRTLLAKSVF
SIGKVFRTMLIKSIF

SEQ ID NO: 259524 - protein, 15 aa, Artificial Sequence
  Description of Artificial Sequence: Synthetic peptide
  Seed: SIGKVCRTLLAKSVF
SIGKVFRTMLIKSLF

SEQ ID NO: 259525 - protein, 15 aa, Artificial Sequence
  Description of Artificial Sequence: Synthetic peptide
  Seed: SIGKVCRTLLAKSVF
SIGKVFRTMLIKSMF

SEQ ID NO: 259526 - protein, 15 aa, Artificial Sequence
  Description of Artificial Sequence: Synthetic peptide
  Seed: SIGKVCRTLLAKSVF
SIGKVFRTMLIKSNF

SEQ ID NO: 259527 - protein, 15 aa, Artificial Sequence
  Description of Artificial Sequence: Synthetic peptide
  Seed: SIGKVCRTLLAKSVF
SIGKVFRTMLIKSQF

SEQ ID NO: 259528 - protein, 15 aa, Artificial Sequence
  Description of Artificial Sequence: Synthetic peptide
  Seed: SIGKVCRTLLAKSVF
SIGKVFRTMLIKSSF

SEQ ID NO: 259529 - protein, 15 aa, Artificial Sequence
  Description of Artificial Sequence: Synthetic peptide
  Seed: SIGKVCRTLLAKSVF
SIGKVFRTMLIKSTF

SEQ ID NO: 259530 - protein, 15 aa, Artificial Sequence
  Description of Artificial Sequence: Synthetic peptide
  Seed: SIGKVCRTLLAKSVF
SIGKVFRTMLIKSVF

SEQ ID NO: 259531 - protein, 15 aa, Artificial Sequence
  Description of Artificial Sequence: Synthetic peptide
  Seed: SIGKVCRTLLAKSVF
SIGKVFRTMLLKSAF

SEQ ID NO: 259532 - protein, 15 aa, Artificial Sequence
  Description of Artificial Sequence: Synthetic peptide
  Seed: SIGKVCRTLLAKSVF
SIGKVFRTMLLKSFF

SEQ ID NO: 259533 - protein, 15 aa, Artificial Sequence
  Description of Artificial Sequence: Synthetic peptide
  Seed: SIGKVCRTLLAKSVF
SIGKVFRTMLLKSIF

SEQ ID NO: 259534 - protein, 15 aa, Artificial Sequence
  Description of Artificial Sequence: Synthetic peptide
  Seed: SIGKVCRTLLAKSVF
SIGKVFRTMLLKSLF

SEQ ID NO: 259535 - protein, 15 aa, Artificial Sequence
  Description of Artificial Sequence: Synthetic peptide
  Seed: SIGKVCRTLLAKSVF
SIGKVFRTMLLKSMF

SEQ ID NO: 259536 - protein, 15 aa, Artificial Sequence
  Description of Artificial Sequence: Synthetic peptide
  Seed: SIGKVCRTLLAKSVF
SIGKVFRTMLLKSNF

SEQ ID NO: 259537 - protein, 15 aa, Artificial Sequence
  Description of Artificial Sequence: Synthetic peptide
  Seed: SIGKVCRTLLAKSVF
SIGKVFRTMLLKSSF

SEQ ID NO: 259538 - protein, 15 aa, Artificial Sequence
  Description of Artificial Sequence: Synthetic peptide
  Seed: SIGKVCRTLLAKSVF
SIGKVFRTMLLKSTF

SEQ ID NO: 259539 - protein, 15 aa, Artificial Sequence
  Description of Artificial Sequence: Synthetic peptide
  Seed: SIGKVCRTLLAKSVF
SIGKVFRTMLLKSVF

SEQ ID NO: 259540 - protein, 15 aa, Artificial Sequence
  Description of Artificial Sequence: Synthetic peptide
  Seed: SIGKVCRTLLAKSVF
SIGKVFRTMLMKSAF

SEQ ID NO: 259541 - protein, 15 aa, Artificial Sequence
  Description of Artificial Sequence: Synthetic peptide
  Seed: SIGKVCRTLLAKSVF
SIGKVFRTMLMKSHF

SEQ ID NO: 259542 - protein, 15 aa, Artificial Sequence
  Description of Artificial Sequence: Synthetic peptide
  Seed: SIGKVCRTLLAKSVF
SIGKVFRTMLMKSIF

SEQ ID NO: 259543 - protein, 15 aa, Artificial Sequence
  Description of Artificial Sequence: Synthetic peptide
  Seed: SIGKVCRTLLAKSVF
SIGKVFRTMLMKSLF

SEQ ID NO: 259544 - protein, 15 aa, Artificial Sequence
  Description of Artificial Sequence: Synthetic peptide
  Seed: SIGKVCRTLLAKSVF
SIGKVFRTMLMKSMF

SEQ ID NO: 259545 - protein, 15 aa, Artificial Sequence
  Description of Artificial Sequence: Synthetic peptide
  Seed: SIGKVCRTLLAKSVF
SIGKVFRTMLMKSNF

SEQ ID NO: 259546 - protein, 15 aa, Artificial Sequence
  Description of Artificial Sequence: Synthetic peptide
  Seed: SIGKVCRTLLAKSVF
SIGKVFRTMLMKSSF

SEQ ID NO: 259547 - protein, 15 aa, Artificial Sequence
  Description of Artificial Sequence: Synthetic peptide
  Seed: SIGKVCRTLLAKSVF
SIGKVFRTMLMKSTF

SEQ ID NO: 259548 - protein, 15 aa, Artificial Sequence
  Description of Artificial Sequence: Synthetic peptide
  Seed: SIGKVCRTLLAKSVF
SIGKVFRTMLMKSVF

SEQ ID NO: 259549 - protein, 15 aa, Artificial Sequence
  Description of Artificial Sequence: Synthetic peptide
  Seed: SIGKVCRTLLAKSVF
SIGKVFRTMLNKSAF

SEQ ID NO: 259550 - protein, 15 aa, Artificial Sequence
  Description of Artificial Sequence: Synthetic peptide
  Seed: SIGKVCRTLLAKSVF
SIGKVFRTMLNKSCF

SEQ ID NO: 259551 - protein, 15 aa, Artificial Sequence
  Description of Artificial Sequence: Synthetic peptide
  Seed: SIGKVCRTLLAKSVF
SIGKVFRTMLNKSFF

SEQ ID NO: 259552 - protein, 15 aa, Artificial Sequence
  Description of Artificial Sequence: Synthetic peptide
  Seed: SIGKVCRTLLAKSVF
SIGKVFRTMLNKSGF

SEQ ID NO: 259553 - protein, 15 aa, Artificial Sequence
  Description of Artificial Sequence: Synthetic peptide
  Seed: SIGKVCRTLLAKSVF
SIGKVFRTMLNKSHF

SEQ ID NO: 259554 - protein, 15 aa, Artificial Sequence
  Description of Artificial Sequence: Synthetic peptide
  Seed: SIGKVCRTLLAKSVF
SIGKVFRTMLNKSIF

SEQ ID NO: 259555 - protein, 15 aa, Artificial Sequence
  Description of Artificial Sequence: Synthetic peptide
  Seed: SIGKVCRTLLAKSVF
SIGKVFRTMLNKSLF

SEQ ID NO: 259556 - protein, 15 aa, Artificial Sequence
  Description of Artificial Sequence: Synthetic peptide
  Seed: SIGKVCRTLLAKSVF
SIGKVFRTMLNKSMF

SEQ ID NO: 259557 - protein, 15 aa, Artificial Sequence
  Description of Artificial Sequence: Synthetic peptide
  Seed: SIGKVCRTLLAKSVF
SIGKVFRTMLNKSNF

SEQ ID NO: 259558 - protein, 15 aa, Artificial Sequence
  Description of Artificial Sequence: Synthetic peptide
  Seed: SIGKVCRTLLAKSVF
SIGKVFRTMLNKSSF

SEQ ID NO: 259559 - protein, 15 aa, Artificial Sequence
  Description of Artificial Sequence: Synthetic peptide
  Seed: SIGKVCRTLLAKSVF
SIGKVFRTMLNKSTF

SEQ ID NO: 259560 - protein, 15 aa, Artificial Sequence
  Description of Artificial Sequence: Synthetic peptide
  Seed: SIGKVCRTLLAKSVF
SIGKVFRTMLNKSVF

SEQ ID NO: 259561 - protein, 15 aa, Artificial Sequence
  Description of Artificial Sequence: Synthetic peptide
  Seed: SIGKVCRTLLAKSVF
SIGKVFRTMLPKSAF

SEQ ID NO: 259562 - protein, 15 aa, Artificial Sequence
  Description of Artificial Sequence: Synthetic peptide
  Seed: SIGKVCRTLLAKSVF
SIGKVFRTMLPKSCF

SEQ ID NO: 259563 - protein, 15 aa, Artificial Sequence
  Description of Artificial Sequence: Synthetic peptide
  Seed: SIGKVCRTLLAKSVF
SIGKVFRTMLPKSDF

SEQ ID NO: 259564 - protein, 15 aa, Artificial Sequence
  Description of Artificial Sequence: Synthetic peptide
  Seed: SIGKVCRTLLAKSVF
SIGKVFRTMLPKSEF

SEQ ID NO: 259565 - protein, 15 aa, Artificial Sequence
  Description of Artificial Sequence: Synthetic peptide
  Seed: SIGKVCRTLLAKSVF
SIGKVFRTMLPKSFF

SEQ ID NO: 259566 - protein, 15 aa, Artificial Sequence
  Description of Artificial Sequence: Synthetic peptide
  Seed: SIGKVCRTLLAKSVF
SIGKVFRTMLPKSGF

SEQ ID NO: 259567 - protein, 15 aa, Artificial Sequence
  Description of Artificial Sequence: Synthetic peptide
  Seed: SIGKVCRTLLAKSVF
SIGKVFRTMLPKSHF

SEQ ID NO: 259568 - protein, 15 aa, Artificial Sequence
  Description of Artificial Sequence: Synthetic peptide
  Seed: SIGKVCRTLLAKSVF
SIGKVFRTMLPKSIF

SEQ ID NO: 259569 - protein, 15 aa, Artificial Sequence
  Description of Artificial Sequence: Synthetic peptide
  Seed: SIGKVCRTLLAKSVF
SIGKVFRTMLPKSLF

SEQ ID NO: 259570 - protein, 15 aa, Artificial Sequence
  Description of Artificial Sequence: Synthetic peptide
  Seed: SIGKVCRTLLAKSVF
SIGKVFRTMLPKSMF

SEQ ID NO: 259571 - protein, 15 aa, Artificial Sequence
  Description of Artificial Sequence: Synthetic peptide
  Seed: SIGKVCRTLLAKSVF
SIGKVFRTMLPKSNF

SEQ ID NO: 259572 - protein, 15 aa, Artificial Sequence
  Description of Artificial Sequence: Synthetic peptide
  Seed: SIGKVCRTLLAKSVF
SIGKVFRTMLPKSPF

SEQ ID NO: 259573 - protein, 15 aa, Artificial Sequence
  Description of Artificial Sequence: Synthetic peptide
  Seed: SIGKVCRTLLAKSVF
SIGKVFRTMLPKSQF

SEQ ID NO: 259574 - protein, 15 aa, Artificial Sequence
  Description of Artificial Sequence: Synthetic peptide
  Seed: SIGKVCRTLLAKSVF
SIGKVFRTMLPKSSF

SEQ ID NO: 259575 - protein, 15 aa, Artificial Sequence
  Description of Artificial Sequence: Synthetic peptide
  Seed: SIGKVCRTLLAKSVF
SIGKVFRTMLPKSTF

SEQ ID NO: 259576 - protein, 15 aa, Artificial Sequence
  Description of Artificial Sequence: Synthetic peptide
  Seed: SIGKVCRTLLAKSVF
SIGKVFRTMLPKSVF

SEQ ID NO: 259577 - protein, 15 aa, Artificial Sequence
  Description of Artificial Sequence: Synthetic peptide
  Seed: SIGKVCRTLLAKSVF
SIGKVFRTMLPKSWF

SEQ ID NO: 259578 - protein, 15 aa, Artificial Sequence
  Description of Artificial Sequence: Synthetic peptide
  Seed: SIGKVCRTLLAKSVF
SIGKVFRTMLPKSYF

SEQ ID NO: 259579 - protein, 15 aa, Artificial Sequence
  Description of Artificial Sequence: Synthetic peptide
  Seed: SIGKVCRTLLAKSVF
SIGKVFRTMLQKSAF

SEQ ID NO: 259580 - protein, 15 aa, Artificial Sequence
  Description of Artificial Sequence: Synthetic peptide
  Seed: SIGKVCRTLLAKSVF
SIGKVFRTMLQKSIF

SEQ ID NO: 259581 - protein, 15 aa, Artificial Sequence
  Description of Artificial Sequence: Synthetic peptide
  Seed: SIGKVCRTLLAKSVF
SIGKVFRTMLQKSLF

SEQ ID NO: 259582 - protein, 15 aa, Artificial Sequence
  Description of Artificial Sequence: Synthetic peptide
  Seed: SIGKVCRTLLAKSVF
SIGKVFRTMLQKSVF

SEQ ID NO: 259583 - protein, 15 aa, Artificial Sequence
  Description of Artificial Sequence: Synthetic peptide
  Seed: SIGKVCRTLLAKSVF
SIGKVFRTMLSKSAF

SEQ ID NO: 259584 - protein, 15 aa, Artificial Sequence
  Description of Artificial Sequence: Synthetic peptide
  Seed: SIGKVCRTLLAKSVF
SIGKVFRTMLSKSCF

SEQ ID NO: 259585 - protein, 15 aa, Artificial Sequence
  Description of Artificial Sequence: Synthetic peptide
  Seed: SIGKVCRTLLAKSVF
SIGKVFRTMLSKSDF

SEQ ID NO: 259586 - protein, 15 aa, Artificial Sequence
  Description of Artificial Sequence: Synthetic peptide
  Seed: SIGKVCRTLLAKSVF
SIGKVFRTMLSKSEF

SEQ ID NO: 259587 - protein, 15 aa, Artificial Sequence
  Description of Artificial Sequence: Synthetic peptide
  Seed: SIGKVCRTLLAKSVF
SIGKVFRTMLSKSFF

SEQ ID NO: 259588 - protein, 15 aa, Artificial Sequence
  Description of Artificial Sequence: Synthetic peptide
  Seed: SIGKVCRTLLAKSVF
SIGKVFRTMLSKSGF

SEQ ID NO: 259589 - protein, 15 aa, Artificial Sequence
  Description of Artificial Sequence: Synthetic peptide
  Seed: SIGKVCRTLLAKSVF
SIGKVFRTMLSKSHF

SEQ ID NO: 259590 - protein, 15 aa, Artificial Sequence
  Description of Artificial Sequence: Synthetic peptide
  Seed: SIGKVCRTLLAKSVF
SIGKVFRTMLSKSIF

SEQ ID NO: 259591 - protein, 15 aa, Artificial Sequence
  Description of Artificial Sequence: Synthetic peptide
  Seed: SIGKVCRTLLAKSVF
SIGKVFRTMLSKSLF

SEQ ID NO: 259592 - protein, 15 aa, Artificial Sequence
  Description of Artificial Sequence: Synthetic peptide
  Seed: SIGKVCRTLLAKSVF
SIGKVFRTMLSKSMF

SEQ ID NO: 259593 - protein, 15 aa, Artificial Sequence
  Description of Artificial Sequence: Synthetic peptide
  Seed: SIGKVCRTLLAKSVF
SIGKVFRTMLSKSNF

SEQ ID NO: 259594 - protein, 15 aa, Artificial Sequence
  Description of Artificial Sequence: Synthetic peptide
  Seed: SIGKVCRTLLAKSVF
SIGKVFRTMLSKSPF

SEQ ID NO: 259595 - protein, 15 aa, Artificial Sequence
  Description of Artificial Sequence: Synthetic peptide
  Seed: SIGKVCRTLLAKSVF
SIGKVFRTMLSKSQF

SEQ ID NO: 259596 - protein, 15 aa, Artificial Sequence
  Description of Artificial Sequence: Synthetic peptide
  Seed: SIGKVCRTLLAKSVF
SIGKVFRTMLSKSRF

SEQ ID NO: 259597 - protein, 15 aa, Artificial Sequence
  Description of Artificial Sequence: Synthetic peptide
  Seed: SIGKVCRTLLAKSVF
SIGKVFRTMLSKSSF

SEQ ID NO: 259598 - protein, 15 aa, Artificial Sequence
  Description of Artificial Sequence: Synthetic peptide
  Seed: SIGKVCRTLLAKSVF
SIGKVFRTMLSKSTF

SEQ ID NO: 259599 - protein, 15 aa, Artificial Sequence
  Description of Artificial Sequence: Synthetic peptide
  Seed: SIGKVCRTLLAKSVF
SIGKVFRTMLSKSVF

SEQ ID NO: 259600 - protein, 15 aa, Artificial Sequence
  Description of Artificial Sequence: Synthetic peptide
  Seed: SIGKVCRTLLAKSVF
SIGKVFRTMLSKSWF

SEQ ID NO: 259601 - protein, 15 aa, Artificial Sequence
  Description of Artificial Sequence: Synthetic peptide
  Seed: SIGKVCRTLLAKSVF
SIGKVFRTMLSKSYF

SEQ ID NO: 259602 - protein, 15 aa, Artificial Sequence
  Description of Artificial Sequence: Synthetic peptide
  Seed: SIGKVCRTLLAKSVF
SIGKVFRTMLTKSAF

SEQ ID NO: 259603 - protein, 15 aa, Artificial Sequence
  Description of Artificial Sequence: Synthetic peptide
  Seed: SIGKVCRTLLAKSVF
SIGKVFRTMLTKSCF

SEQ ID NO: 259604 - protein, 15 aa, Artificial Sequence
  Description of Artificial Sequence: Synthetic peptide
  Seed: SIGKVCRTLLAKSVF
SIGKVFRTMLTKSDF

SEQ ID NO: 259605 - protein, 15 aa, Artificial Sequence
  Description of Artificial Sequence: Synthetic peptide
  Seed: SIGKVCRTLLAKSVF
SIGKVFRTMLTKSEF

SEQ ID NO: 259606 - protein, 15 aa, Artificial Sequence
  Description of Artificial Sequence: Synthetic peptide
  Seed: SIGKVCRTLLAKSVF
SIGKVFRTMLTKSFF

SEQ ID NO: 259607 - protein, 15 aa, Artificial Sequence
  Description of Artificial Sequence: Synthetic peptide
  Seed: SIGKVCRTLLAKSVF
SIGKVFRTMLTKSGF

SEQ ID NO: 259608 - protein, 15 aa, Artificial Sequence
  Description of Artificial Sequence: Synthetic peptide
  Seed: SIGKVCRTLLAKSVF
SIGKVFRTMLTKSHF

SEQ ID NO: 259609 - protein, 15 aa, Artificial Sequence
  Description of Artificial Sequence: Synthetic peptide
  Seed: SIGKVCRTLLAKSVF
SIGKVFRTMLTKSIF

SEQ ID NO: 259610 - protein, 15 aa, Artificial Sequence
  Description of Artificial Sequence: Synthetic peptide
  Seed: SIGKVCRTLLAKSVF
SIGKVFRTMLTKSLF

SEQ ID NO: 259611 - protein, 15 aa, Artificial Sequence
  Description of Artificial Sequence: Synthetic peptide
  Seed: SIGKVCRTLLAKSVF
SIGKVFRTMLTKSMF

SEQ ID NO: 259612 - protein, 15 aa, Artificial Sequence
  Description of Artificial Sequence: Synthetic peptide
  Seed: SIGKVCRTLLAKSVF
SIGKVFRTMLTKSNF

SEQ ID NO: 259613 - protein, 15 aa, Artificial Sequence
  Description of Artificial Sequence: Synthetic peptide
  Seed: SIGKVCRTLLAKSVF
SIGKVFRTMLTKSPF

SEQ ID NO: 259614 - protein, 15 aa, Artificial Sequence
  Description of Artificial Sequence: Synthetic peptide
  Seed: SIGKVCRTLLAKSVF
SIGKVFRTMLTKSQF

SEQ ID NO: 259615 - protein, 15 aa, Artificial Sequence
  Description of Artificial Sequence: Synthetic peptide
  Seed: SIGKVCRTLLAKSVF
SIGKVFRTMLTKSSF

SEQ ID NO: 259616 - protein, 15 aa, Artificial Sequence
  Description of Artificial Sequence: Synthetic peptide
  Seed: SIGKVCRTLLAKSVF
SIGKVFRTMLTKSTF

SEQ ID NO: 259617 - protein, 15 aa, Artificial Sequence
  Description of Artificial Sequence: Synthetic peptide
  Seed: SIGKVCRTLLAKSVF
SIGKVFRTMLTKSVF

SEQ ID NO: 259618 - protein, 15 aa, Artificial Sequence
  Description of Artificial Sequence: Synthetic peptide
  Seed: SIGKVCRTLLAKSVF
SIGKVFRTMLTKSWF

SEQ ID NO: 259619 - protein, 15 aa, Artificial Sequence
  Description of Artificial Sequence: Synthetic peptide
  Seed: SIGKVCRTLLAKSVF
SIGKVFRTMLTKSYF

SEQ ID NO: 259620 - protein, 15 aa, Artificial Sequence
  Description of Artificial Sequence: Synthetic peptide
  Seed: SIGKVCRTLLAKSVF
SIGKVFRTMLVKSAF

SEQ ID NO: 259621 - protein, 15 aa, Artificial Sequence
  Description of Artificial Sequence: Synthetic peptide
  Seed: SIGKVCRTLLAKSVF
SIGKVFRTMLVKSCF

SEQ ID NO: 259622 - protein, 15 aa, Artificial Sequence
  Description of Artificial Sequence: Synthetic peptide
  Seed: SIGKVCRTLLAKSVF
SIGKVFRTMLVKSDF

SEQ ID NO: 259623 - protein, 15 aa, Artificial Sequence
  Description of Artificial Sequence: Synthetic peptide
  Seed: SIGKVCRTLLAKSVF
SIGKVFRTMLVKSEF

SEQ ID NO: 259624 - protein, 15 aa, Artificial Sequence
  Description of Artificial Sequence: Synthetic peptide
  Seed: SIGKVCRTLLAKSVF
SIGKVFRTMLVKSGF

SEQ ID NO: 259625 - protein, 15 aa, Artificial Sequence
  Description of Artificial Sequence: Synthetic peptide
  Seed: SIGKVCRTLLAKSVF
SIGKVFRTMLVKSHF

SEQ ID NO: 259626 - protein, 15 aa, Artificial Sequence
  Description of Artificial Sequence: Synthetic peptide
  Seed: SIGKVCRTLLAKSVF
SIGKVFRTMLVKSIF

SEQ ID NO: 259627 - protein, 15 aa, Artificial Sequence
  Description of Artificial Sequence: Synthetic peptide
  Seed: SIGKVCRTLLAKSVF
SIGKVFRTMLVKSLF

SEQ ID NO: 259628 - protein, 15 aa, Artificial Sequence
  Description of Artificial Sequence: Synthetic peptide
  Seed: SIGKVCRTLLAKSVF
SIGKVFRTMLVKSMF

SEQ ID NO: 259629 - protein, 15 aa, Artificial Sequence
  Description of Artificial Sequence: Synthetic peptide
  Seed: SIGKVCRTLLAKSVF
SIGKVFRTMLVKSNF

SEQ ID NO: 259630 - protein, 15 aa, Artificial Sequence
  Description of Artificial Sequence: Synthetic peptide
  Seed: SIGKVCRTLLAKSVF
SIGKVFRTMLVKSPF

SEQ ID NO: 259631 - protein, 15 aa, Artificial Sequence
  Description of Artificial Sequence: Synthetic peptide
  Seed: SIGKVCRTLLAKSVF
SIGKVFRTMLVKSQF

SEQ ID NO: 259632 - protein, 15 aa, Artificial Sequence
  Description of Artificial Sequence: Synthetic peptide
  Seed: SIGKVCRTLLAKSVF
SIGKVFRTMLVKSSF

SEQ ID NO: 259633 - protein, 15 aa, Artificial Sequence
  Description of Artificial Sequence: Synthetic peptide
  Seed: SIGKVCRTLLAKSVF
SIGKVFRTMLVKSTF

SEQ ID NO: 259634 - protein, 15 aa, Artificial Sequence
  Description of Artificial Sequence: Synthetic peptide
  Seed: SIGKVCRTLLAKSVF
SIGKVFRTMLVKSVF

SEQ ID NO: 259635 - protein, 15 aa, Artificial Sequence
  Description of Artificial Sequence: Synthetic peptide
  Seed: SIGKVCRTLLAKSVF
SIGKVFRTMLWKSFF

SEQ ID NO: 259636 - protein, 15 aa, Artificial Sequence
  Description of Artificial Sequence: Synthetic peptide
  Seed: SIGKVCRTLLAKSVF
SIGKVFRTMLWKSIF

SEQ ID NO: 259637 - protein, 15 aa, Artificial Sequence
  Description of Artificial Sequence: Synthetic peptide
  Seed: SIGKVCRTLLAKSVF
SIGKVFRTMLWKSLF

SEQ ID NO: 259638 - protein, 15 aa, Artificial Sequence
  Description of Artificial Sequence: Synthetic peptide
  Seed: SIGKVCRTLLAKSVF
SIGKVFRTMLWKSVF

SEQ ID NO: 259639 - protein, 15 aa, Artificial Sequence
  Description of Artificial Sequence: Synthetic peptide
  Seed: SIGKVCRTLLAKSVF
SIGKVFRTMLYKSFF

SEQ ID NO: 259640 - protein, 15 aa, Artificial Sequence
  Description of Artificial Sequence: Synthetic peptide
  Seed: SIGKVCRTLLAKSVF
SIGKVFRTMLYKSIF

SEQ ID NO: 259641 - protein, 15 aa, Artificial Sequence
  Description of Artificial Sequence: Synthetic peptide
  Seed: SIGKVCRTLLAKSVF
SIGKVFRTMLYKSLF

SEQ ID NO: 259642 - protein, 15 aa, Artificial Sequence
  Description of Artificial Sequence: Synthetic peptide
  Seed: SIGKVCRTLLAKSVF
SIGKVFRTMLYKSMF

SEQ ID NO: 259643 - protein, 15 aa, Artificial Sequence
  Description of Artificial Sequence: Synthetic peptide
  Seed: SIGKVCRTLLAKSVF
SIGKVFRTMLYKSVF

SEQ ID NO: 259644 - protein, 15 aa, Artificial Sequence
  Description of Artificial Sequence: Synthetic peptide
  Seed: SIGKVCRTLLAKSVF
SIGKVFRTNLAKSAF

SEQ ID NO: 259645 - protein, 15 aa, Artificial Sequence
  Description of Artificial Sequence: Synthetic peptide
  Seed: SIGKVCRTLLAKSVF
SIGKVFRTNLAKSIF

SEQ ID NO: 259646 - protein, 15 aa, Artificial Sequence
  Description of Artificial Sequence: Synthetic peptide
  Seed: SIGKVCRTLLAKSVF
SIGKVFRTNLAKSLF

SEQ ID NO: 259647 - protein, 15 aa, Artificial Sequence
  Description of Artificial Sequence: Synthetic peptide
  Seed: SIGKVCRTLLAKSVF
SIGKVFRTNLAKSMF

SEQ ID NO: 259648 - protein, 15 aa, Artificial Sequence
  Description of Artificial Sequence: Synthetic peptide
  Seed: SIGKVCRTLLAKSVF
SIGKVFRTNLAKSTF

SEQ ID NO: 259649 - protein, 15 aa, Artificial Sequence
  Description of Artificial Sequence: Synthetic peptide
  Seed: SIGKVCRTLLAKSVF
SIGKVFRTNLAKSVF

SEQ ID NO: 259650 - protein, 15 aa, Artificial Sequence
  Description of Artificial Sequence: Synthetic peptide
  Seed: SIGKVCRTLLAKSVF
SIGKVFRTNLFKSAF

SEQ ID NO: 259651 - protein, 15 aa, Artificial Sequence
  Description of Artificial Sequence: Synthetic peptide
  Seed: SIGKVCRTLLAKSVF
SIGKVFRTNLFKSDF

SEQ ID NO: 259652 - protein, 15 aa, Artificial Sequence
  Description of Artificial Sequence: Synthetic peptide
  Seed: SIGKVCRTLLAKSVF
SIGKVFRTNLFKSEF

SEQ ID NO: 259653 - protein, 15 aa, Artificial Sequence
  Description of Artificial Sequence: Synthetic peptide
  Seed: SIGKVCRTLLAKSVF
SIGKVFRTNLFKSFF

SEQ ID NO: 259654 - protein, 15 aa, Artificial Sequence
  Description of Artificial Sequence: Synthetic peptide
  Seed: SIGKVCRTLLAKSVF
SIGKVFRTNLFKSIF

SEQ ID NO: 259655 - protein, 15 aa, Artificial Sequence
  Description of Artificial Sequence: Synthetic peptide
  Seed: SIGKVCRTLLAKSVF
SIGKVFRTNLFKSLF

SEQ ID NO: 259656 - protein, 15 aa, Artificial Sequence
  Description of Artificial Sequence: Synthetic peptide
  Seed: SIGKVCRTLLAKSVF
SIGKVFRTNLFKSMF

SEQ ID NO: 259657 - protein, 15 aa, Artificial Sequence
  Description of Artificial Sequence: Synthetic peptide
  Seed: SIGKVCRTLLAKSVF
SIGKVFRTNLFKSNF

SEQ ID NO: 259658 - protein, 15 aa, Artificial Sequence
  Description of Artificial Sequence: Synthetic peptide
  Seed: SIGKVCRTLLAKSVF
SIGKVFRTNLFKSSF

SEQ ID NO: 259659 - protein, 15 aa, Artificial Sequence
  Description of Artificial Sequence: Synthetic peptide
  Seed: SIGKVCRTLLAKSVF
SIGKVFRTNLFKSTF

SEQ ID NO: 259660 - protein, 15 aa, Artificial Sequence
  Description of Artificial Sequence: Synthetic peptide
  Seed: SIGKVCRTLLAKSVF
SIGKVFRTNLFKSVF

SEQ ID NO: 259661 - protein, 15 aa, Artificial Sequence
  Description of Artificial Sequence: Synthetic peptide
  Seed: SIGKVCRTLLAKSVF
SIGKVFRTNLFKSWF

SEQ ID NO: 259662 - protein, 15 aa, Artificial Sequence
  Description of Artificial Sequence: Synthetic peptide
  Seed: SIGKVCRTLLAKSVF
SIGKVFRTNLFKSYF

SEQ ID NO: 259663 - protein, 15 aa, Artificial Sequence
  Description of Artificial Sequence: Synthetic peptide
  Seed: SIGKVCRTLLAKSVF
SIGKVFRTNLGKSIF

SEQ ID NO: 259664 - protein, 15 aa, Artificial Sequence
  Description of Artificial Sequence: Synthetic peptide
  Seed: SIGKVCRTLLAKSVF
SIGKVFRTNLGKSLF

SEQ ID NO: 259665 - protein, 15 aa, Artificial Sequence
  Description of Artificial Sequence: Synthetic peptide
  Seed: SIGKVCRTLLAKSVF
SIGKVFRTNLGKSVF

SEQ ID NO: 259666 - protein, 15 aa, Artificial Sequence
  Description of Artificial Sequence: Synthetic peptide
  Seed: SIGKVCRTLLAKSVF
SIGKVFRTNLLKSFF

SEQ ID NO: 259667 - protein, 15 aa, Artificial Sequence
  Description of Artificial Sequence: Synthetic peptide
  Seed: SIGKVCRTLLAKSVF
SIGKVFRTNLLKSIF

SEQ ID NO: 259668 - protein, 15 aa, Artificial Sequence
  Description of Artificial Sequence: Synthetic peptide
  Seed: SIGKVCRTLLAKSVF
SIGKVFRTNLLKSLF

SEQ ID NO: 259669 - protein, 15 aa, Artificial Sequence
  Description of Artificial Sequence: Synthetic peptide
  Seed: SIGKVCRTLLAKSVF
SIGKVFRTNLLKSMF

SEQ ID NO: 259670 - protein, 15 aa, Artificial Sequence
  Description of Artificial Sequence: Synthetic peptide
  Seed: SIGKVCRTLLAKSVF
SIGKVFRTNLLKSVF

SEQ ID NO: 259671 - protein, 15 aa, Artificial Sequence
  Description of Artificial Sequence: Synthetic peptide
  Seed: SIGKVCRTLLAKSVF
SIGKVFRTNLPKSIF

SEQ ID NO: 259672 - protein, 15 aa, Artificial Sequence
  Description of Artificial Sequence: Synthetic peptide
  Seed: SIGKVCRTLLAKSVF
SIGKVFRTNLPKSLF

SEQ ID NO: 259673 - protein, 15 aa, Artificial Sequence
  Description of Artificial Sequence: Synthetic peptide
  Seed: SIGKVCRTLLAKSVF
SIGKVFRTNLPKSVF

SEQ ID NO: 259674 - protein, 15 aa, Artificial Sequence
  Description of Artificial Sequence: Synthetic peptide
  Seed: SIGKVCRTLLAKSVF
SIGKVFRTNLSKSIF

SEQ ID NO: 259675 - protein, 15 aa, Artificial Sequence
  Description of Artificial Sequence: Synthetic peptide
  Seed: SIGKVCRTLLAKSVF
SIGKVFRTNLSKSLF

SEQ ID NO: 259676 - protein, 15 aa, Artificial Sequence
  Description of Artificial Sequence: Synthetic peptide
  Seed: SIGKVCRTLLAKSVF
SIGKVFRTNLSKSVF

SEQ ID NO: 259677 - protein, 15 aa, Artificial Sequence
  Description of Artificial Sequence: Synthetic peptide
  Seed: SIGKVCRTLLAKSVF
SIGKVFRTNLWKSIF

SEQ ID NO: 259678 - protein, 15 aa, Artificial Sequence
  Description of Artificial Sequence: Synthetic peptide
  Seed: SIGKVCRTLLAKSVF
SIGKVFRTNLWKSLF

SEQ ID NO: 259679 - protein, 15 aa, Artificial Sequence
  Description of Artificial Sequence: Synthetic peptide
  Seed: SIGKVCRTLLAKSVF
SIGKVFRTNLWKSVF

SEQ ID NO: 259680 - protein, 15 aa, Artificial Sequence
  Description of Artificial Sequence: Synthetic peptide
  Seed: SIGKVCRTLLAKSVF
SIGKVFRTNLYKSIF

SEQ ID NO: 259681 - protein, 15 aa, Artificial Sequence
  Description of Artificial Sequence: Synthetic peptide
  Seed: SIGKVCRTLLAKSVF
SIGKVFRTNLYKSLF

SEQ ID NO: 259682 - protein, 15 aa, Artificial Sequence
  Description of Artificial Sequence: Synthetic peptide
  Seed: SIGKVCRTLLAKSVF
SIGKVFRTNLYKSVF

SEQ ID NO: 259683 - protein, 15 aa, Artificial Sequence
  Description of Artificial Sequence: Synthetic peptide
  Seed: SIGKVCRTLLAKSVF
SIGKVFRTPLFKSFF

SEQ ID NO: 259684 - protein, 15 aa, Artificial Sequence
  Description of Artificial Sequence: Synthetic peptide
  Seed: SIGKVCRTLLAKSVF
SIGKVFRTPLFKSIF

SEQ ID NO: 259685 - protein, 15 aa, Artificial Sequence
  Description of Artificial Sequence: Synthetic peptide
  Seed: SIGKVCRTLLAKSVF
SIGKVFRTPLFKSLF

SEQ ID NO: 259686 - protein, 15 aa, Artificial Sequence
  Description of Artificial Sequence: Synthetic peptide
  Seed: SIGKVCRTLLAKSVF
SIGKVFRTPLFKSMF

SEQ ID NO: 259687 - protein, 15 aa, Artificial Sequence
  Description of Artificial Sequence: Synthetic peptide
  Seed: SIGKVCRTLLAKSVF
SIGKVFRTPLFKSVF

SEQ ID NO: 259688 - protein, 15 aa, Artificial Sequence
  Description of Artificial Sequence: Synthetic peptide
  Seed: SIGKVCRTLLAKSVF
SIGKVFRTPLLKSIF

SEQ ID NO: 259689 - protein, 15 aa, Artificial Sequence
  Description of Artificial Sequence: Synthetic peptide
  Seed: SIGKVCRTLLAKSVF
SIGKVFRTQLAKSAF

SEQ ID NO: 259690 - protein, 15 aa, Artificial Sequence
  Description of Artificial Sequence: Synthetic peptide
  Seed: SIGKVCRTLLAKSVF
SIGKVFRTQLAKSCF

SEQ ID NO: 259691 - protein, 15 aa, Artificial Sequence
  Description of Artificial Sequence: Synthetic peptide
  Seed: SIGKVCRTLLAKSVF
SIGKVFRTQLAKSFF

SEQ ID NO: 259692 - protein, 15 aa, Artificial Sequence
  Description of Artificial Sequence: Synthetic peptide
  Seed: SIGKVCRTLLAKSVF
SIGKVFRTQLAKSGF

SEQ ID NO: 259693 - protein, 15 aa, Artificial Sequence
  Description of Artificial Sequence: Synthetic peptide
  Seed: SIGKVCRTLLAKSVF
SIGKVFRTQLAKSIF

SEQ ID NO: 259694 - protein, 15 aa, Artificial Sequence
  Description of Artificial Sequence: Synthetic peptide
  Seed: SIGKVCRTLLAKSVF
SIGKVFRTQLAKSLF

SEQ ID NO: 259695 - protein, 15 aa, Artificial Sequence
  Description of Artificial Sequence: Synthetic peptide
  Seed: SIGKVCRTLLAKSVF
SIGKVFRTQLAKSMF

SEQ ID NO: 259696 - protein, 15 aa, Artificial Sequence
  Description of Artificial Sequence: Synthetic peptide
  Seed: SIGKVCRTLLAKSVF
SIGKVFRTQLAKSNF

SEQ ID NO: 259697 - protein, 15 aa, Artificial Sequence
  Description of Artificial Sequence: Synthetic peptide
  Seed: SIGKVCRTLLAKSVF
SIGKVFRTQLAKSSF

SEQ ID NO: 259698 - protein, 15 aa, Artificial Sequence
  Description of Artificial Sequence: Synthetic peptide
  Seed: SIGKVCRTLLAKSVF
SIGKVFRTQLAKSTF

SEQ ID NO: 259699 - protein, 15 aa, Artificial Sequence
  Description of Artificial Sequence: Synthetic peptide
  Seed: SIGKVCRTLLAKSVF
SIGKVFRTQLAKSVF

SEQ ID NO: 259700 - protein, 15 aa, Artificial Sequence
  Description of Artificial Sequence: Synthetic peptide
  Seed: SIGKVCRTLLAKSVF
SIGKVFRTQLFKSAF

SEQ ID NO: 259701 - protein, 15 aa, Artificial Sequence
  Description of Artificial Sequence: Synthetic peptide
  Seed: SIGKVCRTLLAKSVF
SIGKVFRTQLFKSDF

SEQ ID NO: 259702 - protein, 15 aa, Artificial Sequence
  Description of Artificial Sequence: Synthetic peptide
  Seed: SIGKVCRTLLAKSVF
SIGKVFRTQLFKSEF

SEQ ID NO: 259703 - protein, 15 aa, Artificial Sequence
  Description of Artificial Sequence: Synthetic peptide
  Seed: SIGKVCRTLLAKSVF
SIGKVFRTQLFKSFF

SEQ ID NO: 259704 - protein, 15 aa, Artificial Sequence
  Description of Artificial Sequence: Synthetic peptide
  Seed: SIGKVCRTLLAKSVF
SIGKVFRTQLFKSIF

SEQ ID NO: 259705 - protein, 15 aa, Artificial Sequence
  Description of Artificial Sequence: Synthetic peptide
  Seed: SIGKVCRTLLAKSVF
SIGKVFRTQLFKSLF

SEQ ID NO: 259706 - protein, 15 aa, Artificial Sequence
  Description of Artificial Sequence: Synthetic peptide
  Seed: SIGKVCRTLLAKSVF
SIGKVFRTQLFKSMF

SEQ ID NO: 259707 - protein, 15 aa, Artificial Sequence
  Description of Artificial Sequence: Synthetic peptide
  Seed: SIGKVCRTLLAKSVF
SIGKVFRTQLFKSNF

SEQ ID NO: 259708 - protein, 15 aa, Artificial Sequence
  Description of Artificial Sequence: Synthetic peptide
  Seed: SIGKVCRTLLAKSVF
SIGKVFRTQLFKSPF

SEQ ID NO: 259709 - protein, 15 aa, Artificial Sequence
  Description of Artificial Sequence: Synthetic peptide
  Seed: SIGKVCRTLLAKSVF
SIGKVFRTQLFKSSF

SEQ ID NO: 259710 - protein, 15 aa, Artificial Sequence
  Description of Artificial Sequence: Synthetic peptide
  Seed: SIGKVCRTLLAKSVF
SIGKVFRTQLFKSTF

SEQ ID NO: 259711 - protein, 15 aa, Artificial Sequence
  Description of Artificial Sequence: Synthetic peptide
  Seed: SIGKVCRTLLAKSVF
SIGKVFRTQLFKSVF

SEQ ID NO: 259712 - protein, 15 aa, Artificial Sequence
  Description of Artificial Sequence: Synthetic peptide
  Seed: SIGKVCRTLLAKSVF
SIGKVFRTQLFKSWF

SEQ ID NO: 259713 - protein, 15 aa, Artificial Sequence
  Description of Artificial Sequence: Synthetic peptide
  Seed: SIGKVCRTLLAKSVF
SIGKVFRTQLFKSYF

SEQ ID NO: 259714 - protein, 15 aa, Artificial Sequence
  Description of Artificial Sequence: Synthetic peptide
  Seed: SIGKVCRTLLAKSVF
SIGKVFRTQLGKSAF

SEQ ID NO: 259715 - protein, 15 aa, Artificial Sequence
  Description of Artificial Sequence: Synthetic peptide
  Seed: SIGKVCRTLLAKSVF
SIGKVFRTQLGKSIF

SEQ ID NO: 259716 - protein, 15 aa, Artificial Sequence
  Description of Artificial Sequence: Synthetic peptide
  Seed: SIGKVCRTLLAKSVF
SIGKVFRTQLGKSLF

SEQ ID NO: 259717 - protein, 15 aa, Artificial Sequence
  Description of Artificial Sequence: Synthetic peptide
  Seed: SIGKVCRTLLAKSVF
SIGKVFRTQLGKSMF

SEQ ID NO: 259718 - protein, 15 aa, Artificial Sequence
  Description of Artificial Sequence: Synthetic peptide
  Seed: SIGKVCRTLLAKSVF
SIGKVFRTQLGKSSF

SEQ ID NO: 259719 - protein, 15 aa, Artificial Sequence
  Description of Artificial Sequence: Synthetic peptide
  Seed: SIGKVCRTLLAKSVF
SIGKVFRTQLGKSTF

SEQ ID NO: 259720 - protein, 15 aa, Artificial Sequence
  Description of Artificial Sequence: Synthetic peptide
  Seed: SIGKVCRTLLAKSVF
SIGKVFRTQLGKSVF

SEQ ID NO: 259721 - protein, 15 aa, Artificial Sequence
  Description of Artificial Sequence: Synthetic peptide
  Seed: SIGKVCRTLLAKSVF
SIGKVFRTQLIKSNF

SEQ ID NO: 259722 - protein, 15 aa, Artificial Sequence
  Description of Artificial Sequence: Synthetic peptide
  Seed: SIGKVCRTLLAKSVF
SIGKVFRTQLLKSFF

SEQ ID NO: 259723 - protein, 15 aa, Artificial Sequence
  Description of Artificial Sequence: Synthetic peptide
  Seed: SIGKVCRTLLAKSVF
SIGKVFRTQLLKSIF

SEQ ID NO: 259724 - protein, 15 aa, Artificial Sequence
  Description of Artificial Sequence: Synthetic peptide
  Seed: SIGKVCRTLLAKSVF
SIGKVFRTQLLKSLF

SEQ ID NO: 259725 - protein, 15 aa, Artificial Sequence
  Description of Artificial Sequence: Synthetic peptide
  Seed: SIGKVCRTLLAKSVF
SIGKVFRTQLLKSMF

SEQ ID NO: 259726 - protein, 15 aa, Artificial Sequence
  Description of Artificial Sequence: Synthetic peptide
  Seed: SIGKVCRTLLAKSVF
SIGKVFRTQLLKSVF

SEQ ID NO: 259727 - protein, 15 aa, Artificial Sequence
  Description of Artificial Sequence: Synthetic peptide
  Seed: SIGKVCRTLLAKSVF
SIGKVFRTQLMKSIF

SEQ ID NO: 259728 - protein, 15 aa, Artificial Sequence
  Description of Artificial Sequence: Synthetic peptide
  Seed: SIGKVCRTLLAKSVF
SIGKVFRTQLMKSLF

SEQ ID NO: 259729 - protein, 15 aa, Artificial Sequence
  Description of Artificial Sequence: Synthetic peptide
  Seed: SIGKVCRTLLAKSVF
SIGKVFRTQLNKSAF

SEQ ID NO: 259730 - protein, 15 aa, Artificial Sequence
  Description of Artificial Sequence: Synthetic peptide
  Seed: SIGKVCRTLLAKSVF
SIGKVFRTQLNKSIF

SEQ ID NO: 259731 - protein, 15 aa, Artificial Sequence
  Description of Artificial Sequence: Synthetic peptide
  Seed: SIGKVCRTLLAKSVF
SIGKVFRTQLNKSLF

SEQ ID NO: 259732 - protein, 15 aa, Artificial Sequence
  Description of Artificial Sequence: Synthetic peptide
  Seed: SIGKVCRTLLAKSVF
SIGKVFRTQLNKSVF

SEQ ID NO: 259733 - protein, 15 aa, Artificial Sequence
  Description of Artificial Sequence: Synthetic peptide
  Seed: SIGKVCRTLLAKSVF
SIGKVFRTQLPKSAF

SEQ ID NO: 259734 - protein, 15 aa, Artificial Sequence
  Description of Artificial Sequence: Synthetic peptide
  Seed: SIGKVCRTLLAKSVF
SIGKVFRTQLPKSIF

SEQ ID NO: 259735 - protein, 15 aa, Artificial Sequence
  Description of Artificial Sequence: Synthetic peptide
  Seed: SIGKVCRTLLAKSVF
SIGKVFRTQLPKSLF

SEQ ID NO: 259736 - protein, 15 aa, Artificial Sequence
  Description of Artificial Sequence: Synthetic peptide
  Seed: SIGKVCRTLLAKSVF
SIGKVFRTQLPKSNF

SEQ ID NO: 259737 - protein, 15 aa, Artificial Sequence
  Description of Artificial Sequence: Synthetic peptide
  Seed: SIGKVCRTLLAKSVF
SIGKVFRTQLPKSSF

SEQ ID NO: 259738 - protein, 15 aa, Artificial Sequence
  Description of Artificial Sequence: Synthetic peptide
  Seed: SIGKVCRTLLAKSVF
SIGKVFRTQLPKSVF

SEQ ID NO: 259739 - protein, 15 aa, Artificial Sequence
  Description of Artificial Sequence: Synthetic peptide
  Seed: SIGKVCRTLLAKSVF
SIGKVFRTQLSKSAF

SEQ ID NO: 259740 - protein, 15 aa, Artificial Sequence
  Description of Artificial Sequence: Synthetic peptide
  Seed: SIGKVCRTLLAKSVF
SIGKVFRTQLSKSIF

SEQ ID NO: 259741 - protein, 15 aa, Artificial Sequence
  Description of Artificial Sequence: Synthetic peptide
  Seed: SIGKVCRTLLAKSVF
SIGKVFRTQLSKSLF

SEQ ID NO: 259742 - protein, 15 aa, Artificial Sequence
  Description of Artificial Sequence: Synthetic peptide
  Seed: SIGKVCRTLLAKSVF
SIGKVFRTQLSKSMF

SEQ ID NO: 259743 - protein, 15 aa, Artificial Sequence
  Description of Artificial Sequence: Synthetic peptide
  Seed: SIGKVCRTLLAKSVF
SIGKVFRTQLSKSNF

SEQ ID NO: 259744 - protein, 15 aa, Artificial Sequence
  Description of Artificial Sequence: Synthetic peptide
  Seed: SIGKVCRTLLAKSVF
SIGKVFRTQLSKSSF

SEQ ID NO: 259745 - protein, 15 aa, Artificial Sequence
  Description of Artificial Sequence: Synthetic peptide
  Seed: SIGKVCRTLLAKSVF
SIGKVFRTQLSKSTF

SEQ ID NO: 259746 - protein, 15 aa, Artificial Sequence
  Description of Artificial Sequence: Synthetic peptide
  Seed: SIGKVCRTLLAKSVF
SIGKVFRTQLSKSVF

SEQ ID NO: 259747 - protein, 15 aa, Artificial Sequence
  Description of Artificial Sequence: Synthetic peptide
  Seed: SIGKVCRTLLAKSVF
SIGKVFRTQLTKSAF

SEQ ID NO: 259748 - protein, 15 aa, Artificial Sequence
  Description of Artificial Sequence: Synthetic peptide
  Seed: SIGKVCRTLLAKSVF
SIGKVFRTQLTKSIF

SEQ ID NO: 259749 - protein, 15 aa, Artificial Sequence
  Description of Artificial Sequence: Synthetic peptide
  Seed: SIGKVCRTLLAKSVF
SIGKVFRTQLTKSLF

SEQ ID NO: 259750 - protein, 15 aa, Artificial Sequence
  Description of Artificial Sequence: Synthetic peptide
  Seed: SIGKVCRTLLAKSVF
SIGKVFRTQLTKSNF

SEQ ID NO: 259751 - protein, 15 aa, Artificial Sequence
  Description of Artificial Sequence: Synthetic peptide
  Seed: SIGKVCRTLLAKSVF
SIGKVFRTQLTKSSF

SEQ ID NO: 259752 - protein, 15 aa, Artificial Sequence
  Description of Artificial Sequence: Synthetic peptide
  Seed: SIGKVCRTLLAKSVF
SIGKVFRTQLTKSVF

SEQ ID NO: 259753 - protein, 15 aa, Artificial Sequence
  Description of Artificial Sequence: Synthetic peptide
  Seed: SIGKVCRTLLAKSVF
SIGKVFRTQLVKSAF

SEQ ID NO: 259754 - protein, 15 aa, Artificial Sequence
  Description of Artificial Sequence: Synthetic peptide
  Seed: SIGKVCRTLLAKSVF
SIGKVFRTQLVKSIF

SEQ ID NO: 259755 - protein, 15 aa, Artificial Sequence
  Description of Artificial Sequence: Synthetic peptide
  Seed: SIGKVCRTLLAKSVF
SIGKVFRTQLVKSLF

SEQ ID NO: 259756 - protein, 15 aa, Artificial Sequence
  Description of Artificial Sequence: Synthetic peptide
  Seed: SIGKVCRTLLAKSVF
SIGKVFRTQLVKSNF

SEQ ID NO: 259757 - protein, 15 aa, Artificial Sequence
  Description of Artificial Sequence: Synthetic peptide
  Seed: SIGKVCRTLLAKSVF
SIGKVFRTQLVKSSF

SEQ ID NO: 259758 - protein, 15 aa, Artificial Sequence
  Description of Artificial Sequence: Synthetic peptide
  Seed: SIGKVCRTLLAKSVF
SIGKVFRTQLVKSVF

SEQ ID NO: 259759 - protein, 15 aa, Artificial Sequence
  Description of Artificial Sequence: Synthetic peptide
  Seed: SIGKVCRTLLAKSVF
SIGKVFRTQLWKSIF

SEQ ID NO: 259760 - protein, 15 aa, Artificial Sequence
  Description of Artificial Sequence: Synthetic peptide
  Seed: SIGKVCRTLLAKSVF
SIGKVFRTQLWKSVF

SEQ ID NO: 259761 - protein, 15 aa, Artificial Sequence
  Description of Artificial Sequence: Synthetic peptide
  Seed: SIGKVCRTLLAKSVF
SIGKVFRTQLYKSIF

SEQ ID NO: 259762 - protein, 15 aa, Artificial Sequence
  Description of Artificial Sequence: Synthetic peptide
  Seed: SIGKVCRTLLAKSVF
SIGKVFRTQLYKSLF

SEQ ID NO: 259763 - protein, 15 aa, Artificial Sequence
  Description of Artificial Sequence: Synthetic peptide
  Seed: SIGKVCRTLLAKSVF
SIGKVFRTQLYKSVF

SEQ ID NO: 259764 - protein, 15 aa, Artificial Sequence
  Description of Artificial Sequence: Synthetic peptide
  Seed: SIGKVCRTLLAKSVF
SIGKVFRTRLFKSAF

SEQ ID NO: 259765 - protein, 15 aa, Artificial Sequence
  Description of Artificial Sequence: Synthetic peptide
  Seed: SIGKVCRTLLAKSVF
SIGKVFRTRLFKSFF

SEQ ID NO: 259766 - protein, 15 aa, Artificial Sequence
  Description of Artificial Sequence: Synthetic peptide
  Seed: SIGKVCRTLLAKSVF
SIGKVFRTRLFKSIF

SEQ ID NO: 259767 - protein, 15 aa, Artificial Sequence
  Description of Artificial Sequence: Synthetic peptide
  Seed: SIGKVCRTLLAKSVF
SIGKVFRTRLFKSLF

SEQ ID NO: 259768 - protein, 15 aa, Artificial Sequence
  Description of Artificial Sequence: Synthetic peptide
  Seed: SIGKVCRTLLAKSVF
SIGKVFRTRLFKSMF

SEQ ID NO: 259769 - protein, 15 aa, Artificial Sequence
  Description of Artificial Sequence: Synthetic peptide
  Seed: SIGKVCRTLLAKSVF
SIGKVFRTRLFKSVF

SEQ ID NO: 259770 - protein, 15 aa, Artificial Sequence
  Description of Artificial Sequence: Synthetic peptide
  Seed: SIGKVCRTLLAKSVF
SIGKVFRTRLFKSYF

SEQ ID NO: 259771 - protein, 15 aa, Artificial Sequence
  Description of Artificial Sequence: Synthetic peptide
  Seed: SIGKVCRTLLAKSVF
SIGKVFRTRLLKSFF

SEQ ID NO: 259772 - protein, 15 aa, Artificial Sequence
  Description of Artificial Sequence: Synthetic peptide
  Seed: SIGKVCRTLLAKSVF
SIGKVFRTRLLKSIF

SEQ ID NO: 259773 - protein, 15 aa, Artificial Sequence
  Description of Artificial Sequence: Synthetic peptide
  Seed: SIGKVCRTLLAKSVF
SIGKVFRTRLLKSLF

SEQ ID NO: 259774 - protein, 15 aa, Artificial Sequence
  Description of Artificial Sequence: Synthetic peptide
  Seed: SIGKVCRTLLAKSVF
SIGKVFRTRLLKSVF

SEQ ID NO: 259775 - protein, 15 aa, Artificial Sequence
  Description of Artificial Sequence: Synthetic peptide
  Seed: SIGKVCRTLLAKSVF
SIGKVFRTSLAKSAF

SEQ ID NO: 259776 - protein, 15 aa, Artificial Sequence
  Description of Artificial Sequence: Synthetic peptide
  Seed: SIGKVCRTLLAKSVF
SIGKVFRTSLAKSFF

SEQ ID NO: 259777 - protein, 15 aa, Artificial Sequence
  Description of Artificial Sequence: Synthetic peptide
  Seed: SIGKVCRTLLAKSVF
SIGKVFRTSLAKSGF

SEQ ID NO: 259778 - protein, 15 aa, Artificial Sequence
  Description of Artificial Sequence: Synthetic peptide
  Seed: SIGKVCRTLLAKSVF
SIGKVFRTSLAKSIF

SEQ ID NO: 259779 - protein, 15 aa, Artificial Sequence
  Description of Artificial Sequence: Synthetic peptide
  Seed: SIGKVCRTLLAKSVF
SIGKVFRTSLAKSLF

SEQ ID NO: 259780 - protein, 15 aa, Artificial Sequence
  Description of Artificial Sequence: Synthetic peptide
  Seed: SIGKVCRTLLAKSVF
SIGKVFRTSLAKSMF

SEQ ID NO: 259781 - protein, 15 aa, Artificial Sequence
  Description of Artificial Sequence: Synthetic peptide
  Seed: SIGKVCRTLLAKSVF
SIGKVFRTSLAKSNF

SEQ ID NO: 259782 - protein, 15 aa, Artificial Sequence
  Description of Artificial Sequence: Synthetic peptide
  Seed: SIGKVCRTLLAKSVF
SIGKVFRTSLAKSSF

SEQ ID NO: 259783 - protein, 15 aa, Artificial Sequence
  Description of Artificial Sequence: Synthetic peptide
  Seed: SIGKVCRTLLAKSVF
SIGKVFRTSLAKSTF

SEQ ID NO: 259784 - protein, 15 aa, Artificial Sequence
  Description of Artificial Sequence: Synthetic peptide
  Seed: SIGKVCRTLLAKSVF
SIGKVFRTSLAKSVF

SEQ ID NO: 259785 - protein, 15 aa, Artificial Sequence
  Description of Artificial Sequence: Synthetic peptide
  Seed: SIGKVCRTLLAKSVF
SIGKVFRTSLAKSWF

SEQ ID NO: 259786 - protein, 15 aa, Artificial Sequence
  Description of Artificial Sequence: Synthetic peptide
  Seed: SIGKVCRTLLAKSVF
SIGKVFRTSLAKSYF

SEQ ID NO: 259787 - protein, 15 aa, Artificial Sequence
  Description of Artificial Sequence: Synthetic peptide
  Seed: SIGKVCRTLLAKSVF
SIGKVFRTSLFKSAF

SEQ ID NO: 259788 - protein, 15 aa, Artificial Sequence
  Description of Artificial Sequence: Synthetic peptide
  Seed: SIGKVCRTLLAKSVF
SIGKVFRTSLFKSCF

SEQ ID NO: 259789 - protein, 15 aa, Artificial Sequence
  Description of Artificial Sequence: Synthetic peptide
  Seed: SIGKVCRTLLAKSVF
SIGKVFRTSLFKSDF

SEQ ID NO: 259790 - protein, 15 aa, Artificial Sequence
  Description of Artificial Sequence: Synthetic peptide
  Seed: SIGKVCRTLLAKSVF
SIGKVFRTSLFKSEF

SEQ ID NO: 259791 - protein, 15 aa, Artificial Sequence
  Description of Artificial Sequence: Synthetic peptide
  Seed: SIGKVCRTLLAKSVF
SIGKVFRTSLFKSFF

SEQ ID NO: 259792 - protein, 15 aa, Artificial Sequence
  Description of Artificial Sequence: Synthetic peptide
  Seed: SIGKVCRTLLAKSVF
SIGKVFRTSLFKSGF

SEQ ID NO: 259793 - protein, 15 aa, Artificial Sequence
  Description of Artificial Sequence: Synthetic peptide
  Seed: SIGKVCRTLLAKSVF
SIGKVFRTSLFKSHF

SEQ ID NO: 259794 - protein, 15 aa, Artificial Sequence
  Description of Artificial Sequence: Synthetic peptide
  Seed: SIGKVCRTLLAKSVF
SIGKVFRTSLFKSIF

SEQ ID NO: 259795 - protein, 15 aa, Artificial Sequence
  Description of Artificial Sequence: Synthetic peptide
  Seed: SIGKVCRTLLAKSVF
SIGKVFRTSLFKSMF

SEQ ID NO: 259796 - protein, 15 aa, Artificial Sequence
  Description of Artificial Sequence: Synthetic peptide
  Seed: SIGKVCRTLLAKSVF
SIGKVFRTSLFKSNF

SEQ ID NO: 259797 - protein, 15 aa, Artificial Sequence
  Description of Artificial Sequence: Synthetic peptide
  Seed: SIGKVCRTLLAKSVF
SIGKVFRTSLFKSPF

SEQ ID NO: 259798 - protein, 15 aa, Artificial Sequence
  Description of Artificial Sequence: Synthetic peptide
  Seed: SIGKVCRTLLAKSVF
SIGKVFRTSLFKSQF

SEQ ID NO: 259799 - protein, 15 aa, Artificial Sequence
  Description of Artificial Sequence: Synthetic peptide
  Seed: SIGKVCRTLLAKSVF
SIGKVFRTSLFKSRF

SEQ ID NO: 259800 - protein, 15 aa, Artificial Sequence
  Description of Artificial Sequence: Synthetic peptide
  Seed: SIGKVCRTLLAKSVF
SIGKVFRTSLFKSSF

SEQ ID NO: 259801 - protein, 15 aa, Artificial Sequence
  Description of Artificial Sequence: Synthetic peptide
  Seed: SIGKVCRTLLAKSVF
SIGKVFRTSLFKSTF

SEQ ID NO: 259802 - protein, 15 aa, Artificial Sequence
  Description of Artificial Sequence: Synthetic peptide
  Seed: SIGKVCRTLLAKSVF
SIGKVFRTSLFKSVF

SEQ ID NO: 259803 - protein, 15 aa, Artificial Sequence
  Description of Artificial Sequence: Synthetic peptide
  Seed: SIGKVCRTLLAKSVF
SIGKVFRTSLFKSWF

SEQ ID NO: 259804 - protein, 15 aa, Artificial Sequence
  Description of Artificial Sequence: Synthetic peptide
  Seed: SIGKVCRTLLAKSVF
SIGKVFRTSLFKSYF

SEQ ID NO: 259805 - protein, 15 aa, Artificial Sequence
  Description of Artificial Sequence: Synthetic peptide
  Seed: SIGKVCRTLLAKSVF
SIGKVFRTSLGKSAF

SEQ ID NO: 259806 - protein, 15 aa, Artificial Sequence
  Description of Artificial Sequence: Synthetic peptide
  Seed: SIGKVCRTLLAKSVF
SIGKVFRTSLGKSFF

SEQ ID NO: 259807 - protein, 15 aa, Artificial Sequence
  Description of Artificial Sequence: Synthetic peptide
  Seed: SIGKVCRTLLAKSVF
SIGKVFRTSLGKSIF

SEQ ID NO: 259808 - protein, 15 aa, Artificial Sequence
  Description of Artificial Sequence: Synthetic peptide
  Seed: SIGKVCRTLLAKSVF
SIGKVFRTSLGKSLF

SEQ ID NO: 259809 - protein, 15 aa, Artificial Sequence
  Description of Artificial Sequence: Synthetic peptide
  Seed: SIGKVCRTLLAKSVF
SIGKVFRTSLGKSMF

SEQ ID NO: 259810 - protein, 15 aa, Artificial Sequence
  Description of Artificial Sequence: Synthetic peptide
  Seed: SIGKVCRTLLAKSVF
SIGKVFRTSLGKSTF

SEQ ID NO: 259811 - protein, 15 aa, Artificial Sequence
  Description of Artificial Sequence: Synthetic peptide
  Seed: SIGKVCRTLLAKSVF
SIGKVFRTSLGKSVF

SEQ ID NO: 259812 - protein, 15 aa, Artificial Sequence
  Description of Artificial Sequence: Synthetic peptide
  Seed: SIGKVCRTLLAKSVF
SIGKVFRTSLIKSFF

SEQ ID NO: 259813 - protein, 15 aa, Artificial Sequence
  Description of Artificial Sequence: Synthetic peptide
  Seed: SIGKVCRTLLAKSVF
SIGKVFRTSLIKSIF

SEQ ID NO: 259814 - protein, 15 aa, Artificial Sequence
  Description of Artificial Sequence: Synthetic peptide
  Seed: SIGKVCRTLLAKSVF
SIGKVFRTSLIKSLF

SEQ ID NO: 259815 - protein, 15 aa, Artificial Sequence
  Description of Artificial Sequence: Synthetic peptide
  Seed: SIGKVCRTLLAKSVF
SIGKVFRTSLIKSVF

SEQ ID NO: 259816 - protein, 15 aa, Artificial Sequence
  Description of Artificial Sequence: Synthetic peptide
  Seed: SIGKVCRTLLAKSVF
SIGKVFRTSLLKSFF

SEQ ID NO: 259817 - protein, 15 aa, Artificial Sequence
  Description of Artificial Sequence: Synthetic peptide
  Seed: SIGKVCRTLLAKSVF
SIGKVFRTSLLKSIF

SEQ ID NO: 259818 - protein, 15 aa, Artificial Sequence
  Description of Artificial Sequence: Synthetic peptide
  Seed: SIGKVCRTLLAKSVF
SIGKVFRTSLLKSLF

SEQ ID NO: 259819 - protein, 15 aa, Artificial Sequence
  Description of Artificial Sequence: Synthetic peptide
  Seed: SIGKVCRTLLAKSVF
SIGKVFRTSLLKSMF

SEQ ID NO: 259820 - protein, 15 aa, Artificial Sequence
  Description of Artificial Sequence: Synthetic peptide
  Seed: SIGKVCRTLLAKSVF
SIGKVFRTSLLKSTF

SEQ ID NO: 259821 - protein, 15 aa, Artificial Sequence
  Description of Artificial Sequence: Synthetic peptide
  Seed: SIGKVCRTLLAKSVF
SIGKVFRTSLLKSVF

SEQ ID NO: 259822 - protein, 15 aa, Artificial Sequence
  Description of Artificial Sequence: Synthetic peptide
  Seed: SIGKVCRTLLAKSVF
SIGKVFRTSLLKSYF

SEQ ID NO: 259823 - protein, 15 aa, Artificial Sequence
  Description of Artificial Sequence: Synthetic peptide
  Seed: SIGKVCRTLLAKSVF
SIGKVFRTSLMKSFF

SEQ ID NO: 259824 - protein, 15 aa, Artificial Sequence
  Description of Artificial Sequence: Synthetic peptide
  Seed: SIGKVCRTLLAKSVF
SIGKVFRTSLMKSIF

SEQ ID NO: 259825 - protein, 15 aa, Artificial Sequence
  Description of Artificial Sequence: Synthetic peptide
  Seed: SIGKVCRTLLAKSVF
SIGKVFRTSLMKSLF

SEQ ID NO: 259826 - protein, 15 aa, Artificial Sequence
  Description of Artificial Sequence: Synthetic peptide
  Seed: SIGKVCRTLLAKSVF
SIGKVFRTSLMKSMF

SEQ ID NO: 259827 - protein, 15 aa, Artificial Sequence
  Description of Artificial Sequence: Synthetic peptide
  Seed: SIGKVCRTLLAKSVF
SIGKVFRTSLMKSVF

SEQ ID NO: 259828 - protein, 15 aa, Artificial Sequence
  Description of Artificial Sequence: Synthetic peptide
  Seed: SIGKVCRTLLAKSVF
SIGKVFRTSLNKSFF

SEQ ID NO: 259829 - protein, 15 aa, Artificial Sequence
  Description of Artificial Sequence: Synthetic peptide
  Seed: SIGKVCRTLLAKSVF
SIGKVFRTSLNKSIF

SEQ ID NO: 259830 - protein, 15 aa, Artificial Sequence
  Description of Artificial Sequence: Synthetic peptide
  Seed: SIGKVCRTLLAKSVF
SIGKVFRTSLNKSLF

SEQ ID NO: 259831 - protein, 15 aa, Artificial Sequence
  Description of Artificial Sequence: Synthetic peptide
  Seed: SIGKVCRTLLAKSVF
SIGKVFRTSLNKSVF

SEQ ID NO: 259832 - protein, 15 aa, Artificial Sequence
  Description of Artificial Sequence: Synthetic peptide
  Seed: SIGKVCRTLLAKSVF
SIGKVFRTSLPKSAF

SEQ ID NO: 259833 - protein, 15 aa, Artificial Sequence
  Description of Artificial Sequence: Synthetic peptide
  Seed: SIGKVCRTLLAKSVF
SIGKVFRTSLPKSFF

SEQ ID NO: 259834 - protein, 15 aa, Artificial Sequence
  Description of Artificial Sequence: Synthetic peptide
  Seed: SIGKVCRTLLAKSVF
SIGKVFRTSLPKSIF

SEQ ID NO: 259835 - protein, 15 aa, Artificial Sequence
  Description of Artificial Sequence: Synthetic peptide
  Seed: SIGKVCRTLLAKSVF
SIGKVFRTSLPKSLF

SEQ ID NO: 259836 - protein, 15 aa, Artificial Sequence
  Description of Artificial Sequence: Synthetic peptide
  Seed: SIGKVCRTLLAKSVF
SIGKVFRTSLPKSMF

SEQ ID NO: 259837 - protein, 15 aa, Artificial Sequence
  Description of Artificial Sequence: Synthetic peptide
  Seed: SIGKVCRTLLAKSVF
SIGKVFRTSLPKSNF

SEQ ID NO: 259838 - protein, 15 aa, Artificial Sequence
  Description of Artificial Sequence: Synthetic peptide
  Seed: SIGKVCRTLLAKSVF
SIGKVFRTSLPKSSF

SEQ ID NO: 259839 - protein, 15 aa, Artificial Sequence
  Description of Artificial Sequence: Synthetic peptide
  Seed: SIGKVCRTLLAKSVF
SIGKVFRTSLPKSVF

SEQ ID NO: 259840 - protein, 15 aa, Artificial Sequence
  Description of Artificial Sequence: Synthetic peptide
  Seed: SIGKVCRTLLAKSVF
SIGKVFRTSLSKSAF

SEQ ID NO: 259841 - protein, 15 aa, Artificial Sequence
  Description of Artificial Sequence: Synthetic peptide
  Seed: SIGKVCRTLLAKSVF
SIGKVFRTSLSKSFF

SEQ ID NO: 259842 - protein, 15 aa, Artificial Sequence
  Description of Artificial Sequence: Synthetic peptide
  Seed: SIGKVCRTLLAKSVF
SIGKVFRTSLSKSIF

SEQ ID NO: 259843 - protein, 15 aa, Artificial Sequence
  Description of Artificial Sequence: Synthetic peptide
  Seed: SIGKVCRTLLAKSVF
SIGKVFRTSLSKSLF

SEQ ID NO: 259844 - protein, 15 aa, Artificial Sequence
  Description of Artificial Sequence: Synthetic peptide
  Seed: SIGKVCRTLLAKSVF
SIGKVFRTSLSKSMF

SEQ ID NO: 259845 - protein, 15 aa, Artificial Sequence
  Description of Artificial Sequence: Synthetic peptide
  Seed: SIGKVCRTLLAKSVF
SIGKVFRTSLSKSNF

SEQ ID NO: 259846 - protein, 15 aa, Artificial Sequence
  Description of Artificial Sequence: Synthetic peptide
  Seed: SIGKVCRTLLAKSVF
SIGKVFRTSLSKSSF

SEQ ID NO: 259847 - protein, 15 aa, Artificial Sequence
  Description of Artificial Sequence: Synthetic peptide
  Seed: SIGKVCRTLLAKSVF
SIGKVFRTSLSKSTF

SEQ ID NO: 259848 - protein, 15 aa, Artificial Sequence
  Description of Artificial Sequence: Synthetic peptide
  Seed: SIGKVCRTLLAKSVF
SIGKVFRTSLSKSVF

SEQ ID NO: 259849 - protein, 15 aa, Artificial Sequence
  Description of Artificial Sequence: Synthetic peptide
  Seed: SIGKVCRTLLAKSVF
SIGKVFRTSLSKSWF

SEQ ID NO: 259850 - protein, 15 aa, Artificial Sequence
  Description of Artificial Sequence: Synthetic peptide
  Seed: SIGKVCRTLLAKSVF
SIGKVFRTSLSKSYF

SEQ ID NO: 259851 - protein, 15 aa, Artificial Sequence
  Description of Artificial Sequence: Synthetic peptide
  Seed: SIGKVCRTLLAKSVF
SIGKVFRTSLTKSAF

SEQ ID NO: 259852 - protein, 15 aa, Artificial Sequence
  Description of Artificial Sequence: Synthetic peptide
  Seed: SIGKVCRTLLAKSVF
SIGKVFRTSLTKSFF

SEQ ID NO: 259853 - protein, 15 aa, Artificial Sequence
  Description of Artificial Sequence: Synthetic peptide
  Seed: SIGKVCRTLLAKSVF
SIGKVFRTSLTKSIF

SEQ ID NO: 259854 - protein, 15 aa, Artificial Sequence
  Description of Artificial Sequence: Synthetic peptide
  Seed: SIGKVCRTLLAKSVF
SIGKVFRTSLTKSLF

SEQ ID NO: 259855 - protein, 15 aa, Artificial Sequence
  Description of Artificial Sequence: Synthetic peptide
  Seed: SIGKVCRTLLAKSVF
SIGKVFRTSLTKSMF

SEQ ID NO: 259856 - protein, 15 aa, Artificial Sequence
  Description of Artificial Sequence: Synthetic peptide
  Seed: SIGKVCRTLLAKSVF
SIGKVFRTSLTKSNF

SEQ ID NO: 259857 - protein, 15 aa, Artificial Sequence
  Description of Artificial Sequence: Synthetic peptide
  Seed: SIGKVCRTLLAKSVF
SIGKVFRTSLTKSSF

SEQ ID NO: 259858 - protein, 15 aa, Artificial Sequence
  Description of Artificial Sequence: Synthetic peptide
  Seed: SIGKVCRTLLAKSVF
SIGKVFRTSLTKSVF

SEQ ID NO: 259859 - protein, 15 aa, Artificial Sequence
  Description of Artificial Sequence: Synthetic peptide
  Seed: SIGKVCRTLLAKSVF
SIGKVFRTSLVKSAF

SEQ ID NO: 259860 - protein, 15 aa, Artificial Sequence
  Description of Artificial Sequence: Synthetic peptide
  Seed: SIGKVCRTLLAKSVF
SIGKVFRTSLVKSFF

SEQ ID NO: 259861 - protein, 15 aa, Artificial Sequence
  Description of Artificial Sequence: Synthetic peptide
  Seed: SIGKVCRTLLAKSVF
SIGKVFRTSLVKSIF

SEQ ID NO: 259862 - protein, 15 aa, Artificial Sequence
  Description of Artificial Sequence: Synthetic peptide
  Seed: SIGKVCRTLLAKSVF
SIGKVFRTSLVKSLF

SEQ ID NO: 259863 - protein, 15 aa, Artificial Sequence
  Description of Artificial Sequence: Synthetic peptide
  Seed: SIGKVCRTLLAKSVF
SIGKVFRTSLVKSMF

SEQ ID NO: 259864 - protein, 15 aa, Artificial Sequence
  Description of Artificial Sequence: Synthetic peptide
  Seed: SIGKVCRTLLAKSVF
SIGKVFRTSLVKSNF

SEQ ID NO: 259865 - protein, 15 aa, Artificial Sequence
  Description of Artificial Sequence: Synthetic peptide
  Seed: SIGKVCRTLLAKSVF
SIGKVFRTSLVKSVF

SEQ ID NO: 259866 - protein, 15 aa, Artificial Sequence
  Description of Artificial Sequence: Synthetic peptide
  Seed: SIGKVCRTLLAKSVF
SIGKVFRTSLWKSAF

SEQ ID NO: 259867 - protein, 15 aa, Artificial Sequence
  Description of Artificial Sequence: Synthetic peptide
  Seed: SIGKVCRTLLAKSVF
SIGKVFRTSLWKSFF

SEQ ID NO: 259868 - protein, 15 aa, Artificial Sequence
  Description of Artificial Sequence: Synthetic peptide
  Seed: SIGKVCRTLLAKSVF
SIGKVFRTSLWKSIF

SEQ ID NO: 259869 - protein, 15 aa, Artificial Sequence
  Description of Artificial Sequence: Synthetic peptide
  Seed: SIGKVCRTLLAKSVF
SIGKVFRTSLWKSLF

SEQ ID NO: 259870 - protein, 15 aa, Artificial Sequence
  Description of Artificial Sequence: Synthetic peptide
  Seed: SIGKVCRTLLAKSVF
SIGKVFRTSLWKSMF

SEQ ID NO: 259871 - protein, 15 aa, Artificial Sequence
  Description of Artificial Sequence: Synthetic peptide
  Seed: SIGKVCRTLLAKSVF
SIGKVFRTSLWKSTF

SEQ ID NO: 259872 - protein, 15 aa, Artificial Sequence
  Description of Artificial Sequence: Synthetic peptide
  Seed: SIGKVCRTLLAKSVF
SIGKVFRTSLWKSVF

SEQ ID NO: 259873 - protein, 15 aa, Artificial Sequence
  Description of Artificial Sequence: Synthetic peptide
  Seed: SIGKVCRTLLAKSVF
SIGKVFRTSLYKSAF

SEQ ID NO: 259874 - protein, 15 aa, Artificial Sequence
  Description of Artificial Sequence: Synthetic peptide
  Seed: SIGKVCRTLLAKSVF
SIGKVFRTSLYKSFF

SEQ ID NO: 259875 - protein, 15 aa, Artificial Sequence
  Description of Artificial Sequence: Synthetic peptide
  Seed: SIGKVCRTLLAKSVF
SIGKVFRTSLYKSIF

SEQ ID NO: 259876 - protein, 15 aa, Artificial Sequence
  Description of Artificial Sequence: Synthetic peptide
  Seed: SIGKVCRTLLAKSVF
SIGKVFRTSLYKSLF

SEQ ID NO: 259877 - protein, 15 aa, Artificial Sequence
  Description of Artificial Sequence: Synthetic peptide
  Seed: SIGKVCRTLLAKSVF
SIGKVFRTSLYKSMF

SEQ ID NO: 259878 - protein, 15 aa, Artificial Sequence
  Description of Artificial Sequence: Synthetic peptide
  Seed: SIGKVCRTLLAKSVF
SIGKVFRTSLYKSTF

SEQ ID NO: 259879 - protein, 15 aa, Artificial Sequence
  Description of Artificial Sequence: Synthetic peptide
  Seed: SIGKVCRTLLAKSVF
SIGKVFRTSLYKSVF

SEQ ID NO: 259880 - protein, 15 aa, Artificial Sequence
  Description of Artificial Sequence: Synthetic peptide
  Seed: SIGKVCRTLLAKSVF
SIGKVFRTTLAKSAF

SEQ ID NO: 259881 - protein, 15 aa, Artificial Sequence
  Description of Artificial Sequence: Synthetic peptide
  Seed: SIGKVCRTLLAKSVF
SIGKVFRTTLAKSFF

SEQ ID NO: 259882 - protein, 15 aa, Artificial Sequence
  Description of Artificial Sequence: Synthetic peptide
  Seed: SIGKVCRTLLAKSVF
SIGKVFRTTLAKSIF

SEQ ID NO: 259883 - protein, 15 aa, Artificial Sequence
  Description of Artificial Sequence: Synthetic peptide
  Seed: SIGKVCRTLLAKSVF
SIGKVFRTTLAKSLF

SEQ ID NO: 259884 - protein, 15 aa, Artificial Sequence
  Description of Artificial Sequence: Synthetic peptide
  Seed: SIGKVCRTLLAKSVF
SIGKVFRTTLAKSMF

SEQ ID NO: 259885 - protein, 15 aa, Artificial Sequence
  Description of Artificial Sequence: Synthetic peptide
  Seed: SIGKVCRTLLAKSVF
SIGKVFRTTLAKSNF

SEQ ID NO: 259886 - protein, 15 aa, Artificial Sequence
  Description of Artificial Sequence: Synthetic peptide
  Seed: SIGKVCRTLLAKSVF
SIGKVFRTTLAKSSF

SEQ ID NO: 259887 - protein, 15 aa, Artificial Sequence
  Description of Artificial Sequence: Synthetic peptide
  Seed: SIGKVCRTLLAKSVF
SIGKVFRTTLAKSTF

SEQ ID NO: 259888 - protein, 15 aa, Artificial Sequence
  Description of Artificial Sequence: Synthetic peptide
  Seed: SIGKVCRTLLAKSVF
SIGKVFRTTLAKSVF

SEQ ID NO: 259889 - protein, 15 aa, Artificial Sequence
  Description of Artificial Sequence: Synthetic peptide
  Seed: SIGKVCRTLLAKSVF
SIGKVFRTTLAKSWF

SEQ ID NO: 259890 - protein, 15 aa, Artificial Sequence
  Description of Artificial Sequence: Synthetic peptide
  Seed: SIGKVCRTLLAKSVF
SIGKVFRTTLAKSYF

SEQ ID NO: 259891 - protein, 15 aa, Artificial Sequence
  Description of Artificial Sequence: Synthetic peptide
  Seed: SIGKVCRTLLAKSVF
SIGKVFRTTLFKSAF

SEQ ID NO: 259892 - protein, 15 aa, Artificial Sequence
  Description of Artificial Sequence: Synthetic peptide
  Seed: SIGKVCRTLLAKSVF
SIGKVFRTTLFKSCF

SEQ ID NO: 259893 - protein, 15 aa, Artificial Sequence
  Description of Artificial Sequence: Synthetic peptide
  Seed: SIGKVCRTLLAKSVF
SIGKVFRTTLFKSDF

SEQ ID NO: 259894 - protein, 15 aa, Artificial Sequence
  Description of Artificial Sequence: Synthetic peptide
  Seed: SIGKVCRTLLAKSVF
SIGKVFRTTLFKSEF

SEQ ID NO: 259895 - protein, 15 aa, Artificial Sequence
  Description of Artificial Sequence: Synthetic peptide
  Seed: SIGKVCRTLLAKSVF
SIGKVFRTTLFKSFF

SEQ ID NO: 259896 - protein, 15 aa, Artificial Sequence
  Description of Artificial Sequence: Synthetic peptide
  Seed: SIGKVCRTLLAKSVF
SIGKVFRTTLFKSGF

SEQ ID NO: 259897 - protein, 15 aa, Artificial Sequence
  Description of Artificial Sequence: Synthetic peptide
  Seed: SIGKVCRTLLAKSVF
SIGKVFRTTLFKSHF

SEQ ID NO: 259898 - protein, 15 aa, Artificial Sequence
  Description of Artificial Sequence: Synthetic peptide
  Seed: SIGKVCRTLLAKSVF
SIGKVFRTTLFKSIF

SEQ ID NO: 259899 - protein, 15 aa, Artificial Sequence
  Description of Artificial Sequence: Synthetic peptide
  Seed: SIGKVCRTLLAKSVF
SIGKVFRTTLFKSKF

SEQ ID NO: 259900 - protein, 15 aa, Artificial Sequence
  Description of Artificial Sequence: Synthetic peptide
  Seed: SIGKVCRTLLAKSVF
SIGKVFRTTLFKSLF

SEQ ID NO: 259901 - protein, 15 aa, Artificial Sequence
  Description of Artificial Sequence: Synthetic peptide
  Seed: SIGKVCRTLLAKSVF
SIGKVFRTTLFKSMF

SEQ ID NO: 259902 - protein, 15 aa, Artificial Sequence
  Description of Artificial Sequence: Synthetic peptide
  Seed: SIGKVCRTLLAKSVF
SIGKVFRTTLFKSNF

SEQ ID NO: 259903 - protein, 15 aa, Artificial Sequence
  Description of Artificial Sequence: Synthetic peptide
  Seed: SIGKVCRTLLAKSVF
SIGKVFRTTLFKSPF

SEQ ID NO: 259904 - protein, 15 aa, Artificial Sequence
  Description of Artificial Sequence: Synthetic peptide
  Seed: SIGKVCRTLLAKSVF
SIGKVFRTTLFKSQF

SEQ ID NO: 259905 - protein, 15 aa, Artificial Sequence
  Description of Artificial Sequence: Synthetic peptide
  Seed: SIGKVCRTLLAKSVF
SIGKVFRTTLFKSSF

SEQ ID NO: 259906 - protein, 15 aa, Artificial Sequence
  Description of Artificial Sequence: Synthetic peptide
  Seed: SIGKVCRTLLAKSVF
SIGKVFRTTLFKSTF

SEQ ID NO: 259907 - protein, 15 aa, Artificial Sequence
  Description of Artificial Sequence: Synthetic peptide
  Seed: SIGKVCRTLLAKSVF
SIGKVFRTTLFKSVF

SEQ ID NO: 259908 - protein, 15 aa, Artificial Sequence
  Description of Artificial Sequence: Synthetic peptide
  Seed: SIGKVCRTLLAKSVF
SIGKVFRTTLFKSWF

SEQ ID NO: 259909 - protein, 15 aa, Artificial Sequence
  Description of Artificial Sequence: Synthetic peptide
  Seed: SIGKVCRTLLAKSVF
SIGKVFRTTLFKSYF

SEQ ID NO: 259910 - protein, 15 aa, Artificial Sequence
  Description of Artificial Sequence: Synthetic peptide
  Seed: SIGKVCRTLLAKSVF
SIGKVFRTTLGKSAF

SEQ ID NO: 259911 - protein, 15 aa, Artificial Sequence
  Description of Artificial Sequence: Synthetic peptide
  Seed: SIGKVCRTLLAKSVF
SIGKVFRTTLGKSFF

SEQ ID NO: 259912 - protein, 15 aa, Artificial Sequence
  Description of Artificial Sequence: Synthetic peptide
  Seed: SIGKVCRTLLAKSVF
SIGKVFRTTLGKSIF

SEQ ID NO: 259913 - protein, 15 aa, Artificial Sequence
  Description of Artificial Sequence: Synthetic peptide
  Seed: SIGKVCRTLLAKSVF
SIGKVFRTTLGKSLF

SEQ ID NO: 259914 - protein, 15 aa, Artificial Sequence
  Description of Artificial Sequence: Synthetic peptide
  Seed: SIGKVCRTLLAKSVF
SIGKVFRTTLGKSMF

SEQ ID NO: 259915 - protein, 15 aa, Artificial Sequence
  Description of Artificial Sequence: Synthetic peptide
  Seed: SIGKVCRTLLAKSVF
SIGKVFRTTLGKSVF

SEQ ID NO: 259916 - protein, 15 aa, Artificial Sequence
  Description of Artificial Sequence: Synthetic peptide
  Seed: SIGKVCRTLLAKSVF
SIGKVFRTTLIKSFF

SEQ ID NO: 259917 - protein, 15 aa, Artificial Sequence
  Description of Artificial Sequence: Synthetic peptide
  Seed: SIGKVCRTLLAKSVF
SIGKVFRTTLIKSIF

SEQ ID NO: 259918 - protein, 15 aa, Artificial Sequence
  Description of Artificial Sequence: Synthetic peptide
  Seed: SIGKVCRTLLAKSVF
SIGKVFRTTLIKSLF

SEQ ID NO: 259919 - protein, 15 aa, Artificial Sequence
  Description of Artificial Sequence: Synthetic peptide
  Seed: SIGKVCRTLLAKSVF
SIGKVFRTTLIKSMF

SEQ ID NO: 259920 - protein, 15 aa, Artificial Sequence
  Description of Artificial Sequence: Synthetic peptide
  Seed: SIGKVCRTLLAKSVF
SIGKVFRTTLIKSVF

SEQ ID NO: 259921 - protein, 15 aa, Artificial Sequence
  Description of Artificial Sequence: Synthetic peptide
  Seed: SIGKVCRTLLAKSVF
SIGKVFRTTLLKSAF

SEQ ID NO: 259922 - protein, 15 aa, Artificial Sequence
  Description of Artificial Sequence: Synthetic peptide
  Seed: SIGKVCRTLLAKSVF
SIGKVFRTTLLKSEF

SEQ ID NO: 259923 - protein, 15 aa, Artificial Sequence
  Description of Artificial Sequence: Synthetic peptide
  Seed: SIGKVCRTLLAKSVF
SIGKVFRTTLLKSFF

SEQ ID NO: 259924 - protein, 15 aa, Artificial Sequence
  Description of Artificial Sequence: Synthetic peptide
  Seed: SIGKVCRTLLAKSVF
SIGKVFRTTLLKSIF

SEQ ID NO: 259925 - protein, 15 aa, Artificial Sequence
  Description of Artificial Sequence: Synthetic peptide
  Seed: SIGKVCRTLLAKSVF
SIGKVFRTTLLKSLF

SEQ ID NO: 259926 - protein, 15 aa, Artificial Sequence
  Description of Artificial Sequence: Synthetic peptide
  Seed: SIGKVCRTLLAKSVF
SIGKVFRTTLLKSMF

SEQ ID NO: 259927 - protein, 15 aa, Artificial Sequence
  Description of Artificial Sequence: Synthetic peptide
  Seed: SIGKVCRTLLAKSVF
SIGKVFRTTLLKSNF

SEQ ID NO: 259928 - protein, 15 aa, Artificial Sequence
  Description of Artificial Sequence: Synthetic peptide
  Seed: SIGKVCRTLLAKSVF
SIGKVFRTTLLKSSF

SEQ ID NO: 259929 - protein, 15 aa, Artificial Sequence
  Description of Artificial Sequence: Synthetic peptide
  Seed: SIGKVCRTLLAKSVF
SIGKVFRTTLLKSTF

SEQ ID NO: 259930 - protein, 15 aa, Artificial Sequence
  Description of Artificial Sequence: Synthetic peptide
  Seed: SIGKVCRTLLAKSVF
SIGKVFRTTLLKSVF

SEQ ID NO: 259931 - protein, 15 aa, Artificial Sequence
  Description of Artificial Sequence: Synthetic peptide
  Seed: SIGKVCRTLLAKSVF
SIGKVFRTTLLKSYF

SEQ ID NO: 259932 - protein, 15 aa, Artificial Sequence
  Description of Artificial Sequence: Synthetic peptide
  Seed: SIGKVCRTLLAKSVF
SIGKVFRTTLMKSFF

SEQ ID NO: 259933 - protein, 15 aa, Artificial Sequence
  Description of Artificial Sequence: Synthetic peptide
  Seed: SIGKVCRTLLAKSVF
SIGKVFRTTLMKSIF

SEQ ID NO: 259934 - protein, 15 aa, Artificial Sequence
  Description of Artificial Sequence: Synthetic peptide
  Seed: SIGKVCRTLLAKSVF
SIGKVFRTTLMKSLF

SEQ ID NO: 259935 - protein, 15 aa, Artificial Sequence
  Description of Artificial Sequence: Synthetic peptide
  Seed: SIGKVCRTLLAKSVF
SIGKVFRTTLMKSMF

SEQ ID NO: 259936 - protein, 15 aa, Artificial Sequence
  Description of Artificial Sequence: Synthetic peptide
  Seed: SIGKVCRTLLAKSVF
SIGKVFRTTLMKSVF

SEQ ID NO: 259937 - protein, 15 aa, Artificial Sequence
  Description of Artificial Sequence: Synthetic peptide
  Seed: SIGKVCRTLLAKSVF
SIGKVFRTTLNKSFF

SEQ ID NO: 259938 - protein, 15 aa, Artificial Sequence
  Description of Artificial Sequence: Synthetic peptide
  Seed: SIGKVCRTLLAKSVF
SIGKVFRTTLNKSIF

SEQ ID NO: 259939 - protein, 15 aa, Artificial Sequence
  Description of Artificial Sequence: Synthetic peptide
  Seed: SIGKVCRTLLAKSVF
SIGKVFRTTLNKSLF

SEQ ID NO: 259940 - protein, 15 aa, Artificial Sequence
  Description of Artificial Sequence: Synthetic peptide
  Seed: SIGKVCRTLLAKSVF
SIGKVFRTTLNKSMF

SEQ ID NO: 259941 - protein, 15 aa, Artificial Sequence
  Description of Artificial Sequence: Synthetic peptide
  Seed: SIGKVCRTLLAKSVF
SIGKVFRTTLNKSVF

SEQ ID NO: 259942 - protein, 15 aa, Artificial Sequence
  Description of Artificial Sequence: Synthetic peptide
  Seed: SIGKVCRTLLAKSVF
SIGKVFRTTLPKSAF

SEQ ID NO: 259943 - protein, 15 aa, Artificial Sequence
  Description of Artificial Sequence: Synthetic peptide
  Seed: SIGKVCRTLLAKSVF
SIGKVFRTTLPKSFF

SEQ ID NO: 259944 - protein, 15 aa, Artificial Sequence
  Description of Artificial Sequence: Synthetic peptide
  Seed: SIGKVCRTLLAKSVF
SIGKVFRTTLPKSIF

SEQ ID NO: 259945 - protein, 15 aa, Artificial Sequence
  Description of Artificial Sequence: Synthetic peptide
  Seed: SIGKVCRTLLAKSVF
SIGKVFRTTLPKSLF

SEQ ID NO: 259946 - protein, 15 aa, Artificial Sequence
  Description of Artificial Sequence: Synthetic peptide
  Seed: SIGKVCRTLLAKSVF
SIGKVFRTTLPKSMF

SEQ ID NO: 259947 - protein, 15 aa, Artificial Sequence
  Description of Artificial Sequence: Synthetic peptide
  Seed: SIGKVCRTLLAKSVF
SIGKVFRTTLPKSVF

SEQ ID NO: 259948 - protein, 15 aa, Artificial Sequence
  Description of Artificial Sequence: Synthetic peptide
  Seed: SIGKVCRTLLAKSVF
SIGKVFRTTLSKSAF

SEQ ID NO: 259949 - protein, 15 aa, Artificial Sequence
  Description of Artificial Sequence: Synthetic peptide
  Seed: SIGKVCRTLLAKSVF
SIGKVFRTTLSKSFF

SEQ ID NO: 259950 - protein, 15 aa, Artificial Sequence
  Description of Artificial Sequence: Synthetic peptide
  Seed: SIGKVCRTLLAKSVF
SIGKVFRTTLSKSIF

SEQ ID NO: 259951 - protein, 15 aa, Artificial Sequence
  Description of Artificial Sequence: Synthetic peptide
  Seed: SIGKVCRTLLAKSVF
SIGKVFRTTLSKSLF

SEQ ID NO: 259952 - protein, 15 aa, Artificial Sequence
  Description of Artificial Sequence: Synthetic peptide
  Seed: SIGKVCRTLLAKSVF
SIGKVFRTTLSKSMF

SEQ ID NO: 259953 - protein, 15 aa, Artificial Sequence
  Description of Artificial Sequence: Synthetic peptide
  Seed: SIGKVCRTLLAKSVF
SIGKVFRTTLSKSSF

SEQ ID NO: 259954 - protein, 15 aa, Artificial Sequence
  Description of Artificial Sequence: Synthetic peptide
  Seed: SIGKVCRTLLAKSVF
SIGKVFRTTLSKSTF

SEQ ID NO: 259955 - protein, 15 aa, Artificial Sequence
  Description of Artificial Sequence: Synthetic peptide
  Seed: SIGKVCRTLLAKSVF
SIGKVFRTTLSKSVF

SEQ ID NO: 259956 - protein, 15 aa, Artificial Sequence
  Description of Artificial Sequence: Synthetic peptide
  Seed: SIGKVCRTLLAKSVF
SIGKVFRTTLSKSWF

SEQ ID NO: 259957 - protein, 15 aa, Artificial Sequence
  Description of Artificial Sequence: Synthetic peptide
  Seed: SIGKVCRTLLAKSVF
SIGKVFRTTLSKSYF

SEQ ID NO: 259958 - protein, 15 aa, Artificial Sequence
  Description of Artificial Sequence: Synthetic peptide
  Seed: SIGKVCRTLLAKSVF
SIGKVFRTTLTKSFF

SEQ ID NO: 259959 - protein, 15 aa, Artificial Sequence
  Description of Artificial Sequence: Synthetic peptide
  Seed: SIGKVCRTLLAKSVF
SIGKVFRTTLTKSIF

SEQ ID NO: 259960 - protein, 15 aa, Artificial Sequence
  Description of Artificial Sequence: Synthetic peptide
  Seed: SIGKVCRTLLAKSVF
SIGKVFRTTLTKSLF

SEQ ID NO: 259961 - protein, 15 aa, Artificial Sequence
  Description of Artificial Sequence: Synthetic peptide
  Seed: SIGKVCRTLLAKSVF
SIGKVFRTTLTKSMF

SEQ ID NO: 259962 - protein, 15 aa, Artificial Sequence
  Description of Artificial Sequence: Synthetic peptide
  Seed: SIGKVCRTLLAKSVF
SIGKVFRTTLTKSVF

SEQ ID NO: 259963 - protein, 15 aa, Artificial Sequence
  Description of Artificial Sequence: Synthetic peptide
  Seed: SIGKVCRTLLAKSVF
SIGKVFRTTLVKSFF

SEQ ID NO: 259964 - protein, 15 aa, Artificial Sequence
  Description of Artificial Sequence: Synthetic peptide
  Seed: SIGKVCRTLLAKSVF
SIGKVFRTTLVKSIF

SEQ ID NO: 259965 - protein, 15 aa, Artificial Sequence
  Description of Artificial Sequence: Synthetic peptide
  Seed: SIGKVCRTLLAKSVF
SIGKVFRTTLVKSLF

SEQ ID NO: 259966 - protein, 15 aa, Artificial Sequence
  Description of Artificial Sequence: Synthetic peptide
  Seed: SIGKVCRTLLAKSVF
SIGKVFRTTLVKSMF

SEQ ID NO: 259967 - protein, 15 aa, Artificial Sequence
  Description of Artificial Sequence: Synthetic peptide
  Seed: SIGKVCRTLLAKSVF
SIGKVFRTTLVKSVF

SEQ ID NO: 259968 - protein, 15 aa, Artificial Sequence
  Description of Artificial Sequence: Synthetic peptide
  Seed: SIGKVCRTLLAKSVF
SIGKVFRTTLWKSAF

SEQ ID NO: 259969 - protein, 15 aa, Artificial Sequence
  Description of Artificial Sequence: Synthetic peptide
  Seed: SIGKVCRTLLAKSVF
SIGKVFRTTLWKSFF

SEQ ID NO: 259970 - protein, 15 aa, Artificial Sequence
  Description of Artificial Sequence: Synthetic peptide
  Seed: SIGKVCRTLLAKSVF
SIGKVFRTTLWKSIF

SEQ ID NO: 259971 - protein, 15 aa, Artificial Sequence
  Description of Artificial Sequence: Synthetic peptide
  Seed: SIGKVCRTLLAKSVF
SIGKVFRTTLWKSLF

SEQ ID NO: 259972 - protein, 15 aa, Artificial Sequence
  Description of Artificial Sequence: Synthetic peptide
  Seed: SIGKVCRTLLAKSVF
SIGKVFRTTLWKSMF

SEQ ID NO: 259973 - protein, 15 aa, Artificial Sequence
  Description of Artificial Sequence: Synthetic peptide
  Seed: SIGKVCRTLLAKSVF
SIGKVFRTTLWKSTF

SEQ ID NO: 259974 - protein, 15 aa, Artificial Sequence
  Description of Artificial Sequence: Synthetic peptide
  Seed: SIGKVCRTLLAKSVF
SIGKVFRTTLWKSVF

SEQ ID NO: 259975 - protein, 15 aa, Artificial Sequence
  Description of Artificial Sequence: Synthetic peptide
  Seed: SIGKVCRTLLAKSVF
SIGKVFRTTLWKSYF

SEQ ID NO: 259976 - protein, 15 aa, Artificial Sequence
  Description of Artificial Sequence: Synthetic peptide
  Seed: SIGKVCRTLLAKSVF
SIGKVFRTTLYKSAF

SEQ ID NO: 259977 - protein, 15 aa, Artificial Sequence
  Description of Artificial Sequence: Synthetic peptide
  Seed: SIGKVCRTLLAKSVF
SIGKVFRTTLYKSFF

SEQ ID NO: 259978 - protein, 15 aa, Artificial Sequence
  Description of Artificial Sequence: Synthetic peptide
  Seed: SIGKVCRTLLAKSVF
SIGKVFRTTLYKSIF

SEQ ID NO: 259979 - protein, 15 aa, Artificial Sequence
  Description of Artificial Sequence: Synthetic peptide
  Seed: SIGKVCRTLLAKSVF
SIGKVFRTTLYKSLF

SEQ ID NO: 259980 - protein, 15 aa, Artificial Sequence
  Description of Artificial Sequence: Synthetic peptide
  Seed: SIGKVCRTLLAKSVF
SIGKVFRTTLYKSMF

SEQ ID NO: 259981 - protein, 15 aa, Artificial Sequence
  Description of Artificial Sequence: Synthetic peptide
  Seed: SIGKVCRTLLAKSVF
SIGKVFRTTLYKSSF

SEQ ID NO: 259982 - protein, 15 aa, Artificial Sequence
  Description of Artificial Sequence: Synthetic peptide
  Seed: SIGKVCRTLLAKSVF
SIGKVFRTTLYKSTF

SEQ ID NO: 259983 - protein, 15 aa, Artificial Sequence
  Description of Artificial Sequence: Synthetic peptide
  Seed: SIGKVCRTLLAKSVF
SIGKVFRTTLYKSVF

SEQ ID NO: 259984 - protein, 15 aa, Artificial Sequence
  Description of Artificial Sequence: Synthetic peptide
  Seed: SIGKVCRTLLAKSVF
SIGKVFRTTLYKSYF

SEQ ID NO: 259985 - protein, 15 aa, Artificial Sequence
  Description of Artificial Sequence: Synthetic peptide
  Seed: SIGKVCRTLLAKSVF
SIGKVFRTVLAKSAF

SEQ ID NO: 259986 - protein, 15 aa, Artificial Sequence
  Description of Artificial Sequence: Synthetic peptide
  Seed: SIGKVCRTLLAKSVF
SIGKVFRTVLAKSCF

SEQ ID NO: 259987 - protein, 15 aa, Artificial Sequence
  Description of Artificial Sequence: Synthetic peptide
  Seed: SIGKVCRTLLAKSVF
SIGKVFRTVLAKSFF

SEQ ID NO: 259988 - protein, 15 aa, Artificial Sequence
  Description of Artificial Sequence: Synthetic peptide
  Seed: SIGKVCRTLLAKSVF
SIGKVFRTVLAKSGF

SEQ ID NO: 259989 - protein, 15 aa, Artificial Sequence
  Description of Artificial Sequence: Synthetic peptide
  Seed: SIGKVCRTLLAKSVF
SIGKVFRTVLAKSHF

SEQ ID NO: 259990 - protein, 15 aa, Artificial Sequence
  Description of Artificial Sequence: Synthetic peptide
  Seed: SIGKVCRTLLAKSVF
SIGKVFRTVLAKSIF

SEQ ID NO: 259991 - protein, 15 aa, Artificial Sequence
  Description of Artificial Sequence: Synthetic peptide
  Seed: SIGKVCRTLLAKSVF
SIGKVFRTVLAKSLF

SEQ ID NO: 259992 - protein, 15 aa, Artificial Sequence
  Description of Artificial Sequence: Synthetic peptide
  Seed: SIGKVCRTLLAKSVF
SIGKVFRTVLAKSMF

SEQ ID NO: 259993 - protein, 15 aa, Artificial Sequence
  Description of Artificial Sequence: Synthetic peptide
  Seed: SIGKVCRTLLAKSVF
SIGKVFRTVLAKSNF

SEQ ID NO: 259994 - protein, 15 aa, Artificial Sequence
  Description of Artificial Sequence: Synthetic peptide
  Seed: SIGKVCRTLLAKSVF
SIGKVFRTVLAKSSF

SEQ ID NO: 259995 - protein, 15 aa, Artificial Sequence
  Description of Artificial Sequence: Synthetic peptide
  Seed: SIGKVCRTLLAKSVF
SIGKVFRTVLAKSTF

SEQ ID NO: 259996 - protein, 15 aa, Artificial Sequence
  Description of Artificial Sequence: Synthetic peptide
  Seed: SIGKVCRTLLAKSVF
SIGKVFRTVLAKSVF

SEQ ID NO: 259997 - protein, 15 aa, Artificial Sequence
  Description of Artificial Sequence: Synthetic peptide
  Seed: SIGKVCRTLLAKSVF
SIGKVFRTVLAKSYF

SEQ ID NO: 259998 - protein, 15 aa, Artificial Sequence
  Description of Artificial Sequence: Synthetic peptide
  Seed: SIGKVCRTLLAKSVF
SIGKVFRTVLFKSAF

SEQ ID NO: 259999 - protein, 15 aa, Artificial Sequence
  Description of Artificial Sequence: Synthetic peptide
  Seed: SIGKVCRTLLAKSVF
SIGKVFRTVLFKSCF

SEQ ID NO: 260000 - protein, 15 aa, Artificial Sequence
  Description of Artificial Sequence: Synthetic peptide
  Seed: SIGKVCRTLLAKSVF
SIGKVFRTVLFKSDF

SEQ ID NO: 260001 - protein, 15 aa, Artificial Sequence
  Description of Artificial Sequence: Synthetic peptide
  Seed: SIGKVCRTLLAKSVF
SIGKVFRTVLFKSEF

SEQ ID NO: 260002 - protein, 15 aa, Artificial Sequence
  Description of Artificial Sequence: Synthetic peptide
  Seed: SIGKVCRTLLAKSVF
SIGKVFRTVLFKSFF

SEQ ID NO: 260003 - protein, 15 aa, Artificial Sequence
  Description of Artificial Sequence: Synthetic peptide
  Seed: SIGKVCRTLLAKSVF
SIGKVFRTVLFKSGF

SEQ ID NO: 260004 - protein, 15 aa, Artificial Sequence
  Description of Artificial Sequence: Synthetic peptide
  Seed: SIGKVCRTLLAKSVF
SIGKVFRTVLFKSHF

SEQ ID NO: 260005 - protein, 15 aa, Artificial Sequence
  Description of Artificial Sequence: Synthetic peptide
  Seed: SIGKVCRTLLAKSVF
SIGKVFRTVLFKSIF

SEQ ID NO: 260006 - protein, 15 aa, Artificial Sequence
  Description of Artificial Sequence: Synthetic peptide
  Seed: SIGKVCRTLLAKSVF
SIGKVFRTVLFKSLF

SEQ ID NO: 260007 - protein, 15 aa, Artificial Sequence
  Description of Artificial Sequence: Synthetic peptide
  Seed: SIGKVCRTLLAKSVF
SIGKVFRTVLFKSMF

SEQ ID NO: 260008 - protein, 15 aa, Artificial Sequence
  Description of Artificial Sequence: Synthetic peptide
  Seed: SIGKVCRTLLAKSVF
SIGKVFRTVLFKSNF

SEQ ID NO: 260009 - protein, 15 aa, Artificial Sequence
  Description of Artificial Sequence: Synthetic peptide
  Seed: SIGKVCRTLLAKSVF
SIGKVFRTVLFKSPF

SEQ ID NO: 260010 - protein, 15 aa, Artificial Sequence
  Description of Artificial Sequence: Synthetic peptide
  Seed: SIGKVCRTLLAKSVF
SIGKVFRTVLFKSQF

SEQ ID NO: 260011 - protein, 15 aa, Artificial Sequence
  Description of Artificial Sequence: Synthetic peptide
  Seed: SIGKVCRTLLAKSVF
SIGKVFRTVLFKSRF

SEQ ID NO: 260012 - protein, 15 aa, Artificial Sequence
  Description of Artificial Sequence: Synthetic peptide
  Seed: SIGKVCRTLLAKSVF
SIGKVFRTVLFKSSF

SEQ ID NO: 260013 - protein, 15 aa, Artificial Sequence
  Description of Artificial Sequence: Synthetic peptide
  Seed: SIGKVCRTLLAKSVF
SIGKVFRTVLFKSTF

SEQ ID NO: 260014 - protein, 15 aa, Artificial Sequence
  Description of Artificial Sequence: Synthetic peptide
  Seed: SIGKVCRTLLAKSVF
SIGKVFRTVLFKSVF

SEQ ID NO: 260015 - protein, 15 aa, Artificial Sequence
  Description of Artificial Sequence: Synthetic peptide
  Seed: SIGKVCRTLLAKSVF
SIGKVFRTVLFKSWF

SEQ ID NO: 260016 - protein, 15 aa, Artificial Sequence
  Description of Artificial Sequence: Synthetic peptide
  Seed: SIGKVCRTLLAKSVF
SIGKVFRTVLFKSYF

SEQ ID NO: 260017 - protein, 15 aa, Artificial Sequence
  Description of Artificial Sequence: Synthetic peptide
  Seed: SIGKVCRTLLAKSVF
SIGKVFRTVLGKSAF

SEQ ID NO: 260018 - protein, 15 aa, Artificial Sequence
  Description of Artificial Sequence: Synthetic peptide
  Seed: SIGKVCRTLLAKSVF
SIGKVFRTVLGKSFF

SEQ ID NO: 260019 - protein, 15 aa, Artificial Sequence
  Description of Artificial Sequence: Synthetic peptide
  Seed: SIGKVCRTLLAKSVF
SIGKVFRTVLGKSGF

SEQ ID NO: 260020 - protein, 15 aa, Artificial Sequence
  Description of Artificial Sequence: Synthetic peptide
  Seed: SIGKVCRTLLAKSVF
SIGKVFRTVLGKSIF

SEQ ID NO: 260021 - protein, 15 aa, Artificial Sequence
  Description of Artificial Sequence: Synthetic peptide
  Seed: SIGKVCRTLLAKSVF
SIGKVFRTVLGKSLF

SEQ ID NO: 260022 - protein, 15 aa, Artificial Sequence
  Description of Artificial Sequence: Synthetic peptide
  Seed: SIGKVCRTLLAKSVF
SIGKVFRTVLGKSMF

SEQ ID NO: 260023 - protein, 15 aa, Artificial Sequence
  Description of Artificial Sequence: Synthetic peptide
  Seed: SIGKVCRTLLAKSVF
SIGKVFRTVLGKSNF

SEQ ID NO: 260024 - protein, 15 aa, Artificial Sequence
  Description of Artificial Sequence: Synthetic peptide
  Seed: SIGKVCRTLLAKSVF
SIGKVFRTVLGKSSF

SEQ ID NO: 260025 - protein, 15 aa, Artificial Sequence
  Description of Artificial Sequence: Synthetic peptide
  Seed: SIGKVCRTLLAKSVF
SIGKVFRTVLGKSTF

SEQ ID NO: 260026 - protein, 15 aa, Artificial Sequence
  Description of Artificial Sequence: Synthetic peptide
  Seed: SIGKVCRTLLAKSVF
SIGKVFRTVLGKSVF

SEQ ID NO: 260027 - protein, 15 aa, Artificial Sequence
  Description of Artificial Sequence: Synthetic peptide
  Seed: SIGKVCRTLLAKSVF
SIGKVFRTVLIKSFF

SEQ ID NO: 260028 - protein, 15 aa, Artificial Sequence
  Description of Artificial Sequence: Synthetic peptide
  Seed: SIGKVCRTLLAKSVF
SIGKVFRTVLIKSIF

SEQ ID NO: 260029 - protein, 15 aa, Artificial Sequence
  Description of Artificial Sequence: Synthetic peptide
  Seed: SIGKVCRTLLAKSVF
SIGKVFRTVLIKSLF

SEQ ID NO: 260030 - protein, 15 aa, Artificial Sequence
  Description of Artificial Sequence: Synthetic peptide
  Seed: SIGKVCRTLLAKSVF
SIGKVFRTVLIKSNF

SEQ ID NO: 260031 - protein, 15 aa, Artificial Sequence
  Description of Artificial Sequence: Synthetic peptide
  Seed: SIGKVCRTLLAKSVF
SIGKVFRTVLIKSVF

SEQ ID NO: 260032 - protein, 15 aa, Artificial Sequence
  Description of Artificial Sequence: Synthetic peptide
  Seed: SIGKVCRTLLAKSVF
SIGKVFRTVLLKSFF

SEQ ID NO: 260033 - protein, 15 aa, Artificial Sequence
  Description of Artificial Sequence: Synthetic peptide
  Seed: SIGKVCRTLLAKSVF
SIGKVFRTVLLKSIF

SEQ ID NO: 260034 - protein, 15 aa, Artificial Sequence
  Description of Artificial Sequence: Synthetic peptide
  Seed: SIGKVCRTLLAKSVF
SIGKVFRTVLLKSLF

SEQ ID NO: 260035 - protein, 15 aa, Artificial Sequence
  Description of Artificial Sequence: Synthetic peptide
  Seed: SIGKVCRTLLAKSVF
SIGKVFRTVLLKSMF

SEQ ID NO: 260036 - protein, 15 aa, Artificial Sequence
  Description of Artificial Sequence: Synthetic peptide
  Seed: SIGKVCRTLLAKSVF
SIGKVFRTVLLKSTF

SEQ ID NO: 260037 - protein, 15 aa, Artificial Sequence
  Description of Artificial Sequence: Synthetic peptide
  Seed: SIGKVCRTLLAKSVF
SIGKVFRTVLLKSVF

SEQ ID NO: 260038 - protein, 15 aa, Artificial Sequence
  Description of Artificial Sequence: Synthetic peptide
  Seed: SIGKVCRTLLAKSVF
SIGKVFRTVLLKSYF

SEQ ID NO: 260039 - protein, 15 aa, Artificial Sequence
  Description of Artificial Sequence: Synthetic peptide
  Seed: SIGKVCRTLLAKSVF
SIGKVFRTVLMKSFF

SEQ ID NO: 260040 - protein, 15 aa, Artificial Sequence
  Description of Artificial Sequence: Synthetic peptide
  Seed: SIGKVCRTLLAKSVF
SIGKVFRTVLMKSIF

SEQ ID NO: 260041 - protein, 15 aa, Artificial Sequence
  Description of Artificial Sequence: Synthetic peptide
  Seed: SIGKVCRTLLAKSVF
SIGKVFRTVLMKSLF

SEQ ID NO: 260042 - protein, 15 aa, Artificial Sequence
  Description of Artificial Sequence: Synthetic peptide
  Seed: SIGKVCRTLLAKSVF
SIGKVFRTVLMKSMF

SEQ ID NO: 260043 - protein, 15 aa, Artificial Sequence
  Description of Artificial Sequence: Synthetic peptide
  Seed: SIGKVCRTLLAKSVF
SIGKVFRTVLMKSVF

SEQ ID NO: 260044 - protein, 15 aa, Artificial Sequence
  Description of Artificial Sequence: Synthetic peptide
  Seed: SIGKVCRTLLAKSVF
SIGKVFRTVLNKSAF

SEQ ID NO: 260045 - protein, 15 aa, Artificial Sequence
  Description of Artificial Sequence: Synthetic peptide
  Seed: SIGKVCRTLLAKSVF
SIGKVFRTVLNKSIF

SEQ ID NO: 260046 - protein, 15 aa, Artificial Sequence
  Description of Artificial Sequence: Synthetic peptide
  Seed: SIGKVCRTLLAKSVF
SIGKVFRTVLNKSLF

SEQ ID NO: 260047 - protein, 15 aa, Artificial Sequence
  Description of Artificial Sequence: Synthetic peptide
  Seed: SIGKVCRTLLAKSVF
SIGKVFRTVLNKSNF

SEQ ID NO: 260048 - protein, 15 aa, Artificial Sequence
  Description of Artificial Sequence: Synthetic peptide
  Seed: SIGKVCRTLLAKSVF
SIGKVFRTVLNKSSF

SEQ ID NO: 260049 - protein, 15 aa, Artificial Sequence
  Description of Artificial Sequence: Synthetic peptide
  Seed: SIGKVCRTLLAKSVF
SIGKVFRTVLNKSVF

SEQ ID NO: 260050 - protein, 15 aa, Artificial Sequence
  Description of Artificial Sequence: Synthetic peptide
  Seed: SIGKVCRTLLAKSVF
SIGKVFRTVLPKSAF

SEQ ID NO: 260051 - protein, 15 aa, Artificial Sequence
  Description of Artificial Sequence: Synthetic peptide
  Seed: SIGKVCRTLLAKSVF
SIGKVFRTVLPKSFF

SEQ ID NO: 260052 - protein, 15 aa, Artificial Sequence
  Description of Artificial Sequence: Synthetic peptide
  Seed: SIGKVCRTLLAKSVF
SIGKVFRTVLPKSGF

SEQ ID NO: 260053 - protein, 15 aa, Artificial Sequence
  Description of Artificial Sequence: Synthetic peptide
  Seed: SIGKVCRTLLAKSVF
SIGKVFRTVLPKSIF

SEQ ID NO: 260054 - protein, 15 aa, Artificial Sequence
  Description of Artificial Sequence: Synthetic peptide
  Seed: SIGKVCRTLLAKSVF
SIGKVFRTVLPKSLF

SEQ ID NO: 260055 - protein, 15 aa, Artificial Sequence
  Description of Artificial Sequence: Synthetic peptide
  Seed: SIGKVCRTLLAKSVF
SIGKVFRTVLPKSMF

SEQ ID NO: 260056 - protein, 15 aa, Artificial Sequence
  Description of Artificial Sequence: Synthetic peptide
  Seed: SIGKVCRTLLAKSVF
SIGKVFRTVLPKSNF

SEQ ID NO: 260057 - protein, 15 aa, Artificial Sequence
  Description of Artificial Sequence: Synthetic peptide
  Seed: SIGKVCRTLLAKSVF
SIGKVFRTVLPKSSF

SEQ ID NO: 260058 - protein, 15 aa, Artificial Sequence
  Description of Artificial Sequence: Synthetic peptide
  Seed: SIGKVCRTLLAKSVF
SIGKVFRTVLPKSTF

SEQ ID NO: 260059 - protein, 15 aa, Artificial Sequence
  Description of Artificial Sequence: Synthetic peptide
  Seed: SIGKVCRTLLAKSVF
SIGKVFRTVLPKSVF

SEQ ID NO: 260060 - protein, 15 aa, Artificial Sequence
  Description of Artificial Sequence: Synthetic peptide
  Seed: SIGKVCRTLLAKSVF
SIGKVFRTVLSKSAF

SEQ ID NO: 260061 - protein, 15 aa, Artificial Sequence
  Description of Artificial Sequence: Synthetic peptide
  Seed: SIGKVCRTLLAKSVF
SIGKVFRTVLSKSFF

SEQ ID NO: 260062 - protein, 15 aa, Artificial Sequence
  Description of Artificial Sequence: Synthetic peptide
  Seed: SIGKVCRTLLAKSVF
SIGKVFRTVLSKSGF

SEQ ID NO: 260063 - protein, 15 aa, Artificial Sequence
  Description of Artificial Sequence: Synthetic peptide
  Seed: SIGKVCRTLLAKSVF
SIGKVFRTVLSKSIF

SEQ ID NO: 260064 - protein, 15 aa, Artificial Sequence
  Description of Artificial Sequence: Synthetic peptide
  Seed: SIGKVCRTLLAKSVF
SIGKVFRTVLSKSLF

SEQ ID NO: 260065 - protein, 15 aa, Artificial Sequence
  Description of Artificial Sequence: Synthetic peptide
  Seed: SIGKVCRTLLAKSVF
SIGKVFRTVLSKSMF

SEQ ID NO: 260066 - protein, 15 aa, Artificial Sequence
  Description of Artificial Sequence: Synthetic peptide
  Seed: SIGKVCRTLLAKSVF
SIGKVFRTVLSKSNF

SEQ ID NO: 260067 - protein, 15 aa, Artificial Sequence
  Description of Artificial Sequence: Synthetic peptide
  Seed: SIGKVCRTLLAKSVF
SIGKVFRTVLSKSSF

SEQ ID NO: 260068 - protein, 15 aa, Artificial Sequence
  Description of Artificial Sequence: Synthetic peptide
  Seed: SIGKVCRTLLAKSVF
SIGKVFRTVLSKSTF

SEQ ID NO: 260069 - protein, 15 aa, Artificial Sequence
  Description of Artificial Sequence: Synthetic peptide
  Seed: SIGKVCRTLLAKSVF
SIGKVFRTVLSKSVF

SEQ ID NO: 260070 - protein, 15 aa, Artificial Sequence
  Description of Artificial Sequence: Synthetic peptide
  Seed: SIGKVCRTLLAKSVF
SIGKVFRTVLSKSYF

SEQ ID NO: 260071 - protein, 15 aa, Artificial Sequence
  Description of Artificial Sequence: Synthetic peptide
  Seed: SIGKVCRTLLAKSVF
SIGKVFRTVLTKSAF

SEQ ID NO: 260072 - protein, 15 aa, Artificial Sequence
  Description of Artificial Sequence: Synthetic peptide
  Seed: SIGKVCRTLLAKSVF
SIGKVFRTVLTKSFF

SEQ ID NO: 260073 - protein, 15 aa, Artificial Sequence
  Description of Artificial Sequence: Synthetic peptide
  Seed: SIGKVCRTLLAKSVF
SIGKVFRTVLTKSIF

SEQ ID NO: 260074 - protein, 15 aa, Artificial Sequence
  Description of Artificial Sequence: Synthetic peptide
  Seed: SIGKVCRTLLAKSVF
SIGKVFRTVLTKSLF

SEQ ID NO: 260075 - protein, 15 aa, Artificial Sequence
  Description of Artificial Sequence: Synthetic peptide
  Seed: SIGKVCRTLLAKSVF
SIGKVFRTVLTKSMF

SEQ ID NO: 260076 - protein, 15 aa, Artificial Sequence
  Description of Artificial Sequence: Synthetic peptide
  Seed: SIGKVCRTLLAKSVF
SIGKVFRTVLTKSNF

SEQ ID NO: 260077 - protein, 15 aa, Artificial Sequence
  Description of Artificial Sequence: Synthetic peptide
  Seed: SIGKVCRTLLAKSVF
SIGKVFRTVLTKSSF

SEQ ID NO: 260078 - protein, 15 aa, Artificial Sequence
  Description of Artificial Sequence: Synthetic peptide
  Seed: SIGKVCRTLLAKSVF
SIGKVFRTVLTKSTF

SEQ ID NO: 260079 - protein, 15 aa, Artificial Sequence
  Description of Artificial Sequence: Synthetic peptide
  Seed: SIGKVCRTLLAKSVF
SIGKVFRTVLTKSVF

SEQ ID NO: 260080 - protein, 15 aa, Artificial Sequence
  Description of Artificial Sequence: Synthetic peptide
  Seed: SIGKVCRTLLAKSVF
SIGKVFRTVLVKSAF

SEQ ID NO: 260081 - protein, 15 aa, Artificial Sequence
  Description of Artificial Sequence: Synthetic peptide
  Seed: SIGKVCRTLLAKSVF
SIGKVFRTVLVKSIF

SEQ ID NO: 260082 - protein, 15 aa, Artificial Sequence
  Description of Artificial Sequence: Synthetic peptide
  Seed: SIGKVCRTLLAKSVF
SIGKVFRTVLVKSLF

SEQ ID NO: 260083 - protein, 15 aa, Artificial Sequence
  Description of Artificial Sequence: Synthetic peptide
  Seed: SIGKVCRTLLAKSVF
SIGKVFRTVLVKSNF

SEQ ID NO: 260084 - protein, 15 aa, Artificial Sequence
  Description of Artificial Sequence: Synthetic peptide
  Seed: SIGKVCRTLLAKSVF
SIGKVFRTVLVKSSF

SEQ ID NO: 260085 - protein, 15 aa, Artificial Sequence
  Description of Artificial Sequence: Synthetic peptide
  Seed: SIGKVCRTLLAKSVF
SIGKVFRTVLVKSTF

SEQ ID NO: 260086 - protein, 15 aa, Artificial Sequence
  Description of Artificial Sequence: Synthetic peptide
  Seed: SIGKVCRTLLAKSVF
SIGKVFRTVLVKSVF

SEQ ID NO: 260087 - protein, 15 aa, Artificial Sequence
  Description of Artificial Sequence: Synthetic peptide
  Seed: SIGKVCRTLLAKSVF
SIGKVFRTVLWKSFF

SEQ ID NO: 260088 - protein, 15 aa, Artificial Sequence
  Description of Artificial Sequence: Synthetic peptide
  Seed: SIGKVCRTLLAKSVF
SIGKVFRTVLWKSIF

SEQ ID NO: 260089 - protein, 15 aa, Artificial Sequence
  Description of Artificial Sequence: Synthetic peptide
  Seed: SIGKVCRTLLAKSVF
SIGKVFRTVLWKSLF

SEQ ID NO: 260090 - protein, 15 aa, Artificial Sequence
  Description of Artificial Sequence: Synthetic peptide
  Seed: SIGKVCRTLLAKSVF
SIGKVFRTVLWKSMF

SEQ ID NO: 260091 - protein, 15 aa, Artificial Sequence
  Description of Artificial Sequence: Synthetic peptide
  Seed: SIGKVCRTLLAKSVF
SIGKVFRTVLWKSVF

SEQ ID NO: 260092 - protein, 15 aa, Artificial Sequence
  Description of Artificial Sequence: Synthetic peptide
  Seed: SIGKVCRTLLAKSVF
SIGKVFRTVLYKSAF

SEQ ID NO: 260093 - protein, 15 aa, Artificial Sequence
  Description of Artificial Sequence: Synthetic peptide
  Seed: SIGKVCRTLLAKSVF
SIGKVFRTVLYKSFF

SEQ ID NO: 260094 - protein, 15 aa, Artificial Sequence
  Description of Artificial Sequence: Synthetic peptide
  Seed: SIGKVCRTLLAKSVF
SIGKVFRTVLYKSIF

SEQ ID NO: 260095 - protein, 15 aa, Artificial Sequence
  Description of Artificial Sequence: Synthetic peptide
  Seed: SIGKVCRTLLAKSVF
SIGKVFRTVLYKSLF

SEQ ID NO: 260096 - protein, 15 aa, Artificial Sequence
  Description of Artificial Sequence: Synthetic peptide
  Seed: SIGKVCRTLLAKSVF
SIGKVFRTVLYKSMF

SEQ ID NO: 260097 - protein, 15 aa, Artificial Sequence
  Description of Artificial Sequence: Synthetic peptide
  Seed: SIGKVCRTLLAKSVF
SIGKVFRTVLYKSTF

SEQ ID NO: 260098 - protein, 15 aa, Artificial Sequence
  Description of Artificial Sequence: Synthetic peptide
  Seed: SIGKVCRTLLAKSVF
SIGKVFRTVLYKSVF

SEQ ID NO: 260099 - protein, 15 aa, Artificial Sequence
  Description of Artificial Sequence: Synthetic peptide
  Seed: SIGKVCRTLLAKSVF
SIGKVFRTVLYKSYF

SEQ ID NO: 260100 - protein, 15 aa, Artificial Sequence
  Description of Artificial Sequence: Synthetic peptide
  Seed: SIGKVCRTLLAKSVF
SIGKVFRTWLAKSVF

SEQ ID NO: 260101 - protein, 15 aa, Artificial Sequence
  Description of Artificial Sequence: Synthetic peptide
  Seed: SIGKVCRTLLAKSVF
SIGKVFRTWLFKSAF

SEQ ID NO: 260102 - protein, 15 aa, Artificial Sequence
  Description of Artificial Sequence: Synthetic peptide
  Seed: SIGKVCRTLLAKSVF
SIGKVFRTWLFKSFF

SEQ ID NO: 260103 - protein, 15 aa, Artificial Sequence
  Description of Artificial Sequence: Synthetic peptide
  Seed: SIGKVCRTLLAKSVF
SIGKVFRTWLFKSIF

SEQ ID NO: 260104 - protein, 15 aa, Artificial Sequence
  Description of Artificial Sequence: Synthetic peptide
  Seed: SIGKVCRTLLAKSVF
SIGKVFRTWLFKSLF

SEQ ID NO: 260105 - protein, 15 aa, Artificial Sequence
  Description of Artificial Sequence: Synthetic peptide
  Seed: SIGKVCRTLLAKSVF
SIGKVFRTWLFKSMF

SEQ ID NO: 260106 - protein, 15 aa, Artificial Sequence
  Description of Artificial Sequence: Synthetic peptide
  Seed: SIGKVCRTLLAKSVF
SIGKVFRTWLFKSNF

SEQ ID NO: 260107 - protein, 15 aa, Artificial Sequence
  Description of Artificial Sequence: Synthetic peptide
  Seed: SIGKVCRTLLAKSVF
SIGKVFRTWLFKSSF

SEQ ID NO: 260108 - protein, 15 aa, Artificial Sequence
  Description of Artificial Sequence: Synthetic peptide
  Seed: SIGKVCRTLLAKSVF
SIGKVFRTWLFKSTF

SEQ ID NO: 260109 - protein, 15 aa, Artificial Sequence
  Description of Artificial Sequence: Synthetic peptide
  Seed: SIGKVCRTLLAKSVF
SIGKVFRTWLFKSVF

SEQ ID NO: 260110 - protein, 15 aa, Artificial Sequence
  Description of Artificial Sequence: Synthetic peptide
  Seed: SIGKVCRTLLAKSVF
SIGKVFRTWLFKSYF

SEQ ID NO: 260111 - protein, 15 aa, Artificial Sequence
  Description of Artificial Sequence: Synthetic peptide
  Seed: SIGKVCRTLLAKSVF
SIGKVFRTWLIKSLF

SEQ ID NO: 260112 - protein, 15 aa, Artificial Sequence
  Description of Artificial Sequence: Synthetic peptide
  Seed: SIGKVCRTLLAKSVF
SIGKVFRTWLLKSFF

SEQ ID NO: 260113 - protein, 15 aa, Artificial Sequence
  Description of Artificial Sequence: Synthetic peptide
  Seed: SIGKVCRTLLAKSVF
SIGKVFRTWLLKSIF

SEQ ID NO: 260114 - protein, 15 aa, Artificial Sequence
  Description of Artificial Sequence: Synthetic peptide
  Seed: SIGKVCRTLLAKSVF
SIGKVFRTWLLKSLF

SEQ ID NO: 260115 - protein, 15 aa, Artificial Sequence
  Description of Artificial Sequence: Synthetic peptide
  Seed: SIGKVCRTLLAKSVF
SIGKVFRTWLLKSMF

SEQ ID NO: 260116 - protein, 15 aa, Artificial Sequence
  Description of Artificial Sequence: Synthetic peptide
  Seed: SIGKVCRTLLAKSVF
SIGKVFRTWLLKSVF

SEQ ID NO: 260117 - protein, 15 aa, Artificial Sequence
  Description of Artificial Sequence: Synthetic peptide
  Seed: SIGKVCRTLLAKSVF
SIGKVFRTWLMKSIF

SEQ ID NO: 260118 - protein, 15 aa, Artificial Sequence
  Description of Artificial Sequence: Synthetic peptide
  Seed: SIGKVCRTLLAKSVF
SIGKVFRTWLMKSLF

SEQ ID NO: 260119 - protein, 15 aa, Artificial Sequence
  Description of Artificial Sequence: Synthetic peptide
  Seed: SIGKVCRTLLAKSVF
SIGKVFRTWLMKSVF

SEQ ID NO: 260120 - protein, 15 aa, Artificial Sequence
  Description of Artificial Sequence: Synthetic peptide
  Seed: SIGKVCRTLLAKSVF
SIGKVFRTWLSKSLF

SEQ ID NO: 260121 - protein, 15 aa, Artificial Sequence
  Description of Artificial Sequence: Synthetic peptide
  Seed: SIGKVCRTLLAKSVF
SIGKVFRTWLSKSVF

SEQ ID NO: 260122 - protein, 15 aa, Artificial Sequence
  Description of Artificial Sequence: Synthetic peptide
  Seed: SIGKVCRTLLAKSVF
SIGKVFRTWLWKSIF

SEQ ID NO: 260123 - protein, 15 aa, Artificial Sequence
  Description of Artificial Sequence: Synthetic peptide
  Seed: SIGKVCRTLLAKSVF
SIGKVFRTWLWKSLF

SEQ ID NO: 260124 - protein, 15 aa, Artificial Sequence
  Description of Artificial Sequence: Synthetic peptide
  Seed: SIGKVCRTLLAKSVF
SIGKVFRTWLWKSVF

SEQ ID NO: 260125 - protein, 15 aa, Artificial Sequence
  Description of Artificial Sequence: Synthetic peptide
  Seed: SIGKVCRTLLAKSVF
SIGKVFRTWLYKSFF

SEQ ID NO: 260126 - protein, 15 aa, Artificial Sequence
  Description of Artificial Sequence: Synthetic peptide
  Seed: SIGKVCRTLLAKSVF
SIGKVFRTWLYKSIF

SEQ ID NO: 260127 - protein, 15 aa, Artificial Sequence
  Description of Artificial Sequence: Synthetic peptide
  Seed: SIGKVCRTLLAKSVF
SIGKVFRTWLYKSLF

SEQ ID NO: 260128 - protein, 15 aa, Artificial Sequence
  Description of Artificial Sequence: Synthetic peptide
  Seed: SIGKVCRTLLAKSVF
SIGKVFRTWLYKSVF

SEQ ID NO: 260129 - protein, 15 aa, Artificial Sequence
  Description of Artificial Sequence: Synthetic peptide
  Seed: SIGKVCRTLLAKSVF
SIGKVFRTYLAKSIF

SEQ ID NO: 260130 - protein, 15 aa, Artificial Sequence
  Description of Artificial Sequence: Synthetic peptide
  Seed: SIGKVCRTLLAKSVF
SIGKVFRTYLAKSLF

SEQ ID NO: 260131 - protein, 15 aa, Artificial Sequence
  Description of Artificial Sequence: Synthetic peptide
  Seed: SIGKVCRTLLAKSVF
SIGKVFRTYLAKSVF

SEQ ID NO: 260132 - protein, 15 aa, Artificial Sequence
  Description of Artificial Sequence: Synthetic peptide
  Seed: SIGKVCRTLLAKSVF
SIGKVFRTYLFKSAF

SEQ ID NO: 260133 - protein, 15 aa, Artificial Sequence
  Description of Artificial Sequence: Synthetic peptide
  Seed: SIGKVCRTLLAKSVF
SIGKVFRTYLFKSDF

SEQ ID NO: 260134 - protein, 15 aa, Artificial Sequence
  Description of Artificial Sequence: Synthetic peptide
  Seed: SIGKVCRTLLAKSVF
SIGKVFRTYLFKSEF

SEQ ID NO: 260135 - protein, 15 aa, Artificial Sequence
  Description of Artificial Sequence: Synthetic peptide
  Seed: SIGKVCRTLLAKSVF
SIGKVFRTYLFKSFF

SEQ ID NO: 260136 - protein, 15 aa, Artificial Sequence
  Description of Artificial Sequence: Synthetic peptide
  Seed: SIGKVCRTLLAKSVF
SIGKVFRTYLFKSHF

SEQ ID NO: 260137 - protein, 15 aa, Artificial Sequence
  Description of Artificial Sequence: Synthetic peptide
  Seed: SIGKVCRTLLAKSVF
SIGKVFRTYLFKSIF

SEQ ID NO: 260138 - protein, 15 aa, Artificial Sequence
  Description of Artificial Sequence: Synthetic peptide
  Seed: SIGKVCRTLLAKSVF
SIGKVFRTYLFKSLF

SEQ ID NO: 260139 - protein, 15 aa, Artificial Sequence
  Description of Artificial Sequence: Synthetic peptide
  Seed: SIGKVCRTLLAKSVF
SIGKVFRTYLFKSMF

SEQ ID NO: 260140 - protein, 15 aa, Artificial Sequence
  Description of Artificial Sequence: Synthetic peptide
  Seed: SIGKVCRTLLAKSVF
SIGKVFRTYLFKSNF

SEQ ID NO: 260141 - protein, 15 aa, Artificial Sequence
  Description of Artificial Sequence: Synthetic peptide
  Seed: SIGKVCRTLLAKSVF
SIGKVFRTYLFKSPF

SEQ ID NO: 260142 - protein, 15 aa, Artificial Sequence
  Description of Artificial Sequence: Synthetic peptide
  Seed: SIGKVCRTLLAKSVF
SIGKVFRTYLFKSSF

SEQ ID NO: 260143 - protein, 15 aa, Artificial Sequence
  Description of Artificial Sequence: Synthetic peptide
  Seed: SIGKVCRTLLAKSVF
SIGKVFRTYLFKSTF

SEQ ID NO: 260144 - protein, 15 aa, Artificial Sequence
  Description of Artificial Sequence: Synthetic peptide
  Seed: SIGKVCRTLLAKSVF
SIGKVFRTYLFKSVF

SEQ ID NO: 260145 - protein, 15 aa, Artificial Sequence
  Description of Artificial Sequence: Synthetic peptide
  Seed: SIGKVCRTLLAKSVF
SIGKVFRTYLFKSYF

SEQ ID NO: 260146 - protein, 15 aa, Artificial Sequence
  Description of Artificial Sequence: Synthetic peptide
  Seed: SIGKVCRTLLAKSVF
SIGKVFRTYLIKSFF

SEQ ID NO: 260147 - protein, 15 aa, Artificial Sequence
  Description of Artificial Sequence: Synthetic peptide
  Seed: SIGKVCRTLLAKSVF
SIGKVFRTYLIKSIF

SEQ ID NO: 260148 - protein, 15 aa, Artificial Sequence
  Description of Artificial Sequence: Synthetic peptide
  Seed: SIGKVCRTLLAKSVF
SIGKVFRTYLIKSLF

SEQ ID NO: 260149 - protein, 15 aa, Artificial Sequence
  Description of Artificial Sequence: Synthetic peptide
  Seed: SIGKVCRTLLAKSVF
SIGKVFRTYLIKSVF

SEQ ID NO: 260150 - protein, 15 aa, Artificial Sequence
  Description of Artificial Sequence: Synthetic peptide
  Seed: SIGKVCRTLLAKSVF
SIGKVFRTYLLKSAF

SEQ ID NO: 260151 - protein, 15 aa, Artificial Sequence
  Description of Artificial Sequence: Synthetic peptide
  Seed: SIGKVCRTLLAKSVF
SIGKVFRTYLLKSEF

SEQ ID NO: 260152 - protein, 15 aa, Artificial Sequence
  Description of Artificial Sequence: Synthetic peptide
  Seed: SIGKVCRTLLAKSVF
SIGKVFRTYLLKSFF

SEQ ID NO: 260153 - protein, 15 aa, Artificial Sequence
  Description of Artificial Sequence: Synthetic peptide
  Seed: SIGKVCRTLLAKSVF
SIGKVFRTYLLKSIF

SEQ ID NO: 260154 - protein, 15 aa, Artificial Sequence
  Description of Artificial Sequence: Synthetic peptide
  Seed: SIGKVCRTLLAKSVF
SIGKVFRTYLLKSLF

SEQ ID NO: 260155 - protein, 15 aa, Artificial Sequence
  Description of Artificial Sequence: Synthetic peptide
  Seed: SIGKVCRTLLAKSVF
SIGKVFRTYLLKSMF

SEQ ID NO: 260156 - protein, 15 aa, Artificial Sequence
  Description of Artificial Sequence: Synthetic peptide
  Seed: SIGKVCRTLLAKSVF
SIGKVFRTYLLKSTF

SEQ ID NO: 260157 - protein, 15 aa, Artificial Sequence
  Description of Artificial Sequence: Synthetic peptide
  Seed: SIGKVCRTLLAKSVF
SIGKVFRTYLLKSVF

SEQ ID NO: 260158 - protein, 15 aa, Artificial Sequence
  Description of Artificial Sequence: Synthetic peptide
  Seed: SIGKVCRTLLAKSVF
SIGKVFRTYLLKSYF

SEQ ID NO: 260159 - protein, 15 aa, Artificial Sequence
  Description of Artificial Sequence: Synthetic peptide
  Seed: SIGKVCRTLLAKSVF
SIGKVFRTYLMKSFF

SEQ ID NO: 260160 - protein, 15 aa, Artificial Sequence
  Description of Artificial Sequence: Synthetic peptide
  Seed: SIGKVCRTLLAKSVF
SIGKVFRTYLMKSIF

SEQ ID NO: 260161 - protein, 15 aa, Artificial Sequence
  Description of Artificial Sequence: Synthetic peptide
  Seed: SIGKVCRTLLAKSVF
SIGKVFRTYLMKSLF

SEQ ID NO: 260162 - protein, 15 aa, Artificial Sequence
  Description of Artificial Sequence: Synthetic peptide
  Seed: SIGKVCRTLLAKSVF
SIGKVFRTYLMKSVF

SEQ ID NO: 260163 - protein, 15 aa, Artificial Sequence
  Description of Artificial Sequence: Synthetic peptide
  Seed: SIGKVCRTLLAKSVF
SIGKVFRTYLNKSLF

SEQ ID NO: 260164 - protein, 15 aa, Artificial Sequence
  Description of Artificial Sequence: Synthetic peptide
  Seed: SIGKVCRTLLAKSVF
SIGKVFRTYLNKSVF

SEQ ID NO: 260165 - protein, 15 aa, Artificial Sequence
  Description of Artificial Sequence: Synthetic peptide
  Seed: SIGKVCRTLLAKSVF
SIGKVFRTYLSKSAF

SEQ ID NO: 260166 - protein, 15 aa, Artificial Sequence
  Description of Artificial Sequence: Synthetic peptide
  Seed: SIGKVCRTLLAKSVF
SIGKVFRTYLSKSIF

SEQ ID NO: 260167 - protein, 15 aa, Artificial Sequence
  Description of Artificial Sequence: Synthetic peptide
  Seed: SIGKVCRTLLAKSVF
SIGKVFRTYLSKSLF

SEQ ID NO: 260168 - protein, 15 aa, Artificial Sequence
  Description of Artificial Sequence: Synthetic peptide
  Seed: SIGKVCRTLLAKSVF
SIGKVFRTYLSKSMF

SEQ ID NO: 260169 - protein, 15 aa, Artificial Sequence
  Description of Artificial Sequence: Synthetic peptide
  Seed: SIGKVCRTLLAKSVF
SIGKVFRTYLSKSVF

SEQ ID NO: 260170 - protein, 15 aa, Artificial Sequence
  Description of Artificial Sequence: Synthetic peptide
  Seed: SIGKVCRTLLAKSVF
SIGKVFRTYLTKSVF

SEQ ID NO: 260171 - protein, 15 aa, Artificial Sequence
  Description of Artificial Sequence: Synthetic peptide
  Seed: SIGKVCRTLLAKSVF
SIGKVFRTYLWKSIF

SEQ ID NO: 260172 - protein, 15 aa, Artificial Sequence
  Description of Artificial Sequence: Synthetic peptide
  Seed: SIGKVCRTLLAKSVF
SIGKVFRTYLWKSLF

SEQ ID NO: 260173 - protein, 15 aa, Artificial Sequence
  Description of Artificial Sequence: Synthetic peptide
  Seed: SIGKVCRTLLAKSVF
SIGKVFRTYLWKSVF

SEQ ID NO: 260174 - protein, 15 aa, Artificial Sequence
  Description of Artificial Sequence: Synthetic peptide
  Seed: SIGKVCRTLLAKSVF
SIGKVFRTYLYKSFF

SEQ ID NO: 260175 - protein, 15 aa, Artificial Sequence
  Description of Artificial Sequence: Synthetic peptide
  Seed: SIGKVCRTLLAKSVF
SIGKVFRTYLYKSIF

SEQ ID NO: 260176 - protein, 15 aa, Artificial Sequence
  Description of Artificial Sequence: Synthetic peptide
  Seed: SIGKVCRTLLAKSVF
SIGKVFRTYLYKSLF

SEQ ID NO: 260177 - protein, 15 aa, Artificial Sequence
  Description of Artificial Sequence: Synthetic peptide
  Seed: SIGKVCRTLLAKSVF
SIGKVFRTYLYKSVF

SEQ ID NO: 260178 - protein, 15 aa, Artificial Sequence
  Description of Artificial Sequence: Synthetic peptide
  Seed: SIGKVCRTLLAKSVF
SIGKVIRTALAKSAF

SEQ ID NO: 260179 - protein, 15 aa, Artificial Sequence
  Description of Artificial Sequence: Synthetic peptide
  Seed: SIGKVCRTLLAKSVF
SIGKVIRTALAKSIF

SEQ ID NO: 260180 - protein, 15 aa, Artificial Sequence
  Description of Artificial Sequence: Synthetic peptide
  Seed: SIGKVCRTLLAKSVF
SIGKVIRTALAKSLF

SEQ ID NO: 260181 - protein, 15 aa, Artificial Sequence
  Description of Artificial Sequence: Synthetic peptide
  Seed: SIGKVCRTLLAKSVF
SIGKVIRTALAKSMF

SEQ ID NO: 260182 - protein, 15 aa, Artificial Sequence
  Description of Artificial Sequence: Synthetic peptide
  Seed: SIGKVCRTLLAKSVF
SIGKVIRTALAKSNF

SEQ ID NO: 260183 - protein, 15 aa, Artificial Sequence
  Description of Artificial Sequence: Synthetic peptide
  Seed: SIGKVCRTLLAKSVF
SIGKVIRTALAKSSF

SEQ ID NO: 260184 - protein, 15 aa, Artificial Sequence
  Description of Artificial Sequence: Synthetic peptide
  Seed: SIGKVCRTLLAKSVF
SIGKVIRTALAKSTF

SEQ ID NO: 260185 - protein, 15 aa, Artificial Sequence
  Description of Artificial Sequence: Synthetic peptide
  Seed: SIGKVCRTLLAKSVF
SIGKVIRTALAKSVF

SEQ ID NO: 260186 - protein, 15 aa, Artificial Sequence
  Description of Artificial Sequence: Synthetic peptide
  Seed: SIGKVCRTLLAKSVF
SIGKVIRTALFKSAF

SEQ ID NO: 260187 - protein, 15 aa, Artificial Sequence
  Description of Artificial Sequence: Synthetic peptide
  Seed: SIGKVCRTLLAKSVF
SIGKVIRTALFKSEF

SEQ ID NO: 260188 - protein, 15 aa, Artificial Sequence
  Description of Artificial Sequence: Synthetic peptide
  Seed: SIGKVCRTLLAKSVF
SIGKVIRTALFKSFF

SEQ ID NO: 260189 - protein, 15 aa, Artificial Sequence
  Description of Artificial Sequence: Synthetic peptide
  Seed: SIGKVCRTLLAKSVF
SIGKVIRTALFKSIF

SEQ ID NO: 260190 - protein, 15 aa, Artificial Sequence
  Description of Artificial Sequence: Synthetic peptide
  Seed: SIGKVCRTLLAKSVF
SIGKVIRTALFKSLF

SEQ ID NO: 260191 - protein, 15 aa, Artificial Sequence
  Description of Artificial Sequence: Synthetic peptide
  Seed: SIGKVCRTLLAKSVF
SIGKVIRTALFKSMF

SEQ ID NO: 260192 - protein, 15 aa, Artificial Sequence
  Description of Artificial Sequence: Synthetic peptide
  Seed: SIGKVCRTLLAKSVF
SIGKVIRTALFKSNF

SEQ ID NO: 260193 - protein, 15 aa, Artificial Sequence
  Description of Artificial Sequence: Synthetic peptide
  Seed: SIGKVCRTLLAKSVF
SIGKVIRTALFKSSF

SEQ ID NO: 260194 - protein, 15 aa, Artificial Sequence
  Description of Artificial Sequence: Synthetic peptide
  Seed: SIGKVCRTLLAKSVF
SIGKVIRTALFKSTF

SEQ ID NO: 260195 - protein, 15 aa, Artificial Sequence
  Description of Artificial Sequence: Synthetic peptide
  Seed: SIGKVCRTLLAKSVF
SIGKVIRTALFKSVF

SEQ ID NO: 260196 - protein, 15 aa, Artificial Sequence
  Description of Artificial Sequence: Synthetic peptide
  Seed: SIGKVCRTLLAKSVF
SIGKVIRTALFKSYF

SEQ ID NO: 260197 - protein, 15 aa, Artificial Sequence
  Description of Artificial Sequence: Synthetic peptide
  Seed: SIGKVCRTLLAKSVF
SIGKVIRTALGKSAF

SEQ ID NO: 260198 - protein, 15 aa, Artificial Sequence
  Description of Artificial Sequence: Synthetic peptide
  Seed: SIGKVCRTLLAKSVF
SIGKVIRTALGKSIF

SEQ ID NO: 260199 - protein, 15 aa, Artificial Sequence
  Description of Artificial Sequence: Synthetic peptide
  Seed: SIGKVCRTLLAKSVF
SIGKVIRTALGKSLF

SEQ ID NO: 260200 - protein, 15 aa, Artificial Sequence
  Description of Artificial Sequence: Synthetic peptide
  Seed: SIGKVCRTLLAKSVF
SIGKVIRTALGKSMF

SEQ ID NO: 260201 - protein, 15 aa, Artificial Sequence
  Description of Artificial Sequence: Synthetic peptide
  Seed: SIGKVCRTLLAKSVF
SIGKVIRTALGKSVF

SEQ ID NO: 260202 - protein, 15 aa, Artificial Sequence
  Description of Artificial Sequence: Synthetic peptide
  Seed: SIGKVCRTLLAKSVF
SIGKVIRTALPKSIF

SEQ ID NO: 260203 - protein, 15 aa, Artificial Sequence
  Description of Artificial Sequence: Synthetic peptide
  Seed: SIGKVCRTLLAKSVF
SIGKVIRTALPKSLF

SEQ ID NO: 260204 - protein, 15 aa, Artificial Sequence
  Description of Artificial Sequence: Synthetic peptide
  Seed: SIGKVCRTLLAKSVF
SIGKVIRTALPKSVF

SEQ ID NO: 260205 - protein, 15 aa, Artificial Sequence
  Description of Artificial Sequence: Synthetic peptide
  Seed: SIGKVCRTLLAKSVF
SIGKVIRTALSKSAF

SEQ ID NO: 260206 - protein, 15 aa, Artificial Sequence
  Description of Artificial Sequence: Synthetic peptide
  Seed: SIGKVCRTLLAKSVF
SIGKVIRTALSKSIF

SEQ ID NO: 260207 - protein, 15 aa, Artificial Sequence
  Description of Artificial Sequence: Synthetic peptide
  Seed: SIGKVCRTLLAKSVF
SIGKVIRTALSKSLF

SEQ ID NO: 260208 - protein, 15 aa, Artificial Sequence
  Description of Artificial Sequence: Synthetic peptide
  Seed: SIGKVCRTLLAKSVF
SIGKVIRTALSKSVF

SEQ ID NO: 260209 - protein, 15 aa, Artificial Sequence
  Description of Artificial Sequence: Synthetic peptide
  Seed: SIGKVCRTLLAKSVF
SIGKVIRTALYKSIF

SEQ ID NO: 260210 - protein, 15 aa, Artificial Sequence
  Description of Artificial Sequence: Synthetic peptide
  Seed: SIGKVCRTLLAKSVF
SIGKVIRTALYKSLF

SEQ ID NO: 260211 - protein, 15 aa, Artificial Sequence
  Description of Artificial Sequence: Synthetic peptide
  Seed: SIGKVCRTLLAKSVF
SIGKVIRTALYKSVF

SEQ ID NO: 260212 - protein, 15 aa, Artificial Sequence
  Description of Artificial Sequence: Synthetic peptide
  Seed: SIGKVCRTLLAKSVF
SIGKVIRTCLFKSIF

SEQ ID NO: 260213 - protein, 15 aa, Artificial Sequence
  Description of Artificial Sequence: Synthetic peptide
  Seed: SIGKVCRTLLAKSVF
SIGKVIRTCLFKSLF

SEQ ID NO: 260214 - protein, 15 aa, Artificial Sequence
  Description of Artificial Sequence: Synthetic peptide
  Seed: SIGKVCRTLLAKSVF
SIGKVIRTCLFKSVF

SEQ ID NO: 260215 - protein, 15 aa, Artificial Sequence
  Description of Artificial Sequence: Synthetic peptide
  Seed: SIGKVCRTLLAKSVF
SIGKVIRTDLFKSIF

SEQ ID NO: 260216 - protein, 15 aa, Artificial Sequence
  Description of Artificial Sequence: Synthetic peptide
  Seed: SIGKVCRTLLAKSVF
SIGKVIRTDLFKSLF

SEQ ID NO: 260217 - protein, 15 aa, Artificial Sequence
  Description of Artificial Sequence: Synthetic peptide
  Seed: SIGKVCRTLLAKSVF
SIGKVIRTDLFKSVF

SEQ ID NO: 260218 - protein, 15 aa, Artificial Sequence
  Description of Artificial Sequence: Synthetic peptide
  Seed: SIGKVCRTLLAKSVF
SIGKVIRTELAKSLF

SEQ ID NO: 260219 - protein, 15 aa, Artificial Sequence
  Description of Artificial Sequence: Synthetic peptide
  Seed: SIGKVCRTLLAKSVF
SIGKVIRTELAKSVF

SEQ ID NO: 260220 - protein, 15 aa, Artificial Sequence
  Description of Artificial Sequence: Synthetic peptide
  Seed: SIGKVCRTLLAKSVF
SIGKVIRTELFKSAF

SEQ ID NO: 260221 - protein, 15 aa, Artificial Sequence
  Description of Artificial Sequence: Synthetic peptide
  Seed: SIGKVCRTLLAKSVF
SIGKVIRTELFKSFF

SEQ ID NO: 260222 - protein, 15 aa, Artificial Sequence
  Description of Artificial Sequence: Synthetic peptide
  Seed: SIGKVCRTLLAKSVF
SIGKVIRTELFKSIF

SEQ ID NO: 260223 - protein, 15 aa, Artificial Sequence
  Description of Artificial Sequence: Synthetic peptide
  Seed: SIGKVCRTLLAKSVF
SIGKVIRTELFKSLF

SEQ ID NO: 260224 - protein, 15 aa, Artificial Sequence
  Description of Artificial Sequence: Synthetic peptide
  Seed: SIGKVCRTLLAKSVF
SIGKVIRTELFKSMF

SEQ ID NO: 260225 - protein, 15 aa, Artificial Sequence
  Description of Artificial Sequence: Synthetic peptide
  Seed: SIGKVCRTLLAKSVF
SIGKVIRTELFKSNF

SEQ ID NO: 260226 - protein, 15 aa, Artificial Sequence
  Description of Artificial Sequence: Synthetic peptide
  Seed: SIGKVCRTLLAKSVF
SIGKVIRTELFKSSF

SEQ ID NO: 260227 - protein, 15 aa, Artificial Sequence
  Description of Artificial Sequence: Synthetic peptide
  Seed: SIGKVCRTLLAKSVF
SIGKVIRTELFKSTF

SEQ ID NO: 260228 - protein, 15 aa, Artificial Sequence
  Description of Artificial Sequence: Synthetic peptide
  Seed: SIGKVCRTLLAKSVF
SIGKVIRTELFKSVF

SEQ ID NO: 260229 - protein, 15 aa, Artificial Sequence
  Description of Artificial Sequence: Synthetic peptide
  Seed: SIGKVCRTLLAKSVF
SIGKVIRTELFKSYF

SEQ ID NO: 260230 - protein, 15 aa, Artificial Sequence
  Description of Artificial Sequence: Synthetic peptide
  Seed: SIGKVCRTLLAKSVF
SIGKVIRTELLKSIF

SEQ ID NO: 260231 - protein, 15 aa, Artificial Sequence
  Description of Artificial Sequence: Synthetic peptide
  Seed: SIGKVCRTLLAKSVF
SIGKVIRTELLKSLF

SEQ ID NO: 260232 - protein, 15 aa, Artificial Sequence
  Description of Artificial Sequence: Synthetic peptide
  Seed: SIGKVCRTLLAKSVF
SIGKVIRTELLKSVF

SEQ ID NO: 260233 - protein, 15 aa, Artificial Sequence
  Description of Artificial Sequence: Synthetic peptide
  Seed: SIGKVCRTLLAKSVF
SIGKVIRTELYKSIF

SEQ ID NO: 260234 - protein, 15 aa, Artificial Sequence
  Description of Artificial Sequence: Synthetic peptide
  Seed: SIGKVCRTLLAKSVF
SIGKVIRTFLAKSAF

SEQ ID NO: 260235 - protein, 15 aa, Artificial Sequence
  Description of Artificial Sequence: Synthetic peptide
  Seed: SIGKVCRTLLAKSVF
SIGKVIRTFLAKSIF

SEQ ID NO: 260236 - protein, 15 aa, Artificial Sequence
  Description of Artificial Sequence: Synthetic peptide
  Seed: SIGKVCRTLLAKSVF
SIGKVIRTFLAKSLF

SEQ ID NO: 260237 - protein, 15 aa, Artificial Sequence
  Description of Artificial Sequence: Synthetic peptide
  Seed: SIGKVCRTLLAKSVF
SIGKVIRTFLAKSMF

SEQ ID NO: 260238 - protein, 15 aa, Artificial Sequence
  Description of Artificial Sequence: Synthetic peptide
  Seed: SIGKVCRTLLAKSVF
SIGKVIRTFLAKSTF

SEQ ID NO: 260239 - protein, 15 aa, Artificial Sequence
  Description of Artificial Sequence: Synthetic peptide
  Seed: SIGKVCRTLLAKSVF
SIGKVIRTFLAKSVF

SEQ ID NO: 260240 - protein, 15 aa, Artificial Sequence
  Description of Artificial Sequence: Synthetic peptide
  Seed: SIGKVCRTLLAKSVF
SIGKVIRTFLFKSAF

SEQ ID NO: 260241 - protein, 15 aa, Artificial Sequence
  Description of Artificial Sequence: Synthetic peptide
  Seed: SIGKVCRTLLAKSVF
SIGKVIRTFLFKSEF

SEQ ID NO: 260242 - protein, 15 aa, Artificial Sequence
  Description of Artificial Sequence: Synthetic peptide
  Seed: SIGKVCRTLLAKSVF
SIGKVIRTFLFKSFF

SEQ ID NO: 260243 - protein, 15 aa, Artificial Sequence
  Description of Artificial Sequence: Synthetic peptide
  Seed: SIGKVCRTLLAKSVF
SIGKVIRTFLFKSIF

SEQ ID NO: 260244 - protein, 15 aa, Artificial Sequence
  Description of Artificial Sequence: Synthetic peptide
  Seed: SIGKVCRTLLAKSVF
SIGKVIRTFLFKSLF

SEQ ID NO: 260245 - protein, 15 aa, Artificial Sequence
  Description of Artificial Sequence: Synthetic peptide
  Seed: SIGKVCRTLLAKSVF
SIGKVIRTFLFKSMF

SEQ ID NO: 260246 - protein, 15 aa, Artificial Sequence
  Description of Artificial Sequence: Synthetic peptide
  Seed: SIGKVCRTLLAKSVF
SIGKVIRTFLFKSNF

SEQ ID NO: 260247 - protein, 15 aa, Artificial Sequence
  Description of Artificial Sequence: Synthetic peptide
  Seed: SIGKVCRTLLAKSVF
SIGKVIRTFLFKSSF

SEQ ID NO: 260248 - protein, 15 aa, Artificial Sequence
  Description of Artificial Sequence: Synthetic peptide
  Seed: SIGKVCRTLLAKSVF
SIGKVIRTFLFKSTF

SEQ ID NO: 260249 - protein, 15 aa, Artificial Sequence
  Description of Artificial Sequence: Synthetic peptide
  Seed: SIGKVCRTLLAKSVF
SIGKVIRTFLFKSVF

SEQ ID NO: 260250 - protein, 15 aa, Artificial Sequence
  Description of Artificial Sequence: Synthetic peptide
  Seed: SIGKVCRTLLAKSVF
SIGKVIRTFLFKSYF

SEQ ID NO: 260251 - protein, 15 aa, Artificial Sequence
  Description of Artificial Sequence: Synthetic peptide
  Seed: SIGKVCRTLLAKSVF
SIGKVIRTFLGKSAF

SEQ ID NO: 260252 - protein, 15 aa, Artificial Sequence
  Description of Artificial Sequence: Synthetic peptide
  Seed: SIGKVCRTLLAKSVF
SIGKVIRTFLGKSIF

SEQ ID NO: 260253 - protein, 15 aa, Artificial Sequence
  Description of Artificial Sequence: Synthetic peptide
  Seed: SIGKVCRTLLAKSVF
SIGKVIRTFLGKSLF

SEQ ID NO: 260254 - protein, 15 aa, Artificial Sequence
  Description of Artificial Sequence: Synthetic peptide
  Seed: SIGKVCRTLLAKSVF
SIGKVIRTFLGKSMF

SEQ ID NO: 260255 - protein, 15 aa, Artificial Sequence
  Description of Artificial Sequence: Synthetic peptide
  Seed: SIGKVCRTLLAKSVF
SIGKVIRTFLGKSTF

SEQ ID NO: 260256 - protein, 15 aa, Artificial Sequence
  Description of Artificial Sequence: Synthetic peptide
  Seed: SIGKVCRTLLAKSVF
SIGKVIRTFLGKSVF

SEQ ID NO: 260257 - protein, 15 aa, Artificial Sequence
  Description of Artificial Sequence: Synthetic peptide
  Seed: SIGKVCRTLLAKSVF
SIGKVIRTFLLKSFF

SEQ ID NO: 260258 - protein, 15 aa, Artificial Sequence
  Description of Artificial Sequence: Synthetic peptide
  Seed: SIGKVCRTLLAKSVF
SIGKVIRTFLLKSIF

SEQ ID NO: 260259 - protein, 15 aa, Artificial Sequence
  Description of Artificial Sequence: Synthetic peptide
  Seed: SIGKVCRTLLAKSVF
SIGKVIRTFLLKSLF

SEQ ID NO: 260260 - protein, 15 aa, Artificial Sequence
  Description of Artificial Sequence: Synthetic peptide
  Seed: SIGKVCRTLLAKSVF
SIGKVIRTFLLKSMF

SEQ ID NO: 260261 - protein, 15 aa, Artificial Sequence
  Description of Artificial Sequence: Synthetic peptide
  Seed: SIGKVCRTLLAKSVF
SIGKVIRTFLLKSVF

SEQ ID NO: 260262 - protein, 15 aa, Artificial Sequence
  Description of Artificial Sequence: Synthetic peptide
  Seed: SIGKVCRTLLAKSVF
SIGKVIRTFLNKSAF

SEQ ID NO: 260263 - protein, 15 aa, Artificial Sequence
  Description of Artificial Sequence: Synthetic peptide
  Seed: SIGKVCRTLLAKSVF
SIGKVIRTFLNKSFF

SEQ ID NO: 260264 - protein, 15 aa, Artificial Sequence
  Description of Artificial Sequence: Synthetic peptide
  Seed: SIGKVCRTLLAKSVF
SIGKVIRTFLNKSIF

SEQ ID NO: 260265 - protein, 15 aa, Artificial Sequence
  Description of Artificial Sequence: Synthetic peptide
  Seed: SIGKVCRTLLAKSVF
SIGKVIRTFLNKSLF

SEQ ID NO: 260266 - protein, 15 aa, Artificial Sequence
  Description of Artificial Sequence: Synthetic peptide
  Seed: SIGKVCRTLLAKSVF
SIGKVIRTFLNKSMF

SEQ ID NO: 260267 - protein, 15 aa, Artificial Sequence
  Description of Artificial Sequence: Synthetic peptide
  Seed: SIGKVCRTLLAKSVF
SIGKVIRTFLNKSSF

SEQ ID NO: 260268 - protein, 15 aa, Artificial Sequence
  Description of Artificial Sequence: Synthetic peptide
  Seed: SIGKVCRTLLAKSVF
SIGKVIRTFLNKSTF

SEQ ID NO: 260269 - protein, 15 aa, Artificial Sequence
  Description of Artificial Sequence: Synthetic peptide
  Seed: SIGKVCRTLLAKSVF
SIGKVIRTFLNKSVF

SEQ ID NO: 260270 - protein, 15 aa, Artificial Sequence
  Description of Artificial Sequence: Synthetic peptide
  Seed: SIGKVCRTLLAKSVF
SIGKVIRTFLSKSAF

SEQ ID NO: 260271 - protein, 15 aa, Artificial Sequence
  Description of Artificial Sequence: Synthetic peptide
  Seed: SIGKVCRTLLAKSVF
SIGKVIRTFLSKSFF

SEQ ID NO: 260272 - protein, 15 aa, Artificial Sequence
  Description of Artificial Sequence: Synthetic peptide
  Seed: SIGKVCRTLLAKSVF
SIGKVIRTFLSKSGF

SEQ ID NO: 260273 - protein, 15 aa, Artificial Sequence
  Description of Artificial Sequence: Synthetic peptide
  Seed: SIGKVCRTLLAKSVF
SIGKVIRTFLSKSIF

SEQ ID NO: 260274 - protein, 15 aa, Artificial Sequence
  Description of Artificial Sequence: Synthetic peptide
  Seed: SIGKVCRTLLAKSVF
SIGKVIRTFLSKSLF

SEQ ID NO: 260275 - protein, 15 aa, Artificial Sequence
  Description of Artificial Sequence: Synthetic peptide
  Seed: SIGKVCRTLLAKSVF
SIGKVIRTFLSKSMF

SEQ ID NO: 260276 - protein, 15 aa, Artificial Sequence
  Description of Artificial Sequence: Synthetic peptide
  Seed: SIGKVCRTLLAKSVF
SIGKVIRTFLSKSSF

SEQ ID NO: 260277 - protein, 15 aa, Artificial Sequence
  Description of Artificial Sequence: Synthetic peptide
  Seed: SIGKVCRTLLAKSVF
SIGKVIRTFLSKSTF

SEQ ID NO: 260278 - protein, 15 aa, Artificial Sequence
  Description of Artificial Sequence: Synthetic peptide
  Seed: SIGKVCRTLLAKSVF
SIGKVIRTFLSKSVF

SEQ ID NO: 260279 - protein, 15 aa, Artificial Sequence
  Description of Artificial Sequence: Synthetic peptide
  Seed: SIGKVCRTLLAKSVF
SIGKVIRTFLTKSAF

SEQ ID NO: 260280 - protein, 15 aa, Artificial Sequence
  Description of Artificial Sequence: Synthetic peptide
  Seed: SIGKVCRTLLAKSVF
SIGKVIRTFLTKSIF

SEQ ID NO: 260281 - protein, 15 aa, Artificial Sequence
  Description of Artificial Sequence: Synthetic peptide
  Seed: SIGKVCRTLLAKSVF
SIGKVIRTFLTKSLF

SEQ ID NO: 260282 - protein, 15 aa, Artificial Sequence
  Description of Artificial Sequence: Synthetic peptide
  Seed: SIGKVCRTLLAKSVF
SIGKVIRTFLTKSMF

SEQ ID NO: 260283 - protein, 15 aa, Artificial Sequence
  Description of Artificial Sequence: Synthetic peptide
  Seed: SIGKVCRTLLAKSVF
SIGKVIRTFLTKSVF

SEQ ID NO: 260284 - protein, 15 aa, Artificial Sequence
  Description of Artificial Sequence: Synthetic peptide
  Seed: SIGKVCRTLLAKSVF
SIGKVIRTFLVKSIF

SEQ ID NO: 260285 - protein, 15 aa, Artificial Sequence
  Description of Artificial Sequence: Synthetic peptide
  Seed: SIGKVCRTLLAKSVF
SIGKVIRTFLVKSLF

SEQ ID NO: 260286 - protein, 15 aa, Artificial Sequence
  Description of Artificial Sequence: Synthetic peptide
  Seed: SIGKVCRTLLAKSVF
SIGKVIRTFLVKSVF

SEQ ID NO: 260287 - protein, 15 aa, Artificial Sequence
  Description of Artificial Sequence: Synthetic peptide
  Seed: SIGKVCRTLLAKSVF
SIGKVIRTFLWKSIF

SEQ ID NO: 260288 - protein, 15 aa, Artificial Sequence
  Description of Artificial Sequence: Synthetic peptide
  Seed: SIGKVCRTLLAKSVF
SIGKVIRTFLWKSVF

SEQ ID NO: 260289 - protein, 15 aa, Artificial Sequence
  Description of Artificial Sequence: Synthetic peptide
  Seed: SIGKVCRTLLAKSVF
SIGKVIRTFLYKSFF

SEQ ID NO: 260290 - protein, 15 aa, Artificial Sequence
  Description of Artificial Sequence: Synthetic peptide
  Seed: SIGKVCRTLLAKSVF
SIGKVIRTFLYKSIF

SEQ ID NO: 260291 - protein, 15 aa, Artificial Sequence
  Description of Artificial Sequence: Synthetic peptide
  Seed: SIGKVCRTLLAKSVF
SIGKVIRTFLYKSLF

SEQ ID NO: 260292 - protein, 15 aa, Artificial Sequence
  Description of Artificial Sequence: Synthetic peptide
  Seed: SIGKVCRTLLAKSVF
SIGKVIRTFLYKSVF

SEQ ID NO: 260293 - protein, 15 aa, Artificial Sequence
  Description of Artificial Sequence: Synthetic peptide
  Seed: SIGKVCRTLLAKSVF
SIGKVIRTGLAKSAF

SEQ ID NO: 260294 - protein, 15 aa, Artificial Sequence
  Description of Artificial Sequence: Synthetic peptide
  Seed: SIGKVCRTLLAKSVF
SIGKVIRTGLAKSIF

SEQ ID NO: 260295 - protein, 15 aa, Artificial Sequence
  Description of Artificial Sequence: Synthetic peptide
  Seed: SIGKVCRTLLAKSVF
SIGKVIRTGLAKSLF

SEQ ID NO: 260296 - protein, 15 aa, Artificial Sequence
  Description of Artificial Sequence: Synthetic peptide
  Seed: SIGKVCRTLLAKSVF
SIGKVIRTGLAKSSF

SEQ ID NO: 260297 - protein, 15 aa, Artificial Sequence
  Description of Artificial Sequence: Synthetic peptide
  Seed: SIGKVCRTLLAKSVF
SIGKVIRTGLAKSTF

SEQ ID NO: 260298 - protein, 15 aa, Artificial Sequence
  Description of Artificial Sequence: Synthetic peptide
  Seed: SIGKVCRTLLAKSVF
SIGKVIRTGLAKSVF

SEQ ID NO: 260299 - protein, 15 aa, Artificial Sequence
  Description of Artificial Sequence: Synthetic peptide
  Seed: SIGKVCRTLLAKSVF
SIGKVIRTGLFKSIF

SEQ ID NO: 260300 - protein, 15 aa, Artificial Sequence
  Description of Artificial Sequence: Synthetic peptide
  Seed: SIGKVCRTLLAKSVF
SIGKVIRTGLFKSLF

SEQ ID NO: 260301 - protein, 15 aa, Artificial Sequence
  Description of Artificial Sequence: Synthetic peptide
  Seed: SIGKVCRTLLAKSVF
SIGKVIRTGLFKSVF

SEQ ID NO: 260302 - protein, 15 aa, Artificial Sequence
  Description of Artificial Sequence: Synthetic peptide
  Seed: SIGKVCRTLLAKSVF
SIGKVIRTHLFKSAF

SEQ ID NO: 260303 - protein, 15 aa, Artificial Sequence
  Description of Artificial Sequence: Synthetic peptide
  Seed: SIGKVCRTLLAKSVF
SIGKVIRTHLFKSEF

SEQ ID NO: 260304 - protein, 15 aa, Artificial Sequence
  Description of Artificial Sequence: Synthetic peptide
  Seed: SIGKVCRTLLAKSVF
SIGKVIRTHLFKSFF

SEQ ID NO: 260305 - protein, 15 aa, Artificial Sequence
  Description of Artificial Sequence: Synthetic peptide
  Seed: SIGKVCRTLLAKSVF
SIGKVIRTHLFKSIF

SEQ ID NO: 260306 - protein, 15 aa, Artificial Sequence
  Description of Artificial Sequence: Synthetic peptide
  Seed: SIGKVCRTLLAKSVF
SIGKVIRTHLFKSLF

SEQ ID NO: 260307 - protein, 15 aa, Artificial Sequence
  Description of Artificial Sequence: Synthetic peptide
  Seed: SIGKVCRTLLAKSVF
SIGKVIRTHLFKSMF

SEQ ID NO: 260308 - protein, 15 aa, Artificial Sequence
  Description of Artificial Sequence: Synthetic peptide
  Seed: SIGKVCRTLLAKSVF
SIGKVIRTHLFKSNF

SEQ ID NO: 260309 - protein, 15 aa, Artificial Sequence
  Description of Artificial Sequence: Synthetic peptide
  Seed: SIGKVCRTLLAKSVF
SIGKVIRTHLFKSSF

SEQ ID NO: 260310 - protein, 15 aa, Artificial Sequence
  Description of Artificial Sequence: Synthetic peptide
  Seed: SIGKVCRTLLAKSVF
SIGKVIRTHLFKSTF

SEQ ID NO: 260311 - protein, 15 aa, Artificial Sequence
  Description of Artificial Sequence: Synthetic peptide
  Seed: SIGKVCRTLLAKSVF
SIGKVIRTHLFKSVF

SEQ ID NO: 260312 - protein, 15 aa, Artificial Sequence
  Description of Artificial Sequence: Synthetic peptide
  Seed: SIGKVCRTLLAKSVF
SIGKVIRTHLFKSYF

SEQ ID NO: 260313 - protein, 15 aa, Artificial Sequence
  Description of Artificial Sequence: Synthetic peptide
  Seed: SIGKVCRTLLAKSVF
SIGKVIRTHLLKSIF

SEQ ID NO: 260314 - protein, 15 aa, Artificial Sequence
  Description of Artificial Sequence: Synthetic peptide
  Seed: SIGKVCRTLLAKSVF
SIGKVIRTHLLKSLF

SEQ ID NO: 260315 - protein, 15 aa, Artificial Sequence
  Description of Artificial Sequence: Synthetic peptide
  Seed: SIGKVCRTLLAKSVF
SIGKVIRTHLLKSVF

SEQ ID NO: 260316 - protein, 15 aa, Artificial Sequence
  Description of Artificial Sequence: Synthetic peptide
  Seed: SIGKVCRTLLAKSVF
SIGKVIRTILAKSAF

SEQ ID NO: 260317 - protein, 15 aa, Artificial Sequence
  Description of Artificial Sequence: Synthetic peptide
  Seed: SIGKVCRTLLAKSVF
SIGKVIRTILAKSIF

SEQ ID NO: 260318 - protein, 15 aa, Artificial Sequence
  Description of Artificial Sequence: Synthetic peptide
  Seed: SIGKVCRTLLAKSVF
SIGKVIRTILAKSLF

SEQ ID NO: 260319 - protein, 15 aa, Artificial Sequence
  Description of Artificial Sequence: Synthetic peptide
  Seed: SIGKVCRTLLAKSVF
SIGKVIRTILAKSMF

SEQ ID NO: 260320 - protein, 15 aa, Artificial Sequence
  Description of Artificial Sequence: Synthetic peptide
  Seed: SIGKVCRTLLAKSVF
SIGKVIRTILAKSNF

SEQ ID NO: 260321 - protein, 15 aa, Artificial Sequence
  Description of Artificial Sequence: Synthetic peptide
  Seed: SIGKVCRTLLAKSVF
SIGKVIRTILAKSSF

SEQ ID NO: 260322 - protein, 15 aa, Artificial Sequence
  Description of Artificial Sequence: Synthetic peptide
  Seed: SIGKVCRTLLAKSVF
SIGKVIRTILAKSTF

SEQ ID NO: 260323 - protein, 15 aa, Artificial Sequence
  Description of Artificial Sequence: Synthetic peptide
  Seed: SIGKVCRTLLAKSVF
SIGKVIRTILAKSVF

SEQ ID NO: 260324 - protein, 15 aa, Artificial Sequence
  Description of Artificial Sequence: Synthetic peptide
  Seed: SIGKVCRTLLAKSVF
SIGKVIRTILFKSAF

SEQ ID NO: 260325 - protein, 15 aa, Artificial Sequence
  Description of Artificial Sequence: Synthetic peptide
  Seed: SIGKVCRTLLAKSVF
SIGKVIRTILFKSDF

SEQ ID NO: 260326 - protein, 15 aa, Artificial Sequence
  Description of Artificial Sequence: Synthetic peptide
  Seed: SIGKVCRTLLAKSVF
SIGKVIRTILFKSEF

SEQ ID NO: 260327 - protein, 15 aa, Artificial Sequence
  Description of Artificial Sequence: Synthetic peptide
  Seed: SIGKVCRTLLAKSVF
SIGKVIRTILFKSFF

SEQ ID NO: 260328 - protein, 15 aa, Artificial Sequence
  Description of Artificial Sequence: Synthetic peptide
  Seed: SIGKVCRTLLAKSVF
SIGKVIRTILFKSIF

SEQ ID NO: 260329 - protein, 15 aa, Artificial Sequence
  Description of Artificial Sequence: Synthetic peptide
  Seed: SIGKVCRTLLAKSVF
SIGKVIRTILFKSLF

SEQ ID NO: 260330 - protein, 15 aa, Artificial Sequence
  Description of Artificial Sequence: Synthetic peptide
  Seed: SIGKVCRTLLAKSVF
SIGKVIRTILFKSMF

SEQ ID NO: 260331 - protein, 15 aa, Artificial Sequence
  Description of Artificial Sequence: Synthetic peptide
  Seed: SIGKVCRTLLAKSVF
SIGKVIRTILFKSNF

SEQ ID NO: 260332 - protein, 15 aa, Artificial Sequence
  Description of Artificial Sequence: Synthetic peptide
  Seed: SIGKVCRTLLAKSVF
SIGKVIRTILFKSSF

SEQ ID NO: 260333 - protein, 15 aa, Artificial Sequence
  Description of Artificial Sequence: Synthetic peptide
  Seed: SIGKVCRTLLAKSVF
SIGKVIRTILFKSTF

SEQ ID NO: 260334 - protein, 15 aa, Artificial Sequence
  Description of Artificial Sequence: Synthetic peptide
  Seed: SIGKVCRTLLAKSVF
SIGKVIRTILFKSVF

SEQ ID NO: 260335 - protein, 15 aa, Artificial Sequence
  Description of Artificial Sequence: Synthetic peptide
  Seed: SIGKVCRTLLAKSVF
SIGKVIRTILFKSYF

SEQ ID NO: 260336 - protein, 15 aa, Artificial Sequence
  Description of Artificial Sequence: Synthetic peptide
  Seed: SIGKVCRTLLAKSVF
SIGKVIRTILGKSAF

SEQ ID NO: 260337 - protein, 15 aa, Artificial Sequence
  Description of Artificial Sequence: Synthetic peptide
  Seed: SIGKVCRTLLAKSVF
SIGKVIRTILGKSIF

SEQ ID NO: 260338 - protein, 15 aa, Artificial Sequence
  Description of Artificial Sequence: Synthetic peptide
  Seed: SIGKVCRTLLAKSVF
SIGKVIRTILGKSLF

SEQ ID NO: 260339 - protein, 15 aa, Artificial Sequence
  Description of Artificial Sequence: Synthetic peptide
  Seed: SIGKVCRTLLAKSVF
SIGKVIRTILGKSTF

SEQ ID NO: 260340 - protein, 15 aa, Artificial Sequence
  Description of Artificial Sequence: Synthetic peptide
  Seed: SIGKVCRTLLAKSVF
SIGKVIRTILGKSVF

SEQ ID NO: 260341 - protein, 15 aa, Artificial Sequence
  Description of Artificial Sequence: Synthetic peptide
  Seed: SIGKVCRTLLAKSVF
SIGKVIRTILLKSIF

SEQ ID NO: 260342 - protein, 15 aa, Artificial Sequence
  Description of Artificial Sequence: Synthetic peptide
  Seed: SIGKVCRTLLAKSVF
SIGKVIRTILLKSLF

SEQ ID NO: 260343 - protein, 15 aa, Artificial Sequence
  Description of Artificial Sequence: Synthetic peptide
  Seed: SIGKVCRTLLAKSVF
SIGKVIRTILLKSVF

SEQ ID NO: 260344 - protein, 15 aa, Artificial Sequence
  Description of Artificial Sequence: Synthetic peptide
  Seed: SIGKVCRTLLAKSVF
SIGKVIRTILPKSIF

SEQ ID NO: 260345 - protein, 15 aa, Artificial Sequence
  Description of Artificial Sequence: Synthetic peptide
  Seed: SIGKVCRTLLAKSVF
SIGKVIRTILPKSVF

SEQ ID NO: 260346 - protein, 15 aa, Artificial Sequence
  Description of Artificial Sequence: Synthetic peptide
  Seed: SIGKVCRTLLAKSVF
SIGKVIRTILSKSAF

SEQ ID NO: 260347 - protein, 15 aa, Artificial Sequence
  Description of Artificial Sequence: Synthetic peptide
  Seed: SIGKVCRTLLAKSVF
SIGKVIRTILSKSIF

SEQ ID NO: 260348 - protein, 15 aa, Artificial Sequence
  Description of Artificial Sequence: Synthetic peptide
  Seed: SIGKVCRTLLAKSVF
SIGKVIRTILSKSLF

SEQ ID NO: 260349 - protein, 15 aa, Artificial Sequence
  Description of Artificial Sequence: Synthetic peptide
  Seed: SIGKVCRTLLAKSVF
SIGKVIRTILSKSVF

SEQ ID NO: 260350 - protein, 15 aa, Artificial Sequence
  Description of Artificial Sequence: Synthetic peptide
  Seed: SIGKVCRTLLAKSVF
SIGKVIRTILWKSIF

SEQ ID NO: 260351 - protein, 15 aa, Artificial Sequence
  Description of Artificial Sequence: Synthetic peptide
  Seed: SIGKVCRTLLAKSVF
SIGKVIRTILWKSLF

SEQ ID NO: 260352 - protein, 15 aa, Artificial Sequence
  Description of Artificial Sequence: Synthetic peptide
  Seed: SIGKVCRTLLAKSVF
SIGKVIRTILWKSVF

SEQ ID NO: 260353 - protein, 15 aa, Artificial Sequence
  Description of Artificial Sequence: Synthetic peptide
  Seed: SIGKVCRTLLAKSVF
SIGKVIRTILYKSIF

SEQ ID NO: 260354 - protein, 15 aa, Artificial Sequence
  Description of Artificial Sequence: Synthetic peptide
  Seed: SIGKVCRTLLAKSVF
SIGKVIRTILYKSLF

SEQ ID NO: 260355 - protein, 15 aa, Artificial Sequence
  Description of Artificial Sequence: Synthetic peptide
  Seed: SIGKVCRTLLAKSVF
SIGKVIRTILYKSVF

SEQ ID NO: 260356 - protein, 15 aa, Artificial Sequence
  Description of Artificial Sequence: Synthetic peptide
  Seed: SIGKVCRTLLAKSVF
SIGKVIRTKLFKSIF

SEQ ID NO: 260357 - protein, 15 aa, Artificial Sequence
  Description of Artificial Sequence: Synthetic peptide
  Seed: SIGKVCRTLLAKSVF
SIGKVIRTKLFKSLF

SEQ ID NO: 260358 - protein, 15 aa, Artificial Sequence
  Description of Artificial Sequence: Synthetic peptide
  Seed: SIGKVCRTLLAKSVF
SIGKVIRTKLFKSVF

SEQ ID NO: 260359 - protein, 15 aa, Artificial Sequence
  Description of Artificial Sequence: Synthetic peptide
  Seed: SIGKVCRTLLAKSVF
SIGKVIRTLLAKSAF

SEQ ID NO: 260360 - protein, 15 aa, Artificial Sequence
  Description of Artificial Sequence: Synthetic peptide
  Seed: SIGKVCRTLLAKSVF
SIGKVIRTLLAKSCF

SEQ ID NO: 260361 - protein, 15 aa, Artificial Sequence
  Description of Artificial Sequence: Synthetic peptide
  Seed: SIGKVCRTLLAKSVF
SIGKVIRTLLAKSGF

SEQ ID NO: 260362 - protein, 15 aa, Artificial Sequence
  Description of Artificial Sequence: Synthetic peptide
  Seed: SIGKVCRTLLAKSVF
SIGKVIRTLLAKSIF

SEQ ID NO: 260363 - protein, 15 aa, Artificial Sequence
  Description of Artificial Sequence: Synthetic peptide
  Seed: SIGKVCRTLLAKSVF
SIGKVIRTLLAKSLF

SEQ ID NO: 260364 - protein, 15 aa, Artificial Sequence
  Description of Artificial Sequence: Synthetic peptide
  Seed: SIGKVCRTLLAKSVF
SIGKVIRTLLAKSMF

SEQ ID NO: 260365 - protein, 15 aa, Artificial Sequence
  Description of Artificial Sequence: Synthetic peptide
  Seed: SIGKVCRTLLAKSVF
SIGKVIRTLLAKSNF

SEQ ID NO: 260366 - protein, 15 aa, Artificial Sequence
  Description of Artificial Sequence: Synthetic peptide
  Seed: SIGKVCRTLLAKSVF
SIGKVIRTLLAKSSF

SEQ ID NO: 260367 - protein, 15 aa, Artificial Sequence
  Description of Artificial Sequence: Synthetic peptide
  Seed: SIGKVCRTLLAKSVF
SIGKVIRTLLAKSTF

SEQ ID NO: 260368 - protein, 15 aa, Artificial Sequence
  Description of Artificial Sequence: Synthetic peptide
  Seed: SIGKVCRTLLAKSVF
SIGKVIRTLLAKSVF

SEQ ID NO: 260369 - protein, 15 aa, Artificial Sequence
  Description of Artificial Sequence: Synthetic peptide
  Seed: SIGKVCRTLLAKSVF
SIGKVIRTLLAKSYF

SEQ ID NO: 260370 - protein, 15 aa, Artificial Sequence
  Description of Artificial Sequence: Synthetic peptide
  Seed: SIGKVCRTLLAKSVF
SIGKVIRTLLFKSAF

SEQ ID NO: 260371 - protein, 15 aa, Artificial Sequence
  Description of Artificial Sequence: Synthetic peptide
  Seed: SIGKVCRTLLAKSVF
SIGKVIRTLLFKSDF

SEQ ID NO: 260372 - protein, 15 aa, Artificial Sequence
  Description of Artificial Sequence: Synthetic peptide
  Seed: SIGKVCRTLLAKSVF
SIGKVIRTLLFKSEF

SEQ ID NO: 260373 - protein, 15 aa, Artificial Sequence
  Description of Artificial Sequence: Synthetic peptide
  Seed: SIGKVCRTLLAKSVF
SIGKVIRTLLFKSFF

SEQ ID NO: 260374 - protein, 15 aa, Artificial Sequence
  Description of Artificial Sequence: Synthetic peptide
  Seed: SIGKVCRTLLAKSVF
SIGKVIRTLLFKSIF

SEQ ID NO: 260375 - protein, 15 aa, Artificial Sequence
  Description of Artificial Sequence: Synthetic peptide
  Seed: SIGKVCRTLLAKSVF
SIGKVIRTLLFKSLF

SEQ ID NO: 260376 - protein, 15 aa, Artificial Sequence
  Description of Artificial Sequence: Synthetic peptide
  Seed: SIGKVCRTLLAKSVF
SIGKVIRTLLFKSMF

SEQ ID NO: 260377 - protein, 15 aa, Artificial Sequence
  Description of Artificial Sequence: Synthetic peptide
  Seed: SIGKVCRTLLAKSVF
SIGKVIRTLLFKSNF

SEQ ID NO: 260378 - protein, 15 aa, Artificial Sequence
  Description of Artificial Sequence: Synthetic peptide
  Seed: SIGKVCRTLLAKSVF
SIGKVIRTLLFKSSF

SEQ ID NO: 260379 - protein, 15 aa, Artificial Sequence
  Description of Artificial Sequence: Synthetic peptide
  Seed: SIGKVCRTLLAKSVF
SIGKVIRTLLFKSTF

SEQ ID NO: 260380 - protein, 15 aa, Artificial Sequence
  Description of Artificial Sequence: Synthetic peptide
  Seed: SIGKVCRTLLAKSVF
SIGKVIRTLLFKSVF

SEQ ID NO: 260381 - protein, 15 aa, Artificial Sequence
  Description of Artificial Sequence: Synthetic peptide
  Seed: SIGKVCRTLLAKSVF
SIGKVIRTLLFKSYF

SEQ ID NO: 260382 - protein, 15 aa, Artificial Sequence
  Description of Artificial Sequence: Synthetic peptide
  Seed: SIGKVCRTLLAKSVF
SIGKVIRTLLGKSAF

SEQ ID NO: 260383 - protein, 15 aa, Artificial Sequence
  Description of Artificial Sequence: Synthetic peptide
  Seed: SIGKVCRTLLAKSVF
SIGKVIRTLLGKSCF

SEQ ID NO: 260384 - protein, 15 aa, Artificial Sequence
  Description of Artificial Sequence: Synthetic peptide
  Seed: SIGKVCRTLLAKSVF
SIGKVIRTLLGKSGF

SEQ ID NO: 260385 - protein, 15 aa, Artificial Sequence
  Description of Artificial Sequence: Synthetic peptide
  Seed: SIGKVCRTLLAKSVF
SIGKVIRTLLGKSIF

SEQ ID NO: 260386 - protein, 15 aa, Artificial Sequence
  Description of Artificial Sequence: Synthetic peptide
  Seed: SIGKVCRTLLAKSVF
SIGKVIRTLLGKSLF

SEQ ID NO: 260387 - protein, 15 aa, Artificial Sequence
  Description of Artificial Sequence: Synthetic peptide
  Seed: SIGKVCRTLLAKSVF
SIGKVIRTLLGKSMF

SEQ ID NO: 260388 - protein, 15 aa, Artificial Sequence
  Description of Artificial Sequence: Synthetic peptide
  Seed: SIGKVCRTLLAKSVF
SIGKVIRTLLGKSSF

SEQ ID NO: 260389 - protein, 15 aa, Artificial Sequence
  Description of Artificial Sequence: Synthetic peptide
  Seed: SIGKVCRTLLAKSVF
SIGKVIRTLLGKSTF

SEQ ID NO: 260390 - protein, 15 aa, Artificial Sequence
  Description of Artificial Sequence: Synthetic peptide
  Seed: SIGKVCRTLLAKSVF
SIGKVIRTLLGKSVF

SEQ ID NO: 260391 - protein, 15 aa, Artificial Sequence
  Description of Artificial Sequence: Synthetic peptide
  Seed: SIGKVCRTLLAKSVF
SIGKVIRTLLNKSAF

SEQ ID NO: 260392 - protein, 15 aa, Artificial Sequence
  Description of Artificial Sequence: Synthetic peptide
  Seed: SIGKVCRTLLAKSVF
SIGKVIRTLLNKSIF

SEQ ID NO: 260393 - protein, 15 aa, Artificial Sequence
  Description of Artificial Sequence: Synthetic peptide
  Seed: SIGKVCRTLLAKSVF
SIGKVIRTLLNKSLF

SEQ ID NO: 260394 - protein, 15 aa, Artificial Sequence
  Description of Artificial Sequence: Synthetic peptide
  Seed: SIGKVCRTLLAKSVF
SIGKVIRTLLNKSVF

SEQ ID NO: 260395 - protein, 15 aa, Artificial Sequence
  Description of Artificial Sequence: Synthetic peptide
  Seed: SIGKVCRTLLAKSVF
SIGKVIRTLLPKSAF

SEQ ID NO: 260396 - protein, 15 aa, Artificial Sequence
  Description of Artificial Sequence: Synthetic peptide
  Seed: SIGKVCRTLLAKSVF
SIGKVIRTLLPKSIF

SEQ ID NO: 260397 - protein, 15 aa, Artificial Sequence
  Description of Artificial Sequence: Synthetic peptide
  Seed: SIGKVCRTLLAKSVF
SIGKVIRTLLPKSLF

SEQ ID NO: 260398 - protein, 15 aa, Artificial Sequence
  Description of Artificial Sequence: Synthetic peptide
  Seed: SIGKVCRTLLAKSVF
SIGKVIRTLLPKSMF

SEQ ID NO: 260399 - protein, 15 aa, Artificial Sequence
  Description of Artificial Sequence: Synthetic peptide
  Seed: SIGKVCRTLLAKSVF
SIGKVIRTLLPKSNF

SEQ ID NO: 260400 - protein, 15 aa, Artificial Sequence
  Description of Artificial Sequence: Synthetic peptide
  Seed: SIGKVCRTLLAKSVF
SIGKVIRTLLPKSSF

SEQ ID NO: 260401 - protein, 15 aa, Artificial Sequence
  Description of Artificial Sequence: Synthetic peptide
  Seed: SIGKVCRTLLAKSVF
SIGKVIRTLLPKSTF

SEQ ID NO: 260402 - protein, 15 aa, Artificial Sequence
  Description of Artificial Sequence: Synthetic peptide
  Seed: SIGKVCRTLLAKSVF
SIGKVIRTLLPKSVF

SEQ ID NO: 260403 - protein, 15 aa, Artificial Sequence
  Description of Artificial Sequence: Synthetic peptide
  Seed: SIGKVCRTLLAKSVF
SIGKVIRTLLSKSAF

SEQ ID NO: 260404 - protein, 15 aa, Artificial Sequence
  Description of Artificial Sequence: Synthetic peptide
  Seed: SIGKVCRTLLAKSVF
SIGKVIRTLLSKSCF

SEQ ID NO: 260405 - protein, 15 aa, Artificial Sequence
  Description of Artificial Sequence: Synthetic peptide
  Seed: SIGKVCRTLLAKSVF
SIGKVIRTLLSKSFF

SEQ ID NO: 260406 - protein, 15 aa, Artificial Sequence
  Description of Artificial Sequence: Synthetic peptide
  Seed: SIGKVCRTLLAKSVF
SIGKVIRTLLSKSGF

SEQ ID NO: 260407 - protein, 15 aa, Artificial Sequence
  Description of Artificial Sequence: Synthetic peptide
  Seed: SIGKVCRTLLAKSVF
SIGKVIRTLLSKSIF

SEQ ID NO: 260408 - protein, 15 aa, Artificial Sequence
  Description of Artificial Sequence: Synthetic peptide
  Seed: SIGKVCRTLLAKSVF
SIGKVIRTLLSKSLF

SEQ ID NO: 260409 - protein, 15 aa, Artificial Sequence
  Description of Artificial Sequence: Synthetic peptide
  Seed: SIGKVCRTLLAKSVF
SIGKVIRTLLSKSMF

SEQ ID NO: 260410 - protein, 15 aa, Artificial Sequence
  Description of Artificial Sequence: Synthetic peptide
  Seed: SIGKVCRTLLAKSVF
SIGKVIRTLLSKSNF

SEQ ID NO: 260411 - protein, 15 aa, Artificial Sequence
  Description of Artificial Sequence: Synthetic peptide
  Seed: SIGKVCRTLLAKSVF
SIGKVIRTLLSKSSF

SEQ ID NO: 260412 - protein, 15 aa, Artificial Sequence
  Description of Artificial Sequence: Synthetic peptide
  Seed: SIGKVCRTLLAKSVF
SIGKVIRTLLSKSTF

SEQ ID NO: 260413 - protein, 15 aa, Artificial Sequence
  Description of Artificial Sequence: Synthetic peptide
  Seed: SIGKVCRTLLAKSVF
SIGKVIRTLLSKSYF

SEQ ID NO: 260414 - protein, 15 aa, Artificial Sequence
  Description of Artificial Sequence: Synthetic peptide
  Seed: SIGKVCRTLLAKSVF
SIGKVIRTLLTKSAF

SEQ ID NO: 260415 - protein, 15 aa, Artificial Sequence
  Description of Artificial Sequence: Synthetic peptide
  Seed: SIGKVCRTLLAKSVF
SIGKVIRTLLTKSIF

SEQ ID NO: 260416 - protein, 15 aa, Artificial Sequence
  Description of Artificial Sequence: Synthetic peptide
  Seed: SIGKVCRTLLAKSVF
SIGKVIRTLLTKSLF

SEQ ID NO: 260417 - protein, 15 aa, Artificial Sequence
  Description of Artificial Sequence: Synthetic peptide
  Seed: SIGKVCRTLLAKSVF
SIGKVIRTLLTKSMF

SEQ ID NO: 260418 - protein, 15 aa, Artificial Sequence
  Description of Artificial Sequence: Synthetic peptide
  Seed: SIGKVCRTLLAKSVF
SIGKVIRTLLTKSNF

SEQ ID NO: 260419 - protein, 15 aa, Artificial Sequence
  Description of Artificial Sequence: Synthetic peptide
  Seed: SIGKVCRTLLAKSVF
SIGKVIRTLLTKSSF

SEQ ID NO: 260420 - protein, 15 aa, Artificial Sequence
  Description of Artificial Sequence: Synthetic peptide
  Seed: SIGKVCRTLLAKSVF
SIGKVIRTLLTKSTF

SEQ ID NO: 260421 - protein, 15 aa, Artificial Sequence
  Description of Artificial Sequence: Synthetic peptide
  Seed: SIGKVCRTLLAKSVF
SIGKVIRTLLTKSVF

SEQ ID NO: 260422 - protein, 15 aa, Artificial Sequence
  Description of Artificial Sequence: Synthetic peptide
  Seed: SIGKVCRTLLAKSVF
SIGKVIRTLLVKSAF

SEQ ID NO: 260423 - protein, 15 aa, Artificial Sequence
  Description of Artificial Sequence: Synthetic peptide
  Seed: SIGKVCRTLLAKSVF
SIGKVIRTLLVKSIF

SEQ ID NO: 260424 - protein, 15 aa, Artificial Sequence
  Description of Artificial Sequence: Synthetic peptide
  Seed: SIGKVCRTLLAKSVF
SIGKVIRTLLVKSLF

SEQ ID NO: 260425 - protein, 15 aa, Artificial Sequence
  Description of Artificial Sequence: Synthetic peptide
  Seed: SIGKVCRTLLAKSVF
SIGKVIRTLLVKSVF

SEQ ID NO: 260426 - protein, 15 aa, Artificial Sequence
  Description of Artificial Sequence: Synthetic peptide
  Seed: SIGKVCRTLLAKSVF
SIGKVIRTLLYKSLF

SEQ ID NO: 260427 - protein, 15 aa, Artificial Sequence
  Description of Artificial Sequence: Synthetic peptide
  Seed: SIGKVCRTLLAKSVF
SIGKVIRTLLYKSVF

SEQ ID NO: 260428 - protein, 15 aa, Artificial Sequence
  Description of Artificial Sequence: Synthetic peptide
  Seed: SIGKVCRTLLAKSVF
SIGKVIRTMLAKSAF

SEQ ID NO: 260429 - protein, 15 aa, Artificial Sequence
  Description of Artificial Sequence: Synthetic peptide
  Seed: SIGKVCRTLLAKSVF
SIGKVIRTMLAKSCF

SEQ ID NO: 260430 - protein, 15 aa, Artificial Sequence
  Description of Artificial Sequence: Synthetic peptide
  Seed: SIGKVCRTLLAKSVF
SIGKVIRTMLAKSFF

SEQ ID NO: 260431 - protein, 15 aa, Artificial Sequence
  Description of Artificial Sequence: Synthetic peptide
  Seed: SIGKVCRTLLAKSVF
SIGKVIRTMLAKSGF

SEQ ID NO: 260432 - protein, 15 aa, Artificial Sequence
  Description of Artificial Sequence: Synthetic peptide
  Seed: SIGKVCRTLLAKSVF
SIGKVIRTMLAKSHF

SEQ ID NO: 260433 - protein, 15 aa, Artificial Sequence
  Description of Artificial Sequence: Synthetic peptide
  Seed: SIGKVCRTLLAKSVF
SIGKVIRTMLAKSIF

SEQ ID NO: 260434 - protein, 15 aa, Artificial Sequence
  Description of Artificial Sequence: Synthetic peptide
  Seed: SIGKVCRTLLAKSVF
SIGKVIRTMLAKSLF

SEQ ID NO: 260435 - protein, 15 aa, Artificial Sequence
  Description of Artificial Sequence: Synthetic peptide
  Seed: SIGKVCRTLLAKSVF
SIGKVIRTMLAKSMF

SEQ ID NO: 260436 - protein, 15 aa, Artificial Sequence
  Description of Artificial Sequence: Synthetic peptide
  Seed: SIGKVCRTLLAKSVF
SIGKVIRTMLAKSNF

SEQ ID NO: 260437 - protein, 15 aa, Artificial Sequence
  Description of Artificial Sequence: Synthetic peptide
  Seed: SIGKVCRTLLAKSVF
SIGKVIRTMLAKSSF

SEQ ID NO: 260438 - protein, 15 aa, Artificial Sequence
  Description of Artificial Sequence: Synthetic peptide
  Seed: SIGKVCRTLLAKSVF
SIGKVIRTMLAKSTF

SEQ ID NO: 260439 - protein, 15 aa, Artificial Sequence
  Description of Artificial Sequence: Synthetic peptide
  Seed: SIGKVCRTLLAKSVF
SIGKVIRTMLAKSVF

SEQ ID NO: 260440 - protein, 15 aa, Artificial Sequence
  Description of Artificial Sequence: Synthetic peptide
  Seed: SIGKVCRTLLAKSVF
SIGKVIRTMLAKSYF

SEQ ID NO: 260441 - protein, 15 aa, Artificial Sequence
  Description of Artificial Sequence: Synthetic peptide
  Seed: SIGKVCRTLLAKSVF
SIGKVIRTMLFKSEF

SEQ ID NO: 260442 - protein, 15 aa, Artificial Sequence
  Description of Artificial Sequence: Synthetic peptide
  Seed: SIGKVCRTLLAKSVF
SIGKVIRTMLFKSFF

SEQ ID NO: 260443 - protein, 15 aa, Artificial Sequence
  Description of Artificial Sequence: Synthetic peptide
  Seed: SIGKVCRTLLAKSVF
SIGKVIRTMLFKSIF

SEQ ID NO: 260444 - protein, 15 aa, Artificial Sequence
  Description of Artificial Sequence: Synthetic peptide
  Seed: SIGKVCRTLLAKSVF
SIGKVIRTMLFKSLF

SEQ ID NO: 260445 - protein, 15 aa, Artificial Sequence
  Description of Artificial Sequence: Synthetic peptide
  Seed: SIGKVCRTLLAKSVF
SIGKVIRTMLFKSMF

SEQ ID NO: 260446 - protein, 15 aa, Artificial Sequence
  Description of Artificial Sequence: Synthetic peptide
  Seed: SIGKVCRTLLAKSVF
SIGKVIRTMLFKSNF

SEQ ID NO: 260447 - protein, 15 aa, Artificial Sequence
  Description of Artificial Sequence: Synthetic peptide
  Seed: SIGKVCRTLLAKSVF
SIGKVIRTMLFKSTF

SEQ ID NO: 260448 - protein, 15 aa, Artificial Sequence
  Description of Artificial Sequence: Synthetic peptide
  Seed: SIGKVCRTLLAKSVF
SIGKVIRTMLFKSVF

SEQ ID NO: 260449 - protein, 15 aa, Artificial Sequence
  Description of Artificial Sequence: Synthetic peptide
  Seed: SIGKVCRTLLAKSVF
SIGKVIRTMLFKSYF

SEQ ID NO: 260450 - protein, 15 aa, Artificial Sequence
  Description of Artificial Sequence: Synthetic peptide
  Seed: SIGKVCRTLLAKSVF
SIGKVIRTMLGKSAF

SEQ ID NO: 260451 - protein, 15 aa, Artificial Sequence
  Description of Artificial Sequence: Synthetic peptide
  Seed: SIGKVCRTLLAKSVF
SIGKVIRTMLGKSCF

SEQ ID NO: 260452 - protein, 15 aa, Artificial Sequence
  Description of Artificial Sequence: Synthetic peptide
  Seed: SIGKVCRTLLAKSVF
SIGKVIRTMLGKSGF

SEQ ID NO: 260453 - protein, 15 aa, Artificial Sequence
  Description of Artificial Sequence: Synthetic peptide
  Seed: SIGKVCRTLLAKSVF
SIGKVIRTMLGKSIF

SEQ ID NO: 260454 - protein, 15 aa, Artificial Sequence
  Description of Artificial Sequence: Synthetic peptide
  Seed: SIGKVCRTLLAKSVF
SIGKVIRTMLGKSLF

SEQ ID NO: 260455 - protein, 15 aa, Artificial Sequence
  Description of Artificial Sequence: Synthetic peptide
  Seed: SIGKVCRTLLAKSVF
SIGKVIRTMLGKSMF

SEQ ID NO: 260456 - protein, 15 aa, Artificial Sequence
  Description of Artificial Sequence: Synthetic peptide
  Seed: SIGKVCRTLLAKSVF
SIGKVIRTMLGKSSF

SEQ ID NO: 260457 - protein, 15 aa, Artificial Sequence
  Description of Artificial Sequence: Synthetic peptide
  Seed: SIGKVCRTLLAKSVF
SIGKVIRTMLGKSTF

SEQ ID NO: 260458 - protein, 15 aa, Artificial Sequence
  Description of Artificial Sequence: Synthetic peptide
  Seed: SIGKVCRTLLAKSVF
SIGKVIRTMLGKSVF

SEQ ID NO: 260459 - protein, 15 aa, Artificial Sequence
  Description of Artificial Sequence: Synthetic peptide
  Seed: SIGKVCRTLLAKSVF
SIGKVIRTMLNKSAF

SEQ ID NO: 260460 - protein, 15 aa, Artificial Sequence
  Description of Artificial Sequence: Synthetic peptide
  Seed: SIGKVCRTLLAKSVF
SIGKVIRTMLNKSIF

SEQ ID NO: 260461 - protein, 15 aa, Artificial Sequence
  Description of Artificial Sequence: Synthetic peptide
  Seed: SIGKVCRTLLAKSVF
SIGKVIRTMLNKSLF

SEQ ID NO: 260462 - protein, 15 aa, Artificial Sequence
  Description of Artificial Sequence: Synthetic peptide
  Seed: SIGKVCRTLLAKSVF
SIGKVIRTMLNKSVF

SEQ ID NO: 260463 - protein, 15 aa, Artificial Sequence
  Description of Artificial Sequence: Synthetic peptide
  Seed: SIGKVCRTLLAKSVF
SIGKVIRTMLPKSAF

SEQ ID NO: 260464 - protein, 15 aa, Artificial Sequence
  Description of Artificial Sequence: Synthetic peptide
  Seed: SIGKVCRTLLAKSVF
SIGKVIRTMLPKSIF

SEQ ID NO: 260465 - protein, 15 aa, Artificial Sequence
  Description of Artificial Sequence: Synthetic peptide
  Seed: SIGKVCRTLLAKSVF
SIGKVIRTMLPKSLF

SEQ ID NO: 260466 - protein, 15 aa, Artificial Sequence
  Description of Artificial Sequence: Synthetic peptide
  Seed: SIGKVCRTLLAKSVF
SIGKVIRTMLPKSMF

SEQ ID NO: 260467 - protein, 15 aa, Artificial Sequence
  Description of Artificial Sequence: Synthetic peptide
  Seed: SIGKVCRTLLAKSVF
SIGKVIRTMLPKSNF

SEQ ID NO: 260468 - protein, 15 aa, Artificial Sequence
  Description of Artificial Sequence: Synthetic peptide
  Seed: SIGKVCRTLLAKSVF
SIGKVIRTMLPKSSF

SEQ ID NO: 260469 - protein, 15 aa, Artificial Sequence
  Description of Artificial Sequence: Synthetic peptide
  Seed: SIGKVCRTLLAKSVF
SIGKVIRTMLPKSTF

SEQ ID NO: 260470 - protein, 15 aa, Artificial Sequence
  Description of Artificial Sequence: Synthetic peptide
  Seed: SIGKVCRTLLAKSVF
SIGKVIRTMLPKSVF

SEQ ID NO: 260471 - protein, 15 aa, Artificial Sequence
  Description of Artificial Sequence: Synthetic peptide
  Seed: SIGKVCRTLLAKSVF
SIGKVIRTMLSKSAF

SEQ ID NO: 260472 - protein, 15 aa, Artificial Sequence
  Description of Artificial Sequence: Synthetic peptide
  Seed: SIGKVCRTLLAKSVF
SIGKVIRTMLSKSCF

SEQ ID NO: 260473 - protein, 15 aa, Artificial Sequence
  Description of Artificial Sequence: Synthetic peptide
  Seed: SIGKVCRTLLAKSVF
SIGKVIRTMLSKSIF

SEQ ID NO: 260474 - protein, 15 aa, Artificial Sequence
  Description of Artificial Sequence: Synthetic peptide
  Seed: SIGKVCRTLLAKSVF
SIGKVIRTMLSKSLF

SEQ ID NO: 260475 - protein, 15 aa, Artificial Sequence
  Description of Artificial Sequence: Synthetic peptide
  Seed: SIGKVCRTLLAKSVF
SIGKVIRTMLSKSMF

SEQ ID NO: 260476 - protein, 15 aa, Artificial Sequence
  Description of Artificial Sequence: Synthetic peptide
  Seed: SIGKVCRTLLAKSVF
SIGKVIRTMLSKSNF

SEQ ID NO: 260477 - protein, 15 aa, Artificial Sequence
  Description of Artificial Sequence: Synthetic peptide
  Seed: SIGKVCRTLLAKSVF
SIGKVIRTMLSKSSF

SEQ ID NO: 260478 - protein, 15 aa, Artificial Sequence
  Description of Artificial Sequence: Synthetic peptide
  Seed: SIGKVCRTLLAKSVF
SIGKVIRTMLSKSTF

SEQ ID NO: 260479 - protein, 15 aa, Artificial Sequence
  Description of Artificial Sequence: Synthetic peptide
  Seed: SIGKVCRTLLAKSVF
SIGKVIRTMLSKSVF

SEQ ID NO: 260480 - protein, 15 aa, Artificial Sequence
  Description of Artificial Sequence: Synthetic peptide
  Seed: SIGKVCRTLLAKSVF
SIGKVIRTMLTKSAF

SEQ ID NO: 260481 - protein, 15 aa, Artificial Sequence
  Description of Artificial Sequence: Synthetic peptide
  Seed: SIGKVCRTLLAKSVF
SIGKVIRTMLTKSIF

SEQ ID NO: 260482 - protein, 15 aa, Artificial Sequence
  Description of Artificial Sequence: Synthetic peptide
  Seed: SIGKVCRTLLAKSVF
SIGKVIRTMLTKSLF

SEQ ID NO: 260483 - protein, 15 aa, Artificial Sequence
  Description of Artificial Sequence: Synthetic peptide
  Seed: SIGKVCRTLLAKSVF
SIGKVIRTMLTKSMF

SEQ ID NO: 260484 - protein, 15 aa, Artificial Sequence
  Description of Artificial Sequence: Synthetic peptide
  Seed: SIGKVCRTLLAKSVF
SIGKVIRTMLTKSNF

SEQ ID NO: 260485 - protein, 15 aa, Artificial Sequence
  Description of Artificial Sequence: Synthetic peptide
  Seed: SIGKVCRTLLAKSVF
SIGKVIRTMLTKSSF

SEQ ID NO: 260486 - protein, 15 aa, Artificial Sequence
  Description of Artificial Sequence: Synthetic peptide
  Seed: SIGKVCRTLLAKSVF
SIGKVIRTMLTKSTF

SEQ ID NO: 260487 - protein, 15 aa, Artificial Sequence
  Description of Artificial Sequence: Synthetic peptide
  Seed: SIGKVCRTLLAKSVF
SIGKVIRTMLTKSVF

SEQ ID NO: 260488 - protein, 15 aa, Artificial Sequence
  Description of Artificial Sequence: Synthetic peptide
  Seed: SIGKVCRTLLAKSVF
SIGKVIRTMLVKSAF

SEQ ID NO: 260489 - protein, 15 aa, Artificial Sequence
  Description of Artificial Sequence: Synthetic peptide
  Seed: SIGKVCRTLLAKSVF
SIGKVIRTMLVKSIF

SEQ ID NO: 260490 - protein, 15 aa, Artificial Sequence
  Description of Artificial Sequence: Synthetic peptide
  Seed: SIGKVCRTLLAKSVF
SIGKVIRTMLVKSLF

SEQ ID NO: 260491 - protein, 15 aa, Artificial Sequence
  Description of Artificial Sequence: Synthetic peptide
  Seed: SIGKVCRTLLAKSVF
SIGKVIRTMLVKSNF

SEQ ID NO: 260492 - protein, 15 aa, Artificial Sequence
  Description of Artificial Sequence: Synthetic peptide
  Seed: SIGKVCRTLLAKSVF
SIGKVIRTMLVKSSF

SEQ ID NO: 260493 - protein, 15 aa, Artificial Sequence
  Description of Artificial Sequence: Synthetic peptide
  Seed: SIGKVCRTLLAKSVF
SIGKVIRTMLVKSVF

SEQ ID NO: 260494 - protein, 15 aa, Artificial Sequence
  Description of Artificial Sequence: Synthetic peptide
  Seed: SIGKVCRTLLAKSVF
SIGKVIRTNLFKSFF

SEQ ID NO: 260495 - protein, 15 aa, Artificial Sequence
  Description of Artificial Sequence: Synthetic peptide
  Seed: SIGKVCRTLLAKSVF
SIGKVIRTNLFKSIF

SEQ ID NO: 260496 - protein, 15 aa, Artificial Sequence
  Description of Artificial Sequence: Synthetic peptide
  Seed: SIGKVCRTLLAKSVF
SIGKVIRTNLFKSLF

SEQ ID NO: 260497 - protein, 15 aa, Artificial Sequence
  Description of Artificial Sequence: Synthetic peptide
  Seed: SIGKVCRTLLAKSVF
SIGKVIRTNLFKSMF

SEQ ID NO: 260498 - protein, 15 aa, Artificial Sequence
  Description of Artificial Sequence: Synthetic peptide
  Seed: SIGKVCRTLLAKSVF
SIGKVIRTNLFKSVF

SEQ ID NO: 260499 - protein, 15 aa, Artificial Sequence
  Description of Artificial Sequence: Synthetic peptide
  Seed: SIGKVCRTLLAKSVF
SIGKVIRTQLAKSAF

SEQ ID NO: 260500 - protein, 15 aa, Artificial Sequence
  Description of Artificial Sequence: Synthetic peptide
  Seed: SIGKVCRTLLAKSVF
SIGKVIRTQLAKSIF

SEQ ID NO: 260501 - protein, 15 aa, Artificial Sequence
  Description of Artificial Sequence: Synthetic peptide
  Seed: SIGKVCRTLLAKSVF
SIGKVIRTQLAKSLF

SEQ ID NO: 260502 - protein, 15 aa, Artificial Sequence
  Description of Artificial Sequence: Synthetic peptide
  Seed: SIGKVCRTLLAKSVF
SIGKVIRTQLAKSVF

SEQ ID NO: 260503 - protein, 15 aa, Artificial Sequence
  Description of Artificial Sequence: Synthetic peptide
  Seed: SIGKVCRTLLAKSVF
SIGKVIRTQLFKSFF

SEQ ID NO: 260504 - protein, 15 aa, Artificial Sequence
  Description of Artificial Sequence: Synthetic peptide
  Seed: SIGKVCRTLLAKSVF
SIGKVIRTQLFKSIF

SEQ ID NO: 260505 - protein, 15 aa, Artificial Sequence
  Description of Artificial Sequence: Synthetic peptide
  Seed: SIGKVCRTLLAKSVF
SIGKVIRTQLFKSLF

SEQ ID NO: 260506 - protein, 15 aa, Artificial Sequence
  Description of Artificial Sequence: Synthetic peptide
  Seed: SIGKVCRTLLAKSVF
SIGKVIRTQLFKSMF

SEQ ID NO: 260507 - protein, 15 aa, Artificial Sequence
  Description of Artificial Sequence: Synthetic peptide
  Seed: SIGKVCRTLLAKSVF
SIGKVIRTQLFKSVF

SEQ ID NO: 260508 - protein, 15 aa, Artificial Sequence
  Description of Artificial Sequence: Synthetic peptide
  Seed: SIGKVCRTLLAKSVF
SIGKVIRTQLGKSIF

SEQ ID NO: 260509 - protein, 15 aa, Artificial Sequence
  Description of Artificial Sequence: Synthetic peptide
  Seed: SIGKVCRTLLAKSVF
SIGKVIRTQLGKSLF

SEQ ID NO: 260510 - protein, 15 aa, Artificial Sequence
  Description of Artificial Sequence: Synthetic peptide
  Seed: SIGKVCRTLLAKSVF
SIGKVIRTQLGKSVF

SEQ ID NO: 260511 - protein, 15 aa, Artificial Sequence
  Description of Artificial Sequence: Synthetic peptide
  Seed: SIGKVCRTLLAKSVF
SIGKVIRTQLSKSIF

SEQ ID NO: 260512 - protein, 15 aa, Artificial Sequence
  Description of Artificial Sequence: Synthetic peptide
  Seed: SIGKVCRTLLAKSVF
SIGKVIRTQLSKSLF

SEQ ID NO: 260513 - protein, 15 aa, Artificial Sequence
  Description of Artificial Sequence: Synthetic peptide
  Seed: SIGKVCRTLLAKSVF
SIGKVIRTQLSKSVF

SEQ ID NO: 260514 - protein, 15 aa, Artificial Sequence
  Description of Artificial Sequence: Synthetic peptide
  Seed: SIGKVCRTLLAKSVF
SIGKVIRTRLFKSIF

SEQ ID NO: 260515 - protein, 15 aa, Artificial Sequence
  Description of Artificial Sequence: Synthetic peptide
  Seed: SIGKVCRTLLAKSVF
SIGKVIRTRLFKSLF

SEQ ID NO: 260516 - protein, 15 aa, Artificial Sequence
  Description of Artificial Sequence: Synthetic peptide
  Seed: SIGKVCRTLLAKSVF
SIGKVIRTRLFKSVF

SEQ ID NO: 260517 - protein, 15 aa, Artificial Sequence
  Description of Artificial Sequence: Synthetic peptide
  Seed: SIGKVCRTLLAKSVF
SIGKVIRTSLAKSAF

SEQ ID NO: 260518 - protein, 15 aa, Artificial Sequence
  Description of Artificial Sequence: Synthetic peptide
  Seed: SIGKVCRTLLAKSVF
SIGKVIRTSLAKSFF

SEQ ID NO: 260519 - protein, 15 aa, Artificial Sequence
  Description of Artificial Sequence: Synthetic peptide
  Seed: SIGKVCRTLLAKSVF
SIGKVIRTSLAKSIF

SEQ ID NO: 260520 - protein, 15 aa, Artificial Sequence
  Description of Artificial Sequence: Synthetic peptide
  Seed: SIGKVCRTLLAKSVF
SIGKVIRTSLAKSLF

SEQ ID NO: 260521 - protein, 15 aa, Artificial Sequence
  Description of Artificial Sequence: Synthetic peptide
  Seed: SIGKVCRTLLAKSVF
SIGKVIRTSLAKSMF

SEQ ID NO: 260522 - protein, 15 aa, Artificial Sequence
  Description of Artificial Sequence: Synthetic peptide
  Seed: SIGKVCRTLLAKSVF
SIGKVIRTSLAKSVF

SEQ ID NO: 260523 - protein, 15 aa, Artificial Sequence
  Description of Artificial Sequence: Synthetic peptide
  Seed: SIGKVCRTLLAKSVF
SIGKVIRTSLFKSAF

SEQ ID NO: 260524 - protein, 15 aa, Artificial Sequence
  Description of Artificial Sequence: Synthetic peptide
  Seed: SIGKVCRTLLAKSVF
SIGKVIRTSLFKSDF

SEQ ID NO: 260525 - protein, 15 aa, Artificial Sequence
  Description of Artificial Sequence: Synthetic peptide
  Seed: SIGKVCRTLLAKSVF
SIGKVIRTSLFKSEF

SEQ ID NO: 260526 - protein, 15 aa, Artificial Sequence
  Description of Artificial Sequence: Synthetic peptide
  Seed: SIGKVCRTLLAKSVF
SIGKVIRTSLFKSFF

SEQ ID NO: 260527 - protein, 15 aa, Artificial Sequence
  Description of Artificial Sequence: Synthetic peptide
  Seed: SIGKVCRTLLAKSVF
SIGKVIRTSLFKSIF

SEQ ID NO: 260528 - protein, 15 aa, Artificial Sequence
  Description of Artificial Sequence: Synthetic peptide
  Seed: SIGKVCRTLLAKSVF
SIGKVIRTSLFKSLF

SEQ ID NO: 260529 - protein, 15 aa, Artificial Sequence
  Description of Artificial Sequence: Synthetic peptide
  Seed: SIGKVCRTLLAKSVF
SIGKVIRTSLFKSMF

SEQ ID NO: 260530 - protein, 15 aa, Artificial Sequence
  Description of Artificial Sequence: Synthetic peptide
  Seed: SIGKVCRTLLAKSVF
SIGKVIRTSLFKSNF

SEQ ID NO: 260531 - protein, 15 aa, Artificial Sequence
  Description of Artificial Sequence: Synthetic peptide
  Seed: SIGKVCRTLLAKSVF
SIGKVIRTSLFKSSF

SEQ ID NO: 260532 - protein, 15 aa, Artificial Sequence
  Description of Artificial Sequence: Synthetic peptide
  Seed: SIGKVCRTLLAKSVF
SIGKVIRTSLFKSTF

SEQ ID NO: 260533 - protein, 15 aa, Artificial Sequence
  Description of Artificial Sequence: Synthetic peptide
  Seed: SIGKVCRTLLAKSVF
SIGKVIRTSLFKSVF

SEQ ID NO: 260534 - protein, 15 aa, Artificial Sequence
  Description of Artificial Sequence: Synthetic peptide
  Seed: SIGKVCRTLLAKSVF
SIGKVIRTSLFKSWF

SEQ ID NO: 260535 - protein, 15 aa, Artificial Sequence
  Description of Artificial Sequence: Synthetic peptide
  Seed: SIGKVCRTLLAKSVF
SIGKVIRTSLFKSYF

SEQ ID NO: 260536 - protein, 15 aa, Artificial Sequence
  Description of Artificial Sequence: Synthetic peptide
  Seed: SIGKVCRTLLAKSVF
SIGKVIRTSLGKSIF

SEQ ID NO: 260537 - protein, 15 aa, Artificial Sequence
  Description of Artificial Sequence: Synthetic peptide
  Seed: SIGKVCRTLLAKSVF
SIGKVIRTSLGKSLF

SEQ ID NO: 260538 - protein, 15 aa, Artificial Sequence
  Description of Artificial Sequence: Synthetic peptide
  Seed: SIGKVCRTLLAKSVF
SIGKVIRTSLGKSVF

SEQ ID NO: 260539 - protein, 15 aa, Artificial Sequence
  Description of Artificial Sequence: Synthetic peptide
  Seed: SIGKVCRTLLAKSVF
SIGKVIRTSLLKSIF

SEQ ID NO: 260540 - protein, 15 aa, Artificial Sequence
  Description of Artificial Sequence: Synthetic peptide
  Seed: SIGKVCRTLLAKSVF
SIGKVIRTSLLKSLF

SEQ ID NO: 260541 - protein, 15 aa, Artificial Sequence
  Description of Artificial Sequence: Synthetic peptide
  Seed: SIGKVCRTLLAKSVF
SIGKVIRTSLLKSVF

SEQ ID NO: 260542 - protein, 15 aa, Artificial Sequence
  Description of Artificial Sequence: Synthetic peptide
  Seed: SIGKVCRTLLAKSVF
SIGKVIRTSLPKSIF

SEQ ID NO: 260543 - protein, 15 aa, Artificial Sequence
  Description of Artificial Sequence: Synthetic peptide
  Seed: SIGKVCRTLLAKSVF
SIGKVIRTSLSKSFF

SEQ ID NO: 260544 - protein, 15 aa, Artificial Sequence
  Description of Artificial Sequence: Synthetic peptide
  Seed: SIGKVCRTLLAKSVF
SIGKVIRTSLSKSIF

SEQ ID NO: 260545 - protein, 15 aa, Artificial Sequence
  Description of Artificial Sequence: Synthetic peptide
  Seed: SIGKVCRTLLAKSVF
SIGKVIRTSLSKSLF

SEQ ID NO: 260546 - protein, 15 aa, Artificial Sequence
  Description of Artificial Sequence: Synthetic peptide
  Seed: SIGKVCRTLLAKSVF
SIGKVIRTSLSKSMF

SEQ ID NO: 260547 - protein, 15 aa, Artificial Sequence
  Description of Artificial Sequence: Synthetic peptide
  Seed: SIGKVCRTLLAKSVF
SIGKVIRTSLSKSVF

SEQ ID NO: 260548 - protein, 15 aa, Artificial Sequence
  Description of Artificial Sequence: Synthetic peptide
  Seed: SIGKVCRTLLAKSVF
SIGKVIRTSLTKSIF

SEQ ID NO: 260549 - protein, 15 aa, Artificial Sequence
  Description of Artificial Sequence: Synthetic peptide
  Seed: SIGKVCRTLLAKSVF
SIGKVIRTSLVKSIF

SEQ ID NO: 260550 - protein, 15 aa, Artificial Sequence
  Description of Artificial Sequence: Synthetic peptide
  Seed: SIGKVCRTLLAKSVF
SIGKVIRTSLWKSIF

SEQ ID NO: 260551 - protein, 15 aa, Artificial Sequence
  Description of Artificial Sequence: Synthetic peptide
  Seed: SIGKVCRTLLAKSVF
SIGKVIRTSLWKSLF

SEQ ID NO: 260552 - protein, 15 aa, Artificial Sequence
  Description of Artificial Sequence: Synthetic peptide
  Seed: SIGKVCRTLLAKSVF
SIGKVIRTSLWKSVF

SEQ ID NO: 260553 - protein, 15 aa, Artificial Sequence
  Description of Artificial Sequence: Synthetic peptide
  Seed: SIGKVCRTLLAKSVF
SIGKVIRTSLYKSIF

SEQ ID NO: 260554 - protein, 15 aa, Artificial Sequence
  Description of Artificial Sequence: Synthetic peptide
  Seed: SIGKVCRTLLAKSVF
SIGKVIRTSLYKSLF

SEQ ID NO: 260555 - protein, 15 aa, Artificial Sequence
  Description of Artificial Sequence: Synthetic peptide
  Seed: SIGKVCRTLLAKSVF
SIGKVIRTSLYKSVF

SEQ ID NO: 260556 - protein, 15 aa, Artificial Sequence
  Description of Artificial Sequence: Synthetic peptide
  Seed: SIGKVCRTLLAKSVF
SIGKVIRTTLAKSFF

SEQ ID NO: 260557 - protein, 15 aa, Artificial Sequence
  Description of Artificial Sequence: Synthetic peptide
  Seed: SIGKVCRTLLAKSVF
SIGKVIRTTLAKSIF

SEQ ID NO: 260558 - protein, 15 aa, Artificial Sequence
  Description of Artificial Sequence: Synthetic peptide
  Seed: SIGKVCRTLLAKSVF
SIGKVIRTTLAKSLF

SEQ ID NO: 260559 - protein, 15 aa, Artificial Sequence
  Description of Artificial Sequence: Synthetic peptide
  Seed: SIGKVCRTLLAKSVF
SIGKVIRTTLAKSMF

SEQ ID NO: 260560 - protein, 15 aa, Artificial Sequence
  Description of Artificial Sequence: Synthetic peptide
  Seed: SIGKVCRTLLAKSVF
SIGKVIRTTLAKSVF

SEQ ID NO: 260561 - protein, 15 aa, Artificial Sequence
  Description of Artificial Sequence: Synthetic peptide
  Seed: SIGKVCRTLLAKSVF
SIGKVIRTTLFKSAF

SEQ ID NO: 260562 - protein, 15 aa, Artificial Sequence
  Description of Artificial Sequence: Synthetic peptide
  Seed: SIGKVCRTLLAKSVF
SIGKVIRTTLFKSCF

SEQ ID NO: 260563 - protein, 15 aa, Artificial Sequence
  Description of Artificial Sequence: Synthetic peptide
  Seed: SIGKVCRTLLAKSVF
SIGKVIRTTLFKSDF

SEQ ID NO: 260564 - protein, 15 aa, Artificial Sequence
  Description of Artificial Sequence: Synthetic peptide
  Seed: SIGKVCRTLLAKSVF
SIGKVIRTTLFKSEF

SEQ ID NO: 260565 - protein, 15 aa, Artificial Sequence
  Description of Artificial Sequence: Synthetic peptide
  Seed: SIGKVCRTLLAKSVF
SIGKVIRTTLFKSFF

SEQ ID NO: 260566 - protein, 15 aa, Artificial Sequence
  Description of Artificial Sequence: Synthetic peptide
  Seed: SIGKVCRTLLAKSVF
SIGKVIRTTLFKSHF

SEQ ID NO: 260567 - protein, 15 aa, Artificial Sequence
  Description of Artificial Sequence: Synthetic peptide
  Seed: SIGKVCRTLLAKSVF
SIGKVIRTTLFKSIF

SEQ ID NO: 260568 - protein, 15 aa, Artificial Sequence
  Description of Artificial Sequence: Synthetic peptide
  Seed: SIGKVCRTLLAKSVF
SIGKVIRTTLFKSLF

SEQ ID NO: 260569 - protein, 15 aa, Artificial Sequence
  Description of Artificial Sequence: Synthetic peptide
  Seed: SIGKVCRTLLAKSVF
SIGKVIRTTLFKSMF

SEQ ID NO: 260570 - protein, 15 aa, Artificial Sequence
  Description of Artificial Sequence: Synthetic peptide
  Seed: SIGKVCRTLLAKSVF
SIGKVIRTTLFKSNF

SEQ ID NO: 260571 - protein, 15 aa, Artificial Sequence
  Description of Artificial Sequence: Synthetic peptide
  Seed: SIGKVCRTLLAKSVF
SIGKVIRTTLFKSPF

SEQ ID NO: 260572 - protein, 15 aa, Artificial Sequence
  Description of Artificial Sequence: Synthetic peptide
  Seed: SIGKVCRTLLAKSVF
SIGKVIRTTLFKSQF

SEQ ID NO: 260573 - protein, 15 aa, Artificial Sequence
  Description of Artificial Sequence: Synthetic peptide
  Seed: SIGKVCRTLLAKSVF
SIGKVIRTTLFKSSF

SEQ ID NO: 260574 - protein, 15 aa, Artificial Sequence
  Description of Artificial Sequence: Synthetic peptide
  Seed: SIGKVCRTLLAKSVF
SIGKVIRTTLFKSTF

SEQ ID NO: 260575 - protein, 15 aa, Artificial Sequence
  Description of Artificial Sequence: Synthetic peptide
  Seed: SIGKVCRTLLAKSVF
SIGKVIRTTLFKSVF

SEQ ID NO: 260576 - protein, 15 aa, Artificial Sequence
  Description of Artificial Sequence: Synthetic peptide
  Seed: SIGKVCRTLLAKSVF
SIGKVIRTTLFKSWF

SEQ ID NO: 260577 - protein, 15 aa, Artificial Sequence
  Description of Artificial Sequence: Synthetic peptide
  Seed: SIGKVCRTLLAKSVF
SIGKVIRTTLFKSYF

SEQ ID NO: 260578 - protein, 15 aa, Artificial Sequence
  Description of Artificial Sequence: Synthetic peptide
  Seed: SIGKVCRTLLAKSVF
SIGKVIRTTLGKSIF

SEQ ID NO: 260579 - protein, 15 aa, Artificial Sequence
  Description of Artificial Sequence: Synthetic peptide
  Seed: SIGKVCRTLLAKSVF
SIGKVIRTTLGKSLF

SEQ ID NO: 260580 - protein, 15 aa, Artificial Sequence
  Description of Artificial Sequence: Synthetic peptide
  Seed: SIGKVCRTLLAKSVF
SIGKVIRTTLGKSVF

SEQ ID NO: 260581 - protein, 15 aa, Artificial Sequence
  Description of Artificial Sequence: Synthetic peptide
  Seed: SIGKVCRTLLAKSVF
SIGKVIRTTLLKSFF

SEQ ID NO: 260582 - protein, 15 aa, Artificial Sequence
  Description of Artificial Sequence: Synthetic peptide
  Seed: SIGKVCRTLLAKSVF
SIGKVIRTTLLKSIF

SEQ ID NO: 260583 - protein, 15 aa, Artificial Sequence
  Description of Artificial Sequence: Synthetic peptide
  Seed: SIGKVCRTLLAKSVF
SIGKVIRTTLLKSLF

SEQ ID NO: 260584 - protein, 15 aa, Artificial Sequence
  Description of Artificial Sequence: Synthetic peptide
  Seed: SIGKVCRTLLAKSVF
SIGKVIRTTLLKSVF

SEQ ID NO: 260585 - protein, 15 aa, Artificial Sequence
  Description of Artificial Sequence: Synthetic peptide
  Seed: SIGKVCRTLLAKSVF
SIGKVIRTTLNKSIF

SEQ ID NO: 260586 - protein, 15 aa, Artificial Sequence
  Description of Artificial Sequence: Synthetic peptide
  Seed: SIGKVCRTLLAKSVF
SIGKVIRTTLPKSIF

SEQ ID NO: 260587 - protein, 15 aa, Artificial Sequence
  Description of Artificial Sequence: Synthetic peptide
  Seed: SIGKVCRTLLAKSVF
SIGKVIRTTLPKSLF

SEQ ID NO: 260588 - protein, 15 aa, Artificial Sequence
  Description of Artificial Sequence: Synthetic peptide
  Seed: SIGKVCRTLLAKSVF
SIGKVIRTTLPKSVF

SEQ ID NO: 260589 - protein, 15 aa, Artificial Sequence
  Description of Artificial Sequence: Synthetic peptide
  Seed: SIGKVCRTLLAKSVF
SIGKVIRTTLSKSFF

SEQ ID NO: 260590 - protein, 15 aa, Artificial Sequence
  Description of Artificial Sequence: Synthetic peptide
  Seed: SIGKVCRTLLAKSVF
SIGKVIRTTLSKSIF

SEQ ID NO: 260591 - protein, 15 aa, Artificial Sequence
  Description of Artificial Sequence: Synthetic peptide
  Seed: SIGKVCRTLLAKSVF
SIGKVIRTTLSKSLF

SEQ ID NO: 260592 - protein, 15 aa, Artificial Sequence
  Description of Artificial Sequence: Synthetic peptide
  Seed: SIGKVCRTLLAKSVF
SIGKVIRTTLSKSMF

SEQ ID NO: 260593 - protein, 15 aa, Artificial Sequence
  Description of Artificial Sequence: Synthetic peptide
  Seed: SIGKVCRTLLAKSVF
SIGKVIRTTLSKSVF

SEQ ID NO: 260594 - protein, 15 aa, Artificial Sequence
  Description of Artificial Sequence: Synthetic peptide
  Seed: SIGKVCRTLLAKSVF
SIGKVIRTTLTKSIF

SEQ ID NO: 260595 - protein, 15 aa, Artificial Sequence
  Description of Artificial Sequence: Synthetic peptide
  Seed: SIGKVCRTLLAKSVF
SIGKVIRTTLTKSLF

SEQ ID NO: 260596 - protein, 15 aa, Artificial Sequence
  Description of Artificial Sequence: Synthetic peptide
  Seed: SIGKVCRTLLAKSVF
SIGKVIRTTLTKSVF

SEQ ID NO: 260597 - protein, 15 aa, Artificial Sequence
  Description of Artificial Sequence: Synthetic peptide
  Seed: SIGKVCRTLLAKSVF
SIGKVIRTTLVKSIF

SEQ ID NO: 260598 - protein, 15 aa, Artificial Sequence
  Description of Artificial Sequence: Synthetic peptide
  Seed: SIGKVCRTLLAKSVF
SIGKVIRTTLWKSFF

SEQ ID NO: 260599 - protein, 15 aa, Artificial Sequence
  Description of Artificial Sequence: Synthetic peptide
  Seed: SIGKVCRTLLAKSVF
SIGKVIRTTLWKSIF

SEQ ID NO: 260600 - protein, 15 aa, Artificial Sequence
  Description of Artificial Sequence: Synthetic peptide
  Seed: SIGKVCRTLLAKSVF
SIGKVIRTTLWKSLF

SEQ ID NO: 260601 - protein, 15 aa, Artificial Sequence
  Description of Artificial Sequence: Synthetic peptide
  Seed: SIGKVCRTLLAKSVF
SIGKVIRTTLWKSVF

SEQ ID NO: 260602 - protein, 15 aa, Artificial Sequence
  Description of Artificial Sequence: Synthetic peptide
  Seed: SIGKVCRTLLAKSVF
SIGKVIRTTLYKSFF

SEQ ID NO: 260603 - protein, 15 aa, Artificial Sequence
  Description of Artificial Sequence: Synthetic peptide
  Seed: SIGKVCRTLLAKSVF
SIGKVIRTTLYKSIF

SEQ ID NO: 260604 - protein, 15 aa, Artificial Sequence
  Description of Artificial Sequence: Synthetic peptide
  Seed: SIGKVCRTLLAKSVF
SIGKVIRTTLYKSLF

SEQ ID NO: 260605 - protein, 15 aa, Artificial Sequence
  Description of Artificial Sequence: Synthetic peptide
  Seed: SIGKVCRTLLAKSVF
SIGKVIRTTLYKSVF

SEQ ID NO: 260606 - protein, 15 aa, Artificial Sequence
  Description of Artificial Sequence: Synthetic peptide
  Seed: SIGKVCRTLLAKSVF
SIGKVIRTVLAKSAF

SEQ ID NO: 260607 - protein, 15 aa, Artificial Sequence
  Description of Artificial Sequence: Synthetic peptide
  Seed: SIGKVCRTLLAKSVF
SIGKVIRTVLAKSIF

SEQ ID NO: 260608 - protein, 15 aa, Artificial Sequence
  Description of Artificial Sequence: Synthetic peptide
  Seed: SIGKVCRTLLAKSVF
SIGKVIRTVLAKSLF

SEQ ID NO: 260609 - protein, 15 aa, Artificial Sequence
  Description of Artificial Sequence: Synthetic peptide
  Seed: SIGKVCRTLLAKSVF
SIGKVIRTVLAKSVF

SEQ ID NO: 260610 - protein, 15 aa, Artificial Sequence
  Description of Artificial Sequence: Synthetic peptide
  Seed: SIGKVCRTLLAKSVF
SIGKVIRTVLFKSAF

SEQ ID NO: 260611 - protein, 15 aa, Artificial Sequence
  Description of Artificial Sequence: Synthetic peptide
  Seed: SIGKVCRTLLAKSVF
SIGKVIRTVLFKSDF

SEQ ID NO: 260612 - protein, 15 aa, Artificial Sequence
  Description of Artificial Sequence: Synthetic peptide
  Seed: SIGKVCRTLLAKSVF
SIGKVIRTVLFKSEF

SEQ ID NO: 260613 - protein, 15 aa, Artificial Sequence
  Description of Artificial Sequence: Synthetic peptide
  Seed: SIGKVCRTLLAKSVF
SIGKVIRTVLFKSFF

SEQ ID NO: 260614 - protein, 15 aa, Artificial Sequence
  Description of Artificial Sequence: Synthetic peptide
  Seed: SIGKVCRTLLAKSVF
SIGKVIRTVLFKSIF

SEQ ID NO: 260615 - protein, 15 aa, Artificial Sequence
  Description of Artificial Sequence: Synthetic peptide
  Seed: SIGKVCRTLLAKSVF
SIGKVIRTVLFKSLF

SEQ ID NO: 260616 - protein, 15 aa, Artificial Sequence
  Description of Artificial Sequence: Synthetic peptide
  Seed: SIGKVCRTLLAKSVF
SIGKVIRTVLFKSMF

SEQ ID NO: 260617 - protein, 15 aa, Artificial Sequence
  Description of Artificial Sequence: Synthetic peptide
  Seed: SIGKVCRTLLAKSVF
SIGKVIRTVLFKSNF

SEQ ID NO: 260618 - protein, 15 aa, Artificial Sequence
  Description of Artificial Sequence: Synthetic peptide
  Seed: SIGKVCRTLLAKSVF
SIGKVIRTVLFKSSF

SEQ ID NO: 260619 - protein, 15 aa, Artificial Sequence
  Description of Artificial Sequence: Synthetic peptide
  Seed: SIGKVCRTLLAKSVF
SIGKVIRTVLFKSTF

SEQ ID NO: 260620 - protein, 15 aa, Artificial Sequence
  Description of Artificial Sequence: Synthetic peptide
  Seed: SIGKVCRTLLAKSVF
SIGKVIRTVLFKSVF

SEQ ID NO: 260621 - protein, 15 aa, Artificial Sequence
  Description of Artificial Sequence: Synthetic peptide
  Seed: SIGKVCRTLLAKSVF
SIGKVIRTVLFKSYF

SEQ ID NO: 260622 - protein, 15 aa, Artificial Sequence
  Description of Artificial Sequence: Synthetic peptide
  Seed: SIGKVCRTLLAKSVF
SIGKVIRTVLGKSIF

SEQ ID NO: 260623 - protein, 15 aa, Artificial Sequence
  Description of Artificial Sequence: Synthetic peptide
  Seed: SIGKVCRTLLAKSVF
SIGKVIRTVLGKSLF

SEQ ID NO: 260624 - protein, 15 aa, Artificial Sequence
  Description of Artificial Sequence: Synthetic peptide
  Seed: SIGKVCRTLLAKSVF
SIGKVIRTVLGKSVF

SEQ ID NO: 260625 - protein, 15 aa, Artificial Sequence
  Description of Artificial Sequence: Synthetic peptide
  Seed: SIGKVCRTLLAKSVF
SIGKVIRTVLLKSIF

SEQ ID NO: 260626 - protein, 15 aa, Artificial Sequence
  Description of Artificial Sequence: Synthetic peptide
  Seed: SIGKVCRTLLAKSVF
SIGKVIRTVLLKSLF

SEQ ID NO: 260627 - protein, 15 aa, Artificial Sequence
  Description of Artificial Sequence: Synthetic peptide
  Seed: SIGKVCRTLLAKSVF
SIGKVIRTVLLKSVF

SEQ ID NO: 260628 - protein, 15 aa, Artificial Sequence
  Description of Artificial Sequence: Synthetic peptide
  Seed: SIGKVCRTLLAKSVF
SIGKVIRTVLPKSIF

SEQ ID NO: 260629 - protein, 15 aa, Artificial Sequence
  Description of Artificial Sequence: Synthetic peptide
  Seed: SIGKVCRTLLAKSVF
SIGKVIRTVLSKSFF

SEQ ID NO: 260630 - protein, 15 aa, Artificial Sequence
  Description of Artificial Sequence: Synthetic peptide
  Seed: SIGKVCRTLLAKSVF
SIGKVIRTVLSKSIF

SEQ ID NO: 260631 - protein, 15 aa, Artificial Sequence
  Description of Artificial Sequence: Synthetic peptide
  Seed: SIGKVCRTLLAKSVF
SIGKVIRTVLSKSLF

SEQ ID NO: 260632 - protein, 15 aa, Artificial Sequence
  Description of Artificial Sequence: Synthetic peptide
  Seed: SIGKVCRTLLAKSVF
SIGKVIRTVLSKSMF

SEQ ID NO: 260633 - protein, 15 aa, Artificial Sequence
  Description of Artificial Sequence: Synthetic peptide
  Seed: SIGKVCRTLLAKSVF
SIGKVIRTVLSKSVF

SEQ ID NO: 260634 - protein, 15 aa, Artificial Sequence
  Description of Artificial Sequence: Synthetic peptide
  Seed: SIGKVCRTLLAKSVF
SIGKVIRTVLTKSIF

SEQ ID NO: 260635 - protein, 15 aa, Artificial Sequence
  Description of Artificial Sequence: Synthetic peptide
  Seed: SIGKVCRTLLAKSVF
SIGKVIRTVLWKSIF

SEQ ID NO: 260636 - protein, 15 aa, Artificial Sequence
  Description of Artificial Sequence: Synthetic peptide
  Seed: SIGKVCRTLLAKSVF
SIGKVIRTVLWKSLF

SEQ ID NO: 260637 - protein, 15 aa, Artificial Sequence
  Description of Artificial Sequence: Synthetic peptide
  Seed: SIGKVCRTLLAKSVF
SIGKVIRTVLWKSVF

SEQ ID NO: 260638 - protein, 15 aa, Artificial Sequence
  Description of Artificial Sequence: Synthetic peptide
  Seed: SIGKVCRTLLAKSVF
SIGKVIRTVLYKSIF

SEQ ID NO: 260639 - protein, 15 aa, Artificial Sequence
  Description of Artificial Sequence: Synthetic peptide
  Seed: SIGKVCRTLLAKSVF
SIGKVIRTVLYKSLF

SEQ ID NO: 260640 - protein, 15 aa, Artificial Sequence
  Description of Artificial Sequence: Synthetic peptide
  Seed: SIGKVCRTLLAKSVF
SIGKVIRTVLYKSVF

SEQ ID NO: 260641 - protein, 15 aa, Artificial Sequence
  Description of Artificial Sequence: Synthetic peptide
  Seed: SIGKVCRTLLAKSVF
SIGKVIRTWLAKSIF

SEQ ID NO: 260642 - protein, 15 aa, Artificial Sequence
  Description of Artificial Sequence: Synthetic peptide
  Seed: SIGKVCRTLLAKSVF
SIGKVIRTWLAKSLF

SEQ ID NO: 260643 - protein, 15 aa, Artificial Sequence
  Description of Artificial Sequence: Synthetic peptide
  Seed: SIGKVCRTLLAKSVF
SIGKVIRTWLAKSVF

SEQ ID NO: 260644 - protein, 15 aa, Artificial Sequence
  Description of Artificial Sequence: Synthetic peptide
  Seed: SIGKVCRTLLAKSVF
SIGKVIRTWLFKSIF

SEQ ID NO: 260645 - protein, 15 aa, Artificial Sequence
  Description of Artificial Sequence: Synthetic peptide
  Seed: SIGKVCRTLLAKSVF
SIGKVIRTWLFKSLF

SEQ ID NO: 260646 - protein, 15 aa, Artificial Sequence
  Description of Artificial Sequence: Synthetic peptide
  Seed: SIGKVCRTLLAKSVF
SIGKVIRTWLFKSVF

SEQ ID NO: 260647 - protein, 15 aa, Artificial Sequence
  Description of Artificial Sequence: Synthetic peptide
  Seed: SIGKVCRTLLAKSVF
SIGKVIRTWLGKSIF

SEQ ID NO: 260648 - protein, 15 aa, Artificial Sequence
  Description of Artificial Sequence: Synthetic peptide
  Seed: SIGKVCRTLLAKSVF
SIGKVIRTWLGKSLF

SEQ ID NO: 260649 - protein, 15 aa, Artificial Sequence
  Description of Artificial Sequence: Synthetic peptide
  Seed: SIGKVCRTLLAKSVF
SIGKVIRTWLGKSVF

SEQ ID NO: 260650 - protein, 15 aa, Artificial Sequence
  Description of Artificial Sequence: Synthetic peptide
  Seed: SIGKVCRTLLAKSVF
SIGKVIRTWLNKSAF

SEQ ID NO: 260651 - protein, 15 aa, Artificial Sequence
  Description of Artificial Sequence: Synthetic peptide
  Seed: SIGKVCRTLLAKSVF
SIGKVIRTWLNKSIF

SEQ ID NO: 260652 - protein, 15 aa, Artificial Sequence
  Description of Artificial Sequence: Synthetic peptide
  Seed: SIGKVCRTLLAKSVF
SIGKVIRTWLNKSLF

SEQ ID NO: 260653 - protein, 15 aa, Artificial Sequence
  Description of Artificial Sequence: Synthetic peptide
  Seed: SIGKVCRTLLAKSVF
SIGKVIRTWLNKSVF

SEQ ID NO: 260654 - protein, 15 aa, Artificial Sequence
  Description of Artificial Sequence: Synthetic peptide
  Seed: SIGKVCRTLLAKSVF
SIGKVIRTWLSKSAF

SEQ ID NO: 260655 - protein, 15 aa, Artificial Sequence
  Description of Artificial Sequence: Synthetic peptide
  Seed: SIGKVCRTLLAKSVF
SIGKVIRTWLSKSIF

SEQ ID NO: 260656 - protein, 15 aa, Artificial Sequence
  Description of Artificial Sequence: Synthetic peptide
  Seed: SIGKVCRTLLAKSVF
SIGKVIRTWLSKSLF

SEQ ID NO: 260657 - protein, 15 aa, Artificial Sequence
  Description of Artificial Sequence: Synthetic peptide
  Seed: SIGKVCRTLLAKSVF
SIGKVIRTWLSKSMF

SEQ ID NO: 260658 - protein, 15 aa, Artificial Sequence
  Description of Artificial Sequence: Synthetic peptide
  Seed: SIGKVCRTLLAKSVF
SIGKVIRTWLSKSVF

SEQ ID NO: 260659 - protein, 15 aa, Artificial Sequence
  Description of Artificial Sequence: Synthetic peptide
  Seed: SIGKVCRTLLAKSVF
SIGKVIRTYLAKSAF

SEQ ID NO: 260660 - protein, 15 aa, Artificial Sequence
  Description of Artificial Sequence: Synthetic peptide
  Seed: SIGKVCRTLLAKSVF
SIGKVIRTYLAKSIF

SEQ ID NO: 260661 - protein, 15 aa, Artificial Sequence
  Description of Artificial Sequence: Synthetic peptide
  Seed: SIGKVCRTLLAKSVF
SIGKVIRTYLAKSLF

SEQ ID NO: 260662 - protein, 15 aa, Artificial Sequence
  Description of Artificial Sequence: Synthetic peptide
  Seed: SIGKVCRTLLAKSVF
SIGKVIRTYLAKSMF

SEQ ID NO: 260663 - protein, 15 aa, Artificial Sequence
  Description of Artificial Sequence: Synthetic peptide
  Seed: SIGKVCRTLLAKSVF
SIGKVIRTYLAKSSF

SEQ ID NO: 260664 - protein, 15 aa, Artificial Sequence
  Description of Artificial Sequence: Synthetic peptide
  Seed: SIGKVCRTLLAKSVF
SIGKVIRTYLAKSTF

SEQ ID NO: 260665 - protein, 15 aa, Artificial Sequence
  Description of Artificial Sequence: Synthetic peptide
  Seed: SIGKVCRTLLAKSVF
SIGKVIRTYLAKSVF

SEQ ID NO: 260666 - protein, 15 aa, Artificial Sequence
  Description of Artificial Sequence: Synthetic peptide
  Seed: SIGKVCRTLLAKSVF
SIGKVIRTYLFKSFF

SEQ ID NO: 260667 - protein, 15 aa, Artificial Sequence
  Description of Artificial Sequence: Synthetic peptide
  Seed: SIGKVCRTLLAKSVF
SIGKVIRTYLFKSIF

SEQ ID NO: 260668 - protein, 15 aa, Artificial Sequence
  Description of Artificial Sequence: Synthetic peptide
  Seed: SIGKVCRTLLAKSVF
SIGKVIRTYLFKSLF

SEQ ID NO: 260669 - protein, 15 aa, Artificial Sequence
  Description of Artificial Sequence: Synthetic peptide
  Seed: SIGKVCRTLLAKSVF
SIGKVIRTYLFKSMF

SEQ ID NO: 260670 - protein, 15 aa, Artificial Sequence
  Description of Artificial Sequence: Synthetic peptide
  Seed: SIGKVCRTLLAKSVF
SIGKVIRTYLFKSVF

SEQ ID NO: 260671 - protein, 15 aa, Artificial Sequence
  Description of Artificial Sequence: Synthetic peptide
  Seed: SIGKVCRTLLAKSVF
SIGKVIRTYLGKSAF

SEQ ID NO: 260672 - protein, 15 aa, Artificial Sequence
  Description of Artificial Sequence: Synthetic peptide
  Seed: SIGKVCRTLLAKSVF
SIGKVIRTYLGKSIF

SEQ ID NO: 260673 - protein, 15 aa, Artificial Sequence
  Description of Artificial Sequence: Synthetic peptide
  Seed: SIGKVCRTLLAKSVF
SIGKVIRTYLGKSLF

SEQ ID NO: 260674 - protein, 15 aa, Artificial Sequence
  Description of Artificial Sequence: Synthetic peptide
  Seed: SIGKVCRTLLAKSVF
SIGKVIRTYLGKSMF

SEQ ID NO: 260675 - protein, 15 aa, Artificial Sequence
  Description of Artificial Sequence: Synthetic peptide
  Seed: SIGKVCRTLLAKSVF
SIGKVIRTYLGKSSF

SEQ ID NO: 260676 - protein, 15 aa, Artificial Sequence
  Description of Artificial Sequence: Synthetic peptide
  Seed: SIGKVCRTLLAKSVF
SIGKVIRTYLGKSTF

SEQ ID NO: 260677 - protein, 15 aa, Artificial Sequence
  Description of Artificial Sequence: Synthetic peptide
  Seed: SIGKVCRTLLAKSVF
SIGKVIRTYLGKSVF

SEQ ID NO: 260678 - protein, 15 aa, Artificial Sequence
  Description of Artificial Sequence: Synthetic peptide
  Seed: SIGKVCRTLLAKSVF
SIGKVIRTYLNKSAF

SEQ ID NO: 260679 - protein, 15 aa, Artificial Sequence
  Description of Artificial Sequence: Synthetic peptide
  Seed: SIGKVCRTLLAKSVF
SIGKVIRTYLNKSFF

SEQ ID NO: 260680 - protein, 15 aa, Artificial Sequence
  Description of Artificial Sequence: Synthetic peptide
  Seed: SIGKVCRTLLAKSVF
SIGKVIRTYLNKSIF

SEQ ID NO: 260681 - protein, 15 aa, Artificial Sequence
  Description of Artificial Sequence: Synthetic peptide
  Seed: SIGKVCRTLLAKSVF
SIGKVIRTYLNKSLF

SEQ ID NO: 260682 - protein, 15 aa, Artificial Sequence
  Description of Artificial Sequence: Synthetic peptide
  Seed: SIGKVCRTLLAKSVF
SIGKVIRTYLNKSMF

SEQ ID NO: 260683 - protein, 15 aa, Artificial Sequence
  Description of Artificial Sequence: Synthetic peptide
  Seed: SIGKVCRTLLAKSVF
SIGKVIRTYLNKSSF

SEQ ID NO: 260684 - protein, 15 aa, Artificial Sequence
  Description of Artificial Sequence: Synthetic peptide
  Seed: SIGKVCRTLLAKSVF
SIGKVIRTYLNKSTF

SEQ ID NO: 260685 - protein, 15 aa, Artificial Sequence
  Description of Artificial Sequence: Synthetic peptide
  Seed: SIGKVCRTLLAKSVF
SIGKVIRTYLNKSVF

SEQ ID NO: 260686 - protein, 15 aa, Artificial Sequence
  Description of Artificial Sequence: Synthetic peptide
  Seed: SIGKVCRTLLAKSVF
SIGKVIRTYLSKSAF

SEQ ID NO: 260687 - protein, 15 aa, Artificial Sequence
  Description of Artificial Sequence: Synthetic peptide
  Seed: SIGKVCRTLLAKSVF
SIGKVIRTYLSKSFF

SEQ ID NO: 260688 - protein, 15 aa, Artificial Sequence
  Description of Artificial Sequence: Synthetic peptide
  Seed: SIGKVCRTLLAKSVF
SIGKVIRTYLSKSGF

SEQ ID NO: 260689 - protein, 15 aa, Artificial Sequence
  Description of Artificial Sequence: Synthetic peptide
  Seed: SIGKVCRTLLAKSVF
SIGKVIRTYLSKSIF

SEQ ID NO: 260690 - protein, 15 aa, Artificial Sequence
  Description of Artificial Sequence: Synthetic peptide
  Seed: SIGKVCRTLLAKSVF
SIGKVIRTYLSKSLF

SEQ ID NO: 260691 - protein, 15 aa, Artificial Sequence
  Description of Artificial Sequence: Synthetic peptide
  Seed: SIGKVCRTLLAKSVF
SIGKVIRTYLSKSMF

SEQ ID NO: 260692 - protein, 15 aa, Artificial Sequence
  Description of Artificial Sequence: Synthetic peptide
  Seed: SIGKVCRTLLAKSVF
SIGKVIRTYLSKSSF

SEQ ID NO: 260693 - protein, 15 aa, Artificial Sequence
  Description of Artificial Sequence: Synthetic peptide
  Seed: SIGKVCRTLLAKSVF
SIGKVIRTYLSKSTF

SEQ ID NO: 260694 - protein, 15 aa, Artificial Sequence
  Description of Artificial Sequence: Synthetic peptide
  Seed: SIGKVCRTLLAKSVF
SIGKVIRTYLSKSVF

SEQ ID NO: 260695 - protein, 15 aa, Artificial Sequence
  Description of Artificial Sequence: Synthetic peptide
  Seed: SIGKVCRTLLAKSVF
SIGKVIRTYLTKSAF

SEQ ID NO: 260696 - protein, 15 aa, Artificial Sequence
  Description of Artificial Sequence: Synthetic peptide
  Seed: SIGKVCRTLLAKSVF
SIGKVIRTYLTKSIF

SEQ ID NO: 260697 - protein, 15 aa, Artificial Sequence
  Description of Artificial Sequence: Synthetic peptide
  Seed: SIGKVCRTLLAKSVF
SIGKVIRTYLTKSLF

SEQ ID NO: 260698 - protein, 15 aa, Artificial Sequence
  Description of Artificial Sequence: Synthetic peptide
  Seed: SIGKVCRTLLAKSVF
SIGKVIRTYLTKSMF

SEQ ID NO: 260699 - protein, 15 aa, Artificial Sequence
  Description of Artificial Sequence: Synthetic peptide
  Seed: SIGKVCRTLLAKSVF
SIGKVIRTYLTKSVF

SEQ ID NO: 260700 - protein, 15 aa, Artificial Sequence
  Description of Artificial Sequence: Synthetic peptide
  Seed: SIGKVCRTLLAKSVF
SIGKVIRTYLVKSLF

SEQ ID NO: 260701 - protein, 15 aa, Artificial Sequence
  Description of Artificial Sequence: Synthetic peptide
  Seed: SIGKVCRTLLAKSVF
SIGKVIRTYLVKSVF

SEQ ID NO: 260702 - protein, 15 aa, Artificial Sequence
  Description of Artificial Sequence: Synthetic peptide
  Seed: SIGKVCRTLLAKSVF
SIGKVLRTALAKSAF

SEQ ID NO: 260703 - protein, 15 aa, Artificial Sequence
  Description of Artificial Sequence: Synthetic peptide
  Seed: SIGKVCRTLLAKSVF
SIGKVLRTALAKSIF

SEQ ID NO: 260704 - protein, 15 aa, Artificial Sequence
  Description of Artificial Sequence: Synthetic peptide
  Seed: SIGKVCRTLLAKSVF
SIGKVLRTALAKSLF

SEQ ID NO: 260705 - protein, 15 aa, Artificial Sequence
  Description of Artificial Sequence: Synthetic peptide
  Seed: SIGKVCRTLLAKSVF
SIGKVLRTALAKSMF

SEQ ID NO: 260706 - protein, 15 aa, Artificial Sequence
  Description of Artificial Sequence: Synthetic peptide
  Seed: SIGKVCRTLLAKSVF
SIGKVLRTALAKSNF

SEQ ID NO: 260707 - protein, 15 aa, Artificial Sequence
  Description of Artificial Sequence: Synthetic peptide
  Seed: SIGKVCRTLLAKSVF
SIGKVLRTALAKSSF

SEQ ID NO: 260708 - protein, 15 aa, Artificial Sequence
  Description of Artificial Sequence: Synthetic peptide
  Seed: SIGKVCRTLLAKSVF
SIGKVLRTALAKSTF

SEQ ID NO: 260709 - protein, 15 aa, Artificial Sequence
  Description of Artificial Sequence: Synthetic peptide
  Seed: SIGKVCRTLLAKSVF
SIGKVLRTALAKSVF

SEQ ID NO: 260710 - protein, 15 aa, Artificial Sequence
  Description of Artificial Sequence: Synthetic peptide
  Seed: SIGKVCRTLLAKSVF
SIGKVLRTALFKSAF

SEQ ID NO: 260711 - protein, 15 aa, Artificial Sequence
  Description of Artificial Sequence: Synthetic peptide
  Seed: SIGKVCRTLLAKSVF
SIGKVLRTALFKSEF

SEQ ID NO: 260712 - protein, 15 aa, Artificial Sequence
  Description of Artificial Sequence: Synthetic peptide
  Seed: SIGKVCRTLLAKSVF
SIGKVLRTALFKSFF

SEQ ID NO: 260713 - protein, 15 aa, Artificial Sequence
  Description of Artificial Sequence: Synthetic peptide
  Seed: SIGKVCRTLLAKSVF
SIGKVLRTALFKSIF

SEQ ID NO: 260714 - protein, 15 aa, Artificial Sequence
  Description of Artificial Sequence: Synthetic peptide
  Seed: SIGKVCRTLLAKSVF
SIGKVLRTALFKSLF

SEQ ID NO: 260715 - protein, 15 aa, Artificial Sequence
  Description of Artificial Sequence: Synthetic peptide
  Seed: SIGKVCRTLLAKSVF
SIGKVLRTALFKSMF

SEQ ID NO: 260716 - protein, 15 aa, Artificial Sequence
  Description of Artificial Sequence: Synthetic peptide
  Seed: SIGKVCRTLLAKSVF
SIGKVLRTALFKSNF

SEQ ID NO: 260717 - protein, 15 aa, Artificial Sequence
  Description of Artificial Sequence: Synthetic peptide
  Seed: SIGKVCRTLLAKSVF
SIGKVLRTALFKSSF

SEQ ID NO: 260718 - protein, 15 aa, Artificial Sequence
  Description of Artificial Sequence: Synthetic peptide
  Seed: SIGKVCRTLLAKSVF
SIGKVLRTALFKSTF

SEQ ID NO: 260719 - protein, 15 aa, Artificial Sequence
  Description of Artificial Sequence: Synthetic peptide
  Seed: SIGKVCRTLLAKSVF
SIGKVLRTALFKSVF

SEQ ID NO: 260720 - protein, 15 aa, Artificial Sequence
  Description of Artificial Sequence: Synthetic peptide
  Seed: SIGKVCRTLLAKSVF
SIGKVLRTALFKSYF

SEQ ID NO: 260721 - protein, 15 aa, Artificial Sequence
  Description of Artificial Sequence: Synthetic peptide
  Seed: SIGKVCRTLLAKSVF
SIGKVLRTALGKSAF

SEQ ID NO: 260722 - protein, 15 aa, Artificial Sequence
  Description of Artificial Sequence: Synthetic peptide
  Seed: SIGKVCRTLLAKSVF
SIGKVLRTALGKSIF

SEQ ID NO: 260723 - protein, 15 aa, Artificial Sequence
  Description of Artificial Sequence: Synthetic peptide
  Seed: SIGKVCRTLLAKSVF
SIGKVLRTALGKSLF

SEQ ID NO: 260724 - protein, 15 aa, Artificial Sequence
  Description of Artificial Sequence: Synthetic peptide
  Seed: SIGKVCRTLLAKSVF
SIGKVLRTALGKSVF

SEQ ID NO: 260725 - protein, 15 aa, Artificial Sequence
  Description of Artificial Sequence: Synthetic peptide
  Seed: SIGKVCRTLLAKSVF
SIGKVLRTALPKSVF

SEQ ID NO: 260726 - protein, 15 aa, Artificial Sequence
  Description of Artificial Sequence: Synthetic peptide
  Seed: SIGKVCRTLLAKSVF
SIGKVLRTALSKSAF

SEQ ID NO: 260727 - protein, 15 aa, Artificial Sequence
  Description of Artificial Sequence: Synthetic peptide
  Seed: SIGKVCRTLLAKSVF
SIGKVLRTALSKSIF

SEQ ID NO: 260728 - protein, 15 aa, Artificial Sequence
  Description of Artificial Sequence: Synthetic peptide
  Seed: SIGKVCRTLLAKSVF
SIGKVLRTALSKSLF

SEQ ID NO: 260729 - protein, 15 aa, Artificial Sequence
  Description of Artificial Sequence: Synthetic peptide
  Seed: SIGKVCRTLLAKSVF
SIGKVLRTALSKSVF

SEQ ID NO: 260730 - protein, 15 aa, Artificial Sequence
  Description of Artificial Sequence: Synthetic peptide
  Seed: SIGKVCRTLLAKSVF
SIGKVLRTALTKSVF

SEQ ID NO: 260731 - protein, 15 aa, Artificial Sequence
  Description of Artificial Sequence: Synthetic peptide
  Seed: SIGKVCRTLLAKSVF
SIGKVLRTALVKSAF

SEQ ID NO: 260732 - protein, 15 aa, Artificial Sequence
  Description of Artificial Sequence: Synthetic peptide
  Seed: SIGKVCRTLLAKSVF
SIGKVLRTALVKSIF

SEQ ID NO: 260733 - protein, 15 aa, Artificial Sequence
  Description of Artificial Sequence: Synthetic peptide
  Seed: SIGKVCRTLLAKSVF
SIGKVLRTALVKSLF

SEQ ID NO: 260734 - protein, 15 aa, Artificial Sequence
  Description of Artificial Sequence: Synthetic peptide
  Seed: SIGKVCRTLLAKSVF
SIGKVLRTALVKSMF

SEQ ID NO: 260735 - protein, 15 aa, Artificial Sequence
  Description of Artificial Sequence: Synthetic peptide
  Seed: SIGKVCRTLLAKSVF
SIGKVLRTALVKSVF

SEQ ID NO: 260736 - protein, 15 aa, Artificial Sequence
  Description of Artificial Sequence: Synthetic peptide
  Seed: SIGKVCRTLLAKSVF
SIGKVLRTALYKSIF

SEQ ID NO: 260737 - protein, 15 aa, Artificial Sequence
  Description of Artificial Sequence: Synthetic peptide
  Seed: SIGKVCRTLLAKSVF
SIGKVLRTALYKSLF

SEQ ID NO: 260738 - protein, 15 aa, Artificial Sequence
  Description of Artificial Sequence: Synthetic peptide
  Seed: SIGKVCRTLLAKSVF
SIGKVLRTALYKSVF

SEQ ID NO: 260739 - protein, 15 aa, Artificial Sequence
  Description of Artificial Sequence: Synthetic peptide
  Seed: SIGKVCRTLLAKSVF
SIGKVLRTCLFKSIF

SEQ ID NO: 260740 - protein, 15 aa, Artificial Sequence
  Description of Artificial Sequence: Synthetic peptide
  Seed: SIGKVCRTLLAKSVF
SIGKVLRTCLFKSLF

SEQ ID NO: 260741 - protein, 15 aa, Artificial Sequence
  Description of Artificial Sequence: Synthetic peptide
  Seed: SIGKVCRTLLAKSVF
SIGKVLRTCLFKSVF

SEQ ID NO: 260742 - protein, 15 aa, Artificial Sequence
  Description of Artificial Sequence: Synthetic peptide
  Seed: SIGKVCRTLLAKSVF
SIGKVLRTDLFKSIF

SEQ ID NO: 260743 - protein, 15 aa, Artificial Sequence
  Description of Artificial Sequence: Synthetic peptide
  Seed: SIGKVCRTLLAKSVF
SIGKVLRTDLFKSVF

SEQ ID NO: 260744 - protein, 15 aa, Artificial Sequence
  Description of Artificial Sequence: Synthetic peptide
  Seed: SIGKVCRTLLAKSVF
SIGKVLRTELFKSAF

SEQ ID NO: 260745 - protein, 15 aa, Artificial Sequence
  Description of Artificial Sequence: Synthetic peptide
  Seed: SIGKVCRTLLAKSVF
SIGKVLRTELFKSFF

SEQ ID NO: 260746 - protein, 15 aa, Artificial Sequence
  Description of Artificial Sequence: Synthetic peptide
  Seed: SIGKVCRTLLAKSVF
SIGKVLRTELFKSIF

SEQ ID NO: 260747 - protein, 15 aa, Artificial Sequence
  Description of Artificial Sequence: Synthetic peptide
  Seed: SIGKVCRTLLAKSVF
SIGKVLRTELFKSLF

SEQ ID NO: 260748 - protein, 15 aa, Artificial Sequence
  Description of Artificial Sequence: Synthetic peptide
  Seed: SIGKVCRTLLAKSVF
SIGKVLRTELFKSMF

SEQ ID NO: 260749 - protein, 15 aa, Artificial Sequence
  Description of Artificial Sequence: Synthetic peptide
  Seed: SIGKVCRTLLAKSVF
SIGKVLRTELFKSNF

SEQ ID NO: 260750 - protein, 15 aa, Artificial Sequence
  Description of Artificial Sequence: Synthetic peptide
  Seed: SIGKVCRTLLAKSVF
SIGKVLRTELFKSSF

SEQ ID NO: 260751 - protein, 15 aa, Artificial Sequence
  Description of Artificial Sequence: Synthetic peptide
  Seed: SIGKVCRTLLAKSVF
SIGKVLRTELFKSTF

SEQ ID NO: 260752 - protein, 15 aa, Artificial Sequence
  Description of Artificial Sequence: Synthetic peptide
  Seed: SIGKVCRTLLAKSVF
SIGKVLRTELFKSVF

SEQ ID NO: 260753 - protein, 15 aa, Artificial Sequence
  Description of Artificial Sequence: Synthetic peptide
  Seed: SIGKVCRTLLAKSVF
SIGKVLRTELFKSYF

SEQ ID NO: 260754 - protein, 15 aa, Artificial Sequence
  Description of Artificial Sequence: Synthetic peptide
  Seed: SIGKVCRTLLAKSVF
SIGKVLRTELLKSIF

SEQ ID NO: 260755 - protein, 15 aa, Artificial Sequence
  Description of Artificial Sequence: Synthetic peptide
  Seed: SIGKVCRTLLAKSVF
SIGKVLRTELLKSLF

SEQ ID NO: 260756 - protein, 15 aa, Artificial Sequence
  Description of Artificial Sequence: Synthetic peptide
  Seed: SIGKVCRTLLAKSVF
SIGKVLRTELLKSVF

SEQ ID NO: 260757 - protein, 15 aa, Artificial Sequence
  Description of Artificial Sequence: Synthetic peptide
  Seed: SIGKVCRTLLAKSVF
SIGKVLRTELYKSIF

SEQ ID NO: 260758 - protein, 15 aa, Artificial Sequence
  Description of Artificial Sequence: Synthetic peptide
  Seed: SIGKVCRTLLAKSVF
SIGKVLRTELYKSVF

SEQ ID NO: 260759 - protein, 15 aa, Artificial Sequence
  Description of Artificial Sequence: Synthetic peptide
  Seed: SIGKVCRTLLAKSVF
SIGKVLRTFLAKSAF

SEQ ID NO: 260760 - protein, 15 aa, Artificial Sequence
  Description of Artificial Sequence: Synthetic peptide
  Seed: SIGKVCRTLLAKSVF
SIGKVLRTFLAKSIF

SEQ ID NO: 260761 - protein, 15 aa, Artificial Sequence
  Description of Artificial Sequence: Synthetic peptide
  Seed: SIGKVCRTLLAKSVF
SIGKVLRTFLAKSLF

SEQ ID NO: 260762 - protein, 15 aa, Artificial Sequence
  Description of Artificial Sequence: Synthetic peptide
  Seed: SIGKVCRTLLAKSVF
SIGKVLRTFLAKSMF

SEQ ID NO: 260763 - protein, 15 aa, Artificial Sequence
  Description of Artificial Sequence: Synthetic peptide
  Seed: SIGKVCRTLLAKSVF
SIGKVLRTFLAKSTF

SEQ ID NO: 260764 - protein, 15 aa, Artificial Sequence
  Description of Artificial Sequence: Synthetic peptide
  Seed: SIGKVCRTLLAKSVF
SIGKVLRTFLAKSVF

SEQ ID NO: 260765 - protein, 15 aa, Artificial Sequence
  Description of Artificial Sequence: Synthetic peptide
  Seed: SIGKVCRTLLAKSVF
SIGKVLRTFLFKSAF

SEQ ID NO: 260766 - protein, 15 aa, Artificial Sequence
  Description of Artificial Sequence: Synthetic peptide
  Seed: SIGKVCRTLLAKSVF
SIGKVLRTFLFKSEF

SEQ ID NO: 260767 - protein, 15 aa, Artificial Sequence
  Description of Artificial Sequence: Synthetic peptide
  Seed: SIGKVCRTLLAKSVF
SIGKVLRTFLFKSFF

SEQ ID NO: 260768 - protein, 15 aa, Artificial Sequence
  Description of Artificial Sequence: Synthetic peptide
  Seed: SIGKVCRTLLAKSVF
SIGKVLRTFLFKSIF

SEQ ID NO: 260769 - protein, 15 aa, Artificial Sequence
  Description of Artificial Sequence: Synthetic peptide
  Seed: SIGKVCRTLLAKSVF
SIGKVLRTFLFKSLF

SEQ ID NO: 260770 - protein, 15 aa, Artificial Sequence
  Description of Artificial Sequence: Synthetic peptide
  Seed: SIGKVCRTLLAKSVF
SIGKVLRTFLFKSMF

SEQ ID NO: 260771 - protein, 15 aa, Artificial Sequence
  Description of Artificial Sequence: Synthetic peptide
  Seed: SIGKVCRTLLAKSVF
SIGKVLRTFLFKSNF

SEQ ID NO: 260772 - protein, 15 aa, Artificial Sequence
  Description of Artificial Sequence: Synthetic peptide
  Seed: SIGKVCRTLLAKSVF
SIGKVLRTFLFKSSF

SEQ ID NO: 260773 - protein, 15 aa, Artificial Sequence
  Description of Artificial Sequence: Synthetic peptide
  Seed: SIGKVCRTLLAKSVF
SIGKVLRTFLFKSTF

SEQ ID NO: 260774 - protein, 15 aa, Artificial Sequence
  Description of Artificial Sequence: Synthetic peptide
  Seed: SIGKVCRTLLAKSVF
SIGKVLRTFLFKSVF

SEQ ID NO: 260775 - protein, 15 aa, Artificial Sequence
  Description of Artificial Sequence: Synthetic peptide
  Seed: SIGKVCRTLLAKSVF
SIGKVLRTFLFKSYF

SEQ ID NO: 260776 - protein, 15 aa, Artificial Sequence
  Description of Artificial Sequence: Synthetic peptide
  Seed: SIGKVCRTLLAKSVF
SIGKVLRTFLGKSIF

SEQ ID NO: 260777 - protein, 15 aa, Artificial Sequence
  Description of Artificial Sequence: Synthetic peptide
  Seed: SIGKVCRTLLAKSVF
SIGKVLRTFLGKSLF

SEQ ID NO: 260778 - protein, 15 aa, Artificial Sequence
  Description of Artificial Sequence: Synthetic peptide
  Seed: SIGKVCRTLLAKSVF
SIGKVLRTFLGKSVF

SEQ ID NO: 260779 - protein, 15 aa, Artificial Sequence
  Description of Artificial Sequence: Synthetic peptide
  Seed: SIGKVCRTLLAKSVF
SIGKVLRTFLLKSFF

SEQ ID NO: 260780 - protein, 15 aa, Artificial Sequence
  Description of Artificial Sequence: Synthetic peptide
  Seed: SIGKVCRTLLAKSVF
SIGKVLRTFLLKSIF

SEQ ID NO: 260781 - protein, 15 aa, Artificial Sequence
  Description of Artificial Sequence: Synthetic peptide
  Seed: SIGKVCRTLLAKSVF
SIGKVLRTFLLKSLF

SEQ ID NO: 260782 - protein, 15 aa, Artificial Sequence
  Description of Artificial Sequence: Synthetic peptide
  Seed: SIGKVCRTLLAKSVF
SIGKVLRTFLLKSMF

SEQ ID NO: 260783 - protein, 15 aa, Artificial Sequence
  Description of Artificial Sequence: Synthetic peptide
  Seed: SIGKVCRTLLAKSVF
SIGKVLRTFLLKSVF

SEQ ID NO: 260784 - protein, 15 aa, Artificial Sequence
  Description of Artificial Sequence: Synthetic peptide
  Seed: SIGKVCRTLLAKSVF
SIGKVLRTFLNKSIF

SEQ ID NO: 260785 - protein, 15 aa, Artificial Sequence
  Description of Artificial Sequence: Synthetic peptide
  Seed: SIGKVCRTLLAKSVF
SIGKVLRTFLNKSLF

SEQ ID NO: 260786 - protein, 15 aa, Artificial Sequence
  Description of Artificial Sequence: Synthetic peptide
  Seed: SIGKVCRTLLAKSVF
SIGKVLRTFLNKSVF

SEQ ID NO: 260787 - protein, 15 aa, Artificial Sequence
  Description of Artificial Sequence: Synthetic peptide
  Seed: SIGKVCRTLLAKSVF
SIGKVLRTFLSKSAF

SEQ ID NO: 260788 - protein, 15 aa, Artificial Sequence
  Description of Artificial Sequence: Synthetic peptide
  Seed: SIGKVCRTLLAKSVF
SIGKVLRTFLSKSIF

SEQ ID NO: 260789 - protein, 15 aa, Artificial Sequence
  Description of Artificial Sequence: Synthetic peptide
  Seed: SIGKVCRTLLAKSVF
SIGKVLRTFLSKSLF

SEQ ID NO: 260790 - protein, 15 aa, Artificial Sequence
  Description of Artificial Sequence: Synthetic peptide
  Seed: SIGKVCRTLLAKSVF
SIGKVLRTFLSKSMF

SEQ ID NO: 260791 - protein, 15 aa, Artificial Sequence
  Description of Artificial Sequence: Synthetic peptide
  Seed: SIGKVCRTLLAKSVF
SIGKVLRTFLSKSTF

SEQ ID NO: 260792 - protein, 15 aa, Artificial Sequence
  Description of Artificial Sequence: Synthetic peptide
  Seed: SIGKVCRTLLAKSVF
SIGKVLRTFLSKSVF

SEQ ID NO: 260793 - protein, 15 aa, Artificial Sequence
  Description of Artificial Sequence: Synthetic peptide
  Seed: SIGKVCRTLLAKSVF
SIGKVLRTFLTKSLF

SEQ ID NO: 260794 - protein, 15 aa, Artificial Sequence
  Description of Artificial Sequence: Synthetic peptide
  Seed: SIGKVCRTLLAKSVF
SIGKVLRTFLTKSVF

SEQ ID NO: 260795 - protein, 15 aa, Artificial Sequence
  Description of Artificial Sequence: Synthetic peptide
  Seed: SIGKVCRTLLAKSVF
SIGKVLRTFLWKSIF

SEQ ID NO: 260796 - protein, 15 aa, Artificial Sequence
  Description of Artificial Sequence: Synthetic peptide
  Seed: SIGKVCRTLLAKSVF
SIGKVLRTFLWKSVF

SEQ ID NO: 260797 - protein, 15 aa, Artificial Sequence
  Description of Artificial Sequence: Synthetic peptide
  Seed: SIGKVCRTLLAKSVF
SIGKVLRTFLYKSIF

SEQ ID NO: 260798 - protein, 15 aa, Artificial Sequence
  Description of Artificial Sequence: Synthetic peptide
  Seed: SIGKVCRTLLAKSVF
SIGKVLRTFLYKSLF

SEQ ID NO: 260799 - protein, 15 aa, Artificial Sequence
  Description of Artificial Sequence: Synthetic peptide
  Seed: SIGKVCRTLLAKSVF
SIGKVLRTFLYKSVF

SEQ ID NO: 260800 - protein, 15 aa, Artificial Sequence
  Description of Artificial Sequence: Synthetic peptide
  Seed: SIGKVCRTLLAKSVF
SIGKVLRTGLAKSIF

SEQ ID NO: 260801 - protein, 15 aa, Artificial Sequence
  Description of Artificial Sequence: Synthetic peptide
  Seed: SIGKVCRTLLAKSVF
SIGKVLRTGLAKSLF

SEQ ID NO: 260802 - protein, 15 aa, Artificial Sequence
  Description of Artificial Sequence: Synthetic peptide
  Seed: SIGKVCRTLLAKSVF
SIGKVLRTGLAKSVF

SEQ ID NO: 260803 - protein, 15 aa, Artificial Sequence
  Description of Artificial Sequence: Synthetic peptide
  Seed: SIGKVCRTLLAKSVF
SIGKVLRTGLFKSIF

SEQ ID NO: 260804 - protein, 15 aa, Artificial Sequence
  Description of Artificial Sequence: Synthetic peptide
  Seed: SIGKVCRTLLAKSVF
SIGKVLRTGLFKSLF

SEQ ID NO: 260805 - protein, 15 aa, Artificial Sequence
  Description of Artificial Sequence: Synthetic peptide
  Seed: SIGKVCRTLLAKSVF
SIGKVLRTGLFKSVF

SEQ ID NO: 260806 - protein, 15 aa, Artificial Sequence
  Description of Artificial Sequence: Synthetic peptide
  Seed: SIGKVCRTLLAKSVF
SIGKVLRTHLFKSAF

SEQ ID NO: 260807 - protein, 15 aa, Artificial Sequence
  Description of Artificial Sequence: Synthetic peptide
  Seed: SIGKVCRTLLAKSVF
SIGKVLRTHLFKSFF

SEQ ID NO: 260808 - protein, 15 aa, Artificial Sequence
  Description of Artificial Sequence: Synthetic peptide
  Seed: SIGKVCRTLLAKSVF
SIGKVLRTHLFKSIF

SEQ ID NO: 260809 - protein, 15 aa, Artificial Sequence
  Description of Artificial Sequence: Synthetic peptide
  Seed: SIGKVCRTLLAKSVF
SIGKVLRTHLFKSLF

SEQ ID NO: 260810 - protein, 15 aa, Artificial Sequence
  Description of Artificial Sequence: Synthetic peptide
  Seed: SIGKVCRTLLAKSVF
SIGKVLRTHLFKSMF

SEQ ID NO: 260811 - protein, 15 aa, Artificial Sequence
  Description of Artificial Sequence: Synthetic peptide
  Seed: SIGKVCRTLLAKSVF
SIGKVLRTHLFKSNF

SEQ ID NO: 260812 - protein, 15 aa, Artificial Sequence
  Description of Artificial Sequence: Synthetic peptide
  Seed: SIGKVCRTLLAKSVF
SIGKVLRTHLFKSSF

SEQ ID NO: 260813 - protein, 15 aa, Artificial Sequence
  Description of Artificial Sequence: Synthetic peptide
  Seed: SIGKVCRTLLAKSVF
SIGKVLRTHLFKSTF

SEQ ID NO: 260814 - protein, 15 aa, Artificial Sequence
  Description of Artificial Sequence: Synthetic peptide
  Seed: SIGKVCRTLLAKSVF
SIGKVLRTHLFKSVF

SEQ ID NO: 260815 - protein, 15 aa, Artificial Sequence
  Description of Artificial Sequence: Synthetic peptide
  Seed: SIGKVCRTLLAKSVF
SIGKVLRTHLFKSYF

SEQ ID NO: 260816 - protein, 15 aa, Artificial Sequence
  Description of Artificial Sequence: Synthetic peptide
  Seed: SIGKVCRTLLAKSVF
SIGKVLRTHLLKSFF

SEQ ID NO: 260817 - protein, 15 aa, Artificial Sequence
  Description of Artificial Sequence: Synthetic peptide
  Seed: SIGKVCRTLLAKSVF
SIGKVLRTHLLKSIF

SEQ ID NO: 260818 - protein, 15 aa, Artificial Sequence
  Description of Artificial Sequence: Synthetic peptide
  Seed: SIGKVCRTLLAKSVF
SIGKVLRTHLLKSLF

SEQ ID NO: 260819 - protein, 15 aa, Artificial Sequence
  Description of Artificial Sequence: Synthetic peptide
  Seed: SIGKVCRTLLAKSVF
SIGKVLRTHLLKSVF

SEQ ID NO: 260820 - protein, 15 aa, Artificial Sequence
  Description of Artificial Sequence: Synthetic peptide
  Seed: SIGKVCRTLLAKSVF
SIGKVLRTILAKSAF

SEQ ID NO: 260821 - protein, 15 aa, Artificial Sequence
  Description of Artificial Sequence: Synthetic peptide
  Seed: SIGKVCRTLLAKSVF
SIGKVLRTILAKSFF

SEQ ID NO: 260822 - protein, 15 aa, Artificial Sequence
  Description of Artificial Sequence: Synthetic peptide
  Seed: SIGKVCRTLLAKSVF
SIGKVLRTILAKSIF

SEQ ID NO: 260823 - protein, 15 aa, Artificial Sequence
  Description of Artificial Sequence: Synthetic peptide
  Seed: SIGKVCRTLLAKSVF
SIGKVLRTILAKSLF

SEQ ID NO: 260824 - protein, 15 aa, Artificial Sequence
  Description of Artificial Sequence: Synthetic peptide
  Seed: SIGKVCRTLLAKSVF
SIGKVLRTILAKSMF

SEQ ID NO: 260825 - protein, 15 aa, Artificial Sequence
  Description of Artificial Sequence: Synthetic peptide
  Seed: SIGKVCRTLLAKSVF
SIGKVLRTILAKSNF

SEQ ID NO: 260826 - protein, 15 aa, Artificial Sequence
  Description of Artificial Sequence: Synthetic peptide
  Seed: SIGKVCRTLLAKSVF
SIGKVLRTILAKSSF

SEQ ID NO: 260827 - protein, 15 aa, Artificial Sequence
  Description of Artificial Sequence: Synthetic peptide
  Seed: SIGKVCRTLLAKSVF
SIGKVLRTILAKSTF

SEQ ID NO: 260828 - protein, 15 aa, Artificial Sequence
  Description of Artificial Sequence: Synthetic peptide
  Seed: SIGKVCRTLLAKSVF
SIGKVLRTILAKSVF

SEQ ID NO: 260829 - protein, 15 aa, Artificial Sequence
  Description of Artificial Sequence: Synthetic peptide
  Seed: SIGKVCRTLLAKSVF
SIGKVLRTILFKSAF

SEQ ID NO: 260830 - protein, 15 aa, Artificial Sequence
  Description of Artificial Sequence: Synthetic peptide
  Seed: SIGKVCRTLLAKSVF
SIGKVLRTILFKSDF

SEQ ID NO: 260831 - protein, 15 aa, Artificial Sequence
  Description of Artificial Sequence: Synthetic peptide
  Seed: SIGKVCRTLLAKSVF
SIGKVLRTILFKSEF

SEQ ID NO: 260832 - protein, 15 aa, Artificial Sequence
  Description of Artificial Sequence: Synthetic peptide
  Seed: SIGKVCRTLLAKSVF
SIGKVLRTILFKSFF

SEQ ID NO: 260833 - protein, 15 aa, Artificial Sequence
  Description of Artificial Sequence: Synthetic peptide
  Seed: SIGKVCRTLLAKSVF
SIGKVLRTILFKSIF

SEQ ID NO: 260834 - protein, 15 aa, Artificial Sequence
  Description of Artificial Sequence: Synthetic peptide
  Seed: SIGKVCRTLLAKSVF
SIGKVLRTILFKSLF

SEQ ID NO: 260835 - protein, 15 aa, Artificial Sequence
  Description of Artificial Sequence: Synthetic peptide
  Seed: SIGKVCRTLLAKSVF
SIGKVLRTILFKSMF

SEQ ID NO: 260836 - protein, 15 aa, Artificial Sequence
  Description of Artificial Sequence: Synthetic peptide
  Seed: SIGKVCRTLLAKSVF
SIGKVLRTILFKSNF

SEQ ID NO: 260837 - protein, 15 aa, Artificial Sequence
  Description of Artificial Sequence: Synthetic peptide
  Seed: SIGKVCRTLLAKSVF
SIGKVLRTILFKSSF

SEQ ID NO: 260838 - protein, 15 aa, Artificial Sequence
  Description of Artificial Sequence: Synthetic peptide
  Seed: SIGKVCRTLLAKSVF
SIGKVLRTILFKSTF

SEQ ID NO: 260839 - protein, 15 aa, Artificial Sequence
  Description of Artificial Sequence: Synthetic peptide
  Seed: SIGKVCRTLLAKSVF
SIGKVLRTILFKSVF

SEQ ID NO: 260840 - protein, 15 aa, Artificial Sequence
  Description of Artificial Sequence: Synthetic peptide
  Seed: SIGKVCRTLLAKSVF
SIGKVLRTILFKSYF

SEQ ID NO: 260841 - protein, 15 aa, Artificial Sequence
  Description of Artificial Sequence: Synthetic peptide
  Seed: SIGKVCRTLLAKSVF
SIGKVLRTILGKSAF

SEQ ID NO: 260842 - protein, 15 aa, Artificial Sequence
  Description of Artificial Sequence: Synthetic peptide
  Seed: SIGKVCRTLLAKSVF
SIGKVLRTILGKSIF

SEQ ID NO: 260843 - protein, 15 aa, Artificial Sequence
  Description of Artificial Sequence: Synthetic peptide
  Seed: SIGKVCRTLLAKSVF
SIGKVLRTILGKSLF

SEQ ID NO: 260844 - protein, 15 aa, Artificial Sequence
  Description of Artificial Sequence: Synthetic peptide
  Seed: SIGKVCRTLLAKSVF
SIGKVLRTILGKSVF

SEQ ID NO: 260845 - protein, 15 aa, Artificial Sequence
  Description of Artificial Sequence: Synthetic peptide
  Seed: SIGKVCRTLLAKSVF
SIGKVLRTILLKSIF

SEQ ID NO: 260846 - protein, 15 aa, Artificial Sequence
  Description of Artificial Sequence: Synthetic peptide
  Seed: SIGKVCRTLLAKSVF
SIGKVLRTILLKSLF

SEQ ID NO: 260847 - protein, 15 aa, Artificial Sequence
  Description of Artificial Sequence: Synthetic peptide
  Seed: SIGKVCRTLLAKSVF
SIGKVLRTILLKSVF

SEQ ID NO: 260848 - protein, 15 aa, Artificial Sequence
  Description of Artificial Sequence: Synthetic peptide
  Seed: SIGKVCRTLLAKSVF
SIGKVLRTILSKSAF

SEQ ID NO: 260849 - protein, 15 aa, Artificial Sequence
  Description of Artificial Sequence: Synthetic peptide
  Seed: SIGKVCRTLLAKSVF
SIGKVLRTILSKSIF

SEQ ID NO: 260850 - protein, 15 aa, Artificial Sequence
  Description of Artificial Sequence: Synthetic peptide
  Seed: SIGKVCRTLLAKSVF
SIGKVLRTILSKSLF

SEQ ID NO: 260851 - protein, 15 aa, Artificial Sequence
  Description of Artificial Sequence: Synthetic peptide
  Seed: SIGKVCRTLLAKSVF
SIGKVLRTILSKSVF

SEQ ID NO: 260852 - protein, 15 aa, Artificial Sequence
  Description of Artificial Sequence: Synthetic peptide
  Seed: SIGKVCRTLLAKSVF
SIGKVLRTILVKSAF

SEQ ID NO: 260853 - protein, 15 aa, Artificial Sequence
  Description of Artificial Sequence: Synthetic peptide
  Seed: SIGKVCRTLLAKSVF
SIGKVLRTILVKSIF

SEQ ID NO: 260854 - protein, 15 aa, Artificial Sequence
  Description of Artificial Sequence: Synthetic peptide
  Seed: SIGKVCRTLLAKSVF
SIGKVLRTILVKSVF

SEQ ID NO: 260855 - protein, 15 aa, Artificial Sequence
  Description of Artificial Sequence: Synthetic peptide
  Seed: SIGKVCRTLLAKSVF
SIGKVLRTILWKSIF

SEQ ID NO: 260856 - protein, 15 aa, Artificial Sequence
  Description of Artificial Sequence: Synthetic peptide
  Seed: SIGKVCRTLLAKSVF
SIGKVLRTILWKSLF

SEQ ID NO: 260857 - protein, 15 aa, Artificial Sequence
  Description of Artificial Sequence: Synthetic peptide
  Seed: SIGKVCRTLLAKSVF
SIGKVLRTILWKSVF

SEQ ID NO: 260858 - protein, 15 aa, Artificial Sequence
  Description of Artificial Sequence: Synthetic peptide
  Seed: SIGKVCRTLLAKSVF
SIGKVLRTILYKSIF

SEQ ID NO: 260859 - protein, 15 aa, Artificial Sequence
  Description of Artificial Sequence: Synthetic peptide
  Seed: SIGKVCRTLLAKSVF
SIGKVLRTILYKSLF

SEQ ID NO: 260860 - protein, 15 aa, Artificial Sequence
  Description of Artificial Sequence: Synthetic peptide
  Seed: SIGKVCRTLLAKSVF
SIGKVLRTILYKSVF

SEQ ID NO: 260861 - protein, 15 aa, Artificial Sequence
  Description of Artificial Sequence: Synthetic peptide
  Seed: SIGKVCRTLLAKSVF
SIGKVLRTKLFKSIF

SEQ ID NO: 260862 - protein, 15 aa, Artificial Sequence
  Description of Artificial Sequence: Synthetic peptide
  Seed: SIGKVCRTLLAKSVF
SIGKVLRTKLFKSLF

SEQ ID NO: 260863 - protein, 15 aa, Artificial Sequence
  Description of Artificial Sequence: Synthetic peptide
  Seed: SIGKVCRTLLAKSVF
SIGKVLRTKLFKSVF

SEQ ID NO: 260864 - protein, 15 aa, Artificial Sequence
  Description of Artificial Sequence: Synthetic peptide
  Seed: SIGKVCRTLLAKSVF
SIGKVLRTLLAKSAF

SEQ ID NO: 260865 - protein, 15 aa, Artificial Sequence
  Description of Artificial Sequence: Synthetic peptide
  Seed: SIGKVCRTLLAKSVF
SIGKVLRTLLAKSCF

SEQ ID NO: 260866 - protein, 15 aa, Artificial Sequence
  Description of Artificial Sequence: Synthetic peptide
  Seed: SIGKVCRTLLAKSVF
SIGKVLRTLLAKSFF

SEQ ID NO: 260867 - protein, 15 aa, Artificial Sequence
  Description of Artificial Sequence: Synthetic peptide
  Seed: SIGKVCRTLLAKSVF
SIGKVLRTLLAKSGF

SEQ ID NO: 260868 - protein, 15 aa, Artificial Sequence
  Description of Artificial Sequence: Synthetic peptide
  Seed: SIGKVCRTLLAKSVF
SIGKVLRTLLAKSHF

SEQ ID NO: 260869 - protein, 15 aa, Artificial Sequence
  Description of Artificial Sequence: Synthetic peptide
  Seed: SIGKVCRTLLAKSVF
SIGKVLRTLLAKSIF

SEQ ID NO: 260870 - protein, 15 aa, Artificial Sequence
  Description of Artificial Sequence: Synthetic peptide
  Seed: SIGKVCRTLLAKSVF
SIGKVLRTLLAKSLF

SEQ ID NO: 260871 - protein, 15 aa, Artificial Sequence
  Description of Artificial Sequence: Synthetic peptide
  Seed: SIGKVCRTLLAKSVF
SIGKVLRTLLAKSMF

SEQ ID NO: 260872 - protein, 15 aa, Artificial Sequence
  Description of Artificial Sequence: Synthetic peptide
  Seed: SIGKVCRTLLAKSVF
SIGKVLRTLLAKSNF

SEQ ID NO: 260873 - protein, 15 aa, Artificial Sequence
  Description of Artificial Sequence: Synthetic peptide
  Seed: SIGKVCRTLLAKSVF
SIGKVLRTLLAKSRF

SEQ ID NO: 260874 - protein, 15 aa, Artificial Sequence
  Description of Artificial Sequence: Synthetic peptide
  Seed: SIGKVCRTLLAKSVF
SIGKVLRTLLAKSSF

SEQ ID NO: 260875 - protein, 15 aa, Artificial Sequence
  Description of Artificial Sequence: Synthetic peptide
  Seed: SIGKVCRTLLAKSVF
SIGKVLRTLLAKSTF

SEQ ID NO: 260876 - protein, 15 aa, Artificial Sequence
  Description of Artificial Sequence: Synthetic peptide
  Seed: SIGKVCRTLLAKSVF
SIGKVLRTLLAKSVF

SEQ ID NO: 260877 - protein, 15 aa, Artificial Sequence
  Description of Artificial Sequence: Synthetic peptide
  Seed: SIGKVCRTLLAKSVF
SIGKVLRTLLAKSWF

SEQ ID NO: 260878 - protein, 15 aa, Artificial Sequence
  Description of Artificial Sequence: Synthetic peptide
  Seed: SIGKVCRTLLAKSVF
SIGKVLRTLLAKSYF

SEQ ID NO: 260879 - protein, 15 aa, Artificial Sequence
  Description of Artificial Sequence: Synthetic peptide
  Seed: SIGKVCRTLLAKSVF
SIGKVLRTLLFKSAF

SEQ ID NO: 260880 - protein, 15 aa, Artificial Sequence
  Description of Artificial Sequence: Synthetic peptide
  Seed: SIGKVCRTLLAKSVF
SIGKVLRTLLFKSDF

SEQ ID NO: 260881 - protein, 15 aa, Artificial Sequence
  Description of Artificial Sequence: Synthetic peptide
  Seed: SIGKVCRTLLAKSVF
SIGKVLRTLLFKSEF

SEQ ID NO: 260882 - protein, 15 aa, Artificial Sequence
  Description of Artificial Sequence: Synthetic peptide
  Seed: SIGKVCRTLLAKSVF
SIGKVLRTLLFKSFF

SEQ ID NO: 260883 - protein, 15 aa, Artificial Sequence
  Description of Artificial Sequence: Synthetic peptide
  Seed: SIGKVCRTLLAKSVF
SIGKVLRTLLFKSIF

SEQ ID NO: 260884 - protein, 15 aa, Artificial Sequence
  Description of Artificial Sequence: Synthetic peptide
  Seed: SIGKVCRTLLAKSVF
SIGKVLRTLLFKSLF

SEQ ID NO: 260885 - protein, 15 aa, Artificial Sequence
  Description of Artificial Sequence: Synthetic peptide
  Seed: SIGKVCRTLLAKSVF
SIGKVLRTLLFKSMF

SEQ ID NO: 260886 - protein, 15 aa, Artificial Sequence
  Description of Artificial Sequence: Synthetic peptide
  Seed: SIGKVCRTLLAKSVF
SIGKVLRTLLFKSNF

SEQ ID NO: 260887 - protein, 15 aa, Artificial Sequence
  Description of Artificial Sequence: Synthetic peptide
  Seed: SIGKVCRTLLAKSVF
SIGKVLRTLLFKSSF

SEQ ID NO: 260888 - protein, 15 aa, Artificial Sequence
  Description of Artificial Sequence: Synthetic peptide
  Seed: SIGKVCRTLLAKSVF
SIGKVLRTLLFKSTF

SEQ ID NO: 260889 - protein, 15 aa, Artificial Sequence
  Description of Artificial Sequence: Synthetic peptide
  Seed: SIGKVCRTLLAKSVF
SIGKVLRTLLFKSVF

SEQ ID NO: 260890 - protein, 15 aa, Artificial Sequence
  Description of Artificial Sequence: Synthetic peptide
  Seed: SIGKVCRTLLAKSVF
SIGKVLRTLLFKSYF

SEQ ID NO: 260891 - protein, 15 aa, Artificial Sequence
  Description of Artificial Sequence: Synthetic peptide
  Seed: SIGKVCRTLLAKSVF
SIGKVLRTLLGKSAF

SEQ ID NO: 260892 - protein, 15 aa, Artificial Sequence
  Description of Artificial Sequence: Synthetic peptide
  Seed: SIGKVCRTLLAKSVF
SIGKVLRTLLGKSIF

SEQ ID NO: 260893 - protein, 15 aa, Artificial Sequence
  Description of Artificial Sequence: Synthetic peptide
  Seed: SIGKVCRTLLAKSVF
SIGKVLRTLLGKSLF

SEQ ID NO: 260894 - protein, 15 aa, Artificial Sequence
  Description of Artificial Sequence: Synthetic peptide
  Seed: SIGKVCRTLLAKSVF
SIGKVLRTLLGKSMF

SEQ ID NO: 260895 - protein, 15 aa, Artificial Sequence
  Description of Artificial Sequence: Synthetic peptide
  Seed: SIGKVCRTLLAKSVF
SIGKVLRTLLGKSSF

SEQ ID NO: 260896 - protein, 15 aa, Artificial Sequence
  Description of Artificial Sequence: Synthetic peptide
  Seed: SIGKVCRTLLAKSVF
SIGKVLRTLLGKSTF

SEQ ID NO: 260897 - protein, 15 aa, Artificial Sequence
  Description of Artificial Sequence: Synthetic peptide
  Seed: SIGKVCRTLLAKSVF
SIGKVLRTLLGKSVF

SEQ ID NO: 260898 - protein, 15 aa, Artificial Sequence
  Description of Artificial Sequence: Synthetic peptide
  Seed: SIGKVCRTLLAKSVF
SIGKVLRTLLIKSAF

SEQ ID NO: 260899 - protein, 15 aa, Artificial Sequence
  Description of Artificial Sequence: Synthetic peptide
  Seed: SIGKVCRTLLAKSVF
SIGKVLRTLLIKSVF

SEQ ID NO: 260900 - protein, 15 aa, Artificial Sequence
  Description of Artificial Sequence: Synthetic peptide
  Seed: SIGKVCRTLLAKSVF
SIGKVLRTLLNKSIF

SEQ ID NO: 260901 - protein, 15 aa, Artificial Sequence
  Description of Artificial Sequence: Synthetic peptide
  Seed: SIGKVCRTLLAKSVF
SIGKVLRTLLNKSLF

SEQ ID NO: 260902 - protein, 15 aa, Artificial Sequence
  Description of Artificial Sequence: Synthetic peptide
  Seed: SIGKVCRTLLAKSVF
SIGKVLRTLLNKSVF

SEQ ID NO: 260903 - protein, 15 aa, Artificial Sequence
  Description of Artificial Sequence: Synthetic peptide
  Seed: SIGKVCRTLLAKSVF
SIGKVLRTLLPKSAF

SEQ ID NO: 260904 - protein, 15 aa, Artificial Sequence
  Description of Artificial Sequence: Synthetic peptide
  Seed: SIGKVCRTLLAKSVF
SIGKVLRTLLPKSIF

SEQ ID NO: 260905 - protein, 15 aa, Artificial Sequence
  Description of Artificial Sequence: Synthetic peptide
  Seed: SIGKVCRTLLAKSVF
SIGKVLRTLLPKSLF

SEQ ID NO: 260906 - protein, 15 aa, Artificial Sequence
  Description of Artificial Sequence: Synthetic peptide
  Seed: SIGKVCRTLLAKSVF
SIGKVLRTLLPKSNF

SEQ ID NO: 260907 - protein, 15 aa, Artificial Sequence
  Description of Artificial Sequence: Synthetic peptide
  Seed: SIGKVCRTLLAKSVF
SIGKVLRTLLPKSSF

SEQ ID NO: 260908 - protein, 15 aa, Artificial Sequence
  Description of Artificial Sequence: Synthetic peptide
  Seed: SIGKVCRTLLAKSVF
SIGKVLRTLLPKSVF

SEQ ID NO: 260909 - protein, 15 aa, Artificial Sequence
  Description of Artificial Sequence: Synthetic peptide
  Seed: SIGKVCRTLLAKSVF
SIGKVLRTLLSKSAF

SEQ ID NO: 260910 - protein, 15 aa, Artificial Sequence
  Description of Artificial Sequence: Synthetic peptide
  Seed: SIGKVCRTLLAKSVF
SIGKVLRTLLSKSIF

SEQ ID NO: 260911 - protein, 15 aa, Artificial Sequence
  Description of Artificial Sequence: Synthetic peptide
  Seed: SIGKVCRTLLAKSVF
SIGKVLRTLLSKSLF

SEQ ID NO: 260912 - protein, 15 aa, Artificial Sequence
  Description of Artificial Sequence: Synthetic peptide
  Seed: SIGKVCRTLLAKSVF
SIGKVLRTLLSKSMF

SEQ ID NO: 260913 - protein, 15 aa, Artificial Sequence
  Description of Artificial Sequence: Synthetic peptide
  Seed: SIGKVCRTLLAKSVF
SIGKVLRTLLSKSNF

SEQ ID NO: 260914 - protein, 15 aa, Artificial Sequence
  Description of Artificial Sequence: Synthetic peptide
  Seed: SIGKVCRTLLAKSVF
SIGKVLRTLLSKSSF

SEQ ID NO: 260915 - protein, 15 aa, Artificial Sequence
  Description of Artificial Sequence: Synthetic peptide
  Seed: SIGKVCRTLLAKSVF
SIGKVLRTLLSKSTF

SEQ ID NO: 260916 - protein, 15 aa, Artificial Sequence
  Description of Artificial Sequence: Synthetic peptide
  Seed: SIGKVCRTLLAKSVF
SIGKVLRTLLSKSVF

SEQ ID NO: 260917 - protein, 15 aa, Artificial Sequence
  Description of Artificial Sequence: Synthetic peptide
  Seed: SIGKVCRTLLAKSVF
SIGKVLRTLLSKSYF

SEQ ID NO: 260918 - protein, 15 aa, Artificial Sequence
  Description of Artificial Sequence: Synthetic peptide
  Seed: SIGKVCRTLLAKSVF
SIGKVLRTLLTKSAF

SEQ ID NO: 260919 - protein, 15 aa, Artificial Sequence
  Description of Artificial Sequence: Synthetic peptide
  Seed: SIGKVCRTLLAKSVF
SIGKVLRTLLTKSIF

SEQ ID NO: 260920 - protein, 15 aa, Artificial Sequence
  Description of Artificial Sequence: Synthetic peptide
  Seed: SIGKVCRTLLAKSVF
SIGKVLRTLLTKSLF

SEQ ID NO: 260921 - protein, 15 aa, Artificial Sequence
  Description of Artificial Sequence: Synthetic peptide
  Seed: SIGKVCRTLLAKSVF
SIGKVLRTLLTKSMF

SEQ ID NO: 260922 - protein, 15 aa, Artificial Sequence
  Description of Artificial Sequence: Synthetic peptide
  Seed: SIGKVCRTLLAKSVF
SIGKVLRTLLTKSNF

SEQ ID NO: 260923 - protein, 15 aa, Artificial Sequence
  Description of Artificial Sequence: Synthetic peptide
  Seed: SIGKVCRTLLAKSVF
SIGKVLRTLLTKSSF

SEQ ID NO: 260924 - protein, 15 aa, Artificial Sequence
  Description of Artificial Sequence: Synthetic peptide
  Seed: SIGKVCRTLLAKSVF
SIGKVLRTLLTKSTF

SEQ ID NO: 260925 - protein, 15 aa, Artificial Sequence
  Description of Artificial Sequence: Synthetic peptide
  Seed: SIGKVCRTLLAKSVF
SIGKVLRTLLTKSVF

SEQ ID NO: 260926 - protein, 15 aa, Artificial Sequence
  Description of Artificial Sequence: Synthetic peptide
  Seed: SIGKVCRTLLAKSVF
SIGKVLRTLLVKSAF

SEQ ID NO: 260927 - protein, 15 aa, Artificial Sequence
  Description of Artificial Sequence: Synthetic peptide
  Seed: SIGKVCRTLLAKSVF
SIGKVLRTLLVKSIF

SEQ ID NO: 260928 - protein, 15 aa, Artificial Sequence
  Description of Artificial Sequence: Synthetic peptide
  Seed: SIGKVCRTLLAKSVF
SIGKVLRTLLVKSLF

SEQ ID NO: 260929 - protein, 15 aa, Artificial Sequence
  Description of Artificial Sequence: Synthetic peptide
  Seed: SIGKVCRTLLAKSVF
SIGKVLRTLLVKSMF

SEQ ID NO: 260930 - protein, 15 aa, Artificial Sequence
  Description of Artificial Sequence: Synthetic peptide
  Seed: SIGKVCRTLLAKSVF
SIGKVLRTLLVKSSF

SEQ ID NO: 260931 - protein, 15 aa, Artificial Sequence
  Description of Artificial Sequence: Synthetic peptide
  Seed: SIGKVCRTLLAKSVF
SIGKVLRTLLVKSTF

SEQ ID NO: 260932 - protein, 15 aa, Artificial Sequence
  Description of Artificial Sequence: Synthetic peptide
  Seed: SIGKVCRTLLAKSVF
SIGKVLRTLLVKSVF

SEQ ID NO: 260933 - protein, 15 aa, Artificial Sequence
  Description of Artificial Sequence: Synthetic peptide
  Seed: SIGKVCRTLLAKSVF
SIGKVLRTLLYKSIF

SEQ ID NO: 260934 - protein, 15 aa, Artificial Sequence
  Description of Artificial Sequence: Synthetic peptide
  Seed: SIGKVCRTLLAKSVF
SIGKVLRTLLYKSLF

SEQ ID NO: 260935 - protein, 15 aa, Artificial Sequence
  Description of Artificial Sequence: Synthetic peptide
  Seed: SIGKVCRTLLAKSVF
SIGKVLRTLLYKSVF

SEQ ID NO: 260936 - protein, 15 aa, Artificial Sequence
  Description of Artificial Sequence: Synthetic peptide
  Seed: SIGKVCRTLLAKSVF
SIGKVLRTMLAKSAF

SEQ ID NO: 260937 - protein, 15 aa, Artificial Sequence
  Description of Artificial Sequence: Synthetic peptide
  Seed: SIGKVCRTLLAKSVF
SIGKVLRTMLAKSCF

SEQ ID NO: 260938 - protein, 15 aa, Artificial Sequence
  Description of Artificial Sequence: Synthetic peptide
  Seed: SIGKVCRTLLAKSVF
SIGKVLRTMLAKSFF

SEQ ID NO: 260939 - protein, 15 aa, Artificial Sequence
  Description of Artificial Sequence: Synthetic peptide
  Seed: SIGKVCRTLLAKSVF
SIGKVLRTMLAKSGF

SEQ ID NO: 260940 - protein, 15 aa, Artificial Sequence
  Description of Artificial Sequence: Synthetic peptide
  Seed: SIGKVCRTLLAKSVF
SIGKVLRTMLAKSHF

SEQ ID NO: 260941 - protein, 15 aa, Artificial Sequence
  Description of Artificial Sequence: Synthetic peptide
  Seed: SIGKVCRTLLAKSVF
SIGKVLRTMLAKSIF

SEQ ID NO: 260942 - protein, 15 aa, Artificial Sequence
  Description of Artificial Sequence: Synthetic peptide
  Seed: SIGKVCRTLLAKSVF
SIGKVLRTMLAKSLF

SEQ ID NO: 260943 - protein, 15 aa, Artificial Sequence
  Description of Artificial Sequence: Synthetic peptide
  Seed: SIGKVCRTLLAKSVF
SIGKVLRTMLAKSMF

SEQ ID NO: 260944 - protein, 15 aa, Artificial Sequence
  Description of Artificial Sequence: Synthetic peptide
  Seed: SIGKVCRTLLAKSVF
SIGKVLRTMLAKSNF

SEQ ID NO: 260945 - protein, 15 aa, Artificial Sequence
  Description of Artificial Sequence: Synthetic peptide
  Seed: SIGKVCRTLLAKSVF
SIGKVLRTMLAKSRF

SEQ ID NO: 260946 - protein, 15 aa, Artificial Sequence
  Description of Artificial Sequence: Synthetic peptide
  Seed: SIGKVCRTLLAKSVF
SIGKVLRTMLAKSSF

SEQ ID NO: 260947 - protein, 15 aa, Artificial Sequence
  Description of Artificial Sequence: Synthetic peptide
  Seed: SIGKVCRTLLAKSVF
SIGKVLRTMLAKSTF

SEQ ID NO: 260948 - protein, 15 aa, Artificial Sequence
  Description of Artificial Sequence: Synthetic peptide
  Seed: SIGKVCRTLLAKSVF
SIGKVLRTMLAKSVF

SEQ ID NO: 260949 - protein, 15 aa, Artificial Sequence
  Description of Artificial Sequence: Synthetic peptide
  Seed: SIGKVCRTLLAKSVF
SIGKVLRTMLAKSYF

SEQ ID NO: 260950 - protein, 15 aa, Artificial Sequence
  Description of Artificial Sequence: Synthetic peptide
  Seed: SIGKVCRTLLAKSVF
SIGKVLRTMLFKSAF

SEQ ID NO: 260951 - protein, 15 aa, Artificial Sequence
  Description of Artificial Sequence: Synthetic peptide
  Seed: SIGKVCRTLLAKSVF
SIGKVLRTMLFKSEF

SEQ ID NO: 260952 - protein, 15 aa, Artificial Sequence
  Description of Artificial Sequence: Synthetic peptide
  Seed: SIGKVCRTLLAKSVF
SIGKVLRTMLFKSFF

SEQ ID NO: 260953 - protein, 15 aa, Artificial Sequence
  Description of Artificial Sequence: Synthetic peptide
  Seed: SIGKVCRTLLAKSVF
SIGKVLRTMLFKSIF

SEQ ID NO: 260954 - protein, 15 aa, Artificial Sequence
  Description of Artificial Sequence: Synthetic peptide
  Seed: SIGKVCRTLLAKSVF
SIGKVLRTMLFKSLF

SEQ ID NO: 260955 - protein, 15 aa, Artificial Sequence
  Description of Artificial Sequence: Synthetic peptide
  Seed: SIGKVCRTLLAKSVF
SIGKVLRTMLFKSMF

SEQ ID NO: 260956 - protein, 15 aa, Artificial Sequence
  Description of Artificial Sequence: Synthetic peptide
  Seed: SIGKVCRTLLAKSVF
SIGKVLRTMLFKSNF

SEQ ID NO: 260957 - protein, 15 aa, Artificial Sequence
  Description of Artificial Sequence: Synthetic peptide
  Seed: SIGKVCRTLLAKSVF
SIGKVLRTMLFKSTF

SEQ ID NO: 260958 - protein, 15 aa, Artificial Sequence
  Description of Artificial Sequence: Synthetic peptide
  Seed: SIGKVCRTLLAKSVF
SIGKVLRTMLFKSVF

SEQ ID NO: 260959 - protein, 15 aa, Artificial Sequence
  Description of Artificial Sequence: Synthetic peptide
  Seed: SIGKVCRTLLAKSVF
SIGKVLRTMLFKSYF

SEQ ID NO: 260960 - protein, 15 aa, Artificial Sequence
  Description of Artificial Sequence: Synthetic peptide
  Seed: SIGKVCRTLLAKSVF
SIGKVLRTMLGKSAF

SEQ ID NO: 260961 - protein, 15 aa, Artificial Sequence
  Description of Artificial Sequence: Synthetic peptide
  Seed: SIGKVCRTLLAKSVF
SIGKVLRTMLGKSIF

SEQ ID NO: 260962 - protein, 15 aa, Artificial Sequence
  Description of Artificial Sequence: Synthetic peptide
  Seed: SIGKVCRTLLAKSVF
SIGKVLRTMLGKSLF

SEQ ID NO: 260963 - protein, 15 aa, Artificial Sequence
  Description of Artificial Sequence: Synthetic peptide
  Seed: SIGKVCRTLLAKSVF
SIGKVLRTMLGKSMF

SEQ ID NO: 260964 - protein, 15 aa, Artificial Sequence
  Description of Artificial Sequence: Synthetic peptide
  Seed: SIGKVCRTLLAKSVF
SIGKVLRTMLGKSSF

SEQ ID NO: 260965 - protein, 15 aa, Artificial Sequence
  Description of Artificial Sequence: Synthetic peptide
  Seed: SIGKVCRTLLAKSVF
SIGKVLRTMLGKSTF

SEQ ID NO: 260966 - protein, 15 aa, Artificial Sequence
  Description of Artificial Sequence: Synthetic peptide
  Seed: SIGKVCRTLLAKSVF
SIGKVLRTMLGKSVF

SEQ ID NO: 260967 - protein, 15 aa, Artificial Sequence
  Description of Artificial Sequence: Synthetic peptide
  Seed: SIGKVCRTLLAKSVF
SIGKVLRTMLNKSAF

SEQ ID NO: 260968 - protein, 15 aa, Artificial Sequence
  Description of Artificial Sequence: Synthetic peptide
  Seed: SIGKVCRTLLAKSVF
SIGKVLRTMLNKSIF

SEQ ID NO: 260969 - protein, 15 aa, Artificial Sequence
  Description of Artificial Sequence: Synthetic peptide
  Seed: SIGKVCRTLLAKSVF
SIGKVLRTMLNKSLF

SEQ ID NO: 260970 - protein, 15 aa, Artificial Sequence
  Description of Artificial Sequence: Synthetic peptide
  Seed: SIGKVCRTLLAKSVF
SIGKVLRTMLNKSVF

SEQ ID NO: 260971 - protein, 15 aa, Artificial Sequence
  Description of Artificial Sequence: Synthetic peptide
  Seed: SIGKVCRTLLAKSVF
SIGKVLRTMLPKSAF

SEQ ID NO: 260972 - protein, 15 aa, Artificial Sequence
  Description of Artificial Sequence: Synthetic peptide
  Seed: SIGKVCRTLLAKSVF
SIGKVLRTMLPKSIF

SEQ ID NO: 260973 - protein, 15 aa, Artificial Sequence
  Description of Artificial Sequence: Synthetic peptide
  Seed: SIGKVCRTLLAKSVF
SIGKVLRTMLPKSLF

SEQ ID NO: 260974 - protein, 15 aa, Artificial Sequence
  Description of Artificial Sequence: Synthetic peptide
  Seed: SIGKVCRTLLAKSVF
SIGKVLRTMLPKSMF

SEQ ID NO: 260975 - protein, 15 aa, Artificial Sequence
  Description of Artificial Sequence: Synthetic peptide
  Seed: SIGKVCRTLLAKSVF
SIGKVLRTMLPKSNF

SEQ ID NO: 260976 - protein, 15 aa, Artificial Sequence
  Description of Artificial Sequence: Synthetic peptide
  Seed: SIGKVCRTLLAKSVF
SIGKVLRTMLPKSSF

SEQ ID NO: 260977 - protein, 15 aa, Artificial Sequence
  Description of Artificial Sequence: Synthetic peptide
  Seed: SIGKVCRTLLAKSVF
SIGKVLRTMLPKSTF

SEQ ID NO: 260978 - protein, 15 aa, Artificial Sequence
  Description of Artificial Sequence: Synthetic peptide
  Seed: SIGKVCRTLLAKSVF
SIGKVLRTMLPKSVF

SEQ ID NO: 260979 - protein, 15 aa, Artificial Sequence
  Description of Artificial Sequence: Synthetic peptide
  Seed: SIGKVCRTLLAKSVF
SIGKVLRTMLSKSAF

SEQ ID NO: 260980 - protein, 15 aa, Artificial Sequence
  Description of Artificial Sequence: Synthetic peptide
  Seed: SIGKVCRTLLAKSVF
SIGKVLRTMLSKSIF

SEQ ID NO: 260981 - protein, 15 aa, Artificial Sequence
  Description of Artificial Sequence: Synthetic peptide
  Seed: SIGKVCRTLLAKSVF
SIGKVLRTMLSKSLF

SEQ ID NO: 260982 - protein, 15 aa, Artificial Sequence
  Description of Artificial Sequence: Synthetic peptide
  Seed: SIGKVCRTLLAKSVF
SIGKVLRTMLSKSMF

SEQ ID NO: 260983 - protein, 15 aa, Artificial Sequence
  Description of Artificial Sequence: Synthetic peptide
  Seed: SIGKVCRTLLAKSVF
SIGKVLRTMLSKSNF

SEQ ID NO: 260984 - protein, 15 aa, Artificial Sequence
  Description of Artificial Sequence: Synthetic peptide
  Seed: SIGKVCRTLLAKSVF
SIGKVLRTMLSKSSF

SEQ ID NO: 260985 - protein, 15 aa, Artificial Sequence
  Description of Artificial Sequence: Synthetic peptide
  Seed: SIGKVCRTLLAKSVF
SIGKVLRTMLSKSTF

SEQ ID NO: 260986 - protein, 15 aa, Artificial Sequence
  Description of Artificial Sequence: Synthetic peptide
  Seed: SIGKVCRTLLAKSVF
SIGKVLRTMLSKSVF

SEQ ID NO: 260987 - protein, 15 aa, Artificial Sequence
  Description of Artificial Sequence: Synthetic peptide
  Seed: SIGKVCRTLLAKSVF
SIGKVLRTMLTKSAF

SEQ ID NO: 260988 - protein, 15 aa, Artificial Sequence
  Description of Artificial Sequence: Synthetic peptide
  Seed: SIGKVCRTLLAKSVF
SIGKVLRTMLTKSIF

SEQ ID NO: 260989 - protein, 15 aa, Artificial Sequence
  Description of Artificial Sequence: Synthetic peptide
  Seed: SIGKVCRTLLAKSVF
SIGKVLRTMLTKSLF

SEQ ID NO: 260990 - protein, 15 aa, Artificial Sequence
  Description of Artificial Sequence: Synthetic peptide
  Seed: SIGKVCRTLLAKSVF
SIGKVLRTMLTKSMF

SEQ ID NO: 260991 - protein, 15 aa, Artificial Sequence
  Description of Artificial Sequence: Synthetic peptide
  Seed: SIGKVCRTLLAKSVF
SIGKVLRTMLTKSNF

SEQ ID NO: 260992 - protein, 15 aa, Artificial Sequence
  Description of Artificial Sequence: Synthetic peptide
  Seed: SIGKVCRTLLAKSVF
SIGKVLRTMLTKSSF

SEQ ID NO: 260993 - protein, 15 aa, Artificial Sequence
  Description of Artificial Sequence: Synthetic peptide
  Seed: SIGKVCRTLLAKSVF
SIGKVLRTMLTKSTF

SEQ ID NO: 260994 - protein, 15 aa, Artificial Sequence
  Description of Artificial Sequence: Synthetic peptide
  Seed: SIGKVCRTLLAKSVF
SIGKVLRTMLTKSVF

SEQ ID NO: 260995 - protein, 15 aa, Artificial Sequence
  Description of Artificial Sequence: Synthetic peptide
  Seed: SIGKVCRTLLAKSVF
SIGKVLRTMLVKSAF

SEQ ID NO: 260996 - protein, 15 aa, Artificial Sequence
  Description of Artificial Sequence: Synthetic peptide
  Seed: SIGKVCRTLLAKSVF
SIGKVLRTMLVKSIF

SEQ ID NO: 260997 - protein, 15 aa, Artificial Sequence
  Description of Artificial Sequence: Synthetic peptide
  Seed: SIGKVCRTLLAKSVF
SIGKVLRTMLVKSLF

SEQ ID NO: 260998 - protein, 15 aa, Artificial Sequence
  Description of Artificial Sequence: Synthetic peptide
  Seed: SIGKVCRTLLAKSVF
SIGKVLRTMLVKSMF

SEQ ID NO: 260999 - protein, 15 aa, Artificial Sequence
  Description of Artificial Sequence: Synthetic peptide
  Seed: SIGKVCRTLLAKSVF
SIGKVLRTMLVKSNF

SEQ ID NO: 261000 - protein, 15 aa, Artificial Sequence
  Description of Artificial Sequence: Synthetic peptide
  Seed: SIGKVCRTLLAKSVF
SIGKVLRTMLVKSSF

SEQ ID NO: 261001 - protein, 15 aa, Artificial Sequence
  Description of Artificial Sequence: Synthetic peptide
  Seed: SIGKVCRTLLAKSVF
SIGKVLRTMLVKSTF

SEQ ID NO: 261002 - protein, 15 aa, Artificial Sequence
  Description of Artificial Sequence: Synthetic peptide
  Seed: SIGKVCRTLLAKSVF
SIGKVLRTMLVKSVF

SEQ ID NO: 261003 - protein, 15 aa, Artificial Sequence
  Description of Artificial Sequence: Synthetic peptide
  Seed: SIGKVCRTLLAKSVF
SIGKVLRTMLYKSIF

SEQ ID NO: 261004 - protein, 15 aa, Artificial Sequence
  Description of Artificial Sequence: Synthetic peptide
  Seed: SIGKVCRTLLAKSVF
SIGKVLRTNLAKSIF

SEQ ID NO: 261005 - protein, 15 aa, Artificial Sequence
  Description of Artificial Sequence: Synthetic peptide
  Seed: SIGKVCRTLLAKSVF
SIGKVLRTNLAKSLF

SEQ ID NO: 261006 - protein, 15 aa, Artificial Sequence
  Description of Artificial Sequence: Synthetic peptide
  Seed: SIGKVCRTLLAKSVF
SIGKVLRTNLAKSVF

SEQ ID NO: 261007 - protein, 15 aa, Artificial Sequence
  Description of Artificial Sequence: Synthetic peptide
  Seed: SIGKVCRTLLAKSVF
SIGKVLRTNLFKSFF

SEQ ID NO: 261008 - protein, 15 aa, Artificial Sequence
  Description of Artificial Sequence: Synthetic peptide
  Seed: SIGKVCRTLLAKSVF
SIGKVLRTNLFKSIF

SEQ ID NO: 261009 - protein, 15 aa, Artificial Sequence
  Description of Artificial Sequence: Synthetic peptide
  Seed: SIGKVCRTLLAKSVF
SIGKVLRTNLFKSLF

SEQ ID NO: 261010 - protein, 15 aa, Artificial Sequence
  Description of Artificial Sequence: Synthetic peptide
  Seed: SIGKVCRTLLAKSVF
SIGKVLRTNLFKSMF

SEQ ID NO: 261011 - protein, 15 aa, Artificial Sequence
  Description of Artificial Sequence: Synthetic peptide
  Seed: SIGKVCRTLLAKSVF
SIGKVLRTNLFKSVF

SEQ ID NO: 261012 - protein, 15 aa, Artificial Sequence
  Description of Artificial Sequence: Synthetic peptide
  Seed: SIGKVCRTLLAKSVF
SIGKVLRTQLAKSAF

SEQ ID NO: 261013 - protein, 15 aa, Artificial Sequence
  Description of Artificial Sequence: Synthetic peptide
  Seed: SIGKVCRTLLAKSVF
SIGKVLRTQLAKSIF

SEQ ID NO: 261014 - protein, 15 aa, Artificial Sequence
  Description of Artificial Sequence: Synthetic peptide
  Seed: SIGKVCRTLLAKSVF
SIGKVLRTQLAKSLF

SEQ ID NO: 261015 - protein, 15 aa, Artificial Sequence
  Description of Artificial Sequence: Synthetic peptide
  Seed: SIGKVCRTLLAKSVF
SIGKVLRTQLAKSVF

SEQ ID NO: 261016 - protein, 15 aa, Artificial Sequence
  Description of Artificial Sequence: Synthetic peptide
  Seed: SIGKVCRTLLAKSVF
SIGKVLRTQLFKSFF

SEQ ID NO: 261017 - protein, 15 aa, Artificial Sequence
  Description of Artificial Sequence: Synthetic peptide
  Seed: SIGKVCRTLLAKSVF
SIGKVLRTQLFKSIF

SEQ ID NO: 261018 - protein, 15 aa, Artificial Sequence
  Description of Artificial Sequence: Synthetic peptide
  Seed: SIGKVCRTLLAKSVF
SIGKVLRTQLFKSLF

SEQ ID NO: 261019 - protein, 15 aa, Artificial Sequence
  Description of Artificial Sequence: Synthetic peptide
  Seed: SIGKVCRTLLAKSVF
SIGKVLRTQLFKSMF

SEQ ID NO: 261020 - protein, 15 aa, Artificial Sequence
  Description of Artificial Sequence: Synthetic peptide
  Seed: SIGKVCRTLLAKSVF
SIGKVLRTQLFKSVF

SEQ ID NO: 261021 - protein, 15 aa, Artificial Sequence
  Description of Artificial Sequence: Synthetic peptide
  Seed: SIGKVCRTLLAKSVF
SIGKVLRTQLGKSLF

SEQ ID NO: 261022 - protein, 15 aa, Artificial Sequence
  Description of Artificial Sequence: Synthetic peptide
  Seed: SIGKVCRTLLAKSVF
SIGKVLRTQLGKSVF

SEQ ID NO: 261023 - protein, 15 aa, Artificial Sequence
  Description of Artificial Sequence: Synthetic peptide
  Seed: SIGKVCRTLLAKSVF
SIGKVLRTQLSKSLF

SEQ ID NO: 261024 - protein, 15 aa, Artificial Sequence
  Description of Artificial Sequence: Synthetic peptide
  Seed: SIGKVCRTLLAKSVF
SIGKVLRTQLSKSVF

SEQ ID NO: 261025 - protein, 15 aa, Artificial Sequence
  Description of Artificial Sequence: Synthetic peptide
  Seed: SIGKVCRTLLAKSVF
SIGKVLRTRLFKSIF

SEQ ID NO: 261026 - protein, 15 aa, Artificial Sequence
  Description of Artificial Sequence: Synthetic peptide
  Seed: SIGKVCRTLLAKSVF
SIGKVLRTRLFKSLF

SEQ ID NO: 261027 - protein, 15 aa, Artificial Sequence
  Description of Artificial Sequence: Synthetic peptide
  Seed: SIGKVCRTLLAKSVF
SIGKVLRTRLFKSVF

SEQ ID NO: 261028 - protein, 15 aa, Artificial Sequence
  Description of Artificial Sequence: Synthetic peptide
  Seed: SIGKVCRTLLAKSVF
SIGKVLRTSLAKSAF

SEQ ID NO: 261029 - protein, 15 aa, Artificial Sequence
  Description of Artificial Sequence: Synthetic peptide
  Seed: SIGKVCRTLLAKSVF
SIGKVLRTSLAKSFF

SEQ ID NO: 261030 - protein, 15 aa, Artificial Sequence
  Description of Artificial Sequence: Synthetic peptide
  Seed: SIGKVCRTLLAKSVF
SIGKVLRTSLAKSIF

SEQ ID NO: 261031 - protein, 15 aa, Artificial Sequence
  Description of Artificial Sequence: Synthetic peptide
  Seed: SIGKVCRTLLAKSVF
SIGKVLRTSLAKSLF

SEQ ID NO: 261032 - protein, 15 aa, Artificial Sequence
  Description of Artificial Sequence: Synthetic peptide
  Seed: SIGKVCRTLLAKSVF
SIGKVLRTSLAKSMF

SEQ ID NO: 261033 - protein, 15 aa, Artificial Sequence
  Description of Artificial Sequence: Synthetic peptide
  Seed: SIGKVCRTLLAKSVF
SIGKVLRTSLAKSVF

SEQ ID NO: 261034 - protein, 15 aa, Artificial Sequence
  Description of Artificial Sequence: Synthetic peptide
  Seed: SIGKVCRTLLAKSVF
SIGKVLRTSLFKSAF

SEQ ID NO: 261035 - protein, 15 aa, Artificial Sequence
  Description of Artificial Sequence: Synthetic peptide
  Seed: SIGKVCRTLLAKSVF
SIGKVLRTSLFKSDF

SEQ ID NO: 261036 - protein, 15 aa, Artificial Sequence
  Description of Artificial Sequence: Synthetic peptide
  Seed: SIGKVCRTLLAKSVF
SIGKVLRTSLFKSEF

SEQ ID NO: 261037 - protein, 15 aa, Artificial Sequence
  Description of Artificial Sequence: Synthetic peptide
  Seed: SIGKVCRTLLAKSVF
SIGKVLRTSLFKSFF

SEQ ID NO: 261038 - protein, 15 aa, Artificial Sequence
  Description of Artificial Sequence: Synthetic peptide
  Seed: SIGKVCRTLLAKSVF
SIGKVLRTSLFKSIF

SEQ ID NO: 261039 - protein, 15 aa, Artificial Sequence
  Description of Artificial Sequence: Synthetic peptide
  Seed: SIGKVCRTLLAKSVF
SIGKVLRTSLFKSLF

SEQ ID NO: 261040 - protein, 15 aa, Artificial Sequence
  Description of Artificial Sequence: Synthetic peptide
  Seed: SIGKVCRTLLAKSVF
SIGKVLRTSLFKSMF

SEQ ID NO: 261041 - protein, 15 aa, Artificial Sequence
  Description of Artificial Sequence: Synthetic peptide
  Seed: SIGKVCRTLLAKSVF
SIGKVLRTSLFKSNF

SEQ ID NO: 261042 - protein, 15 aa, Artificial Sequence
  Description of Artificial Sequence: Synthetic peptide
  Seed: SIGKVCRTLLAKSVF
SIGKVLRTSLFKSSF

SEQ ID NO: 261043 - protein, 15 aa, Artificial Sequence
  Description of Artificial Sequence: Synthetic peptide
  Seed: SIGKVCRTLLAKSVF
SIGKVLRTSLFKSTF

SEQ ID NO: 261044 - protein, 15 aa, Artificial Sequence
  Description of Artificial Sequence: Synthetic peptide
  Seed: SIGKVCRTLLAKSVF
SIGKVLRTSLFKSVF

SEQ ID NO: 261045 - protein, 15 aa, Artificial Sequence
  Description of Artificial Sequence: Synthetic peptide
  Seed: SIGKVCRTLLAKSVF
SIGKVLRTSLFKSWF

SEQ ID NO: 261046 - protein, 15 aa, Artificial Sequence
  Description of Artificial Sequence: Synthetic peptide
  Seed: SIGKVCRTLLAKSVF
SIGKVLRTSLFKSYF

SEQ ID NO: 261047 - protein, 15 aa, Artificial Sequence
  Description of Artificial Sequence: Synthetic peptide
  Seed: SIGKVCRTLLAKSVF
SIGKVLRTSLGKSIF

SEQ ID NO: 261048 - protein, 15 aa, Artificial Sequence
  Description of Artificial Sequence: Synthetic peptide
  Seed: SIGKVCRTLLAKSVF
SIGKVLRTSLGKSLF

SEQ ID NO: 261049 - protein, 15 aa, Artificial Sequence
  Description of Artificial Sequence: Synthetic peptide
  Seed: SIGKVCRTLLAKSVF
SIGKVLRTSLGKSVF

SEQ ID NO: 261050 - protein, 15 aa, Artificial Sequence
  Description of Artificial Sequence: Synthetic peptide
  Seed: SIGKVCRTLLAKSVF
SIGKVLRTSLLKSIF

SEQ ID NO: 261051 - protein, 15 aa, Artificial Sequence
  Description of Artificial Sequence: Synthetic peptide
  Seed: SIGKVCRTLLAKSVF
SIGKVLRTSLLKSLF

SEQ ID NO: 261052 - protein, 15 aa, Artificial Sequence
  Description of Artificial Sequence: Synthetic peptide
  Seed: SIGKVCRTLLAKSVF
SIGKVLRTSLLKSVF

SEQ ID NO: 261053 - protein, 15 aa, Artificial Sequence
  Description of Artificial Sequence: Synthetic peptide
  Seed: SIGKVCRTLLAKSVF
SIGKVLRTSLPKSIF

SEQ ID NO: 261054 - protein, 15 aa, Artificial Sequence
  Description of Artificial Sequence: Synthetic peptide
  Seed: SIGKVCRTLLAKSVF
SIGKVLRTSLSKSFF

SEQ ID NO: 261055 - protein, 15 aa, Artificial Sequence
  Description of Artificial Sequence: Synthetic peptide
  Seed: SIGKVCRTLLAKSVF
SIGKVLRTSLSKSIF

SEQ ID NO: 261056 - protein, 15 aa, Artificial Sequence
  Description of Artificial Sequence: Synthetic peptide
  Seed: SIGKVCRTLLAKSVF
SIGKVLRTSLSKSLF

SEQ ID NO: 261057 - protein, 15 aa, Artificial Sequence
  Description of Artificial Sequence: Synthetic peptide
  Seed: SIGKVCRTLLAKSVF
SIGKVLRTSLSKSMF

SEQ ID NO: 261058 - protein, 15 aa, Artificial Sequence
  Description of Artificial Sequence: Synthetic peptide
  Seed: SIGKVCRTLLAKSVF
SIGKVLRTSLSKSVF

SEQ ID NO: 261059 - protein, 15 aa, Artificial Sequence
  Description of Artificial Sequence: Synthetic peptide
  Seed: SIGKVCRTLLAKSVF
SIGKVLRTSLTKSIF

SEQ ID NO: 261060 - protein, 15 aa, Artificial Sequence
  Description of Artificial Sequence: Synthetic peptide
  Seed: SIGKVCRTLLAKSVF
SIGKVLRTSLWKSIF

SEQ ID NO: 261061 - protein, 15 aa, Artificial Sequence
  Description of Artificial Sequence: Synthetic peptide
  Seed: SIGKVCRTLLAKSVF
SIGKVLRTSLWKSLF

SEQ ID NO: 261062 - protein, 15 aa, Artificial Sequence
  Description of Artificial Sequence: Synthetic peptide
  Seed: SIGKVCRTLLAKSVF
SIGKVLRTSLWKSVF

SEQ ID NO: 261063 - protein, 15 aa, Artificial Sequence
  Description of Artificial Sequence: Synthetic peptide
  Seed: SIGKVCRTLLAKSVF
SIGKVLRTSLYKSIF

SEQ ID NO: 261064 - protein, 15 aa, Artificial Sequence
  Description of Artificial Sequence: Synthetic peptide
  Seed: SIGKVCRTLLAKSVF
SIGKVLRTSLYKSLF

SEQ ID NO: 261065 - protein, 15 aa, Artificial Sequence
  Description of Artificial Sequence: Synthetic peptide
  Seed: SIGKVCRTLLAKSVF
SIGKVLRTSLYKSVF

SEQ ID NO: 261066 - protein, 15 aa, Artificial Sequence
  Description of Artificial Sequence: Synthetic peptide
  Seed: SIGKVCRTLLAKSVF
SIGKVLRTTLAKSFF

SEQ ID NO: 261067 - protein, 15 aa, Artificial Sequence
  Description of Artificial Sequence: Synthetic peptide
  Seed: SIGKVCRTLLAKSVF
SIGKVLRTTLAKSIF

SEQ ID NO: 261068 - protein, 15 aa, Artificial Sequence
  Description of Artificial Sequence: Synthetic peptide
  Seed: SIGKVCRTLLAKSVF
SIGKVLRTTLAKSLF

SEQ ID NO: 261069 - protein, 15 aa, Artificial Sequence
  Description of Artificial Sequence: Synthetic peptide
  Seed: SIGKVCRTLLAKSVF
SIGKVLRTTLAKSMF

SEQ ID NO: 261070 - protein, 15 aa, Artificial Sequence
  Description of Artificial Sequence: Synthetic peptide
  Seed: SIGKVCRTLLAKSVF
SIGKVLRTTLAKSVF

SEQ ID NO: 261071 - protein, 15 aa, Artificial Sequence
  Description of Artificial Sequence: Synthetic peptide
  Seed: SIGKVCRTLLAKSVF
SIGKVLRTTLFKSAF

SEQ ID NO: 261072 - protein, 15 aa, Artificial Sequence
  Description of Artificial Sequence: Synthetic peptide
  Seed: SIGKVCRTLLAKSVF
SIGKVLRTTLFKSCF

SEQ ID NO: 261073 - protein, 15 aa, Artificial Sequence
  Description of Artificial Sequence: Synthetic peptide
  Seed: SIGKVCRTLLAKSVF
SIGKVLRTTLFKSDF

SEQ ID NO: 261074 - protein, 15 aa, Artificial Sequence
  Description of Artificial Sequence: Synthetic peptide
  Seed: SIGKVCRTLLAKSVF
SIGKVLRTTLFKSEF

SEQ ID NO: 261075 - protein, 15 aa, Artificial Sequence
  Description of Artificial Sequence: Synthetic peptide
  Seed: SIGKVCRTLLAKSVF
SIGKVLRTTLFKSFF

SEQ ID NO: 261076 - protein, 15 aa, Artificial Sequence
  Description of Artificial Sequence: Synthetic peptide
  Seed: SIGKVCRTLLAKSVF
SIGKVLRTTLFKSHF

SEQ ID NO: 261077 - protein, 15 aa, Artificial Sequence
  Description of Artificial Sequence: Synthetic peptide
  Seed: SIGKVCRTLLAKSVF
SIGKVLRTTLFKSIF

SEQ ID NO: 261078 - protein, 15 aa, Artificial Sequence
  Description of Artificial Sequence: Synthetic peptide
  Seed: SIGKVCRTLLAKSVF
SIGKVLRTTLFKSLF

SEQ ID NO: 261079 - protein, 15 aa, Artificial Sequence
  Description of Artificial Sequence: Synthetic peptide
  Seed: SIGKVCRTLLAKSVF
SIGKVLRTTLFKSMF

SEQ ID NO: 261080 - protein, 15 aa, Artificial Sequence
  Description of Artificial Sequence: Synthetic peptide
  Seed: SIGKVCRTLLAKSVF
SIGKVLRTTLFKSNF

SEQ ID NO: 261081 - protein, 15 aa, Artificial Sequence
  Description of Artificial Sequence: Synthetic peptide
  Seed: SIGKVCRTLLAKSVF
SIGKVLRTTLFKSPF

SEQ ID NO: 261082 - protein, 15 aa, Artificial Sequence
  Description of Artificial Sequence: Synthetic peptide
  Seed: SIGKVCRTLLAKSVF
SIGKVLRTTLFKSQF

SEQ ID NO: 261083 - protein, 15 aa, Artificial Sequence
  Description of Artificial Sequence: Synthetic peptide
  Seed: SIGKVCRTLLAKSVF
SIGKVLRTTLFKSSF

SEQ ID NO: 261084 - protein, 15 aa, Artificial Sequence
  Description of Artificial Sequence: Synthetic peptide
  Seed: SIGKVCRTLLAKSVF
SIGKVLRTTLFKSTF

SEQ ID NO: 261085 - protein, 15 aa, Artificial Sequence
  Description of Artificial Sequence: Synthetic peptide
  Seed: SIGKVCRTLLAKSVF
SIGKVLRTTLFKSVF

SEQ ID NO: 261086 - protein, 15 aa, Artificial Sequence
  Description of Artificial Sequence: Synthetic peptide
  Seed: SIGKVCRTLLAKSVF
SIGKVLRTTLFKSWF

SEQ ID NO: 261087 - protein, 15 aa, Artificial Sequence
  Description of Artificial Sequence: Synthetic peptide
  Seed: SIGKVCRTLLAKSVF
SIGKVLRTTLFKSYF

SEQ ID NO: 261088 - protein, 15 aa, Artificial Sequence
  Description of Artificial Sequence: Synthetic peptide
  Seed: SIGKVCRTLLAKSVF
SIGKVLRTTLGKSIF

SEQ ID NO: 261089 - protein, 15 aa, Artificial Sequence
  Description of Artificial Sequence: Synthetic peptide
  Seed: SIGKVCRTLLAKSVF
SIGKVLRTTLGKSLF

SEQ ID NO: 261090 - protein, 15 aa, Artificial Sequence
  Description of Artificial Sequence: Synthetic peptide
  Seed: SIGKVCRTLLAKSVF
SIGKVLRTTLGKSVF

SEQ ID NO: 261091 - protein, 15 aa, Artificial Sequence
  Description of Artificial Sequence: Synthetic peptide
  Seed: SIGKVCRTLLAKSVF
SIGKVLRTTLLKSFF

SEQ ID NO: 261092 - protein, 15 aa, Artificial Sequence
  Description of Artificial Sequence: Synthetic peptide
  Seed: SIGKVCRTLLAKSVF
SIGKVLRTTLLKSIF

SEQ ID NO: 261093 - protein, 15 aa, Artificial Sequence
  Description of Artificial Sequence: Synthetic peptide
  Seed: SIGKVCRTLLAKSVF
SIGKVLRTTLLKSLF

SEQ ID NO: 261094 - protein, 15 aa, Artificial Sequence
  Description of Artificial Sequence: Synthetic peptide
  Seed: SIGKVCRTLLAKSVF
SIGKVLRTTLLKSVF

SEQ ID NO: 261095 - protein, 15 aa, Artificial Sequence
  Description of Artificial Sequence: Synthetic peptide
  Seed: SIGKVCRTLLAKSVF
SIGKVLRTTLMKSLF

SEQ ID NO: 261096 - protein, 15 aa, Artificial Sequence
  Description of Artificial Sequence: Synthetic peptide
  Seed: SIGKVCRTLLAKSVF
SIGKVLRTTLPKSIF

SEQ ID NO: 261097 - protein, 15 aa, Artificial Sequence
  Description of Artificial Sequence: Synthetic peptide
  Seed: SIGKVCRTLLAKSVF
SIGKVLRTTLSKSFF

SEQ ID NO: 261098 - protein, 15 aa, Artificial Sequence
  Description of Artificial Sequence: Synthetic peptide
  Seed: SIGKVCRTLLAKSVF
SIGKVLRTTLSKSIF

SEQ ID NO: 261099 - protein, 15 aa, Artificial Sequence
  Description of Artificial Sequence: Synthetic peptide
  Seed: SIGKVCRTLLAKSVF
SIGKVLRTTLSKSLF

SEQ ID NO: 261100 - protein, 15 aa, Artificial Sequence
  Description of Artificial Sequence: Synthetic peptide
  Seed: SIGKVCRTLLAKSVF
SIGKVLRTTLSKSMF

SEQ ID NO: 261101 - protein, 15 aa, Artificial Sequence
  Description of Artificial Sequence: Synthetic peptide
  Seed: SIGKVCRTLLAKSVF
SIGKVLRTTLSKSVF

SEQ ID NO: 261102 - protein, 15 aa, Artificial Sequence
  Description of Artificial Sequence: Synthetic peptide
  Seed: SIGKVCRTLLAKSVF
SIGKVLRTTLTKSIF

SEQ ID NO: 261103 - protein, 15 aa, Artificial Sequence
  Description of Artificial Sequence: Synthetic peptide
  Seed: SIGKVCRTLLAKSVF
SIGKVLRTTLTKSLF

SEQ ID NO: 261104 - protein, 15 aa, Artificial Sequence
  Description of Artificial Sequence: Synthetic peptide
  Seed: SIGKVCRTLLAKSVF
SIGKVLRTTLTKSVF

SEQ ID NO: 261105 - protein, 15 aa, Artificial Sequence
  Description of Artificial Sequence: Synthetic peptide
  Seed: SIGKVCRTLLAKSVF
SIGKVLRTTLWKSFF

SEQ ID NO: 261106 - protein, 15 aa, Artificial Sequence
  Description of Artificial Sequence: Synthetic peptide
  Seed: SIGKVCRTLLAKSVF
SIGKVLRTTLWKSIF

SEQ ID NO: 261107 - protein, 15 aa, Artificial Sequence
  Description of Artificial Sequence: Synthetic peptide
  Seed: SIGKVCRTLLAKSVF
SIGKVLRTTLWKSLF

SEQ ID NO: 261108 - protein, 15 aa, Artificial Sequence
  Description of Artificial Sequence: Synthetic peptide
  Seed: SIGKVCRTLLAKSVF
SIGKVLRTTLWKSVF

SEQ ID NO: 261109 - protein, 15 aa, Artificial Sequence
  Description of Artificial Sequence: Synthetic peptide
  Seed: SIGKVCRTLLAKSVF
SIGKVLRTTLYKSFF

SEQ ID NO: 261110 - protein, 15 aa, Artificial Sequence
  Description of Artificial Sequence: Synthetic peptide
  Seed: SIGKVCRTLLAKSVF
SIGKVLRTTLYKSIF

SEQ ID NO: 261111 - protein, 15 aa, Artificial Sequence
  Description of Artificial Sequence: Synthetic peptide
  Seed: SIGKVCRTLLAKSVF
SIGKVLRTTLYKSLF

SEQ ID NO: 261112 - protein, 15 aa, Artificial Sequence
  Description of Artificial Sequence: Synthetic peptide
  Seed: SIGKVCRTLLAKSVF
SIGKVLRTTLYKSVF

SEQ ID NO: 261113 - protein, 15 aa, Artificial Sequence
  Description of Artificial Sequence: Synthetic peptide
  Seed: SIGKVCRTLLAKSVF
SIGKVLRTVLAKSAF

SEQ ID NO: 261114 - protein, 15 aa, Artificial Sequence
  Description of Artificial Sequence: Synthetic peptide
  Seed: SIGKVCRTLLAKSVF
SIGKVLRTVLAKSIF

SEQ ID NO: 261115 - protein, 15 aa, Artificial Sequence
  Description of Artificial Sequence: Synthetic peptide
  Seed: SIGKVCRTLLAKSVF
SIGKVLRTVLAKSLF

SEQ ID NO: 261116 - protein, 15 aa, Artificial Sequence
  Description of Artificial Sequence: Synthetic peptide
  Seed: SIGKVCRTLLAKSVF
SIGKVLRTVLAKSMF

SEQ ID NO: 261117 - protein, 15 aa, Artificial Sequence
  Description of Artificial Sequence: Synthetic peptide
  Seed: SIGKVCRTLLAKSVF
SIGKVLRTVLAKSSF

SEQ ID NO: 261118 - protein, 15 aa, Artificial Sequence
  Description of Artificial Sequence: Synthetic peptide
  Seed: SIGKVCRTLLAKSVF
SIGKVLRTVLAKSTF

SEQ ID NO: 261119 - protein, 15 aa, Artificial Sequence
  Description of Artificial Sequence: Synthetic peptide
  Seed: SIGKVCRTLLAKSVF
SIGKVLRTVLAKSVF

SEQ ID NO: 261120 - protein, 15 aa, Artificial Sequence
  Description of Artificial Sequence: Synthetic peptide
  Seed: SIGKVCRTLLAKSVF
SIGKVLRTVLFKSAF

SEQ ID NO: 261121 - protein, 15 aa, Artificial Sequence
  Description of Artificial Sequence: Synthetic peptide
  Seed: SIGKVCRTLLAKSVF
SIGKVLRTVLFKSDF

SEQ ID NO: 261122 - protein, 15 aa, Artificial Sequence
  Description of Artificial Sequence: Synthetic peptide
  Seed: SIGKVCRTLLAKSVF
SIGKVLRTVLFKSEF

SEQ ID NO: 261123 - protein, 15 aa, Artificial Sequence
  Description of Artificial Sequence: Synthetic peptide
  Seed: SIGKVCRTLLAKSVF
SIGKVLRTVLFKSFF

SEQ ID NO: 261124 - protein, 15 aa, Artificial Sequence
  Description of Artificial Sequence: Synthetic peptide
  Seed: SIGKVCRTLLAKSVF
SIGKVLRTVLFKSIF

SEQ ID NO: 261125 - protein, 15 aa, Artificial Sequence
  Description of Artificial Sequence: Synthetic peptide
  Seed: SIGKVCRTLLAKSVF
SIGKVLRTVLFKSLF

SEQ ID NO: 261126 - protein, 15 aa, Artificial Sequence
  Description of Artificial Sequence: Synthetic peptide
  Seed: SIGKVCRTLLAKSVF
SIGKVLRTVLFKSMF

SEQ ID NO: 261127 - protein, 15 aa, Artificial Sequence
  Description of Artificial Sequence: Synthetic peptide
  Seed: SIGKVCRTLLAKSVF
SIGKVLRTVLFKSNF

SEQ ID NO: 261128 - protein, 15 aa, Artificial Sequence
  Description of Artificial Sequence: Synthetic peptide
  Seed: SIGKVCRTLLAKSVF
SIGKVLRTVLFKSSF

SEQ ID NO: 261129 - protein, 15 aa, Artificial Sequence
  Description of Artificial Sequence: Synthetic peptide
  Seed: SIGKVCRTLLAKSVF
SIGKVLRTVLFKSTF

SEQ ID NO: 261130 - protein, 15 aa, Artificial Sequence
  Description of Artificial Sequence: Synthetic peptide
  Seed: SIGKVCRTLLAKSVF
SIGKVLRTVLFKSVF

SEQ ID NO: 261131 - protein, 15 aa, Artificial Sequence
  Description of Artificial Sequence: Synthetic peptide
  Seed: SIGKVCRTLLAKSVF
SIGKVLRTVLFKSYF

SEQ ID NO: 261132 - protein, 15 aa, Artificial Sequence
  Description of Artificial Sequence: Synthetic peptide
  Seed: SIGKVCRTLLAKSVF
SIGKVLRTVLGKSIF

SEQ ID NO: 261133 - protein, 15 aa, Artificial Sequence
  Description of Artificial Sequence: Synthetic peptide
  Seed: SIGKVCRTLLAKSVF
SIGKVLRTVLGKSVF

SEQ ID NO: 261134 - protein, 15 aa, Artificial Sequence
  Description of Artificial Sequence: Synthetic peptide
  Seed: SIGKVCRTLLAKSVF
SIGKVLRTVLLKSIF

SEQ ID NO: 261135 - protein, 15 aa, Artificial Sequence
  Description of Artificial Sequence: Synthetic peptide
  Seed: SIGKVCRTLLAKSVF
SIGKVLRTVLLKSLF

SEQ ID NO: 261136 - protein, 15 aa, Artificial Sequence
  Description of Artificial Sequence: Synthetic peptide
  Seed: SIGKVCRTLLAKSVF
SIGKVLRTVLLKSVF

SEQ ID NO: 261137 - protein, 15 aa, Artificial Sequence
  Description of Artificial Sequence: Synthetic peptide
  Seed: SIGKVCRTLLAKSVF
SIGKVLRTVLSKSIF

SEQ ID NO: 261138 - protein, 15 aa, Artificial Sequence
  Description of Artificial Sequence: Synthetic peptide
  Seed: SIGKVCRTLLAKSVF
SIGKVLRTVLSKSLF

SEQ ID NO: 261139 - protein, 15 aa, Artificial Sequence
  Description of Artificial Sequence: Synthetic peptide
  Seed: SIGKVCRTLLAKSVF
SIGKVLRTVLSKSVF

SEQ ID NO: 261140 - protein, 15 aa, Artificial Sequence
  Description of Artificial Sequence: Synthetic peptide
  Seed: SIGKVCRTLLAKSVF
SIGKVLRTVLWKSIF

SEQ ID NO: 261141 - protein, 15 aa, Artificial Sequence
  Description of Artificial Sequence: Synthetic peptide
  Seed: SIGKVCRTLLAKSVF
SIGKVLRTVLWKSLF

SEQ ID NO: 261142 - protein, 15 aa, Artificial Sequence
  Description of Artificial Sequence: Synthetic peptide
  Seed: SIGKVCRTLLAKSVF
SIGKVLRTVLWKSVF

SEQ ID NO: 261143 - protein, 15 aa, Artificial Sequence
  Description of Artificial Sequence: Synthetic peptide
  Seed: SIGKVCRTLLAKSVF
SIGKVLRTVLYKSFF

SEQ ID NO: 261144 - protein, 15 aa, Artificial Sequence
  Description of Artificial Sequence: Synthetic peptide
  Seed: SIGKVCRTLLAKSVF
SIGKVLRTVLYKSIF

SEQ ID NO: 261145 - protein, 15 aa, Artificial Sequence
  Description of Artificial Sequence: Synthetic peptide
  Seed: SIGKVCRTLLAKSVF
SIGKVLRTVLYKSLF

SEQ ID NO: 261146 - protein, 15 aa, Artificial Sequence
  Description of Artificial Sequence: Synthetic peptide
  Seed: SIGKVCRTLLAKSVF
SIGKVLRTVLYKSVF

SEQ ID NO: 261147 - protein, 15 aa, Artificial Sequence
  Description of Artificial Sequence: Synthetic peptide
  Seed: SIGKVCRTLLAKSVF
SIGKVLRTWLFKSIF

SEQ ID NO: 261148 - protein, 15 aa, Artificial Sequence
  Description of Artificial Sequence: Synthetic peptide
  Seed: SIGKVCRTLLAKSVF
SIGKVLRTWLFKSLF

SEQ ID NO: 261149 - protein, 15 aa, Artificial Sequence
  Description of Artificial Sequence: Synthetic peptide
  Seed: SIGKVCRTLLAKSVF
SIGKVLRTWLFKSVF

SEQ ID NO: 261150 - protein, 15 aa, Artificial Sequence
  Description of Artificial Sequence: Synthetic peptide
  Seed: SIGKVCRTLLAKSVF
SIGKVLRTWLNKSVF

SEQ ID NO: 261151 - protein, 15 aa, Artificial Sequence
  Description of Artificial Sequence: Synthetic peptide
  Seed: SIGKVCRTLLAKSVF
SIGKVLRTWLSKSIF

SEQ ID NO: 261152 - protein, 15 aa, Artificial Sequence
  Description of Artificial Sequence: Synthetic peptide
  Seed: SIGKVCRTLLAKSVF
SIGKVLRTWLSKSLF

SEQ ID NO: 261153 - protein, 15 aa, Artificial Sequence
  Description of Artificial Sequence: Synthetic peptide
  Seed: SIGKVCRTLLAKSVF
SIGKVLRTWLSKSVF

SEQ ID NO: 261154 - protein, 15 aa, Artificial Sequence
  Description of Artificial Sequence: Synthetic peptide
  Seed: SIGKVCRTLLAKSVF
SIGKVLRTYLAKSIF

SEQ ID NO: 261155 - protein, 15 aa, Artificial Sequence
  Description of Artificial Sequence: Synthetic peptide
  Seed: SIGKVCRTLLAKSVF
SIGKVLRTYLAKSLF

SEQ ID NO: 261156 - protein, 15 aa, Artificial Sequence
  Description of Artificial Sequence: Synthetic peptide
  Seed: SIGKVCRTLLAKSVF
SIGKVLRTYLAKSVF

SEQ ID NO: 261157 - protein, 15 aa, Artificial Sequence
  Description of Artificial Sequence: Synthetic peptide
  Seed: SIGKVCRTLLAKSVF
SIGKVLRTYLFKSFF

SEQ ID NO: 261158 - protein, 15 aa, Artificial Sequence
  Description of Artificial Sequence: Synthetic peptide
  Seed: SIGKVCRTLLAKSVF
SIGKVLRTYLFKSIF

SEQ ID NO: 261159 - protein, 15 aa, Artificial Sequence
  Description of Artificial Sequence: Synthetic peptide
  Seed: SIGKVCRTLLAKSVF
SIGKVLRTYLFKSLF

SEQ ID NO: 261160 - protein, 15 aa, Artificial Sequence
  Description of Artificial Sequence: Synthetic peptide
  Seed: SIGKVCRTLLAKSVF
SIGKVLRTYLFKSMF

SEQ ID NO: 261161 - protein, 15 aa, Artificial Sequence
  Description of Artificial Sequence: Synthetic peptide
  Seed: SIGKVCRTLLAKSVF
SIGKVLRTYLFKSVF

SEQ ID NO: 261162 - protein, 15 aa, Artificial Sequence
  Description of Artificial Sequence: Synthetic peptide
  Seed: SIGKVCRTLLAKSVF
SIGKVLRTYLGKSAF

SEQ ID NO: 261163 - protein, 15 aa, Artificial Sequence
  Description of Artificial Sequence: Synthetic peptide
  Seed: SIGKVCRTLLAKSVF
SIGKVLRTYLGKSIF

SEQ ID NO: 261164 - protein, 15 aa, Artificial Sequence
  Description of Artificial Sequence: Synthetic peptide
  Seed: SIGKVCRTLLAKSVF
SIGKVLRTYLGKSLF

SEQ ID NO: 261165 - protein, 15 aa, Artificial Sequence
  Description of Artificial Sequence: Synthetic peptide
  Seed: SIGKVCRTLLAKSVF
SIGKVLRTYLGKSVF

SEQ ID NO: 261166 - protein, 15 aa, Artificial Sequence
  Description of Artificial Sequence: Synthetic peptide
  Seed: SIGKVCRTLLAKSVF
SIGKVLRTYLNKSAF

SEQ ID NO: 261167 - protein, 15 aa, Artificial Sequence
  Description of Artificial Sequence: Synthetic peptide
  Seed: SIGKVCRTLLAKSVF
SIGKVLRTYLNKSIF

SEQ ID NO: 261168 - protein, 15 aa, Artificial Sequence
  Description of Artificial Sequence: Synthetic peptide
  Seed: SIGKVCRTLLAKSVF
SIGKVLRTYLNKSLF

SEQ ID NO: 261169 - protein, 15 aa, Artificial Sequence
  Description of Artificial Sequence: Synthetic peptide
  Seed: SIGKVCRTLLAKSVF
SIGKVLRTYLNKSVF

SEQ ID NO: 261170 - protein, 15 aa, Artificial Sequence
  Description of Artificial Sequence: Synthetic peptide
  Seed: SIGKVCRTLLAKSVF
SIGKVLRTYLSKSAF

SEQ ID NO: 261171 - protein, 15 aa, Artificial Sequence
  Description of Artificial Sequence: Synthetic peptide
  Seed: SIGKVCRTLLAKSVF
SIGKVLRTYLSKSIF

SEQ ID NO: 261172 - protein, 15 aa, Artificial Sequence
  Description of Artificial Sequence: Synthetic peptide
  Seed: SIGKVCRTLLAKSVF
SIGKVLRTYLSKSLF

SEQ ID NO: 261173 - protein, 15 aa, Artificial Sequence
  Description of Artificial Sequence: Synthetic peptide
  Seed: SIGKVCRTLLAKSVF
SIGKVLRTYLSKSMF

SEQ ID NO: 261174 - protein, 15 aa, Artificial Sequence
  Description of Artificial Sequence: Synthetic peptide
  Seed: SIGKVCRTLLAKSVF
SIGKVLRTYLSKSTF

SEQ ID NO: 261175 - protein, 15 aa, Artificial Sequence
  Description of Artificial Sequence: Synthetic peptide
  Seed: SIGKVCRTLLAKSVF
SIGKVLRTYLSKSVF

SEQ ID NO: 261176 - protein, 15 aa, Artificial Sequence
  Description of Artificial Sequence: Synthetic peptide
  Seed: SIGKVCRTLLAKSVF
SIGKVMRTALAKSAF

SEQ ID NO: 261177 - protein, 15 aa, Artificial Sequence
  Description of Artificial Sequence: Synthetic peptide
  Seed: SIGKVCRTLLAKSVF
SIGKVMRTALAKSIF

SEQ ID NO: 261178 - protein, 15 aa, Artificial Sequence
  Description of Artificial Sequence: Synthetic peptide
  Seed: SIGKVCRTLLAKSVF
SIGKVMRTALAKSLF

SEQ ID NO: 261179 - protein, 15 aa, Artificial Sequence
  Description of Artificial Sequence: Synthetic peptide
  Seed: SIGKVCRTLLAKSVF
SIGKVMRTALAKSMF

SEQ ID NO: 261180 - protein, 15 aa, Artificial Sequence
  Description of Artificial Sequence: Synthetic peptide
  Seed: SIGKVCRTLLAKSVF
SIGKVMRTALAKSNF

SEQ ID NO: 261181 - protein, 15 aa, Artificial Sequence
  Description of Artificial Sequence: Synthetic peptide
  Seed: SIGKVCRTLLAKSVF
SIGKVMRTALAKSSF

SEQ ID NO: 261182 - protein, 15 aa, Artificial Sequence
  Description of Artificial Sequence: Synthetic peptide
  Seed: SIGKVCRTLLAKSVF
SIGKVMRTALAKSTF

SEQ ID NO: 261183 - protein, 15 aa, Artificial Sequence
  Description of Artificial Sequence: Synthetic peptide
  Seed: SIGKVCRTLLAKSVF
SIGKVMRTALAKSVF

SEQ ID NO: 261184 - protein, 15 aa, Artificial Sequence
  Description of Artificial Sequence: Synthetic peptide
  Seed: SIGKVCRTLLAKSVF
SIGKVMRTALFKSFF

SEQ ID NO: 261185 - protein, 15 aa, Artificial Sequence
  Description of Artificial Sequence: Synthetic peptide
  Seed: SIGKVCRTLLAKSVF
SIGKVMRTALFKSIF

SEQ ID NO: 261186 - protein, 15 aa, Artificial Sequence
  Description of Artificial Sequence: Synthetic peptide
  Seed: SIGKVCRTLLAKSVF
SIGKVMRTALFKSLF

SEQ ID NO: 261187 - protein, 15 aa, Artificial Sequence
  Description of Artificial Sequence: Synthetic peptide
  Seed: SIGKVCRTLLAKSVF
SIGKVMRTALFKSMF

SEQ ID NO: 261188 - protein, 15 aa, Artificial Sequence
  Description of Artificial Sequence: Synthetic peptide
  Seed: SIGKVCRTLLAKSVF
SIGKVMRTALFKSVF

SEQ ID NO: 261189 - protein, 15 aa, Artificial Sequence
  Description of Artificial Sequence: Synthetic peptide
  Seed: SIGKVCRTLLAKSVF
SIGKVMRTALGKSIF

SEQ ID NO: 261190 - protein, 15 aa, Artificial Sequence
  Description of Artificial Sequence: Synthetic peptide
  Seed: SIGKVCRTLLAKSVF
SIGKVMRTALGKSLF

SEQ ID NO: 261191 - protein, 15 aa, Artificial Sequence
  Description of Artificial Sequence: Synthetic peptide
  Seed: SIGKVCRTLLAKSVF
SIGKVMRTALGKSVF

SEQ ID NO: 261192 - protein, 15 aa, Artificial Sequence
  Description of Artificial Sequence: Synthetic peptide
  Seed: SIGKVCRTLLAKSVF
SIGKVMRTALSKSAF

SEQ ID NO: 261193 - protein, 15 aa, Artificial Sequence
  Description of Artificial Sequence: Synthetic peptide
  Seed: SIGKVCRTLLAKSVF
SIGKVMRTALSKSIF

SEQ ID NO: 261194 - protein, 15 aa, Artificial Sequence
  Description of Artificial Sequence: Synthetic peptide
  Seed: SIGKVCRTLLAKSVF
SIGKVMRTALSKSLF

SEQ ID NO: 261195 - protein, 15 aa, Artificial Sequence
  Description of Artificial Sequence: Synthetic peptide
  Seed: SIGKVCRTLLAKSVF
SIGKVMRTALSKSVF

SEQ ID NO: 261196 - protein, 15 aa, Artificial Sequence
  Description of Artificial Sequence: Synthetic peptide
  Seed: SIGKVCRTLLAKSVF
SIGKVMRTALVKSIF

SEQ ID NO: 261197 - protein, 15 aa, Artificial Sequence
  Description of Artificial Sequence: Synthetic peptide
  Seed: SIGKVCRTLLAKSVF
SIGKVMRTALVKSLF

SEQ ID NO: 261198 - protein, 15 aa, Artificial Sequence
  Description of Artificial Sequence: Synthetic peptide
  Seed: SIGKVCRTLLAKSVF
SIGKVMRTALVKSVF

SEQ ID NO: 261199 - protein, 15 aa, Artificial Sequence
  Description of Artificial Sequence: Synthetic peptide
  Seed: SIGKVCRTLLAKSVF
SIGKVMRTELFKSFF

SEQ ID NO: 261200 - protein, 15 aa, Artificial Sequence
  Description of Artificial Sequence: Synthetic peptide
  Seed: SIGKVCRTLLAKSVF
SIGKVMRTELFKSIF

SEQ ID NO: 261201 - protein, 15 aa, Artificial Sequence
  Description of Artificial Sequence: Synthetic peptide
  Seed: SIGKVCRTLLAKSVF
SIGKVMRTELFKSLF

SEQ ID NO: 261202 - protein, 15 aa, Artificial Sequence
  Description of Artificial Sequence: Synthetic peptide
  Seed: SIGKVCRTLLAKSVF
SIGKVMRTELFKSMF

SEQ ID NO: 261203 - protein, 15 aa, Artificial Sequence
  Description of Artificial Sequence: Synthetic peptide
  Seed: SIGKVCRTLLAKSVF
SIGKVMRTELFKSVF

SEQ ID NO: 261204 - protein, 15 aa, Artificial Sequence
  Description of Artificial Sequence: Synthetic peptide
  Seed: SIGKVCRTLLAKSVF
SIGKVMRTFLAKSAF

SEQ ID NO: 261205 - protein, 15 aa, Artificial Sequence
  Description of Artificial Sequence: Synthetic peptide
  Seed: SIGKVCRTLLAKSVF
SIGKVMRTFLAKSIF

SEQ ID NO: 261206 - protein, 15 aa, Artificial Sequence
  Description of Artificial Sequence: Synthetic peptide
  Seed: SIGKVCRTLLAKSVF
SIGKVMRTFLAKSLF

SEQ ID NO: 261207 - protein, 15 aa, Artificial Sequence
  Description of Artificial Sequence: Synthetic peptide
  Seed: SIGKVCRTLLAKSVF
SIGKVMRTFLAKSMF

SEQ ID NO: 261208 - protein, 15 aa, Artificial Sequence
  Description of Artificial Sequence: Synthetic peptide
  Seed: SIGKVCRTLLAKSVF
SIGKVMRTFLAKSVF

SEQ ID NO: 261209 - protein, 15 aa, Artificial Sequence
  Description of Artificial Sequence: Synthetic peptide
  Seed: SIGKVCRTLLAKSVF
SIGKVMRTFLFKSAF

SEQ ID NO: 261210 - protein, 15 aa, Artificial Sequence
  Description of Artificial Sequence: Synthetic peptide
  Seed: SIGKVCRTLLAKSVF
SIGKVMRTFLFKSFF

SEQ ID NO: 261211 - protein, 15 aa, Artificial Sequence
  Description of Artificial Sequence: Synthetic peptide
  Seed: SIGKVCRTLLAKSVF
SIGKVMRTFLFKSIF

SEQ ID NO: 261212 - protein, 15 aa, Artificial Sequence
  Description of Artificial Sequence: Synthetic peptide
  Seed: SIGKVCRTLLAKSVF
SIGKVMRTFLFKSLF

SEQ ID NO: 261213 - protein, 15 aa, Artificial Sequence
  Description of Artificial Sequence: Synthetic peptide
  Seed: SIGKVCRTLLAKSVF
SIGKVMRTFLFKSMF

SEQ ID NO: 261214 - protein, 15 aa, Artificial Sequence
  Description of Artificial Sequence: Synthetic peptide
  Seed: SIGKVCRTLLAKSVF
SIGKVMRTFLFKSTF

SEQ ID NO: 261215 - protein, 15 aa, Artificial Sequence
  Description of Artificial Sequence: Synthetic peptide
  Seed: SIGKVCRTLLAKSVF
SIGKVMRTFLFKSVF

SEQ ID NO: 261216 - protein, 15 aa, Artificial Sequence
  Description of Artificial Sequence: Synthetic peptide
  Seed: SIGKVCRTLLAKSVF
SIGKVMRTFLFKSYF

SEQ ID NO: 261217 - protein, 15 aa, Artificial Sequence
  Description of Artificial Sequence: Synthetic peptide
  Seed: SIGKVCRTLLAKSVF
SIGKVMRTFLLKSFF

SEQ ID NO: 261218 - protein, 15 aa, Artificial Sequence
  Description of Artificial Sequence: Synthetic peptide
  Seed: SIGKVCRTLLAKSVF
SIGKVMRTFLLKSIF

SEQ ID NO: 261219 - protein, 15 aa, Artificial Sequence
  Description of Artificial Sequence: Synthetic peptide
  Seed: SIGKVCRTLLAKSVF
SIGKVMRTFLLKSLF

SEQ ID NO: 261220 - protein, 15 aa, Artificial Sequence
  Description of Artificial Sequence: Synthetic peptide
  Seed: SIGKVCRTLLAKSVF
SIGKVMRTFLLKSVF

SEQ ID NO: 261221 - protein, 15 aa, Artificial Sequence
  Description of Artificial Sequence: Synthetic peptide
  Seed: SIGKVCRTLLAKSVF
SIGKVMRTFLSKSIF

SEQ ID NO: 261222 - protein, 15 aa, Artificial Sequence
  Description of Artificial Sequence: Synthetic peptide
  Seed: SIGKVCRTLLAKSVF
SIGKVMRTFLSKSLF

SEQ ID NO: 261223 - protein, 15 aa, Artificial Sequence
  Description of Artificial Sequence: Synthetic peptide
  Seed: SIGKVCRTLLAKSVF
SIGKVMRTFLSKSVF

SEQ ID NO: 261224 - protein, 15 aa, Artificial Sequence
  Description of Artificial Sequence: Synthetic peptide
  Seed: SIGKVCRTLLAKSVF
SIGKVMRTGLAKSLF

SEQ ID NO: 261225 - protein, 15 aa, Artificial Sequence
  Description of Artificial Sequence: Synthetic peptide
  Seed: SIGKVCRTLLAKSVF
SIGKVMRTGLAKSVF

SEQ ID NO: 261226 - protein, 15 aa, Artificial Sequence
  Description of Artificial Sequence: Synthetic peptide
  Seed: SIGKVCRTLLAKSVF
SIGKVMRTHLFKSFF

SEQ ID NO: 261227 - protein, 15 aa, Artificial Sequence
  Description of Artificial Sequence: Synthetic peptide
  Seed: SIGKVCRTLLAKSVF
SIGKVMRTHLFKSIF

SEQ ID NO: 261228 - protein, 15 aa, Artificial Sequence
  Description of Artificial Sequence: Synthetic peptide
  Seed: SIGKVCRTLLAKSVF
SIGKVMRTHLFKSLF

SEQ ID NO: 261229 - protein, 15 aa, Artificial Sequence
  Description of Artificial Sequence: Synthetic peptide
  Seed: SIGKVCRTLLAKSVF
SIGKVMRTHLFKSMF

SEQ ID NO: 261230 - protein, 15 aa, Artificial Sequence
  Description of Artificial Sequence: Synthetic peptide
  Seed: SIGKVCRTLLAKSVF
SIGKVMRTHLFKSVF

SEQ ID NO: 261231 - protein, 15 aa, Artificial Sequence
  Description of Artificial Sequence: Synthetic peptide
  Seed: SIGKVCRTLLAKSVF
SIGKVMRTILAKSAF

SEQ ID NO: 261232 - protein, 15 aa, Artificial Sequence
  Description of Artificial Sequence: Synthetic peptide
  Seed: SIGKVCRTLLAKSVF
SIGKVMRTILAKSIF

SEQ ID NO: 261233 - protein, 15 aa, Artificial Sequence
  Description of Artificial Sequence: Synthetic peptide
  Seed: SIGKVCRTLLAKSVF
SIGKVMRTILAKSLF

SEQ ID NO: 261234 - protein, 15 aa, Artificial Sequence
  Description of Artificial Sequence: Synthetic peptide
  Seed: SIGKVCRTLLAKSVF
SIGKVMRTILAKSMF

SEQ ID NO: 261235 - protein, 15 aa, Artificial Sequence
  Description of Artificial Sequence: Synthetic peptide
  Seed: SIGKVCRTLLAKSVF
SIGKVMRTILAKSNF

SEQ ID NO: 261236 - protein, 15 aa, Artificial Sequence
  Description of Artificial Sequence: Synthetic peptide
  Seed: SIGKVCRTLLAKSVF
SIGKVMRTILAKSSF

SEQ ID NO: 261237 - protein, 15 aa, Artificial Sequence
  Description of Artificial Sequence: Synthetic peptide
  Seed: SIGKVCRTLLAKSVF
SIGKVMRTILAKSTF

SEQ ID NO: 261238 - protein, 15 aa, Artificial Sequence
  Description of Artificial Sequence: Synthetic peptide
  Seed: SIGKVCRTLLAKSVF
SIGKVMRTILAKSVF

SEQ ID NO: 261239 - protein, 15 aa, Artificial Sequence
  Description of Artificial Sequence: Synthetic peptide
  Seed: SIGKVCRTLLAKSVF
SIGKVMRTILFKSAF

SEQ ID NO: 261240 - protein, 15 aa, Artificial Sequence
  Description of Artificial Sequence: Synthetic peptide
  Seed: SIGKVCRTLLAKSVF
SIGKVMRTILFKSEF

SEQ ID NO: 261241 - protein, 15 aa, Artificial Sequence
  Description of Artificial Sequence: Synthetic peptide
  Seed: SIGKVCRTLLAKSVF
SIGKVMRTILFKSFF

SEQ ID NO: 261242 - protein, 15 aa, Artificial Sequence
  Description of Artificial Sequence: Synthetic peptide
  Seed: SIGKVCRTLLAKSVF
SIGKVMRTILFKSIF

SEQ ID NO: 261243 - protein, 15 aa, Artificial Sequence
  Description of Artificial Sequence: Synthetic peptide
  Seed: SIGKVCRTLLAKSVF
SIGKVMRTILFKSLF

SEQ ID NO: 261244 - protein, 15 aa, Artificial Sequence
  Description of Artificial Sequence: Synthetic peptide
  Seed: SIGKVCRTLLAKSVF
SIGKVMRTILFKSMF

SEQ ID NO: 261245 - protein, 15 aa, Artificial Sequence
  Description of Artificial Sequence: Synthetic peptide
  Seed: SIGKVCRTLLAKSVF
SIGKVMRTILFKSNF

SEQ ID NO: 261246 - protein, 15 aa, Artificial Sequence
  Description of Artificial Sequence: Synthetic peptide
  Seed: SIGKVCRTLLAKSVF
SIGKVMRTILFKSTF

SEQ ID NO: 261247 - protein, 15 aa, Artificial Sequence
  Description of Artificial Sequence: Synthetic peptide
  Seed: SIGKVCRTLLAKSVF
SIGKVMRTILFKSVF

SEQ ID NO: 261248 - protein, 15 aa, Artificial Sequence
  Description of Artificial Sequence: Synthetic peptide
  Seed: SIGKVCRTLLAKSVF
SIGKVMRTILGKSIF

SEQ ID NO: 261249 - protein, 15 aa, Artificial Sequence
  Description of Artificial Sequence: Synthetic peptide
  Seed: SIGKVCRTLLAKSVF
SIGKVMRTILGKSLF

SEQ ID NO: 261250 - protein, 15 aa, Artificial Sequence
  Description of Artificial Sequence: Synthetic peptide
  Seed: SIGKVCRTLLAKSVF
SIGKVMRTILGKSVF

SEQ ID NO: 261251 - protein, 15 aa, Artificial Sequence
  Description of Artificial Sequence: Synthetic peptide
  Seed: SIGKVCRTLLAKSVF
SIGKVMRTILSKSAF

SEQ ID NO: 261252 - protein, 15 aa, Artificial Sequence
  Description of Artificial Sequence: Synthetic peptide
  Seed: SIGKVCRTLLAKSVF
SIGKVMRTILSKSIF

SEQ ID NO: 261253 - protein, 15 aa, Artificial Sequence
  Description of Artificial Sequence: Synthetic peptide
  Seed: SIGKVCRTLLAKSVF
SIGKVMRTILSKSLF

SEQ ID NO: 261254 - protein, 15 aa, Artificial Sequence
  Description of Artificial Sequence: Synthetic peptide
  Seed: SIGKVCRTLLAKSVF
SIGKVMRTILSKSVF

SEQ ID NO: 261255 - protein, 15 aa, Artificial Sequence
  Description of Artificial Sequence: Synthetic peptide
  Seed: SIGKVCRTLLAKSVF
SIGKVMRTILVKSLF

SEQ ID NO: 261256 - protein, 15 aa, Artificial Sequence
  Description of Artificial Sequence: Synthetic peptide
  Seed: SIGKVCRTLLAKSVF
SIGKVMRTILVKSVF

SEQ ID NO: 261257 - protein, 15 aa, Artificial Sequence
  Description of Artificial Sequence: Synthetic peptide
  Seed: SIGKVCRTLLAKSVF
SIGKVMRTLLAKSAF

SEQ ID NO: 261258 - protein, 15 aa, Artificial Sequence
  Description of Artificial Sequence: Synthetic peptide
  Seed: SIGKVCRTLLAKSVF
SIGKVMRTLLAKSCF

SEQ ID NO: 261259 - protein, 15 aa, Artificial Sequence
  Description of Artificial Sequence: Synthetic peptide
  Seed: SIGKVCRTLLAKSVF
SIGKVMRTLLAKSFF

SEQ ID NO: 261260 - protein, 15 aa, Artificial Sequence
  Description of Artificial Sequence: Synthetic peptide
  Seed: SIGKVCRTLLAKSVF
SIGKVMRTLLAKSGF

SEQ ID NO: 261261 - protein, 15 aa, Artificial Sequence
  Description of Artificial Sequence: Synthetic peptide
  Seed: SIGKVCRTLLAKSVF
SIGKVMRTLLAKSHF

SEQ ID NO: 261262 - protein, 15 aa, Artificial Sequence
  Description of Artificial Sequence: Synthetic peptide
  Seed: SIGKVCRTLLAKSVF
SIGKVMRTLLAKSIF

SEQ ID NO: 261263 - protein, 15 aa, Artificial Sequence
  Description of Artificial Sequence: Synthetic peptide
  Seed: SIGKVCRTLLAKSVF
SIGKVMRTLLAKSLF

SEQ ID NO: 261264 - protein, 15 aa, Artificial Sequence
  Description of Artificial Sequence: Synthetic peptide
  Seed: SIGKVCRTLLAKSVF
SIGKVMRTLLAKSMF

SEQ ID NO: 261265 - protein, 15 aa, Artificial Sequence
  Description of Artificial Sequence: Synthetic peptide
  Seed: SIGKVCRTLLAKSVF
SIGKVMRTLLAKSNF

SEQ ID NO: 261266 - protein, 15 aa, Artificial Sequence
  Description of Artificial Sequence: Synthetic peptide
  Seed: SIGKVCRTLLAKSVF
SIGKVMRTLLAKSRF

SEQ ID NO: 261267 - protein, 15 aa, Artificial Sequence
  Description of Artificial Sequence: Synthetic peptide
  Seed: SIGKVCRTLLAKSVF
SIGKVMRTLLAKSSF

SEQ ID NO: 261268 - protein, 15 aa, Artificial Sequence
  Description of Artificial Sequence: Synthetic peptide
  Seed: SIGKVCRTLLAKSVF
SIGKVMRTLLAKSTF

SEQ ID NO: 261269 - protein, 15 aa, Artificial Sequence
  Description of Artificial Sequence: Synthetic peptide
  Seed: SIGKVCRTLLAKSVF
SIGKVMRTLLAKSVF

SEQ ID NO: 261270 - protein, 15 aa, Artificial Sequence
  Description of Artificial Sequence: Synthetic peptide
  Seed: SIGKVCRTLLAKSVF
SIGKVMRTLLAKSWF

SEQ ID NO: 261271 - protein, 15 aa, Artificial Sequence
  Description of Artificial Sequence: Synthetic peptide
  Seed: SIGKVCRTLLAKSVF
SIGKVMRTLLAKSYF

SEQ ID NO: 261272 - protein, 15 aa, Artificial Sequence
  Description of Artificial Sequence: Synthetic peptide
  Seed: SIGKVCRTLLAKSVF
SIGKVMRTLLFKSAF

SEQ ID NO: 261273 - protein, 15 aa, Artificial Sequence
  Description of Artificial Sequence: Synthetic peptide
  Seed: SIGKVCRTLLAKSVF
SIGKVMRTLLFKSFF

SEQ ID NO: 261274 - protein, 15 aa, Artificial Sequence
  Description of Artificial Sequence: Synthetic peptide
  Seed: SIGKVCRTLLAKSVF
SIGKVMRTLLFKSIF

SEQ ID NO: 261275 - protein, 15 aa, Artificial Sequence
  Description of Artificial Sequence: Synthetic peptide
  Seed: SIGKVCRTLLAKSVF
SIGKVMRTLLFKSLF

SEQ ID NO: 261276 - protein, 15 aa, Artificial Sequence
  Description of Artificial Sequence: Synthetic peptide
  Seed: SIGKVCRTLLAKSVF
SIGKVMRTLLFKSMF

SEQ ID NO: 261277 - protein, 15 aa, Artificial Sequence
  Description of Artificial Sequence: Synthetic peptide
  Seed: SIGKVCRTLLAKSVF
SIGKVMRTLLFKSNF

SEQ ID NO: 261278 - protein, 15 aa, Artificial Sequence
  Description of Artificial Sequence: Synthetic peptide
  Seed: SIGKVCRTLLAKSVF
SIGKVMRTLLFKSTF

SEQ ID NO: 261279 - protein, 15 aa, Artificial Sequence
  Description of Artificial Sequence: Synthetic peptide
  Seed: SIGKVCRTLLAKSVF
SIGKVMRTLLFKSVF

SEQ ID NO: 261280 - protein, 15 aa, Artificial Sequence
  Description of Artificial Sequence: Synthetic peptide
  Seed: SIGKVCRTLLAKSVF
SIGKVMRTLLGKSAF

SEQ ID NO: 261281 - protein, 15 aa, Artificial Sequence
  Description of Artificial Sequence: Synthetic peptide
  Seed: SIGKVCRTLLAKSVF
SIGKVMRTLLGKSIF

SEQ ID NO: 261282 - protein, 15 aa, Artificial Sequence
  Description of Artificial Sequence: Synthetic peptide
  Seed: SIGKVCRTLLAKSVF
SIGKVMRTLLGKSLF

SEQ ID NO: 261283 - protein, 15 aa, Artificial Sequence
  Description of Artificial Sequence: Synthetic peptide
  Seed: SIGKVCRTLLAKSVF
SIGKVMRTLLGKSMF

SEQ ID NO: 261284 - protein, 15 aa, Artificial Sequence
  Description of Artificial Sequence: Synthetic peptide
  Seed: SIGKVCRTLLAKSVF
SIGKVMRTLLGKSSF

SEQ ID NO: 261285 - protein, 15 aa, Artificial Sequence
  Description of Artificial Sequence: Synthetic peptide
  Seed: SIGKVCRTLLAKSVF
SIGKVMRTLLGKSTF

SEQ ID NO: 261286 - protein, 15 aa, Artificial Sequence
  Description of Artificial Sequence: Synthetic peptide
  Seed: SIGKVCRTLLAKSVF
SIGKVMRTLLGKSVF

SEQ ID NO: 261287 - protein, 15 aa, Artificial Sequence
  Description of Artificial Sequence: Synthetic peptide
  Seed: SIGKVCRTLLAKSVF
SIGKVMRTLLIKSAF

SEQ ID NO: 261288 - protein, 15 aa, Artificial Sequence
  Description of Artificial Sequence: Synthetic peptide
  Seed: SIGKVCRTLLAKSVF
SIGKVMRTLLIKSVF

SEQ ID NO: 261289 - protein, 15 aa, Artificial Sequence
  Description of Artificial Sequence: Synthetic peptide
  Seed: SIGKVCRTLLAKSVF
SIGKVMRTLLNKSVF

SEQ ID NO: 261290 - protein, 15 aa, Artificial Sequence
  Description of Artificial Sequence: Synthetic peptide
  Seed: SIGKVCRTLLAKSVF
SIGKVMRTLLPKSAF

SEQ ID NO: 261291 - protein, 15 aa, Artificial Sequence
  Description of Artificial Sequence: Synthetic peptide
  Seed: SIGKVCRTLLAKSVF
SIGKVMRTLLPKSIF

SEQ ID NO: 261292 - protein, 15 aa, Artificial Sequence
  Description of Artificial Sequence: Synthetic peptide
  Seed: SIGKVCRTLLAKSVF
SIGKVMRTLLPKSLF

SEQ ID NO: 261293 - protein, 15 aa, Artificial Sequence
  Description of Artificial Sequence: Synthetic peptide
  Seed: SIGKVCRTLLAKSVF
SIGKVMRTLLPKSVF

SEQ ID NO: 261294 - protein, 15 aa, Artificial Sequence
  Description of Artificial Sequence: Synthetic peptide
  Seed: SIGKVCRTLLAKSVF
SIGKVMRTLLSKSAF

SEQ ID NO: 261295 - protein, 15 aa, Artificial Sequence
  Description of Artificial Sequence: Synthetic peptide
  Seed: SIGKVCRTLLAKSVF
SIGKVMRTLLSKSIF

SEQ ID NO: 261296 - protein, 15 aa, Artificial Sequence
  Description of Artificial Sequence: Synthetic peptide
  Seed: SIGKVCRTLLAKSVF
SIGKVMRTLLSKSLF

SEQ ID NO: 261297 - protein, 15 aa, Artificial Sequence
  Description of Artificial Sequence: Synthetic peptide
  Seed: SIGKVCRTLLAKSVF
SIGKVMRTLLSKSMF

SEQ ID NO: 261298 - protein, 15 aa, Artificial Sequence
  Description of Artificial Sequence: Synthetic peptide
  Seed: SIGKVCRTLLAKSVF
SIGKVMRTLLSKSNF

SEQ ID NO: 261299 - protein, 15 aa, Artificial Sequence
  Description of Artificial Sequence: Synthetic peptide
  Seed: SIGKVCRTLLAKSVF
SIGKVMRTLLSKSSF

SEQ ID NO: 261300 - protein, 15 aa, Artificial Sequence
  Description of Artificial Sequence: Synthetic peptide
  Seed: SIGKVCRTLLAKSVF
SIGKVMRTLLSKSTF

SEQ ID NO: 261301 - protein, 15 aa, Artificial Sequence
  Description of Artificial Sequence: Synthetic peptide
  Seed: SIGKVCRTLLAKSVF
SIGKVMRTLLSKSVF

SEQ ID NO: 261302 - protein, 15 aa, Artificial Sequence
  Description of Artificial Sequence: Synthetic peptide
  Seed: SIGKVCRTLLAKSVF
SIGKVMRTLLTKSAF

SEQ ID NO: 261303 - protein, 15 aa, Artificial Sequence
  Description of Artificial Sequence: Synthetic peptide
  Seed: SIGKVCRTLLAKSVF
SIGKVMRTLLTKSIF

SEQ ID NO: 261304 - protein, 15 aa, Artificial Sequence
  Description of Artificial Sequence: Synthetic peptide
  Seed: SIGKVCRTLLAKSVF
SIGKVMRTLLTKSLF

SEQ ID NO: 261305 - protein, 15 aa, Artificial Sequence
  Description of Artificial Sequence: Synthetic peptide
  Seed: SIGKVCRTLLAKSVF
SIGKVMRTLLTKSMF

SEQ ID NO: 261306 - protein, 15 aa, Artificial Sequence
  Description of Artificial Sequence: Synthetic peptide
  Seed: SIGKVCRTLLAKSVF
SIGKVMRTLLTKSNF

SEQ ID NO: 261307 - protein, 15 aa, Artificial Sequence
  Description of Artificial Sequence: Synthetic peptide
  Seed: SIGKVCRTLLAKSVF
SIGKVMRTLLTKSVF

SEQ ID NO: 261308 - protein, 15 aa, Artificial Sequence
  Description of Artificial Sequence: Synthetic peptide
  Seed: SIGKVCRTLLAKSVF
SIGKVMRTLLVKSAF

SEQ ID NO: 261309 - protein, 15 aa, Artificial Sequence
  Description of Artificial Sequence: Synthetic peptide
  Seed: SIGKVCRTLLAKSVF
SIGKVMRTLLVKSIF

SEQ ID NO: 261310 - protein, 15 aa, Artificial Sequence
  Description of Artificial Sequence: Synthetic peptide
  Seed: SIGKVCRTLLAKSVF
SIGKVMRTLLVKSLF

SEQ ID NO: 261311 - protein, 15 aa, Artificial Sequence
  Description of Artificial Sequence: Synthetic peptide
  Seed: SIGKVCRTLLAKSVF
SIGKVMRTLLVKSMF

SEQ ID NO: 261312 - protein, 15 aa, Artificial Sequence
  Description of Artificial Sequence: Synthetic peptide
  Seed: SIGKVCRTLLAKSVF
SIGKVMRTLLVKSNF

SEQ ID NO: 261313 - protein, 15 aa, Artificial Sequence
  Description of Artificial Sequence: Synthetic peptide
  Seed: SIGKVCRTLLAKSVF
SIGKVMRTLLVKSSF

SEQ ID NO: 261314 - protein, 15 aa, Artificial Sequence
  Description of Artificial Sequence: Synthetic peptide
  Seed: SIGKVCRTLLAKSVF
SIGKVMRTLLVKSTF

SEQ ID NO: 261315 - protein, 15 aa, Artificial Sequence
  Description of Artificial Sequence: Synthetic peptide
  Seed: SIGKVCRTLLAKSVF
SIGKVMRTLLVKSVF

SEQ ID NO: 261316 - protein, 15 aa, Artificial Sequence
  Description of Artificial Sequence: Synthetic peptide
  Seed: SIGKVCRTLLAKSVF
SIGKVMRTMLAKSAF

SEQ ID NO: 261317 - protein, 15 aa, Artificial Sequence
  Description of Artificial Sequence: Synthetic peptide
  Seed: SIGKVCRTLLAKSVF
SIGKVMRTMLAKSCF

SEQ ID NO: 261318 - protein, 15 aa, Artificial Sequence
  Description of Artificial Sequence: Synthetic peptide
  Seed: SIGKVCRTLLAKSVF
SIGKVMRTMLAKSFF

SEQ ID NO: 261319 - protein, 15 aa, Artificial Sequence
  Description of Artificial Sequence: Synthetic peptide
  Seed: SIGKVCRTLLAKSVF
SIGKVMRTMLAKSGF

SEQ ID NO: 261320 - protein, 15 aa, Artificial Sequence
  Description of Artificial Sequence: Synthetic peptide
  Seed: SIGKVCRTLLAKSVF
SIGKVMRTMLAKSHF

SEQ ID NO: 261321 - protein, 15 aa, Artificial Sequence
  Description of Artificial Sequence: Synthetic peptide
  Seed: SIGKVCRTLLAKSVF
SIGKVMRTMLAKSIF

SEQ ID NO: 261322 - protein, 15 aa, Artificial Sequence
  Description of Artificial Sequence: Synthetic peptide
  Seed: SIGKVCRTLLAKSVF
SIGKVMRTMLAKSLF

SEQ ID NO: 261323 - protein, 15 aa, Artificial Sequence
  Description of Artificial Sequence: Synthetic peptide
  Seed: SIGKVCRTLLAKSVF
SIGKVMRTMLAKSMF

SEQ ID NO: 261324 - protein, 15 aa, Artificial Sequence
  Description of Artificial Sequence: Synthetic peptide
  Seed: SIGKVCRTLLAKSVF
SIGKVMRTMLAKSNF

SEQ ID NO: 261325 - protein, 15 aa, Artificial Sequence
  Description of Artificial Sequence: Synthetic peptide
  Seed: SIGKVCRTLLAKSVF
SIGKVMRTMLAKSSF

SEQ ID NO: 261326 - protein, 15 aa, Artificial Sequence
  Description of Artificial Sequence: Synthetic peptide
  Seed: SIGKVCRTLLAKSVF
SIGKVMRTMLAKSTF

SEQ ID NO: 261327 - protein, 15 aa, Artificial Sequence
  Description of Artificial Sequence: Synthetic peptide
  Seed: SIGKVCRTLLAKSVF
SIGKVMRTMLAKSVF

SEQ ID NO: 261328 - protein, 15 aa, Artificial Sequence
  Description of Artificial Sequence: Synthetic peptide
  Seed: SIGKVCRTLLAKSVF
SIGKVMRTMLAKSYF

SEQ ID NO: 261329 - protein, 15 aa, Artificial Sequence
  Description of Artificial Sequence: Synthetic peptide
  Seed: SIGKVCRTLLAKSVF
SIGKVMRTMLFKSFF

SEQ ID NO: 261330 - protein, 15 aa, Artificial Sequence
  Description of Artificial Sequence: Synthetic peptide
  Seed: SIGKVCRTLLAKSVF
SIGKVMRTMLFKSIF

SEQ ID NO: 261331 - protein, 15 aa, Artificial Sequence
  Description of Artificial Sequence: Synthetic peptide
  Seed: SIGKVCRTLLAKSVF
SIGKVMRTMLFKSLF

SEQ ID NO: 261332 - protein, 15 aa, Artificial Sequence
  Description of Artificial Sequence: Synthetic peptide
  Seed: SIGKVCRTLLAKSVF
SIGKVMRTMLFKSMF

SEQ ID NO: 261333 - protein, 15 aa, Artificial Sequence
  Description of Artificial Sequence: Synthetic peptide
  Seed: SIGKVCRTLLAKSVF
SIGKVMRTMLFKSVF

SEQ ID NO: 261334 - protein, 15 aa, Artificial Sequence
  Description of Artificial Sequence: Synthetic peptide
  Seed: SIGKVCRTLLAKSVF
SIGKVMRTMLGKSAF

SEQ ID NO: 261335 - protein, 15 aa, Artificial Sequence
  Description of Artificial Sequence: Synthetic peptide
  Seed: SIGKVCRTLLAKSVF
SIGKVMRTMLGKSIF

SEQ ID NO: 261336 - protein, 15 aa, Artificial Sequence
  Description of Artificial Sequence: Synthetic peptide
  Seed: SIGKVCRTLLAKSVF
SIGKVMRTMLGKSLF

SEQ ID NO: 261337 - protein, 15 aa, Artificial Sequence
  Description of Artificial Sequence: Synthetic peptide
  Seed: SIGKVCRTLLAKSVF
SIGKVMRTMLGKSMF

SEQ ID NO: 261338 - protein, 15 aa, Artificial Sequence
  Description of Artificial Sequence: Synthetic peptide
  Seed: SIGKVCRTLLAKSVF
SIGKVMRTMLGKSSF

SEQ ID NO: 261339 - protein, 15 aa, Artificial Sequence
  Description of Artificial Sequence: Synthetic peptide
  Seed: SIGKVCRTLLAKSVF
SIGKVMRTMLGKSTF

SEQ ID NO: 261340 - protein, 15 aa, Artificial Sequence
  Description of Artificial Sequence: Synthetic peptide
  Seed: SIGKVCRTLLAKSVF
SIGKVMRTMLGKSVF

SEQ ID NO: 261341 - protein, 15 aa, Artificial Sequence
  Description of Artificial Sequence: Synthetic peptide
  Seed: SIGKVCRTLLAKSVF
SIGKVMRTMLIKSAF

SEQ ID NO: 261342 - protein, 15 aa, Artificial Sequence
  Description of Artificial Sequence: Synthetic peptide
  Seed: SIGKVCRTLLAKSVF
SIGKVMRTMLNKSVF

SEQ ID NO: 261343 - protein, 15 aa, Artificial Sequence
  Description of Artificial Sequence: Synthetic peptide
  Seed: SIGKVCRTLLAKSVF
SIGKVMRTMLPKSAF

SEQ ID NO: 261344 - protein, 15 aa, Artificial Sequence
  Description of Artificial Sequence: Synthetic peptide
  Seed: SIGKVCRTLLAKSVF
SIGKVMRTMLPKSIF

SEQ ID NO: 261345 - protein, 15 aa, Artificial Sequence
  Description of Artificial Sequence: Synthetic peptide
  Seed: SIGKVCRTLLAKSVF
SIGKVMRTMLPKSLF

SEQ ID NO: 261346 - protein, 15 aa, Artificial Sequence
  Description of Artificial Sequence: Synthetic peptide
  Seed: SIGKVCRTLLAKSVF
SIGKVMRTMLPKSVF

SEQ ID NO: 261347 - protein, 15 aa, Artificial Sequence
  Description of Artificial Sequence: Synthetic peptide
  Seed: SIGKVCRTLLAKSVF
SIGKVMRTMLSKSAF

SEQ ID NO: 261348 - protein, 15 aa, Artificial Sequence
  Description of Artificial Sequence: Synthetic peptide
  Seed: SIGKVCRTLLAKSVF
SIGKVMRTMLSKSIF

SEQ ID NO: 261349 - protein, 15 aa, Artificial Sequence
  Description of Artificial Sequence: Synthetic peptide
  Seed: SIGKVCRTLLAKSVF
SIGKVMRTMLSKSLF

SEQ ID NO: 261350 - protein, 15 aa, Artificial Sequence
  Description of Artificial Sequence: Synthetic peptide
  Seed: SIGKVCRTLLAKSVF
SIGKVMRTMLSKSMF

SEQ ID NO: 261351 - protein, 15 aa, Artificial Sequence
  Description of Artificial Sequence: Synthetic peptide
  Seed: SIGKVCRTLLAKSVF
SIGKVMRTMLSKSNF

SEQ ID NO: 261352 - protein, 15 aa, Artificial Sequence
  Description of Artificial Sequence: Synthetic peptide
  Seed: SIGKVCRTLLAKSVF
SIGKVMRTMLSKSSF

SEQ ID NO: 261353 - protein, 15 aa, Artificial Sequence
  Description of Artificial Sequence: Synthetic peptide
  Seed: SIGKVCRTLLAKSVF
SIGKVMRTMLSKSTF

SEQ ID NO: 261354 - protein, 15 aa, Artificial Sequence
  Description of Artificial Sequence: Synthetic peptide
  Seed: SIGKVCRTLLAKSVF
SIGKVMRTMLSKSVF

SEQ ID NO: 261355 - protein, 15 aa, Artificial Sequence
  Description of Artificial Sequence: Synthetic peptide
  Seed: SIGKVCRTLLAKSVF
SIGKVMRTMLTKSAF

SEQ ID NO: 261356 - protein, 15 aa, Artificial Sequence
  Description of Artificial Sequence: Synthetic peptide
  Seed: SIGKVCRTLLAKSVF
SIGKVMRTMLTKSIF

SEQ ID NO: 261357 - protein, 15 aa, Artificial Sequence
  Description of Artificial Sequence: Synthetic peptide
  Seed: SIGKVCRTLLAKSVF
SIGKVMRTMLTKSLF

SEQ ID NO: 261358 - protein, 15 aa, Artificial Sequence
  Description of Artificial Sequence: Synthetic peptide
  Seed: SIGKVCRTLLAKSVF
SIGKVMRTMLTKSNF

SEQ ID NO: 261359 - protein, 15 aa, Artificial Sequence
  Description of Artificial Sequence: Synthetic peptide
  Seed: SIGKVCRTLLAKSVF
SIGKVMRTMLTKSVF

SEQ ID NO: 261360 - protein, 15 aa, Artificial Sequence
  Description of Artificial Sequence: Synthetic peptide
  Seed: SIGKVCRTLLAKSVF
SIGKVMRTMLVKSAF

SEQ ID NO: 261361 - protein, 15 aa, Artificial Sequence
  Description of Artificial Sequence: Synthetic peptide
  Seed: SIGKVCRTLLAKSVF
SIGKVMRTMLVKSIF

SEQ ID NO: 261362 - protein, 15 aa, Artificial Sequence
  Description of Artificial Sequence: Synthetic peptide
  Seed: SIGKVCRTLLAKSVF
SIGKVMRTMLVKSLF

SEQ ID NO: 261363 - protein, 15 aa, Artificial Sequence
  Description of Artificial Sequence: Synthetic peptide
  Seed: SIGKVCRTLLAKSVF
SIGKVMRTMLVKSMF

SEQ ID NO: 261364 - protein, 15 aa, Artificial Sequence
  Description of Artificial Sequence: Synthetic peptide
  Seed: SIGKVCRTLLAKSVF
SIGKVMRTMLVKSNF

SEQ ID NO: 261365 - protein, 15 aa, Artificial Sequence
  Description of Artificial Sequence: Synthetic peptide
  Seed: SIGKVCRTLLAKSVF
SIGKVMRTMLVKSSF

SEQ ID NO: 261366 - protein, 15 aa, Artificial Sequence
  Description of Artificial Sequence: Synthetic peptide
  Seed: SIGKVCRTLLAKSVF
SIGKVMRTMLVKSTF

SEQ ID NO: 261367 - protein, 15 aa, Artificial Sequence
  Description of Artificial Sequence: Synthetic peptide
  Seed: SIGKVCRTLLAKSVF
SIGKVMRTMLVKSVF

SEQ ID NO: 261368 - protein, 15 aa, Artificial Sequence
  Description of Artificial Sequence: Synthetic peptide
  Seed: SIGKVCRTLLAKSVF
SIGKVMRTNLFKSIF

SEQ ID NO: 261369 - protein, 15 aa, Artificial Sequence
  Description of Artificial Sequence: Synthetic peptide
  Seed: SIGKVCRTLLAKSVF
SIGKVMRTNLFKSLF

SEQ ID NO: 261370 - protein, 15 aa, Artificial Sequence
  Description of Artificial Sequence: Synthetic peptide
  Seed: SIGKVCRTLLAKSVF
SIGKVMRTNLFKSVF

SEQ ID NO: 261371 - protein, 15 aa, Artificial Sequence
  Description of Artificial Sequence: Synthetic peptide
  Seed: SIGKVCRTLLAKSVF
SIGKVMRTQLAKSIF

SEQ ID NO: 261372 - protein, 15 aa, Artificial Sequence
  Description of Artificial Sequence: Synthetic peptide
  Seed: SIGKVCRTLLAKSVF
SIGKVMRTQLAKSLF

SEQ ID NO: 261373 - protein, 15 aa, Artificial Sequence
  Description of Artificial Sequence: Synthetic peptide
  Seed: SIGKVCRTLLAKSVF
SIGKVMRTQLAKSVF

SEQ ID NO: 261374 - protein, 15 aa, Artificial Sequence
  Description of Artificial Sequence: Synthetic peptide
  Seed: SIGKVCRTLLAKSVF
SIGKVMRTQLFKSIF

SEQ ID NO: 261375 - protein, 15 aa, Artificial Sequence
  Description of Artificial Sequence: Synthetic peptide
  Seed: SIGKVCRTLLAKSVF
SIGKVMRTQLFKSLF

SEQ ID NO: 261376 - protein, 15 aa, Artificial Sequence
  Description of Artificial Sequence: Synthetic peptide
  Seed: SIGKVCRTLLAKSVF
SIGKVMRTQLFKSVF

SEQ ID NO: 261377 - protein, 15 aa, Artificial Sequence
  Description of Artificial Sequence: Synthetic peptide
  Seed: SIGKVCRTLLAKSVF
SIGKVMRTSLAKSAF

SEQ ID NO: 261378 - protein, 15 aa, Artificial Sequence
  Description of Artificial Sequence: Synthetic peptide
  Seed: SIGKVCRTLLAKSVF
SIGKVMRTSLAKSIF

SEQ ID NO: 261379 - protein, 15 aa, Artificial Sequence
  Description of Artificial Sequence: Synthetic peptide
  Seed: SIGKVCRTLLAKSVF
SIGKVMRTSLAKSLF

SEQ ID NO: 261380 - protein, 15 aa, Artificial Sequence
  Description of Artificial Sequence: Synthetic peptide
  Seed: SIGKVCRTLLAKSVF
SIGKVMRTSLAKSVF

SEQ ID NO: 261381 - protein, 15 aa, Artificial Sequence
  Description of Artificial Sequence: Synthetic peptide
  Seed: SIGKVCRTLLAKSVF
SIGKVMRTSLFKSFF

SEQ ID NO: 261382 - protein, 15 aa, Artificial Sequence
  Description of Artificial Sequence: Synthetic peptide
  Seed: SIGKVCRTLLAKSVF
SIGKVMRTSLFKSIF

SEQ ID NO: 261383 - protein, 15 aa, Artificial Sequence
  Description of Artificial Sequence: Synthetic peptide
  Seed: SIGKVCRTLLAKSVF
SIGKVMRTSLFKSLF

SEQ ID NO: 261384 - protein, 15 aa, Artificial Sequence
  Description of Artificial Sequence: Synthetic peptide
  Seed: SIGKVCRTLLAKSVF
SIGKVMRTSLFKSMF

SEQ ID NO: 261385 - protein, 15 aa, Artificial Sequence
  Description of Artificial Sequence: Synthetic peptide
  Seed: SIGKVCRTLLAKSVF
SIGKVMRTSLFKSVF

SEQ ID NO: 261386 - protein, 15 aa, Artificial Sequence
  Description of Artificial Sequence: Synthetic peptide
  Seed: SIGKVCRTLLAKSVF
SIGKVMRTSLGKSIF

SEQ ID NO: 261387 - protein, 15 aa, Artificial Sequence
  Description of Artificial Sequence: Synthetic peptide
  Seed: SIGKVCRTLLAKSVF
SIGKVMRTSLSKSIF

SEQ ID NO: 261388 - protein, 15 aa, Artificial Sequence
  Description of Artificial Sequence: Synthetic peptide
  Seed: SIGKVCRTLLAKSVF
SIGKVMRTSLSKSLF

SEQ ID NO: 261389 - protein, 15 aa, Artificial Sequence
  Description of Artificial Sequence: Synthetic peptide
  Seed: SIGKVCRTLLAKSVF
SIGKVMRTSLSKSVF

SEQ ID NO: 261390 - protein, 15 aa, Artificial Sequence
  Description of Artificial Sequence: Synthetic peptide
  Seed: SIGKVCRTLLAKSVF
SIGKVMRTTLAKSIF

SEQ ID NO: 261391 - protein, 15 aa, Artificial Sequence
  Description of Artificial Sequence: Synthetic peptide
  Seed: SIGKVCRTLLAKSVF
SIGKVMRTTLAKSLF

SEQ ID NO: 261392 - protein, 15 aa, Artificial Sequence
  Description of Artificial Sequence: Synthetic peptide
  Seed: SIGKVCRTLLAKSVF
SIGKVMRTTLAKSVF

SEQ ID NO: 261393 - protein, 15 aa, Artificial Sequence
  Description of Artificial Sequence: Synthetic peptide
  Seed: SIGKVCRTLLAKSVF
SIGKVMRTTLFKSAF

SEQ ID NO: 261394 - protein, 15 aa, Artificial Sequence
  Description of Artificial Sequence: Synthetic peptide
  Seed: SIGKVCRTLLAKSVF
SIGKVMRTTLFKSFF

SEQ ID NO: 261395 - protein, 15 aa, Artificial Sequence
  Description of Artificial Sequence: Synthetic peptide
  Seed: SIGKVCRTLLAKSVF
SIGKVMRTTLFKSIF

SEQ ID NO: 261396 - protein, 15 aa, Artificial Sequence
  Description of Artificial Sequence: Synthetic peptide
  Seed: SIGKVCRTLLAKSVF
SIGKVMRTTLFKSLF

SEQ ID NO: 261397 - protein, 15 aa, Artificial Sequence
  Description of Artificial Sequence: Synthetic peptide
  Seed: SIGKVCRTLLAKSVF
SIGKVMRTTLFKSMF

SEQ ID NO: 261398 - protein, 15 aa, Artificial Sequence
  Description of Artificial Sequence: Synthetic peptide
  Seed: SIGKVCRTLLAKSVF
SIGKVMRTTLFKSTF

SEQ ID NO: 261399 - protein, 15 aa, Artificial Sequence
  Description of Artificial Sequence: Synthetic peptide
  Seed: SIGKVCRTLLAKSVF
SIGKVMRTTLFKSVF

SEQ ID NO: 261400 - protein, 15 aa, Artificial Sequence
  Description of Artificial Sequence: Synthetic peptide
  Seed: SIGKVCRTLLAKSVF
SIGKVMRTTLFKSYF

SEQ ID NO: 261401 - protein, 15 aa, Artificial Sequence
  Description of Artificial Sequence: Synthetic peptide
  Seed: SIGKVCRTLLAKSVF
SIGKVMRTTLGKSIF

SEQ ID NO: 261402 - protein, 15 aa, Artificial Sequence
  Description of Artificial Sequence: Synthetic peptide
  Seed: SIGKVCRTLLAKSVF
SIGKVMRTTLSKSIF

SEQ ID NO: 261403 - protein, 15 aa, Artificial Sequence
  Description of Artificial Sequence: Synthetic peptide
  Seed: SIGKVCRTLLAKSVF
SIGKVMRTTLSKSLF

SEQ ID NO: 261404 - protein, 15 aa, Artificial Sequence
  Description of Artificial Sequence: Synthetic peptide
  Seed: SIGKVCRTLLAKSVF
SIGKVMRTTLSKSMF

SEQ ID NO: 261405 - protein, 15 aa, Artificial Sequence
  Description of Artificial Sequence: Synthetic peptide
  Seed: SIGKVCRTLLAKSVF
SIGKVMRTTLSKSVF

SEQ ID NO: 261406 - protein, 15 aa, Artificial Sequence
  Description of Artificial Sequence: Synthetic peptide
  Seed: SIGKVCRTLLAKSVF
SIGKVMRTTLYKSIF

SEQ ID NO: 261407 - protein, 15 aa, Artificial Sequence
  Description of Artificial Sequence: Synthetic peptide
  Seed: SIGKVCRTLLAKSVF
SIGKVMRTTLYKSLF

SEQ ID NO: 261408 - protein, 15 aa, Artificial Sequence
  Description of Artificial Sequence: Synthetic peptide
  Seed: SIGKVCRTLLAKSVF
SIGKVMRTVLAKSAF

SEQ ID NO: 261409 - protein, 15 aa, Artificial Sequence
  Description of Artificial Sequence: Synthetic peptide
  Seed: SIGKVCRTLLAKSVF
SIGKVMRTVLAKSIF

SEQ ID NO: 261410 - protein, 15 aa, Artificial Sequence
  Description of Artificial Sequence: Synthetic peptide
  Seed: SIGKVCRTLLAKSVF
SIGKVMRTVLAKSLF

SEQ ID NO: 261411 - protein, 15 aa, Artificial Sequence
  Description of Artificial Sequence: Synthetic peptide
  Seed: SIGKVCRTLLAKSVF
SIGKVMRTVLAKSMF

SEQ ID NO: 261412 - protein, 15 aa, Artificial Sequence
  Description of Artificial Sequence: Synthetic peptide
  Seed: SIGKVCRTLLAKSVF
SIGKVMRTVLAKSTF

SEQ ID NO: 261413 - protein, 15 aa, Artificial Sequence
  Description of Artificial Sequence: Synthetic peptide
  Seed: SIGKVCRTLLAKSVF
SIGKVMRTVLAKSVF

SEQ ID NO: 261414 - protein, 15 aa, Artificial Sequence
  Description of Artificial Sequence: Synthetic peptide
  Seed: SIGKVCRTLLAKSVF
SIGKVMRTVLFKSAF

SEQ ID NO: 261415 - protein, 15 aa, Artificial Sequence
  Description of Artificial Sequence: Synthetic peptide
  Seed: SIGKVCRTLLAKSVF
SIGKVMRTVLFKSFF

SEQ ID NO: 261416 - protein, 15 aa, Artificial Sequence
  Description of Artificial Sequence: Synthetic peptide
  Seed: SIGKVCRTLLAKSVF
SIGKVMRTVLFKSIF

SEQ ID NO: 261417 - protein, 15 aa, Artificial Sequence
  Description of Artificial Sequence: Synthetic peptide
  Seed: SIGKVCRTLLAKSVF
SIGKVMRTVLFKSLF

SEQ ID NO: 261418 - protein, 15 aa, Artificial Sequence
  Description of Artificial Sequence: Synthetic peptide
  Seed: SIGKVCRTLLAKSVF
SIGKVMRTVLFKSMF

SEQ ID NO: 261419 - protein, 15 aa, Artificial Sequence
  Description of Artificial Sequence: Synthetic peptide
  Seed: SIGKVCRTLLAKSVF
SIGKVMRTVLFKSTF

SEQ ID NO: 261420 - protein, 15 aa, Artificial Sequence
  Description of Artificial Sequence: Synthetic peptide
  Seed: SIGKVCRTLLAKSVF
SIGKVMRTVLFKSVF

SEQ ID NO: 261421 - protein, 15 aa, Artificial Sequence
  Description of Artificial Sequence: Synthetic peptide
  Seed: SIGKVCRTLLAKSVF
SIGKVMRTVLSKSIF

SEQ ID NO: 261422 - protein, 15 aa, Artificial Sequence
  Description of Artificial Sequence: Synthetic peptide
  Seed: SIGKVCRTLLAKSVF
SIGKVMRTVLSKSLF

SEQ ID NO: 261423 - protein, 15 aa, Artificial Sequence
  Description of Artificial Sequence: Synthetic peptide
  Seed: SIGKVCRTLLAKSVF
SIGKVMRTVLSKSVF

SEQ ID NO: 261424 - protein, 15 aa, Artificial Sequence
  Description of Artificial Sequence: Synthetic peptide
  Seed: SIGKVCRTLLAKSVF
SIGKVMRTWLFKSVF

SEQ ID NO: 261425 - protein, 15 aa, Artificial Sequence
  Description of Artificial Sequence: Synthetic peptide
  Seed: SIGKVCRTLLAKSVF
SIGKVMRTYLFKSVF

SEQ ID NO: 261426 - protein, 15 aa, Artificial Sequence
  Description of Artificial Sequence: Synthetic peptide
  Seed: SIGKVCRTLLAKSVF
SIGKVMRTYLSKSAF

SEQ ID NO: 261427 - protein, 15 aa, Artificial Sequence
  Description of Artificial Sequence: Synthetic peptide
  Seed: SIGKVCRTLLAKSVF
SIGKVMRTYLSKSIF

SEQ ID NO: 261428 - protein, 15 aa, Artificial Sequence
  Description of Artificial Sequence: Synthetic peptide
  Seed: SIGKVCRTLLAKSVF
SIGKVMRTYLSKSLF

SEQ ID NO: 261429 - protein, 15 aa, Artificial Sequence
  Description of Artificial Sequence: Synthetic peptide
  Seed: SIGKVCRTLLAKSVF
SIGKVMRTYLSKSVF

SEQ ID NO: 261430 - protein, 15 aa, Artificial Sequence
  Description of Artificial Sequence: Synthetic peptide
  Seed: SIGKVCRTLLAKSVF
SIGKVVRTALAKSIF

SEQ ID NO: 261431 - protein, 15 aa, Artificial Sequence
  Description of Artificial Sequence: Synthetic peptide
  Seed: SIGKVCRTLLAKSVF
SIGKVVRTALAKSLF

SEQ ID NO: 261432 - protein, 15 aa, Artificial Sequence
  Description of Artificial Sequence: Synthetic peptide
  Seed: SIGKVCRTLLAKSVF
SIGKVVRTALAKSVF

SEQ ID NO: 261433 - protein, 15 aa, Artificial Sequence
  Description of Artificial Sequence: Synthetic peptide
  Seed: SIGKVCRTLLAKSVF
SIGKVVRTALFKSFF

SEQ ID NO: 261434 - protein, 15 aa, Artificial Sequence
  Description of Artificial Sequence: Synthetic peptide
  Seed: SIGKVCRTLLAKSVF
SIGKVVRTALFKSIF

SEQ ID NO: 261435 - protein, 15 aa, Artificial Sequence
  Description of Artificial Sequence: Synthetic peptide
  Seed: SIGKVCRTLLAKSVF
SIGKVVRTALFKSLF

SEQ ID NO: 261436 - protein, 15 aa, Artificial Sequence
  Description of Artificial Sequence: Synthetic peptide
  Seed: SIGKVCRTLLAKSVF
SIGKVVRTALFKSMF

SEQ ID NO: 261437 - protein, 15 aa, Artificial Sequence
  Description of Artificial Sequence: Synthetic peptide
  Seed: SIGKVCRTLLAKSVF
SIGKVVRTALFKSVF

SEQ ID NO: 261438 - protein, 15 aa, Artificial Sequence
  Description of Artificial Sequence: Synthetic peptide
  Seed: SIGKVCRTLLAKSVF
SIGKVVRTALSKSIF

SEQ ID NO: 261439 - protein, 15 aa, Artificial Sequence
  Description of Artificial Sequence: Synthetic peptide
  Seed: SIGKVCRTLLAKSVF
SIGKVVRTALSKSLF

SEQ ID NO: 261440 - protein, 15 aa, Artificial Sequence
  Description of Artificial Sequence: Synthetic peptide
  Seed: SIGKVCRTLLAKSVF
SIGKVVRTELFKSFF

SEQ ID NO: 261441 - protein, 15 aa, Artificial Sequence
  Description of Artificial Sequence: Synthetic peptide
  Seed: SIGKVCRTLLAKSVF
SIGKVVRTELFKSIF

SEQ ID NO: 261442 - protein, 15 aa, Artificial Sequence
  Description of Artificial Sequence: Synthetic peptide
  Seed: SIGKVCRTLLAKSVF
SIGKVVRTELFKSLF

SEQ ID NO: 261443 - protein, 15 aa, Artificial Sequence
  Description of Artificial Sequence: Synthetic peptide
  Seed: SIGKVCRTLLAKSVF
SIGKVVRTELFKSMF

SEQ ID NO: 261444 - protein, 15 aa, Artificial Sequence
  Description of Artificial Sequence: Synthetic peptide
  Seed: SIGKVCRTLLAKSVF
SIGKVVRTELFKSVF

SEQ ID NO: 261445 - protein, 15 aa, Artificial Sequence
  Description of Artificial Sequence: Synthetic peptide
  Seed: SIGKVCRTLLAKSVF
SIGKVVRTFLAKSIF

SEQ ID NO: 261446 - protein, 15 aa, Artificial Sequence
  Description of Artificial Sequence: Synthetic peptide
  Seed: SIGKVCRTLLAKSVF
SIGKVVRTFLAKSLF

SEQ ID NO: 261447 - protein, 15 aa, Artificial Sequence
  Description of Artificial Sequence: Synthetic peptide
  Seed: SIGKVCRTLLAKSVF
SIGKVVRTFLAKSVF

SEQ ID NO: 261448 - protein, 15 aa, Artificial Sequence
  Description of Artificial Sequence: Synthetic peptide
  Seed: SIGKVCRTLLAKSVF
SIGKVVRTFLFKSFF

SEQ ID NO: 261449 - protein, 15 aa, Artificial Sequence
  Description of Artificial Sequence: Synthetic peptide
  Seed: SIGKVCRTLLAKSVF
SIGKVVRTFLFKSIF

SEQ ID NO: 261450 - protein, 15 aa, Artificial Sequence
  Description of Artificial Sequence: Synthetic peptide
  Seed: SIGKVCRTLLAKSVF
SIGKVVRTFLFKSLF

SEQ ID NO: 261451 - protein, 15 aa, Artificial Sequence
  Description of Artificial Sequence: Synthetic peptide
  Seed: SIGKVCRTLLAKSVF
SIGKVVRTFLFKSMF

SEQ ID NO: 261452 - protein, 15 aa, Artificial Sequence
  Description of Artificial Sequence: Synthetic peptide
  Seed: SIGKVCRTLLAKSVF
SIGKVVRTFLFKSVF

SEQ ID NO: 261453 - protein, 15 aa, Artificial Sequence
  Description of Artificial Sequence: Synthetic peptide
  Seed: SIGKVCRTLLAKSVF
SIGKVVRTFLFKSYF

SEQ ID NO: 261454 - protein, 15 aa, Artificial Sequence
  Description of Artificial Sequence: Synthetic peptide
  Seed: SIGKVCRTLLAKSVF
SIGKVVRTFLGKSIF

SEQ ID NO: 261455 - protein, 15 aa, Artificial Sequence
  Description of Artificial Sequence: Synthetic peptide
  Seed: SIGKVCRTLLAKSVF
SIGKVVRTFLGKSLF

SEQ ID NO: 261456 - protein, 15 aa, Artificial Sequence
  Description of Artificial Sequence: Synthetic peptide
  Seed: SIGKVCRTLLAKSVF
SIGKVVRTFLGKSVF

SEQ ID NO: 261457 - protein, 15 aa, Artificial Sequence
  Description of Artificial Sequence: Synthetic peptide
  Seed: SIGKVCRTLLAKSVF
SIGKVVRTFLLKSIF

SEQ ID NO: 261458 - protein, 15 aa, Artificial Sequence
  Description of Artificial Sequence: Synthetic peptide
  Seed: SIGKVCRTLLAKSVF
SIGKVVRTFLLKSLF

SEQ ID NO: 261459 - protein, 15 aa, Artificial Sequence
  Description of Artificial Sequence: Synthetic peptide
  Seed: SIGKVCRTLLAKSVF
SIGKVVRTFLNKSIF

SEQ ID NO: 261460 - protein, 15 aa, Artificial Sequence
  Description of Artificial Sequence: Synthetic peptide
  Seed: SIGKVCRTLLAKSVF
SIGKVVRTFLNKSLF

SEQ ID NO: 261461 - protein, 15 aa, Artificial Sequence
  Description of Artificial Sequence: Synthetic peptide
  Seed: SIGKVCRTLLAKSVF
SIGKVVRTFLNKSVF

SEQ ID NO: 261462 - protein, 15 aa, Artificial Sequence
  Description of Artificial Sequence: Synthetic peptide
  Seed: SIGKVCRTLLAKSVF
SIGKVVRTFLSKSAF

SEQ ID NO: 261463 - protein, 15 aa, Artificial Sequence
  Description of Artificial Sequence: Synthetic peptide
  Seed: SIGKVCRTLLAKSVF
SIGKVVRTFLSKSIF

SEQ ID NO: 261464 - protein, 15 aa, Artificial Sequence
  Description of Artificial Sequence: Synthetic peptide
  Seed: SIGKVCRTLLAKSVF
SIGKVVRTFLSKSLF

SEQ ID NO: 261465 - protein, 15 aa, Artificial Sequence
  Description of Artificial Sequence: Synthetic peptide
  Seed: SIGKVCRTLLAKSVF
SIGKVVRTFLSKSMF

SEQ ID NO: 261466 - protein, 15 aa, Artificial Sequence
  Description of Artificial Sequence: Synthetic peptide
  Seed: SIGKVCRTLLAKSVF
SIGKVVRTFLSKSVF

SEQ ID NO: 261467 - protein, 15 aa, Artificial Sequence
  Description of Artificial Sequence: Synthetic peptide
  Seed: SIGKVCRTLLAKSVF
SIGKVVRTGLAKSAF

SEQ ID NO: 261468 - protein, 15 aa, Artificial Sequence
  Description of Artificial Sequence: Synthetic peptide
  Seed: SIGKVCRTLLAKSVF
SIGKVVRTGLAKSSF

SEQ ID NO: 261469 - protein, 15 aa, Artificial Sequence
  Description of Artificial Sequence: Synthetic peptide
  Seed: SIGKVCRTLLAKSVF
SIGKVVRTGLAKSVF

SEQ ID NO: 261470 - protein, 15 aa, Artificial Sequence
  Description of Artificial Sequence: Synthetic peptide
  Seed: SIGKVCRTLLAKSVF
SIGKVVRTHLFKSFF

SEQ ID NO: 261471 - protein, 15 aa, Artificial Sequence
  Description of Artificial Sequence: Synthetic peptide
  Seed: SIGKVCRTLLAKSVF
SIGKVVRTHLFKSIF

SEQ ID NO: 261472 - protein, 15 aa, Artificial Sequence
  Description of Artificial Sequence: Synthetic peptide
  Seed: SIGKVCRTLLAKSVF
SIGKVVRTHLFKSLF

SEQ ID NO: 261473 - protein, 15 aa, Artificial Sequence
  Description of Artificial Sequence: Synthetic peptide
  Seed: SIGKVCRTLLAKSVF
SIGKVVRTHLFKSMF

SEQ ID NO: 261474 - protein, 15 aa, Artificial Sequence
  Description of Artificial Sequence: Synthetic peptide
  Seed: SIGKVCRTLLAKSVF
SIGKVVRTHLFKSVF

SEQ ID NO: 261475 - protein, 15 aa, Artificial Sequence
  Description of Artificial Sequence: Synthetic peptide
  Seed: SIGKVCRTLLAKSVF
SIGKVVRTILAKSIF

SEQ ID NO: 261476 - protein, 15 aa, Artificial Sequence
  Description of Artificial Sequence: Synthetic peptide
  Seed: SIGKVCRTLLAKSVF
SIGKVVRTILAKSLF

SEQ ID NO: 261477 - protein, 15 aa, Artificial Sequence
  Description of Artificial Sequence: Synthetic peptide
  Seed: SIGKVCRTLLAKSVF
SIGKVVRTILAKSVF

SEQ ID NO: 261478 - protein, 15 aa, Artificial Sequence
  Description of Artificial Sequence: Synthetic peptide
  Seed: SIGKVCRTLLAKSVF
SIGKVVRTILFKSAF

SEQ ID NO: 261479 - protein, 15 aa, Artificial Sequence
  Description of Artificial Sequence: Synthetic peptide
  Seed: SIGKVCRTLLAKSVF
SIGKVVRTILFKSFF

SEQ ID NO: 261480 - protein, 15 aa, Artificial Sequence
  Description of Artificial Sequence: Synthetic peptide
  Seed: SIGKVCRTLLAKSVF
SIGKVVRTILFKSIF

SEQ ID NO: 261481 - protein, 15 aa, Artificial Sequence
  Description of Artificial Sequence: Synthetic peptide
  Seed: SIGKVCRTLLAKSVF
SIGKVVRTILFKSLF

SEQ ID NO: 261482 - protein, 15 aa, Artificial Sequence
  Description of Artificial Sequence: Synthetic peptide
  Seed: SIGKVCRTLLAKSVF
SIGKVVRTILFKSMF

SEQ ID NO: 261483 - protein, 15 aa, Artificial Sequence
  Description of Artificial Sequence: Synthetic peptide
  Seed: SIGKVCRTLLAKSVF
SIGKVVRTILFKSTF

SEQ ID NO: 261484 - protein, 15 aa, Artificial Sequence
  Description of Artificial Sequence: Synthetic peptide
  Seed: SIGKVCRTLLAKSVF
SIGKVVRTILFKSVF

SEQ ID NO: 261485 - protein, 15 aa, Artificial Sequence
  Description of Artificial Sequence: Synthetic peptide
  Seed: SIGKVCRTLLAKSVF
SIGKVVRTILGKSLF

SEQ ID NO: 261486 - protein, 15 aa, Artificial Sequence
  Description of Artificial Sequence: Synthetic peptide
  Seed: SIGKVCRTLLAKSVF
SIGKVVRTILGKSVF

SEQ ID NO: 261487 - protein, 15 aa, Artificial Sequence
  Description of Artificial Sequence: Synthetic peptide
  Seed: SIGKVCRTLLAKSVF
SIGKVVRTILSKSIF

SEQ ID NO: 261488 - protein, 15 aa, Artificial Sequence
  Description of Artificial Sequence: Synthetic peptide
  Seed: SIGKVCRTLLAKSVF
SIGKVVRTILSKSVF

SEQ ID NO: 261489 - protein, 15 aa, Artificial Sequence
  Description of Artificial Sequence: Synthetic peptide
  Seed: SIGKVCRTLLAKSVF
SIGKVVRTILYKSIF

SEQ ID NO: 261490 - protein, 15 aa, Artificial Sequence
  Description of Artificial Sequence: Synthetic peptide
  Seed: SIGKVCRTLLAKSVF
SIGKVVRTILYKSLF

SEQ ID NO: 261491 - protein, 15 aa, Artificial Sequence
  Description of Artificial Sequence: Synthetic peptide
  Seed: SIGKVCRTLLAKSVF
SIGKVVRTLLAKSAF

SEQ ID NO: 261492 - protein, 15 aa, Artificial Sequence
  Description of Artificial Sequence: Synthetic peptide
  Seed: SIGKVCRTLLAKSVF
SIGKVVRTLLAKSIF

SEQ ID NO: 261493 - protein, 15 aa, Artificial Sequence
  Description of Artificial Sequence: Synthetic peptide
  Seed: SIGKVCRTLLAKSVF
SIGKVVRTLLAKSLF

SEQ ID NO: 261494 - protein, 15 aa, Artificial Sequence
  Description of Artificial Sequence: Synthetic peptide
  Seed: SIGKVCRTLLAKSVF
SIGKVVRTLLAKSMF

SEQ ID NO: 261495 - protein, 15 aa, Artificial Sequence
  Description of Artificial Sequence: Synthetic peptide
  Seed: SIGKVCRTLLAKSVF
SIGKVVRTLLAKSSF

SEQ ID NO: 261496 - protein, 15 aa, Artificial Sequence
  Description of Artificial Sequence: Synthetic peptide
  Seed: SIGKVCRTLLAKSVF
SIGKVVRTLLAKSTF

SEQ ID NO: 261497 - protein, 15 aa, Artificial Sequence
  Description of Artificial Sequence: Synthetic peptide
  Seed: SIGKVCRTLLAKSVF
SIGKVVRTLLAKSVF

SEQ ID NO: 261498 - protein, 15 aa, Artificial Sequence
  Description of Artificial Sequence: Synthetic peptide
  Seed: SIGKVCRTLLAKSVF
SIGKVVRTLLFKSFF

SEQ ID NO: 261499 - protein, 15 aa, Artificial Sequence
  Description of Artificial Sequence: Synthetic peptide
  Seed: SIGKVCRTLLAKSVF
SIGKVVRTLLFKSIF

SEQ ID NO: 261500 - protein, 15 aa, Artificial Sequence
  Description of Artificial Sequence: Synthetic peptide
  Seed: SIGKVCRTLLAKSVF
SIGKVVRTLLFKSLF

SEQ ID NO: 261501 - protein, 15 aa, Artificial Sequence
  Description of Artificial Sequence: Synthetic peptide
  Seed: SIGKVCRTLLAKSVF
SIGKVVRTLLFKSMF

SEQ ID NO: 261502 - protein, 15 aa, Artificial Sequence
  Description of Artificial Sequence: Synthetic peptide
  Seed: SIGKVCRTLLAKSVF
SIGKVVRTLLFKSTF

SEQ ID NO: 261503 - protein, 15 aa, Artificial Sequence
  Description of Artificial Sequence: Synthetic peptide
  Seed: SIGKVCRTLLAKSVF
SIGKVVRTLLFKSVF

SEQ ID NO: 261504 - protein, 15 aa, Artificial Sequence
  Description of Artificial Sequence: Synthetic peptide
  Seed: SIGKVCRTLLAKSVF
SIGKVVRTLLGKSAF

SEQ ID NO: 261505 - protein, 15 aa, Artificial Sequence
  Description of Artificial Sequence: Synthetic peptide
  Seed: SIGKVCRTLLAKSVF
SIGKVVRTLLGKSIF

SEQ ID NO: 261506 - protein, 15 aa, Artificial Sequence
  Description of Artificial Sequence: Synthetic peptide
  Seed: SIGKVCRTLLAKSVF
SIGKVVRTLLGKSLF

SEQ ID NO: 261507 - protein, 15 aa, Artificial Sequence
  Description of Artificial Sequence: Synthetic peptide
  Seed: SIGKVCRTLLAKSVF
SIGKVVRTLLGKSMF

SEQ ID NO: 261508 - protein, 15 aa, Artificial Sequence
  Description of Artificial Sequence: Synthetic peptide
  Seed: SIGKVCRTLLAKSVF
SIGKVVRTLLGKSTF

SEQ ID NO: 261509 - protein, 15 aa, Artificial Sequence
  Description of Artificial Sequence: Synthetic peptide
  Seed: SIGKVCRTLLAKSVF
SIGKVVRTLLGKSVF

SEQ ID NO: 261510 - protein, 15 aa, Artificial Sequence
  Description of Artificial Sequence: Synthetic peptide
  Seed: SIGKVCRTLLAKSVF
SIGKVVRTLLPKSIF

SEQ ID NO: 261511 - protein, 15 aa, Artificial Sequence
  Description of Artificial Sequence: Synthetic peptide
  Seed: SIGKVCRTLLAKSVF
SIGKVVRTLLPKSLF

SEQ ID NO: 261512 - protein, 15 aa, Artificial Sequence
  Description of Artificial Sequence: Synthetic peptide
  Seed: SIGKVCRTLLAKSVF
SIGKVVRTLLPKSVF

SEQ ID NO: 261513 - protein, 15 aa, Artificial Sequence
  Description of Artificial Sequence: Synthetic peptide
  Seed: SIGKVCRTLLAKSVF
SIGKVVRTLLSKSAF

SEQ ID NO: 261514 - protein, 15 aa, Artificial Sequence
  Description of Artificial Sequence: Synthetic peptide
  Seed: SIGKVCRTLLAKSVF
SIGKVVRTLLSKSIF

SEQ ID NO: 261515 - protein, 15 aa, Artificial Sequence
  Description of Artificial Sequence: Synthetic peptide
  Seed: SIGKVCRTLLAKSVF
SIGKVVRTLLSKSLF

SEQ ID NO: 261516 - protein, 15 aa, Artificial Sequence
  Description of Artificial Sequence: Synthetic peptide
  Seed: SIGKVCRTLLAKSVF
SIGKVVRTLLSKSMF

SEQ ID NO: 261517 - protein, 15 aa, Artificial Sequence
  Description of Artificial Sequence: Synthetic peptide
  Seed: SIGKVCRTLLAKSVF
SIGKVVRTLLSKSTF

SEQ ID NO: 261518 - protein, 15 aa, Artificial Sequence
  Description of Artificial Sequence: Synthetic peptide
  Seed: SIGKVCRTLLAKSVF
SIGKVVRTLLSKSVF

SEQ ID NO: 261519 - protein, 15 aa, Artificial Sequence
  Description of Artificial Sequence: Synthetic peptide
  Seed: SIGKVCRTLLAKSVF
SIGKVVRTLLTKSVF

SEQ ID NO: 261520 - protein, 15 aa, Artificial Sequence
  Description of Artificial Sequence: Synthetic peptide
  Seed: SIGKVCRTLLAKSVF
SIGKVVRTMLAKSAF

SEQ ID NO: 261521 - protein, 15 aa, Artificial Sequence
  Description of Artificial Sequence: Synthetic peptide
  Seed: SIGKVCRTLLAKSVF
SIGKVVRTMLAKSIF

SEQ ID NO: 261522 - protein, 15 aa, Artificial Sequence
  Description of Artificial Sequence: Synthetic peptide
  Seed: SIGKVCRTLLAKSVF
SIGKVVRTMLAKSLF

SEQ ID NO: 261523 - protein, 15 aa, Artificial Sequence
  Description of Artificial Sequence: Synthetic peptide
  Seed: SIGKVCRTLLAKSVF
SIGKVVRTMLAKSMF

SEQ ID NO: 261524 - protein, 15 aa, Artificial Sequence
  Description of Artificial Sequence: Synthetic peptide
  Seed: SIGKVCRTLLAKSVF
SIGKVVRTMLAKSSF

SEQ ID NO: 261525 - protein, 15 aa, Artificial Sequence
  Description of Artificial Sequence: Synthetic peptide
  Seed: SIGKVCRTLLAKSVF
SIGKVVRTMLAKSTF

SEQ ID NO: 261526 - protein, 15 aa, Artificial Sequence
  Description of Artificial Sequence: Synthetic peptide
  Seed: SIGKVCRTLLAKSVF
SIGKVVRTMLAKSVF

SEQ ID NO: 261527 - protein, 15 aa, Artificial Sequence
  Description of Artificial Sequence: Synthetic peptide
  Seed: SIGKVCRTLLAKSVF
SIGKVVRTMLFKSFF

SEQ ID NO: 261528 - protein, 15 aa, Artificial Sequence
  Description of Artificial Sequence: Synthetic peptide
  Seed: SIGKVCRTLLAKSVF
SIGKVVRTMLFKSIF

SEQ ID NO: 261529 - protein, 15 aa, Artificial Sequence
  Description of Artificial Sequence: Synthetic peptide
  Seed: SIGKVCRTLLAKSVF
SIGKVVRTMLFKSLF

SEQ ID NO: 261530 - protein, 15 aa, Artificial Sequence
  Description of Artificial Sequence: Synthetic peptide
  Seed: SIGKVCRTLLAKSVF
SIGKVVRTMLFKSMF

SEQ ID NO: 261531 - protein, 15 aa, Artificial Sequence
  Description of Artificial Sequence: Synthetic peptide
  Seed: SIGKVCRTLLAKSVF
SIGKVVRTMLFKSVF

SEQ ID NO: 261532 - protein, 15 aa, Artificial Sequence
  Description of Artificial Sequence: Synthetic peptide
  Seed: SIGKVCRTLLAKSVF
SIGKVVRTMLGKSAF

SEQ ID NO: 261533 - protein, 15 aa, Artificial Sequence
  Description of Artificial Sequence: Synthetic peptide
  Seed: SIGKVCRTLLAKSVF
SIGKVVRTMLGKSIF

SEQ ID NO: 261534 - protein, 15 aa, Artificial Sequence
  Description of Artificial Sequence: Synthetic peptide
  Seed: SIGKVCRTLLAKSVF
SIGKVVRTMLGKSLF

SEQ ID NO: 261535 - protein, 15 aa, Artificial Sequence
  Description of Artificial Sequence: Synthetic peptide
  Seed: SIGKVCRTLLAKSVF
SIGKVVRTMLGKSMF

SEQ ID NO: 261536 - protein, 15 aa, Artificial Sequence
  Description of Artificial Sequence: Synthetic peptide
  Seed: SIGKVCRTLLAKSVF
SIGKVVRTMLGKSTF

SEQ ID NO: 261537 - protein, 15 aa, Artificial Sequence
  Description of Artificial Sequence: Synthetic peptide
  Seed: SIGKVCRTLLAKSVF
SIGKVVRTMLGKSVF

SEQ ID NO: 261538 - protein, 15 aa, Artificial Sequence
  Description of Artificial Sequence: Synthetic peptide
  Seed: SIGKVCRTLLAKSVF
SIGKVVRTMLPKSIF

SEQ ID NO: 261539 - protein, 15 aa, Artificial Sequence
  Description of Artificial Sequence: Synthetic peptide
  Seed: SIGKVCRTLLAKSVF
SIGKVVRTMLPKSLF

SEQ ID NO: 261540 - protein, 15 aa, Artificial Sequence
  Description of Artificial Sequence: Synthetic peptide
  Seed: SIGKVCRTLLAKSVF
SIGKVVRTMLPKSVF

SEQ ID NO: 261541 - protein, 15 aa, Artificial Sequence
  Description of Artificial Sequence: Synthetic peptide
  Seed: SIGKVCRTLLAKSVF
SIGKVVRTMLSKSAF

SEQ ID NO: 261542 - protein, 15 aa, Artificial Sequence
  Description of Artificial Sequence: Synthetic peptide
  Seed: SIGKVCRTLLAKSVF
SIGKVVRTMLSKSIF

SEQ ID NO: 261543 - protein, 15 aa, Artificial Sequence
  Description of Artificial Sequence: Synthetic peptide
  Seed: SIGKVCRTLLAKSVF
SIGKVVRTMLSKSLF

SEQ ID NO: 261544 - protein, 15 aa, Artificial Sequence
  Description of Artificial Sequence: Synthetic peptide
  Seed: SIGKVCRTLLAKSVF
SIGKVVRTMLSKSMF

SEQ ID NO: 261545 - protein, 15 aa, Artificial Sequence
  Description of Artificial Sequence: Synthetic peptide
  Seed: SIGKVCRTLLAKSVF
SIGKVVRTMLSKSTF

SEQ ID NO: 261546 - protein, 15 aa, Artificial Sequence
  Description of Artificial Sequence: Synthetic peptide
  Seed: SIGKVCRTLLAKSVF
SIGKVVRTMLSKSVF

SEQ ID NO: 261547 - protein, 15 aa, Artificial Sequence
  Description of Artificial Sequence: Synthetic peptide
  Seed: SIGKVCRTLLAKSVF
SIGKVVRTMLTKSVF

SEQ ID NO: 261548 - protein, 15 aa, Artificial Sequence
  Description of Artificial Sequence: Synthetic peptide
  Seed: SIGKVCRTLLAKSVF
SIGKVVRTNLFKSIF

SEQ ID NO: 261549 - protein, 15 aa, Artificial Sequence
  Description of Artificial Sequence: Synthetic peptide
  Seed: SIGKVCRTLLAKSVF
SIGKVVRTNLFKSLF

SEQ ID NO: 261550 - protein, 15 aa, Artificial Sequence
  Description of Artificial Sequence: Synthetic peptide
  Seed: SIGKVCRTLLAKSVF
SIGKVVRTNLFKSVF

SEQ ID NO: 261551 - protein, 15 aa, Artificial Sequence
  Description of Artificial Sequence: Synthetic peptide
  Seed: SIGKVCRTLLAKSVF
SIGKVVRTQLFKSIF

SEQ ID NO: 261552 - protein, 15 aa, Artificial Sequence
  Description of Artificial Sequence: Synthetic peptide
  Seed: SIGKVCRTLLAKSVF
SIGKVVRTQLFKSLF

SEQ ID NO: 261553 - protein, 15 aa, Artificial Sequence
  Description of Artificial Sequence: Synthetic peptide
  Seed: SIGKVCRTLLAKSVF
SIGKVVRTQLFKSVF

SEQ ID NO: 261554 - protein, 15 aa, Artificial Sequence
  Description of Artificial Sequence: Synthetic peptide
  Seed: SIGKVCRTLLAKSVF
SIGKVVRTSLAKSIF

SEQ ID NO: 261555 - protein, 15 aa, Artificial Sequence
  Description of Artificial Sequence: Synthetic peptide
  Seed: SIGKVCRTLLAKSVF
SIGKVVRTSLAKSLF

SEQ ID NO: 261556 - protein, 15 aa, Artificial Sequence
  Description of Artificial Sequence: Synthetic peptide
  Seed: SIGKVCRTLLAKSVF
SIGKVVRTSLAKSVF

SEQ ID NO: 261557 - protein, 15 aa, Artificial Sequence
  Description of Artificial Sequence: Synthetic peptide
  Seed: SIGKVCRTLLAKSVF
SIGKVVRTSLFKSAF

SEQ ID NO: 261558 - protein, 15 aa, Artificial Sequence
  Description of Artificial Sequence: Synthetic peptide
  Seed: SIGKVCRTLLAKSVF
SIGKVVRTSLFKSFF

SEQ ID NO: 261559 - protein, 15 aa, Artificial Sequence
  Description of Artificial Sequence: Synthetic peptide
  Seed: SIGKVCRTLLAKSVF
SIGKVVRTSLFKSIF

SEQ ID NO: 261560 - protein, 15 aa, Artificial Sequence
  Description of Artificial Sequence: Synthetic peptide
  Seed: SIGKVCRTLLAKSVF
SIGKVVRTSLFKSLF

SEQ ID NO: 261561 - protein, 15 aa, Artificial Sequence
  Description of Artificial Sequence: Synthetic peptide
  Seed: SIGKVCRTLLAKSVF
SIGKVVRTSLFKSMF

SEQ ID NO: 261562 - protein, 15 aa, Artificial Sequence
  Description of Artificial Sequence: Synthetic peptide
  Seed: SIGKVCRTLLAKSVF
SIGKVVRTSLFKSTF

SEQ ID NO: 261563 - protein, 15 aa, Artificial Sequence
  Description of Artificial Sequence: Synthetic peptide
  Seed: SIGKVCRTLLAKSVF
SIGKVVRTSLFKSVF

SEQ ID NO: 261564 - protein, 15 aa, Artificial Sequence
  Description of Artificial Sequence: Synthetic peptide
  Seed: SIGKVCRTLLAKSVF
SIGKVVRTSLGKSIF

SEQ ID NO: 261565 - protein, 15 aa, Artificial Sequence
  Description of Artificial Sequence: Synthetic peptide
  Seed: SIGKVCRTLLAKSVF
SIGKVVRTSLSKSIF

SEQ ID NO: 261566 - protein, 15 aa, Artificial Sequence
  Description of Artificial Sequence: Synthetic peptide
  Seed: SIGKVCRTLLAKSVF
SIGKVVRTSLSKSLF

SEQ ID NO: 261567 - protein, 15 aa, Artificial Sequence
  Description of Artificial Sequence: Synthetic peptide
  Seed: SIGKVCRTLLAKSVF
SIGKVVRTSLSKSVF

SEQ ID NO: 261568 - protein, 15 aa, Artificial Sequence
  Description of Artificial Sequence: Synthetic peptide
  Seed: SIGKVCRTLLAKSVF
SIGKVVRTTLAKSIF

SEQ ID NO: 261569 - protein, 15 aa, Artificial Sequence
  Description of Artificial Sequence: Synthetic peptide
  Seed: SIGKVCRTLLAKSVF
SIGKVVRTTLAKSLF

SEQ ID NO: 261570 - protein, 15 aa, Artificial Sequence
  Description of Artificial Sequence: Synthetic peptide
  Seed: SIGKVCRTLLAKSVF
SIGKVVRTTLAKSVF

SEQ ID NO: 261571 - protein, 15 aa, Artificial Sequence
  Description of Artificial Sequence: Synthetic peptide
  Seed: SIGKVCRTLLAKSVF
SIGKVVRTTLFKSAF

SEQ ID NO: 261572 - protein, 15 aa, Artificial Sequence
  Description of Artificial Sequence: Synthetic peptide
  Seed: SIGKVCRTLLAKSVF
SIGKVVRTTLFKSFF

SEQ ID NO: 261573 - protein, 15 aa, Artificial Sequence
  Description of Artificial Sequence: Synthetic peptide
  Seed: SIGKVCRTLLAKSVF
SIGKVVRTTLFKSIF

SEQ ID NO: 261574 - protein, 15 aa, Artificial Sequence
  Description of Artificial Sequence: Synthetic peptide
  Seed: SIGKVCRTLLAKSVF
SIGKVVRTTLFKSLF

SEQ ID NO: 261575 - protein, 15 aa, Artificial Sequence
  Description of Artificial Sequence: Synthetic peptide
  Seed: SIGKVCRTLLAKSVF
SIGKVVRTTLFKSMF

SEQ ID NO: 261576 - protein, 15 aa, Artificial Sequence
  Description of Artificial Sequence: Synthetic peptide
  Seed: SIGKVCRTLLAKSVF
SIGKVVRTTLFKSNF

SEQ ID NO: 261577 - protein, 15 aa, Artificial Sequence
  Description of Artificial Sequence: Synthetic peptide
  Seed: SIGKVCRTLLAKSVF
SIGKVVRTTLFKSSF

SEQ ID NO: 261578 - protein, 15 aa, Artificial Sequence
  Description of Artificial Sequence: Synthetic peptide
  Seed: SIGKVCRTLLAKSVF
SIGKVVRTTLFKSTF

SEQ ID NO: 261579 - protein, 15 aa, Artificial Sequence
  Description of Artificial Sequence: Synthetic peptide
  Seed: SIGKVCRTLLAKSVF
SIGKVVRTTLFKSVF

SEQ ID NO: 261580 - protein, 15 aa, Artificial Sequence
  Description of Artificial Sequence: Synthetic peptide
  Seed: SIGKVCRTLLAKSVF
SIGKVVRTTLFKSYF

SEQ ID NO: 261581 - protein, 15 aa, Artificial Sequence
  Description of Artificial Sequence: Synthetic peptide
  Seed: SIGKVCRTLLAKSVF
SIGKVVRTTLGKSIF

SEQ ID NO: 261582 - protein, 15 aa, Artificial Sequence
  Description of Artificial Sequence: Synthetic peptide
  Seed: SIGKVCRTLLAKSVF
SIGKVVRTTLLKSIF

SEQ ID NO: 261583 - protein, 15 aa, Artificial Sequence
  Description of Artificial Sequence: Synthetic peptide
  Seed: SIGKVCRTLLAKSVF
SIGKVVRTTLLKSLF

SEQ ID NO: 261584 - protein, 15 aa, Artificial Sequence
  Description of Artificial Sequence: Synthetic peptide
  Seed: SIGKVCRTLLAKSVF
SIGKVVRTTLSKSIF

SEQ ID NO: 261585 - protein, 15 aa, Artificial Sequence
  Description of Artificial Sequence: Synthetic peptide
  Seed: SIGKVCRTLLAKSVF
SIGKVVRTTLSKSLF

SEQ ID NO: 261586 - protein, 15 aa, Artificial Sequence
  Description of Artificial Sequence: Synthetic peptide
  Seed: SIGKVCRTLLAKSVF
SIGKVVRTTLSKSVF

SEQ ID NO: 261587 - protein, 15 aa, Artificial Sequence
  Description of Artificial Sequence: Synthetic peptide
  Seed: SIGKVCRTLLAKSVF
SIGKVVRTTLYKSIF

SEQ ID NO: 261588 - protein, 15 aa, Artificial Sequence
  Description of Artificial Sequence: Synthetic peptide
  Seed: SIGKVCRTLLAKSVF
SIGKVVRTTLYKSLF

SEQ ID NO: 261589 - protein, 15 aa, Artificial Sequence
  Description of Artificial Sequence: Synthetic peptide
  Seed: SIGKVCRTLLAKSVF
SIGKVVRTTLYKSVF

SEQ ID NO: 261590 - protein, 15 aa, Artificial Sequence
  Description of Artificial Sequence: Synthetic peptide
  Seed: SIGKVCRTLLAKSVF
SIGKVVRTVLAKSIF

SEQ ID NO: 261591 - protein, 15 aa, Artificial Sequence
  Description of Artificial Sequence: Synthetic peptide
  Seed: SIGKVCRTLLAKSVF
SIGKVVRTVLFKSAF

SEQ ID NO: 261592 - protein, 15 aa, Artificial Sequence
  Description of Artificial Sequence: Synthetic peptide
  Seed: SIGKVCRTLLAKSVF
SIGKVVRTVLFKSFF

SEQ ID NO: 261593 - protein, 15 aa, Artificial Sequence
  Description of Artificial Sequence: Synthetic peptide
  Seed: SIGKVCRTLLAKSVF
SIGKVVRTVLFKSIF

SEQ ID NO: 261594 - protein, 15 aa, Artificial Sequence
  Description of Artificial Sequence: Synthetic peptide
  Seed: SIGKVCRTLLAKSVF
SIGKVVRTVLFKSLF

SEQ ID NO: 261595 - protein, 15 aa, Artificial Sequence
  Description of Artificial Sequence: Synthetic peptide
  Seed: SIGKVCRTLLAKSVF
SIGKVVRTVLFKSMF

SEQ ID NO: 261596 - protein, 15 aa, Artificial Sequence
  Description of Artificial Sequence: Synthetic peptide
  Seed: SIGKVCRTLLAKSVF
SIGKVVRTVLFKSTF

SEQ ID NO: 261597 - protein, 15 aa, Artificial Sequence
  Description of Artificial Sequence: Synthetic peptide
  Seed: SIGKVCRTLLAKSVF
SIGKVVRTVLFKSVF

SEQ ID NO: 261598 - protein, 15 aa, Artificial Sequence
  Description of Artificial Sequence: Synthetic peptide
  Seed: SIGKVCRTLLAKSVF
SIGKVVRTVLSKSIF

SEQ ID NO: 261599 - protein, 15 aa, Artificial Sequence
  Description of Artificial Sequence: Synthetic peptide
  Seed: SIGKVCRTLLAKSVF
SIGKVVRTVLSKSLF

SEQ ID NO: 261600 - protein, 15 aa, Artificial Sequence
  Description of Artificial Sequence: Synthetic peptide
  Seed: SIGKVCRTLLAKSVF
SIGKVVRTVLSKSVF

SEQ ID NO: 261601 - protein, 15 aa, Artificial Sequence
  Description of Artificial Sequence: Synthetic peptide
  Seed: SIGKVCRTLLAKSVF
SIGKVVRTVLYKSLF

SEQ ID NO: 261602 - protein, 15 aa, Artificial Sequence
  Description of Artificial Sequence: Synthetic peptide
  Seed: SIGKVCRTLLAKSVF
SIGKVVRTWLFKSVF

SEQ ID NO: 261603 - protein, 15 aa, Artificial Sequence
  Description of Artificial Sequence: Synthetic peptide
  Seed: SIGKVCRTLLAKSVF
SIGKVVRTWLSKSLF

SEQ ID NO: 261604 - protein, 15 aa, Artificial Sequence
  Description of Artificial Sequence: Synthetic peptide
  Seed: SIGKVCRTLLAKSVF
SIGKVVRTWLSKSVF

SEQ ID NO: 261605 - protein, 15 aa, Artificial Sequence
  Description of Artificial Sequence: Synthetic peptide
  Seed: SIGKVCRTLLAKSVF
SIGKVVRTYLAKSIF

SEQ ID NO: 261606 - protein, 15 aa, Artificial Sequence
  Description of Artificial Sequence: Synthetic peptide
  Seed: SIGKVCRTLLAKSVF
SIGKVVRTYLAKSLF

SEQ ID NO: 261607 - protein, 15 aa, Artificial Sequence
  Description of Artificial Sequence: Synthetic peptide
  Seed: SIGKVCRTLLAKSVF
SIGKVVRTYLAKSVF

SEQ ID NO: 261608 - protein, 15 aa, Artificial Sequence
  Description of Artificial Sequence: Synthetic peptide
  Seed: SIGKVCRTLLAKSVF
SIGKVVRTYLFKSIF

SEQ ID NO: 261609 - protein, 15 aa, Artificial Sequence
  Description of Artificial Sequence: Synthetic peptide
  Seed: SIGKVCRTLLAKSVF
SIGKVVRTYLFKSLF

SEQ ID NO: 261610 - protein, 15 aa, Artificial Sequence
  Description of Artificial Sequence: Synthetic peptide
  Seed: SIGKVCRTLLAKSVF
SIGKVVRTYLFKSVF

SEQ ID NO: 261611 - protein, 15 aa, Artificial Sequence
  Description of Artificial Sequence: Synthetic peptide
  Seed: SIGKVCRTLLAKSVF
SIGKVVRTYLGKSIF

SEQ ID NO: 261612 - protein, 15 aa, Artificial Sequence
  Description of Artificial Sequence: Synthetic peptide
  Seed: SIGKVCRTLLAKSVF
SIGKVVRTYLGKSLF

SEQ ID NO: 261613 - protein, 15 aa, Artificial Sequence
  Description of Artificial Sequence: Synthetic peptide
  Seed: SIGKVCRTLLAKSVF
SIGKVVRTYLGKSVF

SEQ ID NO: 261614 - protein, 15 aa, Artificial Sequence
  Description of Artificial Sequence: Synthetic peptide
  Seed: SIGKVCRTLLAKSVF
SIGKVVRTYLNKSAF

SEQ ID NO: 261615 - protein, 15 aa, Artificial Sequence
  Description of Artificial Sequence: Synthetic peptide
  Seed: SIGKVCRTLLAKSVF
SIGKVVRTYLNKSIF

SEQ ID NO: 261616 - protein, 15 aa, Artificial Sequence
  Description of Artificial Sequence: Synthetic peptide
  Seed: SIGKVCRTLLAKSVF
SIGKVVRTYLNKSLF

SEQ ID NO: 261617 - protein, 15 aa, Artificial Sequence
  Description of Artificial Sequence: Synthetic peptide
  Seed: SIGKVCRTLLAKSVF
SIGKVVRTYLNKSVF

SEQ ID NO: 261618 - protein, 15 aa, Artificial Sequence
  Description of Artificial Sequence: Synthetic peptide
  Seed: SIGKVCRTLLAKSVF
SIGKVVRTYLSKSAF

SEQ ID NO: 261619 - protein, 15 aa, Artificial Sequence
  Description of Artificial Sequence: Synthetic peptide
  Seed: SIGKVCRTLLAKSVF
SIGKVVRTYLSKSIF

SEQ ID NO: 261620 - protein, 15 aa, Artificial Sequence
  Description of Artificial Sequence: Synthetic peptide
  Seed: SIGKVCRTLLAKSVF
SIGKVVRTYLSKSLF

SEQ ID NO: 261621 - protein, 15 aa, Artificial Sequence
  Description of Artificial Sequence: Synthetic peptide
  Seed: SIGKVCRTLLAKSVF
SIGKVVRTYLSKSMF

SEQ ID NO: 261622 - protein, 15 aa, Artificial Sequence
  Description of Artificial Sequence: Synthetic peptide
  Seed: SIGKVCRTLLAKSVF
SIGKVVRTYLSKSTF

SEQ ID NO: 261623 - protein, 15 aa, Artificial Sequence
  Description of Artificial Sequence: Synthetic peptide
  Seed: SIGKVCRTLLAKSVF
SIGKVVRTYLSKSVF

SEQ ID NO: 261624 - protein, 15 aa, Artificial Sequence
  Description of Artificial Sequence: Synthetic peptide
  Seed: SIGKVCRTLLAKSVF
SIGKVWRTALAKSAF

SEQ ID NO: 261625 - protein, 15 aa, Artificial Sequence
  Description of Artificial Sequence: Synthetic peptide
  Seed: SIGKVCRTLLAKSVF
SIGKVWRTALAKSIF

SEQ ID NO: 261626 - protein, 15 aa, Artificial Sequence
  Description of Artificial Sequence: Synthetic peptide
  Seed: SIGKVCRTLLAKSVF
SIGKVWRTALAKSLF

SEQ ID NO: 261627 - protein, 15 aa, Artificial Sequence
  Description of Artificial Sequence: Synthetic peptide
  Seed: SIGKVCRTLLAKSVF
SIGKVWRTALAKSMF

SEQ ID NO: 261628 - protein, 15 aa, Artificial Sequence
  Description of Artificial Sequence: Synthetic peptide
  Seed: SIGKVCRTLLAKSVF
SIGKVWRTALAKSNF

SEQ ID NO: 261629 - protein, 15 aa, Artificial Sequence
  Description of Artificial Sequence: Synthetic peptide
  Seed: SIGKVCRTLLAKSVF
SIGKVWRTALAKSSF

SEQ ID NO: 261630 - protein, 15 aa, Artificial Sequence
  Description of Artificial Sequence: Synthetic peptide
  Seed: SIGKVCRTLLAKSVF
SIGKVWRTALAKSTF

SEQ ID NO: 261631 - protein, 15 aa, Artificial Sequence
  Description of Artificial Sequence: Synthetic peptide
  Seed: SIGKVCRTLLAKSVF
SIGKVWRTALAKSVF

SEQ ID NO: 261632 - protein, 15 aa, Artificial Sequence
  Description of Artificial Sequence: Synthetic peptide
  Seed: SIGKVCRTLLAKSVF
SIGKVWRTALFKSFF

SEQ ID NO: 261633 - protein, 15 aa, Artificial Sequence
  Description of Artificial Sequence: Synthetic peptide
  Seed: SIGKVCRTLLAKSVF
SIGKVWRTALFKSIF

SEQ ID NO: 261634 - protein, 15 aa, Artificial Sequence
  Description of Artificial Sequence: Synthetic peptide
  Seed: SIGKVCRTLLAKSVF
SIGKVWRTALFKSLF

SEQ ID NO: 261635 - protein, 15 aa, Artificial Sequence
  Description of Artificial Sequence: Synthetic peptide
  Seed: SIGKVCRTLLAKSVF
SIGKVWRTALFKSMF

SEQ ID NO: 261636 - protein, 15 aa, Artificial Sequence
  Description of Artificial Sequence: Synthetic peptide
  Seed: SIGKVCRTLLAKSVF
SIGKVWRTALFKSVF

SEQ ID NO: 261637 - protein, 15 aa, Artificial Sequence
  Description of Artificial Sequence: Synthetic peptide
  Seed: SIGKVCRTLLAKSVF
SIGKVWRTALGKSAF

SEQ ID NO: 261638 - protein, 15 aa, Artificial Sequence
  Description of Artificial Sequence: Synthetic peptide
  Seed: SIGKVCRTLLAKSVF
SIGKVWRTALGKSIF

SEQ ID NO: 261639 - protein, 15 aa, Artificial Sequence
  Description of Artificial Sequence: Synthetic peptide
  Seed: SIGKVCRTLLAKSVF
SIGKVWRTALGKSLF

SEQ ID NO: 261640 - protein, 15 aa, Artificial Sequence
  Description of Artificial Sequence: Synthetic peptide
  Seed: SIGKVCRTLLAKSVF
SIGKVWRTALGKSMF

SEQ ID NO: 261641 - protein, 15 aa, Artificial Sequence
  Description of Artificial Sequence: Synthetic peptide
  Seed: SIGKVCRTLLAKSVF
SIGKVWRTALGKSVF

SEQ ID NO: 261642 - protein, 15 aa, Artificial Sequence
  Description of Artificial Sequence: Synthetic peptide
  Seed: SIGKVCRTLLAKSVF
SIGKVWRTALPKSIF

SEQ ID NO: 261643 - protein, 15 aa, Artificial Sequence
  Description of Artificial Sequence: Synthetic peptide
  Seed: SIGKVCRTLLAKSVF
SIGKVWRTALPKSLF

SEQ ID NO: 261644 - protein, 15 aa, Artificial Sequence
  Description of Artificial Sequence: Synthetic peptide
  Seed: SIGKVCRTLLAKSVF
SIGKVWRTALPKSVF

SEQ ID NO: 261645 - protein, 15 aa, Artificial Sequence
  Description of Artificial Sequence: Synthetic peptide
  Seed: SIGKVCRTLLAKSVF
SIGKVWRTALSKSAF

SEQ ID NO: 261646 - protein, 15 aa, Artificial Sequence
  Description of Artificial Sequence: Synthetic peptide
  Seed: SIGKVCRTLLAKSVF
SIGKVWRTALSKSFF

SEQ ID NO: 261647 - protein, 15 aa, Artificial Sequence
  Description of Artificial Sequence: Synthetic peptide
  Seed: SIGKVCRTLLAKSVF
SIGKVWRTALSKSIF

SEQ ID NO: 261648 - protein, 15 aa, Artificial Sequence
  Description of Artificial Sequence: Synthetic peptide
  Seed: SIGKVCRTLLAKSVF
SIGKVWRTALSKSLF

SEQ ID NO: 261649 - protein, 15 aa, Artificial Sequence
  Description of Artificial Sequence: Synthetic peptide
  Seed: SIGKVCRTLLAKSVF
SIGKVWRTALSKSMF

SEQ ID NO: 261650 - protein, 15 aa, Artificial Sequence
  Description of Artificial Sequence: Synthetic peptide
  Seed: SIGKVCRTLLAKSVF
SIGKVWRTALSKSTF

SEQ ID NO: 261651 - protein, 15 aa, Artificial Sequence
  Description of Artificial Sequence: Synthetic peptide
  Seed: SIGKVCRTLLAKSVF
SIGKVWRTALSKSVF

SEQ ID NO: 261652 - protein, 15 aa, Artificial Sequence
  Description of Artificial Sequence: Synthetic peptide
  Seed: SIGKVCRTLLAKSVF
SIGKVWRTALTKSIF

SEQ ID NO: 261653 - protein, 15 aa, Artificial Sequence
  Description of Artificial Sequence: Synthetic peptide
  Seed: SIGKVCRTLLAKSVF
SIGKVWRTALTKSLF

SEQ ID NO: 261654 - protein, 15 aa, Artificial Sequence
  Description of Artificial Sequence: Synthetic peptide
  Seed: SIGKVCRTLLAKSVF
SIGKVWRTALTKSNF

SEQ ID NO: 261655 - protein, 15 aa, Artificial Sequence
  Description of Artificial Sequence: Synthetic peptide
  Seed: SIGKVCRTLLAKSVF
SIGKVWRTALTKSVF

SEQ ID NO: 261656 - protein, 15 aa, Artificial Sequence
  Description of Artificial Sequence: Synthetic peptide
  Seed: SIGKVCRTLLAKSVF
SIGKVWRTCLFKSIF

SEQ ID NO: 261657 - protein, 15 aa, Artificial Sequence
  Description of Artificial Sequence: Synthetic peptide
  Seed: SIGKVCRTLLAKSVF
SIGKVWRTCLFKSLF

SEQ ID NO: 261658 - protein, 15 aa, Artificial Sequence
  Description of Artificial Sequence: Synthetic peptide
  Seed: SIGKVCRTLLAKSVF
SIGKVWRTCLFKSVF

SEQ ID NO: 261659 - protein, 15 aa, Artificial Sequence
  Description of Artificial Sequence: Synthetic peptide
  Seed: SIGKVCRTLLAKSVF
SIGKVWRTELFKSAF

SEQ ID NO: 261660 - protein, 15 aa, Artificial Sequence
  Description of Artificial Sequence: Synthetic peptide
  Seed: SIGKVCRTLLAKSVF
SIGKVWRTELFKSFF

SEQ ID NO: 261661 - protein, 15 aa, Artificial Sequence
  Description of Artificial Sequence: Synthetic peptide
  Seed: SIGKVCRTLLAKSVF
SIGKVWRTELFKSIF

SEQ ID NO: 261662 - protein, 15 aa, Artificial Sequence
  Description of Artificial Sequence: Synthetic peptide
  Seed: SIGKVCRTLLAKSVF
SIGKVWRTELFKSLF

SEQ ID NO: 261663 - protein, 15 aa, Artificial Sequence
  Description of Artificial Sequence: Synthetic peptide
  Seed: SIGKVCRTLLAKSVF
SIGKVWRTELFKSMF

SEQ ID NO: 261664 - protein, 15 aa, Artificial Sequence
  Description of Artificial Sequence: Synthetic peptide
  Seed: SIGKVCRTLLAKSVF
SIGKVWRTELFKSVF

SEQ ID NO: 261665 - protein, 15 aa, Artificial Sequence
  Description of Artificial Sequence: Synthetic peptide
  Seed: SIGKVCRTLLAKSVF
SIGKVWRTFLAKSIF

SEQ ID NO: 261666 - protein, 15 aa, Artificial Sequence
  Description of Artificial Sequence: Synthetic peptide
  Seed: SIGKVCRTLLAKSVF
SIGKVWRTFLFKSAF

SEQ ID NO: 261667 - protein, 15 aa, Artificial Sequence
  Description of Artificial Sequence: Synthetic peptide
  Seed: SIGKVCRTLLAKSVF
SIGKVWRTFLFKSFF

SEQ ID NO: 261668 - protein, 15 aa, Artificial Sequence
  Description of Artificial Sequence: Synthetic peptide
  Seed: SIGKVCRTLLAKSVF
SIGKVWRTFLFKSIF

SEQ ID NO: 261669 - protein, 15 aa, Artificial Sequence
  Description of Artificial Sequence: Synthetic peptide
  Seed: SIGKVCRTLLAKSVF
SIGKVWRTFLFKSLF

SEQ ID NO: 261670 - protein, 15 aa, Artificial Sequence
  Description of Artificial Sequence: Synthetic peptide
  Seed: SIGKVCRTLLAKSVF
SIGKVWRTFLFKSMF

SEQ ID NO: 261671 - protein, 15 aa, Artificial Sequence
  Description of Artificial Sequence: Synthetic peptide
  Seed: SIGKVCRTLLAKSVF
SIGKVWRTFLFKSTF

SEQ ID NO: 261672 - protein, 15 aa, Artificial Sequence
  Description of Artificial Sequence: Synthetic peptide
  Seed: SIGKVCRTLLAKSVF
SIGKVWRTFLFKSVF

SEQ ID NO: 261673 - protein, 15 aa, Artificial Sequence
  Description of Artificial Sequence: Synthetic peptide
  Seed: SIGKVCRTLLAKSVF
SIGKVWRTFLLKSIF

SEQ ID NO: 261674 - protein, 15 aa, Artificial Sequence
  Description of Artificial Sequence: Synthetic peptide
  Seed: SIGKVCRTLLAKSVF
SIGKVWRTFLLKSLF

SEQ ID NO: 261675 - protein, 15 aa, Artificial Sequence
  Description of Artificial Sequence: Synthetic peptide
  Seed: SIGKVCRTLLAKSVF
SIGKVWRTFLLKSVF

SEQ ID NO: 261676 - protein, 15 aa, Artificial Sequence
  Description of Artificial Sequence: Synthetic peptide
  Seed: SIGKVCRTLLAKSVF
SIGKVWRTFLYKSIF

SEQ ID NO: 261677 - protein, 15 aa, Artificial Sequence
  Description of Artificial Sequence: Synthetic peptide
  Seed: SIGKVCRTLLAKSVF
SIGKVWRTFLYKSLF

SEQ ID NO: 261678 - protein, 15 aa, Artificial Sequence
  Description of Artificial Sequence: Synthetic peptide
  Seed: SIGKVCRTLLAKSVF
SIGKVWRTFLYKSVF

SEQ ID NO: 261679 - protein, 15 aa, Artificial Sequence
  Description of Artificial Sequence: Synthetic peptide
  Seed: SIGKVCRTLLAKSVF
SIGKVWRTGLAKSIF

SEQ ID NO: 261680 - protein, 15 aa, Artificial Sequence
  Description of Artificial Sequence: Synthetic peptide
  Seed: SIGKVCRTLLAKSVF
SIGKVWRTGLAKSLF

SEQ ID NO: 261681 - protein, 15 aa, Artificial Sequence
  Description of Artificial Sequence: Synthetic peptide
  Seed: SIGKVCRTLLAKSVF
SIGKVWRTGLAKSVF

SEQ ID NO: 261682 - protein, 15 aa, Artificial Sequence
  Description of Artificial Sequence: Synthetic peptide
  Seed: SIGKVCRTLLAKSVF
SIGKVWRTHLAKSIF

SEQ ID NO: 261683 - protein, 15 aa, Artificial Sequence
  Description of Artificial Sequence: Synthetic peptide
  Seed: SIGKVCRTLLAKSVF
SIGKVWRTHLFKSAF

SEQ ID NO: 261684 - protein, 15 aa, Artificial Sequence
  Description of Artificial Sequence: Synthetic peptide
  Seed: SIGKVCRTLLAKSVF
SIGKVWRTHLFKSFF

SEQ ID NO: 261685 - protein, 15 aa, Artificial Sequence
  Description of Artificial Sequence: Synthetic peptide
  Seed: SIGKVCRTLLAKSVF
SIGKVWRTHLFKSIF

SEQ ID NO: 261686 - protein, 15 aa, Artificial Sequence
  Description of Artificial Sequence: Synthetic peptide
  Seed: SIGKVCRTLLAKSVF
SIGKVWRTHLFKSLF

SEQ ID NO: 261687 - protein, 15 aa, Artificial Sequence
  Description of Artificial Sequence: Synthetic peptide
  Seed: SIGKVCRTLLAKSVF
SIGKVWRTHLFKSMF

SEQ ID NO: 261688 - protein, 15 aa, Artificial Sequence
  Description of Artificial Sequence: Synthetic peptide
  Seed: SIGKVCRTLLAKSVF
SIGKVWRTHLFKSVF

SEQ ID NO: 261689 - protein, 15 aa, Artificial Sequence
  Description of Artificial Sequence: Synthetic peptide
  Seed: SIGKVCRTLLAKSVF
SIGKVWRTHLLKSIF

SEQ ID NO: 261690 - protein, 15 aa, Artificial Sequence
  Description of Artificial Sequence: Synthetic peptide
  Seed: SIGKVCRTLLAKSVF
SIGKVWRTHLLKSLF

SEQ ID NO: 261691 - protein, 15 aa, Artificial Sequence
  Description of Artificial Sequence: Synthetic peptide
  Seed: SIGKVCRTLLAKSVF
SIGKVWRTHLLKSVF

SEQ ID NO: 261692 - protein, 15 aa, Artificial Sequence
  Description of Artificial Sequence: Synthetic peptide
  Seed: SIGKVCRTLLAKSVF
SIGKVWRTHLSKSIF

SEQ ID NO: 261693 - protein, 15 aa, Artificial Sequence
  Description of Artificial Sequence: Synthetic peptide
  Seed: SIGKVCRTLLAKSVF
SIGKVWRTILAKSAF

SEQ ID NO: 261694 - protein, 15 aa, Artificial Sequence
  Description of Artificial Sequence: Synthetic peptide
  Seed: SIGKVCRTLLAKSVF
SIGKVWRTILAKSIF

SEQ ID NO: 261695 - protein, 15 aa, Artificial Sequence
  Description of Artificial Sequence: Synthetic peptide
  Seed: SIGKVCRTLLAKSVF
SIGKVWRTILAKSLF

SEQ ID NO: 261696 - protein, 15 aa, Artificial Sequence
  Description of Artificial Sequence: Synthetic peptide
  Seed: SIGKVCRTLLAKSVF
SIGKVWRTILAKSMF

SEQ ID NO: 261697 - protein, 15 aa, Artificial Sequence
  Description of Artificial Sequence: Synthetic peptide
  Seed: SIGKVCRTLLAKSVF
SIGKVWRTILAKSNF

SEQ ID NO: 261698 - protein, 15 aa, Artificial Sequence
  Description of Artificial Sequence: Synthetic peptide
  Seed: SIGKVCRTLLAKSVF
SIGKVWRTILAKSSF

SEQ ID NO: 261699 - protein, 15 aa, Artificial Sequence
  Description of Artificial Sequence: Synthetic peptide
  Seed: SIGKVCRTLLAKSVF
SIGKVWRTILAKSTF

SEQ ID NO: 261700 - protein, 15 aa, Artificial Sequence
  Description of Artificial Sequence: Synthetic peptide
  Seed: SIGKVCRTLLAKSVF
SIGKVWRTILAKSVF

SEQ ID NO: 261701 - protein, 15 aa, Artificial Sequence
  Description of Artificial Sequence: Synthetic peptide
  Seed: SIGKVCRTLLAKSVF
SIGKVWRTILFKSAF

SEQ ID NO: 261702 - protein, 15 aa, Artificial Sequence
  Description of Artificial Sequence: Synthetic peptide
  Seed: SIGKVCRTLLAKSVF
SIGKVWRTILFKSFF

SEQ ID NO: 261703 - protein, 15 aa, Artificial Sequence
  Description of Artificial Sequence: Synthetic peptide
  Seed: SIGKVCRTLLAKSVF
SIGKVWRTILFKSIF

SEQ ID NO: 261704 - protein, 15 aa, Artificial Sequence
  Description of Artificial Sequence: Synthetic peptide
  Seed: SIGKVCRTLLAKSVF
SIGKVWRTILFKSLF

SEQ ID NO: 261705 - protein, 15 aa, Artificial Sequence
  Description of Artificial Sequence: Synthetic peptide
  Seed: SIGKVCRTLLAKSVF
SIGKVWRTILFKSMF

SEQ ID NO: 261706 - protein, 15 aa, Artificial Sequence
  Description of Artificial Sequence: Synthetic peptide
  Seed: SIGKVCRTLLAKSVF
SIGKVWRTILFKSTF

SEQ ID NO: 261707 - protein, 15 aa, Artificial Sequence
  Description of Artificial Sequence: Synthetic peptide
  Seed: SIGKVCRTLLAKSVF
SIGKVWRTILFKSVF

SEQ ID NO: 261708 - protein, 15 aa, Artificial Sequence
  Description of Artificial Sequence: Synthetic peptide
  Seed: SIGKVCRTLLAKSVF
SIGKVWRTILGKSAF

SEQ ID NO: 261709 - protein, 15 aa, Artificial Sequence
  Description of Artificial Sequence: Synthetic peptide
  Seed: SIGKVCRTLLAKSVF
SIGKVWRTILGKSIF

SEQ ID NO: 261710 - protein, 15 aa, Artificial Sequence
  Description of Artificial Sequence: Synthetic peptide
  Seed: SIGKVCRTLLAKSVF
SIGKVWRTILGKSLF

SEQ ID NO: 261711 - protein, 15 aa, Artificial Sequence
  Description of Artificial Sequence: Synthetic peptide
  Seed: SIGKVCRTLLAKSVF
SIGKVWRTILGKSMF

SEQ ID NO: 261712 - protein, 15 aa, Artificial Sequence
  Description of Artificial Sequence: Synthetic peptide
  Seed: SIGKVCRTLLAKSVF
SIGKVWRTILGKSTF

SEQ ID NO: 261713 - protein, 15 aa, Artificial Sequence
  Description of Artificial Sequence: Synthetic peptide
  Seed: SIGKVCRTLLAKSVF
SIGKVWRTILGKSVF

SEQ ID NO: 261714 - protein, 15 aa, Artificial Sequence
  Description of Artificial Sequence: Synthetic peptide
  Seed: SIGKVCRTLLAKSVF
SIGKVWRTILLKSLF

SEQ ID NO: 261715 - protein, 15 aa, Artificial Sequence
  Description of Artificial Sequence: Synthetic peptide
  Seed: SIGKVCRTLLAKSVF
SIGKVWRTILPKSAF

SEQ ID NO: 261716 - protein, 15 aa, Artificial Sequence
  Description of Artificial Sequence: Synthetic peptide
  Seed: SIGKVCRTLLAKSVF
SIGKVWRTILPKSIF

SEQ ID NO: 261717 - protein, 15 aa, Artificial Sequence
  Description of Artificial Sequence: Synthetic peptide
  Seed: SIGKVCRTLLAKSVF
SIGKVWRTILPKSLF

SEQ ID NO: 261718 - protein, 15 aa, Artificial Sequence
  Description of Artificial Sequence: Synthetic peptide
  Seed: SIGKVCRTLLAKSVF
SIGKVWRTILPKSNF

SEQ ID NO: 261719 - protein, 15 aa, Artificial Sequence
  Description of Artificial Sequence: Synthetic peptide
  Seed: SIGKVCRTLLAKSVF
SIGKVWRTILPKSSF

SEQ ID NO: 261720 - protein, 15 aa, Artificial Sequence
  Description of Artificial Sequence: Synthetic peptide
  Seed: SIGKVCRTLLAKSVF
SIGKVWRTILPKSVF

SEQ ID NO: 261721 - protein, 15 aa, Artificial Sequence
  Description of Artificial Sequence: Synthetic peptide
  Seed: SIGKVCRTLLAKSVF
SIGKVWRTILSKSAF

SEQ ID NO: 261722 - protein, 15 aa, Artificial Sequence
  Description of Artificial Sequence: Synthetic peptide
  Seed: SIGKVCRTLLAKSVF
SIGKVWRTILSKSIF

SEQ ID NO: 261723 - protein, 15 aa, Artificial Sequence
  Description of Artificial Sequence: Synthetic peptide
  Seed: SIGKVCRTLLAKSVF
SIGKVWRTILSKSLF

SEQ ID NO: 261724 - protein, 15 aa, Artificial Sequence
  Description of Artificial Sequence: Synthetic peptide
  Seed: SIGKVCRTLLAKSVF
SIGKVWRTILSKSMF

SEQ ID NO: 261725 - protein, 15 aa, Artificial Sequence
  Description of Artificial Sequence: Synthetic peptide
  Seed: SIGKVCRTLLAKSVF
SIGKVWRTILSKSNF

SEQ ID NO: 261726 - protein, 15 aa, Artificial Sequence
  Description of Artificial Sequence: Synthetic peptide
  Seed: SIGKVCRTLLAKSVF
SIGKVWRTILSKSSF

SEQ ID NO: 261727 - protein, 15 aa, Artificial Sequence
  Description of Artificial Sequence: Synthetic peptide
  Seed: SIGKVCRTLLAKSVF
SIGKVWRTILSKSTF

SEQ ID NO: 261728 - protein, 15 aa, Artificial Sequence
  Description of Artificial Sequence: Synthetic peptide
  Seed: SIGKVCRTLLAKSVF
SIGKVWRTILSKSVF

SEQ ID NO: 261729 - protein, 15 aa, Artificial Sequence
  Description of Artificial Sequence: Synthetic peptide
  Seed: SIGKVCRTLLAKSVF
SIGKVWRTILTKSAF

SEQ ID NO: 261730 - protein, 15 aa, Artificial Sequence
  Description of Artificial Sequence: Synthetic peptide
  Seed: SIGKVCRTLLAKSVF
SIGKVWRTILTKSIF

SEQ ID NO: 261731 - protein, 15 aa, Artificial Sequence
  Description of Artificial Sequence: Synthetic peptide
  Seed: SIGKVCRTLLAKSVF
SIGKVWRTILTKSNF

SEQ ID NO: 261732 - protein, 15 aa, Artificial Sequence
  Description of Artificial Sequence: Synthetic peptide
  Seed: SIGKVCRTLLAKSVF
SIGKVWRTILTKSSF

SEQ ID NO: 261733 - protein, 15 aa, Artificial Sequence
  Description of Artificial Sequence: Synthetic peptide
  Seed: SIGKVCRTLLAKSVF
SIGKVWRTILTKSVF

SEQ ID NO: 261734 - protein, 15 aa, Artificial Sequence
  Description of Artificial Sequence: Synthetic peptide
  Seed: SIGKVCRTLLAKSVF
SIGKVWRTILYKSIF

SEQ ID NO: 261735 - protein, 15 aa, Artificial Sequence
  Description of Artificial Sequence: Synthetic peptide
  Seed: SIGKVCRTLLAKSVF
SIGKVWRTILYKSLF

SEQ ID NO: 261736 - protein, 15 aa, Artificial Sequence
  Description of Artificial Sequence: Synthetic peptide
  Seed: SIGKVCRTLLAKSVF
SIGKVWRTILYKSVF

SEQ ID NO: 261737 - protein, 15 aa, Artificial Sequence
  Description of Artificial Sequence: Synthetic peptide
  Seed: SIGKVCRTLLAKSVF
SIGKVWRTKLFKSIF

SEQ ID NO: 261738 - protein, 15 aa, Artificial Sequence
  Description of Artificial Sequence: Synthetic peptide
  Seed: SIGKVCRTLLAKSVF
SIGKVWRTKLFKSLF

SEQ ID NO: 261739 - protein, 15 aa, Artificial Sequence
  Description of Artificial Sequence: Synthetic peptide
  Seed: SIGKVCRTLLAKSVF
SIGKVWRTKLFKSVF

SEQ ID NO: 261740 - protein, 15 aa, Artificial Sequence
  Description of Artificial Sequence: Synthetic peptide
  Seed: SIGKVCRTLLAKSVF
SIGKVWRTLLAKSAF

SEQ ID NO: 261741 - protein, 15 aa, Artificial Sequence
  Description of Artificial Sequence: Synthetic peptide
  Seed: SIGKVCRTLLAKSVF
SIGKVWRTLLAKSCF

SEQ ID NO: 261742 - protein, 15 aa, Artificial Sequence
  Description of Artificial Sequence: Synthetic peptide
  Seed: SIGKVCRTLLAKSVF
SIGKVWRTLLAKSGF

SEQ ID NO: 261743 - protein, 15 aa, Artificial Sequence
  Description of Artificial Sequence: Synthetic peptide
  Seed: SIGKVCRTLLAKSVF
SIGKVWRTLLAKSIF

SEQ ID NO: 261744 - protein, 15 aa, Artificial Sequence
  Description of Artificial Sequence: Synthetic peptide
  Seed: SIGKVCRTLLAKSVF
SIGKVWRTLLAKSLF

SEQ ID NO: 261745 - protein, 15 aa, Artificial Sequence
  Description of Artificial Sequence: Synthetic peptide
  Seed: SIGKVCRTLLAKSVF
SIGKVWRTLLAKSMF

SEQ ID NO: 261746 - protein, 15 aa, Artificial Sequence
  Description of Artificial Sequence: Synthetic peptide
  Seed: SIGKVCRTLLAKSVF
SIGKVWRTLLAKSNF

SEQ ID NO: 261747 - protein, 15 aa, Artificial Sequence
  Description of Artificial Sequence: Synthetic peptide
  Seed: SIGKVCRTLLAKSVF
SIGKVWRTLLAKSSF

SEQ ID NO: 261748 - protein, 15 aa, Artificial Sequence
  Description of Artificial Sequence: Synthetic peptide
  Seed: SIGKVCRTLLAKSVF
SIGKVWRTLLAKSTF

SEQ ID NO: 261749 - protein, 15 aa, Artificial Sequence
  Description of Artificial Sequence: Synthetic peptide
  Seed: SIGKVCRTLLAKSVF
SIGKVWRTLLAKSVF

SEQ ID NO: 261750 - protein, 15 aa, Artificial Sequence
  Description of Artificial Sequence: Synthetic peptide
  Seed: SIGKVCRTLLAKSVF
SIGKVWRTLLFKSFF

SEQ ID NO: 261751 - protein, 15 aa, Artificial Sequence
  Description of Artificial Sequence: Synthetic peptide
  Seed: SIGKVCRTLLAKSVF
SIGKVWRTLLFKSIF

SEQ ID NO: 261752 - protein, 15 aa, Artificial Sequence
  Description of Artificial Sequence: Synthetic peptide
  Seed: SIGKVCRTLLAKSVF
SIGKVWRTLLFKSLF

SEQ ID NO: 261753 - protein, 15 aa, Artificial Sequence
  Description of Artificial Sequence: Synthetic peptide
  Seed: SIGKVCRTLLAKSVF
SIGKVWRTLLFKSMF

SEQ ID NO: 261754 - protein, 15 aa, Artificial Sequence
  Description of Artificial Sequence: Synthetic peptide
  Seed: SIGKVCRTLLAKSVF
SIGKVWRTLLFKSTF

SEQ ID NO: 261755 - protein, 15 aa, Artificial Sequence
  Description of Artificial Sequence: Synthetic peptide
  Seed: SIGKVCRTLLAKSVF
SIGKVWRTLLFKSVF

SEQ ID NO: 261756 - protein, 15 aa, Artificial Sequence
  Description of Artificial Sequence: Synthetic peptide
  Seed: SIGKVCRTLLAKSVF
SIGKVWRTLLGKSAF

SEQ ID NO: 261757 - protein, 15 aa, Artificial Sequence
  Description of Artificial Sequence: Synthetic peptide
  Seed: SIGKVCRTLLAKSVF
SIGKVWRTLLGKSCF

SEQ ID NO: 261758 - protein, 15 aa, Artificial Sequence
  Description of Artificial Sequence: Synthetic peptide
  Seed: SIGKVCRTLLAKSVF
SIGKVWRTLLGKSGF

SEQ ID NO: 261759 - protein, 15 aa, Artificial Sequence
  Description of Artificial Sequence: Synthetic peptide
  Seed: SIGKVCRTLLAKSVF
SIGKVWRTLLGKSIF

SEQ ID NO: 261760 - protein, 15 aa, Artificial Sequence
  Description of Artificial Sequence: Synthetic peptide
  Seed: SIGKVCRTLLAKSVF
SIGKVWRTLLGKSLF

SEQ ID NO: 261761 - protein, 15 aa, Artificial Sequence
  Description of Artificial Sequence: Synthetic peptide
  Seed: SIGKVCRTLLAKSVF
SIGKVWRTLLGKSMF

SEQ ID NO: 261762 - protein, 15 aa, Artificial Sequence
  Description of Artificial Sequence: Synthetic peptide
  Seed: SIGKVCRTLLAKSVF
SIGKVWRTLLGKSSF

SEQ ID NO: 261763 - protein, 15 aa, Artificial Sequence
  Description of Artificial Sequence: Synthetic peptide
  Seed: SIGKVCRTLLAKSVF
SIGKVWRTLLGKSTF

SEQ ID NO: 261764 - protein, 15 aa, Artificial Sequence
  Description of Artificial Sequence: Synthetic peptide
  Seed: SIGKVCRTLLAKSVF
SIGKVWRTLLGKSVF

SEQ ID NO: 261765 - protein, 15 aa, Artificial Sequence
  Description of Artificial Sequence: Synthetic peptide
  Seed: SIGKVCRTLLAKSVF
SIGKVWRTLLNKSAF

SEQ ID NO: 261766 - protein, 15 aa, Artificial Sequence
  Description of Artificial Sequence: Synthetic peptide
  Seed: SIGKVCRTLLAKSVF
SIGKVWRTLLNKSIF

SEQ ID NO: 261767 - protein, 15 aa, Artificial Sequence
  Description of Artificial Sequence: Synthetic peptide
  Seed: SIGKVCRTLLAKSVF
SIGKVWRTLLNKSLF

SEQ ID NO: 261768 - protein, 15 aa, Artificial Sequence
  Description of Artificial Sequence: Synthetic peptide
  Seed: SIGKVCRTLLAKSVF
SIGKVWRTLLNKSVF

SEQ ID NO: 261769 - protein, 15 aa, Artificial Sequence
  Description of Artificial Sequence: Synthetic peptide
  Seed: SIGKVCRTLLAKSVF
SIGKVWRTLLPKSAF

SEQ ID NO: 261770 - protein, 15 aa, Artificial Sequence
  Description of Artificial Sequence: Synthetic peptide
  Seed: SIGKVCRTLLAKSVF
SIGKVWRTLLPKSIF

SEQ ID NO: 261771 - protein, 15 aa, Artificial Sequence
  Description of Artificial Sequence: Synthetic peptide
  Seed: SIGKVCRTLLAKSVF
SIGKVWRTLLPKSLF

SEQ ID NO: 261772 - protein, 15 aa, Artificial Sequence
  Description of Artificial Sequence: Synthetic peptide
  Seed: SIGKVCRTLLAKSVF
SIGKVWRTLLPKSMF

SEQ ID NO: 261773 - protein, 15 aa, Artificial Sequence
  Description of Artificial Sequence: Synthetic peptide
  Seed: SIGKVCRTLLAKSVF
SIGKVWRTLLPKSNF

SEQ ID NO: 261774 - protein, 15 aa, Artificial Sequence
  Description of Artificial Sequence: Synthetic peptide
  Seed: SIGKVCRTLLAKSVF
SIGKVWRTLLPKSSF

SEQ ID NO: 261775 - protein, 15 aa, Artificial Sequence
  Description of Artificial Sequence: Synthetic peptide
  Seed: SIGKVCRTLLAKSVF
SIGKVWRTLLPKSTF

SEQ ID NO: 261776 - protein, 15 aa, Artificial Sequence
  Description of Artificial Sequence: Synthetic peptide
  Seed: SIGKVCRTLLAKSVF
SIGKVWRTLLPKSVF

SEQ ID NO: 261777 - protein, 15 aa, Artificial Sequence
  Description of Artificial Sequence: Synthetic peptide
  Seed: SIGKVCRTLLAKSVF
SIGKVWRTLLSKSAF

SEQ ID NO: 261778 - protein, 15 aa, Artificial Sequence
  Description of Artificial Sequence: Synthetic peptide
  Seed: SIGKVCRTLLAKSVF
SIGKVWRTLLSKSCF

SEQ ID NO: 261779 - protein, 15 aa, Artificial Sequence
  Description of Artificial Sequence: Synthetic peptide
  Seed: SIGKVCRTLLAKSVF
SIGKVWRTLLSKSGF

SEQ ID NO: 261780 - protein, 15 aa, Artificial Sequence
  Description of Artificial Sequence: Synthetic peptide
  Seed: SIGKVCRTLLAKSVF
SIGKVWRTLLSKSIF

SEQ ID NO: 261781 - protein, 15 aa, Artificial Sequence
  Description of Artificial Sequence: Synthetic peptide
  Seed: SIGKVCRTLLAKSVF
SIGKVWRTLLSKSLF

SEQ ID NO: 261782 - protein, 15 aa, Artificial Sequence
  Description of Artificial Sequence: Synthetic peptide
  Seed: SIGKVCRTLLAKSVF
SIGKVWRTLLSKSMF

SEQ ID NO: 261783 - protein, 15 aa, Artificial Sequence
  Description of Artificial Sequence: Synthetic peptide
  Seed: SIGKVCRTLLAKSVF
SIGKVWRTLLSKSNF

SEQ ID NO: 261784 - protein, 15 aa, Artificial Sequence
  Description of Artificial Sequence: Synthetic peptide
  Seed: SIGKVCRTLLAKSVF
SIGKVWRTLLSKSSF

SEQ ID NO: 261785 - protein, 15 aa, Artificial Sequence
  Description of Artificial Sequence: Synthetic peptide
  Seed: SIGKVCRTLLAKSVF
SIGKVWRTLLSKSTF

SEQ ID NO: 261786 - protein, 15 aa, Artificial Sequence
  Description of Artificial Sequence: Synthetic peptide
  Seed: SIGKVCRTLLAKSVF
SIGKVWRTLLSKSVF

SEQ ID NO: 261787 - protein, 15 aa, Artificial Sequence
  Description of Artificial Sequence: Synthetic peptide
  Seed: SIGKVCRTLLAKSVF
SIGKVWRTLLTKSAF

SEQ ID NO: 261788 - protein, 15 aa, Artificial Sequence
  Description of Artificial Sequence: Synthetic peptide
  Seed: SIGKVCRTLLAKSVF
SIGKVWRTLLTKSIF

SEQ ID NO: 261789 - protein, 15 aa, Artificial Sequence
  Description of Artificial Sequence: Synthetic peptide
  Seed: SIGKVCRTLLAKSVF
SIGKVWRTLLTKSLF

SEQ ID NO: 261790 - protein, 15 aa, Artificial Sequence
  Description of Artificial Sequence: Synthetic peptide
  Seed: SIGKVCRTLLAKSVF
SIGKVWRTLLTKSMF

SEQ ID NO: 261791 - protein, 15 aa, Artificial Sequence
  Description of Artificial Sequence: Synthetic peptide
  Seed: SIGKVCRTLLAKSVF
SIGKVWRTLLTKSNF

SEQ ID NO: 261792 - protein, 15 aa, Artificial Sequence
  Description of Artificial Sequence: Synthetic peptide
  Seed: SIGKVCRTLLAKSVF
SIGKVWRTLLTKSSF

SEQ ID NO: 261793 - protein, 15 aa, Artificial Sequence
  Description of Artificial Sequence: Synthetic peptide
  Seed: SIGKVCRTLLAKSVF
SIGKVWRTLLTKSTF

SEQ ID NO: 261794 - protein, 15 aa, Artificial Sequence
  Description of Artificial Sequence: Synthetic peptide
  Seed: SIGKVCRTLLAKSVF
SIGKVWRTLLTKSVF

SEQ ID NO: 261795 - protein, 15 aa, Artificial Sequence
  Description of Artificial Sequence: Synthetic peptide
  Seed: SIGKVCRTLLAKSVF
SIGKVWRTLLVKSAF

SEQ ID NO: 261796 - protein, 15 aa, Artificial Sequence
  Description of Artificial Sequence: Synthetic peptide
  Seed: SIGKVCRTLLAKSVF
SIGKVWRTLLVKSIF

SEQ ID NO: 261797 - protein, 15 aa, Artificial Sequence
  Description of Artificial Sequence: Synthetic peptide
  Seed: SIGKVCRTLLAKSVF
SIGKVWRTLLVKSNF

SEQ ID NO: 261798 - protein, 15 aa, Artificial Sequence
  Description of Artificial Sequence: Synthetic peptide
  Seed: SIGKVCRTLLAKSVF
SIGKVWRTLLVKSSF

SEQ ID NO: 261799 - protein, 15 aa, Artificial Sequence
  Description of Artificial Sequence: Synthetic peptide
  Seed: SIGKVCRTLLAKSVF
SIGKVWRTLLVKSVF

SEQ ID NO: 261800 - protein, 15 aa, Artificial Sequence
  Description of Artificial Sequence: Synthetic peptide
  Seed: SIGKVCRTLLAKSVF
SIGKVWRTMLAKSAF

SEQ ID NO: 261801 - protein, 15 aa, Artificial Sequence
  Description of Artificial Sequence: Synthetic peptide
  Seed: SIGKVCRTLLAKSVF
SIGKVWRTMLAKSCF

SEQ ID NO: 261802 - protein, 15 aa, Artificial Sequence
  Description of Artificial Sequence: Synthetic peptide
  Seed: SIGKVCRTLLAKSVF
SIGKVWRTMLAKSFF

SEQ ID NO: 261803 - protein, 15 aa, Artificial Sequence
  Description of Artificial Sequence: Synthetic peptide
  Seed: SIGKVCRTLLAKSVF
SIGKVWRTMLAKSGF

SEQ ID NO: 261804 - protein, 15 aa, Artificial Sequence
  Description of Artificial Sequence: Synthetic peptide
  Seed: SIGKVCRTLLAKSVF
SIGKVWRTMLAKSIF

SEQ ID NO: 261805 - protein, 15 aa, Artificial Sequence
  Description of Artificial Sequence: Synthetic peptide
  Seed: SIGKVCRTLLAKSVF
SIGKVWRTMLAKSLF

SEQ ID NO: 261806 - protein, 15 aa, Artificial Sequence
  Description of Artificial Sequence: Synthetic peptide
  Seed: SIGKVCRTLLAKSVF
SIGKVWRTMLAKSMF

SEQ ID NO: 261807 - protein, 15 aa, Artificial Sequence
  Description of Artificial Sequence: Synthetic peptide
  Seed: SIGKVCRTLLAKSVF
SIGKVWRTMLAKSNF

SEQ ID NO: 261808 - protein, 15 aa, Artificial Sequence
  Description of Artificial Sequence: Synthetic peptide
  Seed: SIGKVCRTLLAKSVF
SIGKVWRTMLAKSSF

SEQ ID NO: 261809 - protein, 15 aa, Artificial Sequence
  Description of Artificial Sequence: Synthetic peptide
  Seed: SIGKVCRTLLAKSVF
SIGKVWRTMLAKSTF

SEQ ID NO: 261810 - protein, 15 aa, Artificial Sequence
  Description of Artificial Sequence: Synthetic peptide
  Seed: SIGKVCRTLLAKSVF
SIGKVWRTMLAKSVF

SEQ ID NO: 261811 - protein, 15 aa, Artificial Sequence
  Description of Artificial Sequence: Synthetic peptide
  Seed: SIGKVCRTLLAKSVF
SIGKVWRTMLFKSFF

SEQ ID NO: 261812 - protein, 15 aa, Artificial Sequence
  Description of Artificial Sequence: Synthetic peptide
  Seed: SIGKVCRTLLAKSVF
SIGKVWRTMLFKSIF

SEQ ID NO: 261813 - protein, 15 aa, Artificial Sequence
  Description of Artificial Sequence: Synthetic peptide
  Seed: SIGKVCRTLLAKSVF
SIGKVWRTMLFKSLF

SEQ ID NO: 261814 - protein, 15 aa, Artificial Sequence
  Description of Artificial Sequence: Synthetic peptide
  Seed: SIGKVCRTLLAKSVF
SIGKVWRTMLFKSMF

SEQ ID NO: 261815 - protein, 15 aa, Artificial Sequence
  Description of Artificial Sequence: Synthetic peptide
  Seed: SIGKVCRTLLAKSVF
SIGKVWRTMLFKSVF

SEQ ID NO: 261816 - protein, 15 aa, Artificial Sequence
  Description of Artificial Sequence: Synthetic peptide
  Seed: SIGKVCRTLLAKSVF
SIGKVWRTMLGKSAF

SEQ ID NO: 261817 - protein, 15 aa, Artificial Sequence
  Description of Artificial Sequence: Synthetic peptide
  Seed: SIGKVCRTLLAKSVF
SIGKVWRTMLGKSGF

SEQ ID NO: 261818 - protein, 15 aa, Artificial Sequence
  Description of Artificial Sequence: Synthetic peptide
  Seed: SIGKVCRTLLAKSVF
SIGKVWRTMLGKSIF

SEQ ID NO: 261819 - protein, 15 aa, Artificial Sequence
  Description of Artificial Sequence: Synthetic peptide
  Seed: SIGKVCRTLLAKSVF
SIGKVWRTMLGKSLF

SEQ ID NO: 261820 - protein, 15 aa, Artificial Sequence
  Description of Artificial Sequence: Synthetic peptide
  Seed: SIGKVCRTLLAKSVF
SIGKVWRTMLGKSMF

SEQ ID NO: 261821 - protein, 15 aa, Artificial Sequence
  Description of Artificial Sequence: Synthetic peptide
  Seed: SIGKVCRTLLAKSVF
SIGKVWRTMLGKSSF

SEQ ID NO: 261822 - protein, 15 aa, Artificial Sequence
  Description of Artificial Sequence: Synthetic peptide
  Seed: SIGKVCRTLLAKSVF
SIGKVWRTMLGKSTF

SEQ ID NO: 261823 - protein, 15 aa, Artificial Sequence
  Description of Artificial Sequence: Synthetic peptide
  Seed: SIGKVCRTLLAKSVF
SIGKVWRTMLGKSVF

SEQ ID NO: 261824 - protein, 15 aa, Artificial Sequence
  Description of Artificial Sequence: Synthetic peptide
  Seed: SIGKVCRTLLAKSVF
SIGKVWRTMLIKSAF

SEQ ID NO: 261825 - protein, 15 aa, Artificial Sequence
  Description of Artificial Sequence: Synthetic peptide
  Seed: SIGKVCRTLLAKSVF
SIGKVWRTMLIKSNF

SEQ ID NO: 261826 - protein, 15 aa, Artificial Sequence
  Description of Artificial Sequence: Synthetic peptide
  Seed: SIGKVCRTLLAKSVF
SIGKVWRTMLIKSSF

SEQ ID NO: 261827 - protein, 15 aa, Artificial Sequence
  Description of Artificial Sequence: Synthetic peptide
  Seed: SIGKVCRTLLAKSVF
SIGKVWRTMLNKSAF

SEQ ID NO: 261828 - protein, 15 aa, Artificial Sequence
  Description of Artificial Sequence: Synthetic peptide
  Seed: SIGKVCRTLLAKSVF
SIGKVWRTMLNKSIF

SEQ ID NO: 261829 - protein, 15 aa, Artificial Sequence
  Description of Artificial Sequence: Synthetic peptide
  Seed: SIGKVCRTLLAKSVF
SIGKVWRTMLNKSLF

SEQ ID NO: 261830 - protein, 15 aa, Artificial Sequence
  Description of Artificial Sequence: Synthetic peptide
  Seed: SIGKVCRTLLAKSVF
SIGKVWRTMLNKSVF

SEQ ID NO: 261831 - protein, 15 aa, Artificial Sequence
  Description of Artificial Sequence: Synthetic peptide
  Seed: SIGKVCRTLLAKSVF
SIGKVWRTMLPKSAF

SEQ ID NO: 261832 - protein, 15 aa, Artificial Sequence
  Description of Artificial Sequence: Synthetic peptide
  Seed: SIGKVCRTLLAKSVF
SIGKVWRTMLPKSIF

SEQ ID NO: 261833 - protein, 15 aa, Artificial Sequence
  Description of Artificial Sequence: Synthetic peptide
  Seed: SIGKVCRTLLAKSVF
SIGKVWRTMLPKSLF

SEQ ID NO: 261834 - protein, 15 aa, Artificial Sequence
  Description of Artificial Sequence: Synthetic peptide
  Seed: SIGKVCRTLLAKSVF
SIGKVWRTMLPKSMF

SEQ ID NO: 261835 - protein, 15 aa, Artificial Sequence
  Description of Artificial Sequence: Synthetic peptide
  Seed: SIGKVCRTLLAKSVF
SIGKVWRTMLPKSNF

SEQ ID NO: 261836 - protein, 15 aa, Artificial Sequence
  Description of Artificial Sequence: Synthetic peptide
  Seed: SIGKVCRTLLAKSVF
SIGKVWRTMLPKSSF

SEQ ID NO: 261837 - protein, 15 aa, Artificial Sequence
  Description of Artificial Sequence: Synthetic peptide
  Seed: SIGKVCRTLLAKSVF
SIGKVWRTMLPKSTF

SEQ ID NO: 261838 - protein, 15 aa, Artificial Sequence
  Description of Artificial Sequence: Synthetic peptide
  Seed: SIGKVCRTLLAKSVF
SIGKVWRTMLPKSVF

SEQ ID NO: 261839 - protein, 15 aa, Artificial Sequence
  Description of Artificial Sequence: Synthetic peptide
  Seed: SIGKVCRTLLAKSVF
SIGKVWRTMLSKSAF

SEQ ID NO: 261840 - protein, 15 aa, Artificial Sequence
  Description of Artificial Sequence: Synthetic peptide
  Seed: SIGKVCRTLLAKSVF
SIGKVWRTMLSKSGF

SEQ ID NO: 261841 - protein, 15 aa, Artificial Sequence
  Description of Artificial Sequence: Synthetic peptide
  Seed: SIGKVCRTLLAKSVF
SIGKVWRTMLSKSIF

SEQ ID NO: 261842 - protein, 15 aa, Artificial Sequence
  Description of Artificial Sequence: Synthetic peptide
  Seed: SIGKVCRTLLAKSVF
SIGKVWRTMLSKSLF

SEQ ID NO: 261843 - protein, 15 aa, Artificial Sequence
  Description of Artificial Sequence: Synthetic peptide
  Seed: SIGKVCRTLLAKSVF
SIGKVWRTMLSKSMF

SEQ ID NO: 261844 - protein, 15 aa, Artificial Sequence
  Description of Artificial Sequence: Synthetic peptide
  Seed: SIGKVCRTLLAKSVF
SIGKVWRTMLSKSNF

SEQ ID NO: 261845 - protein, 15 aa, Artificial Sequence
  Description of Artificial Sequence: Synthetic peptide
  Seed: SIGKVCRTLLAKSVF
SIGKVWRTMLSKSSF

SEQ ID NO: 261846 - protein, 15 aa, Artificial Sequence
  Description of Artificial Sequence: Synthetic peptide
  Seed: SIGKVCRTLLAKSVF
SIGKVWRTMLSKSTF

SEQ ID NO: 261847 - protein, 15 aa, Artificial Sequence
  Description of Artificial Sequence: Synthetic peptide
  Seed: SIGKVCRTLLAKSVF
SIGKVWRTMLSKSVF

SEQ ID NO: 261848 - protein, 15 aa, Artificial Sequence
  Description of Artificial Sequence: Synthetic peptide
  Seed: SIGKVCRTLLAKSVF
SIGKVWRTMLTKSAF

SEQ ID NO: 261849 - protein, 15 aa, Artificial Sequence
  Description of Artificial Sequence: Synthetic peptide
  Seed: SIGKVCRTLLAKSVF
SIGKVWRTMLTKSIF

SEQ ID NO: 261850 - protein, 15 aa, Artificial Sequence
  Description of Artificial Sequence: Synthetic peptide
  Seed: SIGKVCRTLLAKSVF
SIGKVWRTMLTKSLF

SEQ ID NO: 261851 - protein, 15 aa, Artificial Sequence
  Description of Artificial Sequence: Synthetic peptide
  Seed: SIGKVCRTLLAKSVF
SIGKVWRTMLTKSMF

SEQ ID NO: 261852 - protein, 15 aa, Artificial Sequence
  Description of Artificial Sequence: Synthetic peptide
  Seed: SIGKVCRTLLAKSVF
SIGKVWRTMLTKSNF

SEQ ID NO: 261853 - protein, 15 aa, Artificial Sequence
  Description of Artificial Sequence: Synthetic peptide
  Seed: SIGKVCRTLLAKSVF
SIGKVWRTMLTKSSF

SEQ ID NO: 261854 - protein, 15 aa, Artificial Sequence
  Description of Artificial Sequence: Synthetic peptide
  Seed: SIGKVCRTLLAKSVF
SIGKVWRTMLTKSTF

SEQ ID NO: 261855 - protein, 15 aa, Artificial Sequence
  Description of Artificial Sequence: Synthetic peptide
  Seed: SIGKVCRTLLAKSVF
SIGKVWRTMLTKSVF

SEQ ID NO: 261856 - protein, 15 aa, Artificial Sequence
  Description of Artificial Sequence: Synthetic peptide
  Seed: SIGKVCRTLLAKSVF
SIGKVWRTMLVKSAF

SEQ ID NO: 261857 - protein, 15 aa, Artificial Sequence
  Description of Artificial Sequence: Synthetic peptide
  Seed: SIGKVCRTLLAKSVF
SIGKVWRTMLVKSIF

SEQ ID NO: 261858 - protein, 15 aa, Artificial Sequence
  Description of Artificial Sequence: Synthetic peptide
  Seed: SIGKVCRTLLAKSVF
SIGKVWRTMLVKSLF

SEQ ID NO: 261859 - protein, 15 aa, Artificial Sequence
  Description of Artificial Sequence: Synthetic peptide
  Seed: SIGKVCRTLLAKSVF
SIGKVWRTMLVKSNF

SEQ ID NO: 261860 - protein, 15 aa, Artificial Sequence
  Description of Artificial Sequence: Synthetic peptide
  Seed: SIGKVCRTLLAKSVF
SIGKVWRTMLVKSSF

SEQ ID NO: 261861 - protein, 15 aa, Artificial Sequence
  Description of Artificial Sequence: Synthetic peptide
  Seed: SIGKVCRTLLAKSVF
SIGKVWRTMLVKSTF

SEQ ID NO: 261862 - protein, 15 aa, Artificial Sequence
  Description of Artificial Sequence: Synthetic peptide
  Seed: SIGKVCRTLLAKSVF
SIGKVWRTMLVKSVF

SEQ ID NO: 261863 - protein, 15 aa, Artificial Sequence
  Description of Artificial Sequence: Synthetic peptide
  Seed: SIGKVCRTLLAKSVF
SIGKVWRTNLFKSFF

SEQ ID NO: 261864 - protein, 15 aa, Artificial Sequence
  Description of Artificial Sequence: Synthetic peptide
  Seed: SIGKVCRTLLAKSVF
SIGKVWRTNLFKSIF

SEQ ID NO: 261865 - protein, 15 aa, Artificial Sequence
  Description of Artificial Sequence: Synthetic peptide
  Seed: SIGKVCRTLLAKSVF
SIGKVWRTNLFKSLF

SEQ ID NO: 261866 - protein, 15 aa, Artificial Sequence
  Description of Artificial Sequence: Synthetic peptide
  Seed: SIGKVCRTLLAKSVF
SIGKVWRTNLFKSVF

SEQ ID NO: 261867 - protein, 15 aa, Artificial Sequence
  Description of Artificial Sequence: Synthetic peptide
  Seed: SIGKVCRTLLAKSVF
SIGKVWRTQLAKSAF

SEQ ID NO: 261868 - protein, 15 aa, Artificial Sequence
  Description of Artificial Sequence: Synthetic peptide
  Seed: SIGKVCRTLLAKSVF
SIGKVWRTQLAKSIF

SEQ ID NO: 261869 - protein, 15 aa, Artificial Sequence
  Description of Artificial Sequence: Synthetic peptide
  Seed: SIGKVCRTLLAKSVF
SIGKVWRTQLAKSLF

SEQ ID NO: 261870 - protein, 15 aa, Artificial Sequence
  Description of Artificial Sequence: Synthetic peptide
  Seed: SIGKVCRTLLAKSVF
SIGKVWRTQLAKSVF

SEQ ID NO: 261871 - protein, 15 aa, Artificial Sequence
  Description of Artificial Sequence: Synthetic peptide
  Seed: SIGKVCRTLLAKSVF
SIGKVWRTQLFKSFF

SEQ ID NO: 261872 - protein, 15 aa, Artificial Sequence
  Description of Artificial Sequence: Synthetic peptide
  Seed: SIGKVCRTLLAKSVF
SIGKVWRTQLFKSIF

SEQ ID NO: 261873 - protein, 15 aa, Artificial Sequence
  Description of Artificial Sequence: Synthetic peptide
  Seed: SIGKVCRTLLAKSVF
SIGKVWRTQLFKSLF

SEQ ID NO: 261874 - protein, 15 aa, Artificial Sequence
  Description of Artificial Sequence: Synthetic peptide
  Seed: SIGKVCRTLLAKSVF
SIGKVWRTQLFKSMF

SEQ ID NO: 261875 - protein, 15 aa, Artificial Sequence
  Description of Artificial Sequence: Synthetic peptide
  Seed: SIGKVCRTLLAKSVF
SIGKVWRTQLFKSVF

SEQ ID NO: 261876 - protein, 15 aa, Artificial Sequence
  Description of Artificial Sequence: Synthetic peptide
  Seed: SIGKVCRTLLAKSVF
SIGKVWRTQLGKSIF

SEQ ID NO: 261877 - protein, 15 aa, Artificial Sequence
  Description of Artificial Sequence: Synthetic peptide
  Seed: SIGKVCRTLLAKSVF
SIGKVWRTQLGKSLF

SEQ ID NO: 261878 - protein, 15 aa, Artificial Sequence
  Description of Artificial Sequence: Synthetic peptide
  Seed: SIGKVCRTLLAKSVF
SIGKVWRTQLGKSVF

SEQ ID NO: 261879 - protein, 15 aa, Artificial Sequence
  Description of Artificial Sequence: Synthetic peptide
  Seed: SIGKVCRTLLAKSVF
SIGKVWRTQLSKSIF

SEQ ID NO: 261880 - protein, 15 aa, Artificial Sequence
  Description of Artificial Sequence: Synthetic peptide
  Seed: SIGKVCRTLLAKSVF
SIGKVWRTQLSKSLF

SEQ ID NO: 261881 - protein, 15 aa, Artificial Sequence
  Description of Artificial Sequence: Synthetic peptide
  Seed: SIGKVCRTLLAKSVF
SIGKVWRTQLSKSVF

SEQ ID NO: 261882 - protein, 15 aa, Artificial Sequence
  Description of Artificial Sequence: Synthetic peptide
  Seed: SIGKVCRTLLAKSVF
SIGKVWRTRLFKSIF

SEQ ID NO: 261883 - protein, 15 aa, Artificial Sequence
  Description of Artificial Sequence: Synthetic peptide
  Seed: SIGKVCRTLLAKSVF
SIGKVWRTRLFKSLF

SEQ ID NO: 261884 - protein, 15 aa, Artificial Sequence
  Description of Artificial Sequence: Synthetic peptide
  Seed: SIGKVCRTLLAKSVF
SIGKVWRTSLAKSAF

SEQ ID NO: 261885 - protein, 15 aa, Artificial Sequence
  Description of Artificial Sequence: Synthetic peptide
  Seed: SIGKVCRTLLAKSVF
SIGKVWRTSLAKSFF

SEQ ID NO: 261886 - protein, 15 aa, Artificial Sequence
  Description of Artificial Sequence: Synthetic peptide
  Seed: SIGKVCRTLLAKSVF
SIGKVWRTSLAKSIF

SEQ ID NO: 261887 - protein, 15 aa, Artificial Sequence
  Description of Artificial Sequence: Synthetic peptide
  Seed: SIGKVCRTLLAKSVF
SIGKVWRTSLAKSLF

SEQ ID NO: 261888 - protein, 15 aa, Artificial Sequence
  Description of Artificial Sequence: Synthetic peptide
  Seed: SIGKVCRTLLAKSVF
SIGKVWRTSLAKSMF

SEQ ID NO: 261889 - protein, 15 aa, Artificial Sequence
  Description of Artificial Sequence: Synthetic peptide
  Seed: SIGKVCRTLLAKSVF
SIGKVWRTSLAKSVF

SEQ ID NO: 261890 - protein, 15 aa, Artificial Sequence
  Description of Artificial Sequence: Synthetic peptide
  Seed: SIGKVCRTLLAKSVF
SIGKVWRTSLFKSAF

SEQ ID NO: 261891 - protein, 15 aa, Artificial Sequence
  Description of Artificial Sequence: Synthetic peptide
  Seed: SIGKVCRTLLAKSVF
SIGKVWRTSLFKSFF

SEQ ID NO: 261892 - protein, 15 aa, Artificial Sequence
  Description of Artificial Sequence: Synthetic peptide
  Seed: SIGKVCRTLLAKSVF
SIGKVWRTSLFKSIF

SEQ ID NO: 261893 - protein, 15 aa, Artificial Sequence
  Description of Artificial Sequence: Synthetic peptide
  Seed: SIGKVCRTLLAKSVF
SIGKVWRTSLFKSLF

SEQ ID NO: 261894 - protein, 15 aa, Artificial Sequence
  Description of Artificial Sequence: Synthetic peptide
  Seed: SIGKVCRTLLAKSVF
SIGKVWRTSLFKSMF

SEQ ID NO: 261895 - protein, 15 aa, Artificial Sequence
  Description of Artificial Sequence: Synthetic peptide
  Seed: SIGKVCRTLLAKSVF
SIGKVWRTSLFKSSF

SEQ ID NO: 261896 - protein, 15 aa, Artificial Sequence
  Description of Artificial Sequence: Synthetic peptide
  Seed: SIGKVCRTLLAKSVF
SIGKVWRTSLFKSTF

SEQ ID NO: 261897 - protein, 15 aa, Artificial Sequence
  Description of Artificial Sequence: Synthetic peptide
  Seed: SIGKVCRTLLAKSVF
SIGKVWRTSLFKSVF

SEQ ID NO: 261898 - protein, 15 aa, Artificial Sequence
  Description of Artificial Sequence: Synthetic peptide
  Seed: SIGKVCRTLLAKSVF
SIGKVWRTSLFKSYF

SEQ ID NO: 261899 - protein, 15 aa, Artificial Sequence
  Description of Artificial Sequence: Synthetic peptide
  Seed: SIGKVCRTLLAKSVF
SIGKVWRTSLGKSIF

SEQ ID NO: 261900 - protein, 15 aa, Artificial Sequence
  Description of Artificial Sequence: Synthetic peptide
  Seed: SIGKVCRTLLAKSVF
SIGKVWRTSLGKSLF

SEQ ID NO: 261901 - protein, 15 aa, Artificial Sequence
  Description of Artificial Sequence: Synthetic peptide
  Seed: SIGKVCRTLLAKSVF
SIGKVWRTSLGKSVF

SEQ ID NO: 261902 - protein, 15 aa, Artificial Sequence
  Description of Artificial Sequence: Synthetic peptide
  Seed: SIGKVCRTLLAKSVF
SIGKVWRTSLLKSIF

SEQ ID NO: 261903 - protein, 15 aa, Artificial Sequence
  Description of Artificial Sequence: Synthetic peptide
  Seed: SIGKVCRTLLAKSVF
SIGKVWRTSLLKSLF

SEQ ID NO: 261904 - protein, 15 aa, Artificial Sequence
  Description of Artificial Sequence: Synthetic peptide
  Seed: SIGKVCRTLLAKSVF
SIGKVWRTSLLKSVF

SEQ ID NO: 261905 - protein, 15 aa, Artificial Sequence
  Description of Artificial Sequence: Synthetic peptide
  Seed: SIGKVCRTLLAKSVF
SIGKVWRTSLNKSIF

SEQ ID NO: 261906 - protein, 15 aa, Artificial Sequence
  Description of Artificial Sequence: Synthetic peptide
  Seed: SIGKVCRTLLAKSVF
SIGKVWRTSLPKSIF

SEQ ID NO: 261907 - protein, 15 aa, Artificial Sequence
  Description of Artificial Sequence: Synthetic peptide
  Seed: SIGKVCRTLLAKSVF
SIGKVWRTSLSKSFF

SEQ ID NO: 261908 - protein, 15 aa, Artificial Sequence
  Description of Artificial Sequence: Synthetic peptide
  Seed: SIGKVCRTLLAKSVF
SIGKVWRTSLSKSIF

SEQ ID NO: 261909 - protein, 15 aa, Artificial Sequence
  Description of Artificial Sequence: Synthetic peptide
  Seed: SIGKVCRTLLAKSVF
SIGKVWRTSLSKSLF

SEQ ID NO: 261910 - protein, 15 aa, Artificial Sequence
  Description of Artificial Sequence: Synthetic peptide
  Seed: SIGKVCRTLLAKSVF
SIGKVWRTSLSKSMF

SEQ ID NO: 261911 - protein, 15 aa, Artificial Sequence
  Description of Artificial Sequence: Synthetic peptide
  Seed: SIGKVCRTLLAKSVF
SIGKVWRTSLSKSVF

SEQ ID NO: 261912 - protein, 15 aa, Artificial Sequence
  Description of Artificial Sequence: Synthetic peptide
  Seed: SIGKVCRTLLAKSVF
SIGKVWRTSLTKSIF

SEQ ID NO: 261913 - protein, 15 aa, Artificial Sequence
  Description of Artificial Sequence: Synthetic peptide
  Seed: SIGKVCRTLLAKSVF
SIGKVWRTSLTKSLF

SEQ ID NO: 261914 - protein, 15 aa, Artificial Sequence
  Description of Artificial Sequence: Synthetic peptide
  Seed: SIGKVCRTLLAKSVF
SIGKVWRTSLTKSVF

SEQ ID NO: 261915 - protein, 15 aa, Artificial Sequence
  Description of Artificial Sequence: Synthetic peptide
  Seed: SIGKVCRTLLAKSVF
SIGKVWRTSLYKSLF

SEQ ID NO: 261916 - protein, 15 aa, Artificial Sequence
  Description of Artificial Sequence: Synthetic peptide
  Seed: SIGKVCRTLLAKSVF
SIGKVWRTTLAKSFF

SEQ ID NO: 261917 - protein, 15 aa, Artificial Sequence
  Description of Artificial Sequence: Synthetic peptide
  Seed: SIGKVCRTLLAKSVF
SIGKVWRTTLAKSIF

SEQ ID NO: 261918 - protein, 15 aa, Artificial Sequence
  Description of Artificial Sequence: Synthetic peptide
  Seed: SIGKVCRTLLAKSVF
SIGKVWRTTLAKSLF

SEQ ID NO: 261919 - protein, 15 aa, Artificial Sequence
  Description of Artificial Sequence: Synthetic peptide
  Seed: SIGKVCRTLLAKSVF
SIGKVWRTTLAKSMF

SEQ ID NO: 261920 - protein, 15 aa, Artificial Sequence
  Description of Artificial Sequence: Synthetic peptide
  Seed: SIGKVCRTLLAKSVF
SIGKVWRTTLAKSVF

SEQ ID NO: 261921 - protein, 15 aa, Artificial Sequence
  Description of Artificial Sequence: Synthetic peptide
  Seed: SIGKVCRTLLAKSVF
SIGKVWRTTLFKSAF

SEQ ID NO: 261922 - protein, 15 aa, Artificial Sequence
  Description of Artificial Sequence: Synthetic peptide
  Seed: SIGKVCRTLLAKSVF
SIGKVWRTTLFKSEF

SEQ ID NO: 261923 - protein, 15 aa, Artificial Sequence
  Description of Artificial Sequence: Synthetic peptide
  Seed: SIGKVCRTLLAKSVF
SIGKVWRTTLFKSFF

SEQ ID NO: 261924 - protein, 15 aa, Artificial Sequence
  Description of Artificial Sequence: Synthetic peptide
  Seed: SIGKVCRTLLAKSVF
SIGKVWRTTLFKSIF

SEQ ID NO: 261925 - protein, 15 aa, Artificial Sequence
  Description of Artificial Sequence: Synthetic peptide
  Seed: SIGKVCRTLLAKSVF
SIGKVWRTTLFKSLF

SEQ ID NO: 261926 - protein, 15 aa, Artificial Sequence
  Description of Artificial Sequence: Synthetic peptide
  Seed: SIGKVCRTLLAKSVF
SIGKVWRTTLFKSMF

SEQ ID NO: 261927 - protein, 15 aa, Artificial Sequence
  Description of Artificial Sequence: Synthetic peptide
  Seed: SIGKVCRTLLAKSVF
SIGKVWRTTLFKSNF

SEQ ID NO: 261928 - protein, 15 aa, Artificial Sequence
  Description of Artificial Sequence: Synthetic peptide
  Seed: SIGKVCRTLLAKSVF
SIGKVWRTTLFKSSF

SEQ ID NO: 261929 - protein, 15 aa, Artificial Sequence
  Description of Artificial Sequence: Synthetic peptide
  Seed: SIGKVCRTLLAKSVF
SIGKVWRTTLFKSTF

SEQ ID NO: 261930 - protein, 15 aa, Artificial Sequence
  Description of Artificial Sequence: Synthetic peptide
  Seed: SIGKVCRTLLAKSVF
SIGKVWRTTLFKSVF

SEQ ID NO: 261931 - protein, 15 aa, Artificial Sequence
  Description of Artificial Sequence: Synthetic peptide
  Seed: SIGKVCRTLLAKSVF
SIGKVWRTTLFKSYF

SEQ ID NO: 261932 - protein, 15 aa, Artificial Sequence
  Description of Artificial Sequence: Synthetic peptide
  Seed: SIGKVCRTLLAKSVF
SIGKVWRTTLGKSIF

SEQ ID NO: 261933 - protein, 15 aa, Artificial Sequence
  Description of Artificial Sequence: Synthetic peptide
  Seed: SIGKVCRTLLAKSVF
SIGKVWRTTLGKSLF

SEQ ID NO: 261934 - protein, 15 aa, Artificial Sequence
  Description of Artificial Sequence: Synthetic peptide
  Seed: SIGKVCRTLLAKSVF
SIGKVWRTTLGKSVF

SEQ ID NO: 261935 - protein, 15 aa, Artificial Sequence
  Description of Artificial Sequence: Synthetic peptide
  Seed: SIGKVCRTLLAKSVF
SIGKVWRTTLLKSFF

SEQ ID NO: 261936 - protein, 15 aa, Artificial Sequence
  Description of Artificial Sequence: Synthetic peptide
  Seed: SIGKVCRTLLAKSVF
SIGKVWRTTLLKSIF

SEQ ID NO: 261937 - protein, 15 aa, Artificial Sequence
  Description of Artificial Sequence: Synthetic peptide
  Seed: SIGKVCRTLLAKSVF
SIGKVWRTTLLKSLF

SEQ ID NO: 261938 - protein, 15 aa, Artificial Sequence
  Description of Artificial Sequence: Synthetic peptide
  Seed: SIGKVCRTLLAKSVF
SIGKVWRTTLLKSVF

SEQ ID NO: 261939 - protein, 15 aa, Artificial Sequence
  Description of Artificial Sequence: Synthetic peptide
  Seed: SIGKVCRTLLAKSVF
SIGKVWRTTLNKSIF

SEQ ID NO: 261940 - protein, 15 aa, Artificial Sequence
  Description of Artificial Sequence: Synthetic peptide
  Seed: SIGKVCRTLLAKSVF
SIGKVWRTTLPKSIF

SEQ ID NO: 261941 - protein, 15 aa, Artificial Sequence
  Description of Artificial Sequence: Synthetic peptide
  Seed: SIGKVCRTLLAKSVF
SIGKVWRTTLPKSLF

SEQ ID NO: 261942 - protein, 15 aa, Artificial Sequence
  Description of Artificial Sequence: Synthetic peptide
  Seed: SIGKVCRTLLAKSVF
SIGKVWRTTLPKSVF

SEQ ID NO: 261943 - protein, 15 aa, Artificial Sequence
  Description of Artificial Sequence: Synthetic peptide
  Seed: SIGKVCRTLLAKSVF
SIGKVWRTTLSKSFF

SEQ ID NO: 261944 - protein, 15 aa, Artificial Sequence
  Description of Artificial Sequence: Synthetic peptide
  Seed: SIGKVCRTLLAKSVF
SIGKVWRTTLSKSIF

SEQ ID NO: 261945 - protein, 15 aa, Artificial Sequence
  Description of Artificial Sequence: Synthetic peptide
  Seed: SIGKVCRTLLAKSVF
SIGKVWRTTLSKSLF

SEQ ID NO: 261946 - protein, 15 aa, Artificial Sequence
  Description of Artificial Sequence: Synthetic peptide
  Seed: SIGKVCRTLLAKSVF
SIGKVWRTTLSKSMF

SEQ ID NO: 261947 - protein, 15 aa, Artificial Sequence
  Description of Artificial Sequence: Synthetic peptide
  Seed: SIGKVCRTLLAKSVF
SIGKVWRTTLSKSVF

SEQ ID NO: 261948 - protein, 15 aa, Artificial Sequence
  Description of Artificial Sequence: Synthetic peptide
  Seed: SIGKVCRTLLAKSVF
SIGKVWRTTLTKSIF

SEQ ID NO: 261949 - protein, 15 aa, Artificial Sequence
  Description of Artificial Sequence: Synthetic peptide
  Seed: SIGKVCRTLLAKSVF
SIGKVWRTTLTKSLF

SEQ ID NO: 261950 - protein, 15 aa, Artificial Sequence
  Description of Artificial Sequence: Synthetic peptide
  Seed: SIGKVCRTLLAKSVF
SIGKVWRTTLTKSVF

SEQ ID NO: 261951 - protein, 15 aa, Artificial Sequence
  Description of Artificial Sequence: Synthetic peptide
  Seed: SIGKVCRTLLAKSVF
SIGKVWRTTLVKSIF

SEQ ID NO: 261952 - protein, 15 aa, Artificial Sequence
  Description of Artificial Sequence: Synthetic peptide
  Seed: SIGKVCRTLLAKSVF
SIGKVWRTTLYKSIF

SEQ ID NO: 261953 - protein, 15 aa, Artificial Sequence
  Description of Artificial Sequence: Synthetic peptide
  Seed: SIGKVCRTLLAKSVF
SIGKVWRTTLYKSLF

SEQ ID NO: 261954 - protein, 15 aa, Artificial Sequence
  Description of Artificial Sequence: Synthetic peptide
  Seed: SIGKVCRTLLAKSVF
SIGKVWRTTLYKSVF

SEQ ID NO: 261955 - protein, 15 aa, Artificial Sequence
  Description of Artificial Sequence: Synthetic peptide
  Seed: SIGKVCRTLLAKSVF
SIGKVWRTVLAKSAF

SEQ ID NO: 261956 - protein, 15 aa, Artificial Sequence
  Description of Artificial Sequence: Synthetic peptide
  Seed: SIGKVCRTLLAKSVF
SIGKVWRTVLAKSIF

SEQ ID NO: 261957 - protein, 15 aa, Artificial Sequence
  Description of Artificial Sequence: Synthetic peptide
  Seed: SIGKVCRTLLAKSVF
SIGKVWRTVLAKSLF

SEQ ID NO: 261958 - protein, 15 aa, Artificial Sequence
  Description of Artificial Sequence: Synthetic peptide
  Seed: SIGKVCRTLLAKSVF
SIGKVWRTVLAKSVF

SEQ ID NO: 261959 - protein, 15 aa, Artificial Sequence
  Description of Artificial Sequence: Synthetic peptide
  Seed: SIGKVCRTLLAKSVF
SIGKVWRTVLFKSAF

SEQ ID NO: 261960 - protein, 15 aa, Artificial Sequence
  Description of Artificial Sequence: Synthetic peptide
  Seed: SIGKVCRTLLAKSVF
SIGKVWRTVLFKSFF

SEQ ID NO: 261961 - protein, 15 aa, Artificial Sequence
  Description of Artificial Sequence: Synthetic peptide
  Seed: SIGKVCRTLLAKSVF
SIGKVWRTVLFKSIF

SEQ ID NO: 261962 - protein, 15 aa, Artificial Sequence
  Description of Artificial Sequence: Synthetic peptide
  Seed: SIGKVCRTLLAKSVF
SIGKVWRTVLFKSLF

SEQ ID NO: 261963 - protein, 15 aa, Artificial Sequence
  Description of Artificial Sequence: Synthetic peptide
  Seed: SIGKVCRTLLAKSVF
SIGKVWRTVLFKSMF

SEQ ID NO: 261964 - protein, 15 aa, Artificial Sequence
  Description of Artificial Sequence: Synthetic peptide
  Seed: SIGKVCRTLLAKSVF
SIGKVWRTVLFKSNF

SEQ ID NO: 261965 - protein, 15 aa, Artificial Sequence
  Description of Artificial Sequence: Synthetic peptide
  Seed: SIGKVCRTLLAKSVF
SIGKVWRTVLFKSSF

SEQ ID NO: 261966 - protein, 15 aa, Artificial Sequence
  Description of Artificial Sequence: Synthetic peptide
  Seed: SIGKVCRTLLAKSVF
SIGKVWRTVLFKSTF

SEQ ID NO: 261967 - protein, 15 aa, Artificial Sequence
  Description of Artificial Sequence: Synthetic peptide
  Seed: SIGKVCRTLLAKSVF
SIGKVWRTVLFKSVF

SEQ ID NO: 261968 - protein, 15 aa, Artificial Sequence
  Description of Artificial Sequence: Synthetic peptide
  Seed: SIGKVCRTLLAKSVF
SIGKVWRTVLFKSYF

SEQ ID NO: 261969 - protein, 15 aa, Artificial Sequence
  Description of Artificial Sequence: Synthetic peptide
  Seed: SIGKVCRTLLAKSVF
SIGKVWRTVLGKSAF

SEQ ID NO: 261970 - protein, 15 aa, Artificial Sequence
  Description of Artificial Sequence: Synthetic peptide
  Seed: SIGKVCRTLLAKSVF
SIGKVWRTVLGKSIF

SEQ ID NO: 261971 - protein, 15 aa, Artificial Sequence
  Description of Artificial Sequence: Synthetic peptide
  Seed: SIGKVCRTLLAKSVF
SIGKVWRTVLGKSLF

SEQ ID NO: 261972 - protein, 15 aa, Artificial Sequence
  Description of Artificial Sequence: Synthetic peptide
  Seed: SIGKVCRTLLAKSVF
SIGKVWRTVLGKSVF

SEQ ID NO: 261973 - protein, 15 aa, Artificial Sequence
  Description of Artificial Sequence: Synthetic peptide
  Seed: SIGKVCRTLLAKSVF
SIGKVWRTVLPKSIF

SEQ ID NO: 261974 - protein, 15 aa, Artificial Sequence
  Description of Artificial Sequence: Synthetic peptide
  Seed: SIGKVCRTLLAKSVF
SIGKVWRTVLSKSAF

SEQ ID NO: 261975 - protein, 15 aa, Artificial Sequence
  Description of Artificial Sequence: Synthetic peptide
  Seed: SIGKVCRTLLAKSVF
SIGKVWRTVLSKSFF

SEQ ID NO: 261976 - protein, 15 aa, Artificial Sequence
  Description of Artificial Sequence: Synthetic peptide
  Seed: SIGKVCRTLLAKSVF
SIGKVWRTVLSKSIF

SEQ ID NO: 261977 - protein, 15 aa, Artificial Sequence
  Description of Artificial Sequence: Synthetic peptide
  Seed: SIGKVCRTLLAKSVF
SIGKVWRTVLSKSLF

SEQ ID NO: 261978 - protein, 15 aa, Artificial Sequence
  Description of Artificial Sequence: Synthetic peptide
  Seed: SIGKVCRTLLAKSVF
SIGKVWRTVLSKSMF

SEQ ID NO: 261979 - protein, 15 aa, Artificial Sequence
  Description of Artificial Sequence: Synthetic peptide
  Seed: SIGKVCRTLLAKSVF
SIGKVWRTVLSKSVF

SEQ ID NO: 261980 - protein, 15 aa, Artificial Sequence
  Description of Artificial Sequence: Synthetic peptide
  Seed: SIGKVCRTLLAKSVF
SIGKVWRTVLTKSIF

SEQ ID NO: 261981 - protein, 15 aa, Artificial Sequence
  Description of Artificial Sequence: Synthetic peptide
  Seed: SIGKVCRTLLAKSVF
SIGKVWRTVLYKSIF

SEQ ID NO: 261982 - protein, 15 aa, Artificial Sequence
  Description of Artificial Sequence: Synthetic peptide
  Seed: SIGKVCRTLLAKSVF
SIGKVWRTVLYKSLF

SEQ ID NO: 261983 - protein, 15 aa, Artificial Sequence
  Description of Artificial Sequence: Synthetic peptide
  Seed: SIGKVCRTLLAKSVF
SIGKVWRTVLYKSVF

SEQ ID NO: 261984 - protein, 15 aa, Artificial Sequence
  Description of Artificial Sequence: Synthetic peptide
  Seed: SIGKVCRTLLAKSVF
SIGKVWRTWLFKSIF

SEQ ID NO: 261985 - protein, 15 aa, Artificial Sequence
  Description of Artificial Sequence: Synthetic peptide
  Seed: SIGKVCRTLLAKSVF
SIGKVWRTWLFKSLF

SEQ ID NO: 261986 - protein, 15 aa, Artificial Sequence
  Description of Artificial Sequence: Synthetic peptide
  Seed: SIGKVCRTLLAKSVF
SIGKVWRTWLFKSVF

SEQ ID NO: 261987 - protein, 15 aa, Artificial Sequence
  Description of Artificial Sequence: Synthetic peptide
  Seed: SIGKVCRTLLAKSVF
SIGKVWRTYLFKSIF

SEQ ID NO: 261988 - protein, 15 aa, Artificial Sequence
  Description of Artificial Sequence: Synthetic peptide
  Seed: SIGKVCRTLLAKSVF
SIGKVWRTYLFKSLF

SEQ ID NO: 261989 - protein, 15 aa, Artificial Sequence
  Description of Artificial Sequence: Synthetic peptide
  Seed: SIGKVCRTLLAKSVF
SIGKVWRTYLFKSVF

SEQ ID NO: 261990 - protein, 15 aa, Artificial Sequence
  Description of Artificial Sequence: Synthetic peptide
  Seed: SIGKVCRTLLAKSVF
SIGKVYRTALAKSAF

SEQ ID NO: 261991 - protein, 15 aa, Artificial Sequence
  Description of Artificial Sequence: Synthetic peptide
  Seed: SIGKVCRTLLAKSVF
SIGKVYRTALAKSCF

SEQ ID NO: 261992 - protein, 15 aa, Artificial Sequence
  Description of Artificial Sequence: Synthetic peptide
  Seed: SIGKVCRTLLAKSVF
SIGKVYRTALAKSFF

SEQ ID NO: 261993 - protein, 15 aa, Artificial Sequence
  Description of Artificial Sequence: Synthetic peptide
  Seed: SIGKVCRTLLAKSVF
SIGKVYRTALAKSGF

SEQ ID NO: 261994 - protein, 15 aa, Artificial Sequence
  Description of Artificial Sequence: Synthetic peptide
  Seed: SIGKVCRTLLAKSVF
SIGKVYRTALAKSHF

SEQ ID NO: 261995 - protein, 15 aa, Artificial Sequence
  Description of Artificial Sequence: Synthetic peptide
  Seed: SIGKVCRTLLAKSVF
SIGKVYRTALAKSIF

SEQ ID NO: 261996 - protein, 15 aa, Artificial Sequence
  Description of Artificial Sequence: Synthetic peptide
  Seed: SIGKVCRTLLAKSVF
SIGKVYRTALAKSLF

SEQ ID NO: 261997 - protein, 15 aa, Artificial Sequence
  Description of Artificial Sequence: Synthetic peptide
  Seed: SIGKVCRTLLAKSVF
SIGKVYRTALAKSMF

SEQ ID NO: 261998 - protein, 15 aa, Artificial Sequence
  Description of Artificial Sequence: Synthetic peptide
  Seed: SIGKVCRTLLAKSVF
SIGKVYRTALAKSNF

SEQ ID NO: 261999 - protein, 15 aa, Artificial Sequence
  Description of Artificial Sequence: Synthetic peptide
  Seed: SIGKVCRTLLAKSVF
SIGKVYRTALAKSPF

SEQ ID NO: 262000 - protein, 15 aa, Artificial Sequence
  Description of Artificial Sequence: Synthetic peptide
  Seed: SIGKVCRTLLAKSVF
SIGKVYRTALAKSQF

SEQ ID NO: 262001 - protein, 15 aa, Artificial Sequence
  Description of Artificial Sequence: Synthetic peptide
  Seed: SIGKVCRTLLAKSVF
SIGKVYRTALAKSSF

SEQ ID NO: 262002 - protein, 15 aa, Artificial Sequence
  Description of Artificial Sequence: Synthetic peptide
  Seed: SIGKVCRTLLAKSVF
SIGKVYRTALAKSTF

SEQ ID NO: 262003 - protein, 15 aa, Artificial Sequence
  Description of Artificial Sequence: Synthetic peptide
  Seed: SIGKVCRTLLAKSVF
SIGKVYRTALAKSVF

SEQ ID NO: 262004 - protein, 15 aa, Artificial Sequence
  Description of Artificial Sequence: Synthetic peptide
  Seed: SIGKVCRTLLAKSVF
SIGKVYRTALFKSAF

SEQ ID NO: 262005 - protein, 15 aa, Artificial Sequence
  Description of Artificial Sequence: Synthetic peptide
  Seed: SIGKVCRTLLAKSVF
SIGKVYRTALFKSFF

SEQ ID NO: 262006 - protein, 15 aa, Artificial Sequence
  Description of Artificial Sequence: Synthetic peptide
  Seed: SIGKVCRTLLAKSVF
SIGKVYRTALFKSIF

SEQ ID NO: 262007 - protein, 15 aa, Artificial Sequence
  Description of Artificial Sequence: Synthetic peptide
  Seed: SIGKVCRTLLAKSVF
SIGKVYRTALFKSLF

SEQ ID NO: 262008 - protein, 15 aa, Artificial Sequence
  Description of Artificial Sequence: Synthetic peptide
  Seed: SIGKVCRTLLAKSVF
SIGKVYRTALFKSMF

SEQ ID NO: 262009 - protein, 15 aa, Artificial Sequence
  Description of Artificial Sequence: Synthetic peptide
  Seed: SIGKVCRTLLAKSVF
SIGKVYRTALFKSTF

SEQ ID NO: 262010 - protein, 15 aa, Artificial Sequence
  Description of Artificial Sequence: Synthetic peptide
  Seed: SIGKVCRTLLAKSVF
SIGKVYRTALFKSVF

SEQ ID NO: 262011 - protein, 15 aa, Artificial Sequence
  Description of Artificial Sequence: Synthetic peptide
  Seed: SIGKVCRTLLAKSVF
SIGKVYRTALFKSYF

SEQ ID NO: 262012 - protein, 15 aa, Artificial Sequence
  Description of Artificial Sequence: Synthetic peptide
  Seed: SIGKVCRTLLAKSVF
SIGKVYRTALGKSAF

SEQ ID NO: 262013 - protein, 15 aa, Artificial Sequence
  Description of Artificial Sequence: Synthetic peptide
  Seed: SIGKVCRTLLAKSVF
SIGKVYRTALGKSFF

SEQ ID NO: 262014 - protein, 15 aa, Artificial Sequence
  Description of Artificial Sequence: Synthetic peptide
  Seed: SIGKVCRTLLAKSVF
SIGKVYRTALGKSGF

SEQ ID NO: 262015 - protein, 15 aa, Artificial Sequence
  Description of Artificial Sequence: Synthetic peptide
  Seed: SIGKVCRTLLAKSVF
SIGKVYRTALGKSIF

SEQ ID NO: 262016 - protein, 15 aa, Artificial Sequence
  Description of Artificial Sequence: Synthetic peptide
  Seed: SIGKVCRTLLAKSVF
SIGKVYRTALGKSLF

SEQ ID NO: 262017 - protein, 15 aa, Artificial Sequence
  Description of Artificial Sequence: Synthetic peptide
  Seed: SIGKVCRTLLAKSVF
SIGKVYRTALGKSMF

SEQ ID NO: 262018 - protein, 15 aa, Artificial Sequence
  Description of Artificial Sequence: Synthetic peptide
  Seed: SIGKVCRTLLAKSVF
SIGKVYRTALGKSSF

SEQ ID NO: 262019 - protein, 15 aa, Artificial Sequence
  Description of Artificial Sequence: Synthetic peptide
  Seed: SIGKVCRTLLAKSVF
SIGKVYRTALGKSTF

SEQ ID NO: 262020 - protein, 15 aa, Artificial Sequence
  Description of Artificial Sequence: Synthetic peptide
  Seed: SIGKVCRTLLAKSVF
SIGKVYRTALGKSVF

SEQ ID NO: 262021 - protein, 15 aa, Artificial Sequence
  Description of Artificial Sequence: Synthetic peptide
  Seed: SIGKVCRTLLAKSVF
SIGKVYRTALIKSAF

SEQ ID NO: 262022 - protein, 15 aa, Artificial Sequence
  Description of Artificial Sequence: Synthetic peptide
  Seed: SIGKVCRTLLAKSVF
SIGKVYRTALIKSIF

SEQ ID NO: 262023 - protein, 15 aa, Artificial Sequence
  Description of Artificial Sequence: Synthetic peptide
  Seed: SIGKVCRTLLAKSVF
SIGKVYRTALIKSNF

SEQ ID NO: 262024 - protein, 15 aa, Artificial Sequence
  Description of Artificial Sequence: Synthetic peptide
  Seed: SIGKVCRTLLAKSVF
SIGKVYRTALIKSSF

SEQ ID NO: 262025 - protein, 15 aa, Artificial Sequence
  Description of Artificial Sequence: Synthetic peptide
  Seed: SIGKVCRTLLAKSVF
SIGKVYRTALIKSVF

SEQ ID NO: 262026 - protein, 15 aa, Artificial Sequence
  Description of Artificial Sequence: Synthetic peptide
  Seed: SIGKVCRTLLAKSVF
SIGKVYRTALNKSAF

SEQ ID NO: 262027 - protein, 15 aa, Artificial Sequence
  Description of Artificial Sequence: Synthetic peptide
  Seed: SIGKVCRTLLAKSVF
SIGKVYRTALNKSIF

SEQ ID NO: 262028 - protein, 15 aa, Artificial Sequence
  Description of Artificial Sequence: Synthetic peptide
  Seed: SIGKVCRTLLAKSVF
SIGKVYRTALNKSLF

SEQ ID NO: 262029 - protein, 15 aa, Artificial Sequence
  Description of Artificial Sequence: Synthetic peptide
  Seed: SIGKVCRTLLAKSVF
SIGKVYRTALNKSMF

SEQ ID NO: 262030 - protein, 15 aa, Artificial Sequence
  Description of Artificial Sequence: Synthetic peptide
  Seed: SIGKVCRTLLAKSVF
SIGKVYRTALNKSNF

SEQ ID NO: 262031 - protein, 15 aa, Artificial Sequence
  Description of Artificial Sequence: Synthetic peptide
  Seed: SIGKVCRTLLAKSVF
SIGKVYRTALNKSVF

SEQ ID NO: 262032 - protein, 15 aa, Artificial Sequence
  Description of Artificial Sequence: Synthetic peptide
  Seed: SIGKVCRTLLAKSVF
SIGKVYRTALPKSAF

SEQ ID NO: 262033 - protein, 15 aa, Artificial Sequence
  Description of Artificial Sequence: Synthetic peptide
  Seed: SIGKVCRTLLAKSVF
SIGKVYRTALPKSIF

SEQ ID NO: 262034 - protein, 15 aa, Artificial Sequence
  Description of Artificial Sequence: Synthetic peptide
  Seed: SIGKVCRTLLAKSVF
SIGKVYRTALPKSLF

SEQ ID NO: 262035 - protein, 15 aa, Artificial Sequence
  Description of Artificial Sequence: Synthetic peptide
  Seed: SIGKVCRTLLAKSVF
SIGKVYRTALPKSMF

SEQ ID NO: 262036 - protein, 15 aa, Artificial Sequence
  Description of Artificial Sequence: Synthetic peptide
  Seed: SIGKVCRTLLAKSVF
SIGKVYRTALPKSNF

SEQ ID NO: 262037 - protein, 15 aa, Artificial Sequence
  Description of Artificial Sequence: Synthetic peptide
  Seed: SIGKVCRTLLAKSVF
SIGKVYRTALPKSSF

SEQ ID NO: 262038 - protein, 15 aa, Artificial Sequence
  Description of Artificial Sequence: Synthetic peptide
  Seed: SIGKVCRTLLAKSVF
SIGKVYRTALPKSTF

SEQ ID NO: 262039 - protein, 15 aa, Artificial Sequence
  Description of Artificial Sequence: Synthetic peptide
  Seed: SIGKVCRTLLAKSVF
SIGKVYRTALPKSVF

SEQ ID NO: 262040 - protein, 15 aa, Artificial Sequence
  Description of Artificial Sequence: Synthetic peptide
  Seed: SIGKVCRTLLAKSVF
SIGKVYRTALSKSAF

SEQ ID NO: 262041 - protein, 15 aa, Artificial Sequence
  Description of Artificial Sequence: Synthetic peptide
  Seed: SIGKVCRTLLAKSVF
SIGKVYRTALSKSCF

SEQ ID NO: 262042 - protein, 15 aa, Artificial Sequence
  Description of Artificial Sequence: Synthetic peptide
  Seed: SIGKVCRTLLAKSVF
SIGKVYRTALSKSFF

SEQ ID NO: 262043 - protein, 15 aa, Artificial Sequence
  Description of Artificial Sequence: Synthetic peptide
  Seed: SIGKVCRTLLAKSVF
SIGKVYRTALSKSGF

SEQ ID NO: 262044 - protein, 15 aa, Artificial Sequence
  Description of Artificial Sequence: Synthetic peptide
  Seed: SIGKVCRTLLAKSVF
SIGKVYRTALSKSIF

SEQ ID NO: 262045 - protein, 15 aa, Artificial Sequence
  Description of Artificial Sequence: Synthetic peptide
  Seed: SIGKVCRTLLAKSVF
SIGKVYRTALSKSLF

SEQ ID NO: 262046 - protein, 15 aa, Artificial Sequence
  Description of Artificial Sequence: Synthetic peptide
  Seed: SIGKVCRTLLAKSVF
SIGKVYRTALSKSMF

SEQ ID NO: 262047 - protein, 15 aa, Artificial Sequence
  Description of Artificial Sequence: Synthetic peptide
  Seed: SIGKVCRTLLAKSVF
SIGKVYRTALSKSNF

SEQ ID NO: 262048 - protein, 15 aa, Artificial Sequence
  Description of Artificial Sequence: Synthetic peptide
  Seed: SIGKVCRTLLAKSVF
SIGKVYRTALSKSSF

SEQ ID NO: 262049 - protein, 15 aa, Artificial Sequence
  Description of Artificial Sequence: Synthetic peptide
  Seed: SIGKVCRTLLAKSVF
SIGKVYRTALSKSTF

SEQ ID NO: 262050 - protein, 15 aa, Artificial Sequence
  Description of Artificial Sequence: Synthetic peptide
  Seed: SIGKVCRTLLAKSVF
SIGKVYRTALSKSVF

SEQ ID NO: 262051 - protein, 15 aa, Artificial Sequence
  Description of Artificial Sequence: Synthetic peptide
  Seed: SIGKVCRTLLAKSVF
SIGKVYRTALTKSAF

SEQ ID NO: 262052 - protein, 15 aa, Artificial Sequence
  Description of Artificial Sequence: Synthetic peptide
  Seed: SIGKVCRTLLAKSVF
SIGKVYRTALTKSIF

SEQ ID NO: 262053 - protein, 15 aa, Artificial Sequence
  Description of Artificial Sequence: Synthetic peptide
  Seed: SIGKVCRTLLAKSVF
SIGKVYRTALTKSLF

SEQ ID NO: 262054 - protein, 15 aa, Artificial Sequence
  Description of Artificial Sequence: Synthetic peptide
  Seed: SIGKVCRTLLAKSVF
SIGKVYRTALTKSMF

SEQ ID NO: 262055 - protein, 15 aa, Artificial Sequence
  Description of Artificial Sequence: Synthetic peptide
  Seed: SIGKVCRTLLAKSVF
SIGKVYRTALTKSNF

SEQ ID NO: 262056 - protein, 15 aa, Artificial Sequence
  Description of Artificial Sequence: Synthetic peptide
  Seed: SIGKVCRTLLAKSVF
SIGKVYRTALTKSSF

SEQ ID NO: 262057 - protein, 15 aa, Artificial Sequence
  Description of Artificial Sequence: Synthetic peptide
  Seed: SIGKVCRTLLAKSVF
SIGKVYRTALTKSTF

SEQ ID NO: 262058 - protein, 15 aa, Artificial Sequence
  Description of Artificial Sequence: Synthetic peptide
  Seed: SIGKVCRTLLAKSVF
SIGKVYRTALTKSVF

SEQ ID NO: 262059 - protein, 15 aa, Artificial Sequence
  Description of Artificial Sequence: Synthetic peptide
  Seed: SIGKVCRTLLAKSVF
SIGKVYRTALVKSAF

SEQ ID NO: 262060 - protein, 15 aa, Artificial Sequence
  Description of Artificial Sequence: Synthetic peptide
  Seed: SIGKVCRTLLAKSVF
SIGKVYRTALVKSIF

SEQ ID NO: 262061 - protein, 15 aa, Artificial Sequence
  Description of Artificial Sequence: Synthetic peptide
  Seed: SIGKVCRTLLAKSVF
SIGKVYRTALVKSLF

SEQ ID NO: 262062 - protein, 15 aa, Artificial Sequence
  Description of Artificial Sequence: Synthetic peptide
  Seed: SIGKVCRTLLAKSVF
SIGKVYRTALVKSMF

SEQ ID NO: 262063 - protein, 15 aa, Artificial Sequence
  Description of Artificial Sequence: Synthetic peptide
  Seed: SIGKVCRTLLAKSVF
SIGKVYRTALVKSNF

SEQ ID NO: 262064 - protein, 15 aa, Artificial Sequence
  Description of Artificial Sequence: Synthetic peptide
  Seed: SIGKVCRTLLAKSVF
SIGKVYRTALVKSSF

SEQ ID NO: 262065 - protein, 15 aa, Artificial Sequence
  Description of Artificial Sequence: Synthetic peptide
  Seed: SIGKVCRTLLAKSVF
SIGKVYRTALVKSTF

SEQ ID NO: 262066 - protein, 15 aa, Artificial Sequence
  Description of Artificial Sequence: Synthetic peptide
  Seed: SIGKVCRTLLAKSVF
SIGKVYRTALVKSVF

SEQ ID NO: 262067 - protein, 15 aa, Artificial Sequence
  Description of Artificial Sequence: Synthetic peptide
  Seed: SIGKVCRTLLAKSVF
SIGKVYRTALYKSIF

SEQ ID NO: 262068 - protein, 15 aa, Artificial Sequence
  Description of Artificial Sequence: Synthetic peptide
  Seed: SIGKVCRTLLAKSVF
SIGKVYRTALYKSLF

SEQ ID NO: 262069 - protein, 15 aa, Artificial Sequence
  Description of Artificial Sequence: Synthetic peptide
  Seed: SIGKVCRTLLAKSVF
SIGKVYRTALYKSVF

SEQ ID NO: 262070 - protein, 15 aa, Artificial Sequence
  Description of Artificial Sequence: Synthetic peptide
  Seed: SIGKVCRTLLAKSVF
SIGKVYRTCLFKSIF

SEQ ID NO: 262071 - protein, 15 aa, Artificial Sequence
  Description of Artificial Sequence: Synthetic peptide
  Seed: SIGKVCRTLLAKSVF
SIGKVYRTCLFKSLF

SEQ ID NO: 262072 - protein, 15 aa, Artificial Sequence
  Description of Artificial Sequence: Synthetic peptide
  Seed: SIGKVCRTLLAKSVF
SIGKVYRTCLFKSVF

SEQ ID NO: 262073 - protein, 15 aa, Artificial Sequence
  Description of Artificial Sequence: Synthetic peptide
  Seed: SIGKVCRTLLAKSVF
SIGKVYRTDLFKSIF

SEQ ID NO: 262074 - protein, 15 aa, Artificial Sequence
  Description of Artificial Sequence: Synthetic peptide
  Seed: SIGKVCRTLLAKSVF
SIGKVYRTELAKSAF

SEQ ID NO: 262075 - protein, 15 aa, Artificial Sequence
  Description of Artificial Sequence: Synthetic peptide
  Seed: SIGKVCRTLLAKSVF
SIGKVYRTELAKSIF

SEQ ID NO: 262076 - protein, 15 aa, Artificial Sequence
  Description of Artificial Sequence: Synthetic peptide
  Seed: SIGKVCRTLLAKSVF
SIGKVYRTELAKSLF

SEQ ID NO: 262077 - protein, 15 aa, Artificial Sequence
  Description of Artificial Sequence: Synthetic peptide
  Seed: SIGKVCRTLLAKSVF
SIGKVYRTELAKSVF

SEQ ID NO: 262078 - protein, 15 aa, Artificial Sequence
  Description of Artificial Sequence: Synthetic peptide
  Seed: SIGKVCRTLLAKSVF
SIGKVYRTELFKSAF

SEQ ID NO: 262079 - protein, 15 aa, Artificial Sequence
  Description of Artificial Sequence: Synthetic peptide
  Seed: SIGKVCRTLLAKSVF
SIGKVYRTELFKSFF

SEQ ID NO: 262080 - protein, 15 aa, Artificial Sequence
  Description of Artificial Sequence: Synthetic peptide
  Seed: SIGKVCRTLLAKSVF
SIGKVYRTELFKSIF

SEQ ID NO: 262081 - protein, 15 aa, Artificial Sequence
  Description of Artificial Sequence: Synthetic peptide
  Seed: SIGKVCRTLLAKSVF
SIGKVYRTELFKSLF

SEQ ID NO: 262082 - protein, 15 aa, Artificial Sequence
  Description of Artificial Sequence: Synthetic peptide
  Seed: SIGKVCRTLLAKSVF
SIGKVYRTELFKSMF

SEQ ID NO: 262083 - protein, 15 aa, Artificial Sequence
  Description of Artificial Sequence: Synthetic peptide
  Seed: SIGKVCRTLLAKSVF
SIGKVYRTELFKSVF

SEQ ID NO: 262084 - protein, 15 aa, Artificial Sequence
  Description of Artificial Sequence: Synthetic peptide
  Seed: SIGKVCRTLLAKSVF
SIGKVYRTELGKSAF

SEQ ID NO: 262085 - protein, 15 aa, Artificial Sequence
  Description of Artificial Sequence: Synthetic peptide
  Seed: SIGKVCRTLLAKSVF
SIGKVYRTELGKSIF

SEQ ID NO: 262086 - protein, 15 aa, Artificial Sequence
  Description of Artificial Sequence: Synthetic peptide
  Seed: SIGKVCRTLLAKSVF
SIGKVYRTELGKSLF

SEQ ID NO: 262087 - protein, 15 aa, Artificial Sequence
  Description of Artificial Sequence: Synthetic peptide
  Seed: SIGKVCRTLLAKSVF
SIGKVYRTELGKSVF

SEQ ID NO: 262088 - protein, 15 aa, Artificial Sequence
  Description of Artificial Sequence: Synthetic peptide
  Seed: SIGKVCRTLLAKSVF
SIGKVYRTELLKSIF

SEQ ID NO: 262089 - protein, 15 aa, Artificial Sequence
  Description of Artificial Sequence: Synthetic peptide
  Seed: SIGKVCRTLLAKSVF
SIGKVYRTELLKSLF

SEQ ID NO: 262090 - protein, 15 aa, Artificial Sequence
  Description of Artificial Sequence: Synthetic peptide
  Seed: SIGKVCRTLLAKSVF
SIGKVYRTELSKSAF

SEQ ID NO: 262091 - protein, 15 aa, Artificial Sequence
  Description of Artificial Sequence: Synthetic peptide
  Seed: SIGKVCRTLLAKSVF
SIGKVYRTELSKSIF

SEQ ID NO: 262092 - protein, 15 aa, Artificial Sequence
  Description of Artificial Sequence: Synthetic peptide
  Seed: SIGKVCRTLLAKSVF
SIGKVYRTELSKSLF

SEQ ID NO: 262093 - protein, 15 aa, Artificial Sequence
  Description of Artificial Sequence: Synthetic peptide
  Seed: SIGKVCRTLLAKSVF
SIGKVYRTELSKSVF

SEQ ID NO: 262094 - protein, 15 aa, Artificial Sequence
  Description of Artificial Sequence: Synthetic peptide
  Seed: SIGKVCRTLLAKSVF
SIGKVYRTFLAKSAF

SEQ ID NO: 262095 - protein, 15 aa, Artificial Sequence
  Description of Artificial Sequence: Synthetic peptide
  Seed: SIGKVCRTLLAKSVF
SIGKVYRTFLAKSIF

SEQ ID NO: 262096 - protein, 15 aa, Artificial Sequence
  Description of Artificial Sequence: Synthetic peptide
  Seed: SIGKVCRTLLAKSVF
SIGKVYRTFLAKSLF

SEQ ID NO: 262097 - protein, 15 aa, Artificial Sequence
  Description of Artificial Sequence: Synthetic peptide
  Seed: SIGKVCRTLLAKSVF
SIGKVYRTFLAKSNF

SEQ ID NO: 262098 - protein, 15 aa, Artificial Sequence
  Description of Artificial Sequence: Synthetic peptide
  Seed: SIGKVCRTLLAKSVF
SIGKVYRTFLAKSSF

SEQ ID NO: 262099 - protein, 15 aa, Artificial Sequence
  Description of Artificial Sequence: Synthetic peptide
  Seed: SIGKVCRTLLAKSVF
SIGKVYRTFLAKSVF

SEQ ID NO: 262100 - protein, 15 aa, Artificial Sequence
  Description of Artificial Sequence: Synthetic peptide
  Seed: SIGKVCRTLLAKSVF
SIGKVYRTFLFKSAF

SEQ ID NO: 262101 - protein, 15 aa, Artificial Sequence
  Description of Artificial Sequence: Synthetic peptide
  Seed: SIGKVCRTLLAKSVF
SIGKVYRTFLFKSDF

SEQ ID NO: 262102 - protein, 15 aa, Artificial Sequence
  Description of Artificial Sequence: Synthetic peptide
  Seed: SIGKVCRTLLAKSVF
SIGKVYRTFLFKSEF

SEQ ID NO: 262103 - protein, 15 aa, Artificial Sequence
  Description of Artificial Sequence: Synthetic peptide
  Seed: SIGKVCRTLLAKSVF
SIGKVYRTFLFKSFF

SEQ ID NO: 262104 - protein, 15 aa, Artificial Sequence
  Description of Artificial Sequence: Synthetic peptide
  Seed: SIGKVCRTLLAKSVF
SIGKVYRTFLFKSIF

SEQ ID NO: 262105 - protein, 15 aa, Artificial Sequence
  Description of Artificial Sequence: Synthetic peptide
  Seed: SIGKVCRTLLAKSVF
SIGKVYRTFLFKSLF

SEQ ID NO: 262106 - protein, 15 aa, Artificial Sequence
  Description of Artificial Sequence: Synthetic peptide
  Seed: SIGKVCRTLLAKSVF
SIGKVYRTFLFKSMF

SEQ ID NO: 262107 - protein, 15 aa, Artificial Sequence
  Description of Artificial Sequence: Synthetic peptide
  Seed: SIGKVCRTLLAKSVF
SIGKVYRTFLFKSNF

SEQ ID NO: 262108 - protein, 15 aa, Artificial Sequence
  Description of Artificial Sequence: Synthetic peptide
  Seed: SIGKVCRTLLAKSVF
SIGKVYRTFLFKSSF

SEQ ID NO: 262109 - protein, 15 aa, Artificial Sequence
  Description of Artificial Sequence: Synthetic peptide
  Seed: SIGKVCRTLLAKSVF
SIGKVYRTFLFKSTF

SEQ ID NO: 262110 - protein, 15 aa, Artificial Sequence
  Description of Artificial Sequence: Synthetic peptide
  Seed: SIGKVCRTLLAKSVF
SIGKVYRTFLFKSVF

SEQ ID NO: 262111 - protein, 15 aa, Artificial Sequence
  Description of Artificial Sequence: Synthetic peptide
  Seed: SIGKVCRTLLAKSVF
SIGKVYRTFLFKSYF

SEQ ID NO: 262112 - protein, 15 aa, Artificial Sequence
  Description of Artificial Sequence: Synthetic peptide
  Seed: SIGKVCRTLLAKSVF
SIGKVYRTFLGKSIF

SEQ ID NO: 262113 - protein, 15 aa, Artificial Sequence
  Description of Artificial Sequence: Synthetic peptide
  Seed: SIGKVCRTLLAKSVF
SIGKVYRTFLGKSLF

SEQ ID NO: 262114 - protein, 15 aa, Artificial Sequence
  Description of Artificial Sequence: Synthetic peptide
  Seed: SIGKVCRTLLAKSVF
SIGKVYRTFLGKSVF

SEQ ID NO: 262115 - protein, 15 aa, Artificial Sequence
  Description of Artificial Sequence: Synthetic peptide
  Seed: SIGKVCRTLLAKSVF
SIGKVYRTFLLKSFF

SEQ ID NO: 262116 - protein, 15 aa, Artificial Sequence
  Description of Artificial Sequence: Synthetic peptide
  Seed: SIGKVCRTLLAKSVF
SIGKVYRTFLLKSIF

SEQ ID NO: 262117 - protein, 15 aa, Artificial Sequence
  Description of Artificial Sequence: Synthetic peptide
  Seed: SIGKVCRTLLAKSVF
SIGKVYRTFLLKSLF

SEQ ID NO: 262118 - protein, 15 aa, Artificial Sequence
  Description of Artificial Sequence: Synthetic peptide
  Seed: SIGKVCRTLLAKSVF
SIGKVYRTFLLKSMF

SEQ ID NO: 262119 - protein, 15 aa, Artificial Sequence
  Description of Artificial Sequence: Synthetic peptide
  Seed: SIGKVCRTLLAKSVF
SIGKVYRTFLLKSVF

SEQ ID NO: 262120 - protein, 15 aa, Artificial Sequence
  Description of Artificial Sequence: Synthetic peptide
  Seed: SIGKVCRTLLAKSVF
SIGKVYRTFLMKSLF

SEQ ID NO: 262121 - protein, 15 aa, Artificial Sequence
  Description of Artificial Sequence: Synthetic peptide
  Seed: SIGKVCRTLLAKSVF
SIGKVYRTFLPKSVF

SEQ ID NO: 262122 - protein, 15 aa, Artificial Sequence
  Description of Artificial Sequence: Synthetic peptide
  Seed: SIGKVCRTLLAKSVF
SIGKVYRTFLSKSAF

SEQ ID NO: 262123 - protein, 15 aa, Artificial Sequence
  Description of Artificial Sequence: Synthetic peptide
  Seed: SIGKVCRTLLAKSVF
SIGKVYRTFLSKSIF

SEQ ID NO: 262124 - protein, 15 aa, Artificial Sequence
  Description of Artificial Sequence: Synthetic peptide
  Seed: SIGKVCRTLLAKSVF
SIGKVYRTFLSKSLF

SEQ ID NO: 262125 - protein, 15 aa, Artificial Sequence
  Description of Artificial Sequence: Synthetic peptide
  Seed: SIGKVCRTLLAKSVF
SIGKVYRTFLSKSVF

SEQ ID NO: 262126 - protein, 15 aa, Artificial Sequence
  Description of Artificial Sequence: Synthetic peptide
  Seed: SIGKVCRTLLAKSVF
SIGKVYRTFLTKSLF

SEQ ID NO: 262127 - protein, 15 aa, Artificial Sequence
  Description of Artificial Sequence: Synthetic peptide
  Seed: SIGKVCRTLLAKSVF
SIGKVYRTFLTKSVF

SEQ ID NO: 262128 - protein, 15 aa, Artificial Sequence
  Description of Artificial Sequence: Synthetic peptide
  Seed: SIGKVCRTLLAKSVF
SIGKVYRTFLWKSIF

SEQ ID NO: 262129 - protein, 15 aa, Artificial Sequence
  Description of Artificial Sequence: Synthetic peptide
  Seed: SIGKVCRTLLAKSVF
SIGKVYRTFLWKSVF

SEQ ID NO: 262130 - protein, 15 aa, Artificial Sequence
  Description of Artificial Sequence: Synthetic peptide
  Seed: SIGKVCRTLLAKSVF
SIGKVYRTFLYKSFF

SEQ ID NO: 262131 - protein, 15 aa, Artificial Sequence
  Description of Artificial Sequence: Synthetic peptide
  Seed: SIGKVCRTLLAKSVF
SIGKVYRTFLYKSIF

SEQ ID NO: 262132 - protein, 15 aa, Artificial Sequence
  Description of Artificial Sequence: Synthetic peptide
  Seed: SIGKVCRTLLAKSVF
SIGKVYRTFLYKSLF

SEQ ID NO: 262133 - protein, 15 aa, Artificial Sequence
  Description of Artificial Sequence: Synthetic peptide
  Seed: SIGKVCRTLLAKSVF
SIGKVYRTFLYKSVF

SEQ ID NO: 262134 - protein, 15 aa, Artificial Sequence
  Description of Artificial Sequence: Synthetic peptide
  Seed: SIGKVCRTLLAKSVF
SIGKVYRTGLAKSAF

SEQ ID NO: 262135 - protein, 15 aa, Artificial Sequence
  Description of Artificial Sequence: Synthetic peptide
  Seed: SIGKVCRTLLAKSVF
SIGKVYRTGLAKSIF

SEQ ID NO: 262136 - protein, 15 aa, Artificial Sequence
  Description of Artificial Sequence: Synthetic peptide
  Seed: SIGKVCRTLLAKSVF
SIGKVYRTGLAKSLF

SEQ ID NO: 262137 - protein, 15 aa, Artificial Sequence
  Description of Artificial Sequence: Synthetic peptide
  Seed: SIGKVCRTLLAKSVF
SIGKVYRTGLAKSMF

SEQ ID NO: 262138 - protein, 15 aa, Artificial Sequence
  Description of Artificial Sequence: Synthetic peptide
  Seed: SIGKVCRTLLAKSVF
SIGKVYRTGLAKSVF

SEQ ID NO: 262139 - protein, 15 aa, Artificial Sequence
  Description of Artificial Sequence: Synthetic peptide
  Seed: SIGKVCRTLLAKSVF
SIGKVYRTGLFKSIF

SEQ ID NO: 262140 - protein, 15 aa, Artificial Sequence
  Description of Artificial Sequence: Synthetic peptide
  Seed: SIGKVCRTLLAKSVF
SIGKVYRTGLFKSLF

SEQ ID NO: 262141 - protein, 15 aa, Artificial Sequence
  Description of Artificial Sequence: Synthetic peptide
  Seed: SIGKVCRTLLAKSVF
SIGKVYRTGLFKSVF

SEQ ID NO: 262142 - protein, 15 aa, Artificial Sequence
  Description of Artificial Sequence: Synthetic peptide
  Seed: SIGKVCRTLLAKSVF
SIGKVYRTGLGKSIF

SEQ ID NO: 262143 - protein, 15 aa, Artificial Sequence
  Description of Artificial Sequence: Synthetic peptide
  Seed: SIGKVCRTLLAKSVF
SIGKVYRTGLGKSLF

SEQ ID NO: 262144 - protein, 15 aa, Artificial Sequence
  Description of Artificial Sequence: Synthetic peptide
  Seed: SIGKVCRTLLAKSVF
SIGKVYRTGLGKSVF

SEQ ID NO: 262145 - protein, 15 aa, Artificial Sequence
  Description of Artificial Sequence: Synthetic peptide
  Seed: SIGKVCRTLLAKSVF
SIGKVYRTGLPKSIF

SEQ ID NO: 262146 - protein, 15 aa, Artificial Sequence
  Description of Artificial Sequence: Synthetic peptide
  Seed: SIGKVCRTLLAKSVF
SIGKVYRTGLPKSLF

SEQ ID NO: 262147 - protein, 15 aa, Artificial Sequence
  Description of Artificial Sequence: Synthetic peptide
  Seed: SIGKVCRTLLAKSVF
SIGKVYRTGLPKSVF

SEQ ID NO: 262148 - protein, 15 aa, Artificial Sequence
  Description of Artificial Sequence: Synthetic peptide
  Seed: SIGKVCRTLLAKSVF
SIGKVYRTGLSKSAF

SEQ ID NO: 262149 - protein, 15 aa, Artificial Sequence
  Description of Artificial Sequence: Synthetic peptide
  Seed: SIGKVCRTLLAKSVF
SIGKVYRTGLSKSIF

SEQ ID NO: 262150 - protein, 15 aa, Artificial Sequence
  Description of Artificial Sequence: Synthetic peptide
  Seed: SIGKVCRTLLAKSVF
SIGKVYRTGLSKSLF

SEQ ID NO: 262151 - protein, 15 aa, Artificial Sequence
  Description of Artificial Sequence: Synthetic peptide
  Seed: SIGKVCRTLLAKSVF
SIGKVYRTGLSKSMF

SEQ ID NO: 262152 - protein, 15 aa, Artificial Sequence
  Description of Artificial Sequence: Synthetic peptide
  Seed: SIGKVCRTLLAKSVF
SIGKVYRTGLSKSVF

SEQ ID NO: 262153 - protein, 15 aa, Artificial Sequence
  Description of Artificial Sequence: Synthetic peptide
  Seed: SIGKVCRTLLAKSVF
SIGKVYRTGLTKSIF

SEQ ID NO: 262154 - protein, 15 aa, Artificial Sequence
  Description of Artificial Sequence: Synthetic peptide
  Seed: SIGKVCRTLLAKSVF
SIGKVYRTGLTKSLF

SEQ ID NO: 262155 - protein, 15 aa, Artificial Sequence
  Description of Artificial Sequence: Synthetic peptide
  Seed: SIGKVCRTLLAKSVF
SIGKVYRTGLTKSVF

SEQ ID NO: 262156 - protein, 15 aa, Artificial Sequence
  Description of Artificial Sequence: Synthetic peptide
  Seed: SIGKVCRTLLAKSVF
SIGKVYRTHLAKSIF

SEQ ID NO: 262157 - protein, 15 aa, Artificial Sequence
  Description of Artificial Sequence: Synthetic peptide
  Seed: SIGKVCRTLLAKSVF
SIGKVYRTHLAKSLF

SEQ ID NO: 262158 - protein, 15 aa, Artificial Sequence
  Description of Artificial Sequence: Synthetic peptide
  Seed: SIGKVCRTLLAKSVF
SIGKVYRTHLAKSVF

SEQ ID NO: 262159 - protein, 15 aa, Artificial Sequence
  Description of Artificial Sequence: Synthetic peptide
  Seed: SIGKVCRTLLAKSVF
SIGKVYRTHLFKSAF

SEQ ID NO: 262160 - protein, 15 aa, Artificial Sequence
  Description of Artificial Sequence: Synthetic peptide
  Seed: SIGKVCRTLLAKSVF
SIGKVYRTHLFKSFF

SEQ ID NO: 262161 - protein, 15 aa, Artificial Sequence
  Description of Artificial Sequence: Synthetic peptide
  Seed: SIGKVCRTLLAKSVF
SIGKVYRTHLFKSIF

SEQ ID NO: 262162 - protein, 15 aa, Artificial Sequence
  Description of Artificial Sequence: Synthetic peptide
  Seed: SIGKVCRTLLAKSVF
SIGKVYRTHLFKSLF

SEQ ID NO: 262163 - protein, 15 aa, Artificial Sequence
  Description of Artificial Sequence: Synthetic peptide
  Seed: SIGKVCRTLLAKSVF
SIGKVYRTHLFKSMF

SEQ ID NO: 262164 - protein, 15 aa, Artificial Sequence
  Description of Artificial Sequence: Synthetic peptide
  Seed: SIGKVCRTLLAKSVF
SIGKVYRTHLFKSSF

SEQ ID NO: 262165 - protein, 15 aa, Artificial Sequence
  Description of Artificial Sequence: Synthetic peptide
  Seed: SIGKVCRTLLAKSVF
SIGKVYRTHLFKSTF

SEQ ID NO: 262166 - protein, 15 aa, Artificial Sequence
  Description of Artificial Sequence: Synthetic peptide
  Seed: SIGKVCRTLLAKSVF
SIGKVYRTHLFKSVF

SEQ ID NO: 262167 - protein, 15 aa, Artificial Sequence
  Description of Artificial Sequence: Synthetic peptide
  Seed: SIGKVCRTLLAKSVF
SIGKVYRTHLFKSYF

SEQ ID NO: 262168 - protein, 15 aa, Artificial Sequence
  Description of Artificial Sequence: Synthetic peptide
  Seed: SIGKVCRTLLAKSVF
SIGKVYRTHLLKSIF

SEQ ID NO: 262169 - protein, 15 aa, Artificial Sequence
  Description of Artificial Sequence: Synthetic peptide
  Seed: SIGKVCRTLLAKSVF
SIGKVYRTHLLKSLF

SEQ ID NO: 262170 - protein, 15 aa, Artificial Sequence
  Description of Artificial Sequence: Synthetic peptide
  Seed: SIGKVCRTLLAKSVF
SIGKVYRTHLLKSVF

SEQ ID NO: 262171 - protein, 15 aa, Artificial Sequence
  Description of Artificial Sequence: Synthetic peptide
  Seed: SIGKVCRTLLAKSVF
SIGKVYRTHLSKSIF

SEQ ID NO: 262172 - protein, 15 aa, Artificial Sequence
  Description of Artificial Sequence: Synthetic peptide
  Seed: SIGKVCRTLLAKSVF
SIGKVYRTHLSKSLF

SEQ ID NO: 262173 - protein, 15 aa, Artificial Sequence
  Description of Artificial Sequence: Synthetic peptide
  Seed: SIGKVCRTLLAKSVF
SIGKVYRTHLSKSVF

SEQ ID NO: 262174 - protein, 15 aa, Artificial Sequence
  Description of Artificial Sequence: Synthetic peptide
  Seed: SIGKVCRTLLAKSVF
SIGKVYRTILAKSAF

SEQ ID NO: 262175 - protein, 15 aa, Artificial Sequence
  Description of Artificial Sequence: Synthetic peptide
  Seed: SIGKVCRTLLAKSVF
SIGKVYRTILAKSCF

SEQ ID NO: 262176 - protein, 15 aa, Artificial Sequence
  Description of Artificial Sequence: Synthetic peptide
  Seed: SIGKVCRTLLAKSVF
SIGKVYRTILAKSFF

SEQ ID NO: 262177 - protein, 15 aa, Artificial Sequence
  Description of Artificial Sequence: Synthetic peptide
  Seed: SIGKVCRTLLAKSVF
SIGKVYRTILAKSGF

SEQ ID NO: 262178 - protein, 15 aa, Artificial Sequence
  Description of Artificial Sequence: Synthetic peptide
  Seed: SIGKVCRTLLAKSVF
SIGKVYRTILAKSHF

SEQ ID NO: 262179 - protein, 15 aa, Artificial Sequence
  Description of Artificial Sequence: Synthetic peptide
  Seed: SIGKVCRTLLAKSVF
SIGKVYRTILAKSIF

SEQ ID NO: 262180 - protein, 15 aa, Artificial Sequence
  Description of Artificial Sequence: Synthetic peptide
  Seed: SIGKVCRTLLAKSVF
SIGKVYRTILAKSLF

SEQ ID NO: 262181 - protein, 15 aa, Artificial Sequence
  Description of Artificial Sequence: Synthetic peptide
  Seed: SIGKVCRTLLAKSVF
SIGKVYRTILAKSMF

SEQ ID NO: 262182 - protein, 15 aa, Artificial Sequence
  Description of Artificial Sequence: Synthetic peptide
  Seed: SIGKVCRTLLAKSVF
SIGKVYRTILAKSNF

SEQ ID NO: 262183 - protein, 15 aa, Artificial Sequence
  Description of Artificial Sequence: Synthetic peptide
  Seed: SIGKVCRTLLAKSVF
SIGKVYRTILAKSPF

SEQ ID NO: 262184 - protein, 15 aa, Artificial Sequence
  Description of Artificial Sequence: Synthetic peptide
  Seed: SIGKVCRTLLAKSVF
SIGKVYRTILAKSQF

SEQ ID NO: 262185 - protein, 15 aa, Artificial Sequence
  Description of Artificial Sequence: Synthetic peptide
  Seed: SIGKVCRTLLAKSVF
SIGKVYRTILAKSSF

SEQ ID NO: 262186 - protein, 15 aa, Artificial Sequence
  Description of Artificial Sequence: Synthetic peptide
  Seed: SIGKVCRTLLAKSVF
SIGKVYRTILAKSTF

SEQ ID NO: 262187 - protein, 15 aa, Artificial Sequence
  Description of Artificial Sequence: Synthetic peptide
  Seed: SIGKVCRTLLAKSVF
SIGKVYRTILAKSVF

SEQ ID NO: 262188 - protein, 15 aa, Artificial Sequence
  Description of Artificial Sequence: Synthetic peptide
  Seed: SIGKVCRTLLAKSVF
SIGKVYRTILFKSAF

SEQ ID NO: 262189 - protein, 15 aa, Artificial Sequence
  Description of Artificial Sequence: Synthetic peptide
  Seed: SIGKVCRTLLAKSVF
SIGKVYRTILFKSDF

SEQ ID NO: 262190 - protein, 15 aa, Artificial Sequence
  Description of Artificial Sequence: Synthetic peptide
  Seed: SIGKVCRTLLAKSVF
SIGKVYRTILFKSEF

SEQ ID NO: 262191 - protein, 15 aa, Artificial Sequence
  Description of Artificial Sequence: Synthetic peptide
  Seed: SIGKVCRTLLAKSVF
SIGKVYRTILFKSFF

SEQ ID NO: 262192 - protein, 15 aa, Artificial Sequence
  Description of Artificial Sequence: Synthetic peptide
  Seed: SIGKVCRTLLAKSVF
SIGKVYRTILFKSIF

SEQ ID NO: 262193 - protein, 15 aa, Artificial Sequence
  Description of Artificial Sequence: Synthetic peptide
  Seed: SIGKVCRTLLAKSVF
SIGKVYRTILFKSLF

SEQ ID NO: 262194 - protein, 15 aa, Artificial Sequence
  Description of Artificial Sequence: Synthetic peptide
  Seed: SIGKVCRTLLAKSVF
SIGKVYRTILFKSMF

SEQ ID NO: 262195 - protein, 15 aa, Artificial Sequence
  Description of Artificial Sequence: Synthetic peptide
  Seed: SIGKVCRTLLAKSVF
SIGKVYRTILFKSNF

SEQ ID NO: 262196 - protein, 15 aa, Artificial Sequence
  Description of Artificial Sequence: Synthetic peptide
  Seed: SIGKVCRTLLAKSVF
SIGKVYRTILFKSSF

SEQ ID NO: 262197 - protein, 15 aa, Artificial Sequence
  Description of Artificial Sequence: Synthetic peptide
  Seed: SIGKVCRTLLAKSVF
SIGKVYRTILFKSTF

SEQ ID NO: 262198 - protein, 15 aa, Artificial Sequence
  Description of Artificial Sequence: Synthetic peptide
  Seed: SIGKVCRTLLAKSVF
SIGKVYRTILFKSVF

SEQ ID NO: 262199 - protein, 15 aa, Artificial Sequence
  Description of Artificial Sequence: Synthetic peptide
  Seed: SIGKVCRTLLAKSVF
SIGKVYRTILFKSYF

SEQ ID NO: 262200 - protein, 15 aa, Artificial Sequence
  Description of Artificial Sequence: Synthetic peptide
  Seed: SIGKVCRTLLAKSVF
SIGKVYRTILGKSAF

SEQ ID NO: 262201 - protein, 15 aa, Artificial Sequence
  Description of Artificial Sequence: Synthetic peptide
  Seed: SIGKVCRTLLAKSVF
SIGKVYRTILGKSCF

SEQ ID NO: 262202 - protein, 15 aa, Artificial Sequence
  Description of Artificial Sequence: Synthetic peptide
  Seed: SIGKVCRTLLAKSVF
SIGKVYRTILGKSFF

SEQ ID NO: 262203 - protein, 15 aa, Artificial Sequence
  Description of Artificial Sequence: Synthetic peptide
  Seed: SIGKVCRTLLAKSVF
SIGKVYRTILGKSGF

SEQ ID NO: 262204 - protein, 15 aa, Artificial Sequence
  Description of Artificial Sequence: Synthetic peptide
  Seed: SIGKVCRTLLAKSVF
SIGKVYRTILGKSIF

SEQ ID NO: 262205 - protein, 15 aa, Artificial Sequence
  Description of Artificial Sequence: Synthetic peptide
  Seed: SIGKVCRTLLAKSVF
SIGKVYRTILGKSLF

SEQ ID NO: 262206 - protein, 15 aa, Artificial Sequence
  Description of Artificial Sequence: Synthetic peptide
  Seed: SIGKVCRTLLAKSVF
SIGKVYRTILGKSMF

SEQ ID NO: 262207 - protein, 15 aa, Artificial Sequence
  Description of Artificial Sequence: Synthetic peptide
  Seed: SIGKVCRTLLAKSVF
SIGKVYRTILGKSNF

SEQ ID NO: 262208 - protein, 15 aa, Artificial Sequence
  Description of Artificial Sequence: Synthetic peptide
  Seed: SIGKVCRTLLAKSVF
SIGKVYRTILGKSSF

SEQ ID NO: 262209 - protein, 15 aa, Artificial Sequence
  Description of Artificial Sequence: Synthetic peptide
  Seed: SIGKVCRTLLAKSVF
SIGKVYRTILGKSTF

SEQ ID NO: 262210 - protein, 15 aa, Artificial Sequence
  Description of Artificial Sequence: Synthetic peptide
  Seed: SIGKVCRTLLAKSVF
SIGKVYRTILGKSVF

SEQ ID NO: 262211 - protein, 15 aa, Artificial Sequence
  Description of Artificial Sequence: Synthetic peptide
  Seed: SIGKVCRTLLAKSVF
SIGKVYRTILIKSAF

SEQ ID NO: 262212 - protein, 15 aa, Artificial Sequence
  Description of Artificial Sequence: Synthetic peptide
  Seed: SIGKVCRTLLAKSVF
SIGKVYRTILIKSNF

SEQ ID NO: 262213 - protein, 15 aa, Artificial Sequence
  Description of Artificial Sequence: Synthetic peptide
  Seed: SIGKVCRTLLAKSVF
SIGKVYRTILIKSSF

SEQ ID NO: 262214 - protein, 15 aa, Artificial Sequence
  Description of Artificial Sequence: Synthetic peptide
  Seed: SIGKVCRTLLAKSVF
SIGKVYRTILIKSVF

SEQ ID NO: 262215 - protein, 15 aa, Artificial Sequence
  Description of Artificial Sequence: Synthetic peptide
  Seed: SIGKVCRTLLAKSVF
SIGKVYRTILLKSIF

SEQ ID NO: 262216 - protein, 15 aa, Artificial Sequence
  Description of Artificial Sequence: Synthetic peptide
  Seed: SIGKVCRTLLAKSVF
SIGKVYRTILLKSLF

SEQ ID NO: 262217 - protein, 15 aa, Artificial Sequence
  Description of Artificial Sequence: Synthetic peptide
  Seed: SIGKVCRTLLAKSVF
SIGKVYRTILLKSVF

SEQ ID NO: 262218 - protein, 15 aa, Artificial Sequence
  Description of Artificial Sequence: Synthetic peptide
  Seed: SIGKVCRTLLAKSVF
SIGKVYRTILNKSAF

SEQ ID NO: 262219 - protein, 15 aa, Artificial Sequence
  Description of Artificial Sequence: Synthetic peptide
  Seed: SIGKVCRTLLAKSVF
SIGKVYRTILNKSIF

SEQ ID NO: 262220 - protein, 15 aa, Artificial Sequence
  Description of Artificial Sequence: Synthetic peptide
  Seed: SIGKVCRTLLAKSVF
SIGKVYRTILNKSLF

SEQ ID NO: 262221 - protein, 15 aa, Artificial Sequence
  Description of Artificial Sequence: Synthetic peptide
  Seed: SIGKVCRTLLAKSVF
SIGKVYRTILNKSNF

SEQ ID NO: 262222 - protein, 15 aa, Artificial Sequence
  Description of Artificial Sequence: Synthetic peptide
  Seed: SIGKVCRTLLAKSVF
SIGKVYRTILNKSSF

SEQ ID NO: 262223 - protein, 15 aa, Artificial Sequence
  Description of Artificial Sequence: Synthetic peptide
  Seed: SIGKVCRTLLAKSVF
SIGKVYRTILNKSVF

SEQ ID NO: 262224 - protein, 15 aa, Artificial Sequence
  Description of Artificial Sequence: Synthetic peptide
  Seed: SIGKVCRTLLAKSVF
SIGKVYRTILPKSAF

SEQ ID NO: 262225 - protein, 15 aa, Artificial Sequence
  Description of Artificial Sequence: Synthetic peptide
  Seed: SIGKVCRTLLAKSVF
SIGKVYRTILPKSGF

SEQ ID NO: 262226 - protein, 15 aa, Artificial Sequence
  Description of Artificial Sequence: Synthetic peptide
  Seed: SIGKVCRTLLAKSVF
SIGKVYRTILPKSIF

SEQ ID NO: 262227 - protein, 15 aa, Artificial Sequence
  Description of Artificial Sequence: Synthetic peptide
  Seed: SIGKVCRTLLAKSVF
SIGKVYRTILPKSLF

SEQ ID NO: 262228 - protein, 15 aa, Artificial Sequence
  Description of Artificial Sequence: Synthetic peptide
  Seed: SIGKVCRTLLAKSVF
SIGKVYRTILPKSMF

SEQ ID NO: 262229 - protein, 15 aa, Artificial Sequence
  Description of Artificial Sequence: Synthetic peptide
  Seed: SIGKVCRTLLAKSVF
SIGKVYRTILPKSNF

SEQ ID NO: 262230 - protein, 15 aa, Artificial Sequence
  Description of Artificial Sequence: Synthetic peptide
  Seed: SIGKVCRTLLAKSVF
SIGKVYRTILPKSSF

SEQ ID NO: 262231 - protein, 15 aa, Artificial Sequence
  Description of Artificial Sequence: Synthetic peptide
  Seed: SIGKVCRTLLAKSVF
SIGKVYRTILPKSTF

SEQ ID NO: 262232 - protein, 15 aa, Artificial Sequence
  Description of Artificial Sequence: Synthetic peptide
  Seed: SIGKVCRTLLAKSVF
SIGKVYRTILPKSVF

SEQ ID NO: 262233 - protein, 15 aa, Artificial Sequence
  Description of Artificial Sequence: Synthetic peptide
  Seed: SIGKVCRTLLAKSVF
SIGKVYRTILSKSAF

SEQ ID NO: 262234 - protein, 15 aa, Artificial Sequence
  Description of Artificial Sequence: Synthetic peptide
  Seed: SIGKVCRTLLAKSVF
SIGKVYRTILSKSCF

SEQ ID NO: 262235 - protein, 15 aa, Artificial Sequence
  Description of Artificial Sequence: Synthetic peptide
  Seed: SIGKVCRTLLAKSVF
SIGKVYRTILSKSFF

SEQ ID NO: 262236 - protein, 15 aa, Artificial Sequence
  Description of Artificial Sequence: Synthetic peptide
  Seed: SIGKVCRTLLAKSVF
SIGKVYRTILSKSGF

SEQ ID NO: 262237 - protein, 15 aa, Artificial Sequence
  Description of Artificial Sequence: Synthetic peptide
  Seed: SIGKVCRTLLAKSVF
SIGKVYRTILSKSIF

SEQ ID NO: 262238 - protein, 15 aa, Artificial Sequence
  Description of Artificial Sequence: Synthetic peptide
  Seed: SIGKVCRTLLAKSVF
SIGKVYRTILSKSLF

SEQ ID NO: 262239 - protein, 15 aa, Artificial Sequence
  Description of Artificial Sequence: Synthetic peptide
  Seed: SIGKVCRTLLAKSVF
SIGKVYRTILSKSMF

SEQ ID NO: 262240 - protein, 15 aa, Artificial Sequence
  Description of Artificial Sequence: Synthetic peptide
  Seed: SIGKVCRTLLAKSVF
SIGKVYRTILSKSNF

SEQ ID NO: 262241 - protein, 15 aa, Artificial Sequence
  Description of Artificial Sequence: Synthetic peptide
  Seed: SIGKVCRTLLAKSVF
SIGKVYRTILSKSSF

SEQ ID NO: 262242 - protein, 15 aa, Artificial Sequence
  Description of Artificial Sequence: Synthetic peptide
  Seed: SIGKVCRTLLAKSVF
SIGKVYRTILSKSTF

SEQ ID NO: 262243 - protein, 15 aa, Artificial Sequence
  Description of Artificial Sequence: Synthetic peptide
  Seed: SIGKVCRTLLAKSVF
SIGKVYRTILSKSVF

SEQ ID NO: 262244 - protein, 15 aa, Artificial Sequence
  Description of Artificial Sequence: Synthetic peptide
  Seed: SIGKVCRTLLAKSVF
SIGKVYRTILTKSAF

SEQ ID NO: 262245 - protein, 15 aa, Artificial Sequence
  Description of Artificial Sequence: Synthetic peptide
  Seed: SIGKVCRTLLAKSVF
SIGKVYRTILTKSIF

SEQ ID NO: 262246 - protein, 15 aa, Artificial Sequence
  Description of Artificial Sequence: Synthetic peptide
  Seed: SIGKVCRTLLAKSVF
SIGKVYRTILTKSLF

SEQ ID NO: 262247 - protein, 15 aa, Artificial Sequence
  Description of Artificial Sequence: Synthetic peptide
  Seed: SIGKVCRTLLAKSVF
SIGKVYRTILTKSMF

SEQ ID NO: 262248 - protein, 15 aa, Artificial Sequence
  Description of Artificial Sequence: Synthetic peptide
  Seed: SIGKVCRTLLAKSVF
SIGKVYRTILTKSNF

SEQ ID NO: 262249 - protein, 15 aa, Artificial Sequence
  Description of Artificial Sequence: Synthetic peptide
  Seed: SIGKVCRTLLAKSVF
SIGKVYRTILTKSSF

SEQ ID NO: 262250 - protein, 15 aa, Artificial Sequence
  Description of Artificial Sequence: Synthetic peptide
  Seed: SIGKVCRTLLAKSVF
SIGKVYRTILTKSTF

SEQ ID NO: 262251 - protein, 15 aa, Artificial Sequence
  Description of Artificial Sequence: Synthetic peptide
  Seed: SIGKVCRTLLAKSVF
SIGKVYRTILTKSVF

SEQ ID NO: 262252 - protein, 15 aa, Artificial Sequence
  Description of Artificial Sequence: Synthetic peptide
  Seed: SIGKVCRTLLAKSVF
SIGKVYRTILVKSAF

SEQ ID NO: 262253 - protein, 15 aa, Artificial Sequence
  Description of Artificial Sequence: Synthetic peptide
  Seed: SIGKVCRTLLAKSVF
SIGKVYRTILVKSGF

SEQ ID NO: 262254 - protein, 15 aa, Artificial Sequence
  Description of Artificial Sequence: Synthetic peptide
  Seed: SIGKVCRTLLAKSVF
SIGKVYRTILVKSIF

SEQ ID NO: 262255 - protein, 15 aa, Artificial Sequence
  Description of Artificial Sequence: Synthetic peptide
  Seed: SIGKVCRTLLAKSVF
SIGKVYRTILVKSLF

SEQ ID NO: 262256 - protein, 15 aa, Artificial Sequence
  Description of Artificial Sequence: Synthetic peptide
  Seed: SIGKVCRTLLAKSVF
SIGKVYRTILVKSNF

SEQ ID NO: 262257 - protein, 15 aa, Artificial Sequence
  Description of Artificial Sequence: Synthetic peptide
  Seed: SIGKVCRTLLAKSVF
SIGKVYRTILVKSSF

SEQ ID NO: 262258 - protein, 15 aa, Artificial Sequence
  Description of Artificial Sequence: Synthetic peptide
  Seed: SIGKVCRTLLAKSVF
SIGKVYRTILVKSTF

SEQ ID NO: 262259 - protein, 15 aa, Artificial Sequence
  Description of Artificial Sequence: Synthetic peptide
  Seed: SIGKVCRTLLAKSVF
SIGKVYRTILVKSVF

SEQ ID NO: 262260 - protein, 15 aa, Artificial Sequence
  Description of Artificial Sequence: Synthetic peptide
  Seed: SIGKVCRTLLAKSVF
SIGKVYRTILYKSIF

SEQ ID NO: 262261 - protein, 15 aa, Artificial Sequence
  Description of Artificial Sequence: Synthetic peptide
  Seed: SIGKVCRTLLAKSVF
SIGKVYRTILYKSLF

SEQ ID NO: 262262 - protein, 15 aa, Artificial Sequence
  Description of Artificial Sequence: Synthetic peptide
  Seed: SIGKVCRTLLAKSVF
SIGKVYRTILYKSVF

SEQ ID NO: 262263 - protein, 15 aa, Artificial Sequence
  Description of Artificial Sequence: Synthetic peptide
  Seed: SIGKVCRTLLAKSVF
SIGKVYRTKLFKSIF

SEQ ID NO: 262264 - protein, 15 aa, Artificial Sequence
  Description of Artificial Sequence: Synthetic peptide
  Seed: SIGKVCRTLLAKSVF
SIGKVYRTKLFKSLF

SEQ ID NO: 262265 - protein, 15 aa, Artificial Sequence
  Description of Artificial Sequence: Synthetic peptide
  Seed: SIGKVCRTLLAKSVF
SIGKVYRTKLFKSVF

SEQ ID NO: 262266 - protein, 15 aa, Artificial Sequence
  Description of Artificial Sequence: Synthetic peptide
  Seed: SIGKVCRTLLAKSVF
SIGKVYRTLLAKSAF

SEQ ID NO: 262267 - protein, 15 aa, Artificial Sequence
  Description of Artificial Sequence: Synthetic peptide
  Seed: SIGKVCRTLLAKSVF
SIGKVYRTLLAKSCF

SEQ ID NO: 262268 - protein, 15 aa, Artificial Sequence
  Description of Artificial Sequence: Synthetic peptide
  Seed: SIGKVCRTLLAKSVF
SIGKVYRTLLAKSDF

SEQ ID NO: 262269 - protein, 15 aa, Artificial Sequence
  Description of Artificial Sequence: Synthetic peptide
  Seed: SIGKVCRTLLAKSVF
SIGKVYRTLLAKSEF

SEQ ID NO: 262270 - protein, 15 aa, Artificial Sequence
  Description of Artificial Sequence: Synthetic peptide
  Seed: SIGKVCRTLLAKSVF
SIGKVYRTLLAKSFF

SEQ ID NO: 262271 - protein, 15 aa, Artificial Sequence
  Description of Artificial Sequence: Synthetic peptide
  Seed: SIGKVCRTLLAKSVF
SIGKVYRTLLAKSGF

SEQ ID NO: 262272 - protein, 15 aa, Artificial Sequence
  Description of Artificial Sequence: Synthetic peptide
  Seed: SIGKVCRTLLAKSVF
SIGKVYRTLLAKSHF

SEQ ID NO: 262273 - protein, 15 aa, Artificial Sequence
  Description of Artificial Sequence: Synthetic peptide
  Seed: SIGKVCRTLLAKSVF
SIGKVYRTLLAKSIF

SEQ ID NO: 262274 - protein, 15 aa, Artificial Sequence
  Description of Artificial Sequence: Synthetic peptide
  Seed: SIGKVCRTLLAKSVF
SIGKVYRTLLAKSLF

SEQ ID NO: 262275 - protein, 15 aa, Artificial Sequence
  Description of Artificial Sequence: Synthetic peptide
  Seed: SIGKVCRTLLAKSVF
SIGKVYRTLLAKSMF

SEQ ID NO: 262276 - protein, 15 aa, Artificial Sequence
  Description of Artificial Sequence: Synthetic peptide
  Seed: SIGKVCRTLLAKSVF
SIGKVYRTLLAKSNF

SEQ ID NO: 262277 - protein, 15 aa, Artificial Sequence
  Description of Artificial Sequence: Synthetic peptide
  Seed: SIGKVCRTLLAKSVF
SIGKVYRTLLAKSPF

SEQ ID NO: 262278 - protein, 15 aa, Artificial Sequence
  Description of Artificial Sequence: Synthetic peptide
  Seed: SIGKVCRTLLAKSVF
SIGKVYRTLLAKSQF

SEQ ID NO: 262279 - protein, 15 aa, Artificial Sequence
  Description of Artificial Sequence: Synthetic peptide
  Seed: SIGKVCRTLLAKSVF
SIGKVYRTLLAKSSF

SEQ ID NO: 262280 - protein, 15 aa, Artificial Sequence
  Description of Artificial Sequence: Synthetic peptide
  Seed: SIGKVCRTLLAKSVF
SIGKVYRTLLAKSTF

SEQ ID NO: 262281 - protein, 15 aa, Artificial Sequence
  Description of Artificial Sequence: Synthetic peptide
  Seed: SIGKVCRTLLAKSVF
SIGKVYRTLLAKSVF

SEQ ID NO: 262282 - protein, 15 aa, Artificial Sequence
  Description of Artificial Sequence: Synthetic peptide
  Seed: SIGKVCRTLLAKSVF
SIGKVYRTLLAKSWF

SEQ ID NO: 262283 - protein, 15 aa, Artificial Sequence
  Description of Artificial Sequence: Synthetic peptide
  Seed: SIGKVCRTLLAKSVF
SIGKVYRTLLAKSYF

SEQ ID NO: 262284 - protein, 15 aa, Artificial Sequence
  Description of Artificial Sequence: Synthetic peptide
  Seed: SIGKVCRTLLAKSVF
SIGKVYRTLLFKSAF

SEQ ID NO: 262285 - protein, 15 aa, Artificial Sequence
  Description of Artificial Sequence: Synthetic peptide
  Seed: SIGKVCRTLLAKSVF
SIGKVYRTLLFKSDF

SEQ ID NO: 262286 - protein, 15 aa, Artificial Sequence
  Description of Artificial Sequence: Synthetic peptide
  Seed: SIGKVCRTLLAKSVF
SIGKVYRTLLFKSEF

SEQ ID NO: 262287 - protein, 15 aa, Artificial Sequence
  Description of Artificial Sequence: Synthetic peptide
  Seed: SIGKVCRTLLAKSVF
SIGKVYRTLLFKSFF

SEQ ID NO: 262288 - protein, 15 aa, Artificial Sequence
  Description of Artificial Sequence: Synthetic peptide
  Seed: SIGKVCRTLLAKSVF
SIGKVYRTLLFKSIF

SEQ ID NO: 262289 - protein, 15 aa, Artificial Sequence
  Description of Artificial Sequence: Synthetic peptide
  Seed: SIGKVCRTLLAKSVF
SIGKVYRTLLFKSLF

SEQ ID NO: 262290 - protein, 15 aa, Artificial Sequence
  Description of Artificial Sequence: Synthetic peptide
  Seed: SIGKVCRTLLAKSVF
SIGKVYRTLLFKSMF

SEQ ID NO: 262291 - protein, 15 aa, Artificial Sequence
  Description of Artificial Sequence: Synthetic peptide
  Seed: SIGKVCRTLLAKSVF
SIGKVYRTLLFKSTF

SEQ ID NO: 262292 - protein, 15 aa, Artificial Sequence
  Description of Artificial Sequence: Synthetic peptide
  Seed: SIGKVCRTLLAKSVF
SIGKVYRTLLFKSVF

SEQ ID NO: 262293 - protein, 15 aa, Artificial Sequence
  Description of Artificial Sequence: Synthetic peptide
  Seed: SIGKVCRTLLAKSVF
SIGKVYRTLLFKSYF

SEQ ID NO: 262294 - protein, 15 aa, Artificial Sequence
  Description of Artificial Sequence: Synthetic peptide
  Seed: SIGKVCRTLLAKSVF
SIGKVYRTLLGKSAF

SEQ ID NO: 262295 - protein, 15 aa, Artificial Sequence
  Description of Artificial Sequence: Synthetic peptide
  Seed: SIGKVCRTLLAKSVF
SIGKVYRTLLGKSCF

SEQ ID NO: 262296 - protein, 15 aa, Artificial Sequence
  Description of Artificial Sequence: Synthetic peptide
  Seed: SIGKVCRTLLAKSVF
SIGKVYRTLLGKSFF

SEQ ID NO: 262297 - protein, 15 aa, Artificial Sequence
  Description of Artificial Sequence: Synthetic peptide
  Seed: SIGKVCRTLLAKSVF
SIGKVYRTLLGKSGF

SEQ ID NO: 262298 - protein, 15 aa, Artificial Sequence
  Description of Artificial Sequence: Synthetic peptide
  Seed: SIGKVCRTLLAKSVF
SIGKVYRTLLGKSIF

SEQ ID NO: 262299 - protein, 15 aa, Artificial Sequence
  Description of Artificial Sequence: Synthetic peptide
  Seed: SIGKVCRTLLAKSVF
SIGKVYRTLLGKSLF

SEQ ID NO: 262300 - protein, 15 aa, Artificial Sequence
  Description of Artificial Sequence: Synthetic peptide
  Seed: SIGKVCRTLLAKSVF
SIGKVYRTLLGKSMF

SEQ ID NO: 262301 - protein, 15 aa, Artificial Sequence
  Description of Artificial Sequence: Synthetic peptide
  Seed: SIGKVCRTLLAKSVF
SIGKVYRTLLGKSNF

SEQ ID NO: 262302 - protein, 15 aa, Artificial Sequence
  Description of Artificial Sequence: Synthetic peptide
  Seed: SIGKVCRTLLAKSVF
SIGKVYRTLLGKSPF

SEQ ID NO: 262303 - protein, 15 aa, Artificial Sequence
  Description of Artificial Sequence: Synthetic peptide
  Seed: SIGKVCRTLLAKSVF
SIGKVYRTLLGKSSF

SEQ ID NO: 262304 - protein, 15 aa, Artificial Sequence
  Description of Artificial Sequence: Synthetic peptide
  Seed: SIGKVCRTLLAKSVF
SIGKVYRTLLGKSTF

SEQ ID NO: 262305 - protein, 15 aa, Artificial Sequence
  Description of Artificial Sequence: Synthetic peptide
  Seed: SIGKVCRTLLAKSVF
SIGKVYRTLLGKSVF

SEQ ID NO: 262306 - protein, 15 aa, Artificial Sequence
  Description of Artificial Sequence: Synthetic peptide
  Seed: SIGKVCRTLLAKSVF
SIGKVYRTLLGKSYF

SEQ ID NO: 262307 - protein, 15 aa, Artificial Sequence
  Description of Artificial Sequence: Synthetic peptide
  Seed: SIGKVCRTLLAKSVF
SIGKVYRTLLHKSLF

SEQ ID NO: 262308 - protein, 15 aa, Artificial Sequence
  Description of Artificial Sequence: Synthetic peptide
  Seed: SIGKVCRTLLAKSVF
SIGKVYRTLLHKSVF

SEQ ID NO: 262309 - protein, 15 aa, Artificial Sequence
  Description of Artificial Sequence: Synthetic peptide
  Seed: SIGKVCRTLLAKSVF
SIGKVYRTLLIKSAF

SEQ ID NO: 262310 - protein, 15 aa, Artificial Sequence
  Description of Artificial Sequence: Synthetic peptide
  Seed: SIGKVCRTLLAKSVF
SIGKVYRTLLIKSIF

SEQ ID NO: 262311 - protein, 15 aa, Artificial Sequence
  Description of Artificial Sequence: Synthetic peptide
  Seed: SIGKVCRTLLAKSVF
SIGKVYRTLLIKSLF

SEQ ID NO: 262312 - protein, 15 aa, Artificial Sequence
  Description of Artificial Sequence: Synthetic peptide
  Seed: SIGKVCRTLLAKSVF
SIGKVYRTLLIKSMF

SEQ ID NO: 262313 - protein, 15 aa, Artificial Sequence
  Description of Artificial Sequence: Synthetic peptide
  Seed: SIGKVCRTLLAKSVF
SIGKVYRTLLIKSNF

SEQ ID NO: 262314 - protein, 15 aa, Artificial Sequence
  Description of Artificial Sequence: Synthetic peptide
  Seed: SIGKVCRTLLAKSVF
SIGKVYRTLLIKSSF

SEQ ID NO: 262315 - protein, 15 aa, Artificial Sequence
  Description of Artificial Sequence: Synthetic peptide
  Seed: SIGKVCRTLLAKSVF
SIGKVYRTLLIKSTF

SEQ ID NO: 262316 - protein, 15 aa, Artificial Sequence
  Description of Artificial Sequence: Synthetic peptide
  Seed: SIGKVCRTLLAKSVF
SIGKVYRTLLIKSVF

SEQ ID NO: 262317 - protein, 15 aa, Artificial Sequence
  Description of Artificial Sequence: Synthetic peptide
  Seed: SIGKVCRTLLAKSVF
SIGKVYRTLLLKSAF

SEQ ID NO: 262318 - protein, 15 aa, Artificial Sequence
  Description of Artificial Sequence: Synthetic peptide
  Seed: SIGKVCRTLLAKSVF
SIGKVYRTLLLKSIF

SEQ ID NO: 262319 - protein, 15 aa, Artificial Sequence
  Description of Artificial Sequence: Synthetic peptide
  Seed: SIGKVCRTLLAKSVF
SIGKVYRTLLLKSLF

SEQ ID NO: 262320 - protein, 15 aa, Artificial Sequence
  Description of Artificial Sequence: Synthetic peptide
  Seed: SIGKVCRTLLAKSVF
SIGKVYRTLLLKSNF

SEQ ID NO: 262321 - protein, 15 aa, Artificial Sequence
  Description of Artificial Sequence: Synthetic peptide
  Seed: SIGKVCRTLLAKSVF
SIGKVYRTLLLKSVF

SEQ ID NO: 262322 - protein, 15 aa, Artificial Sequence
  Description of Artificial Sequence: Synthetic peptide
  Seed: SIGKVCRTLLAKSVF
SIGKVYRTLLMKSAF

SEQ ID NO: 262323 - protein, 15 aa, Artificial Sequence
  Description of Artificial Sequence: Synthetic peptide
  Seed: SIGKVCRTLLAKSVF
SIGKVYRTLLMKSIF

SEQ ID NO: 262324 - protein, 15 aa, Artificial Sequence
  Description of Artificial Sequence: Synthetic peptide
  Seed: SIGKVCRTLLAKSVF
SIGKVYRTLLMKSNF

SEQ ID NO: 262325 - protein, 15 aa, Artificial Sequence
  Description of Artificial Sequence: Synthetic peptide
  Seed: SIGKVCRTLLAKSVF
SIGKVYRTLLMKSSF

SEQ ID NO: 262326 - protein, 15 aa, Artificial Sequence
  Description of Artificial Sequence: Synthetic peptide
  Seed: SIGKVCRTLLAKSVF
SIGKVYRTLLMKSVF

SEQ ID NO: 262327 - protein, 15 aa, Artificial Sequence
  Description of Artificial Sequence: Synthetic peptide
  Seed: SIGKVCRTLLAKSVF
SIGKVYRTLLNKSAF

SEQ ID NO: 262328 - protein, 15 aa, Artificial Sequence
  Description of Artificial Sequence: Synthetic peptide
  Seed: SIGKVCRTLLAKSVF
SIGKVYRTLLNKSIF

SEQ ID NO: 262329 - protein, 15 aa, Artificial Sequence
  Description of Artificial Sequence: Synthetic peptide
  Seed: SIGKVCRTLLAKSVF
SIGKVYRTLLNKSLF

SEQ ID NO: 262330 - protein, 15 aa, Artificial Sequence
  Description of Artificial Sequence: Synthetic peptide
  Seed: SIGKVCRTLLAKSVF
SIGKVYRTLLNKSMF

SEQ ID NO: 262331 - protein, 15 aa, Artificial Sequence
  Description of Artificial Sequence: Synthetic peptide
  Seed: SIGKVCRTLLAKSVF
SIGKVYRTLLNKSNF

SEQ ID NO: 262332 - protein, 15 aa, Artificial Sequence
  Description of Artificial Sequence: Synthetic peptide
  Seed: SIGKVCRTLLAKSVF
SIGKVYRTLLNKSSF

SEQ ID NO: 262333 - protein, 15 aa, Artificial Sequence
  Description of Artificial Sequence: Synthetic peptide
  Seed: SIGKVCRTLLAKSVF
SIGKVYRTLLNKSTF

SEQ ID NO: 262334 - protein, 15 aa, Artificial Sequence
  Description of Artificial Sequence: Synthetic peptide
  Seed: SIGKVCRTLLAKSVF
SIGKVYRTLLNKSVF

SEQ ID NO: 262335 - protein, 15 aa, Artificial Sequence
  Description of Artificial Sequence: Synthetic peptide
  Seed: SIGKVCRTLLAKSVF
SIGKVYRTLLPKSAF

SEQ ID NO: 262336 - protein, 15 aa, Artificial Sequence
  Description of Artificial Sequence: Synthetic peptide
  Seed: SIGKVCRTLLAKSVF
SIGKVYRTLLPKSCF

SEQ ID NO: 262337 - protein, 15 aa, Artificial Sequence
  Description of Artificial Sequence: Synthetic peptide
  Seed: SIGKVCRTLLAKSVF
SIGKVYRTLLPKSFF

SEQ ID NO: 262338 - protein, 15 aa, Artificial Sequence
  Description of Artificial Sequence: Synthetic peptide
  Seed: SIGKVCRTLLAKSVF
SIGKVYRTLLPKSGF

SEQ ID NO: 262339 - protein, 15 aa, Artificial Sequence
  Description of Artificial Sequence: Synthetic peptide
  Seed: SIGKVCRTLLAKSVF
SIGKVYRTLLPKSHF

SEQ ID NO: 262340 - protein, 15 aa, Artificial Sequence
  Description of Artificial Sequence: Synthetic peptide
  Seed: SIGKVCRTLLAKSVF
SIGKVYRTLLPKSIF

SEQ ID NO: 262341 - protein, 15 aa, Artificial Sequence
  Description of Artificial Sequence: Synthetic peptide
  Seed: SIGKVCRTLLAKSVF
SIGKVYRTLLPKSLF

SEQ ID NO: 262342 - protein, 15 aa, Artificial Sequence
  Description of Artificial Sequence: Synthetic peptide
  Seed: SIGKVCRTLLAKSVF
SIGKVYRTLLPKSMF

SEQ ID NO: 262343 - protein, 15 aa, Artificial Sequence
  Description of Artificial Sequence: Synthetic peptide
  Seed: SIGKVCRTLLAKSVF
SIGKVYRTLLPKSNF

SEQ ID NO: 262344 - protein, 15 aa, Artificial Sequence
  Description of Artificial Sequence: Synthetic peptide
  Seed: SIGKVCRTLLAKSVF
SIGKVYRTLLPKSPF

SEQ ID NO: 262345 - protein, 15 aa, Artificial Sequence
  Description of Artificial Sequence: Synthetic peptide
  Seed: SIGKVCRTLLAKSVF
SIGKVYRTLLPKSQF

SEQ ID NO: 262346 - protein, 15 aa, Artificial Sequence
  Description of Artificial Sequence: Synthetic peptide
  Seed: SIGKVCRTLLAKSVF
SIGKVYRTLLPKSSF

SEQ ID NO: 262347 - protein, 15 aa, Artificial Sequence
  Description of Artificial Sequence: Synthetic peptide
  Seed: SIGKVCRTLLAKSVF
SIGKVYRTLLPKSTF

SEQ ID NO: 262348 - protein, 15 aa, Artificial Sequence
  Description of Artificial Sequence: Synthetic peptide
  Seed: SIGKVCRTLLAKSVF
SIGKVYRTLLPKSVF

SEQ ID NO: 262349 - protein, 15 aa, Artificial Sequence
  Description of Artificial Sequence: Synthetic peptide
  Seed: SIGKVCRTLLAKSVF
SIGKVYRTLLQKSVF

SEQ ID NO: 262350 - protein, 15 aa, Artificial Sequence
  Description of Artificial Sequence: Synthetic peptide
  Seed: SIGKVCRTLLAKSVF
SIGKVYRTLLSKSAF

SEQ ID NO: 262351 - protein, 15 aa, Artificial Sequence
  Description of Artificial Sequence: Synthetic peptide
  Seed: SIGKVCRTLLAKSVF
SIGKVYRTLLSKSCF

SEQ ID NO: 262352 - protein, 15 aa, Artificial Sequence
  Description of Artificial Sequence: Synthetic peptide
  Seed: SIGKVCRTLLAKSVF
SIGKVYRTLLSKSFF

SEQ ID NO: 262353 - protein, 15 aa, Artificial Sequence
  Description of Artificial Sequence: Synthetic peptide
  Seed: SIGKVCRTLLAKSVF
SIGKVYRTLLSKSGF

SEQ ID NO: 262354 - protein, 15 aa, Artificial Sequence
  Description of Artificial Sequence: Synthetic peptide
  Seed: SIGKVCRTLLAKSVF
SIGKVYRTLLSKSHF

SEQ ID NO: 262355 - protein, 15 aa, Artificial Sequence
  Description of Artificial Sequence: Synthetic peptide
  Seed: SIGKVCRTLLAKSVF
SIGKVYRTLLSKSIF

SEQ ID NO: 262356 - protein, 15 aa, Artificial Sequence
  Description of Artificial Sequence: Synthetic peptide
  Seed: SIGKVCRTLLAKSVF
SIGKVYRTLLSKSLF

SEQ ID NO: 262357 - protein, 15 aa, Artificial Sequence
  Description of Artificial Sequence: Synthetic peptide
  Seed: SIGKVCRTLLAKSVF
SIGKVYRTLLSKSMF

SEQ ID NO: 262358 - protein, 15 aa, Artificial Sequence
  Description of Artificial Sequence: Synthetic peptide
  Seed: SIGKVCRTLLAKSVF
SIGKVYRTLLSKSNF

SEQ ID NO: 262359 - protein, 15 aa, Artificial Sequence
  Description of Artificial Sequence: Synthetic peptide
  Seed: SIGKVCRTLLAKSVF
SIGKVYRTLLSKSPF

SEQ ID NO: 262360 - protein, 15 aa, Artificial Sequence
  Description of Artificial Sequence: Synthetic peptide
  Seed: SIGKVCRTLLAKSVF
SIGKVYRTLLSKSQF

SEQ ID NO: 262361 - protein, 15 aa, Artificial Sequence
  Description of Artificial Sequence: Synthetic peptide
  Seed: SIGKVCRTLLAKSVF
SIGKVYRTLLSKSSF

SEQ ID NO: 262362 - protein, 15 aa, Artificial Sequence
  Description of Artificial Sequence: Synthetic peptide
  Seed: SIGKVCRTLLAKSVF
SIGKVYRTLLSKSTF

SEQ ID NO: 262363 - protein, 15 aa, Artificial Sequence
  Description of Artificial Sequence: Synthetic peptide
  Seed: SIGKVCRTLLAKSVF
SIGKVYRTLLSKSVF

SEQ ID NO: 262364 - protein, 15 aa, Artificial Sequence
  Description of Artificial Sequence: Synthetic peptide
  Seed: SIGKVCRTLLAKSVF
SIGKVYRTLLSKSYF

SEQ ID NO: 262365 - protein, 15 aa, Artificial Sequence
  Description of Artificial Sequence: Synthetic peptide
  Seed: SIGKVCRTLLAKSVF
SIGKVYRTLLTKSAF

SEQ ID NO: 262366 - protein, 15 aa, Artificial Sequence
  Description of Artificial Sequence: Synthetic peptide
  Seed: SIGKVCRTLLAKSVF
SIGKVYRTLLTKSFF

SEQ ID NO: 262367 - protein, 15 aa, Artificial Sequence
  Description of Artificial Sequence: Synthetic peptide
  Seed: SIGKVCRTLLAKSVF
SIGKVYRTLLTKSGF

SEQ ID NO: 262368 - protein, 15 aa, Artificial Sequence
  Description of Artificial Sequence: Synthetic peptide
  Seed: SIGKVCRTLLAKSVF
SIGKVYRTLLTKSHF

SEQ ID NO: 262369 - protein, 15 aa, Artificial Sequence
  Description of Artificial Sequence: Synthetic peptide
  Seed: SIGKVCRTLLAKSVF
SIGKVYRTLLTKSIF

SEQ ID NO: 262370 - protein, 15 aa, Artificial Sequence
  Description of Artificial Sequence: Synthetic peptide
  Seed: SIGKVCRTLLAKSVF
SIGKVYRTLLTKSLF

SEQ ID NO: 262371 - protein, 15 aa, Artificial Sequence
  Description of Artificial Sequence: Synthetic peptide
  Seed: SIGKVCRTLLAKSVF
SIGKVYRTLLTKSMF

SEQ ID NO: 262372 - protein, 15 aa, Artificial Sequence
  Description of Artificial Sequence: Synthetic peptide
  Seed: SIGKVCRTLLAKSVF
SIGKVYRTLLTKSNF

SEQ ID NO: 262373 - protein, 15 aa, Artificial Sequence
  Description of Artificial Sequence: Synthetic peptide
  Seed: SIGKVCRTLLAKSVF
SIGKVYRTLLTKSSF

SEQ ID NO: 262374 - protein, 15 aa, Artificial Sequence
  Description of Artificial Sequence: Synthetic peptide
  Seed: SIGKVCRTLLAKSVF
SIGKVYRTLLTKSTF

SEQ ID NO: 262375 - protein, 15 aa, Artificial Sequence
  Description of Artificial Sequence: Synthetic peptide
  Seed: SIGKVCRTLLAKSVF
SIGKVYRTLLTKSVF

SEQ ID NO: 262376 - protein, 15 aa, Artificial Sequence
  Description of Artificial Sequence: Synthetic peptide
  Seed: SIGKVCRTLLAKSVF
SIGKVYRTLLVKSAF

SEQ ID NO: 262377 - protein, 15 aa, Artificial Sequence
  Description of Artificial Sequence: Synthetic peptide
  Seed: SIGKVCRTLLAKSVF
SIGKVYRTLLVKSGF

SEQ ID NO: 262378 - protein, 15 aa, Artificial Sequence
  Description of Artificial Sequence: Synthetic peptide
  Seed: SIGKVCRTLLAKSVF
SIGKVYRTLLVKSHF

SEQ ID NO: 262379 - protein, 15 aa, Artificial Sequence
  Description of Artificial Sequence: Synthetic peptide
  Seed: SIGKVCRTLLAKSVF
SIGKVYRTLLVKSIF

SEQ ID NO: 262380 - protein, 15 aa, Artificial Sequence
  Description of Artificial Sequence: Synthetic peptide
  Seed: SIGKVCRTLLAKSVF
SIGKVYRTLLVKSLF

SEQ ID NO: 262381 - protein, 15 aa, Artificial Sequence
  Description of Artificial Sequence: Synthetic peptide
  Seed: SIGKVCRTLLAKSVF
SIGKVYRTLLVKSMF

SEQ ID NO: 262382 - protein, 15 aa, Artificial Sequence
  Description of Artificial Sequence: Synthetic peptide
  Seed: SIGKVCRTLLAKSVF
SIGKVYRTLLVKSNF

SEQ ID NO: 262383 - protein, 15 aa, Artificial Sequence
  Description of Artificial Sequence: Synthetic peptide
  Seed: SIGKVCRTLLAKSVF
SIGKVYRTLLVKSSF

SEQ ID NO: 262384 - protein, 15 aa, Artificial Sequence
  Description of Artificial Sequence: Synthetic peptide
  Seed: SIGKVCRTLLAKSVF
SIGKVYRTLLVKSTF

SEQ ID NO: 262385 - protein, 15 aa, Artificial Sequence
  Description of Artificial Sequence: Synthetic peptide
  Seed: SIGKVCRTLLAKSVF
SIGKVYRTLLVKSVF

SEQ ID NO: 262386 - protein, 15 aa, Artificial Sequence
  Description of Artificial Sequence: Synthetic peptide
  Seed: SIGKVCRTLLAKSVF
SIGKVYRTLLYKSIF

SEQ ID NO: 262387 - protein, 15 aa, Artificial Sequence
  Description of Artificial Sequence: Synthetic peptide
  Seed: SIGKVCRTLLAKSVF
SIGKVYRTLLYKSLF

SEQ ID NO: 262388 - protein, 15 aa, Artificial Sequence
  Description of Artificial Sequence: Synthetic peptide
  Seed: SIGKVCRTLLAKSVF
SIGKVYRTMLAKSAF

SEQ ID NO: 262389 - protein, 15 aa, Artificial Sequence
  Description of Artificial Sequence: Synthetic peptide
  Seed: SIGKVCRTLLAKSVF
SIGKVYRTMLAKSCF

SEQ ID NO: 262390 - protein, 15 aa, Artificial Sequence
  Description of Artificial Sequence: Synthetic peptide
  Seed: SIGKVCRTLLAKSVF
SIGKVYRTMLAKSDF

SEQ ID NO: 262391 - protein, 15 aa, Artificial Sequence
  Description of Artificial Sequence: Synthetic peptide
  Seed: SIGKVCRTLLAKSVF
SIGKVYRTMLAKSEF

SEQ ID NO: 262392 - protein, 15 aa, Artificial Sequence
  Description of Artificial Sequence: Synthetic peptide
  Seed: SIGKVCRTLLAKSVF
SIGKVYRTMLAKSFF

SEQ ID NO: 262393 - protein, 15 aa, Artificial Sequence
  Description of Artificial Sequence: Synthetic peptide
  Seed: SIGKVCRTLLAKSVF
SIGKVYRTMLAKSGF

SEQ ID NO: 262394 - protein, 15 aa, Artificial Sequence
  Description of Artificial Sequence: Synthetic peptide
  Seed: SIGKVCRTLLAKSVF
SIGKVYRTMLAKSHF

SEQ ID NO: 262395 - protein, 15 aa, Artificial Sequence
  Description of Artificial Sequence: Synthetic peptide
  Seed: SIGKVCRTLLAKSVF
SIGKVYRTMLAKSIF

SEQ ID NO: 262396 - protein, 15 aa, Artificial Sequence
  Description of Artificial Sequence: Synthetic peptide
  Seed: SIGKVCRTLLAKSVF
SIGKVYRTMLAKSLF

SEQ ID NO: 262397 - protein, 15 aa, Artificial Sequence
  Description of Artificial Sequence: Synthetic peptide
  Seed: SIGKVCRTLLAKSVF
SIGKVYRTMLAKSMF

SEQ ID NO: 262398 - protein, 15 aa, Artificial Sequence
  Description of Artificial Sequence: Synthetic peptide
  Seed: SIGKVCRTLLAKSVF
SIGKVYRTMLAKSNF

SEQ ID NO: 262399 - protein, 15 aa, Artificial Sequence
  Description of Artificial Sequence: Synthetic peptide
  Seed: SIGKVCRTLLAKSVF
SIGKVYRTMLAKSPF

SEQ ID NO: 262400 - protein, 15 aa, Artificial Sequence
  Description of Artificial Sequence: Synthetic peptide
  Seed: SIGKVCRTLLAKSVF
SIGKVYRTMLAKSQF

SEQ ID NO: 262401 - protein, 15 aa, Artificial Sequence
  Description of Artificial Sequence: Synthetic peptide
  Seed: SIGKVCRTLLAKSVF
SIGKVYRTMLAKSRF

SEQ ID NO: 262402 - protein, 15 aa, Artificial Sequence
  Description of Artificial Sequence: Synthetic peptide
  Seed: SIGKVCRTLLAKSVF
SIGKVYRTMLAKSSF

SEQ ID NO: 262403 - protein, 15 aa, Artificial Sequence
  Description of Artificial Sequence: Synthetic peptide
  Seed: SIGKVCRTLLAKSVF
SIGKVYRTMLAKSTF

SEQ ID NO: 262404 - protein, 15 aa, Artificial Sequence
  Description of Artificial Sequence: Synthetic peptide
  Seed: SIGKVCRTLLAKSVF
SIGKVYRTMLAKSVF

SEQ ID NO: 262405 - protein, 15 aa, Artificial Sequence
  Description of Artificial Sequence: Synthetic peptide
  Seed: SIGKVCRTLLAKSVF
SIGKVYRTMLAKSWF

SEQ ID NO: 262406 - protein, 15 aa, Artificial Sequence
  Description of Artificial Sequence: Synthetic peptide
  Seed: SIGKVCRTLLAKSVF
SIGKVYRTMLAKSYF

SEQ ID NO: 262407 - protein, 15 aa, Artificial Sequence
  Description of Artificial Sequence: Synthetic peptide
  Seed: SIGKVCRTLLAKSVF
SIGKVYRTMLFKSFF

SEQ ID NO: 262408 - protein, 15 aa, Artificial Sequence
  Description of Artificial Sequence: Synthetic peptide
  Seed: SIGKVCRTLLAKSVF
SIGKVYRTMLFKSIF

SEQ ID NO: 262409 - protein, 15 aa, Artificial Sequence
  Description of Artificial Sequence: Synthetic peptide
  Seed: SIGKVCRTLLAKSVF
SIGKVYRTMLFKSLF

SEQ ID NO: 262410 - protein, 15 aa, Artificial Sequence
  Description of Artificial Sequence: Synthetic peptide
  Seed: SIGKVCRTLLAKSVF
SIGKVYRTMLFKSMF

SEQ ID NO: 262411 - protein, 15 aa, Artificial Sequence
  Description of Artificial Sequence: Synthetic peptide
  Seed: SIGKVCRTLLAKSVF
SIGKVYRTMLFKSTF

SEQ ID NO: 262412 - protein, 15 aa, Artificial Sequence
  Description of Artificial Sequence: Synthetic peptide
  Seed: SIGKVCRTLLAKSVF
SIGKVYRTMLFKSVF

SEQ ID NO: 262413 - protein, 15 aa, Artificial Sequence
  Description of Artificial Sequence: Synthetic peptide
  Seed: SIGKVCRTLLAKSVF
SIGKVYRTMLGKSAF

SEQ ID NO: 262414 - protein, 15 aa, Artificial Sequence
  Description of Artificial Sequence: Synthetic peptide
  Seed: SIGKVCRTLLAKSVF
SIGKVYRTMLGKSCF

SEQ ID NO: 262415 - protein, 15 aa, Artificial Sequence
  Description of Artificial Sequence: Synthetic peptide
  Seed: SIGKVCRTLLAKSVF
SIGKVYRTMLGKSFF

SEQ ID NO: 262416 - protein, 15 aa, Artificial Sequence
  Description of Artificial Sequence: Synthetic peptide
  Seed: SIGKVCRTLLAKSVF
SIGKVYRTMLGKSGF

SEQ ID NO: 262417 - protein, 15 aa, Artificial Sequence
  Description of Artificial Sequence: Synthetic peptide
  Seed: SIGKVCRTLLAKSVF
SIGKVYRTMLGKSIF

SEQ ID NO: 262418 - protein, 15 aa, Artificial Sequence
  Description of Artificial Sequence: Synthetic peptide
  Seed: SIGKVCRTLLAKSVF
SIGKVYRTMLGKSLF

SEQ ID NO: 262419 - protein, 15 aa, Artificial Sequence
  Description of Artificial Sequence: Synthetic peptide
  Seed: SIGKVCRTLLAKSVF
SIGKVYRTMLGKSMF

SEQ ID NO: 262420 - protein, 15 aa, Artificial Sequence
  Description of Artificial Sequence: Synthetic peptide
  Seed: SIGKVCRTLLAKSVF
SIGKVYRTMLGKSNF

SEQ ID NO: 262421 - protein, 15 aa, Artificial Sequence
  Description of Artificial Sequence: Synthetic peptide
  Seed: SIGKVCRTLLAKSVF
SIGKVYRTMLGKSPF

SEQ ID NO: 262422 - protein, 15 aa, Artificial Sequence
  Description of Artificial Sequence: Synthetic peptide
  Seed: SIGKVCRTLLAKSVF
SIGKVYRTMLGKSSF

SEQ ID NO: 262423 - protein, 15 aa, Artificial Sequence
  Description of Artificial Sequence: Synthetic peptide
  Seed: SIGKVCRTLLAKSVF
SIGKVYRTMLGKSTF

SEQ ID NO: 262424 - protein, 15 aa, Artificial Sequence
  Description of Artificial Sequence: Synthetic peptide
  Seed: SIGKVCRTLLAKSVF
SIGKVYRTMLGKSVF

SEQ ID NO: 262425 - protein, 15 aa, Artificial Sequence
  Description of Artificial Sequence: Synthetic peptide
  Seed: SIGKVCRTLLAKSVF
SIGKVYRTMLGKSYF

SEQ ID NO: 262426 - protein, 15 aa, Artificial Sequence
  Description of Artificial Sequence: Synthetic peptide
  Seed: SIGKVCRTLLAKSVF
SIGKVYRTMLHKSIF

SEQ ID NO: 262427 - protein, 15 aa, Artificial Sequence
  Description of Artificial Sequence: Synthetic peptide
  Seed: SIGKVCRTLLAKSVF
SIGKVYRTMLHKSLF

SEQ ID NO: 262428 - protein, 15 aa, Artificial Sequence
  Description of Artificial Sequence: Synthetic peptide
  Seed: SIGKVCRTLLAKSVF
SIGKVYRTMLHKSVF

SEQ ID NO: 262429 - protein, 15 aa, Artificial Sequence
  Description of Artificial Sequence: Synthetic peptide
  Seed: SIGKVCRTLLAKSVF
SIGKVYRTMLIKSAF

SEQ ID NO: 262430 - protein, 15 aa, Artificial Sequence
  Description of Artificial Sequence: Synthetic peptide
  Seed: SIGKVCRTLLAKSVF
SIGKVYRTMLIKSGF

SEQ ID NO: 262431 - protein, 15 aa, Artificial Sequence
  Description of Artificial Sequence: Synthetic peptide
  Seed: SIGKVCRTLLAKSVF
SIGKVYRTMLIKSHF

SEQ ID NO: 262432 - protein, 15 aa, Artificial Sequence
  Description of Artificial Sequence: Synthetic peptide
  Seed: SIGKVCRTLLAKSVF
SIGKVYRTMLIKSIF

SEQ ID NO: 262433 - protein, 15 aa, Artificial Sequence
  Description of Artificial Sequence: Synthetic peptide
  Seed: SIGKVCRTLLAKSVF
SIGKVYRTMLIKSLF

SEQ ID NO: 262434 - protein, 15 aa, Artificial Sequence
  Description of Artificial Sequence: Synthetic peptide
  Seed: SIGKVCRTLLAKSVF
SIGKVYRTMLIKSMF

SEQ ID NO: 262435 - protein, 15 aa, Artificial Sequence
  Description of Artificial Sequence: Synthetic peptide
  Seed: SIGKVCRTLLAKSVF
SIGKVYRTMLIKSNF

SEQ ID NO: 262436 - protein, 15 aa, Artificial Sequence
  Description of Artificial Sequence: Synthetic peptide
  Seed: SIGKVCRTLLAKSVF
SIGKVYRTMLIKSSF

SEQ ID NO: 262437 - protein, 15 aa, Artificial Sequence
  Description of Artificial Sequence: Synthetic peptide
  Seed: SIGKVCRTLLAKSVF
SIGKVYRTMLIKSTF

SEQ ID NO: 262438 - protein, 15 aa, Artificial Sequence
  Description of Artificial Sequence: Synthetic peptide
  Seed: SIGKVCRTLLAKSVF
SIGKVYRTMLIKSVF

SEQ ID NO: 262439 - protein, 15 aa, Artificial Sequence
  Description of Artificial Sequence: Synthetic peptide
  Seed: SIGKVCRTLLAKSVF
SIGKVYRTMLLKSAF

SEQ ID NO: 262440 - protein, 15 aa, Artificial Sequence
  Description of Artificial Sequence: Synthetic peptide
  Seed: SIGKVCRTLLAKSVF
SIGKVYRTMLLKSNF

SEQ ID NO: 262441 - protein, 15 aa, Artificial Sequence
  Description of Artificial Sequence: Synthetic peptide
  Seed: SIGKVCRTLLAKSVF
SIGKVYRTMLLKSSF

SEQ ID NO: 262442 - protein, 15 aa, Artificial Sequence
  Description of Artificial Sequence: Synthetic peptide
  Seed: SIGKVCRTLLAKSVF
SIGKVYRTMLLKSTF

SEQ ID NO: 262443 - protein, 15 aa, Artificial Sequence
  Description of Artificial Sequence: Synthetic peptide
  Seed: SIGKVCRTLLAKSVF
SIGKVYRTMLLKSVF

SEQ ID NO: 262444 - protein, 15 aa, Artificial Sequence
  Description of Artificial Sequence: Synthetic peptide
  Seed: SIGKVCRTLLAKSVF
SIGKVYRTMLMKSAF

SEQ ID NO: 262445 - protein, 15 aa, Artificial Sequence
  Description of Artificial Sequence: Synthetic peptide
  Seed: SIGKVCRTLLAKSVF
SIGKVYRTMLMKSIF

SEQ ID NO: 262446 - protein, 15 aa, Artificial Sequence
  Description of Artificial Sequence: Synthetic peptide
  Seed: SIGKVCRTLLAKSVF
SIGKVYRTMLMKSLF

SEQ ID NO: 262447 - protein, 15 aa, Artificial Sequence
  Description of Artificial Sequence: Synthetic peptide
  Seed: SIGKVCRTLLAKSVF
SIGKVYRTMLMKSNF

SEQ ID NO: 262448 - protein, 15 aa, Artificial Sequence
  Description of Artificial Sequence: Synthetic peptide
  Seed: SIGKVCRTLLAKSVF
SIGKVYRTMLMKSSF

SEQ ID NO: 262449 - protein, 15 aa, Artificial Sequence
  Description of Artificial Sequence: Synthetic peptide
  Seed: SIGKVCRTLLAKSVF
SIGKVYRTMLMKSTF

SEQ ID NO: 262450 - protein, 15 aa, Artificial Sequence
  Description of Artificial Sequence: Synthetic peptide
  Seed: SIGKVCRTLLAKSVF
SIGKVYRTMLMKSVF

SEQ ID NO: 262451 - protein, 15 aa, Artificial Sequence
  Description of Artificial Sequence: Synthetic peptide
  Seed: SIGKVCRTLLAKSVF
SIGKVYRTMLNKSAF

SEQ ID NO: 262452 - protein, 15 aa, Artificial Sequence
  Description of Artificial Sequence: Synthetic peptide
  Seed: SIGKVCRTLLAKSVF
SIGKVYRTMLNKSIF

SEQ ID NO: 262453 - protein, 15 aa, Artificial Sequence
  Description of Artificial Sequence: Synthetic peptide
  Seed: SIGKVCRTLLAKSVF
SIGKVYRTMLNKSLF

SEQ ID NO: 262454 - protein, 15 aa, Artificial Sequence
  Description of Artificial Sequence: Synthetic peptide
  Seed: SIGKVCRTLLAKSVF
SIGKVYRTMLNKSMF

SEQ ID NO: 262455 - protein, 15 aa, Artificial Sequence
  Description of Artificial Sequence: Synthetic peptide
  Seed: SIGKVCRTLLAKSVF
SIGKVYRTMLNKSNF

SEQ ID NO: 262456 - protein, 15 aa, Artificial Sequence
  Description of Artificial Sequence: Synthetic peptide
  Seed: SIGKVCRTLLAKSVF
SIGKVYRTMLNKSSF

SEQ ID NO: 262457 - protein, 15 aa, Artificial Sequence
  Description of Artificial Sequence: Synthetic peptide
  Seed: SIGKVCRTLLAKSVF
SIGKVYRTMLNKSTF

SEQ ID NO: 262458 - protein, 15 aa, Artificial Sequence
  Description of Artificial Sequence: Synthetic peptide
  Seed: SIGKVCRTLLAKSVF
SIGKVYRTMLNKSVF

SEQ ID NO: 262459 - protein, 15 aa, Artificial Sequence
  Description of Artificial Sequence: Synthetic peptide
  Seed: SIGKVCRTLLAKSVF
SIGKVYRTMLPKSAF

SEQ ID NO: 262460 - protein, 15 aa, Artificial Sequence
  Description of Artificial Sequence: Synthetic peptide
  Seed: SIGKVCRTLLAKSVF
SIGKVYRTMLPKSCF

SEQ ID NO: 262461 - protein, 15 aa, Artificial Sequence
  Description of Artificial Sequence: Synthetic peptide
  Seed: SIGKVCRTLLAKSVF
SIGKVYRTMLPKSFF

SEQ ID NO: 262462 - protein, 15 aa, Artificial Sequence
  Description of Artificial Sequence: Synthetic peptide
  Seed: SIGKVCRTLLAKSVF
SIGKVYRTMLPKSGF

SEQ ID NO: 262463 - protein, 15 aa, Artificial Sequence
  Description of Artificial Sequence: Synthetic peptide
  Seed: SIGKVCRTLLAKSVF
SIGKVYRTMLPKSHF

SEQ ID NO: 262464 - protein, 15 aa, Artificial Sequence
  Description of Artificial Sequence: Synthetic peptide
  Seed: SIGKVCRTLLAKSVF
SIGKVYRTMLPKSIF

SEQ ID NO: 262465 - protein, 15 aa, Artificial Sequence
  Description of Artificial Sequence: Synthetic peptide
  Seed: SIGKVCRTLLAKSVF
SIGKVYRTMLPKSLF

SEQ ID NO: 262466 - protein, 15 aa, Artificial Sequence
  Description of Artificial Sequence: Synthetic peptide
  Seed: SIGKVCRTLLAKSVF
SIGKVYRTMLPKSMF

SEQ ID NO: 262467 - protein, 15 aa, Artificial Sequence
  Description of Artificial Sequence: Synthetic peptide
  Seed: SIGKVCRTLLAKSVF
SIGKVYRTMLPKSNF

SEQ ID NO: 262468 - protein, 15 aa, Artificial Sequence
  Description of Artificial Sequence: Synthetic peptide
  Seed: SIGKVCRTLLAKSVF
SIGKVYRTMLPKSPF

SEQ ID NO: 262469 - protein, 15 aa, Artificial Sequence
  Description of Artificial Sequence: Synthetic peptide
  Seed: SIGKVCRTLLAKSVF
SIGKVYRTMLPKSQF

SEQ ID NO: 262470 - protein, 15 aa, Artificial Sequence
  Description of Artificial Sequence: Synthetic peptide
  Seed: SIGKVCRTLLAKSVF
SIGKVYRTMLPKSSF

SEQ ID NO: 262471 - protein, 15 aa, Artificial Sequence
  Description of Artificial Sequence: Synthetic peptide
  Seed: SIGKVCRTLLAKSVF
SIGKVYRTMLPKSTF

SEQ ID NO: 262472 - protein, 15 aa, Artificial Sequence
  Description of Artificial Sequence: Synthetic peptide
  Seed: SIGKVCRTLLAKSVF
SIGKVYRTMLPKSVF

SEQ ID NO: 262473 - protein, 15 aa, Artificial Sequence
  Description of Artificial Sequence: Synthetic peptide
  Seed: SIGKVCRTLLAKSVF
SIGKVYRTMLQKSIF

SEQ ID NO: 262474 - protein, 15 aa, Artificial Sequence
  Description of Artificial Sequence: Synthetic peptide
  Seed: SIGKVCRTLLAKSVF
SIGKVYRTMLQKSLF

SEQ ID NO: 262475 - protein, 15 aa, Artificial Sequence
  Description of Artificial Sequence: Synthetic peptide
  Seed: SIGKVCRTLLAKSVF
SIGKVYRTMLQKSVF

SEQ ID NO: 262476 - protein, 15 aa, Artificial Sequence
  Description of Artificial Sequence: Synthetic peptide
  Seed: SIGKVCRTLLAKSVF
SIGKVYRTMLSKSAF

SEQ ID NO: 262477 - protein, 15 aa, Artificial Sequence
  Description of Artificial Sequence: Synthetic peptide
  Seed: SIGKVCRTLLAKSVF
SIGKVYRTMLSKSCF

SEQ ID NO: 262478 - protein, 15 aa, Artificial Sequence
  Description of Artificial Sequence: Synthetic peptide
  Seed: SIGKVCRTLLAKSVF
SIGKVYRTMLSKSFF

SEQ ID NO: 262479 - protein, 15 aa, Artificial Sequence
  Description of Artificial Sequence: Synthetic peptide
  Seed: SIGKVCRTLLAKSVF
SIGKVYRTMLSKSGF

SEQ ID NO: 262480 - protein, 15 aa, Artificial Sequence
  Description of Artificial Sequence: Synthetic peptide
  Seed: SIGKVCRTLLAKSVF
SIGKVYRTMLSKSHF

SEQ ID NO: 262481 - protein, 15 aa, Artificial Sequence
  Description of Artificial Sequence: Synthetic peptide
  Seed: SIGKVCRTLLAKSVF
SIGKVYRTMLSKSIF

SEQ ID NO: 262482 - protein, 15 aa, Artificial Sequence
  Description of Artificial Sequence: Synthetic peptide
  Seed: SIGKVCRTLLAKSVF
SIGKVYRTMLSKSLF

SEQ ID NO: 262483 - protein, 15 aa, Artificial Sequence
  Description of Artificial Sequence: Synthetic peptide
  Seed: SIGKVCRTLLAKSVF
SIGKVYRTMLSKSMF

SEQ ID NO: 262484 - protein, 15 aa, Artificial Sequence
  Description of Artificial Sequence: Synthetic peptide
  Seed: SIGKVCRTLLAKSVF
SIGKVYRTMLSKSNF

SEQ ID NO: 262485 - protein, 15 aa, Artificial Sequence
  Description of Artificial Sequence: Synthetic peptide
  Seed: SIGKVCRTLLAKSVF
SIGKVYRTMLSKSPF

SEQ ID NO: 262486 - protein, 15 aa, Artificial Sequence
  Description of Artificial Sequence: Synthetic peptide
  Seed: SIGKVCRTLLAKSVF
SIGKVYRTMLSKSQF

SEQ ID NO: 262487 - protein, 15 aa, Artificial Sequence
  Description of Artificial Sequence: Synthetic peptide
  Seed: SIGKVCRTLLAKSVF
SIGKVYRTMLSKSSF

SEQ ID NO: 262488 - protein, 15 aa, Artificial Sequence
  Description of Artificial Sequence: Synthetic peptide
  Seed: SIGKVCRTLLAKSVF
SIGKVYRTMLSKSTF

SEQ ID NO: 262489 - protein, 15 aa, Artificial Sequence
  Description of Artificial Sequence: Synthetic peptide
  Seed: SIGKVCRTLLAKSVF
SIGKVYRTMLSKSVF

SEQ ID NO: 262490 - protein, 15 aa, Artificial Sequence
  Description of Artificial Sequence: Synthetic peptide
  Seed: SIGKVCRTLLAKSVF
SIGKVYRTMLSKSYF

SEQ ID NO: 262491 - protein, 15 aa, Artificial Sequence
  Description of Artificial Sequence: Synthetic peptide
  Seed: SIGKVCRTLLAKSVF
SIGKVYRTMLTKSAF

SEQ ID NO: 262492 - protein, 15 aa, Artificial Sequence
  Description of Artificial Sequence: Synthetic peptide
  Seed: SIGKVCRTLLAKSVF
SIGKVYRTMLTKSGF

SEQ ID NO: 262493 - protein, 15 aa, Artificial Sequence
  Description of Artificial Sequence: Synthetic peptide
  Seed: SIGKVCRTLLAKSVF
SIGKVYRTMLTKSHF

SEQ ID NO: 262494 - protein, 15 aa, Artificial Sequence
  Description of Artificial Sequence: Synthetic peptide
  Seed: SIGKVCRTLLAKSVF
SIGKVYRTMLTKSIF

SEQ ID NO: 262495 - protein, 15 aa, Artificial Sequence
  Description of Artificial Sequence: Synthetic peptide
  Seed: SIGKVCRTLLAKSVF
SIGKVYRTMLTKSLF

SEQ ID NO: 262496 - protein, 15 aa, Artificial Sequence
  Description of Artificial Sequence: Synthetic peptide
  Seed: SIGKVCRTLLAKSVF
SIGKVYRTMLTKSMF

SEQ ID NO: 262497 - protein, 15 aa, Artificial Sequence
  Description of Artificial Sequence: Synthetic peptide
  Seed: SIGKVCRTLLAKSVF
SIGKVYRTMLTKSNF

SEQ ID NO: 262498 - protein, 15 aa, Artificial Sequence
  Description of Artificial Sequence: Synthetic peptide
  Seed: SIGKVCRTLLAKSVF
SIGKVYRTMLTKSPF

SEQ ID NO: 262499 - protein, 15 aa, Artificial Sequence
  Description of Artificial Sequence: Synthetic peptide
  Seed: SIGKVCRTLLAKSVF
SIGKVYRTMLTKSQF

SEQ ID NO: 262500 - protein, 15 aa, Artificial Sequence
  Description of Artificial Sequence: Synthetic peptide
  Seed: SIGKVCRTLLAKSVF
SIGKVYRTMLTKSSF

SEQ ID NO: 262501 - protein, 15 aa, Artificial Sequence
  Description of Artificial Sequence: Synthetic peptide
  Seed: SIGKVCRTLLAKSVF
SIGKVYRTMLTKSTF

SEQ ID NO: 262502 - protein, 15 aa, Artificial Sequence
  Description of Artificial Sequence: Synthetic peptide
  Seed: SIGKVCRTLLAKSVF
SIGKVYRTMLTKSVF

SEQ ID NO: 262503 - protein, 15 aa, Artificial Sequence
  Description of Artificial Sequence: Synthetic peptide
  Seed: SIGKVCRTLLAKSVF
SIGKVYRTMLVKSAF

SEQ ID NO: 262504 - protein, 15 aa, Artificial Sequence
  Description of Artificial Sequence: Synthetic peptide
  Seed: SIGKVCRTLLAKSVF
SIGKVYRTMLVKSGF

SEQ ID NO: 262505 - protein, 15 aa, Artificial Sequence
  Description of Artificial Sequence: Synthetic peptide
  Seed: SIGKVCRTLLAKSVF
SIGKVYRTMLVKSHF

SEQ ID NO: 262506 - protein, 15 aa, Artificial Sequence
  Description of Artificial Sequence: Synthetic peptide
  Seed: SIGKVCRTLLAKSVF
SIGKVYRTMLVKSIF

SEQ ID NO: 262507 - protein, 15 aa, Artificial Sequence
  Description of Artificial Sequence: Synthetic peptide
  Seed: SIGKVCRTLLAKSVF
SIGKVYRTMLVKSLF

SEQ ID NO: 262508 - protein, 15 aa, Artificial Sequence
  Description of Artificial Sequence: Synthetic peptide
  Seed: SIGKVCRTLLAKSVF
SIGKVYRTMLVKSMF

SEQ ID NO: 262509 - protein, 15 aa, Artificial Sequence
  Description of Artificial Sequence: Synthetic peptide
  Seed: SIGKVCRTLLAKSVF
SIGKVYRTMLVKSNF

SEQ ID NO: 262510 - protein, 15 aa, Artificial Sequence
  Description of Artificial Sequence: Synthetic peptide
  Seed: SIGKVCRTLLAKSVF
SIGKVYRTMLVKSPF

SEQ ID NO: 262511 - protein, 15 aa, Artificial Sequence
  Description of Artificial Sequence: Synthetic peptide
  Seed: SIGKVCRTLLAKSVF
SIGKVYRTMLVKSQF

SEQ ID NO: 262512 - protein, 15 aa, Artificial Sequence
  Description of Artificial Sequence: Synthetic peptide
  Seed: SIGKVCRTLLAKSVF
SIGKVYRTMLVKSSF

SEQ ID NO: 262513 - protein, 15 aa, Artificial Sequence
  Description of Artificial Sequence: Synthetic peptide
  Seed: SIGKVCRTLLAKSVF
SIGKVYRTMLVKSTF

SEQ ID NO: 262514 - protein, 15 aa, Artificial Sequence
  Description of Artificial Sequence: Synthetic peptide
  Seed: SIGKVCRTLLAKSVF
SIGKVYRTMLVKSVF

SEQ ID NO: 262515 - protein, 15 aa, Artificial Sequence
  Description of Artificial Sequence: Synthetic peptide
  Seed: SIGKVCRTLLAKSVF
SIGKVYRTNLAKSAF

SEQ ID NO: 262516 - protein, 15 aa, Artificial Sequence
  Description of Artificial Sequence: Synthetic peptide
  Seed: SIGKVCRTLLAKSVF
SIGKVYRTNLAKSIF

SEQ ID NO: 262517 - protein, 15 aa, Artificial Sequence
  Description of Artificial Sequence: Synthetic peptide
  Seed: SIGKVCRTLLAKSVF
SIGKVYRTNLAKSLF

SEQ ID NO: 262518 - protein, 15 aa, Artificial Sequence
  Description of Artificial Sequence: Synthetic peptide
  Seed: SIGKVCRTLLAKSVF
SIGKVYRTNLAKSVF

SEQ ID NO: 262519 - protein, 15 aa, Artificial Sequence
  Description of Artificial Sequence: Synthetic peptide
  Seed: SIGKVCRTLLAKSVF
SIGKVYRTNLFKSFF

SEQ ID NO: 262520 - protein, 15 aa, Artificial Sequence
  Description of Artificial Sequence: Synthetic peptide
  Seed: SIGKVCRTLLAKSVF
SIGKVYRTNLFKSIF

SEQ ID NO: 262521 - protein, 15 aa, Artificial Sequence
  Description of Artificial Sequence: Synthetic peptide
  Seed: SIGKVCRTLLAKSVF
SIGKVYRTNLFKSLF

SEQ ID NO: 262522 - protein, 15 aa, Artificial Sequence
  Description of Artificial Sequence: Synthetic peptide
  Seed: SIGKVCRTLLAKSVF
SIGKVYRTNLFKSMF

SEQ ID NO: 262523 - protein, 15 aa, Artificial Sequence
  Description of Artificial Sequence: Synthetic peptide
  Seed: SIGKVCRTLLAKSVF
SIGKVYRTNLFKSVF

SEQ ID NO: 262524 - protein, 15 aa, Artificial Sequence
  Description of Artificial Sequence: Synthetic peptide
  Seed: SIGKVCRTLLAKSVF
SIGKVYRTNLGKSIF

SEQ ID NO: 262525 - protein, 15 aa, Artificial Sequence
  Description of Artificial Sequence: Synthetic peptide
  Seed: SIGKVCRTLLAKSVF
SIGKVYRTNLGKSLF

SEQ ID NO: 262526 - protein, 15 aa, Artificial Sequence
  Description of Artificial Sequence: Synthetic peptide
  Seed: SIGKVCRTLLAKSVF
SIGKVYRTNLGKSVF

SEQ ID NO: 262527 - protein, 15 aa, Artificial Sequence
  Description of Artificial Sequence: Synthetic peptide
  Seed: SIGKVCRTLLAKSVF
SIGKVYRTNLSKSIF

SEQ ID NO: 262528 - protein, 15 aa, Artificial Sequence
  Description of Artificial Sequence: Synthetic peptide
  Seed: SIGKVCRTLLAKSVF
SIGKVYRTNLSKSLF

SEQ ID NO: 262529 - protein, 15 aa, Artificial Sequence
  Description of Artificial Sequence: Synthetic peptide
  Seed: SIGKVCRTLLAKSVF
SIGKVYRTNLSKSVF

SEQ ID NO: 262530 - protein, 15 aa, Artificial Sequence
  Description of Artificial Sequence: Synthetic peptide
  Seed: SIGKVCRTLLAKSVF
SIGKVYRTQLAKSAF

SEQ ID NO: 262531 - protein, 15 aa, Artificial Sequence
  Description of Artificial Sequence: Synthetic peptide
  Seed: SIGKVCRTLLAKSVF
SIGKVYRTQLAKSIF

SEQ ID NO: 262532 - protein, 15 aa, Artificial Sequence
  Description of Artificial Sequence: Synthetic peptide
  Seed: SIGKVCRTLLAKSVF
SIGKVYRTQLAKSLF

SEQ ID NO: 262533 - protein, 15 aa, Artificial Sequence
  Description of Artificial Sequence: Synthetic peptide
  Seed: SIGKVCRTLLAKSVF
SIGKVYRTQLAKSMF

SEQ ID NO: 262534 - protein, 15 aa, Artificial Sequence
  Description of Artificial Sequence: Synthetic peptide
  Seed: SIGKVCRTLLAKSVF
SIGKVYRTQLAKSNF

SEQ ID NO: 262535 - protein, 15 aa, Artificial Sequence
  Description of Artificial Sequence: Synthetic peptide
  Seed: SIGKVCRTLLAKSVF
SIGKVYRTQLAKSSF

SEQ ID NO: 262536 - protein, 15 aa, Artificial Sequence
  Description of Artificial Sequence: Synthetic peptide
  Seed: SIGKVCRTLLAKSVF
SIGKVYRTQLAKSTF

SEQ ID NO: 262537 - protein, 15 aa, Artificial Sequence
  Description of Artificial Sequence: Synthetic peptide
  Seed: SIGKVCRTLLAKSVF
SIGKVYRTQLAKSVF

SEQ ID NO: 262538 - protein, 15 aa, Artificial Sequence
  Description of Artificial Sequence: Synthetic peptide
  Seed: SIGKVCRTLLAKSVF
SIGKVYRTQLFKSFF

SEQ ID NO: 262539 - protein, 15 aa, Artificial Sequence
  Description of Artificial Sequence: Synthetic peptide
  Seed: SIGKVCRTLLAKSVF
SIGKVYRTQLFKSIF

SEQ ID NO: 262540 - protein, 15 aa, Artificial Sequence
  Description of Artificial Sequence: Synthetic peptide
  Seed: SIGKVCRTLLAKSVF
SIGKVYRTQLFKSLF

SEQ ID NO: 262541 - protein, 15 aa, Artificial Sequence
  Description of Artificial Sequence: Synthetic peptide
  Seed: SIGKVCRTLLAKSVF
SIGKVYRTQLFKSMF

SEQ ID NO: 262542 - protein, 15 aa, Artificial Sequence
  Description of Artificial Sequence: Synthetic peptide
  Seed: SIGKVCRTLLAKSVF
SIGKVYRTQLFKSVF

SEQ ID NO: 262543 - protein, 15 aa, Artificial Sequence
  Description of Artificial Sequence: Synthetic peptide
  Seed: SIGKVCRTLLAKSVF
SIGKVYRTQLGKSAF

SEQ ID NO: 262544 - protein, 15 aa, Artificial Sequence
  Description of Artificial Sequence: Synthetic peptide
  Seed: SIGKVCRTLLAKSVF
SIGKVYRTQLGKSIF

SEQ ID NO: 262545 - protein, 15 aa, Artificial Sequence
  Description of Artificial Sequence: Synthetic peptide
  Seed: SIGKVCRTLLAKSVF
SIGKVYRTQLGKSLF

SEQ ID NO: 262546 - protein, 15 aa, Artificial Sequence
  Description of Artificial Sequence: Synthetic peptide
  Seed: SIGKVCRTLLAKSVF
SIGKVYRTQLGKSMF

SEQ ID NO: 262547 - protein, 15 aa, Artificial Sequence
  Description of Artificial Sequence: Synthetic peptide
  Seed: SIGKVCRTLLAKSVF
SIGKVYRTQLGKSTF

SEQ ID NO: 262548 - protein, 15 aa, Artificial Sequence
  Description of Artificial Sequence: Synthetic peptide
  Seed: SIGKVCRTLLAKSVF
SIGKVYRTQLGKSVF

SEQ ID NO: 262549 - protein, 15 aa, Artificial Sequence
  Description of Artificial Sequence: Synthetic peptide
  Seed: SIGKVCRTLLAKSVF
SIGKVYRTQLNKSLF

SEQ ID NO: 262550 - protein, 15 aa, Artificial Sequence
  Description of Artificial Sequence: Synthetic peptide
  Seed: SIGKVCRTLLAKSVF
SIGKVYRTQLNKSVF

SEQ ID NO: 262551 - protein, 15 aa, Artificial Sequence
  Description of Artificial Sequence: Synthetic peptide
  Seed: SIGKVCRTLLAKSVF
SIGKVYRTQLPKSAF

SEQ ID NO: 262552 - protein, 15 aa, Artificial Sequence
  Description of Artificial Sequence: Synthetic peptide
  Seed: SIGKVCRTLLAKSVF
SIGKVYRTQLPKSIF

SEQ ID NO: 262553 - protein, 15 aa, Artificial Sequence
  Description of Artificial Sequence: Synthetic peptide
  Seed: SIGKVCRTLLAKSVF
SIGKVYRTQLPKSLF

SEQ ID NO: 262554 - protein, 15 aa, Artificial Sequence
  Description of Artificial Sequence: Synthetic peptide
  Seed: SIGKVCRTLLAKSVF
SIGKVYRTQLPKSVF

SEQ ID NO: 262555 - protein, 15 aa, Artificial Sequence
  Description of Artificial Sequence: Synthetic peptide
  Seed: SIGKVCRTLLAKSVF
SIGKVYRTQLSKSAF

SEQ ID NO: 262556 - protein, 15 aa, Artificial Sequence
  Description of Artificial Sequence: Synthetic peptide
  Seed: SIGKVCRTLLAKSVF
SIGKVYRTQLSKSIF

SEQ ID NO: 262557 - protein, 15 aa, Artificial Sequence
  Description of Artificial Sequence: Synthetic peptide
  Seed: SIGKVCRTLLAKSVF
SIGKVYRTQLSKSLF

SEQ ID NO: 262558 - protein, 15 aa, Artificial Sequence
  Description of Artificial Sequence: Synthetic peptide
  Seed: SIGKVCRTLLAKSVF
SIGKVYRTQLSKSMF

SEQ ID NO: 262559 - protein, 15 aa, Artificial Sequence
  Description of Artificial Sequence: Synthetic peptide
  Seed: SIGKVCRTLLAKSVF
SIGKVYRTQLSKSTF

SEQ ID NO: 262560 - protein, 15 aa, Artificial Sequence
  Description of Artificial Sequence: Synthetic peptide
  Seed: SIGKVCRTLLAKSVF
SIGKVYRTQLSKSVF

SEQ ID NO: 262561 - protein, 15 aa, Artificial Sequence
  Description of Artificial Sequence: Synthetic peptide
  Seed: SIGKVCRTLLAKSVF
SIGKVYRTQLTKSIF

SEQ ID NO: 262562 - protein, 15 aa, Artificial Sequence
  Description of Artificial Sequence: Synthetic peptide
  Seed: SIGKVCRTLLAKSVF
SIGKVYRTQLTKSLF

SEQ ID NO: 262563 - protein, 15 aa, Artificial Sequence
  Description of Artificial Sequence: Synthetic peptide
  Seed: SIGKVCRTLLAKSVF
SIGKVYRTQLTKSVF

SEQ ID NO: 262564 - protein, 15 aa, Artificial Sequence
  Description of Artificial Sequence: Synthetic peptide
  Seed: SIGKVCRTLLAKSVF
SIGKVYRTRLFKSIF

SEQ ID NO: 262565 - protein, 15 aa, Artificial Sequence
  Description of Artificial Sequence: Synthetic peptide
  Seed: SIGKVCRTLLAKSVF
SIGKVYRTRLFKSLF

SEQ ID NO: 262566 - protein, 15 aa, Artificial Sequence
  Description of Artificial Sequence: Synthetic peptide
  Seed: SIGKVCRTLLAKSVF
SIGKVYRTRLFKSVF

SEQ ID NO: 262567 - protein, 15 aa, Artificial Sequence
  Description of Artificial Sequence: Synthetic peptide
  Seed: SIGKVCRTLLAKSVF
SIGKVYRTSLAKSAF

SEQ ID NO: 262568 - protein, 15 aa, Artificial Sequence
  Description of Artificial Sequence: Synthetic peptide
  Seed: SIGKVCRTLLAKSVF
SIGKVYRTSLAKSFF

SEQ ID NO: 262569 - protein, 15 aa, Artificial Sequence
  Description of Artificial Sequence: Synthetic peptide
  Seed: SIGKVCRTLLAKSVF
SIGKVYRTSLAKSIF

SEQ ID NO: 262570 - protein, 15 aa, Artificial Sequence
  Description of Artificial Sequence: Synthetic peptide
  Seed: SIGKVCRTLLAKSVF
SIGKVYRTSLAKSLF

SEQ ID NO: 262571 - protein, 15 aa, Artificial Sequence
  Description of Artificial Sequence: Synthetic peptide
  Seed: SIGKVCRTLLAKSVF
SIGKVYRTSLAKSMF

SEQ ID NO: 262572 - protein, 15 aa, Artificial Sequence
  Description of Artificial Sequence: Synthetic peptide
  Seed: SIGKVCRTLLAKSVF
SIGKVYRTSLAKSNF

SEQ ID NO: 262573 - protein, 15 aa, Artificial Sequence
  Description of Artificial Sequence: Synthetic peptide
  Seed: SIGKVCRTLLAKSVF
SIGKVYRTSLAKSSF

SEQ ID NO: 262574 - protein, 15 aa, Artificial Sequence
  Description of Artificial Sequence: Synthetic peptide
  Seed: SIGKVCRTLLAKSVF
SIGKVYRTSLAKSTF

SEQ ID NO: 262575 - protein, 15 aa, Artificial Sequence
  Description of Artificial Sequence: Synthetic peptide
  Seed: SIGKVCRTLLAKSVF
SIGKVYRTSLAKSVF

SEQ ID NO: 262576 - protein, 15 aa, Artificial Sequence
  Description of Artificial Sequence: Synthetic peptide
  Seed: SIGKVCRTLLAKSVF
SIGKVYRTSLFKSAF

SEQ ID NO: 262577 - protein, 15 aa, Artificial Sequence
  Description of Artificial Sequence: Synthetic peptide
  Seed: SIGKVCRTLLAKSVF
SIGKVYRTSLFKSFF

SEQ ID NO: 262578 - protein, 15 aa, Artificial Sequence
  Description of Artificial Sequence: Synthetic peptide
  Seed: SIGKVCRTLLAKSVF
SIGKVYRTSLFKSIF

SEQ ID NO: 262579 - protein, 15 aa, Artificial Sequence
  Description of Artificial Sequence: Synthetic peptide
  Seed: SIGKVCRTLLAKSVF
SIGKVYRTSLFKSLF

SEQ ID NO: 262580 - protein, 15 aa, Artificial Sequence
  Description of Artificial Sequence: Synthetic peptide
  Seed: SIGKVCRTLLAKSVF
SIGKVYRTSLFKSMF

SEQ ID NO: 262581 - protein, 15 aa, Artificial Sequence
  Description of Artificial Sequence: Synthetic peptide
  Seed: SIGKVCRTLLAKSVF
SIGKVYRTSLFKSNF

SEQ ID NO: 262582 - protein, 15 aa, Artificial Sequence
  Description of Artificial Sequence: Synthetic peptide
  Seed: SIGKVCRTLLAKSVF
SIGKVYRTSLFKSSF

SEQ ID NO: 262583 - protein, 15 aa, Artificial Sequence
  Description of Artificial Sequence: Synthetic peptide
  Seed: SIGKVCRTLLAKSVF
SIGKVYRTSLFKSTF

SEQ ID NO: 262584 - protein, 15 aa, Artificial Sequence
  Description of Artificial Sequence: Synthetic peptide
  Seed: SIGKVCRTLLAKSVF
SIGKVYRTSLFKSVF

SEQ ID NO: 262585 - protein, 15 aa, Artificial Sequence
  Description of Artificial Sequence: Synthetic peptide
  Seed: SIGKVCRTLLAKSVF
SIGKVYRTSLFKSYF

SEQ ID NO: 262586 - protein, 15 aa, Artificial Sequence
  Description of Artificial Sequence: Synthetic peptide
  Seed: SIGKVCRTLLAKSVF
SIGKVYRTSLGKSAF

SEQ ID NO: 262587 - protein, 15 aa, Artificial Sequence
  Description of Artificial Sequence: Synthetic peptide
  Seed: SIGKVCRTLLAKSVF
SIGKVYRTSLGKSFF

SEQ ID NO: 262588 - protein, 15 aa, Artificial Sequence
  Description of Artificial Sequence: Synthetic peptide
  Seed: SIGKVCRTLLAKSVF
SIGKVYRTSLGKSIF

SEQ ID NO: 262589 - protein, 15 aa, Artificial Sequence
  Description of Artificial Sequence: Synthetic peptide
  Seed: SIGKVCRTLLAKSVF
SIGKVYRTSLGKSLF

SEQ ID NO: 262590 - protein, 15 aa, Artificial Sequence
  Description of Artificial Sequence: Synthetic peptide
  Seed: SIGKVCRTLLAKSVF
SIGKVYRTSLGKSMF

SEQ ID NO: 262591 - protein, 15 aa, Artificial Sequence
  Description of Artificial Sequence: Synthetic peptide
  Seed: SIGKVCRTLLAKSVF
SIGKVYRTSLGKSVF

SEQ ID NO: 262592 - protein, 15 aa, Artificial Sequence
  Description of Artificial Sequence: Synthetic peptide
  Seed: SIGKVCRTLLAKSVF
SIGKVYRTSLIKSIF

SEQ ID NO: 262593 - protein, 15 aa, Artificial Sequence
  Description of Artificial Sequence: Synthetic peptide
  Seed: SIGKVCRTLLAKSVF
SIGKVYRTSLLKSIF

SEQ ID NO: 262594 - protein, 15 aa, Artificial Sequence
  Description of Artificial Sequence: Synthetic peptide
  Seed: SIGKVCRTLLAKSVF
SIGKVYRTSLLKSLF

SEQ ID NO: 262595 - protein, 15 aa, Artificial Sequence
  Description of Artificial Sequence: Synthetic peptide
  Seed: SIGKVCRTLLAKSVF
SIGKVYRTSLLKSVF

SEQ ID NO: 262596 - protein, 15 aa, Artificial Sequence
  Description of Artificial Sequence: Synthetic peptide
  Seed: SIGKVCRTLLAKSVF
SIGKVYRTSLNKSIF

SEQ ID NO: 262597 - protein, 15 aa, Artificial Sequence
  Description of Artificial Sequence: Synthetic peptide
  Seed: SIGKVCRTLLAKSVF
SIGKVYRTSLNKSLF

SEQ ID NO: 262598 - protein, 15 aa, Artificial Sequence
  Description of Artificial Sequence: Synthetic peptide
  Seed: SIGKVCRTLLAKSVF
SIGKVYRTSLNKSVF

SEQ ID NO: 262599 - protein, 15 aa, Artificial Sequence
  Description of Artificial Sequence: Synthetic peptide
  Seed: SIGKVCRTLLAKSVF
SIGKVYRTSLPKSAF

SEQ ID NO: 262600 - protein, 15 aa, Artificial Sequence
  Description of Artificial Sequence: Synthetic peptide
  Seed: SIGKVCRTLLAKSVF
SIGKVYRTSLPKSIF

SEQ ID NO: 262601 - protein, 15 aa, Artificial Sequence
  Description of Artificial Sequence: Synthetic peptide
  Seed: SIGKVCRTLLAKSVF
SIGKVYRTSLPKSLF

SEQ ID NO: 262602 - protein, 15 aa, Artificial Sequence
  Description of Artificial Sequence: Synthetic peptide
  Seed: SIGKVCRTLLAKSVF
SIGKVYRTSLPKSVF

SEQ ID NO: 262603 - protein, 15 aa, Artificial Sequence
  Description of Artificial Sequence: Synthetic peptide
  Seed: SIGKVCRTLLAKSVF
SIGKVYRTSLSKSAF

SEQ ID NO: 262604 - protein, 15 aa, Artificial Sequence
  Description of Artificial Sequence: Synthetic peptide
  Seed: SIGKVCRTLLAKSVF
SIGKVYRTSLSKSFF

SEQ ID NO: 262605 - protein, 15 aa, Artificial Sequence
  Description of Artificial Sequence: Synthetic peptide
  Seed: SIGKVCRTLLAKSVF
SIGKVYRTSLSKSIF

SEQ ID NO: 262606 - protein, 15 aa, Artificial Sequence
  Description of Artificial Sequence: Synthetic peptide
  Seed: SIGKVCRTLLAKSVF
SIGKVYRTSLSKSLF

SEQ ID NO: 262607 - protein, 15 aa, Artificial Sequence
  Description of Artificial Sequence: Synthetic peptide
  Seed: SIGKVCRTLLAKSVF
SIGKVYRTSLSKSMF

SEQ ID NO: 262608 - protein, 15 aa, Artificial Sequence
  Description of Artificial Sequence: Synthetic peptide
  Seed: SIGKVCRTLLAKSVF
SIGKVYRTSLSKSTF

SEQ ID NO: 262609 - protein, 15 aa, Artificial Sequence
  Description of Artificial Sequence: Synthetic peptide
  Seed: SIGKVCRTLLAKSVF
SIGKVYRTSLSKSVF

SEQ ID NO: 262610 - protein, 15 aa, Artificial Sequence
  Description of Artificial Sequence: Synthetic peptide
  Seed: SIGKVCRTLLAKSVF
SIGKVYRTSLSKSYF

SEQ ID NO: 262611 - protein, 15 aa, Artificial Sequence
  Description of Artificial Sequence: Synthetic peptide
  Seed: SIGKVCRTLLAKSVF
SIGKVYRTSLTKSFF

SEQ ID NO: 262612 - protein, 15 aa, Artificial Sequence
  Description of Artificial Sequence: Synthetic peptide
  Seed: SIGKVCRTLLAKSVF
SIGKVYRTSLTKSIF

SEQ ID NO: 262613 - protein, 15 aa, Artificial Sequence
  Description of Artificial Sequence: Synthetic peptide
  Seed: SIGKVCRTLLAKSVF
SIGKVYRTSLTKSLF

SEQ ID NO: 262614 - protein, 15 aa, Artificial Sequence
  Description of Artificial Sequence: Synthetic peptide
  Seed: SIGKVCRTLLAKSVF
SIGKVYRTSLTKSVF

SEQ ID NO: 262615 - protein, 15 aa, Artificial Sequence
  Description of Artificial Sequence: Synthetic peptide
  Seed: SIGKVCRTLLAKSVF
SIGKVYRTSLVKSIF

SEQ ID NO: 262616 - protein, 15 aa, Artificial Sequence
  Description of Artificial Sequence: Synthetic peptide
  Seed: SIGKVCRTLLAKSVF
SIGKVYRTSLVKSLF

SEQ ID NO: 262617 - protein, 15 aa, Artificial Sequence
  Description of Artificial Sequence: Synthetic peptide
  Seed: SIGKVCRTLLAKSVF
SIGKVYRTSLVKSVF

SEQ ID NO: 262618 - protein, 15 aa, Artificial Sequence
  Description of Artificial Sequence: Synthetic peptide
  Seed: SIGKVCRTLLAKSVF
SIGKVYRTSLYKSIF

SEQ ID NO: 262619 - protein, 15 aa, Artificial Sequence
  Description of Artificial Sequence: Synthetic peptide
  Seed: SIGKVCRTLLAKSVF
SIGKVYRTSLYKSLF

SEQ ID NO: 262620 - protein, 15 aa, Artificial Sequence
  Description of Artificial Sequence: Synthetic peptide
  Seed: SIGKVCRTLLAKSVF
SIGKVYRTSLYKSVF

SEQ ID NO: 262621 - protein, 15 aa, Artificial Sequence
  Description of Artificial Sequence: Synthetic peptide
  Seed: SIGKVCRTLLAKSVF
SIGKVYRTTLAKSAF

SEQ ID NO: 262622 - protein, 15 aa, Artificial Sequence
  Description of Artificial Sequence: Synthetic peptide
  Seed: SIGKVCRTLLAKSVF
SIGKVYRTTLAKSFF

SEQ ID NO: 262623 - protein, 15 aa, Artificial Sequence
  Description of Artificial Sequence: Synthetic peptide
  Seed: SIGKVCRTLLAKSVF
SIGKVYRTTLAKSIF

SEQ ID NO: 262624 - protein, 15 aa, Artificial Sequence
  Description of Artificial Sequence: Synthetic peptide
  Seed: SIGKVCRTLLAKSVF
SIGKVYRTTLAKSLF

SEQ ID NO: 262625 - protein, 15 aa, Artificial Sequence
  Description of Artificial Sequence: Synthetic peptide
  Seed: SIGKVCRTLLAKSVF
SIGKVYRTTLAKSMF

SEQ ID NO: 262626 - protein, 15 aa, Artificial Sequence
  Description of Artificial Sequence: Synthetic peptide
  Seed: SIGKVCRTLLAKSVF
SIGKVYRTTLAKSVF

SEQ ID NO: 262627 - protein, 15 aa, Artificial Sequence
  Description of Artificial Sequence: Synthetic peptide
  Seed: SIGKVCRTLLAKSVF
SIGKVYRTTLFKSAF

SEQ ID NO: 262628 - protein, 15 aa, Artificial Sequence
  Description of Artificial Sequence: Synthetic peptide
  Seed: SIGKVCRTLLAKSVF
SIGKVYRTTLFKSDF

SEQ ID NO: 262629 - protein, 15 aa, Artificial Sequence
  Description of Artificial Sequence: Synthetic peptide
  Seed: SIGKVCRTLLAKSVF
SIGKVYRTTLFKSEF

SEQ ID NO: 262630 - protein, 15 aa, Artificial Sequence
  Description of Artificial Sequence: Synthetic peptide
  Seed: SIGKVCRTLLAKSVF
SIGKVYRTTLFKSFF

SEQ ID NO: 262631 - protein, 15 aa, Artificial Sequence
  Description of Artificial Sequence: Synthetic peptide
  Seed: SIGKVCRTLLAKSVF
SIGKVYRTTLFKSIF

SEQ ID NO: 262632 - protein, 15 aa, Artificial Sequence
  Description of Artificial Sequence: Synthetic peptide
  Seed: SIGKVCRTLLAKSVF
SIGKVYRTTLFKSLF

SEQ ID NO: 262633 - protein, 15 aa, Artificial Sequence
  Description of Artificial Sequence: Synthetic peptide
  Seed: SIGKVCRTLLAKSVF
SIGKVYRTTLFKSMF

SEQ ID NO: 262634 - protein, 15 aa, Artificial Sequence
  Description of Artificial Sequence: Synthetic peptide
  Seed: SIGKVCRTLLAKSVF
SIGKVYRTTLFKSNF

SEQ ID NO: 262635 - protein, 15 aa, Artificial Sequence
  Description of Artificial Sequence: Synthetic peptide
  Seed: SIGKVCRTLLAKSVF
SIGKVYRTTLFKSSF

SEQ ID NO: 262636 - protein, 15 aa, Artificial Sequence
  Description of Artificial Sequence: Synthetic peptide
  Seed: SIGKVCRTLLAKSVF
SIGKVYRTTLFKSTF

SEQ ID NO: 262637 - protein, 15 aa, Artificial Sequence
  Description of Artificial Sequence: Synthetic peptide
  Seed: SIGKVCRTLLAKSVF
SIGKVYRTTLFKSVF

SEQ ID NO: 262638 - protein, 15 aa, Artificial Sequence
  Description of Artificial Sequence: Synthetic peptide
  Seed: SIGKVCRTLLAKSVF
SIGKVYRTTLFKSWF

SEQ ID NO: 262639 - protein, 15 aa, Artificial Sequence
  Description of Artificial Sequence: Synthetic peptide
  Seed: SIGKVCRTLLAKSVF
SIGKVYRTTLFKSYF

SEQ ID NO: 262640 - protein, 15 aa, Artificial Sequence
  Description of Artificial Sequence: Synthetic peptide
  Seed: SIGKVCRTLLAKSVF
SIGKVYRTTLGKSAF

SEQ ID NO: 262641 - protein, 15 aa, Artificial Sequence
  Description of Artificial Sequence: Synthetic peptide
  Seed: SIGKVCRTLLAKSVF
SIGKVYRTTLGKSFF

SEQ ID NO: 262642 - protein, 15 aa, Artificial Sequence
  Description of Artificial Sequence: Synthetic peptide
  Seed: SIGKVCRTLLAKSVF
SIGKVYRTTLGKSIF

SEQ ID NO: 262643 - protein, 15 aa, Artificial Sequence
  Description of Artificial Sequence: Synthetic peptide
  Seed: SIGKVCRTLLAKSVF
SIGKVYRTTLGKSLF

SEQ ID NO: 262644 - protein, 15 aa, Artificial Sequence
  Description of Artificial Sequence: Synthetic peptide
  Seed: SIGKVCRTLLAKSVF
SIGKVYRTTLGKSMF

SEQ ID NO: 262645 - protein, 15 aa, Artificial Sequence
  Description of Artificial Sequence: Synthetic peptide
  Seed: SIGKVCRTLLAKSVF
SIGKVYRTTLGKSVF

SEQ ID NO: 262646 - protein, 15 aa, Artificial Sequence
  Description of Artificial Sequence: Synthetic peptide
  Seed: SIGKVCRTLLAKSVF
SIGKVYRTTLIKSIF

SEQ ID NO: 262647 - protein, 15 aa, Artificial Sequence
  Description of Artificial Sequence: Synthetic peptide
  Seed: SIGKVCRTLLAKSVF
SIGKVYRTTLIKSLF

SEQ ID NO: 262648 - protein, 15 aa, Artificial Sequence
  Description of Artificial Sequence: Synthetic peptide
  Seed: SIGKVCRTLLAKSVF
SIGKVYRTTLIKSVF

SEQ ID NO: 262649 - protein, 15 aa, Artificial Sequence
  Description of Artificial Sequence: Synthetic peptide
  Seed: SIGKVCRTLLAKSVF
SIGKVYRTTLLKSFF

SEQ ID NO: 262650 - protein, 15 aa, Artificial Sequence
  Description of Artificial Sequence: Synthetic peptide
  Seed: SIGKVCRTLLAKSVF
SIGKVYRTTLLKSIF

SEQ ID NO: 262651 - protein, 15 aa, Artificial Sequence
  Description of Artificial Sequence: Synthetic peptide
  Seed: SIGKVCRTLLAKSVF
SIGKVYRTTLLKSLF

SEQ ID NO: 262652 - protein, 15 aa, Artificial Sequence
  Description of Artificial Sequence: Synthetic peptide
  Seed: SIGKVCRTLLAKSVF
SIGKVYRTTLLKSMF

SEQ ID NO: 262653 - protein, 15 aa, Artificial Sequence
  Description of Artificial Sequence: Synthetic peptide
  Seed: SIGKVCRTLLAKSVF
SIGKVYRTTLLKSVF

SEQ ID NO: 262654 - protein, 15 aa, Artificial Sequence
  Description of Artificial Sequence: Synthetic peptide
  Seed: SIGKVCRTLLAKSVF
SIGKVYRTTLMKSIF

SEQ ID NO: 262655 - protein, 15 aa, Artificial Sequence
  Description of Artificial Sequence: Synthetic peptide
  Seed: SIGKVCRTLLAKSVF
SIGKVYRTTLMKSLF

SEQ ID NO: 262656 - protein, 15 aa, Artificial Sequence
  Description of Artificial Sequence: Synthetic peptide
  Seed: SIGKVCRTLLAKSVF
SIGKVYRTTLNKSIF

SEQ ID NO: 262657 - protein, 15 aa, Artificial Sequence
  Description of Artificial Sequence: Synthetic peptide
  Seed: SIGKVCRTLLAKSVF
SIGKVYRTTLNKSLF

SEQ ID NO: 262658 - protein, 15 aa, Artificial Sequence
  Description of Artificial Sequence: Synthetic peptide
  Seed: SIGKVCRTLLAKSVF
SIGKVYRTTLNKSVF

SEQ ID NO: 262659 - protein, 15 aa, Artificial Sequence
  Description of Artificial Sequence: Synthetic peptide
  Seed: SIGKVCRTLLAKSVF
SIGKVYRTTLPKSIF

SEQ ID NO: 262660 - protein, 15 aa, Artificial Sequence
  Description of Artificial Sequence: Synthetic peptide
  Seed: SIGKVCRTLLAKSVF
SIGKVYRTTLPKSLF

SEQ ID NO: 262661 - protein, 15 aa, Artificial Sequence
  Description of Artificial Sequence: Synthetic peptide
  Seed: SIGKVCRTLLAKSVF
SIGKVYRTTLPKSVF

SEQ ID NO: 262662 - protein, 15 aa, Artificial Sequence
  Description of Artificial Sequence: Synthetic peptide
  Seed: SIGKVCRTLLAKSVF
SIGKVYRTTLSKSAF

SEQ ID NO: 262663 - protein, 15 aa, Artificial Sequence
  Description of Artificial Sequence: Synthetic peptide
  Seed: SIGKVCRTLLAKSVF
SIGKVYRTTLSKSFF

SEQ ID NO: 262664 - protein, 15 aa, Artificial Sequence
  Description of Artificial Sequence: Synthetic peptide
  Seed: SIGKVCRTLLAKSVF
SIGKVYRTTLSKSIF

SEQ ID NO: 262665 - protein, 15 aa, Artificial Sequence
  Description of Artificial Sequence: Synthetic peptide
  Seed: SIGKVCRTLLAKSVF
SIGKVYRTTLSKSLF

SEQ ID NO: 262666 - protein, 15 aa, Artificial Sequence
  Description of Artificial Sequence: Synthetic peptide
  Seed: SIGKVCRTLLAKSVF
SIGKVYRTTLSKSMF

SEQ ID NO: 262667 - protein, 15 aa, Artificial Sequence
  Description of Artificial Sequence: Synthetic peptide
  Seed: SIGKVCRTLLAKSVF
SIGKVYRTTLSKSVF

SEQ ID NO: 262668 - protein, 15 aa, Artificial Sequence
  Description of Artificial Sequence: Synthetic peptide
  Seed: SIGKVCRTLLAKSVF
SIGKVYRTTLSKSYF

SEQ ID NO: 262669 - protein, 15 aa, Artificial Sequence
  Description of Artificial Sequence: Synthetic peptide
  Seed: SIGKVCRTLLAKSVF
SIGKVYRTTLTKSFF

SEQ ID NO: 262670 - protein, 15 aa, Artificial Sequence
  Description of Artificial Sequence: Synthetic peptide
  Seed: SIGKVCRTLLAKSVF
SIGKVYRTTLTKSIF

SEQ ID NO: 262671 - protein, 15 aa, Artificial Sequence
  Description of Artificial Sequence: Synthetic peptide
  Seed: SIGKVCRTLLAKSVF
SIGKVYRTTLTKSLF

SEQ ID NO: 262672 - protein, 15 aa, Artificial Sequence
  Description of Artificial Sequence: Synthetic peptide
  Seed: SIGKVCRTLLAKSVF
SIGKVYRTTLTKSVF

SEQ ID NO: 262673 - protein, 15 aa, Artificial Sequence
  Description of Artificial Sequence: Synthetic peptide
  Seed: SIGKVCRTLLAKSVF
SIGKVYRTTLVKSIF

SEQ ID NO: 262674 - protein, 15 aa, Artificial Sequence
  Description of Artificial Sequence: Synthetic peptide
  Seed: SIGKVCRTLLAKSVF
SIGKVYRTTLVKSLF

SEQ ID NO: 262675 - protein, 15 aa, Artificial Sequence
  Description of Artificial Sequence: Synthetic peptide
  Seed: SIGKVCRTLLAKSVF
SIGKVYRTTLVKSVF

SEQ ID NO: 262676 - protein, 15 aa, Artificial Sequence
  Description of Artificial Sequence: Synthetic peptide
  Seed: SIGKVCRTLLAKSVF
SIGKVYRTTLWKSIF

SEQ ID NO: 262677 - protein, 15 aa, Artificial Sequence
  Description of Artificial Sequence: Synthetic peptide
  Seed: SIGKVCRTLLAKSVF
SIGKVYRTTLWKSLF

SEQ ID NO: 262678 - protein, 15 aa, Artificial Sequence
  Description of Artificial Sequence: Synthetic peptide
  Seed: SIGKVCRTLLAKSVF
SIGKVYRTTLWKSVF

SEQ ID NO: 262679 - protein, 15 aa, Artificial Sequence
  Description of Artificial Sequence: Synthetic peptide
  Seed: SIGKVCRTLLAKSVF
SIGKVYRTTLYKSIF

SEQ ID NO: 262680 - protein, 15 aa, Artificial Sequence
  Description of Artificial Sequence: Synthetic peptide
  Seed: SIGKVCRTLLAKSVF
SIGKVYRTTLYKSLF

SEQ ID NO: 262681 - protein, 15 aa, Artificial Sequence
  Description of Artificial Sequence: Synthetic peptide
  Seed: SIGKVCRTLLAKSVF
SIGKVYRTTLYKSVF

SEQ ID NO: 262682 - protein, 15 aa, Artificial Sequence
  Description of Artificial Sequence: Synthetic peptide
  Seed: SIGKVCRTLLAKSVF
SIGKVYRTVLAKSAF

SEQ ID NO: 262683 - protein, 15 aa, Artificial Sequence
  Description of Artificial Sequence: Synthetic peptide
  Seed: SIGKVCRTLLAKSVF
SIGKVYRTVLAKSFF

SEQ ID NO: 262684 - protein, 15 aa, Artificial Sequence
  Description of Artificial Sequence: Synthetic peptide
  Seed: SIGKVCRTLLAKSVF
SIGKVYRTVLAKSGF

SEQ ID NO: 262685 - protein, 15 aa, Artificial Sequence
  Description of Artificial Sequence: Synthetic peptide
  Seed: SIGKVCRTLLAKSVF
SIGKVYRTVLAKSIF

SEQ ID NO: 262686 - protein, 15 aa, Artificial Sequence
  Description of Artificial Sequence: Synthetic peptide
  Seed: SIGKVCRTLLAKSVF
SIGKVYRTVLAKSLF

SEQ ID NO: 262687 - protein, 15 aa, Artificial Sequence
  Description of Artificial Sequence: Synthetic peptide
  Seed: SIGKVCRTLLAKSVF
SIGKVYRTVLAKSMF

SEQ ID NO: 262688 - protein, 15 aa, Artificial Sequence
  Description of Artificial Sequence: Synthetic peptide
  Seed: SIGKVCRTLLAKSVF
SIGKVYRTVLAKSNF

SEQ ID NO: 262689 - protein, 15 aa, Artificial Sequence
  Description of Artificial Sequence: Synthetic peptide
  Seed: SIGKVCRTLLAKSVF
SIGKVYRTVLAKSSF

SEQ ID NO: 262690 - protein, 15 aa, Artificial Sequence
  Description of Artificial Sequence: Synthetic peptide
  Seed: SIGKVCRTLLAKSVF
SIGKVYRTVLAKSTF

SEQ ID NO: 262691 - protein, 15 aa, Artificial Sequence
  Description of Artificial Sequence: Synthetic peptide
  Seed: SIGKVCRTLLAKSVF
SIGKVYRTVLAKSVF

SEQ ID NO: 262692 - protein, 15 aa, Artificial Sequence
  Description of Artificial Sequence: Synthetic peptide
  Seed: SIGKVCRTLLAKSVF
SIGKVYRTVLFKSAF

SEQ ID NO: 262693 - protein, 15 aa, Artificial Sequence
  Description of Artificial Sequence: Synthetic peptide
  Seed: SIGKVCRTLLAKSVF
SIGKVYRTVLFKSDF

SEQ ID NO: 262694 - protein, 15 aa, Artificial Sequence
  Description of Artificial Sequence: Synthetic peptide
  Seed: SIGKVCRTLLAKSVF
SIGKVYRTVLFKSEF

SEQ ID NO: 262695 - protein, 15 aa, Artificial Sequence
  Description of Artificial Sequence: Synthetic peptide
  Seed: SIGKVCRTLLAKSVF
SIGKVYRTVLFKSFF

SEQ ID NO: 262696 - protein, 15 aa, Artificial Sequence
  Description of Artificial Sequence: Synthetic peptide
  Seed: SIGKVCRTLLAKSVF
SIGKVYRTVLFKSIF

SEQ ID NO: 262697 - protein, 15 aa, Artificial Sequence
  Description of Artificial Sequence: Synthetic peptide
  Seed: SIGKVCRTLLAKSVF
SIGKVYRTVLFKSLF

SEQ ID NO: 262698 - protein, 15 aa, Artificial Sequence
  Description of Artificial Sequence: Synthetic peptide
  Seed: SIGKVCRTLLAKSVF
SIGKVYRTVLFKSMF

SEQ ID NO: 262699 - protein, 15 aa, Artificial Sequence
  Description of Artificial Sequence: Synthetic peptide
  Seed: SIGKVCRTLLAKSVF
SIGKVYRTVLFKSNF

SEQ ID NO: 262700 - protein, 15 aa, Artificial Sequence
  Description of Artificial Sequence: Synthetic peptide
  Seed: SIGKVCRTLLAKSVF
SIGKVYRTVLFKSSF

SEQ ID NO: 262701 - protein, 15 aa, Artificial Sequence
  Description of Artificial Sequence: Synthetic peptide
  Seed: SIGKVCRTLLAKSVF
SIGKVYRTVLFKSTF

SEQ ID NO: 262702 - protein, 15 aa, Artificial Sequence
  Description of Artificial Sequence: Synthetic peptide
  Seed: SIGKVCRTLLAKSVF
SIGKVYRTVLFKSVF

SEQ ID NO: 262703 - protein, 15 aa, Artificial Sequence
  Description of Artificial Sequence: Synthetic peptide
  Seed: SIGKVCRTLLAKSVF
SIGKVYRTVLFKSYF

SEQ ID NO: 262704 - protein, 15 aa, Artificial Sequence
  Description of Artificial Sequence: Synthetic peptide
  Seed: SIGKVCRTLLAKSVF
SIGKVYRTVLGKSAF

SEQ ID NO: 262705 - protein, 15 aa, Artificial Sequence
  Description of Artificial Sequence: Synthetic peptide
  Seed: SIGKVCRTLLAKSVF
SIGKVYRTVLGKSIF

SEQ ID NO: 262706 - protein, 15 aa, Artificial Sequence
  Description of Artificial Sequence: Synthetic peptide
  Seed: SIGKVCRTLLAKSVF
SIGKVYRTVLGKSLF

SEQ ID NO: 262707 - protein, 15 aa, Artificial Sequence
  Description of Artificial Sequence: Synthetic peptide
  Seed: SIGKVCRTLLAKSVF
SIGKVYRTVLGKSMF

SEQ ID NO: 262708 - protein, 15 aa, Artificial Sequence
  Description of Artificial Sequence: Synthetic peptide
  Seed: SIGKVCRTLLAKSVF
SIGKVYRTVLGKSSF

SEQ ID NO: 262709 - protein, 15 aa, Artificial Sequence
  Description of Artificial Sequence: Synthetic peptide
  Seed: SIGKVCRTLLAKSVF
SIGKVYRTVLGKSTF

SEQ ID NO: 262710 - protein, 15 aa, Artificial Sequence
  Description of Artificial Sequence: Synthetic peptide
  Seed: SIGKVCRTLLAKSVF
SIGKVYRTVLGKSVF

SEQ ID NO: 262711 - protein, 15 aa, Artificial Sequence
  Description of Artificial Sequence: Synthetic peptide
  Seed: SIGKVCRTLLAKSVF
SIGKVYRTVLLKSIF

SEQ ID NO: 262712 - protein, 15 aa, Artificial Sequence
  Description of Artificial Sequence: Synthetic peptide
  Seed: SIGKVCRTLLAKSVF
SIGKVYRTVLLKSLF

SEQ ID NO: 262713 - protein, 15 aa, Artificial Sequence
  Description of Artificial Sequence: Synthetic peptide
  Seed: SIGKVCRTLLAKSVF
SIGKVYRTVLLKSVF

SEQ ID NO: 262714 - protein, 15 aa, Artificial Sequence
  Description of Artificial Sequence: Synthetic peptide
  Seed: SIGKVCRTLLAKSVF
SIGKVYRTVLNKSIF

SEQ ID NO: 262715 - protein, 15 aa, Artificial Sequence
  Description of Artificial Sequence: Synthetic peptide
  Seed: SIGKVCRTLLAKSVF
SIGKVYRTVLNKSLF

SEQ ID NO: 262716 - protein, 15 aa, Artificial Sequence
  Description of Artificial Sequence: Synthetic peptide
  Seed: SIGKVCRTLLAKSVF
SIGKVYRTVLNKSVF

SEQ ID NO: 262717 - protein, 15 aa, Artificial Sequence
  Description of Artificial Sequence: Synthetic peptide
  Seed: SIGKVCRTLLAKSVF
SIGKVYRTVLPKSAF

SEQ ID NO: 262718 - protein, 15 aa, Artificial Sequence
  Description of Artificial Sequence: Synthetic peptide
  Seed: SIGKVCRTLLAKSVF
SIGKVYRTVLPKSIF

SEQ ID NO: 262719 - protein, 15 aa, Artificial Sequence
  Description of Artificial Sequence: Synthetic peptide
  Seed: SIGKVCRTLLAKSVF
SIGKVYRTVLPKSLF

SEQ ID NO: 262720 - protein, 15 aa, Artificial Sequence
  Description of Artificial Sequence: Synthetic peptide
  Seed: SIGKVCRTLLAKSVF
SIGKVYRTVLPKSMF

SEQ ID NO: 262721 - protein, 15 aa, Artificial Sequence
  Description of Artificial Sequence: Synthetic peptide
  Seed: SIGKVCRTLLAKSVF
SIGKVYRTVLPKSNF

SEQ ID NO: 262722 - protein, 15 aa, Artificial Sequence
  Description of Artificial Sequence: Synthetic peptide
  Seed: SIGKVCRTLLAKSVF
SIGKVYRTVLPKSSF

SEQ ID NO: 262723 - protein, 15 aa, Artificial Sequence
  Description of Artificial Sequence: Synthetic peptide
  Seed: SIGKVCRTLLAKSVF
SIGKVYRTVLPKSTF

SEQ ID NO: 262724 - protein, 15 aa, Artificial Sequence
  Description of Artificial Sequence: Synthetic peptide
  Seed: SIGKVCRTLLAKSVF
SIGKVYRTVLPKSVF

SEQ ID NO: 262725 - protein, 15 aa, Artificial Sequence
  Description of Artificial Sequence: Synthetic peptide
  Seed: SIGKVCRTLLAKSVF
SIGKVYRTVLSKSAF

SEQ ID NO: 262726 - protein, 15 aa, Artificial Sequence
  Description of Artificial Sequence: Synthetic peptide
  Seed: SIGKVCRTLLAKSVF
SIGKVYRTVLSKSFF

SEQ ID NO: 262727 - protein, 15 aa, Artificial Sequence
  Description of Artificial Sequence: Synthetic peptide
  Seed: SIGKVCRTLLAKSVF
SIGKVYRTVLSKSIF

SEQ ID NO: 262728 - protein, 15 aa, Artificial Sequence
  Description of Artificial Sequence: Synthetic peptide
  Seed: SIGKVCRTLLAKSVF
SIGKVYRTVLSKSLF

SEQ ID NO: 262729 - protein, 15 aa, Artificial Sequence
  Description of Artificial Sequence: Synthetic peptide
  Seed: SIGKVCRTLLAKSVF
SIGKVYRTVLSKSMF

SEQ ID NO: 262730 - protein, 15 aa, Artificial Sequence
  Description of Artificial Sequence: Synthetic peptide
  Seed: SIGKVCRTLLAKSVF
SIGKVYRTVLSKSNF

SEQ ID NO: 262731 - protein, 15 aa, Artificial Sequence
  Description of Artificial Sequence: Synthetic peptide
  Seed: SIGKVCRTLLAKSVF
SIGKVYRTVLSKSSF

SEQ ID NO: 262732 - protein, 15 aa, Artificial Sequence
  Description of Artificial Sequence: Synthetic peptide
  Seed: SIGKVCRTLLAKSVF
SIGKVYRTVLSKSTF

SEQ ID NO: 262733 - protein, 15 aa, Artificial Sequence
  Description of Artificial Sequence: Synthetic peptide
  Seed: SIGKVCRTLLAKSVF
SIGKVYRTVLSKSVF

SEQ ID NO: 262734 - protein, 15 aa, Artificial Sequence
  Description of Artificial Sequence: Synthetic peptide
  Seed: SIGKVCRTLLAKSVF
SIGKVYRTVLTKSAF

SEQ ID NO: 262735 - protein, 15 aa, Artificial Sequence
  Description of Artificial Sequence: Synthetic peptide
  Seed: SIGKVCRTLLAKSVF
SIGKVYRTVLTKSIF

SEQ ID NO: 262736 - protein, 15 aa, Artificial Sequence
  Description of Artificial Sequence: Synthetic peptide
  Seed: SIGKVCRTLLAKSVF
SIGKVYRTVLTKSLF

SEQ ID NO: 262737 - protein, 15 aa, Artificial Sequence
  Description of Artificial Sequence: Synthetic peptide
  Seed: SIGKVCRTLLAKSVF
SIGKVYRTVLTKSNF

SEQ ID NO: 262738 - protein, 15 aa, Artificial Sequence
  Description of Artificial Sequence: Synthetic peptide
  Seed: SIGKVCRTLLAKSVF
SIGKVYRTVLTKSSF

SEQ ID NO: 262739 - protein, 15 aa, Artificial Sequence
  Description of Artificial Sequence: Synthetic peptide
  Seed: SIGKVCRTLLAKSVF
SIGKVYRTVLTKSTF

SEQ ID NO: 262740 - protein, 15 aa, Artificial Sequence
  Description of Artificial Sequence: Synthetic peptide
  Seed: SIGKVCRTLLAKSVF
SIGKVYRTVLTKSVF

SEQ ID NO: 262741 - protein, 15 aa, Artificial Sequence
  Description of Artificial Sequence: Synthetic peptide
  Seed: SIGKVCRTLLAKSVF
SIGKVYRTVLVKSAF

SEQ ID NO: 262742 - protein, 15 aa, Artificial Sequence
  Description of Artificial Sequence: Synthetic peptide
  Seed: SIGKVCRTLLAKSVF
SIGKVYRTVLVKSIF

SEQ ID NO: 262743 - protein, 15 aa, Artificial Sequence
  Description of Artificial Sequence: Synthetic peptide
  Seed: SIGKVCRTLLAKSVF
SIGKVYRTVLVKSNF

SEQ ID NO: 262744 - protein, 15 aa, Artificial Sequence
  Description of Artificial Sequence: Synthetic peptide
  Seed: SIGKVCRTLLAKSVF
SIGKVYRTVLVKSSF

SEQ ID NO: 262745 - protein, 15 aa, Artificial Sequence
  Description of Artificial Sequence: Synthetic peptide
  Seed: SIGKVCRTLLAKSVF
SIGKVYRTVLVKSVF

SEQ ID NO: 262746 - protein, 15 aa, Artificial Sequence
  Description of Artificial Sequence: Synthetic peptide
  Seed: SIGKVCRTLLAKSVF
SIGKVYRTVLYKSIF

SEQ ID NO: 262747 - protein, 15 aa, Artificial Sequence
  Description of Artificial Sequence: Synthetic peptide
  Seed: SIGKVCRTLLAKSVF
SIGKVYRTVLYKSLF

SEQ ID NO: 262748 - protein, 15 aa, Artificial Sequence
  Description of Artificial Sequence: Synthetic peptide
  Seed: SIGKVCRTLLAKSVF
SIGKVYRTVLYKSVF

SEQ ID NO: 262749 - protein, 15 aa, Artificial Sequence
  Description of Artificial Sequence: Synthetic peptide
  Seed: SIGKVCRTLLAKSVF
SIGKVYRTWLFKSFF

SEQ ID NO: 262750 - protein, 15 aa, Artificial Sequence
  Description of Artificial Sequence: Synthetic peptide
  Seed: SIGKVCRTLLAKSVF
SIGKVYRTWLFKSIF

SEQ ID NO: 262751 - protein, 15 aa, Artificial Sequence
  Description of Artificial Sequence: Synthetic peptide
  Seed: SIGKVCRTLLAKSVF
SIGKVYRTWLFKSLF

SEQ ID NO: 262752 - protein, 15 aa, Artificial Sequence
  Description of Artificial Sequence: Synthetic peptide
  Seed: SIGKVCRTLLAKSVF
SIGKVYRTWLFKSMF

SEQ ID NO: 262753 - protein, 15 aa, Artificial Sequence
  Description of Artificial Sequence: Synthetic peptide
  Seed: SIGKVCRTLLAKSVF
SIGKVYRTWLFKSVF

SEQ ID NO: 262754 - protein, 15 aa, Artificial Sequence
  Description of Artificial Sequence: Synthetic peptide
  Seed: SIGKVCRTLLAKSVF
SIGKVYRTYLAKSIF

SEQ ID NO: 262755 - protein, 15 aa, Artificial Sequence
  Description of Artificial Sequence: Synthetic peptide
  Seed: SIGKVCRTLLAKSVF
SIGKVYRTYLAKSLF

SEQ ID NO: 262756 - protein, 15 aa, Artificial Sequence
  Description of Artificial Sequence: Synthetic peptide
  Seed: SIGKVCRTLLAKSVF
SIGKVYRTYLAKSVF

SEQ ID NO: 262757 - protein, 15 aa, Artificial Sequence
  Description of Artificial Sequence: Synthetic peptide
  Seed: SIGKVCRTLLAKSVF
SIGKVYRTYLFKSFF

SEQ ID NO: 262758 - protein, 15 aa, Artificial Sequence
  Description of Artificial Sequence: Synthetic peptide
  Seed: SIGKVCRTLLAKSVF
SIGKVYRTYLFKSIF

SEQ ID NO: 262759 - protein, 15 aa, Artificial Sequence
  Description of Artificial Sequence: Synthetic peptide
  Seed: SIGKVCRTLLAKSVF
SIGKVYRTYLFKSLF

SEQ ID NO: 262760 - protein, 15 aa, Artificial Sequence
  Description of Artificial Sequence: Synthetic peptide
  Seed: SIGKVCRTLLAKSVF
SIGKVYRTYLFKSMF

SEQ ID NO: 262761 - protein, 15 aa, Artificial Sequence
  Description of Artificial Sequence: Synthetic peptide
  Seed: SIGKVCRTLLAKSVF
SIGKVYRTYLFKSVF

SEQ ID NO: 262762 - protein, 15 aa, Artificial Sequence
  Description of Artificial Sequence: Synthetic peptide
  Seed: SIGKVCRTLLAKSVF
SIGKVYRTYLLKSLF

SEQ ID NO: 262763 - protein, 15 aa, Artificial Sequence
  Description of Artificial Sequence: Synthetic peptide
  Seed: SIGKVCRTLLAKSVF
SIGKVYRTYLSKSLF

SEQ ID NO: 262764 - protein, 15 aa, Artificial Sequence
  Description of Artificial Sequence: Synthetic peptide
  Seed: SIGKVCRTLLAKSVF
SIGKVYRTYLSKSVF

SEQ ID NO: 262765 - protein, 15 aa, Artificial Sequence
  Description of Artificial Sequence: Synthetic peptide
  Seed: SIGKVCRTLLAKSVF
SIAKVARKLLAKSVF

SEQ ID NO: 262766 - protein, 15 aa, Artificial Sequence
  Description of Artificial Sequence: Synthetic peptide
  Seed: SIGKVCRTLLAKSVF
SIAKVARKLLGKSVF

SEQ ID NO: 262767 - protein, 15 aa, Artificial Sequence
  Description of Artificial Sequence: Synthetic peptide
  Seed: SIGKVCRTLLAKSVF
SIAKVARKLLQKSVF

SEQ ID NO: 262768 - protein, 15 aa, Artificial Sequence
  Description of Artificial Sequence: Synthetic peptide
  Seed: SIGKVCRTLLAKSVF
SIAKVARKLLSKSVF

SEQ ID NO: 262769 - protein, 15 aa, Artificial Sequence
  Description of Artificial Sequence: Synthetic peptide
  Seed: SIGKVCRTLLAKSVF
SIAKVARRLLAKSVF

SEQ ID NO: 262770 - protein, 15 aa, Artificial Sequence
  Description of Artificial Sequence: Synthetic peptide
  Seed: SIGKVCRTLLAKSVF
SIAKVARRLLGKSVF

SEQ ID NO: 262771 - protein, 15 aa, Artificial Sequence
  Description of Artificial Sequence: Synthetic peptide
  Seed: SIGKVCRTLLAKSVF
SIAKVARRLLQKSVF

SEQ ID NO: 262772 - protein, 15 aa, Artificial Sequence
  Description of Artificial Sequence: Synthetic peptide
  Seed: SIGKVCRTLLAKSVF
SIAKVARRLLSKSVF

SEQ ID NO: 262773 - protein, 15 aa, Artificial Sequence
  Description of Artificial Sequence: Synthetic peptide
  Seed: SIGKVCRTLLAKSVF
SIAKVCRKLLAKSVF

SEQ ID NO: 262774 - protein, 15 aa, Artificial Sequence
  Description of Artificial Sequence: Synthetic peptide
  Seed: SIGKVCRTLLAKSVF
SIAKVCRKLLRKSVF

SEQ ID NO: 262775 - protein, 15 aa, Artificial Sequence
  Description of Artificial Sequence: Synthetic peptide
  Seed: SIGKVCRTLLAKSVF
SIAKVCRKLLSKSVF

SEQ ID NO: 262776 - protein, 15 aa, Artificial Sequence
  Description of Artificial Sequence: Synthetic peptide
  Seed: SIGKVCRTLLAKSVF
SIAKVCRRLLAKSVF

SEQ ID NO: 262777 - protein, 15 aa, Artificial Sequence
  Description of Artificial Sequence: Synthetic peptide
  Seed: SIGKVCRTLLAKSVF
SIAKVCRRLLGKSVF

SEQ ID NO: 262778 - protein, 15 aa, Artificial Sequence
  Description of Artificial Sequence: Synthetic peptide
  Seed: SIGKVCRTLLAKSVF
SIAKVCRRLLQKSVF

SEQ ID NO: 262779 - protein, 15 aa, Artificial Sequence
  Description of Artificial Sequence: Synthetic peptide
  Seed: SIGKVCRTLLAKSVF
SIAKVCRRLLSKSVF

SEQ ID NO: 262780 - protein, 15 aa, Artificial Sequence
  Description of Artificial Sequence: Synthetic peptide
  Seed: SIGKVCRTLLAKSVF
SIAKVCRRLLTKSVF

SEQ ID NO: 262781 - protein, 15 aa, Artificial Sequence
  Description of Artificial Sequence: Synthetic peptide
  Seed: SIGKVCRTLLAKSVF
SIAKVCRRLLVKSVF

SEQ ID NO: 262782 - protein, 15 aa, Artificial Sequence
  Description of Artificial Sequence: Synthetic peptide
  Seed: SIGKVCRTLLAKSVF
SIAKVERRLLAKSVF

SEQ ID NO: 262783 - protein, 15 aa, Artificial Sequence
  Description of Artificial Sequence: Synthetic peptide
  Seed: SIGKVCRTLLAKSVF
SIAKVERRLLQKSVF

SEQ ID NO: 262784 - protein, 15 aa, Artificial Sequence
  Description of Artificial Sequence: Synthetic peptide
  Seed: SIGKVCRTLLAKSVF
SIAKVERRLLSKSVF

SEQ ID NO: 262785 - protein, 15 aa, Artificial Sequence
  Description of Artificial Sequence: Synthetic peptide
  Seed: SIGKVCRTLLAKSVF
SIAKVFRKLLAKSVF

SEQ ID NO: 262786 - protein, 15 aa, Artificial Sequence
  Description of Artificial Sequence: Synthetic peptide
  Seed: SIGKVCRTLLAKSVF
SIAKVFRKLLGKSVF

SEQ ID NO: 262787 - protein, 15 aa, Artificial Sequence
  Description of Artificial Sequence: Synthetic peptide
  Seed: SIGKVCRTLLAKSVF
SIAKVFRKLLHKSVF

SEQ ID NO: 262788 - protein, 15 aa, Artificial Sequence
  Description of Artificial Sequence: Synthetic peptide
  Seed: SIGKVCRTLLAKSVF
SIAKVFRKLLMKSVF

SEQ ID NO: 262789 - protein, 15 aa, Artificial Sequence
  Description of Artificial Sequence: Synthetic peptide
  Seed: SIGKVCRTLLAKSVF
SIAKVFRKLLNKSVF

SEQ ID NO: 262790 - protein, 15 aa, Artificial Sequence
  Description of Artificial Sequence: Synthetic peptide
  Seed: SIGKVCRTLLAKSVF
SIAKVFRKLLQKSVF

SEQ ID NO: 262791 - protein, 15 aa, Artificial Sequence
  Description of Artificial Sequence: Synthetic peptide
  Seed: SIGKVCRTLLAKSVF
SIAKVFRKLLSKSVF

SEQ ID NO: 262792 - protein, 15 aa, Artificial Sequence
  Description of Artificial Sequence: Synthetic peptide
  Seed: SIGKVCRTLLAKSVF
SIAKVFRKLLTKSVF

SEQ ID NO: 262793 - protein, 15 aa, Artificial Sequence
  Description of Artificial Sequence: Synthetic peptide
  Seed: SIGKVCRTLLAKSVF
SIAKVFRKLLVKSVF

SEQ ID NO: 262794 - protein, 15 aa, Artificial Sequence
  Description of Artificial Sequence: Synthetic peptide
  Seed: SIGKVCRTLLAKSVF
SIAKVFRRLLAKSVF

SEQ ID NO: 262795 - protein, 15 aa, Artificial Sequence
  Description of Artificial Sequence: Synthetic peptide
  Seed: SIGKVCRTLLAKSVF
SIAKVFRRLLEKSVF

SEQ ID NO: 262796 - protein, 15 aa, Artificial Sequence
  Description of Artificial Sequence: Synthetic peptide
  Seed: SIGKVCRTLLAKSVF
SIAKVFRRLLGKSVF

SEQ ID NO: 262797 - protein, 15 aa, Artificial Sequence
  Description of Artificial Sequence: Synthetic peptide
  Seed: SIGKVCRTLLAKSVF
SIAKVFRRLLHKSVF

SEQ ID NO: 262798 - protein, 15 aa, Artificial Sequence
  Description of Artificial Sequence: Synthetic peptide
  Seed: SIGKVCRTLLAKSVF
SIAKVFRRLLMKSVF

SEQ ID NO: 262799 - protein, 15 aa, Artificial Sequence
  Description of Artificial Sequence: Synthetic peptide
  Seed: SIGKVCRTLLAKSVF
SIAKVFRRLLQKSVF

SEQ ID NO: 262800 - protein, 15 aa, Artificial Sequence
  Description of Artificial Sequence: Synthetic peptide
  Seed: SIGKVCRTLLAKSVF
SIAKVFRRLLSKSVF

SEQ ID NO: 262801 - protein, 15 aa, Artificial Sequence
  Description of Artificial Sequence: Synthetic peptide
  Seed: SIGKVCRTLLAKSVF
SIAKVIRKLLAKSVF

SEQ ID NO: 262802 - protein, 15 aa, Artificial Sequence
  Description of Artificial Sequence: Synthetic peptide
  Seed: SIGKVCRTLLAKSVF
SIAKVIRKLLGKSVF

SEQ ID NO: 262803 - protein, 15 aa, Artificial Sequence
  Description of Artificial Sequence: Synthetic peptide
  Seed: SIGKVCRTLLAKSVF
SIAKVIRKLLIKSVF

SEQ ID NO: 262804 - protein, 15 aa, Artificial Sequence
  Description of Artificial Sequence: Synthetic peptide
  Seed: SIGKVCRTLLAKSVF
SIAKVIRKLLLKSVF

SEQ ID NO: 262805 - protein, 15 aa, Artificial Sequence
  Description of Artificial Sequence: Synthetic peptide
  Seed: SIGKVCRTLLAKSVF
SIAKVIRKLLMKSVF

SEQ ID NO: 262806 - protein, 15 aa, Artificial Sequence
  Description of Artificial Sequence: Synthetic peptide
  Seed: SIGKVCRTLLAKSVF
SIAKVIRKLLNKSVF

SEQ ID NO: 262807 - protein, 15 aa, Artificial Sequence
  Description of Artificial Sequence: Synthetic peptide
  Seed: SIGKVCRTLLAKSVF
SIAKVIRKLLQKSVF

SEQ ID NO: 262808 - protein, 15 aa, Artificial Sequence
  Description of Artificial Sequence: Synthetic peptide
  Seed: SIGKVCRTLLAKSVF
SIAKVIRKLLSKSVF

SEQ ID NO: 262809 - protein, 15 aa, Artificial Sequence
  Description of Artificial Sequence: Synthetic peptide
  Seed: SIGKVCRTLLAKSVF
SIAKVIRKLLTKSVF

SEQ ID NO: 262810 - protein, 15 aa, Artificial Sequence
  Description of Artificial Sequence: Synthetic peptide
  Seed: SIGKVCRTLLAKSVF
SIAKVIRKLLVKSVF

SEQ ID NO: 262811 - protein, 15 aa, Artificial Sequence
  Description of Artificial Sequence: Synthetic peptide
  Seed: SIGKVCRTLLAKSVF
SIAKVIRRLLAKSVF

SEQ ID NO: 262812 - protein, 15 aa, Artificial Sequence
  Description of Artificial Sequence: Synthetic peptide
  Seed: SIGKVCRTLLAKSVF
SIAKVIRRLLCKSVF

SEQ ID NO: 262813 - protein, 15 aa, Artificial Sequence
  Description of Artificial Sequence: Synthetic peptide
  Seed: SIGKVCRTLLAKSVF
SIAKVIRRLLEKSVF

SEQ ID NO: 262814 - protein, 15 aa, Artificial Sequence
  Description of Artificial Sequence: Synthetic peptide
  Seed: SIGKVCRTLLAKSVF
SIAKVIRRLLGKSVF

SEQ ID NO: 262815 - protein, 15 aa, Artificial Sequence
  Description of Artificial Sequence: Synthetic peptide
  Seed: SIGKVCRTLLAKSVF
SIAKVIRRLLMKSVF

SEQ ID NO: 262816 - protein, 15 aa, Artificial Sequence
  Description of Artificial Sequence: Synthetic peptide
  Seed: SIGKVCRTLLAKSVF
SIAKVIRRLLNKSVF

SEQ ID NO: 262817 - protein, 15 aa, Artificial Sequence
  Description of Artificial Sequence: Synthetic peptide
  Seed: SIGKVCRTLLAKSVF
SIAKVIRRLLQKSVF

SEQ ID NO: 262818 - protein, 15 aa, Artificial Sequence
  Description of Artificial Sequence: Synthetic peptide
  Seed: SIGKVCRTLLAKSVF
SIAKVIRRLLSKSVF

SEQ ID NO: 262819 - protein, 15 aa, Artificial Sequence
  Description of Artificial Sequence: Synthetic peptide
  Seed: SIGKVCRTLLAKSVF
SIAKVIRRLLVKSVF

SEQ ID NO: 262820 - protein, 15 aa, Artificial Sequence
  Description of Artificial Sequence: Synthetic peptide
  Seed: SIGKVCRTLLAKSVF
SIAKVLRHLLGKSVF

SEQ ID NO: 262821 - protein, 15 aa, Artificial Sequence
  Description of Artificial Sequence: Synthetic peptide
  Seed: SIGKVCRTLLAKSVF
SIAKVLRHLLQKSVF

SEQ ID NO: 262822 - protein, 15 aa, Artificial Sequence
  Description of Artificial Sequence: Synthetic peptide
  Seed: SIGKVCRTLLAKSVF
SIAKVLRKLLAKSVF

SEQ ID NO: 262823 - protein, 15 aa, Artificial Sequence
  Description of Artificial Sequence: Synthetic peptide
  Seed: SIGKVCRTLLAKSVF
SIAKVLRKLLCKSVF

SEQ ID NO: 262824 - protein, 15 aa, Artificial Sequence
  Description of Artificial Sequence: Synthetic peptide
  Seed: SIGKVCRTLLAKSVF
SIAKVLRKLLEKSVF

SEQ ID NO: 262825 - protein, 15 aa, Artificial Sequence
  Description of Artificial Sequence: Synthetic peptide
  Seed: SIGKVCRTLLAKSVF
SIAKVLRKLLGKSVF

SEQ ID NO: 262826 - protein, 15 aa, Artificial Sequence
  Description of Artificial Sequence: Synthetic peptide
  Seed: SIGKVCRTLLAKSVF
SIAKVLRKLLHKSVF

SEQ ID NO: 262827 - protein, 15 aa, Artificial Sequence
  Description of Artificial Sequence: Synthetic peptide
  Seed: SIGKVCRTLLAKSVF
SIAKVLRKLLIKSVF

SEQ ID NO: 262828 - protein, 15 aa, Artificial Sequence
  Description of Artificial Sequence: Synthetic peptide
  Seed: SIGKVCRTLLAKSVF
SIAKVLRKLLLKSVF

SEQ ID NO: 262829 - protein, 15 aa, Artificial Sequence
  Description of Artificial Sequence: Synthetic peptide
  Seed: SIGKVCRTLLAKSVF
SIAKVLRKLLMKSVF

SEQ ID NO: 262830 - protein, 15 aa, Artificial Sequence
  Description of Artificial Sequence: Synthetic peptide
  Seed: SIGKVCRTLLAKSVF
SIAKVLRKLLNKSVF

SEQ ID NO: 262831 - protein, 15 aa, Artificial Sequence
  Description of Artificial Sequence: Synthetic peptide
  Seed: SIGKVCRTLLAKSVF
SIAKVLRKLLQKSVF

SEQ ID NO: 262832 - protein, 15 aa, Artificial Sequence
  Description of Artificial Sequence: Synthetic peptide
  Seed: SIGKVCRTLLAKSVF
SIAKVLRKLLSKSVF

SEQ ID NO: 262833 - protein, 15 aa, Artificial Sequence
  Description of Artificial Sequence: Synthetic peptide
  Seed: SIGKVCRTLLAKSVF
SIAKVLRKLLTKSVF

SEQ ID NO: 262834 - protein, 15 aa, Artificial Sequence
  Description of Artificial Sequence: Synthetic peptide
  Seed: SIGKVCRTLLAKSVF
SIAKVLRKLLVKSVF

SEQ ID NO: 262835 - protein, 15 aa, Artificial Sequence
  Description of Artificial Sequence: Synthetic peptide
  Seed: SIGKVCRTLLAKSVF
SIAKVLRKLLYKSVF

SEQ ID NO: 262836 - protein, 15 aa, Artificial Sequence
  Description of Artificial Sequence: Synthetic peptide
  Seed: SIGKVCRTLLAKSVF
SIAKVLRRLLAKSVF

SEQ ID NO: 262837 - protein, 15 aa, Artificial Sequence
  Description of Artificial Sequence: Synthetic peptide
  Seed: SIGKVCRTLLAKSVF
SIAKVLRRLLCKSVF

SEQ ID NO: 262838 - protein, 15 aa, Artificial Sequence
  Description of Artificial Sequence: Synthetic peptide
  Seed: SIGKVCRTLLAKSVF
SIAKVLRRLLDKSVF

SEQ ID NO: 262839 - protein, 15 aa, Artificial Sequence
  Description of Artificial Sequence: Synthetic peptide
  Seed: SIGKVCRTLLAKSVF
SIAKVLRRLLEKSVF

SEQ ID NO: 262840 - protein, 15 aa, Artificial Sequence
  Description of Artificial Sequence: Synthetic peptide
  Seed: SIGKVCRTLLAKSVF
SIAKVLRRLLGKSVF

SEQ ID NO: 262841 - protein, 15 aa, Artificial Sequence
  Description of Artificial Sequence: Synthetic peptide
  Seed: SIGKVCRTLLAKSVF
SIAKVLRRLLHKSVF

SEQ ID NO: 262842 - protein, 15 aa, Artificial Sequence
  Description of Artificial Sequence: Synthetic peptide
  Seed: SIGKVCRTLLAKSVF
SIAKVLRRLLIKSVF

SEQ ID NO: 262843 - protein, 15 aa, Artificial Sequence
  Description of Artificial Sequence: Synthetic peptide
  Seed: SIGKVCRTLLAKSVF
SIAKVLRRLLLKSVF

SEQ ID NO: 262844 - protein, 15 aa, Artificial Sequence
  Description of Artificial Sequence: Synthetic peptide
  Seed: SIGKVCRTLLAKSVF
SIAKVLRRLLMKSVF

SEQ ID NO: 262845 - protein, 15 aa, Artificial Sequence
  Description of Artificial Sequence: Synthetic peptide
  Seed: SIGKVCRTLLAKSVF
SIAKVLRRLLNKSVF

SEQ ID NO: 262846 - protein, 15 aa, Artificial Sequence
  Description of Artificial Sequence: Synthetic peptide
  Seed: SIGKVCRTLLAKSVF
SIAKVLRRLLQKSVF

SEQ ID NO: 262847 - protein, 15 aa, Artificial Sequence
  Description of Artificial Sequence: Synthetic peptide
  Seed: SIGKVCRTLLAKSVF
SIAKVLRRLLSKSVF

SEQ ID NO: 262848 - protein, 15 aa, Artificial Sequence
  Description of Artificial Sequence: Synthetic peptide
  Seed: SIGKVCRTLLAKSVF
SIAKVLRRLLTKSVF

SEQ ID NO: 262849 - protein, 15 aa, Artificial Sequence
  Description of Artificial Sequence: Synthetic peptide
  Seed: SIGKVCRTLLAKSVF
SIAKVLRRLLVKSVF

SEQ ID NO: 262850 - protein, 15 aa, Artificial Sequence
  Description of Artificial Sequence: Synthetic peptide
  Seed: SIGKVCRTLLAKSVF
SIAKVLRRLLYKSVF

SEQ ID NO: 262851 - protein, 15 aa, Artificial Sequence
  Description of Artificial Sequence: Synthetic peptide
  Seed: SIGKVCRTLLAKSVF
SIAKVMRHLLAKSVF

SEQ ID NO: 262852 - protein, 15 aa, Artificial Sequence
  Description of Artificial Sequence: Synthetic peptide
  Seed: SIGKVCRTLLAKSVF
SIAKVMRHLLGKSVF

SEQ ID NO: 262853 - protein, 15 aa, Artificial Sequence
  Description of Artificial Sequence: Synthetic peptide
  Seed: SIGKVCRTLLAKSVF
SIAKVMRHLLQKSVF

SEQ ID NO: 262854 - protein, 15 aa, Artificial Sequence
  Description of Artificial Sequence: Synthetic peptide
  Seed: SIGKVCRTLLAKSVF
SIAKVMRHLLSKSVF

SEQ ID NO: 262855 - protein, 15 aa, Artificial Sequence
  Description of Artificial Sequence: Synthetic peptide
  Seed: SIGKVCRTLLAKSVF
SIAKVMRKLLAKSVF

SEQ ID NO: 262856 - protein, 15 aa, Artificial Sequence
  Description of Artificial Sequence: Synthetic peptide
  Seed: SIGKVCRTLLAKSVF
SIAKVMRKLLCKSVF

SEQ ID NO: 262857 - protein, 15 aa, Artificial Sequence
  Description of Artificial Sequence: Synthetic peptide
  Seed: SIGKVCRTLLAKSVF
SIAKVMRKLLDKSVF

SEQ ID NO: 262858 - protein, 15 aa, Artificial Sequence
  Description of Artificial Sequence: Synthetic peptide
  Seed: SIGKVCRTLLAKSVF
SIAKVMRKLLEKSVF

SEQ ID NO: 262859 - protein, 15 aa, Artificial Sequence
  Description of Artificial Sequence: Synthetic peptide
  Seed: SIGKVCRTLLAKSVF
SIAKVMRKLLGKSVF

SEQ ID NO: 262860 - protein, 15 aa, Artificial Sequence
  Description of Artificial Sequence: Synthetic peptide
  Seed: SIGKVCRTLLAKSVF
SIAKVMRKLLHKSVF

SEQ ID NO: 262861 - protein, 15 aa, Artificial Sequence
  Description of Artificial Sequence: Synthetic peptide
  Seed: SIGKVCRTLLAKSVF
SIAKVMRKLLIKSVF

SEQ ID NO: 262862 - protein, 15 aa, Artificial Sequence
  Description of Artificial Sequence: Synthetic peptide
  Seed: SIGKVCRTLLAKSVF
SIAKVMRKLLLKSVF

SEQ ID NO: 262863 - protein, 15 aa, Artificial Sequence
  Description of Artificial Sequence: Synthetic peptide
  Seed: SIGKVCRTLLAKSVF
SIAKVMRKLLMKSVF

SEQ ID NO: 262864 - protein, 15 aa, Artificial Sequence
  Description of Artificial Sequence: Synthetic peptide
  Seed: SIGKVCRTLLAKSVF
SIAKVMRKLLNKSVF

SEQ ID NO: 262865 - protein, 15 aa, Artificial Sequence
  Description of Artificial Sequence: Synthetic peptide
  Seed: SIGKVCRTLLAKSVF
SIAKVMRKLLPKSVF

SEQ ID NO: 262866 - protein, 15 aa, Artificial Sequence
  Description of Artificial Sequence: Synthetic peptide
  Seed: SIGKVCRTLLAKSVF
SIAKVMRKLLQKSVF

SEQ ID NO: 262867 - protein, 15 aa, Artificial Sequence
  Description of Artificial Sequence: Synthetic peptide
  Seed: SIGKVCRTLLAKSVF
SIAKVMRKLLSKSVF

SEQ ID NO: 262868 - protein, 15 aa, Artificial Sequence
  Description of Artificial Sequence: Synthetic peptide
  Seed: SIGKVCRTLLAKSVF
SIAKVMRKLLTKSVF

SEQ ID NO: 262869 - protein, 15 aa, Artificial Sequence
  Description of Artificial Sequence: Synthetic peptide
  Seed: SIGKVCRTLLAKSVF
SIAKVMRKLLVKSVF

SEQ ID NO: 262870 - protein, 15 aa, Artificial Sequence
  Description of Artificial Sequence: Synthetic peptide
  Seed: SIGKVCRTLLAKSVF
SIAKVMRKLLYKSVF

SEQ ID NO: 262871 - protein, 15 aa, Artificial Sequence
  Description of Artificial Sequence: Synthetic peptide
  Seed: SIGKVCRTLLAKSVF
SIAKVMRNLLAKSVF

SEQ ID NO: 262872 - protein, 15 aa, Artificial Sequence
  Description of Artificial Sequence: Synthetic peptide
  Seed: SIGKVCRTLLAKSVF
SIAKVMRNLLSKSVF

SEQ ID NO: 262873 - protein, 15 aa, Artificial Sequence
  Description of Artificial Sequence: Synthetic peptide
  Seed: SIGKVCRTLLAKSVF
SIAKVMRRLLAKSVF

SEQ ID NO: 262874 - protein, 15 aa, Artificial Sequence
  Description of Artificial Sequence: Synthetic peptide
  Seed: SIGKVCRTLLAKSVF
SIAKVMRRLLCKSVF

SEQ ID NO: 262875 - protein, 15 aa, Artificial Sequence
  Description of Artificial Sequence: Synthetic peptide
  Seed: SIGKVCRTLLAKSVF
SIAKVMRRLLDKSVF

SEQ ID NO: 262876 - protein, 15 aa, Artificial Sequence
  Description of Artificial Sequence: Synthetic peptide
  Seed: SIGKVCRTLLAKSVF
SIAKVMRRLLEKSVF

SEQ ID NO: 262877 - protein, 15 aa, Artificial Sequence
  Description of Artificial Sequence: Synthetic peptide
  Seed: SIGKVCRTLLAKSVF
SIAKVMRRLLGKSVF

SEQ ID NO: 262878 - protein, 15 aa, Artificial Sequence
  Description of Artificial Sequence: Synthetic peptide
  Seed: SIGKVCRTLLAKSVF
SIAKVMRRLLHKSVF

SEQ ID NO: 262879 - protein, 15 aa, Artificial Sequence
  Description of Artificial Sequence: Synthetic peptide
  Seed: SIGKVCRTLLAKSVF
SIAKVMRRLLIKSVF

SEQ ID NO: 262880 - protein, 15 aa, Artificial Sequence
  Description of Artificial Sequence: Synthetic peptide
  Seed: SIGKVCRTLLAKSVF
SIAKVMRRLLLKSVF

SEQ ID NO: 262881 - protein, 15 aa, Artificial Sequence
  Description of Artificial Sequence: Synthetic peptide
  Seed: SIGKVCRTLLAKSVF
SIAKVMRRLLMKSVF

SEQ ID NO: 262882 - protein, 15 aa, Artificial Sequence
  Description of Artificial Sequence: Synthetic peptide
  Seed: SIGKVCRTLLAKSVF
SIAKVMRRLLNKSVF

SEQ ID NO: 262883 - protein, 15 aa, Artificial Sequence
  Description of Artificial Sequence: Synthetic peptide
  Seed: SIGKVCRTLLAKSVF
SIAKVMRRLLPKSVF

SEQ ID NO: 262884 - protein, 15 aa, Artificial Sequence
  Description of Artificial Sequence: Synthetic peptide
  Seed: SIGKVCRTLLAKSVF
SIAKVMRRLLQKSVF

SEQ ID NO: 262885 - protein, 15 aa, Artificial Sequence
  Description of Artificial Sequence: Synthetic peptide
  Seed: SIGKVCRTLLAKSVF
SIAKVMRRLLSKSVF

SEQ ID NO: 262886 - protein, 15 aa, Artificial Sequence
  Description of Artificial Sequence: Synthetic peptide
  Seed: SIGKVCRTLLAKSVF
SIAKVMRRLLTKSVF

SEQ ID NO: 262887 - protein, 15 aa, Artificial Sequence
  Description of Artificial Sequence: Synthetic peptide
  Seed: SIGKVCRTLLAKSVF
SIAKVMRRLLVKSVF

SEQ ID NO: 262888 - protein, 15 aa, Artificial Sequence
  Description of Artificial Sequence: Synthetic peptide
  Seed: SIGKVCRTLLAKSVF
SIAKVMRRLLYKSVF

SEQ ID NO: 262889 - protein, 15 aa, Artificial Sequence
  Description of Artificial Sequence: Synthetic peptide
  Seed: SIGKVCRTLLAKSVF
SIAKVMRSLLAKSVF

SEQ ID NO: 262890 - protein, 15 aa, Artificial Sequence
  Description of Artificial Sequence: Synthetic peptide
  Seed: SIGKVCRTLLAKSVF
SIAKVMRSLLGKSVF

SEQ ID NO: 262891 - protein, 15 aa, Artificial Sequence
  Description of Artificial Sequence: Synthetic peptide
  Seed: SIGKVCRTLLAKSVF
SIAKVMRSLLQKSVF

SEQ ID NO: 262892 - protein, 15 aa, Artificial Sequence
  Description of Artificial Sequence: Synthetic peptide
  Seed: SIGKVCRTLLAKSVF
SIAKVMRSLLSKSVF

SEQ ID NO: 262893 - protein, 15 aa, Artificial Sequence
  Description of Artificial Sequence: Synthetic peptide
  Seed: SIGKVCRTLLAKSVF
SIAKVMRTLLAKSVF

SEQ ID NO: 262894 - protein, 15 aa, Artificial Sequence
  Description of Artificial Sequence: Synthetic peptide
  Seed: SIGKVCRTLLAKSVF
SIAKVMRTLLSKSVF

SEQ ID NO: 262895 - protein, 15 aa, Artificial Sequence
  Description of Artificial Sequence: Synthetic peptide
  Seed: SIGKVCRTLLAKSVF
SIAKVQRKLLAKSVF

SEQ ID NO: 262896 - protein, 15 aa, Artificial Sequence
  Description of Artificial Sequence: Synthetic peptide
  Seed: SIGKVCRTLLAKSVF
SIAKVQRKLLGKSVF

SEQ ID NO: 262897 - protein, 15 aa, Artificial Sequence
  Description of Artificial Sequence: Synthetic peptide
  Seed: SIGKVCRTLLAKSVF
SIAKVQRKLLQKSVF

SEQ ID NO: 262898 - protein, 15 aa, Artificial Sequence
  Description of Artificial Sequence: Synthetic peptide
  Seed: SIGKVCRTLLAKSVF
SIAKVQRKLLSKSVF

SEQ ID NO: 262899 - protein, 15 aa, Artificial Sequence
  Description of Artificial Sequence: Synthetic peptide
  Seed: SIGKVCRTLLAKSVF
SIAKVQRRLLAKSVF

SEQ ID NO: 262900 - protein, 15 aa, Artificial Sequence
  Description of Artificial Sequence: Synthetic peptide
  Seed: SIGKVCRTLLAKSVF
SIAKVQRRLLGKSVF

SEQ ID NO: 262901 - protein, 15 aa, Artificial Sequence
  Description of Artificial Sequence: Synthetic peptide
  Seed: SIGKVCRTLLAKSVF
SIAKVQRRLLQKSVF

SEQ ID NO: 262902 - protein, 15 aa, Artificial Sequence
  Description of Artificial Sequence: Synthetic peptide
  Seed: SIGKVCRTLLAKSVF
SIAKVQRRLLSKSVF

SEQ ID NO: 262903 - protein, 15 aa, Artificial Sequence
  Description of Artificial Sequence: Synthetic peptide
  Seed: SIGKVCRTLLAKSVF
SIAKVVRKLLAKSVF

SEQ ID NO: 262904 - protein, 15 aa, Artificial Sequence
  Description of Artificial Sequence: Synthetic peptide
  Seed: SIGKVCRTLLAKSVF
SIAKVVRKLLGKSVF

SEQ ID NO: 262905 - protein, 15 aa, Artificial Sequence
  Description of Artificial Sequence: Synthetic peptide
  Seed: SIGKVCRTLLAKSVF
SIAKVVRKLLQKSVF

SEQ ID NO: 262906 - protein, 15 aa, Artificial Sequence
  Description of Artificial Sequence: Synthetic peptide
  Seed: SIGKVCRTLLAKSVF
SIAKVVRKLLSKSVF

SEQ ID NO: 262907 - protein, 15 aa, Artificial Sequence
  Description of Artificial Sequence: Synthetic peptide
  Seed: SIGKVCRTLLAKSVF
SIAKVVRKLLVKSVF

SEQ ID NO: 262908 - protein, 15 aa, Artificial Sequence
  Description of Artificial Sequence: Synthetic peptide
  Seed: SIGKVCRTLLAKSVF
SIAKVVRRLLAKSVF

SEQ ID NO: 262909 - protein, 15 aa, Artificial Sequence
  Description of Artificial Sequence: Synthetic peptide
  Seed: SIGKVCRTLLAKSVF
SIAKVVRRLLCKSVF

SEQ ID NO: 262910 - protein, 15 aa, Artificial Sequence
  Description of Artificial Sequence: Synthetic peptide
  Seed: SIGKVCRTLLAKSVF
SIAKVVRRLLGKSVF

SEQ ID NO: 262911 - protein, 15 aa, Artificial Sequence
  Description of Artificial Sequence: Synthetic peptide
  Seed: SIGKVCRTLLAKSVF
SIAKVVRRLLQKSVF

SEQ ID NO: 262912 - protein, 15 aa, Artificial Sequence
  Description of Artificial Sequence: Synthetic peptide
  Seed: SIGKVCRTLLAKSVF
SIAKVVRRLLSKSVF

SEQ ID NO: 262913 - protein, 15 aa, Artificial Sequence
  Description of Artificial Sequence: Synthetic peptide
  Seed: SIGKVCRTLLAKSVF
SIAKVWRKLLAKSVF

SEQ ID NO: 262914 - protein, 15 aa, Artificial Sequence
  Description of Artificial Sequence: Synthetic peptide
  Seed: SIGKVCRTLLAKSVF
SIAKVWRKLLGKSVF

SEQ ID NO: 262915 - protein, 15 aa, Artificial Sequence
  Description of Artificial Sequence: Synthetic peptide
  Seed: SIGKVCRTLLAKSVF
SIAKVWRKLLMKSVF

SEQ ID NO: 262916 - protein, 15 aa, Artificial Sequence
  Description of Artificial Sequence: Synthetic peptide
  Seed: SIGKVCRTLLAKSVF
SIAKVWRKLLQKSVF

SEQ ID NO: 262917 - protein, 15 aa, Artificial Sequence
  Description of Artificial Sequence: Synthetic peptide
  Seed: SIGKVCRTLLAKSVF
SIAKVWRKLLSKSVF

SEQ ID NO: 262918 - protein, 15 aa, Artificial Sequence
  Description of Artificial Sequence: Synthetic peptide
  Seed: SIGKVCRTLLAKSVF
SIAKVWRKLLVKSVF

SEQ ID NO: 262919 - protein, 15 aa, Artificial Sequence
  Description of Artificial Sequence: Synthetic peptide
  Seed: SIGKVCRTLLAKSVF
SIAKVWRRLLAKSVF

SEQ ID NO: 262920 - protein, 15 aa, Artificial Sequence
  Description of Artificial Sequence: Synthetic peptide
  Seed: SIGKVCRTLLAKSVF
SIAKVWRRLLGKSVF

SEQ ID NO: 262921 - protein, 15 aa, Artificial Sequence
  Description of Artificial Sequence: Synthetic peptide
  Seed: SIGKVCRTLLAKSVF
SIAKVWRRLLQKSVF

SEQ ID NO: 262922 - protein, 15 aa, Artificial Sequence
  Description of Artificial Sequence: Synthetic peptide
  Seed: SIGKVCRTLLAKSVF
SIAKVWRRLLSKSVF

SEQ ID NO: 262923 - protein, 15 aa, Artificial Sequence
  Description of Artificial Sequence: Synthetic peptide
  Seed: SIGKVCRTLLAKSVF
SIAKVYRKLLAKSVF

SEQ ID NO: 262924 - protein, 15 aa, Artificial Sequence
  Description of Artificial Sequence: Synthetic peptide
  Seed: SIGKVCRTLLAKSVF
SIAKVYRKLLGKSVF

SEQ ID NO: 262925 - protein, 15 aa, Artificial Sequence
  Description of Artificial Sequence: Synthetic peptide
  Seed: SIGKVCRTLLAKSVF
SIAKVYRKLLQKSVF

SEQ ID NO: 262926 - protein, 15 aa, Artificial Sequence
  Description of Artificial Sequence: Synthetic peptide
  Seed: SIGKVCRTLLAKSVF
SIAKVYRKLLSKSVF

SEQ ID NO: 262927 - protein, 15 aa, Artificial Sequence
  Description of Artificial Sequence: Synthetic peptide
  Seed: SIGKVCRTLLAKSVF
SIAKVYRRLLAKSVF

SEQ ID NO: 262928 - protein, 15 aa, Artificial Sequence
  Description of Artificial Sequence: Synthetic peptide
  Seed: SIGKVCRTLLAKSVF
SIAKVYRRLLGKSVF

SEQ ID NO: 262929 - protein, 15 aa, Artificial Sequence
  Description of Artificial Sequence: Synthetic peptide
  Seed: SIGKVCRTLLAKSVF
SIAKVYRRLLSKSVF

SEQ ID NO: 262930 - protein, 15 aa, Artificial Sequence
  Description of Artificial Sequence: Synthetic peptide
  Seed: SIGKVCRTLLAKSVF
SICKVARKLLAKSVF

SEQ ID NO: 262931 - protein, 15 aa, Artificial Sequence
  Description of Artificial Sequence: Synthetic peptide
  Seed: SIGKVCRTLLAKSVF
SICKVARKLLGKSVF

SEQ ID NO: 262932 - protein, 15 aa, Artificial Sequence
  Description of Artificial Sequence: Synthetic peptide
  Seed: SIGKVCRTLLAKSVF
SICKVARKLLQKSVF

SEQ ID NO: 262933 - protein, 15 aa, Artificial Sequence
  Description of Artificial Sequence: Synthetic peptide
  Seed: SIGKVCRTLLAKSVF
SICKVARKLLSKSVF

SEQ ID NO: 262934 - protein, 15 aa, Artificial Sequence
  Description of Artificial Sequence: Synthetic peptide
  Seed: SIGKVCRTLLAKSVF
SICKVARRLLAKSVF

SEQ ID NO: 262935 - protein, 15 aa, Artificial Sequence
  Description of Artificial Sequence: Synthetic peptide
  Seed: SIGKVCRTLLAKSVF
SICKVARRLLGKSVF

SEQ ID NO: 262936 - protein, 15 aa, Artificial Sequence
  Description of Artificial Sequence: Synthetic peptide
  Seed: SIGKVCRTLLAKSVF
SICKVARRLLQKSVF

SEQ ID NO: 262937 - protein, 15 aa, Artificial Sequence
  Description of Artificial Sequence: Synthetic peptide
  Seed: SIGKVCRTLLAKSVF
SICKVARRLLSKSVF

SEQ ID NO: 262938 - protein, 15 aa, Artificial Sequence
  Description of Artificial Sequence: Synthetic peptide
  Seed: SIGKVCRTLLAKSVF
SICKVCRRLLRKSVF

SEQ ID NO: 262939 - protein, 15 aa, Artificial Sequence
  Description of Artificial Sequence: Synthetic peptide
  Seed: SIGKVCRTLLAKSVF
SICKVFRKLLAKSVF

SEQ ID NO: 262940 - protein, 15 aa, Artificial Sequence
  Description of Artificial Sequence: Synthetic peptide
  Seed: SIGKVCRTLLAKSVF
SICKVFRKLLGKSVF

SEQ ID NO: 262941 - protein, 15 aa, Artificial Sequence
  Description of Artificial Sequence: Synthetic peptide
  Seed: SIGKVCRTLLAKSVF
SICKVFRKLLQKSVF

SEQ ID NO: 262942 - protein, 15 aa, Artificial Sequence
  Description of Artificial Sequence: Synthetic peptide
  Seed: SIGKVCRTLLAKSVF
SICKVFRKLLSKSVF

SEQ ID NO: 262943 - protein, 15 aa, Artificial Sequence
  Description of Artificial Sequence: Synthetic peptide
  Seed: SIGKVCRTLLAKSVF
SICKVFRKLLTKSVF

SEQ ID NO: 262944 - protein, 15 aa, Artificial Sequence
  Description of Artificial Sequence: Synthetic peptide
  Seed: SIGKVCRTLLAKSVF
SICKVFRRLLAKSVF

SEQ ID NO: 262945 - protein, 15 aa, Artificial Sequence
  Description of Artificial Sequence: Synthetic peptide
  Seed: SIGKVCRTLLAKSVF
SICKVFRRLLGKSVF

SEQ ID NO: 262946 - protein, 15 aa, Artificial Sequence
  Description of Artificial Sequence: Synthetic peptide
  Seed: SIGKVCRTLLAKSVF
SICKVFRRLLQKSVF

SEQ ID NO: 262947 - protein, 15 aa, Artificial Sequence
  Description of Artificial Sequence: Synthetic peptide
  Seed: SIGKVCRTLLAKSVF
SICKVFRRLLSKSVF

SEQ ID NO: 262948 - protein, 15 aa, Artificial Sequence
  Description of Artificial Sequence: Synthetic peptide
  Seed: SIGKVCRTLLAKSVF
SICKVFRRLLVKSVF

SEQ ID NO: 262949 - protein, 15 aa, Artificial Sequence
  Description of Artificial Sequence: Synthetic peptide
  Seed: SIGKVCRTLLAKSVF
SICKVHRRLLAKSVF

SEQ ID NO: 262950 - protein, 15 aa, Artificial Sequence
  Description of Artificial Sequence: Synthetic peptide
  Seed: SIGKVCRTLLAKSVF
SICKVIRHLLGKSVF

SEQ ID NO: 262951 - protein, 15 aa, Artificial Sequence
  Description of Artificial Sequence: Synthetic peptide
  Seed: SIGKVCRTLLAKSVF
SICKVIRHLLQKSVF

SEQ ID NO: 262952 - protein, 15 aa, Artificial Sequence
  Description of Artificial Sequence: Synthetic peptide
  Seed: SIGKVCRTLLAKSVF
SICKVIRKLLAKSVF

SEQ ID NO: 262953 - protein, 15 aa, Artificial Sequence
  Description of Artificial Sequence: Synthetic peptide
  Seed: SIGKVCRTLLAKSVF
SICKVIRKLLGKSVF

SEQ ID NO: 262954 - protein, 15 aa, Artificial Sequence
  Description of Artificial Sequence: Synthetic peptide
  Seed: SIGKVCRTLLAKSVF
SICKVIRKLLIKSVF

SEQ ID NO: 262955 - protein, 15 aa, Artificial Sequence
  Description of Artificial Sequence: Synthetic peptide
  Seed: SIGKVCRTLLAKSVF
SICKVIRKLLLKSVF

SEQ ID NO: 262956 - protein, 15 aa, Artificial Sequence
  Description of Artificial Sequence: Synthetic peptide
  Seed: SIGKVCRTLLAKSVF
SICKVIRKLLMKSVF

SEQ ID NO: 262957 - protein, 15 aa, Artificial Sequence
  Description of Artificial Sequence: Synthetic peptide
  Seed: SIGKVCRTLLAKSVF
SICKVIRKLLQKSVF

SEQ ID NO: 262958 - protein, 15 aa, Artificial Sequence
  Description of Artificial Sequence: Synthetic peptide
  Seed: SIGKVCRTLLAKSVF
SICKVIRKLLSKSVF

SEQ ID NO: 262959 - protein, 15 aa, Artificial Sequence
  Description of Artificial Sequence: Synthetic peptide
  Seed: SIGKVCRTLLAKSVF
SICKVIRKLLVKSVF

SEQ ID NO: 262960 - protein, 15 aa, Artificial Sequence
  Description of Artificial Sequence: Synthetic peptide
  Seed: SIGKVCRTLLAKSVF
SICKVIRKLLYKSVF

SEQ ID NO: 262961 - protein, 15 aa, Artificial Sequence
  Description of Artificial Sequence: Synthetic peptide
  Seed: SIGKVCRTLLAKSVF
SICKVIRRLLAKSVF

SEQ ID NO: 262962 - protein, 15 aa, Artificial Sequence
  Description of Artificial Sequence: Synthetic peptide
  Seed: SIGKVCRTLLAKSVF
SICKVIRRLLEKSVF

SEQ ID NO: 262963 - protein, 15 aa, Artificial Sequence
  Description of Artificial Sequence: Synthetic peptide
  Seed: SIGKVCRTLLAKSVF
SICKVIRRLLGKSVF

SEQ ID NO: 262964 - protein, 15 aa, Artificial Sequence
  Description of Artificial Sequence: Synthetic peptide
  Seed: SIGKVCRTLLAKSVF
SICKVIRRLLIKSVF

SEQ ID NO: 262965 - protein, 15 aa, Artificial Sequence
  Description of Artificial Sequence: Synthetic peptide
  Seed: SIGKVCRTLLAKSVF
SICKVIRRLLLKSVF

SEQ ID NO: 262966 - protein, 15 aa, Artificial Sequence
  Description of Artificial Sequence: Synthetic peptide
  Seed: SIGKVCRTLLAKSVF
SICKVIRRLLMKSVF

SEQ ID NO: 262967 - protein, 15 aa, Artificial Sequence
  Description of Artificial Sequence: Synthetic peptide
  Seed: SIGKVCRTLLAKSVF
SICKVIRRLLQKSVF

SEQ ID NO: 262968 - protein, 15 aa, Artificial Sequence
  Description of Artificial Sequence: Synthetic peptide
  Seed: SIGKVCRTLLAKSVF
SICKVIRRLLSKSVF

SEQ ID NO: 262969 - protein, 15 aa, Artificial Sequence
  Description of Artificial Sequence: Synthetic peptide
  Seed: SIGKVCRTLLAKSVF
SICKVIRRLLVKSVF

SEQ ID NO: 262970 - protein, 15 aa, Artificial Sequence
  Description of Artificial Sequence: Synthetic peptide
  Seed: SIGKVCRTLLAKSVF
SICKVIRRLLYKSVF

SEQ ID NO: 262971 - protein, 15 aa, Artificial Sequence
  Description of Artificial Sequence: Synthetic peptide
  Seed: SIGKVCRTLLAKSVF
SICKVKRKLLAKSVF

SEQ ID NO: 262972 - protein, 15 aa, Artificial Sequence
  Description of Artificial Sequence: Synthetic peptide
  Seed: SIGKVCRTLLAKSVF
SICKVKRRLLAKSVF

SEQ ID NO: 262973 - protein, 15 aa, Artificial Sequence
  Description of Artificial Sequence: Synthetic peptide
  Seed: SIGKVCRTLLAKSVF
SICKVLRHLLAKSVF

SEQ ID NO: 262974 - protein, 15 aa, Artificial Sequence
  Description of Artificial Sequence: Synthetic peptide
  Seed: SIGKVCRTLLAKSVF
SICKVLRHLLSKSVF

SEQ ID NO: 262975 - protein, 15 aa, Artificial Sequence
  Description of Artificial Sequence: Synthetic peptide
  Seed: SIGKVCRTLLAKSVF
SICKVLRKLLAKSVF

SEQ ID NO: 262976 - protein, 15 aa, Artificial Sequence
  Description of Artificial Sequence: Synthetic peptide
  Seed: SIGKVCRTLLAKSVF
SICKVLRKLLGKSVF

SEQ ID NO: 262977 - protein, 15 aa, Artificial Sequence
  Description of Artificial Sequence: Synthetic peptide
  Seed: SIGKVCRTLLAKSVF
SICKVLRKLLHKSVF

SEQ ID NO: 262978 - protein, 15 aa, Artificial Sequence
  Description of Artificial Sequence: Synthetic peptide
  Seed: SIGKVCRTLLAKSVF
SICKVLRKLLIKSVF

SEQ ID NO: 262979 - protein, 15 aa, Artificial Sequence
  Description of Artificial Sequence: Synthetic peptide
  Seed: SIGKVCRTLLAKSVF
SICKVLRKLLLKSVF

SEQ ID NO: 262980 - protein, 15 aa, Artificial Sequence
  Description of Artificial Sequence: Synthetic peptide
  Seed: SIGKVCRTLLAKSVF
SICKVLRKLLMKSVF

SEQ ID NO: 262981 - protein, 15 aa, Artificial Sequence
  Description of Artificial Sequence: Synthetic peptide
  Seed: SIGKVCRTLLAKSVF
SICKVLRKLLNKSVF

SEQ ID NO: 262982 - protein, 15 aa, Artificial Sequence
  Description of Artificial Sequence: Synthetic peptide
  Seed: SIGKVCRTLLAKSVF
SICKVLRKLLPKSVF

SEQ ID NO: 262983 - protein, 15 aa, Artificial Sequence
  Description of Artificial Sequence: Synthetic peptide
  Seed: SIGKVCRTLLAKSVF
SICKVLRKLLQKSVF

SEQ ID NO: 262984 - protein, 15 aa, Artificial Sequence
  Description of Artificial Sequence: Synthetic peptide
  Seed: SIGKVCRTLLAKSVF
SICKVLRKLLSKSVF

SEQ ID NO: 262985 - protein, 15 aa, Artificial Sequence
  Description of Artificial Sequence: Synthetic peptide
  Seed: SIGKVCRTLLAKSVF
SICKVLRKLLTKSVF

SEQ ID NO: 262986 - protein, 15 aa, Artificial Sequence
  Description of Artificial Sequence: Synthetic peptide
  Seed: SIGKVCRTLLAKSVF
SICKVLRKLLVKSVF

SEQ ID NO: 262987 - protein, 15 aa, Artificial Sequence
  Description of Artificial Sequence: Synthetic peptide
  Seed: SIGKVCRTLLAKSVF
SICKVLRKLLYKSVF

SEQ ID NO: 262988 - protein, 15 aa, Artificial Sequence
  Description of Artificial Sequence: Synthetic peptide
  Seed: SIGKVCRTLLAKSVF
SICKVLRRLLAKSVF

SEQ ID NO: 262989 - protein, 15 aa, Artificial Sequence
  Description of Artificial Sequence: Synthetic peptide
  Seed: SIGKVCRTLLAKSVF
SICKVLRRLLDKSVF

SEQ ID NO: 262990 - protein, 15 aa, Artificial Sequence
  Description of Artificial Sequence: Synthetic peptide
  Seed: SIGKVCRTLLAKSVF
SICKVLRRLLEKSVF

SEQ ID NO: 262991 - protein, 15 aa, Artificial Sequence
  Description of Artificial Sequence: Synthetic peptide
  Seed: SIGKVCRTLLAKSVF
SICKVLRRLLGKSVF

SEQ ID NO: 262992 - protein, 15 aa, Artificial Sequence
  Description of Artificial Sequence: Synthetic peptide
  Seed: SIGKVCRTLLAKSVF
SICKVLRRLLIKSVF

SEQ ID NO: 262993 - protein, 15 aa, Artificial Sequence
  Description of Artificial Sequence: Synthetic peptide
  Seed: SIGKVCRTLLAKSVF
SICKVLRRLLLKSVF

SEQ ID NO: 262994 - protein, 15 aa, Artificial Sequence
  Description of Artificial Sequence: Synthetic peptide
  Seed: SIGKVCRTLLAKSVF
SICKVLRRLLMKSVF

SEQ ID NO: 262995 - protein, 15 aa, Artificial Sequence
  Description of Artificial Sequence: Synthetic peptide
  Seed: SIGKVCRTLLAKSVF
SICKVLRRLLNKSVF

SEQ ID NO: 262996 - protein, 15 aa, Artificial Sequence
  Description of Artificial Sequence: Synthetic peptide
  Seed: SIGKVCRTLLAKSVF
SICKVLRRLLPKSVF

SEQ ID NO: 262997 - protein, 15 aa, Artificial Sequence
  Description of Artificial Sequence: Synthetic peptide
  Seed: SIGKVCRTLLAKSVF
SICKVLRRLLQKSVF

SEQ ID NO: 262998 - protein, 15 aa, Artificial Sequence
  Description of Artificial Sequence: Synthetic peptide
  Seed: SIGKVCRTLLAKSVF
SICKVLRRLLSKSVF

SEQ ID NO: 262999 - protein, 15 aa, Artificial Sequence
  Description of Artificial Sequence: Synthetic peptide
  Seed: SIGKVCRTLLAKSVF
SICKVLRRLLTKSVF

SEQ ID NO: 263000 - protein, 15 aa, Artificial Sequence
  Description of Artificial Sequence: Synthetic peptide
  Seed: SIGKVCRTLLAKSVF
SICKVLRRLLVKSVF

SEQ ID NO: 263001 - protein, 15 aa, Artificial Sequence
  Description of Artificial Sequence: Synthetic peptide
  Seed: SIGKVCRTLLAKSVF
SICKVLRRLLYKSVF

SEQ ID NO: 263002 - protein, 15 aa, Artificial Sequence
  Description of Artificial Sequence: Synthetic peptide
  Seed: SIGKVCRTLLAKSVF
SICKVMRHLLAKSVF

SEQ ID NO: 263003 - protein, 15 aa, Artificial Sequence
  Description of Artificial Sequence: Synthetic peptide
  Seed: SIGKVCRTLLAKSVF
SICKVMRHLLGKSVF

SEQ ID NO: 263004 - protein, 15 aa, Artificial Sequence
  Description of Artificial Sequence: Synthetic peptide
  Seed: SIGKVCRTLLAKSVF
SICKVMRHLLQKSVF

SEQ ID NO: 263005 - protein, 15 aa, Artificial Sequence
  Description of Artificial Sequence: Synthetic peptide
  Seed: SIGKVCRTLLAKSVF
SICKVMRHLLSKSVF

SEQ ID NO: 263006 - protein, 15 aa, Artificial Sequence
  Description of Artificial Sequence: Synthetic peptide
  Seed: SIGKVCRTLLAKSVF
SICKVMRKLLAKSVF

SEQ ID NO: 263007 - protein, 15 aa, Artificial Sequence
  Description of Artificial Sequence: Synthetic peptide
  Seed: SIGKVCRTLLAKSVF
SICKVMRKLLEKSVF

SEQ ID NO: 263008 - protein, 15 aa, Artificial Sequence
  Description of Artificial Sequence: Synthetic peptide
  Seed: SIGKVCRTLLAKSVF
SICKVMRKLLGKSVF

SEQ ID NO: 263009 - protein, 15 aa, Artificial Sequence
  Description of Artificial Sequence: Synthetic peptide
  Seed: SIGKVCRTLLAKSVF
SICKVMRKLLHKSVF

SEQ ID NO: 263010 - protein, 15 aa, Artificial Sequence
  Description of Artificial Sequence: Synthetic peptide
  Seed: SIGKVCRTLLAKSVF
SICKVMRKLLIKSVF

SEQ ID NO: 263011 - protein, 15 aa, Artificial Sequence
  Description of Artificial Sequence: Synthetic peptide
  Seed: SIGKVCRTLLAKSVF
SICKVMRKLLLKSVF

SEQ ID NO: 263012 - protein, 15 aa, Artificial Sequence
  Description of Artificial Sequence: Synthetic peptide
  Seed: SIGKVCRTLLAKSVF
SICKVMRKLLMKSVF

SEQ ID NO: 263013 - protein, 15 aa, Artificial Sequence
  Description of Artificial Sequence: Synthetic peptide
  Seed: SIGKVCRTLLAKSVF
SICKVMRKLLNKSVF

SEQ ID NO: 263014 - protein, 15 aa, Artificial Sequence
  Description of Artificial Sequence: Synthetic peptide
  Seed: SIGKVCRTLLAKSVF
SICKVMRKLLPKSVF

SEQ ID NO: 263015 - protein, 15 aa, Artificial Sequence
  Description of Artificial Sequence: Synthetic peptide
  Seed: SIGKVCRTLLAKSVF
SICKVMRKLLQKSVF

SEQ ID NO: 263016 - protein, 15 aa, Artificial Sequence
  Description of Artificial Sequence: Synthetic peptide
  Seed: SIGKVCRTLLAKSVF
SICKVMRKLLSKSVF

SEQ ID NO: 263017 - protein, 15 aa, Artificial Sequence
  Description of Artificial Sequence: Synthetic peptide
  Seed: SIGKVCRTLLAKSVF
SICKVMRKLLTKSVF

SEQ ID NO: 263018 - protein, 15 aa, Artificial Sequence
  Description of Artificial Sequence: Synthetic peptide
  Seed: SIGKVCRTLLAKSVF
SICKVMRKLLVKSVF

SEQ ID NO: 263019 - protein, 15 aa, Artificial Sequence
  Description of Artificial Sequence: Synthetic peptide
  Seed: SIGKVCRTLLAKSVF
SICKVMRKLLYKSVF

SEQ ID NO: 263020 - protein, 15 aa, Artificial Sequence
  Description of Artificial Sequence: Synthetic peptide
  Seed: SIGKVCRTLLAKSVF
SICKVMRRLLAKSVF

SEQ ID NO: 263021 - protein, 15 aa, Artificial Sequence
  Description of Artificial Sequence: Synthetic peptide
  Seed: SIGKVCRTLLAKSVF
SICKVMRRLLCKSVF

SEQ ID NO: 263022 - protein, 15 aa, Artificial Sequence
  Description of Artificial Sequence: Synthetic peptide
  Seed: SIGKVCRTLLAKSVF
SICKVMRRLLDKSVF

SEQ ID NO: 263023 - protein, 15 aa, Artificial Sequence
  Description of Artificial Sequence: Synthetic peptide
  Seed: SIGKVCRTLLAKSVF
SICKVMRRLLEKSVF

SEQ ID NO: 263024 - protein, 15 aa, Artificial Sequence
  Description of Artificial Sequence: Synthetic peptide
  Seed: SIGKVCRTLLAKSVF
SICKVMRRLLFKSVF

SEQ ID NO: 263025 - protein, 15 aa, Artificial Sequence
  Description of Artificial Sequence: Synthetic peptide
  Seed: SIGKVCRTLLAKSVF
SICKVMRRLLGKSVF

SEQ ID NO: 263026 - protein, 15 aa, Artificial Sequence
  Description of Artificial Sequence: Synthetic peptide
  Seed: SIGKVCRTLLAKSVF
SICKVMRRLLHKSVF

SEQ ID NO: 263027 - protein, 15 aa, Artificial Sequence
  Description of Artificial Sequence: Synthetic peptide
  Seed: SIGKVCRTLLAKSVF
SICKVMRRLLIKSVF

SEQ ID NO: 263028 - protein, 15 aa, Artificial Sequence
  Description of Artificial Sequence: Synthetic peptide
  Seed: SIGKVCRTLLAKSVF
SICKVMRRLLLKSVF

SEQ ID NO: 263029 - protein, 15 aa, Artificial Sequence
  Description of Artificial Sequence: Synthetic peptide
  Seed: SIGKVCRTLLAKSVF
SICKVMRRLLMKSVF

SEQ ID NO: 263030 - protein, 15 aa, Artificial Sequence
  Description of Artificial Sequence: Synthetic peptide
  Seed: SIGKVCRTLLAKSVF
SICKVMRRLLNKSVF

SEQ ID NO: 263031 - protein, 15 aa, Artificial Sequence
  Description of Artificial Sequence: Synthetic peptide
  Seed: SIGKVCRTLLAKSVF
SICKVMRRLLPKSVF

SEQ ID NO: 263032 - protein, 15 aa, Artificial Sequence
  Description of Artificial Sequence: Synthetic peptide
  Seed: SIGKVCRTLLAKSVF
SICKVMRRLLQKSVF

SEQ ID NO: 263033 - protein, 15 aa, Artificial Sequence
  Description of Artificial Sequence: Synthetic peptide
  Seed: SIGKVCRTLLAKSVF
SICKVMRRLLSKSVF

SEQ ID NO: 263034 - protein, 15 aa, Artificial Sequence
  Description of Artificial Sequence: Synthetic peptide
  Seed: SIGKVCRTLLAKSVF
SICKVMRRLLTKSVF

SEQ ID NO: 263035 - protein, 15 aa, Artificial Sequence
  Description of Artificial Sequence: Synthetic peptide
  Seed: SIGKVCRTLLAKSVF
SICKVMRRLLVKSVF

SEQ ID NO: 263036 - protein, 15 aa, Artificial Sequence
  Description of Artificial Sequence: Synthetic peptide
  Seed: SIGKVCRTLLAKSVF
SICKVMRRLLWKSVF

SEQ ID NO: 263037 - protein, 15 aa, Artificial Sequence
  Description of Artificial Sequence: Synthetic peptide
  Seed: SIGKVCRTLLAKSVF
SICKVMRRLLYKSVF

SEQ ID NO: 263038 - protein, 15 aa, Artificial Sequence
  Description of Artificial Sequence: Synthetic peptide
  Seed: SIGKVCRTLLAKSVF
SICKVQRKLLAKSVF

SEQ ID NO: 263039 - protein, 15 aa, Artificial Sequence
  Description of Artificial Sequence: Synthetic peptide
  Seed: SIGKVCRTLLAKSVF
SICKVQRKLLSKSVF

SEQ ID NO: 263040 - protein, 15 aa, Artificial Sequence
  Description of Artificial Sequence: Synthetic peptide
  Seed: SIGKVCRTLLAKSVF
SICKVQRRLLAKSVF

SEQ ID NO: 263041 - protein, 15 aa, Artificial Sequence
  Description of Artificial Sequence: Synthetic peptide
  Seed: SIGKVCRTLLAKSVF
SICKVQRRLLGKSVF

SEQ ID NO: 263042 - protein, 15 aa, Artificial Sequence
  Description of Artificial Sequence: Synthetic peptide
  Seed: SIGKVCRTLLAKSVF
SICKVQRRLLQKSVF

SEQ ID NO: 263043 - protein, 15 aa, Artificial Sequence
  Description of Artificial Sequence: Synthetic peptide
  Seed: SIGKVCRTLLAKSVF
SICKVQRRLLSKSVF

SEQ ID NO: 263044 - protein, 15 aa, Artificial Sequence
  Description of Artificial Sequence: Synthetic peptide
  Seed: SIGKVCRTLLAKSVF
SICKVSRKLLAKSVF

SEQ ID NO: 263045 - protein, 15 aa, Artificial Sequence
  Description of Artificial Sequence: Synthetic peptide
  Seed: SIGKVCRTLLAKSVF
SICKVSRKLLSKSVF

SEQ ID NO: 263046 - protein, 15 aa, Artificial Sequence
  Description of Artificial Sequence: Synthetic peptide
  Seed: SIGKVCRTLLAKSVF
SICKVSRRLLAKSVF

SEQ ID NO: 263047 - protein, 15 aa, Artificial Sequence
  Description of Artificial Sequence: Synthetic peptide
  Seed: SIGKVCRTLLAKSVF
SICKVSRRLLGKSVF

SEQ ID NO: 263048 - protein, 15 aa, Artificial Sequence
  Description of Artificial Sequence: Synthetic peptide
  Seed: SIGKVCRTLLAKSVF
SICKVTRKLLAKSVF

SEQ ID NO: 263049 - protein, 15 aa, Artificial Sequence
  Description of Artificial Sequence: Synthetic peptide
  Seed: SIGKVCRTLLAKSVF
SICKVTRKLLSKSVF

SEQ ID NO: 263050 - protein, 15 aa, Artificial Sequence
  Description of Artificial Sequence: Synthetic peptide
  Seed: SIGKVCRTLLAKSVF
SICKVTRRLLAKSVF

SEQ ID NO: 263051 - protein, 15 aa, Artificial Sequence
  Description of Artificial Sequence: Synthetic peptide
  Seed: SIGKVCRTLLAKSVF
SICKVTRRLLGKSVF

SEQ ID NO: 263052 - protein, 15 aa, Artificial Sequence
  Description of Artificial Sequence: Synthetic peptide
  Seed: SIGKVCRTLLAKSVF
SICKVVRKLLAKSVF

SEQ ID NO: 263053 - protein, 15 aa, Artificial Sequence
  Description of Artificial Sequence: Synthetic peptide
  Seed: SIGKVCRTLLAKSVF
SICKVVRKLLGKSVF

SEQ ID NO: 263054 - protein, 15 aa, Artificial Sequence
  Description of Artificial Sequence: Synthetic peptide
  Seed: SIGKVCRTLLAKSVF
SICKVVRKLLIKSVF

SEQ ID NO: 263055 - protein, 15 aa, Artificial Sequence
  Description of Artificial Sequence: Synthetic peptide
  Seed: SIGKVCRTLLAKSVF
SICKVVRKLLNKSVF

SEQ ID NO: 263056 - protein, 15 aa, Artificial Sequence
  Description of Artificial Sequence: Synthetic peptide
  Seed: SIGKVCRTLLAKSVF
SICKVVRKLLQKSVF

SEQ ID NO: 263057 - protein, 15 aa, Artificial Sequence
  Description of Artificial Sequence: Synthetic peptide
  Seed: SIGKVCRTLLAKSVF
SICKVVRKLLSKSVF

SEQ ID NO: 263058 - protein, 15 aa, Artificial Sequence
  Description of Artificial Sequence: Synthetic peptide
  Seed: SIGKVCRTLLAKSVF
SICKVVRKLLTKSVF

SEQ ID NO: 263059 - protein, 15 aa, Artificial Sequence
  Description of Artificial Sequence: Synthetic peptide
  Seed: SIGKVCRTLLAKSVF
SICKVVRKLLVKSVF

SEQ ID NO: 263060 - protein, 15 aa, Artificial Sequence
  Description of Artificial Sequence: Synthetic peptide
  Seed: SIGKVCRTLLAKSVF
SICKVVRRLLAKSVF

SEQ ID NO: 263061 - protein, 15 aa, Artificial Sequence
  Description of Artificial Sequence: Synthetic peptide
  Seed: SIGKVCRTLLAKSVF
SICKVVRRLLGKSVF

SEQ ID NO: 263062 - protein, 15 aa, Artificial Sequence
  Description of Artificial Sequence: Synthetic peptide
  Seed: SIGKVCRTLLAKSVF
SICKVVRRLLQKSVF

SEQ ID NO: 263063 - protein, 15 aa, Artificial Sequence
  Description of Artificial Sequence: Synthetic peptide
  Seed: SIGKVCRTLLAKSVF
SICKVVRRLLSKSVF

SEQ ID NO: 263064 - protein, 15 aa, Artificial Sequence
  Description of Artificial Sequence: Synthetic peptide
  Seed: SIGKVCRTLLAKSVF
SICKVVRRLLTKSVF

SEQ ID NO: 263065 - protein, 15 aa, Artificial Sequence
  Description of Artificial Sequence: Synthetic peptide
  Seed: SIGKVCRTLLAKSVF
SICKVVRRLLVKSVF

SEQ ID NO: 263066 - protein, 15 aa, Artificial Sequence
  Description of Artificial Sequence: Synthetic peptide
  Seed: SIGKVCRTLLAKSVF
SICKVWRKLLAKSVF

SEQ ID NO: 263067 - protein, 15 aa, Artificial Sequence
  Description of Artificial Sequence: Synthetic peptide
  Seed: SIGKVCRTLLAKSVF
SICKVWRKLLSKSVF

SEQ ID NO: 263068 - protein, 15 aa, Artificial Sequence
  Description of Artificial Sequence: Synthetic peptide
  Seed: SIGKVCRTLLAKSVF
SICKVWRRLLAKSVF

SEQ ID NO: 263069 - protein, 15 aa, Artificial Sequence
  Description of Artificial Sequence: Synthetic peptide
  Seed: SIGKVCRTLLAKSVF
SICKVWRRLLGKSVF

SEQ ID NO: 263070 - protein, 15 aa, Artificial Sequence
  Description of Artificial Sequence: Synthetic peptide
  Seed: SIGKVCRTLLAKSVF
SICKVWRRLLHKSVF

SEQ ID NO: 263071 - protein, 15 aa, Artificial Sequence
  Description of Artificial Sequence: Synthetic peptide
  Seed: SIGKVCRTLLAKSVF
SICKVWRRLLSKSVF

SEQ ID NO: 263072 - protein, 15 aa, Artificial Sequence
  Description of Artificial Sequence: Synthetic peptide
  Seed: SIGKVCRTLLAKSVF
SICKVYRRLLAKSVF

SEQ ID NO: 263073 - protein, 15 aa, Artificial Sequence
  Description of Artificial Sequence: Synthetic peptide
  Seed: SIGKVCRTLLAKSVF
SICKVYRRLLSKSVF

SEQ ID NO: 263074 - protein, 15 aa, Artificial Sequence
  Description of Artificial Sequence: Synthetic peptide
  Seed: SIGKVCRTLLAKSVF
SIDKVARRLLAKSVF

SEQ ID NO: 263075 - protein, 15 aa, Artificial Sequence
  Description of Artificial Sequence: Synthetic peptide
  Seed: SIGKVCRTLLAKSVF
SIDKVARRLLSKSVF

SEQ ID NO: 263076 - protein, 15 aa, Artificial Sequence
  Description of Artificial Sequence: Synthetic peptide
  Seed: SIGKVCRTLLAKSVF
SIDKVFRRLLAKSVF

SEQ ID NO: 263077 - protein, 15 aa, Artificial Sequence
  Description of Artificial Sequence: Synthetic peptide
  Seed: SIGKVCRTLLAKSVF
SIDKVFRRLLSKSVF

SEQ ID NO: 263078 - protein, 15 aa, Artificial Sequence
  Description of Artificial Sequence: Synthetic peptide
  Seed: SIGKVCRTLLAKSVF
SIDKVIRKLLAKSVF

SEQ ID NO: 263079 - protein, 15 aa, Artificial Sequence
  Description of Artificial Sequence: Synthetic peptide
  Seed: SIGKVCRTLLAKSVF
SIDKVIRKLLGKSVF

SEQ ID NO: 263080 - protein, 15 aa, Artificial Sequence
  Description of Artificial Sequence: Synthetic peptide
  Seed: SIGKVCRTLLAKSVF
SIDKVIRKLLQKSVF

SEQ ID NO: 263081 - protein, 15 aa, Artificial Sequence
  Description of Artificial Sequence: Synthetic peptide
  Seed: SIGKVCRTLLAKSVF
SIDKVIRKLLSKSVF

SEQ ID NO: 263082 - protein, 15 aa, Artificial Sequence
  Description of Artificial Sequence: Synthetic peptide
  Seed: SIGKVCRTLLAKSVF
SIDKVIRRLLAKSVF

SEQ ID NO: 263083 - protein, 15 aa, Artificial Sequence
  Description of Artificial Sequence: Synthetic peptide
  Seed: SIGKVCRTLLAKSVF
SIDKVIRRLLGKSVF

SEQ ID NO: 263084 - protein, 15 aa, Artificial Sequence
  Description of Artificial Sequence: Synthetic peptide
  Seed: SIGKVCRTLLAKSVF
SIDKVIRRLLMKSVF

SEQ ID NO: 263085 - protein, 15 aa, Artificial Sequence
  Description of Artificial Sequence: Synthetic peptide
  Seed: SIGKVCRTLLAKSVF
SIDKVIRRLLQKSVF

SEQ ID NO: 263086 - protein, 15 aa, Artificial Sequence
  Description of Artificial Sequence: Synthetic peptide
  Seed: SIGKVCRTLLAKSVF
SIDKVIRRLLSKSVF

SEQ ID NO: 263087 - protein, 15 aa, Artificial Sequence
  Description of Artificial Sequence: Synthetic peptide
  Seed: SIGKVCRTLLAKSVF
SIDKVLRKLLAKSVF

SEQ ID NO: 263088 - protein, 15 aa, Artificial Sequence
  Description of Artificial Sequence: Synthetic peptide
  Seed: SIGKVCRTLLAKSVF
SIDKVLRKLLGKSVF

SEQ ID NO: 263089 - protein, 15 aa, Artificial Sequence
  Description of Artificial Sequence: Synthetic peptide
  Seed: SIGKVCRTLLAKSVF
SIDKVLRKLLSKSVF

SEQ ID NO: 263090 - protein, 15 aa, Artificial Sequence
  Description of Artificial Sequence: Synthetic peptide
  Seed: SIGKVCRTLLAKSVF
SIDKVLRKLLTKSVF

SEQ ID NO: 263091 - protein, 15 aa, Artificial Sequence
  Description of Artificial Sequence: Synthetic peptide
  Seed: SIGKVCRTLLAKSVF
SIDKVLRRLLAKSVF

SEQ ID NO: 263092 - protein, 15 aa, Artificial Sequence
  Description of Artificial Sequence: Synthetic peptide
  Seed: SIGKVCRTLLAKSVF
SIDKVLRRLLGKSVF

SEQ ID NO: 263093 - protein, 15 aa, Artificial Sequence
  Description of Artificial Sequence: Synthetic peptide
  Seed: SIGKVCRTLLAKSVF
SIDKVLRRLLIKSVF

SEQ ID NO: 263094 - protein, 15 aa, Artificial Sequence
  Description of Artificial Sequence: Synthetic peptide
  Seed: SIGKVCRTLLAKSVF
SIDKVLRRLLMKSVF

SEQ ID NO: 263095 - protein, 15 aa, Artificial Sequence
  Description of Artificial Sequence: Synthetic peptide
  Seed: SIGKVCRTLLAKSVF
SIDKVLRRLLNKSVF

SEQ ID NO: 263096 - protein, 15 aa, Artificial Sequence
  Description of Artificial Sequence: Synthetic peptide
  Seed: SIGKVCRTLLAKSVF
SIDKVLRRLLQKSVF

SEQ ID NO: 263097 - protein, 15 aa, Artificial Sequence
  Description of Artificial Sequence: Synthetic peptide
  Seed: SIGKVCRTLLAKSVF
SIDKVLRRLLSKSVF

SEQ ID NO: 263098 - protein, 15 aa, Artificial Sequence
  Description of Artificial Sequence: Synthetic peptide
  Seed: SIGKVCRTLLAKSVF
SIDKVLRRLLVKSVF

SEQ ID NO: 263099 - protein, 15 aa, Artificial Sequence
  Description of Artificial Sequence: Synthetic peptide
  Seed: SIGKVCRTLLAKSVF
SIDKVMRKLLAKSVF

SEQ ID NO: 263100 - protein, 15 aa, Artificial Sequence
  Description of Artificial Sequence: Synthetic peptide
  Seed: SIGKVCRTLLAKSVF
SIDKVMRKLLGKSVF

SEQ ID NO: 263101 - protein, 15 aa, Artificial Sequence
  Description of Artificial Sequence: Synthetic peptide
  Seed: SIGKVCRTLLAKSVF
SIDKVMRKLLHKSVF

SEQ ID NO: 263102 - protein, 15 aa, Artificial Sequence
  Description of Artificial Sequence: Synthetic peptide
  Seed: SIGKVCRTLLAKSVF
SIDKVMRKLLMKSVF

SEQ ID NO: 263103 - protein, 15 aa, Artificial Sequence
  Description of Artificial Sequence: Synthetic peptide
  Seed: SIGKVCRTLLAKSVF
SIDKVMRKLLQKSVF

SEQ ID NO: 263104 - protein, 15 aa, Artificial Sequence
  Description of Artificial Sequence: Synthetic peptide
  Seed: SIGKVCRTLLAKSVF
SIDKVMRKLLSKSVF

SEQ ID NO: 263105 - protein, 15 aa, Artificial Sequence
  Description of Artificial Sequence: Synthetic peptide
  Seed: SIGKVCRTLLAKSVF
SIDKVMRKLLTKSVF

SEQ ID NO: 263106 - protein, 15 aa, Artificial Sequence
  Description of Artificial Sequence: Synthetic peptide
  Seed: SIGKVCRTLLAKSVF
SIDKVMRKLLVKSVF

SEQ ID NO: 263107 - protein, 15 aa, Artificial Sequence
  Description of Artificial Sequence: Synthetic peptide
  Seed: SIGKVCRTLLAKSVF
SIDKVMRRLLAKSVF

SEQ ID NO: 263108 - protein, 15 aa, Artificial Sequence
  Description of Artificial Sequence: Synthetic peptide
  Seed: SIGKVCRTLLAKSVF
SIDKVMRRLLGKSVF

SEQ ID NO: 263109 - protein, 15 aa, Artificial Sequence
  Description of Artificial Sequence: Synthetic peptide
  Seed: SIGKVCRTLLAKSVF
SIDKVMRRLLHKSVF

SEQ ID NO: 263110 - protein, 15 aa, Artificial Sequence
  Description of Artificial Sequence: Synthetic peptide
  Seed: SIGKVCRTLLAKSVF
SIDKVMRRLLIKSVF

SEQ ID NO: 263111 - protein, 15 aa, Artificial Sequence
  Description of Artificial Sequence: Synthetic peptide
  Seed: SIGKVCRTLLAKSVF
SIDKVMRRLLLKSVF

SEQ ID NO: 263112 - protein, 15 aa, Artificial Sequence
  Description of Artificial Sequence: Synthetic peptide
  Seed: SIGKVCRTLLAKSVF
SIDKVMRRLLMKSVF

SEQ ID NO: 263113 - protein, 15 aa, Artificial Sequence
  Description of Artificial Sequence: Synthetic peptide
  Seed: SIGKVCRTLLAKSVF
SIDKVMRRLLNKSVF

SEQ ID NO: 263114 - protein, 15 aa, Artificial Sequence
  Description of Artificial Sequence: Synthetic peptide
  Seed: SIGKVCRTLLAKSVF
SIDKVMRRLLPKSVF

SEQ ID NO: 263115 - protein, 15 aa, Artificial Sequence
  Description of Artificial Sequence: Synthetic peptide
  Seed: SIGKVCRTLLAKSVF
SIDKVMRRLLQKSVF

SEQ ID NO: 263116 - protein, 15 aa, Artificial Sequence
  Description of Artificial Sequence: Synthetic peptide
  Seed: SIGKVCRTLLAKSVF
SIDKVMRRLLSKSVF

SEQ ID NO: 263117 - protein, 15 aa, Artificial Sequence
  Description of Artificial Sequence: Synthetic peptide
  Seed: SIGKVCRTLLAKSVF
SIDKVMRRLLTKSVF

SEQ ID NO: 263118 - protein, 15 aa, Artificial Sequence
  Description of Artificial Sequence: Synthetic peptide
  Seed: SIGKVCRTLLAKSVF
SIDKVMRRLLVKSVF

SEQ ID NO: 263119 - protein, 15 aa, Artificial Sequence
  Description of Artificial Sequence: Synthetic peptide
  Seed: SIGKVCRTLLAKSVF
SIDKVMRRLLYKSVF

SEQ ID NO: 263120 - protein, 15 aa, Artificial Sequence
  Description of Artificial Sequence: Synthetic peptide
  Seed: SIGKVCRTLLAKSVF
SIDKVVRKLLAKSVF

SEQ ID NO: 263121 - protein, 15 aa, Artificial Sequence
  Description of Artificial Sequence: Synthetic peptide
  Seed: SIGKVCRTLLAKSVF
SIDKVVRKLLSKSVF

SEQ ID NO: 263122 - protein, 15 aa, Artificial Sequence
  Description of Artificial Sequence: Synthetic peptide
  Seed: SIGKVCRTLLAKSVF
SIDKVVRRLLAKSVF

SEQ ID NO: 263123 - protein, 15 aa, Artificial Sequence
  Description of Artificial Sequence: Synthetic peptide
  Seed: SIGKVCRTLLAKSVF
SIDKVVRRLLGKSVF

SEQ ID NO: 263124 - protein, 15 aa, Artificial Sequence
  Description of Artificial Sequence: Synthetic peptide
  Seed: SIGKVCRTLLAKSVF
SIDKVVRRLLQKSVF

SEQ ID NO: 263125 - protein, 15 aa, Artificial Sequence
  Description of Artificial Sequence: Synthetic peptide
  Seed: SIGKVCRTLLAKSVF
SIDKVVRRLLSKSVF

SEQ ID NO: 263126 - protein, 15 aa, Artificial Sequence
  Description of Artificial Sequence: Synthetic peptide
  Seed: SIGKVCRTLLAKSVF
SIEKVFRKLLAKSVF

SEQ ID NO: 263127 - protein, 15 aa, Artificial Sequence
  Description of Artificial Sequence: Synthetic peptide
  Seed: SIGKVCRTLLAKSVF
SIEKVFRKLLSKSVF

SEQ ID NO: 263128 - protein, 15 aa, Artificial Sequence
  Description of Artificial Sequence: Synthetic peptide
  Seed: SIGKVCRTLLAKSVF
SIEKVFRRLLAKSVF

SEQ ID NO: 263129 - protein, 15 aa, Artificial Sequence
  Description of Artificial Sequence: Synthetic peptide
  Seed: SIGKVCRTLLAKSVF
SIEKVFRRLLGKSVF

SEQ ID NO: 263130 - protein, 15 aa, Artificial Sequence
  Description of Artificial Sequence: Synthetic peptide
  Seed: SIGKVCRTLLAKSVF
SIEKVFRRLLQKSVF

SEQ ID NO: 263131 - protein, 15 aa, Artificial Sequence
  Description of Artificial Sequence: Synthetic peptide
  Seed: SIGKVCRTLLAKSVF
SIEKVFRRLLSKSVF

SEQ ID NO: 263132 - protein, 15 aa, Artificial Sequence
  Description of Artificial Sequence: Synthetic peptide
  Seed: SIGKVCRTLLAKSVF
SIEKVIRKLLAKSVF

SEQ ID NO: 263133 - protein, 15 aa, Artificial Sequence
  Description of Artificial Sequence: Synthetic peptide
  Seed: SIGKVCRTLLAKSVF
SIEKVIRKLLGKSVF

SEQ ID NO: 263134 - protein, 15 aa, Artificial Sequence
  Description of Artificial Sequence: Synthetic peptide
  Seed: SIGKVCRTLLAKSVF
SIEKVIRKLLQKSVF

SEQ ID NO: 263135 - protein, 15 aa, Artificial Sequence
  Description of Artificial Sequence: Synthetic peptide
  Seed: SIGKVCRTLLAKSVF
SIEKVIRKLLSKSVF

SEQ ID NO: 263136 - protein, 15 aa, Artificial Sequence
  Description of Artificial Sequence: Synthetic peptide
  Seed: SIGKVCRTLLAKSVF
SIEKVIRRLLAKSVF

SEQ ID NO: 263137 - protein, 15 aa, Artificial Sequence
  Description of Artificial Sequence: Synthetic peptide
  Seed: SIGKVCRTLLAKSVF
SIEKVIRRLLGKSVF

SEQ ID NO: 263138 - protein, 15 aa, Artificial Sequence
  Description of Artificial Sequence: Synthetic peptide
  Seed: SIGKVCRTLLAKSVF
SIEKVIRRLLQKSVF

SEQ ID NO: 263139 - protein, 15 aa, Artificial Sequence
  Description of Artificial Sequence: Synthetic peptide
  Seed: SIGKVCRTLLAKSVF
SIEKVIRRLLSKSVF

SEQ ID NO: 263140 - protein, 15 aa, Artificial Sequence
  Description of Artificial Sequence: Synthetic peptide
  Seed: SIGKVCRTLLAKSVF
SIEKVLRKLLAKSVF

SEQ ID NO: 263141 - protein, 15 aa, Artificial Sequence
  Description of Artificial Sequence: Synthetic peptide
  Seed: SIGKVCRTLLAKSVF
SIEKVLRKLLGKSVF

SEQ ID NO: 263142 - protein, 15 aa, Artificial Sequence
  Description of Artificial Sequence: Synthetic peptide
  Seed: SIGKVCRTLLAKSVF
SIEKVLRKLLQKSVF

SEQ ID NO: 263143 - protein, 15 aa, Artificial Sequence
  Description of Artificial Sequence: Synthetic peptide
  Seed: SIGKVCRTLLAKSVF
SIEKVLRKLLSKSVF

SEQ ID NO: 263144 - protein, 15 aa, Artificial Sequence
  Description of Artificial Sequence: Synthetic peptide
  Seed: SIGKVCRTLLAKSVF
SIEKVLRRLLAKSVF

SEQ ID NO: 263145 - protein, 15 aa, Artificial Sequence
  Description of Artificial Sequence: Synthetic peptide
  Seed: SIGKVCRTLLAKSVF
SIEKVLRRLLGKSVF

SEQ ID NO: 263146 - protein, 15 aa, Artificial Sequence
  Description of Artificial Sequence: Synthetic peptide
  Seed: SIGKVCRTLLAKSVF
SIEKVLRRLLQKSVF

SEQ ID NO: 263147 - protein, 15 aa, Artificial Sequence
  Description of Artificial Sequence: Synthetic peptide
  Seed: SIGKVCRTLLAKSVF
SIEKVLRRLLSKSVF

SEQ ID NO: 263148 - protein, 15 aa, Artificial Sequence
  Description of Artificial Sequence: Synthetic peptide
  Seed: SIGKVCRTLLAKSVF
SIEKVMRKLLAKSVF

SEQ ID NO: 263149 - protein, 15 aa, Artificial Sequence
  Description of Artificial Sequence: Synthetic peptide
  Seed: SIGKVCRTLLAKSVF
SIEKVMRKLLGKSVF

SEQ ID NO: 263150 - protein, 15 aa, Artificial Sequence
  Description of Artificial Sequence: Synthetic peptide
  Seed: SIGKVCRTLLAKSVF
SIEKVMRKLLMKSVF

SEQ ID NO: 263151 - protein, 15 aa, Artificial Sequence
  Description of Artificial Sequence: Synthetic peptide
  Seed: SIGKVCRTLLAKSVF
SIEKVMRKLLNKSVF

SEQ ID NO: 263152 - protein, 15 aa, Artificial Sequence
  Description of Artificial Sequence: Synthetic peptide
  Seed: SIGKVCRTLLAKSVF
SIEKVMRKLLQKSVF

SEQ ID NO: 263153 - protein, 15 aa, Artificial Sequence
  Description of Artificial Sequence: Synthetic peptide
  Seed: SIGKVCRTLLAKSVF
SIEKVMRKLLSKSVF

SEQ ID NO: 263154 - protein, 15 aa, Artificial Sequence
  Description of Artificial Sequence: Synthetic peptide
  Seed: SIGKVCRTLLAKSVF
SIEKVMRKLLTKSVF

SEQ ID NO: 263155 - protein, 15 aa, Artificial Sequence
  Description of Artificial Sequence: Synthetic peptide
  Seed: SIGKVCRTLLAKSVF
SIEKVMRKLLVKSVF

SEQ ID NO: 263156 - protein, 15 aa, Artificial Sequence
  Description of Artificial Sequence: Synthetic peptide
  Seed: SIGKVCRTLLAKSVF
SIEKVMRRLLAKSVF

SEQ ID NO: 263157 - protein, 15 aa, Artificial Sequence
  Description of Artificial Sequence: Synthetic peptide
  Seed: SIGKVCRTLLAKSVF
SIEKVMRRLLGKSVF

SEQ ID NO: 263158 - protein, 15 aa, Artificial Sequence
  Description of Artificial Sequence: Synthetic peptide
  Seed: SIGKVCRTLLAKSVF
SIEKVMRRLLMKSVF

SEQ ID NO: 263159 - protein, 15 aa, Artificial Sequence
  Description of Artificial Sequence: Synthetic peptide
  Seed: SIGKVCRTLLAKSVF
SIEKVMRRLLQKSVF

SEQ ID NO: 263160 - protein, 15 aa, Artificial Sequence
  Description of Artificial Sequence: Synthetic peptide
  Seed: SIGKVCRTLLAKSVF
SIEKVMRRLLSKSVF

SEQ ID NO: 263161 - protein, 15 aa, Artificial Sequence
  Description of Artificial Sequence: Synthetic peptide
  Seed: SIGKVCRTLLAKSVF
SIEKVMRRLLTKSVF

SEQ ID NO: 263162 - protein, 15 aa, Artificial Sequence
  Description of Artificial Sequence: Synthetic peptide
  Seed: SIGKVCRTLLAKSVF
SIEKVMRRLLVKSVF

SEQ ID NO: 263163 - protein, 15 aa, Artificial Sequence
  Description of Artificial Sequence: Synthetic peptide
  Seed: SIGKVCRTLLAKSVF
SIEKVVRKLLAKSVF

SEQ ID NO: 263164 - protein, 15 aa, Artificial Sequence
  Description of Artificial Sequence: Synthetic peptide
  Seed: SIGKVCRTLLAKSVF
SIEKVVRRLLAKSVF

SEQ ID NO: 263165 - protein, 15 aa, Artificial Sequence
  Description of Artificial Sequence: Synthetic peptide
  Seed: SIGKVCRTLLAKSVF
SIEKVVRRLLGKSVF

SEQ ID NO: 263166 - protein, 15 aa, Artificial Sequence
  Description of Artificial Sequence: Synthetic peptide
  Seed: SIGKVCRTLLAKSVF
SIFKVARALLAKSVF

SEQ ID NO: 263167 - protein, 15 aa, Artificial Sequence
  Description of Artificial Sequence: Synthetic peptide
  Seed: SIGKVCRTLLAKSVF
SIFKVARALLDKSVF

SEQ ID NO: 263168 - protein, 15 aa, Artificial Sequence
  Description of Artificial Sequence: Synthetic peptide
  Seed: SIGKVCRTLLAKSVF
SIFKVARALLEKSVF

SEQ ID NO: 263169 - protein, 15 aa, Artificial Sequence
  Description of Artificial Sequence: Synthetic peptide
  Seed: SIGKVCRTLLAKSVF
SIFKVARALLGKSVF

SEQ ID NO: 263170 - protein, 15 aa, Artificial Sequence
  Description of Artificial Sequence: Synthetic peptide
  Seed: SIGKVCRTLLAKSVF
SIFKVARALLHKSVF

SEQ ID NO: 263171 - protein, 15 aa, Artificial Sequence
  Description of Artificial Sequence: Synthetic peptide
  Seed: SIGKVCRTLLAKSVF
SIFKVARALLKKSVF

SEQ ID NO: 263172 - protein, 15 aa, Artificial Sequence
  Description of Artificial Sequence: Synthetic peptide
  Seed: SIGKVCRTLLAKSVF
SIFKVARALLMKSVF

SEQ ID NO: 263173 - protein, 15 aa, Artificial Sequence
  Description of Artificial Sequence: Synthetic peptide
  Seed: SIGKVCRTLLAKSVF
SIFKVARALLNKSVF

SEQ ID NO: 263174 - protein, 15 aa, Artificial Sequence
  Description of Artificial Sequence: Synthetic peptide
  Seed: SIGKVCRTLLAKSVF
SIFKVARALLPKSVF

SEQ ID NO: 263175 - protein, 15 aa, Artificial Sequence
  Description of Artificial Sequence: Synthetic peptide
  Seed: SIGKVCRTLLAKSVF
SIFKVARALLQKSVF

SEQ ID NO: 263176 - protein, 15 aa, Artificial Sequence
  Description of Artificial Sequence: Synthetic peptide
  Seed: SIGKVCRTLLAKSVF
SIFKVARALLRKSVF

SEQ ID NO: 263177 - protein, 15 aa, Artificial Sequence
  Description of Artificial Sequence: Synthetic peptide
  Seed: SIGKVCRTLLAKSVF
SIFKVARALLSKSVF

SEQ ID NO: 263178 - protein, 15 aa, Artificial Sequence
  Description of Artificial Sequence: Synthetic peptide
  Seed: SIGKVCRTLLAKSVF
SIFKVARALLTKSVF

SEQ ID NO: 263179 - protein, 15 aa, Artificial Sequence
  Description of Artificial Sequence: Synthetic peptide
  Seed: SIGKVCRTLLAKSVF
SIFKVARALLVKSVF

SEQ ID NO: 263180 - protein, 15 aa, Artificial Sequence
  Description of Artificial Sequence: Synthetic peptide
  Seed: SIGKVCRTLLAKSVF
SIFKVARALLYKSVF

SEQ ID NO: 263181 - protein, 15 aa, Artificial Sequence
  Description of Artificial Sequence: Synthetic peptide
  Seed: SIGKVCRTLLAKSVF
SIFKVARCLLRKSVF

SEQ ID NO: 263182 - protein, 15 aa, Artificial Sequence
  Description of Artificial Sequence: Synthetic peptide
  Seed: SIGKVCRTLLAKSVF
SIFKVARDLLAKSVF

SEQ ID NO: 263183 - protein, 15 aa, Artificial Sequence
  Description of Artificial Sequence: Synthetic peptide
  Seed: SIGKVCRTLLAKSVF
SIFKVARDLLDKSVF

SEQ ID NO: 263184 - protein, 15 aa, Artificial Sequence
  Description of Artificial Sequence: Synthetic peptide
  Seed: SIGKVCRTLLAKSVF
SIFKVARDLLEKSVF

SEQ ID NO: 263185 - protein, 15 aa, Artificial Sequence
  Description of Artificial Sequence: Synthetic peptide
  Seed: SIGKVCRTLLAKSVF
SIFKVARDLLGKSVF

SEQ ID NO: 263186 - protein, 15 aa, Artificial Sequence
  Description of Artificial Sequence: Synthetic peptide
  Seed: SIGKVCRTLLAKSVF
SIFKVARDLLSKSVF

SEQ ID NO: 263187 - protein, 15 aa, Artificial Sequence
  Description of Artificial Sequence: Synthetic peptide
  Seed: SIGKVCRTLLAKSVF
SIFKVARELLAKSVF

SEQ ID NO: 263188 - protein, 15 aa, Artificial Sequence
  Description of Artificial Sequence: Synthetic peptide
  Seed: SIGKVCRTLLAKSVF
SIFKVARELLRKSVF

SEQ ID NO: 263189 - protein, 15 aa, Artificial Sequence
  Description of Artificial Sequence: Synthetic peptide
  Seed: SIGKVCRTLLAKSVF
SIFKVARELLSKSVF

SEQ ID NO: 263190 - protein, 15 aa, Artificial Sequence
  Description of Artificial Sequence: Synthetic peptide
  Seed: SIGKVCRTLLAKSVF
SIFKVARGLLAKSVF

SEQ ID NO: 263191 - protein, 15 aa, Artificial Sequence
  Description of Artificial Sequence: Synthetic peptide
  Seed: SIGKVCRTLLAKSVF
SIFKVARGLLDKSVF

SEQ ID NO: 263192 - protein, 15 aa, Artificial Sequence
  Description of Artificial Sequence: Synthetic peptide
  Seed: SIGKVCRTLLAKSVF
SIFKVARGLLGKSVF

SEQ ID NO: 263193 - protein, 15 aa, Artificial Sequence
  Description of Artificial Sequence: Synthetic peptide
  Seed: SIGKVCRTLLAKSVF
SIFKVARGLLHKSVF

SEQ ID NO: 263194 - protein, 15 aa, Artificial Sequence
  Description of Artificial Sequence: Synthetic peptide
  Seed: SIGKVCRTLLAKSVF
SIFKVARGLLKKSVF

SEQ ID NO: 263195 - protein, 15 aa, Artificial Sequence
  Description of Artificial Sequence: Synthetic peptide
  Seed: SIGKVCRTLLAKSVF
SIFKVARGLLNKSVF

SEQ ID NO: 263196 - protein, 15 aa, Artificial Sequence
  Description of Artificial Sequence: Synthetic peptide
  Seed: SIGKVCRTLLAKSVF
SIFKVARGLLQKSVF

SEQ ID NO: 263197 - protein, 15 aa, Artificial Sequence
  Description of Artificial Sequence: Synthetic peptide
  Seed: SIGKVCRTLLAKSVF
SIFKVARGLLRKSVF

SEQ ID NO: 263198 - protein, 15 aa, Artificial Sequence
  Description of Artificial Sequence: Synthetic peptide
  Seed: SIGKVCRTLLAKSVF
SIFKVARGLLSKSVF

SEQ ID NO: 263199 - protein, 15 aa, Artificial Sequence
  Description of Artificial Sequence: Synthetic peptide
  Seed: SIGKVCRTLLAKSVF
SIFKVARGLLTKSVF

SEQ ID NO: 263200 - protein, 15 aa, Artificial Sequence
  Description of Artificial Sequence: Synthetic peptide
  Seed: SIGKVCRTLLAKSVF
SIFKVARGLLVKSVF

SEQ ID NO: 263201 - protein, 15 aa, Artificial Sequence
  Description of Artificial Sequence: Synthetic peptide
  Seed: SIGKVCRTLLAKSVF
SIFKVARHLLAKSVF

SEQ ID NO: 263202 - protein, 15 aa, Artificial Sequence
  Description of Artificial Sequence: Synthetic peptide
  Seed: SIGKVCRTLLAKSVF
SIFKVARHLLDKSVF

SEQ ID NO: 263203 - protein, 15 aa, Artificial Sequence
  Description of Artificial Sequence: Synthetic peptide
  Seed: SIGKVCRTLLAKSVF
SIFKVARHLLEKSVF

SEQ ID NO: 263204 - protein, 15 aa, Artificial Sequence
  Description of Artificial Sequence: Synthetic peptide
  Seed: SIGKVCRTLLAKSVF
SIFKVARHLLGKSVF

SEQ ID NO: 263205 - protein, 15 aa, Artificial Sequence
  Description of Artificial Sequence: Synthetic peptide
  Seed: SIGKVCRTLLAKSVF
SIFKVARHLLHKSVF

SEQ ID NO: 263206 - protein, 15 aa, Artificial Sequence
  Description of Artificial Sequence: Synthetic peptide
  Seed: SIGKVCRTLLAKSVF
SIFKVARHLLIKSVF

SEQ ID NO: 263207 - protein, 15 aa, Artificial Sequence
  Description of Artificial Sequence: Synthetic peptide
  Seed: SIGKVCRTLLAKSVF
SIFKVARHLLKKSVF

SEQ ID NO: 263208 - protein, 15 aa, Artificial Sequence
  Description of Artificial Sequence: Synthetic peptide
  Seed: SIGKVCRTLLAKSVF
SIFKVARHLLLKSVF

SEQ ID NO: 263209 - protein, 15 aa, Artificial Sequence
  Description of Artificial Sequence: Synthetic peptide
  Seed: SIGKVCRTLLAKSVF
SIFKVARHLLMKSVF

SEQ ID NO: 263210 - protein, 15 aa, Artificial Sequence
  Description of Artificial Sequence: Synthetic peptide
  Seed: SIGKVCRTLLAKSVF
SIFKVARHLLNKSVF

SEQ ID NO: 263211 - protein, 15 aa, Artificial Sequence
  Description of Artificial Sequence: Synthetic peptide
  Seed: SIGKVCRTLLAKSVF
SIFKVARHLLPKSVF

SEQ ID NO: 263212 - protein, 15 aa, Artificial Sequence
  Description of Artificial Sequence: Synthetic peptide
  Seed: SIGKVCRTLLAKSVF
SIFKVARHLLQKSVF

SEQ ID NO: 263213 - protein, 15 aa, Artificial Sequence
  Description of Artificial Sequence: Synthetic peptide
  Seed: SIGKVCRTLLAKSVF
SIFKVARHLLRKSVF

SEQ ID NO: 263214 - protein, 15 aa, Artificial Sequence
  Description of Artificial Sequence: Synthetic peptide
  Seed: SIGKVCRTLLAKSVF
SIFKVARHLLSKSVF

SEQ ID NO: 263215 - protein, 15 aa, Artificial Sequence
  Description of Artificial Sequence: Synthetic peptide
  Seed: SIGKVCRTLLAKSVF
SIFKVARHLLTKSVF

SEQ ID NO: 263216 - protein, 15 aa, Artificial Sequence
  Description of Artificial Sequence: Synthetic peptide
  Seed: SIGKVCRTLLAKSVF
SIFKVARHLLVKSVF

SEQ ID NO: 263217 - protein, 15 aa, Artificial Sequence
  Description of Artificial Sequence: Synthetic peptide
  Seed: SIGKVCRTLLAKSVF
SIFKVARHLLYKSVF

SEQ ID NO: 263218 - protein, 15 aa, Artificial Sequence
  Description of Artificial Sequence: Synthetic peptide
  Seed: SIGKVCRTLLAKSVF
SIFKVARILLDKSVF

SEQ ID NO: 263219 - protein, 15 aa, Artificial Sequence
  Description of Artificial Sequence: Synthetic peptide
  Seed: SIGKVCRTLLAKSVF
SIFKVARILLHKSVF

SEQ ID NO: 263220 - protein, 15 aa, Artificial Sequence
  Description of Artificial Sequence: Synthetic peptide
  Seed: SIGKVCRTLLAKSVF
SIFKVARILLKKSVF

SEQ ID NO: 263221 - protein, 15 aa, Artificial Sequence
  Description of Artificial Sequence: Synthetic peptide
  Seed: SIGKVCRTLLAKSVF
SIFKVARILLNKSVF

SEQ ID NO: 263222 - protein, 15 aa, Artificial Sequence
  Description of Artificial Sequence: Synthetic peptide
  Seed: SIGKVCRTLLAKSVF
SIFKVARILLRKSVF

SEQ ID NO: 263223 - protein, 15 aa, Artificial Sequence
  Description of Artificial Sequence: Synthetic peptide
  Seed: SIGKVCRTLLAKSVF
SIFKVARILLSKSVF

SEQ ID NO: 263224 - protein, 15 aa, Artificial Sequence
  Description of Artificial Sequence: Synthetic peptide
  Seed: SIGKVCRTLLAKSVF
SIFKVARKLLAKSVF

SEQ ID NO: 263225 - protein, 15 aa, Artificial Sequence
  Description of Artificial Sequence: Synthetic peptide
  Seed: SIGKVCRTLLAKSVF
SIFKVARKLLCKSVF

SEQ ID NO: 263226 - protein, 15 aa, Artificial Sequence
  Description of Artificial Sequence: Synthetic peptide
  Seed: SIGKVCRTLLAKSVF
SIFKVARKLLDKSVF

SEQ ID NO: 263227 - protein, 15 aa, Artificial Sequence
  Description of Artificial Sequence: Synthetic peptide
  Seed: SIGKVCRTLLAKSVF
SIFKVARKLLEKSVF

SEQ ID NO: 263228 - protein, 15 aa, Artificial Sequence
  Description of Artificial Sequence: Synthetic peptide
  Seed: SIGKVCRTLLAKSVF
SIFKVARKLLFKSVF

SEQ ID NO: 263229 - protein, 15 aa, Artificial Sequence
  Description of Artificial Sequence: Synthetic peptide
  Seed: SIGKVCRTLLAKSVF
SIFKVARKLLGKSVF

SEQ ID NO: 263230 - protein, 15 aa, Artificial Sequence
  Description of Artificial Sequence: Synthetic peptide
  Seed: SIGKVCRTLLAKSVF
SIFKVARKLLHKSVF

SEQ ID NO: 263231 - protein, 15 aa, Artificial Sequence
  Description of Artificial Sequence: Synthetic peptide
  Seed: SIGKVCRTLLAKSVF
SIFKVARKLLIKSVF

SEQ ID NO: 263232 - protein, 15 aa, Artificial Sequence
  Description of Artificial Sequence: Synthetic peptide
  Seed: SIGKVCRTLLAKSVF
SIFKVARKLLKKSVF

SEQ ID NO: 263233 - protein, 15 aa, Artificial Sequence
  Description of Artificial Sequence: Synthetic peptide
  Seed: SIGKVCRTLLAKSVF
SIFKVARKLLLKSVF

SEQ ID NO: 263234 - protein, 15 aa, Artificial Sequence
  Description of Artificial Sequence: Synthetic peptide
  Seed: SIGKVCRTLLAKSVF
SIFKVARKLLMKSVF

SEQ ID NO: 263235 - protein, 15 aa, Artificial Sequence
  Description of Artificial Sequence: Synthetic peptide
  Seed: SIGKVCRTLLAKSVF
SIFKVARKLLNKSVF

SEQ ID NO: 263236 - protein, 15 aa, Artificial Sequence
  Description of Artificial Sequence: Synthetic peptide
  Seed: SIGKVCRTLLAKSVF
SIFKVARKLLPKSVF

SEQ ID NO: 263237 - protein, 15 aa, Artificial Sequence
  Description of Artificial Sequence: Synthetic peptide
  Seed: SIGKVCRTLLAKSVF
SIFKVARKLLQKSVF

SEQ ID NO: 263238 - protein, 15 aa, Artificial Sequence
  Description of Artificial Sequence: Synthetic peptide
  Seed: SIGKVCRTLLAKSVF
SIFKVARKLLRKSVF

SEQ ID NO: 263239 - protein, 15 aa, Artificial Sequence
  Description of Artificial Sequence: Synthetic peptide
  Seed: SIGKVCRTLLAKSVF
SIFKVARKLLSKSVF

SEQ ID NO: 263240 - protein, 15 aa, Artificial Sequence
  Description of Artificial Sequence: Synthetic peptide
  Seed: SIGKVCRTLLAKSVF
SIFKVARKLLTKSVF

SEQ ID NO: 263241 - protein, 15 aa, Artificial Sequence
  Description of Artificial Sequence: Synthetic peptide
  Seed: SIGKVCRTLLAKSVF
SIFKVARKLLVKSVF

SEQ ID NO: 263242 - protein, 15 aa, Artificial Sequence
  Description of Artificial Sequence: Synthetic peptide
  Seed: SIGKVCRTLLAKSVF
SIFKVARKLLWKSVF

SEQ ID NO: 263243 - protein, 15 aa, Artificial Sequence
  Description of Artificial Sequence: Synthetic peptide
  Seed: SIGKVCRTLLAKSVF
SIFKVARKLLYKSVF

SEQ ID NO: 263244 - protein, 15 aa, Artificial Sequence
  Description of Artificial Sequence: Synthetic peptide
  Seed: SIGKVCRTLLAKSVF
SIFKVARLLLRKSVF

SEQ ID NO: 263245 - protein, 15 aa, Artificial Sequence
  Description of Artificial Sequence: Synthetic peptide
  Seed: SIGKVCRTLLAKSVF
SIFKVARMLLHKSVF

SEQ ID NO: 263246 - protein, 15 aa, Artificial Sequence
  Description of Artificial Sequence: Synthetic peptide
  Seed: SIGKVCRTLLAKSVF
SIFKVARMLLKKSVF

SEQ ID NO: 263247 - protein, 15 aa, Artificial Sequence
  Description of Artificial Sequence: Synthetic peptide
  Seed: SIGKVCRTLLAKSVF
SIFKVARMLLRKSVF

SEQ ID NO: 263248 - protein, 15 aa, Artificial Sequence
  Description of Artificial Sequence: Synthetic peptide
  Seed: SIGKVCRTLLAKSVF
SIFKVARNLLAKSVF

SEQ ID NO: 263249 - protein, 15 aa, Artificial Sequence
  Description of Artificial Sequence: Synthetic peptide
  Seed: SIGKVCRTLLAKSVF
SIFKVARNLLDKSVF

SEQ ID NO: 263250 - protein, 15 aa, Artificial Sequence
  Description of Artificial Sequence: Synthetic peptide
  Seed: SIGKVCRTLLAKSVF
SIFKVARNLLEKSVF

SEQ ID NO: 263251 - protein, 15 aa, Artificial Sequence
  Description of Artificial Sequence: Synthetic peptide
  Seed: SIGKVCRTLLAKSVF
SIFKVARNLLGKSVF

SEQ ID NO: 263252 - protein, 15 aa, Artificial Sequence
  Description of Artificial Sequence: Synthetic peptide
  Seed: SIGKVCRTLLAKSVF
SIFKVARNLLHKSVF

SEQ ID NO: 263253 - protein, 15 aa, Artificial Sequence
  Description of Artificial Sequence: Synthetic peptide
  Seed: SIGKVCRTLLAKSVF
SIFKVARNLLIKSVF

SEQ ID NO: 263254 - protein, 15 aa, Artificial Sequence
  Description of Artificial Sequence: Synthetic peptide
  Seed: SIGKVCRTLLAKSVF
SIFKVARNLLKKSVF

SEQ ID NO: 263255 - protein, 15 aa, Artificial Sequence
  Description of Artificial Sequence: Synthetic peptide
  Seed: SIGKVCRTLLAKSVF
SIFKVARNLLLKSVF

SEQ ID NO: 263256 - protein, 15 aa, Artificial Sequence
  Description of Artificial Sequence: Synthetic peptide
  Seed: SIGKVCRTLLAKSVF
SIFKVARNLLMKSVF

SEQ ID NO: 263257 - protein, 15 aa, Artificial Sequence
  Description of Artificial Sequence: Synthetic peptide
  Seed: SIGKVCRTLLAKSVF
SIFKVARNLLNKSVF

SEQ ID NO: 263258 - protein, 15 aa, Artificial Sequence
  Description of Artificial Sequence: Synthetic peptide
  Seed: SIGKVCRTLLAKSVF
SIFKVARNLLPKSVF

SEQ ID NO: 263259 - protein, 15 aa, Artificial Sequence
  Description of Artificial Sequence: Synthetic peptide
  Seed: SIGKVCRTLLAKSVF
SIFKVARNLLQKSVF

SEQ ID NO: 263260 - protein, 15 aa, Artificial Sequence
  Description of Artificial Sequence: Synthetic peptide
  Seed: SIGKVCRTLLAKSVF
SIFKVARNLLRKSVF

SEQ ID NO: 263261 - protein, 15 aa, Artificial Sequence
  Description of Artificial Sequence: Synthetic peptide
  Seed: SIGKVCRTLLAKSVF
SIFKVARNLLSKSVF

SEQ ID NO: 263262 - protein, 15 aa, Artificial Sequence
  Description of Artificial Sequence: Synthetic peptide
  Seed: SIGKVCRTLLAKSVF
SIFKVARNLLTKSVF

SEQ ID NO: 263263 - protein, 15 aa, Artificial Sequence
  Description of Artificial Sequence: Synthetic peptide
  Seed: SIGKVCRTLLAKSVF
SIFKVARNLLVKSVF

SEQ ID NO: 263264 - protein, 15 aa, Artificial Sequence
  Description of Artificial Sequence: Synthetic peptide
  Seed: SIGKVCRTLLAKSVF
SIFKVARNLLYKSVF

SEQ ID NO: 263265 - protein, 15 aa, Artificial Sequence
  Description of Artificial Sequence: Synthetic peptide
  Seed: SIGKVCRTLLAKSVF
SIFKVARPLLAKSVF

SEQ ID NO: 263266 - protein, 15 aa, Artificial Sequence
  Description of Artificial Sequence: Synthetic peptide
  Seed: SIGKVCRTLLAKSVF
SIFKVARPLLDKSVF

SEQ ID NO: 263267 - protein, 15 aa, Artificial Sequence
  Description of Artificial Sequence: Synthetic peptide
  Seed: SIGKVCRTLLAKSVF
SIFKVARPLLGKSVF

SEQ ID NO: 263268 - protein, 15 aa, Artificial Sequence
  Description of Artificial Sequence: Synthetic peptide
  Seed: SIGKVCRTLLAKSVF
SIFKVARPLLHKSVF

SEQ ID NO: 263269 - protein, 15 aa, Artificial Sequence
  Description of Artificial Sequence: Synthetic peptide
  Seed: SIGKVCRTLLAKSVF
SIFKVARPLLIKSVF

SEQ ID NO: 263270 - protein, 15 aa, Artificial Sequence
  Description of Artificial Sequence: Synthetic peptide
  Seed: SIGKVCRTLLAKSVF
SIFKVARPLLKKSVF

SEQ ID NO: 263271 - protein, 15 aa, Artificial Sequence
  Description of Artificial Sequence: Synthetic peptide
  Seed: SIGKVCRTLLAKSVF
SIFKVARPLLLKSVF

SEQ ID NO: 263272 - protein, 15 aa, Artificial Sequence
  Description of Artificial Sequence: Synthetic peptide
  Seed: SIGKVCRTLLAKSVF
SIFKVARPLLMKSVF

SEQ ID NO: 263273 - protein, 15 aa, Artificial Sequence
  Description of Artificial Sequence: Synthetic peptide
  Seed: SIGKVCRTLLAKSVF
SIFKVARPLLNKSVF

SEQ ID NO: 263274 - protein, 15 aa, Artificial Sequence
  Description of Artificial Sequence: Synthetic peptide
  Seed: SIGKVCRTLLAKSVF
SIFKVARPLLPKSVF

SEQ ID NO: 263275 - protein, 15 aa, Artificial Sequence
  Description of Artificial Sequence: Synthetic peptide
  Seed: SIGKVCRTLLAKSVF
SIFKVARPLLQKSVF

SEQ ID NO: 263276 - protein, 15 aa, Artificial Sequence
  Description of Artificial Sequence: Synthetic peptide
  Seed: SIGKVCRTLLAKSVF
SIFKVARPLLRKSVF

SEQ ID NO: 263277 - protein, 15 aa, Artificial Sequence
  Description of Artificial Sequence: Synthetic peptide
  Seed: SIGKVCRTLLAKSVF
SIFKVARPLLTKSVF

SEQ ID NO: 263278 - protein, 15 aa, Artificial Sequence
  Description of Artificial Sequence: Synthetic peptide
  Seed: SIGKVCRTLLAKSVF
SIFKVARPLLVKSVF

SEQ ID NO: 263279 - protein, 15 aa, Artificial Sequence
  Description of Artificial Sequence: Synthetic peptide
  Seed: SIGKVCRTLLAKSVF
SIFKVARPLLYKSVF

SEQ ID NO: 263280 - protein, 15 aa, Artificial Sequence
  Description of Artificial Sequence: Synthetic peptide
  Seed: SIGKVCRTLLAKSVF
SIFKVARQLLAKSVF

SEQ ID NO: 263281 - protein, 15 aa, Artificial Sequence
  Description of Artificial Sequence: Synthetic peptide
  Seed: SIGKVCRTLLAKSVF
SIFKVARQLLGKSVF

SEQ ID NO: 263282 - protein, 15 aa, Artificial Sequence
  Description of Artificial Sequence: Synthetic peptide
  Seed: SIGKVCRTLLAKSVF
SIFKVARQLLHKSVF

SEQ ID NO: 263283 - protein, 15 aa, Artificial Sequence
  Description of Artificial Sequence: Synthetic peptide
  Seed: SIGKVCRTLLAKSVF
SIFKVARQLLKKSVF

SEQ ID NO: 263284 - protein, 15 aa, Artificial Sequence
  Description of Artificial Sequence: Synthetic peptide
  Seed: SIGKVCRTLLAKSVF
SIFKVARQLLNKSVF

SEQ ID NO: 263285 - protein, 15 aa, Artificial Sequence
  Description of Artificial Sequence: Synthetic peptide
  Seed: SIGKVCRTLLAKSVF
SIFKVARQLLQKSVF

SEQ ID NO: 263286 - protein, 15 aa, Artificial Sequence
  Description of Artificial Sequence: Synthetic peptide
  Seed: SIGKVCRTLLAKSVF
SIFKVARQLLRKSVF

SEQ ID NO: 263287 - protein, 15 aa, Artificial Sequence
  Description of Artificial Sequence: Synthetic peptide
  Seed: SIGKVCRTLLAKSVF
SIFKVARQLLSKSVF

SEQ ID NO: 263288 - protein, 15 aa, Artificial Sequence
  Description of Artificial Sequence: Synthetic peptide
  Seed: SIGKVCRTLLAKSVF
SIFKVARQLLTKSVF

SEQ ID NO: 263289 - protein, 15 aa, Artificial Sequence
  Description of Artificial Sequence: Synthetic peptide
  Seed: SIGKVCRTLLAKSVF
SIFKVARQLLYKSVF

SEQ ID NO: 263290 - protein, 15 aa, Artificial Sequence
  Description of Artificial Sequence: Synthetic peptide
  Seed: SIGKVCRTLLAKSVF
SIFKVARRLLAKSVF

SEQ ID NO: 263291 - protein, 15 aa, Artificial Sequence
  Description of Artificial Sequence: Synthetic peptide
  Seed: SIGKVCRTLLAKSVF
SIFKVARRLLCKSVF

SEQ ID NO: 263292 - protein, 15 aa, Artificial Sequence
  Description of Artificial Sequence: Synthetic peptide
  Seed: SIGKVCRTLLAKSVF
SIFKVARRLLDKSVF

SEQ ID NO: 263293 - protein, 15 aa, Artificial Sequence
  Description of Artificial Sequence: Synthetic peptide
  Seed: SIGKVCRTLLAKSVF
SIFKVARRLLEKSVF

SEQ ID NO: 263294 - protein, 15 aa, Artificial Sequence
  Description of Artificial Sequence: Synthetic peptide
  Seed: SIGKVCRTLLAKSVF
SIFKVARRLLFKSVF

SEQ ID NO: 263295 - protein, 15 aa, Artificial Sequence
  Description of Artificial Sequence: Synthetic peptide
  Seed: SIGKVCRTLLAKSVF
SIFKVARRLLGKSVF

SEQ ID NO: 263296 - protein, 15 aa, Artificial Sequence
  Description of Artificial Sequence: Synthetic peptide
  Seed: SIGKVCRTLLAKSVF
SIFKVARRLLHKSVF

SEQ ID NO: 263297 - protein, 15 aa, Artificial Sequence
  Description of Artificial Sequence: Synthetic peptide
  Seed: SIGKVCRTLLAKSVF
SIFKVARRLLIKSVF

SEQ ID NO: 263298 - protein, 15 aa, Artificial Sequence
  Description of Artificial Sequence: Synthetic peptide
  Seed: SIGKVCRTLLAKSVF
SIFKVARRLLKKSVF

SEQ ID NO: 263299 - protein, 15 aa, Artificial Sequence
  Description of Artificial Sequence: Synthetic peptide
  Seed: SIGKVCRTLLAKSVF
SIFKVARRLLLKSVF

SEQ ID NO: 263300 - protein, 15 aa, Artificial Sequence
  Description of Artificial Sequence: Synthetic peptide
  Seed: SIGKVCRTLLAKSVF
SIFKVARRLLMKSVF

SEQ ID NO: 263301 - protein, 15 aa, Artificial Sequence
  Description of Artificial Sequence: Synthetic peptide
  Seed: SIGKVCRTLLAKSVF
SIFKVARRLLNKSVF

SEQ ID NO: 263302 - protein, 15 aa, Artificial Sequence
  Description of Artificial Sequence: Synthetic peptide
  Seed: SIGKVCRTLLAKSVF
SIFKVARRLLPKSVF

SEQ ID NO: 263303 - protein, 15 aa, Artificial Sequence
  Description of Artificial Sequence: Synthetic peptide
  Seed: SIGKVCRTLLAKSVF
SIFKVARRLLQKSVF

SEQ ID NO: 263304 - protein, 15 aa, Artificial Sequence
  Description of Artificial Sequence: Synthetic peptide
  Seed: SIGKVCRTLLAKSVF
SIFKVARRLLRKSVF

SEQ ID NO: 263305 - protein, 15 aa, Artificial Sequence
  Description of Artificial Sequence: Synthetic peptide
  Seed: SIGKVCRTLLAKSVF
SIFKVARRLLSKSVF

SEQ ID NO: 263306 - protein, 15 aa, Artificial Sequence
  Description of Artificial Sequence: Synthetic peptide
  Seed: SIGKVCRTLLAKSVF
SIFKVARRLLTKSVF

SEQ ID NO: 263307 - protein, 15 aa, Artificial Sequence
  Description of Artificial Sequence: Synthetic peptide
  Seed: SIGKVCRTLLAKSVF
SIFKVARRLLVKSVF

SEQ ID NO: 263308 - protein, 15 aa, Artificial Sequence
  Description of Artificial Sequence: Synthetic peptide
  Seed: SIGKVCRTLLAKSVF
SIFKVARRLLWKSVF

SEQ ID NO: 263309 - protein, 15 aa, Artificial Sequence
  Description of Artificial Sequence: Synthetic peptide
  Seed: SIGKVCRTLLAKSVF
SIFKVARRLLYKSVF

SEQ ID NO: 263310 - protein, 15 aa, Artificial Sequence
  Description of Artificial Sequence: Synthetic peptide
  Seed: SIGKVCRTLLAKSVF
SIFKVARSLLAKSVF

SEQ ID NO: 263311 - protein, 15 aa, Artificial Sequence
  Description of Artificial Sequence: Synthetic peptide
  Seed: SIGKVCRTLLAKSVF
SIFKVARSLLDKSVF

SEQ ID NO: 263312 - protein, 15 aa, Artificial Sequence
  Description of Artificial Sequence: Synthetic peptide
  Seed: SIGKVCRTLLAKSVF
SIFKVARSLLEKSVF

SEQ ID NO: 263313 - protein, 15 aa, Artificial Sequence
  Description of Artificial Sequence: Synthetic peptide
  Seed: SIGKVCRTLLAKSVF
SIFKVARSLLGKSVF

SEQ ID NO: 263314 - protein, 15 aa, Artificial Sequence
  Description of Artificial Sequence: Synthetic peptide
  Seed: SIGKVCRTLLAKSVF
SIFKVARSLLHKSVF

SEQ ID NO: 263315 - protein, 15 aa, Artificial Sequence
  Description of Artificial Sequence: Synthetic peptide
  Seed: SIGKVCRTLLAKSVF
SIFKVARSLLIKSVF

SEQ ID NO: 263316 - protein, 15 aa, Artificial Sequence
  Description of Artificial Sequence: Synthetic peptide
  Seed: SIGKVCRTLLAKSVF
SIFKVARSLLKKSVF

SEQ ID NO: 263317 - protein, 15 aa, Artificial Sequence
  Description of Artificial Sequence: Synthetic peptide
  Seed: SIGKVCRTLLAKSVF
SIFKVARSLLLKSVF

SEQ ID NO: 263318 - protein, 15 aa, Artificial Sequence
  Description of Artificial Sequence: Synthetic peptide
  Seed: SIGKVCRTLLAKSVF
SIFKVARSLLMKSVF

SEQ ID NO: 263319 - protein, 15 aa, Artificial Sequence
  Description of Artificial Sequence: Synthetic peptide
  Seed: SIGKVCRTLLAKSVF
SIFKVARSLLNKSVF

SEQ ID NO: 263320 - protein, 15 aa, Artificial Sequence
  Description of Artificial Sequence: Synthetic peptide
  Seed: SIGKVCRTLLAKSVF
SIFKVARSLLPKSVF

SEQ ID NO: 263321 - protein, 15 aa, Artificial Sequence
  Description of Artificial Sequence: Synthetic peptide
  Seed: SIGKVCRTLLAKSVF
SIFKVARSLLQKSVF

SEQ ID NO: 263322 - protein, 15 aa, Artificial Sequence
  Description of Artificial Sequence: Synthetic peptide
  Seed: SIGKVCRTLLAKSVF
SIFKVARSLLRKSVF

SEQ ID NO: 263323 - protein, 15 aa, Artificial Sequence
  Description of Artificial Sequence: Synthetic peptide
  Seed: SIGKVCRTLLAKSVF
SIFKVARSLLSKSVF

SEQ ID NO: 263324 - protein, 15 aa, Artificial Sequence
  Description of Artificial Sequence: Synthetic peptide
  Seed: SIGKVCRTLLAKSVF
SIFKVARSLLTKSVF

SEQ ID NO: 263325 - protein, 15 aa, Artificial Sequence
  Description of Artificial Sequence: Synthetic peptide
  Seed: SIGKVCRTLLAKSVF
SIFKVARSLLVKSVF

SEQ ID NO: 263326 - protein, 15 aa, Artificial Sequence
  Description of Artificial Sequence: Synthetic peptide
  Seed: SIGKVCRTLLAKSVF
SIFKVARSLLYKSVF

SEQ ID NO: 263327 - protein, 15 aa, Artificial Sequence
  Description of Artificial Sequence: Synthetic peptide
  Seed: SIGKVCRTLLAKSVF
SIFKVARTLLAKSVF

SEQ ID NO: 263328 - protein, 15 aa, Artificial Sequence
  Description of Artificial Sequence: Synthetic peptide
  Seed: SIGKVCRTLLAKSVF
SIFKVARTLLDKSVF

SEQ ID NO: 263329 - protein, 15 aa, Artificial Sequence
  Description of Artificial Sequence: Synthetic peptide
  Seed: SIGKVCRTLLAKSVF
SIFKVARTLLEKSVF

SEQ ID NO: 263330 - protein, 15 aa, Artificial Sequence
  Description of Artificial Sequence: Synthetic peptide
  Seed: SIGKVCRTLLAKSVF
SIFKVARTLLGKSVF

SEQ ID NO: 263331 - protein, 15 aa, Artificial Sequence
  Description of Artificial Sequence: Synthetic peptide
  Seed: SIGKVCRTLLAKSVF
SIFKVARTLLHKSVF

SEQ ID NO: 263332 - protein, 15 aa, Artificial Sequence
  Description of Artificial Sequence: Synthetic peptide
  Seed: SIGKVCRTLLAKSVF
SIFKVARTLLIKSVF

SEQ ID NO: 263333 - protein, 15 aa, Artificial Sequence
  Description of Artificial Sequence: Synthetic peptide
  Seed: SIGKVCRTLLAKSVF
SIFKVARTLLKKSVF

SEQ ID NO: 263334 - protein, 15 aa, Artificial Sequence
  Description of Artificial Sequence: Synthetic peptide
  Seed: SIGKVCRTLLAKSVF
SIFKVARTLLLKSVF

SEQ ID NO: 263335 - protein, 15 aa, Artificial Sequence
  Description of Artificial Sequence: Synthetic peptide
  Seed: SIGKVCRTLLAKSVF
SIFKVARTLLMKSVF

SEQ ID NO: 263336 - protein, 15 aa, Artificial Sequence
  Description of Artificial Sequence: Synthetic peptide
  Seed: SIGKVCRTLLAKSVF
SIFKVARTLLNKSVF

SEQ ID NO: 263337 - protein, 15 aa, Artificial Sequence
  Description of Artificial Sequence: Synthetic peptide
  Seed: SIGKVCRTLLAKSVF
SIFKVARTLLPKSVF

SEQ ID NO: 263338 - protein, 15 aa, Artificial Sequence
  Description of Artificial Sequence: Synthetic peptide
  Seed: SIGKVCRTLLAKSVF
SIFKVARTLLQKSVF

SEQ ID NO: 263339 - protein, 15 aa, Artificial Sequence
  Description of Artificial Sequence: Synthetic peptide
  Seed: SIGKVCRTLLAKSVF
SIFKVARTLLRKSVF

SEQ ID NO: 263340 - protein, 15 aa, Artificial Sequence
  Description of Artificial Sequence: Synthetic peptide
  Seed: SIGKVCRTLLAKSVF
SIFKVARTLLSKSVF

SEQ ID NO: 263341 - protein, 15 aa, Artificial Sequence
  Description of Artificial Sequence: Synthetic peptide
  Seed: SIGKVCRTLLAKSVF
SIFKVARTLLTKSVF

SEQ ID NO: 263342 - protein, 15 aa, Artificial Sequence
  Description of Artificial Sequence: Synthetic peptide
  Seed: SIGKVCRTLLAKSVF
SIFKVARTLLVKSVF

SEQ ID NO: 263343 - protein, 15 aa, Artificial Sequence
  Description of Artificial Sequence: Synthetic peptide
  Seed: SIGKVCRTLLAKSVF
SIFKVARTLLYKSVF

SEQ ID NO: 263344 - protein, 15 aa, Artificial Sequence
  Description of Artificial Sequence: Synthetic peptide
  Seed: SIGKVCRTLLAKSVF
SIFKVARVLLAKSVF

SEQ ID NO: 263345 - protein, 15 aa, Artificial Sequence
  Description of Artificial Sequence: Synthetic peptide
  Seed: SIGKVCRTLLAKSVF
SIFKVARVLLDKSVF

SEQ ID NO: 263346 - protein, 15 aa, Artificial Sequence
  Description of Artificial Sequence: Synthetic peptide
  Seed: SIGKVCRTLLAKSVF
SIFKVARVLLEKSVF

SEQ ID NO: 263347 - protein, 15 aa, Artificial Sequence
  Description of Artificial Sequence: Synthetic peptide
  Seed: SIGKVCRTLLAKSVF
SIFKVARVLLGKSVF

SEQ ID NO: 263348 - protein, 15 aa, Artificial Sequence
  Description of Artificial Sequence: Synthetic peptide
  Seed: SIGKVCRTLLAKSVF
SIFKVARVLLHKSVF

SEQ ID NO: 263349 - protein, 15 aa, Artificial Sequence
  Description of Artificial Sequence: Synthetic peptide
  Seed: SIGKVCRTLLAKSVF
SIFKVARVLLKKSVF

SEQ ID NO: 263350 - protein, 15 aa, Artificial Sequence
  Description of Artificial Sequence: Synthetic peptide
  Seed: SIGKVCRTLLAKSVF
SIFKVARVLLNKSVF

SEQ ID NO: 263351 - protein, 15 aa, Artificial Sequence
  Description of Artificial Sequence: Synthetic peptide
  Seed: SIGKVCRTLLAKSVF
SIFKVARVLLQKSVF

SEQ ID NO: 263352 - protein, 15 aa, Artificial Sequence
  Description of Artificial Sequence: Synthetic peptide
  Seed: SIGKVCRTLLAKSVF
SIFKVARVLLRKSVF

SEQ ID NO: 263353 - protein, 15 aa, Artificial Sequence
  Description of Artificial Sequence: Synthetic peptide
  Seed: SIGKVCRTLLAKSVF
SIFKVARVLLSKSVF

SEQ ID NO: 263354 - protein, 15 aa, Artificial Sequence
  Description of Artificial Sequence: Synthetic peptide
  Seed: SIGKVCRTLLAKSVF
SIFKVCRALLAKSVF

SEQ ID NO: 263355 - protein, 15 aa, Artificial Sequence
  Description of Artificial Sequence: Synthetic peptide
  Seed: SIGKVCRTLLAKSVF
SIFKVCRALLGKSVF

SEQ ID NO: 263356 - protein, 15 aa, Artificial Sequence
  Description of Artificial Sequence: Synthetic peptide
  Seed: SIGKVCRTLLAKSVF
SIFKVCRALLHKSVF

SEQ ID NO: 263357 - protein, 15 aa, Artificial Sequence
  Description of Artificial Sequence: Synthetic peptide
  Seed: SIGKVCRTLLAKSVF
SIFKVCRALLKKSVF

SEQ ID NO: 263358 - protein, 15 aa, Artificial Sequence
  Description of Artificial Sequence: Synthetic peptide
  Seed: SIGKVCRTLLAKSVF
SIFKVCRALLQKSVF

SEQ ID NO: 263359 - protein, 15 aa, Artificial Sequence
  Description of Artificial Sequence: Synthetic peptide
  Seed: SIGKVCRTLLAKSVF
SIFKVCRALLRKSVF

SEQ ID NO: 263360 - protein, 15 aa, Artificial Sequence
  Description of Artificial Sequence: Synthetic peptide
  Seed: SIGKVCRTLLAKSVF
SIFKVCRALLSKSVF

SEQ ID NO: 263361 - protein, 15 aa, Artificial Sequence
  Description of Artificial Sequence: Synthetic peptide
  Seed: SIGKVCRTLLAKSVF
SIFKVCRGLLRKSVF

SEQ ID NO: 263362 - protein, 15 aa, Artificial Sequence
  Description of Artificial Sequence: Synthetic peptide
  Seed: SIGKVCRTLLAKSVF
SIFKVCRGLLSKSVF

SEQ ID NO: 263363 - protein, 15 aa, Artificial Sequence
  Description of Artificial Sequence: Synthetic peptide
  Seed: SIGKVCRTLLAKSVF
SIFKVCRHLLAKSVF

SEQ ID NO: 263364 - protein, 15 aa, Artificial Sequence
  Description of Artificial Sequence: Synthetic peptide
  Seed: SIGKVCRTLLAKSVF
SIFKVCRHLLGKSVF

SEQ ID NO: 263365 - protein, 15 aa, Artificial Sequence
  Description of Artificial Sequence: Synthetic peptide
  Seed: SIGKVCRTLLAKSVF
SIFKVCRHLLHKSVF

SEQ ID NO: 263366 - protein, 15 aa, Artificial Sequence
  Description of Artificial Sequence: Synthetic peptide
  Seed: SIGKVCRTLLAKSVF
SIFKVCRHLLKKSVF

SEQ ID NO: 263367 - protein, 15 aa, Artificial Sequence
  Description of Artificial Sequence: Synthetic peptide
  Seed: SIGKVCRTLLAKSVF
SIFKVCRHLLQKSVF

SEQ ID NO: 263368 - protein, 15 aa, Artificial Sequence
  Description of Artificial Sequence: Synthetic peptide
  Seed: SIGKVCRTLLAKSVF
SIFKVCRHLLRKSVF

SEQ ID NO: 263369 - protein, 15 aa, Artificial Sequence
  Description of Artificial Sequence: Synthetic peptide
  Seed: SIGKVCRTLLAKSVF
SIFKVCRHLLSKSVF

SEQ ID NO: 263370 - protein, 15 aa, Artificial Sequence
  Description of Artificial Sequence: Synthetic peptide
  Seed: SIGKVCRTLLAKSVF
SIFKVCRILLRKSVF

SEQ ID NO: 263371 - protein, 15 aa, Artificial Sequence
  Description of Artificial Sequence: Synthetic peptide
  Seed: SIGKVCRTLLAKSVF
SIFKVCRKLLAKSVF

SEQ ID NO: 263372 - protein, 15 aa, Artificial Sequence
  Description of Artificial Sequence: Synthetic peptide
  Seed: SIGKVCRTLLAKSVF
SIFKVCRKLLDKSVF

SEQ ID NO: 263373 - protein, 15 aa, Artificial Sequence
  Description of Artificial Sequence: Synthetic peptide
  Seed: SIGKVCRTLLAKSVF
SIFKVCRKLLEKSVF

SEQ ID NO: 263374 - protein, 15 aa, Artificial Sequence
  Description of Artificial Sequence: Synthetic peptide
  Seed: SIGKVCRTLLAKSVF
SIFKVCRKLLFKSVF

SEQ ID NO: 263375 - protein, 15 aa, Artificial Sequence
  Description of Artificial Sequence: Synthetic peptide
  Seed: SIGKVCRTLLAKSVF
SIFKVCRKLLGKSVF

SEQ ID NO: 263376 - protein, 15 aa, Artificial Sequence
  Description of Artificial Sequence: Synthetic peptide
  Seed: SIGKVCRTLLAKSVF
SIFKVCRKLLHKSVF

SEQ ID NO: 263377 - protein, 15 aa, Artificial Sequence
  Description of Artificial Sequence: Synthetic peptide
  Seed: SIGKVCRTLLAKSVF
SIFKVCRKLLIKSVF

SEQ ID NO: 263378 - protein, 15 aa, Artificial Sequence
  Description of Artificial Sequence: Synthetic peptide
  Seed: SIGKVCRTLLAKSVF
SIFKVCRKLLKKSVF

SEQ ID NO: 263379 - protein, 15 aa, Artificial Sequence
  Description of Artificial Sequence: Synthetic peptide
  Seed: SIGKVCRTLLAKSVF
SIFKVCRKLLLKSVF

SEQ ID NO: 263380 - protein, 15 aa, Artificial Sequence
  Description of Artificial Sequence: Synthetic peptide
  Seed: SIGKVCRTLLAKSVF
SIFKVCRKLLMKSVF

SEQ ID NO: 263381 - protein, 15 aa, Artificial Sequence
  Description of Artificial Sequence: Synthetic peptide
  Seed: SIGKVCRTLLAKSVF
SIFKVCRKLLNKSVF

SEQ ID NO: 263382 - protein, 15 aa, Artificial Sequence
  Description of Artificial Sequence: Synthetic peptide
  Seed: SIGKVCRTLLAKSVF
SIFKVCRKLLPKSVF

SEQ ID NO: 263383 - protein, 15 aa, Artificial Sequence
  Description of Artificial Sequence: Synthetic peptide
  Seed: SIGKVCRTLLAKSVF
SIFKVCRKLLQKSVF

SEQ ID NO: 263384 - protein, 15 aa, Artificial Sequence
  Description of Artificial Sequence: Synthetic peptide
  Seed: SIGKVCRTLLAKSVF
SIFKVCRKLLRKSVF

SEQ ID NO: 263385 - protein, 15 aa, Artificial Sequence
  Description of Artificial Sequence: Synthetic peptide
  Seed: SIGKVCRTLLAKSVF
SIFKVCRKLLSKSVF

SEQ ID NO: 263386 - protein, 15 aa, Artificial Sequence
  Description of Artificial Sequence: Synthetic peptide
  Seed: SIGKVCRTLLAKSVF
SIFKVCRKLLTKSVF

SEQ ID NO: 263387 - protein, 15 aa, Artificial Sequence
  Description of Artificial Sequence: Synthetic peptide
  Seed: SIGKVCRTLLAKSVF
SIFKVCRKLLVKSVF

SEQ ID NO: 263388 - protein, 15 aa, Artificial Sequence
  Description of Artificial Sequence: Synthetic peptide
  Seed: SIGKVCRTLLAKSVF
SIFKVCRKLLYKSVF

SEQ ID NO: 263389 - protein, 15 aa, Artificial Sequence
  Description of Artificial Sequence: Synthetic peptide
  Seed: SIGKVCRTLLAKSVF
SIFKVCRLLLRKSVF

SEQ ID NO: 263390 - protein, 15 aa, Artificial Sequence
  Description of Artificial Sequence: Synthetic peptide
  Seed: SIGKVCRTLLAKSVF
SIFKVCRMLLRKSVF

SEQ ID NO: 263391 - protein, 15 aa, Artificial Sequence
  Description of Artificial Sequence: Synthetic peptide
  Seed: SIGKVCRTLLAKSVF
SIFKVCRNLLAKSVF

SEQ ID NO: 263392 - protein, 15 aa, Artificial Sequence
  Description of Artificial Sequence: Synthetic peptide
  Seed: SIGKVCRTLLAKSVF
SIFKVCRNLLDKSVF

SEQ ID NO: 263393 - protein, 15 aa, Artificial Sequence
  Description of Artificial Sequence: Synthetic peptide
  Seed: SIGKVCRTLLAKSVF
SIFKVCRNLLEKSVF

SEQ ID NO: 263394 - protein, 15 aa, Artificial Sequence
  Description of Artificial Sequence: Synthetic peptide
  Seed: SIGKVCRTLLAKSVF
SIFKVCRNLLKKSVF

SEQ ID NO: 263395 - protein, 15 aa, Artificial Sequence
  Description of Artificial Sequence: Synthetic peptide
  Seed: SIGKVCRTLLAKSVF
SIFKVCRNLLRKSVF

SEQ ID NO: 263396 - protein, 15 aa, Artificial Sequence
  Description of Artificial Sequence: Synthetic peptide
  Seed: SIGKVCRTLLAKSVF
SIFKVCRNLLSKSVF

SEQ ID NO: 263397 - protein, 15 aa, Artificial Sequence
  Description of Artificial Sequence: Synthetic peptide
  Seed: SIGKVCRTLLAKSVF
SIFKVCRPLLAKSVF

SEQ ID NO: 263398 - protein, 15 aa, Artificial Sequence
  Description of Artificial Sequence: Synthetic peptide
  Seed: SIGKVCRTLLAKSVF
SIFKVCRPLLGKSVF

SEQ ID NO: 263399 - protein, 15 aa, Artificial Sequence
  Description of Artificial Sequence: Synthetic peptide
  Seed: SIGKVCRTLLAKSVF
SIFKVCRPLLRKSVF

SEQ ID NO: 263400 - protein, 15 aa, Artificial Sequence
  Description of Artificial Sequence: Synthetic peptide
  Seed: SIGKVCRTLLAKSVF
SIFKVCRPLLSKSVF

SEQ ID NO: 263401 - protein, 15 aa, Artificial Sequence
  Description of Artificial Sequence: Synthetic peptide
  Seed: SIGKVCRTLLAKSVF
SIFKVCRQLLKKSVF

SEQ ID NO: 263402 - protein, 15 aa, Artificial Sequence
  Description of Artificial Sequence: Synthetic peptide
  Seed: SIGKVCRTLLAKSVF
SIFKVCRQLLRKSVF

SEQ ID NO: 263403 - protein, 15 aa, Artificial Sequence
  Description of Artificial Sequence: Synthetic peptide
  Seed: SIGKVCRTLLAKSVF
SIFKVCRRLLAKSVF

SEQ ID NO: 263404 - protein, 15 aa, Artificial Sequence
  Description of Artificial Sequence: Synthetic peptide
  Seed: SIGKVCRTLLAKSVF
SIFKVCRRLLCKSVF

SEQ ID NO: 263405 - protein, 15 aa, Artificial Sequence
  Description of Artificial Sequence: Synthetic peptide
  Seed: SIGKVCRTLLAKSVF
SIFKVCRRLLDKSVF

SEQ ID NO: 263406 - protein, 15 aa, Artificial Sequence
  Description of Artificial Sequence: Synthetic peptide
  Seed: SIGKVCRTLLAKSVF
SIFKVCRRLLEKSVF

SEQ ID NO: 263407 - protein, 15 aa, Artificial Sequence
  Description of Artificial Sequence: Synthetic peptide
  Seed: SIGKVCRTLLAKSVF
SIFKVCRRLLFKSVF

SEQ ID NO: 263408 - protein, 15 aa, Artificial Sequence
  Description of Artificial Sequence: Synthetic peptide
  Seed: SIGKVCRTLLAKSVF
SIFKVCRRLLGKSVF

SEQ ID NO: 263409 - protein, 15 aa, Artificial Sequence
  Description of Artificial Sequence: Synthetic peptide
  Seed: SIGKVCRTLLAKSVF
SIFKVCRRLLHKSVF

SEQ ID NO: 263410 - protein, 15 aa, Artificial Sequence
  Description of Artificial Sequence: Synthetic peptide
  Seed: SIGKVCRTLLAKSVF
SIFKVCRRLLIKSVF

SEQ ID NO: 263411 - protein, 15 aa, Artificial Sequence
  Description of Artificial Sequence: Synthetic peptide
  Seed: SIGKVCRTLLAKSVF
SIFKVCRRLLKKSVF

SEQ ID NO: 263412 - protein, 15 aa, Artificial Sequence
  Description of Artificial Sequence: Synthetic peptide
  Seed: SIGKVCRTLLAKSVF
SIFKVCRRLLLKSVF

SEQ ID NO: 263413 - protein, 15 aa, Artificial Sequence
  Description of Artificial Sequence: Synthetic peptide
  Seed: SIGKVCRTLLAKSVF
SIFKVCRRLLMKSVF

SEQ ID NO: 263414 - protein, 15 aa, Artificial Sequence
  Description of Artificial Sequence: Synthetic peptide
  Seed: SIGKVCRTLLAKSVF
SIFKVCRRLLNKSVF

SEQ ID NO: 263415 - protein, 15 aa, Artificial Sequence
  Description of Artificial Sequence: Synthetic peptide
  Seed: SIGKVCRTLLAKSVF
SIFKVCRRLLPKSVF

SEQ ID NO: 263416 - protein, 15 aa, Artificial Sequence
  Description of Artificial Sequence: Synthetic peptide
  Seed: SIGKVCRTLLAKSVF
SIFKVCRRLLQKSVF

SEQ ID NO: 263417 - protein, 15 aa, Artificial Sequence
  Description of Artificial Sequence: Synthetic peptide
  Seed: SIGKVCRTLLAKSVF
SIFKVCRRLLRKSVF

SEQ ID NO: 263418 - protein, 15 aa, Artificial Sequence
  Description of Artificial Sequence: Synthetic peptide
  Seed: SIGKVCRTLLAKSVF
SIFKVCRRLLSKSVF

SEQ ID NO: 263419 - protein, 15 aa, Artificial Sequence
  Description of Artificial Sequence: Synthetic peptide
  Seed: SIGKVCRTLLAKSVF
SIFKVCRRLLTKSVF

SEQ ID NO: 263420 - protein, 15 aa, Artificial Sequence
  Description of Artificial Sequence: Synthetic peptide
  Seed: SIGKVCRTLLAKSVF
SIFKVCRRLLVKSVF

SEQ ID NO: 263421 - protein, 15 aa, Artificial Sequence
  Description of Artificial Sequence: Synthetic peptide
  Seed: SIGKVCRTLLAKSVF
SIFKVCRRLLYKSVF

SEQ ID NO: 263422 - protein, 15 aa, Artificial Sequence
  Description of Artificial Sequence: Synthetic peptide
  Seed: SIGKVCRTLLAKSVF
SIFKVCRSLLAKSVF

SEQ ID NO: 263423 - protein, 15 aa, Artificial Sequence
  Description of Artificial Sequence: Synthetic peptide
  Seed: SIGKVCRTLLAKSVF
SIFKVCRSLLDKSVF

SEQ ID NO: 263424 - protein, 15 aa, Artificial Sequence
  Description of Artificial Sequence: Synthetic peptide
  Seed: SIGKVCRTLLAKSVF
SIFKVCRSLLGKSVF

SEQ ID NO: 263425 - protein, 15 aa, Artificial Sequence
  Description of Artificial Sequence: Synthetic peptide
  Seed: SIGKVCRTLLAKSVF
SIFKVCRSLLHKSVF

SEQ ID NO: 263426 - protein, 15 aa, Artificial Sequence
  Description of Artificial Sequence: Synthetic peptide
  Seed: SIGKVCRTLLAKSVF
SIFKVCRSLLKKSVF

SEQ ID NO: 263427 - protein, 15 aa, Artificial Sequence
  Description of Artificial Sequence: Synthetic peptide
  Seed: SIGKVCRTLLAKSVF
SIFKVCRSLLNKSVF

SEQ ID NO: 263428 - protein, 15 aa, Artificial Sequence
  Description of Artificial Sequence: Synthetic peptide
  Seed: SIGKVCRTLLAKSVF
SIFKVCRSLLQKSVF

SEQ ID NO: 263429 - protein, 15 aa, Artificial Sequence
  Description of Artificial Sequence: Synthetic peptide
  Seed: SIGKVCRTLLAKSVF
SIFKVCRSLLRKSVF

SEQ ID NO: 263430 - protein, 15 aa, Artificial Sequence
  Description of Artificial Sequence: Synthetic peptide
  Seed: SIGKVCRTLLAKSVF
SIFKVCRSLLSKSVF

SEQ ID NO: 263431 - protein, 15 aa, Artificial Sequence
  Description of Artificial Sequence: Synthetic peptide
  Seed: SIGKVCRTLLAKSVF
SIFKVCRTLLAKSVF

SEQ ID NO: 263432 - protein, 15 aa, Artificial Sequence
  Description of Artificial Sequence: Synthetic peptide
  Seed: SIGKVCRTLLAKSVF
SIFKVCRTLLDKSVF

SEQ ID NO: 263433 - protein, 15 aa, Artificial Sequence
  Description of Artificial Sequence: Synthetic peptide
  Seed: SIGKVCRTLLAKSVF
SIFKVCRTLLEKSVF

SEQ ID NO: 263434 - protein, 15 aa, Artificial Sequence
  Description of Artificial Sequence: Synthetic peptide
  Seed: SIGKVCRTLLAKSVF
SIFKVCRTLLGKSVF

SEQ ID NO: 263435 - protein, 15 aa, Artificial Sequence
  Description of Artificial Sequence: Synthetic peptide
  Seed: SIGKVCRTLLAKSVF
SIFKVCRTLLHKSVF

SEQ ID NO: 263436 - protein, 15 aa, Artificial Sequence
  Description of Artificial Sequence: Synthetic peptide
  Seed: SIGKVCRTLLAKSVF
SIFKVCRTLLKKSVF

SEQ ID NO: 263437 - protein, 15 aa, Artificial Sequence
  Description of Artificial Sequence: Synthetic peptide
  Seed: SIGKVCRTLLAKSVF
SIFKVCRTLLRKSVF

SEQ ID NO: 263438 - protein, 15 aa, Artificial Sequence
  Description of Artificial Sequence: Synthetic peptide
  Seed: SIGKVCRTLLAKSVF
SIFKVCRTLLSKSVF

SEQ ID NO: 263439 - protein, 15 aa, Artificial Sequence
  Description of Artificial Sequence: Synthetic peptide
  Seed: SIGKVCRTLLAKSVF
SIFKVCRVLLKKSVF

SEQ ID NO: 263440 - protein, 15 aa, Artificial Sequence
  Description of Artificial Sequence: Synthetic peptide
  Seed: SIGKVCRTLLAKSVF
SIFKVCRVLLRKSVF

SEQ ID NO: 263441 - protein, 15 aa, Artificial Sequence
  Description of Artificial Sequence: Synthetic peptide
  Seed: SIGKVCRTLLAKSVF
SIFKVDRALLAKSVF

SEQ ID NO: 263442 - protein, 15 aa, Artificial Sequence
  Description of Artificial Sequence: Synthetic peptide
  Seed: SIGKVCRTLLAKSVF
SIFKVDRALLGKSVF

SEQ ID NO: 263443 - protein, 15 aa, Artificial Sequence
  Description of Artificial Sequence: Synthetic peptide
  Seed: SIGKVCRTLLAKSVF
SIFKVDRALLHKSVF

SEQ ID NO: 263444 - protein, 15 aa, Artificial Sequence
  Description of Artificial Sequence: Synthetic peptide
  Seed: SIGKVCRTLLAKSVF
SIFKVDRALLNKSVF

SEQ ID NO: 263445 - protein, 15 aa, Artificial Sequence
  Description of Artificial Sequence: Synthetic peptide
  Seed: SIGKVCRTLLAKSVF
SIFKVDRALLQKSVF

SEQ ID NO: 263446 - protein, 15 aa, Artificial Sequence
  Description of Artificial Sequence: Synthetic peptide
  Seed: SIGKVCRTLLAKSVF
SIFKVDRALLSKSVF

SEQ ID NO: 263447 - protein, 15 aa, Artificial Sequence
  Description of Artificial Sequence: Synthetic peptide
  Seed: SIGKVCRTLLAKSVF
SIFKVDRALLTKSVF

SEQ ID NO: 263448 - protein, 15 aa, Artificial Sequence
  Description of Artificial Sequence: Synthetic peptide
  Seed: SIGKVCRTLLAKSVF
SIFKVDRDLLAKSVF

SEQ ID NO: 263449 - protein, 15 aa, Artificial Sequence
  Description of Artificial Sequence: Synthetic peptide
  Seed: SIGKVCRTLLAKSVF
SIFKVDRDLLGKSVF

SEQ ID NO: 263450 - protein, 15 aa, Artificial Sequence
  Description of Artificial Sequence: Synthetic peptide
  Seed: SIGKVCRTLLAKSVF
SIFKVDRDLLSKSVF

SEQ ID NO: 263451 - protein, 15 aa, Artificial Sequence
  Description of Artificial Sequence: Synthetic peptide
  Seed: SIGKVCRTLLAKSVF
SIFKVDRGLLAKSVF

SEQ ID NO: 263452 - protein, 15 aa, Artificial Sequence
  Description of Artificial Sequence: Synthetic peptide
  Seed: SIGKVCRTLLAKSVF
SIFKVDRGLLSKSVF

SEQ ID NO: 263453 - protein, 15 aa, Artificial Sequence
  Description of Artificial Sequence: Synthetic peptide
  Seed: SIGKVCRTLLAKSVF
SIFKVDRILLAKSVF

SEQ ID NO: 263454 - protein, 15 aa, Artificial Sequence
  Description of Artificial Sequence: Synthetic peptide
  Seed: SIGKVCRTLLAKSVF
SIFKVDRILLSKSVF

SEQ ID NO: 263455 - protein, 15 aa, Artificial Sequence
  Description of Artificial Sequence: Synthetic peptide
  Seed: SIGKVCRTLLAKSVF
SIFKVDRKLLAKSVF

SEQ ID NO: 263456 - protein, 15 aa, Artificial Sequence
  Description of Artificial Sequence: Synthetic peptide
  Seed: SIGKVCRTLLAKSVF
SIFKVDRKLLKKSVF

SEQ ID NO: 263457 - protein, 15 aa, Artificial Sequence
  Description of Artificial Sequence: Synthetic peptide
  Seed: SIGKVCRTLLAKSVF
SIFKVDRKLLRKSVF

SEQ ID NO: 263458 - protein, 15 aa, Artificial Sequence
  Description of Artificial Sequence: Synthetic peptide
  Seed: SIGKVCRTLLAKSVF
SIFKVDRKLLSKSVF

SEQ ID NO: 263459 - protein, 15 aa, Artificial Sequence
  Description of Artificial Sequence: Synthetic peptide
  Seed: SIGKVCRTLLAKSVF
SIFKVDRNLLAKSVF

SEQ ID NO: 263460 - protein, 15 aa, Artificial Sequence
  Description of Artificial Sequence: Synthetic peptide
  Seed: SIGKVCRTLLAKSVF
SIFKVDRNLLDKSVF

SEQ ID NO: 263461 - protein, 15 aa, Artificial Sequence
  Description of Artificial Sequence: Synthetic peptide
  Seed: SIGKVCRTLLAKSVF
SIFKVDRNLLEKSVF

SEQ ID NO: 263462 - protein, 15 aa, Artificial Sequence
  Description of Artificial Sequence: Synthetic peptide
  Seed: SIGKVCRTLLAKSVF
SIFKVDRNLLGKSVF

SEQ ID NO: 263463 - protein, 15 aa, Artificial Sequence
  Description of Artificial Sequence: Synthetic peptide
  Seed: SIGKVCRTLLAKSVF
SIFKVDRNLLHKSVF

SEQ ID NO: 263464 - protein, 15 aa, Artificial Sequence
  Description of Artificial Sequence: Synthetic peptide
  Seed: SIGKVCRTLLAKSVF
SIFKVDRNLLIKSVF

SEQ ID NO: 263465 - protein, 15 aa, Artificial Sequence
  Description of Artificial Sequence: Synthetic peptide
  Seed: SIGKVCRTLLAKSVF
SIFKVDRNLLMKSVF

SEQ ID NO: 263466 - protein, 15 aa, Artificial Sequence
  Description of Artificial Sequence: Synthetic peptide
  Seed: SIGKVCRTLLAKSVF
SIFKVDRNLLNKSVF

SEQ ID NO: 263467 - protein, 15 aa, Artificial Sequence
  Description of Artificial Sequence: Synthetic peptide
  Seed: SIGKVCRTLLAKSVF
SIFKVDRNLLPKSVF

SEQ ID NO: 263468 - protein, 15 aa, Artificial Sequence
  Description of Artificial Sequence: Synthetic peptide
  Seed: SIGKVCRTLLAKSVF
SIFKVDRNLLQKSVF

SEQ ID NO: 263469 - protein, 15 aa, Artificial Sequence
  Description of Artificial Sequence: Synthetic peptide
  Seed: SIGKVCRTLLAKSVF
SIFKVDRNLLSKSVF

SEQ ID NO: 263470 - protein, 15 aa, Artificial Sequence
  Description of Artificial Sequence: Synthetic peptide
  Seed: SIGKVCRTLLAKSVF
SIFKVDRNLLTKSVF

SEQ ID NO: 263471 - protein, 15 aa, Artificial Sequence
  Description of Artificial Sequence: Synthetic peptide
  Seed: SIGKVCRTLLAKSVF
SIFKVDRNLLVKSVF

SEQ ID NO: 263472 - protein, 15 aa, Artificial Sequence
  Description of Artificial Sequence: Synthetic peptide
  Seed: SIGKVCRTLLAKSVF
SIFKVDRPLLAKSVF

SEQ ID NO: 263473 - protein, 15 aa, Artificial Sequence
  Description of Artificial Sequence: Synthetic peptide
  Seed: SIGKVCRTLLAKSVF
SIFKVDRPLLGKSVF

SEQ ID NO: 263474 - protein, 15 aa, Artificial Sequence
  Description of Artificial Sequence: Synthetic peptide
  Seed: SIGKVCRTLLAKSVF
SIFKVDRPLLSKSVF

SEQ ID NO: 263475 - protein, 15 aa, Artificial Sequence
  Description of Artificial Sequence: Synthetic peptide
  Seed: SIGKVCRTLLAKSVF
SIFKVDRRLLAKSVF

SEQ ID NO: 263476 - protein, 15 aa, Artificial Sequence
  Description of Artificial Sequence: Synthetic peptide
  Seed: SIGKVCRTLLAKSVF
SIFKVDRRLLGKSVF

SEQ ID NO: 263477 - protein, 15 aa, Artificial Sequence
  Description of Artificial Sequence: Synthetic peptide
  Seed: SIGKVCRTLLAKSVF
SIFKVDRRLLHKSVF

SEQ ID NO: 263478 - protein, 15 aa, Artificial Sequence
  Description of Artificial Sequence: Synthetic peptide
  Seed: SIGKVCRTLLAKSVF
SIFKVDRRLLKKSVF

SEQ ID NO: 263479 - protein, 15 aa, Artificial Sequence
  Description of Artificial Sequence: Synthetic peptide
  Seed: SIGKVCRTLLAKSVF
SIFKVDRRLLMKSVF

SEQ ID NO: 263480 - protein, 15 aa, Artificial Sequence
  Description of Artificial Sequence: Synthetic peptide
  Seed: SIGKVCRTLLAKSVF
SIFKVDRRLLNKSVF

SEQ ID NO: 263481 - protein, 15 aa, Artificial Sequence
  Description of Artificial Sequence: Synthetic peptide
  Seed: SIGKVCRTLLAKSVF
SIFKVDRRLLQKSVF

SEQ ID NO: 263482 - protein, 15 aa, Artificial Sequence
  Description of Artificial Sequence: Synthetic peptide
  Seed: SIGKVCRTLLAKSVF
SIFKVDRRLLRKSVF

SEQ ID NO: 263483 - protein, 15 aa, Artificial Sequence
  Description of Artificial Sequence: Synthetic peptide
  Seed: SIGKVCRTLLAKSVF
SIFKVDRRLLSKSVF

SEQ ID NO: 263484 - protein, 15 aa, Artificial Sequence
  Description of Artificial Sequence: Synthetic peptide
  Seed: SIGKVCRTLLAKSVF
SIFKVDRRLLTKSVF

SEQ ID NO: 263485 - protein, 15 aa, Artificial Sequence
  Description of Artificial Sequence: Synthetic peptide
  Seed: SIGKVCRTLLAKSVF
SIFKVDRRLLVKSVF

SEQ ID NO: 263486 - protein, 15 aa, Artificial Sequence
  Description of Artificial Sequence: Synthetic peptide
  Seed: SIGKVCRTLLAKSVF
SIFKVDRRLLYKSVF

SEQ ID NO: 263487 - protein, 15 aa, Artificial Sequence
  Description of Artificial Sequence: Synthetic peptide
  Seed: SIGKVCRTLLAKSVF
SIFKVDRSLLAKSVF

SEQ ID NO: 263488 - protein, 15 aa, Artificial Sequence
  Description of Artificial Sequence: Synthetic peptide
  Seed: SIGKVCRTLLAKSVF
SIFKVDRSLLGKSVF

SEQ ID NO: 263489 - protein, 15 aa, Artificial Sequence
  Description of Artificial Sequence: Synthetic peptide
  Seed: SIGKVCRTLLAKSVF
SIFKVDRSLLHKSVF

SEQ ID NO: 263490 - protein, 15 aa, Artificial Sequence
  Description of Artificial Sequence: Synthetic peptide
  Seed: SIGKVCRTLLAKSVF
SIFKVDRSLLMKSVF

SEQ ID NO: 263491 - protein, 15 aa, Artificial Sequence
  Description of Artificial Sequence: Synthetic peptide
  Seed: SIGKVCRTLLAKSVF
SIFKVDRSLLNKSVF

SEQ ID NO: 263492 - protein, 15 aa, Artificial Sequence
  Description of Artificial Sequence: Synthetic peptide
  Seed: SIGKVCRTLLAKSVF
SIFKVDRSLLQKSVF

SEQ ID NO: 263493 - protein, 15 aa, Artificial Sequence
  Description of Artificial Sequence: Synthetic peptide
  Seed: SIGKVCRTLLAKSVF
SIFKVDRSLLSKSVF

SEQ ID NO: 263494 - protein, 15 aa, Artificial Sequence
  Description of Artificial Sequence: Synthetic peptide
  Seed: SIGKVCRTLLAKSVF
SIFKVDRSLLTKSVF

SEQ ID NO: 263495 - protein, 15 aa, Artificial Sequence
  Description of Artificial Sequence: Synthetic peptide
  Seed: SIGKVCRTLLAKSVF
SIFKVDRSLLVKSVF

SEQ ID NO: 263496 - protein, 15 aa, Artificial Sequence
  Description of Artificial Sequence: Synthetic peptide
  Seed: SIGKVCRTLLAKSVF
SIFKVDRTLLAKSVF

SEQ ID NO: 263497 - protein, 15 aa, Artificial Sequence
  Description of Artificial Sequence: Synthetic peptide
  Seed: SIGKVCRTLLAKSVF
SIFKVDRTLLDKSVF

SEQ ID NO: 263498 - protein, 15 aa, Artificial Sequence
  Description of Artificial Sequence: Synthetic peptide
  Seed: SIGKVCRTLLAKSVF
SIFKVDRTLLEKSVF

SEQ ID NO: 263499 - protein, 15 aa, Artificial Sequence
  Description of Artificial Sequence: Synthetic peptide
  Seed: SIGKVCRTLLAKSVF
SIFKVDRTLLGKSVF

SEQ ID NO: 263500 - protein, 15 aa, Artificial Sequence
  Description of Artificial Sequence: Synthetic peptide
  Seed: SIGKVCRTLLAKSVF
SIFKVDRTLLHKSVF

SEQ ID NO: 263501 - protein, 15 aa, Artificial Sequence
  Description of Artificial Sequence: Synthetic peptide
  Seed: SIGKVCRTLLAKSVF
SIFKVDRTLLIKSVF

SEQ ID NO: 263502 - protein, 15 aa, Artificial Sequence
  Description of Artificial Sequence: Synthetic peptide
  Seed: SIGKVCRTLLAKSVF
SIFKVDRTLLLKSVF

SEQ ID NO: 263503 - protein, 15 aa, Artificial Sequence
  Description of Artificial Sequence: Synthetic peptide
  Seed: SIGKVCRTLLAKSVF
SIFKVDRTLLMKSVF

SEQ ID NO: 263504 - protein, 15 aa, Artificial Sequence
  Description of Artificial Sequence: Synthetic peptide
  Seed: SIGKVCRTLLAKSVF
SIFKVDRTLLNKSVF

SEQ ID NO: 263505 - protein, 15 aa, Artificial Sequence
  Description of Artificial Sequence: Synthetic peptide
  Seed: SIGKVCRTLLAKSVF
SIFKVDRTLLPKSVF

SEQ ID NO: 263506 - protein, 15 aa, Artificial Sequence
  Description of Artificial Sequence: Synthetic peptide
  Seed: SIGKVCRTLLAKSVF
SIFKVDRTLLQKSVF

SEQ ID NO: 263507 - protein, 15 aa, Artificial Sequence
  Description of Artificial Sequence: Synthetic peptide
  Seed: SIGKVCRTLLAKSVF
SIFKVDRTLLSKSVF

SEQ ID NO: 263508 - protein, 15 aa, Artificial Sequence
  Description of Artificial Sequence: Synthetic peptide
  Seed: SIGKVCRTLLAKSVF
SIFKVDRTLLTKSVF

SEQ ID NO: 263509 - protein, 15 aa, Artificial Sequence
  Description of Artificial Sequence: Synthetic peptide
  Seed: SIGKVCRTLLAKSVF
SIFKVDRTLLVKSVF

SEQ ID NO: 263510 - protein, 15 aa, Artificial Sequence
  Description of Artificial Sequence: Synthetic peptide
  Seed: SIGKVCRTLLAKSVF
SIFKVDRVLLAKSVF

SEQ ID NO: 263511 - protein, 15 aa, Artificial Sequence
  Description of Artificial Sequence: Synthetic peptide
  Seed: SIGKVCRTLLAKSVF
SIFKVDRVLLGKSVF

SEQ ID NO: 263512 - protein, 15 aa, Artificial Sequence
  Description of Artificial Sequence: Synthetic peptide
  Seed: SIGKVCRTLLAKSVF
SIFKVDRVLLHKSVF

SEQ ID NO: 263513 - protein, 15 aa, Artificial Sequence
  Description of Artificial Sequence: Synthetic peptide
  Seed: SIGKVCRTLLAKSVF
SIFKVDRVLLNKSVF

SEQ ID NO: 263514 - protein, 15 aa, Artificial Sequence
  Description of Artificial Sequence: Synthetic peptide
  Seed: SIGKVCRTLLAKSVF
SIFKVDRVLLSKSVF

SEQ ID NO: 263515 - protein, 15 aa, Artificial Sequence
  Description of Artificial Sequence: Synthetic peptide
  Seed: SIGKVCRTLLAKSVF
SIFKVERALLAKSVF

SEQ ID NO: 263516 - protein, 15 aa, Artificial Sequence
  Description of Artificial Sequence: Synthetic peptide
  Seed: SIGKVCRTLLAKSVF
SIFKVERALLRKSVF

SEQ ID NO: 263517 - protein, 15 aa, Artificial Sequence
  Description of Artificial Sequence: Synthetic peptide
  Seed: SIGKVCRTLLAKSVF
SIFKVERALLSKSVF

SEQ ID NO: 263518 - protein, 15 aa, Artificial Sequence
  Description of Artificial Sequence: Synthetic peptide
  Seed: SIGKVCRTLLAKSVF
SIFKVERDLLAKSVF

SEQ ID NO: 263519 - protein, 15 aa, Artificial Sequence
  Description of Artificial Sequence: Synthetic peptide
  Seed: SIGKVCRTLLAKSVF
SIFKVERHLLRKSVF

SEQ ID NO: 263520 - protein, 15 aa, Artificial Sequence
  Description of Artificial Sequence: Synthetic peptide
  Seed: SIGKVCRTLLAKSVF
SIFKVERILLRKSVF

SEQ ID NO: 263521 - protein, 15 aa, Artificial Sequence
  Description of Artificial Sequence: Synthetic peptide
  Seed: SIGKVCRTLLAKSVF
SIFKVERKLLAKSVF

SEQ ID NO: 263522 - protein, 15 aa, Artificial Sequence
  Description of Artificial Sequence: Synthetic peptide
  Seed: SIGKVCRTLLAKSVF
SIFKVERKLLGKSVF

SEQ ID NO: 263523 - protein, 15 aa, Artificial Sequence
  Description of Artificial Sequence: Synthetic peptide
  Seed: SIGKVCRTLLAKSVF
SIFKVERKLLHKSVF

SEQ ID NO: 263524 - protein, 15 aa, Artificial Sequence
  Description of Artificial Sequence: Synthetic peptide
  Seed: SIGKVCRTLLAKSVF
SIFKVERKLLIKSVF

SEQ ID NO: 263525 - protein, 15 aa, Artificial Sequence
  Description of Artificial Sequence: Synthetic peptide
  Seed: SIGKVCRTLLAKSVF
SIFKVERKLLKKSVF

SEQ ID NO: 263526 - protein, 15 aa, Artificial Sequence
  Description of Artificial Sequence: Synthetic peptide
  Seed: SIGKVCRTLLAKSVF
SIFKVERKLLLKSVF

SEQ ID NO: 263527 - protein, 15 aa, Artificial Sequence
  Description of Artificial Sequence: Synthetic peptide
  Seed: SIGKVCRTLLAKSVF
SIFKVERKLLMKSVF

SEQ ID NO: 263528 - protein, 15 aa, Artificial Sequence
  Description of Artificial Sequence: Synthetic peptide
  Seed: SIGKVCRTLLAKSVF
SIFKVERKLLNKSVF

SEQ ID NO: 263529 - protein, 15 aa, Artificial Sequence
  Description of Artificial Sequence: Synthetic peptide
  Seed: SIGKVCRTLLAKSVF
SIFKVERKLLQKSVF

SEQ ID NO: 263530 - protein, 15 aa, Artificial Sequence
  Description of Artificial Sequence: Synthetic peptide
  Seed: SIGKVCRTLLAKSVF
SIFKVERKLLRKSVF

SEQ ID NO: 263531 - protein, 15 aa, Artificial Sequence
  Description of Artificial Sequence: Synthetic peptide
  Seed: SIGKVCRTLLAKSVF
SIFKVERKLLSKSVF

SEQ ID NO: 263532 - protein, 15 aa, Artificial Sequence
  Description of Artificial Sequence: Synthetic peptide
  Seed: SIGKVCRTLLAKSVF
SIFKVERKLLTKSVF

SEQ ID NO: 263533 - protein, 15 aa, Artificial Sequence
  Description of Artificial Sequence: Synthetic peptide
  Seed: SIGKVCRTLLAKSVF
SIFKVERKLLVKSVF

SEQ ID NO: 263534 - protein, 15 aa, Artificial Sequence
  Description of Artificial Sequence: Synthetic peptide
  Seed: SIGKVCRTLLAKSVF
SIFKVERKLLYKSVF

SEQ ID NO: 263535 - protein, 15 aa, Artificial Sequence
  Description of Artificial Sequence: Synthetic peptide
  Seed: SIGKVCRTLLAKSVF
SIFKVERNLLAKSVF

SEQ ID NO: 263536 - protein, 15 aa, Artificial Sequence
  Description of Artificial Sequence: Synthetic peptide
  Seed: SIGKVCRTLLAKSVF
SIFKVERNLLDKSVF

SEQ ID NO: 263537 - protein, 15 aa, Artificial Sequence
  Description of Artificial Sequence: Synthetic peptide
  Seed: SIGKVCRTLLAKSVF
SIFKVERNLLEKSVF

SEQ ID NO: 263538 - protein, 15 aa, Artificial Sequence
  Description of Artificial Sequence: Synthetic peptide
  Seed: SIGKVCRTLLAKSVF
SIFKVERNLLGKSVF

SEQ ID NO: 263539 - protein, 15 aa, Artificial Sequence
  Description of Artificial Sequence: Synthetic peptide
  Seed: SIGKVCRTLLAKSVF
SIFKVERNLLHKSVF

SEQ ID NO: 263540 - protein, 15 aa, Artificial Sequence
  Description of Artificial Sequence: Synthetic peptide
  Seed: SIGKVCRTLLAKSVF
SIFKVERNLLNKSVF

SEQ ID NO: 263541 - protein, 15 aa, Artificial Sequence
  Description of Artificial Sequence: Synthetic peptide
  Seed: SIGKVCRTLLAKSVF
SIFKVERNLLQKSVF

SEQ ID NO: 263542 - protein, 15 aa, Artificial Sequence
  Description of Artificial Sequence: Synthetic peptide
  Seed: SIGKVCRTLLAKSVF
SIFKVERNLLSKSVF

SEQ ID NO: 263543 - protein, 15 aa, Artificial Sequence
  Description of Artificial Sequence: Synthetic peptide
  Seed: SIGKVCRTLLAKSVF
SIFKVERNLLTKSVF

SEQ ID NO: 263544 - protein, 15 aa, Artificial Sequence
  Description of Artificial Sequence: Synthetic peptide
  Seed: SIGKVCRTLLAKSVF
SIFKVERRLLAKSVF

SEQ ID NO: 263545 - protein, 15 aa, Artificial Sequence
  Description of Artificial Sequence: Synthetic peptide
  Seed: SIGKVCRTLLAKSVF
SIFKVERRLLCKSVF

SEQ ID NO: 263546 - protein, 15 aa, Artificial Sequence
  Description of Artificial Sequence: Synthetic peptide
  Seed: SIGKVCRTLLAKSVF
SIFKVERRLLDKSVF

SEQ ID NO: 263547 - protein, 15 aa, Artificial Sequence
  Description of Artificial Sequence: Synthetic peptide
  Seed: SIGKVCRTLLAKSVF
SIFKVERRLLEKSVF

SEQ ID NO: 263548 - protein, 15 aa, Artificial Sequence
  Description of Artificial Sequence: Synthetic peptide
  Seed: SIGKVCRTLLAKSVF
SIFKVERRLLFKSVF

SEQ ID NO: 263549 - protein, 15 aa, Artificial Sequence
  Description of Artificial Sequence: Synthetic peptide
  Seed: SIGKVCRTLLAKSVF
SIFKVERRLLGKSVF

SEQ ID NO: 263550 - protein, 15 aa, Artificial Sequence
  Description of Artificial Sequence: Synthetic peptide
  Seed: SIGKVCRTLLAKSVF
SIFKVERRLLHKSVF

SEQ ID NO: 263551 - protein, 15 aa, Artificial Sequence
  Description of Artificial Sequence: Synthetic peptide
  Seed: SIGKVCRTLLAKSVF
SIFKVERRLLIKSVF

SEQ ID NO: 263552 - protein, 15 aa, Artificial Sequence
  Description of Artificial Sequence: Synthetic peptide
  Seed: SIGKVCRTLLAKSVF
SIFKVERRLLKKSVF

SEQ ID NO: 263553 - protein, 15 aa, Artificial Sequence
  Description of Artificial Sequence: Synthetic peptide
  Seed: SIGKVCRTLLAKSVF
SIFKVERRLLLKSVF

SEQ ID NO: 263554 - protein, 15 aa, Artificial Sequence
  Description of Artificial Sequence: Synthetic peptide
  Seed: SIGKVCRTLLAKSVF
SIFKVERRLLMKSVF

SEQ ID NO: 263555 - protein, 15 aa, Artificial Sequence
  Description of Artificial Sequence: Synthetic peptide
  Seed: SIGKVCRTLLAKSVF
SIFKVERRLLNKSVF

SEQ ID NO: 263556 - protein, 15 aa, Artificial Sequence
  Description of Artificial Sequence: Synthetic peptide
  Seed: SIGKVCRTLLAKSVF
SIFKVERRLLPKSVF

SEQ ID NO: 263557 - protein, 15 aa, Artificial Sequence
  Description of Artificial Sequence: Synthetic peptide
  Seed: SIGKVCRTLLAKSVF
SIFKVERRLLQKSVF

SEQ ID NO: 263558 - protein, 15 aa, Artificial Sequence
  Description of Artificial Sequence: Synthetic peptide
  Seed: SIGKVCRTLLAKSVF
SIFKVERRLLRKSVF

SEQ ID NO: 263559 - protein, 15 aa, Artificial Sequence
  Description of Artificial Sequence: Synthetic peptide
  Seed: SIGKVCRTLLAKSVF
SIFKVERRLLSKSVF

SEQ ID NO: 263560 - protein, 15 aa, Artificial Sequence
  Description of Artificial Sequence: Synthetic peptide
  Seed: SIGKVCRTLLAKSVF
SIFKVERRLLTKSVF

SEQ ID NO: 263561 - protein, 15 aa, Artificial Sequence
  Description of Artificial Sequence: Synthetic peptide
  Seed: SIGKVCRTLLAKSVF
SIFKVERRLLVKSVF

SEQ ID NO: 263562 - protein, 15 aa, Artificial Sequence
  Description of Artificial Sequence: Synthetic peptide
  Seed: SIGKVCRTLLAKSVF
SIFKVERRLLWKSVF

SEQ ID NO: 263563 - protein, 15 aa, Artificial Sequence
  Description of Artificial Sequence: Synthetic peptide
  Seed: SIGKVCRTLLAKSVF
SIFKVERRLLYKSVF

SEQ ID NO: 263564 - protein, 15 aa, Artificial Sequence
  Description of Artificial Sequence: Synthetic peptide
  Seed: SIGKVCRTLLAKSVF
SIFKVERSLLAKSVF

SEQ ID NO: 263565 - protein, 15 aa, Artificial Sequence
  Description of Artificial Sequence: Synthetic peptide
  Seed: SIGKVCRTLLAKSVF
SIFKVERSLLDKSVF

SEQ ID NO: 263566 - protein, 15 aa, Artificial Sequence
  Description of Artificial Sequence: Synthetic peptide
  Seed: SIGKVCRTLLAKSVF
SIFKVERSLLGKSVF

SEQ ID NO: 263567 - protein, 15 aa, Artificial Sequence
  Description of Artificial Sequence: Synthetic peptide
  Seed: SIGKVCRTLLAKSVF
SIFKVERSLLHKSVF

SEQ ID NO: 263568 - protein, 15 aa, Artificial Sequence
  Description of Artificial Sequence: Synthetic peptide
  Seed: SIGKVCRTLLAKSVF
SIFKVERSLLNKSVF

SEQ ID NO: 263569 - protein, 15 aa, Artificial Sequence
  Description of Artificial Sequence: Synthetic peptide
  Seed: SIGKVCRTLLAKSVF
SIFKVERSLLQKSVF

SEQ ID NO: 263570 - protein, 15 aa, Artificial Sequence
  Description of Artificial Sequence: Synthetic peptide
  Seed: SIGKVCRTLLAKSVF
SIFKVERSLLRKSVF

SEQ ID NO: 263571 - protein, 15 aa, Artificial Sequence
  Description of Artificial Sequence: Synthetic peptide
  Seed: SIGKVCRTLLAKSVF
SIFKVERSLLSKSVF

SEQ ID NO: 263572 - protein, 15 aa, Artificial Sequence
  Description of Artificial Sequence: Synthetic peptide
  Seed: SIGKVCRTLLAKSVF
SIFKVERSLLTKSVF

SEQ ID NO: 263573 - protein, 15 aa, Artificial Sequence
  Description of Artificial Sequence: Synthetic peptide
  Seed: SIGKVCRTLLAKSVF
SIFKVERTLLAKSVF

SEQ ID NO: 263574 - protein, 15 aa, Artificial Sequence
  Description of Artificial Sequence: Synthetic peptide
  Seed: SIGKVCRTLLAKSVF
SIFKVERTLLDKSVF

SEQ ID NO: 263575 - protein, 15 aa, Artificial Sequence
  Description of Artificial Sequence: Synthetic peptide
  Seed: SIGKVCRTLLAKSVF
SIFKVERTLLEKSVF

SEQ ID NO: 263576 - protein, 15 aa, Artificial Sequence
  Description of Artificial Sequence: Synthetic peptide
  Seed: SIGKVCRTLLAKSVF
SIFKVERTLLGKSVF

SEQ ID NO: 263577 - protein, 15 aa, Artificial Sequence
  Description of Artificial Sequence: Synthetic peptide
  Seed: SIGKVCRTLLAKSVF
SIFKVERTLLHKSVF

SEQ ID NO: 263578 - protein, 15 aa, Artificial Sequence
  Description of Artificial Sequence: Synthetic peptide
  Seed: SIGKVCRTLLAKSVF
SIFKVERTLLMKSVF

SEQ ID NO: 263579 - protein, 15 aa, Artificial Sequence
  Description of Artificial Sequence: Synthetic peptide
  Seed: SIGKVCRTLLAKSVF
SIFKVERTLLNKSVF

SEQ ID NO: 263580 - protein, 15 aa, Artificial Sequence
  Description of Artificial Sequence: Synthetic peptide
  Seed: SIGKVCRTLLAKSVF
SIFKVERTLLQKSVF

SEQ ID NO: 263581 - protein, 15 aa, Artificial Sequence
  Description of Artificial Sequence: Synthetic peptide
  Seed: SIGKVCRTLLAKSVF
SIFKVERTLLRKSVF

SEQ ID NO: 263582 - protein, 15 aa, Artificial Sequence
  Description of Artificial Sequence: Synthetic peptide
  Seed: SIGKVCRTLLAKSVF
SIFKVERTLLSKSVF

SEQ ID NO: 263583 - protein, 15 aa, Artificial Sequence
  Description of Artificial Sequence: Synthetic peptide
  Seed: SIGKVCRTLLAKSVF
SIFKVERTLLTKSVF

SEQ ID NO: 263584 - protein, 15 aa, Artificial Sequence
  Description of Artificial Sequence: Synthetic peptide
  Seed: SIGKVCRTLLAKSVF
SIFKVERTLLVKSVF

SEQ ID NO: 263585 - protein, 15 aa, Artificial Sequence
  Description of Artificial Sequence: Synthetic peptide
  Seed: SIGKVCRTLLAKSVF
SIFKVERVLLDKSVF

SEQ ID NO: 263586 - protein, 15 aa, Artificial Sequence
  Description of Artificial Sequence: Synthetic peptide
  Seed: SIGKVCRTLLAKSVF
SIFKVERVLLRKSVF

SEQ ID NO: 263587 - protein, 15 aa, Artificial Sequence
  Description of Artificial Sequence: Synthetic peptide
  Seed: SIGKVCRTLLAKSVF
SIFKVFRALLAKSVF

SEQ ID NO: 263588 - protein, 15 aa, Artificial Sequence
  Description of Artificial Sequence: Synthetic peptide
  Seed: SIGKVCRTLLAKSVF
SIFKVFRALLDKSVF

SEQ ID NO: 263589 - protein, 15 aa, Artificial Sequence
  Description of Artificial Sequence: Synthetic peptide
  Seed: SIGKVCRTLLAKSVF
SIFKVFRALLEKSVF

SEQ ID NO: 263590 - protein, 15 aa, Artificial Sequence
  Description of Artificial Sequence: Synthetic peptide
  Seed: SIGKVCRTLLAKSVF
SIFKVFRALLGKSVF

SEQ ID NO: 263591 - protein, 15 aa, Artificial Sequence
  Description of Artificial Sequence: Synthetic peptide
  Seed: SIGKVCRTLLAKSVF
SIFKVFRALLHKSVF

SEQ ID NO: 263592 - protein, 15 aa, Artificial Sequence
  Description of Artificial Sequence: Synthetic peptide
  Seed: SIGKVCRTLLAKSVF
SIFKVFRALLSKSVF

SEQ ID NO: 263593 - protein, 15 aa, Artificial Sequence
  Description of Artificial Sequence: Synthetic peptide
  Seed: SIGKVCRTLLAKSVF
SIFKVFRDLLDKSVF

SEQ ID NO: 263594 - protein, 15 aa, Artificial Sequence
  Description of Artificial Sequence: Synthetic peptide
  Seed: SIGKVCRTLLAKSVF
SIFKVFRELLRKSVF

SEQ ID NO: 263595 - protein, 15 aa, Artificial Sequence
  Description of Artificial Sequence: Synthetic peptide
  Seed: SIGKVCRTLLAKSVF
SIFKVFRGLLAKSVF

SEQ ID NO: 263596 - protein, 15 aa, Artificial Sequence
  Description of Artificial Sequence: Synthetic peptide
  Seed: SIGKVCRTLLAKSVF
SIFKVFRGLLDKSVF

SEQ ID NO: 263597 - protein, 15 aa, Artificial Sequence
  Description of Artificial Sequence: Synthetic peptide
  Seed: SIGKVCRTLLAKSVF
SIFKVFRGLLHKSVF

SEQ ID NO: 263598 - protein, 15 aa, Artificial Sequence
  Description of Artificial Sequence: Synthetic peptide
  Seed: SIGKVCRTLLAKSVF
SIFKVFRGLLSKSVF

SEQ ID NO: 263599 - protein, 15 aa, Artificial Sequence
  Description of Artificial Sequence: Synthetic peptide
  Seed: SIGKVCRTLLAKSVF
SIFKVFRHLLAKSVF

SEQ ID NO: 263600 - protein, 15 aa, Artificial Sequence
  Description of Artificial Sequence: Synthetic peptide
  Seed: SIGKVCRTLLAKSVF
SIFKVFRHLLGKSVF

SEQ ID NO: 263601 - protein, 15 aa, Artificial Sequence
  Description of Artificial Sequence: Synthetic peptide
  Seed: SIGKVCRTLLAKSVF
SIFKVFRHLLHKSVF

SEQ ID NO: 263602 - protein, 15 aa, Artificial Sequence
  Description of Artificial Sequence: Synthetic peptide
  Seed: SIGKVCRTLLAKSVF
SIFKVFRHLLKKSVF

SEQ ID NO: 263603 - protein, 15 aa, Artificial Sequence
  Description of Artificial Sequence: Synthetic peptide
  Seed: SIGKVCRTLLAKSVF
SIFKVFRHLLNKSVF

SEQ ID NO: 263604 - protein, 15 aa, Artificial Sequence
  Description of Artificial Sequence: Synthetic peptide
  Seed: SIGKVCRTLLAKSVF
SIFKVFRHLLPKSVF

SEQ ID NO: 263605 - protein, 15 aa, Artificial Sequence
  Description of Artificial Sequence: Synthetic peptide
  Seed: SIGKVCRTLLAKSVF
SIFKVFRHLLQKSVF

SEQ ID NO: 263606 - protein, 15 aa, Artificial Sequence
  Description of Artificial Sequence: Synthetic peptide
  Seed: SIGKVCRTLLAKSVF
SIFKVFRHLLRKSVF

SEQ ID NO: 263607 - protein, 15 aa, Artificial Sequence
  Description of Artificial Sequence: Synthetic peptide
  Seed: SIGKVCRTLLAKSVF
SIFKVFRHLLSKSVF

SEQ ID NO: 263608 - protein, 15 aa, Artificial Sequence
  Description of Artificial Sequence: Synthetic peptide
  Seed: SIGKVCRTLLAKSVF
SIFKVFRHLLTKSVF

SEQ ID NO: 263609 - protein, 15 aa, Artificial Sequence
  Description of Artificial Sequence: Synthetic peptide
  Seed: SIGKVCRTLLAKSVF
SIFKVFRHLLVKSVF

SEQ ID NO: 263610 - protein, 15 aa, Artificial Sequence
  Description of Artificial Sequence: Synthetic peptide
  Seed: SIGKVCRTLLAKSVF
SIFKVFRHLLYKSVF

SEQ ID NO: 263611 - protein, 15 aa, Artificial Sequence
  Description of Artificial Sequence: Synthetic peptide
  Seed: SIGKVCRTLLAKSVF
SIFKVFRILLDKSVF

SEQ ID NO: 263612 - protein, 15 aa, Artificial Sequence
  Description of Artificial Sequence: Synthetic peptide
  Seed: SIGKVCRTLLAKSVF
SIFKVFRKLLAKSVF

SEQ ID NO: 263613 - protein, 15 aa, Artificial Sequence
  Description of Artificial Sequence: Synthetic peptide
  Seed: SIGKVCRTLLAKSVF
SIFKVFRKLLDKSVF

SEQ ID NO: 263614 - protein, 15 aa, Artificial Sequence
  Description of Artificial Sequence: Synthetic peptide
  Seed: SIGKVCRTLLAKSVF
SIFKVFRKLLEKSVF

SEQ ID NO: 263615 - protein, 15 aa, Artificial Sequence
  Description of Artificial Sequence: Synthetic peptide
  Seed: SIGKVCRTLLAKSVF
SIFKVFRKLLFKSVF

SEQ ID NO: 263616 - protein, 15 aa, Artificial Sequence
  Description of Artificial Sequence: Synthetic peptide
  Seed: SIGKVCRTLLAKSVF
SIFKVFRKLLGKSVF

SEQ ID NO: 263617 - protein, 15 aa, Artificial Sequence
  Description of Artificial Sequence: Synthetic peptide
  Seed: SIGKVCRTLLAKSVF
SIFKVFRKLLHKSVF

SEQ ID NO: 263618 - protein, 15 aa, Artificial Sequence
  Description of Artificial Sequence: Synthetic peptide
  Seed: SIGKVCRTLLAKSVF
SIFKVFRKLLIKSVF

SEQ ID NO: 263619 - protein, 15 aa, Artificial Sequence
  Description of Artificial Sequence: Synthetic peptide
  Seed: SIGKVCRTLLAKSVF
SIFKVFRKLLKKSVF

SEQ ID NO: 263620 - protein, 15 aa, Artificial Sequence
  Description of Artificial Sequence: Synthetic peptide
  Seed: SIGKVCRTLLAKSVF
SIFKVFRKLLLKSVF

SEQ ID NO: 263621 - protein, 15 aa, Artificial Sequence
  Description of Artificial Sequence: Synthetic peptide
  Seed: SIGKVCRTLLAKSVF
SIFKVFRKLLMKSVF

SEQ ID NO: 263622 - protein, 15 aa, Artificial Sequence
  Description of Artificial Sequence: Synthetic peptide
  Seed: SIGKVCRTLLAKSVF
SIFKVFRKLLNKSVF

SEQ ID NO: 263623 - protein, 15 aa, Artificial Sequence
  Description of Artificial Sequence: Synthetic peptide
  Seed: SIGKVCRTLLAKSVF
SIFKVFRKLLPKSVF

SEQ ID NO: 263624 - protein, 15 aa, Artificial Sequence
  Description of Artificial Sequence: Synthetic peptide
  Seed: SIGKVCRTLLAKSVF
SIFKVFRKLLQKSVF

SEQ ID NO: 263625 - protein, 15 aa, Artificial Sequence
  Description of Artificial Sequence: Synthetic peptide
  Seed: SIGKVCRTLLAKSVF
SIFKVFRKLLRKSVF

SEQ ID NO: 263626 - protein, 15 aa, Artificial Sequence
  Description of Artificial Sequence: Synthetic peptide
  Seed: SIGKVCRTLLAKSVF
SIFKVFRKLLSKSVF

SEQ ID NO: 263627 - protein, 15 aa, Artificial Sequence
  Description of Artificial Sequence: Synthetic peptide
  Seed: SIGKVCRTLLAKSVF
SIFKVFRKLLTKSVF

SEQ ID NO: 263628 - protein, 15 aa, Artificial Sequence
  Description of Artificial Sequence: Synthetic peptide
  Seed: SIGKVCRTLLAKSVF
SIFKVFRKLLVKSVF

SEQ ID NO: 263629 - protein, 15 aa, Artificial Sequence
  Description of Artificial Sequence: Synthetic peptide
  Seed: SIGKVCRTLLAKSVF
SIFKVFRKLLWKSVF

SEQ ID NO: 263630 - protein, 15 aa, Artificial Sequence
  Description of Artificial Sequence: Synthetic peptide
  Seed: SIGKVCRTLLAKSVF
SIFKVFRKLLYKSVF

SEQ ID NO: 263631 - protein, 15 aa, Artificial Sequence
  Description of Artificial Sequence: Synthetic peptide
  Seed: SIGKVCRTLLAKSVF
SIFKVFRNLLAKSVF

SEQ ID NO: 263632 - protein, 15 aa, Artificial Sequence
  Description of Artificial Sequence: Synthetic peptide
  Seed: SIGKVCRTLLAKSVF
SIFKVFRNLLDKSVF

SEQ ID NO: 263633 - protein, 15 aa, Artificial Sequence
  Description of Artificial Sequence: Synthetic peptide
  Seed: SIGKVCRTLLAKSVF
SIFKVFRNLLEKSVF

SEQ ID NO: 263634 - protein, 15 aa, Artificial Sequence
  Description of Artificial Sequence: Synthetic peptide
  Seed: SIGKVCRTLLAKSVF
SIFKVFRNLLGKSVF

SEQ ID NO: 263635 - protein, 15 aa, Artificial Sequence
  Description of Artificial Sequence: Synthetic peptide
  Seed: SIGKVCRTLLAKSVF
SIFKVFRNLLHKSVF

SEQ ID NO: 263636 - protein, 15 aa, Artificial Sequence
  Description of Artificial Sequence: Synthetic peptide
  Seed: SIGKVCRTLLAKSVF
SIFKVFRNLLNKSVF

SEQ ID NO: 263637 - protein, 15 aa, Artificial Sequence
  Description of Artificial Sequence: Synthetic peptide
  Seed: SIGKVCRTLLAKSVF
SIFKVFRNLLRKSVF

SEQ ID NO: 263638 - protein, 15 aa, Artificial Sequence
  Description of Artificial Sequence: Synthetic peptide
  Seed: SIGKVCRTLLAKSVF
SIFKVFRNLLSKSVF

SEQ ID NO: 263639 - protein, 15 aa, Artificial Sequence
  Description of Artificial Sequence: Synthetic peptide
  Seed: SIGKVCRTLLAKSVF
SIFKVFRNLLTKSVF

SEQ ID NO: 263640 - protein, 15 aa, Artificial Sequence
  Description of Artificial Sequence: Synthetic peptide
  Seed: SIGKVCRTLLAKSVF
SIFKVFRPLLAKSVF

SEQ ID NO: 263641 - protein, 15 aa, Artificial Sequence
  Description of Artificial Sequence: Synthetic peptide
  Seed: SIGKVCRTLLAKSVF
SIFKVFRPLLDKSVF

SEQ ID NO: 263642 - protein, 15 aa, Artificial Sequence
  Description of Artificial Sequence: Synthetic peptide
  Seed: SIGKVCRTLLAKSVF
SIFKVFRPLLGKSVF

SEQ ID NO: 263643 - protein, 15 aa, Artificial Sequence
  Description of Artificial Sequence: Synthetic peptide
  Seed: SIGKVCRTLLAKSVF
SIFKVFRPLLHKSVF

SEQ ID NO: 263644 - protein, 15 aa, Artificial Sequence
  Description of Artificial Sequence: Synthetic peptide
  Seed: SIGKVCRTLLAKSVF
SIFKVFRPLLNKSVF

SEQ ID NO: 263645 - protein, 15 aa, Artificial Sequence
  Description of Artificial Sequence: Synthetic peptide
  Seed: SIGKVCRTLLAKSVF
SIFKVFRPLLQKSVF

SEQ ID NO: 263646 - protein, 15 aa, Artificial Sequence
  Description of Artificial Sequence: Synthetic peptide
  Seed: SIGKVCRTLLAKSVF
SIFKVFRPLLSKSVF

SEQ ID NO: 263647 - protein, 15 aa, Artificial Sequence
  Description of Artificial Sequence: Synthetic peptide
  Seed: SIGKVCRTLLAKSVF
SIFKVFRPLLTKSVF

SEQ ID NO: 263648 - protein, 15 aa, Artificial Sequence
  Description of Artificial Sequence: Synthetic peptide
  Seed: SIGKVCRTLLAKSVF
SIFKVFRQLLHKSVF

SEQ ID NO: 263649 - protein, 15 aa, Artificial Sequence
  Description of Artificial Sequence: Synthetic peptide
  Seed: SIGKVCRTLLAKSVF
SIFKVFRQLLRKSVF

SEQ ID NO: 263650 - protein, 15 aa, Artificial Sequence
  Description of Artificial Sequence: Synthetic peptide
  Seed: SIGKVCRTLLAKSVF
SIFKVFRQLLSKSVF

SEQ ID NO: 263651 - protein, 15 aa, Artificial Sequence
  Description of Artificial Sequence: Synthetic peptide
  Seed: SIGKVCRTLLAKSVF
SIFKVFRRLLAKSVF

SEQ ID NO: 263652 - protein, 15 aa, Artificial Sequence
  Description of Artificial Sequence: Synthetic peptide
  Seed: SIGKVCRTLLAKSVF
SIFKVFRRLLDKSVF

SEQ ID NO: 263653 - protein, 15 aa, Artificial Sequence
  Description of Artificial Sequence: Synthetic peptide
  Seed: SIGKVCRTLLAKSVF
SIFKVFRRLLEKSVF

SEQ ID NO: 263654 - protein, 15 aa, Artificial Sequence
  Description of Artificial Sequence: Synthetic peptide
  Seed: SIGKVCRTLLAKSVF
SIFKVFRRLLFKSVF

SEQ ID NO: 263655 - protein, 15 aa, Artificial Sequence
  Description of Artificial Sequence: Synthetic peptide
  Seed: SIGKVCRTLLAKSVF
SIFKVFRRLLGKSVF

SEQ ID NO: 263656 - protein, 15 aa, Artificial Sequence
  Description of Artificial Sequence: Synthetic peptide
  Seed: SIGKVCRTLLAKSVF
SIFKVFRRLLHKSVF

SEQ ID NO: 263657 - protein, 15 aa, Artificial Sequence
  Description of Artificial Sequence: Synthetic peptide
  Seed: SIGKVCRTLLAKSVF
SIFKVFRRLLIKSVF

SEQ ID NO: 263658 - protein, 15 aa, Artificial Sequence
  Description of Artificial Sequence: Synthetic peptide
  Seed: SIGKVCRTLLAKSVF
SIFKVFRRLLKKSVF

SEQ ID NO: 263659 - protein, 15 aa, Artificial Sequence
  Description of Artificial Sequence: Synthetic peptide
  Seed: SIGKVCRTLLAKSVF
SIFKVFRRLLLKSVF

SEQ ID NO: 263660 - protein, 15 aa, Artificial Sequence
  Description of Artificial Sequence: Synthetic peptide
  Seed: SIGKVCRTLLAKSVF
SIFKVFRRLLMKSVF

SEQ ID NO: 263661 - protein, 15 aa, Artificial Sequence
  Description of Artificial Sequence: Synthetic peptide
  Seed: SIGKVCRTLLAKSVF
SIFKVFRRLLNKSVF

SEQ ID NO: 263662 - protein, 15 aa, Artificial Sequence
  Description of Artificial Sequence: Synthetic peptide
  Seed: SIGKVCRTLLAKSVF
SIFKVFRRLLPKSVF

SEQ ID NO: 263663 - protein, 15 aa, Artificial Sequence
  Description of Artificial Sequence: Synthetic peptide
  Seed: SIGKVCRTLLAKSVF
SIFKVFRRLLQKSVF

SEQ ID NO: 263664 - protein, 15 aa, Artificial Sequence
  Description of Artificial Sequence: Synthetic peptide
  Seed: SIGKVCRTLLAKSVF
SIFKVFRRLLRKSVF

SEQ ID NO: 263665 - protein, 15 aa, Artificial Sequence
  Description of Artificial Sequence: Synthetic peptide
  Seed: SIGKVCRTLLAKSVF
SIFKVFRRLLSKSVF

SEQ ID NO: 263666 - protein, 15 aa, Artificial Sequence
  Description of Artificial Sequence: Synthetic peptide
  Seed: SIGKVCRTLLAKSVF
SIFKVFRRLLTKSVF

SEQ ID NO: 263667 - protein, 15 aa, Artificial Sequence
  Description of Artificial Sequence: Synthetic peptide
  Seed: SIGKVCRTLLAKSVF
SIFKVFRRLLVKSVF

SEQ ID NO: 263668 - protein, 15 aa, Artificial Sequence
  Description of Artificial Sequence: Synthetic peptide
  Seed: SIGKVCRTLLAKSVF
SIFKVFRRLLWKSVF

SEQ ID NO: 263669 - protein, 15 aa, Artificial Sequence
  Description of Artificial Sequence: Synthetic peptide
  Seed: SIGKVCRTLLAKSVF
SIFKVFRRLLYKSVF

SEQ ID NO: 263670 - protein, 15 aa, Artificial Sequence
  Description of Artificial Sequence: Synthetic peptide
  Seed: SIGKVCRTLLAKSVF
SIFKVFRSLLAKSVF

SEQ ID NO: 263671 - protein, 15 aa, Artificial Sequence
  Description of Artificial Sequence: Synthetic peptide
  Seed: SIGKVCRTLLAKSVF
SIFKVFRSLLDKSVF

SEQ ID NO: 263672 - protein, 15 aa, Artificial Sequence
  Description of Artificial Sequence: Synthetic peptide
  Seed: SIGKVCRTLLAKSVF
SIFKVFRSLLEKSVF

SEQ ID NO: 263673 - protein, 15 aa, Artificial Sequence
  Description of Artificial Sequence: Synthetic peptide
  Seed: SIGKVCRTLLAKSVF
SIFKVFRSLLGKSVF

SEQ ID NO: 263674 - protein, 15 aa, Artificial Sequence
  Description of Artificial Sequence: Synthetic peptide
  Seed: SIGKVCRTLLAKSVF
SIFKVFRSLLHKSVF

SEQ ID NO: 263675 - protein, 15 aa, Artificial Sequence
  Description of Artificial Sequence: Synthetic peptide
  Seed: SIGKVCRTLLAKSVF
SIFKVFRSLLNKSVF

SEQ ID NO: 263676 - protein, 15 aa, Artificial Sequence
  Description of Artificial Sequence: Synthetic peptide
  Seed: SIGKVCRTLLAKSVF
SIFKVFRSLLRKSVF

SEQ ID NO: 263677 - protein, 15 aa, Artificial Sequence
  Description of Artificial Sequence: Synthetic peptide
  Seed: SIGKVCRTLLAKSVF
SIFKVFRSLLSKSVF

SEQ ID NO: 263678 - protein, 15 aa, Artificial Sequence
  Description of Artificial Sequence: Synthetic peptide
  Seed: SIGKVCRTLLAKSVF
SIFKVFRSLLTKSVF

SEQ ID NO: 263679 - protein, 15 aa, Artificial Sequence
  Description of Artificial Sequence: Synthetic peptide
  Seed: SIGKVCRTLLAKSVF
SIFKVFRTLLAKSVF

SEQ ID NO: 263680 - protein, 15 aa, Artificial Sequence
  Description of Artificial Sequence: Synthetic peptide
  Seed: SIGKVCRTLLAKSVF
SIFKVFRTLLDKSVF

SEQ ID NO: 263681 - protein, 15 aa, Artificial Sequence
  Description of Artificial Sequence: Synthetic peptide
  Seed: SIGKVCRTLLAKSVF
SIFKVFRTLLEKSVF

SEQ ID NO: 263682 - protein, 15 aa, Artificial Sequence
  Description of Artificial Sequence: Synthetic peptide
  Seed: SIGKVCRTLLAKSVF
SIFKVFRTLLGKSVF

SEQ ID NO: 263683 - protein, 15 aa, Artificial Sequence
  Description of Artificial Sequence: Synthetic peptide
  Seed: SIGKVCRTLLAKSVF
SIFKVFRTLLHKSVF

SEQ ID NO: 263684 - protein, 15 aa, Artificial Sequence
  Description of Artificial Sequence: Synthetic peptide
  Seed: SIGKVCRTLLAKSVF
SIFKVFRTLLKKSVF

SEQ ID NO: 263685 - protein, 15 aa, Artificial Sequence
  Description of Artificial Sequence: Synthetic peptide
  Seed: SIGKVCRTLLAKSVF
SIFKVFRTLLNKSVF

SEQ ID NO: 263686 - protein, 15 aa, Artificial Sequence
  Description of Artificial Sequence: Synthetic peptide
  Seed: SIGKVCRTLLAKSVF
SIFKVFRTLLQKSVF

SEQ ID NO: 263687 - protein, 15 aa, Artificial Sequence
  Description of Artificial Sequence: Synthetic peptide
  Seed: SIGKVCRTLLAKSVF
SIFKVFRTLLRKSVF

SEQ ID NO: 263688 - protein, 15 aa, Artificial Sequence
  Description of Artificial Sequence: Synthetic peptide
  Seed: SIGKVCRTLLAKSVF
SIFKVFRTLLSKSVF

SEQ ID NO: 263689 - protein, 15 aa, Artificial Sequence
  Description of Artificial Sequence: Synthetic peptide
  Seed: SIGKVCRTLLAKSVF
SIFKVFRTLLTKSVF

SEQ ID NO: 263690 - protein, 15 aa, Artificial Sequence
  Description of Artificial Sequence: Synthetic peptide
  Seed: SIGKVCRTLLAKSVF
SIFKVFRTLLVKSVF

SEQ ID NO: 263691 - protein, 15 aa, Artificial Sequence
  Description of Artificial Sequence: Synthetic peptide
  Seed: SIGKVCRTLLAKSVF
SIFKVFRVLLDKSVF

SEQ ID NO: 263692 - protein, 15 aa, Artificial Sequence
  Description of Artificial Sequence: Synthetic peptide
  Seed: SIGKVCRTLLAKSVF
SIFKVFRVLLHKSVF

SEQ ID NO: 263693 - protein, 15 aa, Artificial Sequence
  Description of Artificial Sequence: Synthetic peptide
  Seed: SIGKVCRTLLAKSVF
SIFKVGRALLSKSVF

SEQ ID NO: 263694 - protein, 15 aa, Artificial Sequence
  Description of Artificial Sequence: Synthetic peptide
  Seed: SIGKVCRTLLAKSVF
SIFKVGRHLLAKSVF

SEQ ID NO: 263695 - protein, 15 aa, Artificial Sequence
  Description of Artificial Sequence: Synthetic peptide
  Seed: SIGKVCRTLLAKSVF
SIFKVGRHLLGKSVF

SEQ ID NO: 263696 - protein, 15 aa, Artificial Sequence
  Description of Artificial Sequence: Synthetic peptide
  Seed: SIGKVCRTLLAKSVF
SIFKVGRHLLQKSVF

SEQ ID NO: 263697 - protein, 15 aa, Artificial Sequence
  Description of Artificial Sequence: Synthetic peptide
  Seed: SIGKVCRTLLAKSVF
SIFKVGRHLLSKSVF

SEQ ID NO: 263698 - protein, 15 aa, Artificial Sequence
  Description of Artificial Sequence: Synthetic peptide
  Seed: SIGKVCRTLLAKSVF
SIFKVGRKLLAKSVF

SEQ ID NO: 263699 - protein, 15 aa, Artificial Sequence
  Description of Artificial Sequence: Synthetic peptide
  Seed: SIGKVCRTLLAKSVF
SIFKVGRKLLEKSVF

SEQ ID NO: 263700 - protein, 15 aa, Artificial Sequence
  Description of Artificial Sequence: Synthetic peptide
  Seed: SIGKVCRTLLAKSVF
SIFKVGRKLLFKSVF

SEQ ID NO: 263701 - protein, 15 aa, Artificial Sequence
  Description of Artificial Sequence: Synthetic peptide
  Seed: SIGKVCRTLLAKSVF
SIFKVGRKLLGKSVF

SEQ ID NO: 263702 - protein, 15 aa, Artificial Sequence
  Description of Artificial Sequence: Synthetic peptide
  Seed: SIGKVCRTLLAKSVF
SIFKVGRKLLHKSVF

SEQ ID NO: 263703 - protein, 15 aa, Artificial Sequence
  Description of Artificial Sequence: Synthetic peptide
  Seed: SIGKVCRTLLAKSVF
SIFKVGRKLLIKSVF

SEQ ID NO: 263704 - protein, 15 aa, Artificial Sequence
  Description of Artificial Sequence: Synthetic peptide
  Seed: SIGKVCRTLLAKSVF
SIFKVGRKLLKKSVF

SEQ ID NO: 263705 - protein, 15 aa, Artificial Sequence
  Description of Artificial Sequence: Synthetic peptide
  Seed: SIGKVCRTLLAKSVF
SIFKVGRKLLLKSVF

SEQ ID NO: 263706 - protein, 15 aa, Artificial Sequence
  Description of Artificial Sequence: Synthetic peptide
  Seed: SIGKVCRTLLAKSVF
SIFKVGRKLLMKSVF

SEQ ID NO: 263707 - protein, 15 aa, Artificial Sequence
  Description of Artificial Sequence: Synthetic peptide
  Seed: SIGKVCRTLLAKSVF
SIFKVGRKLLNKSVF

SEQ ID NO: 263708 - protein, 15 aa, Artificial Sequence
  Description of Artificial Sequence: Synthetic peptide
  Seed: SIGKVCRTLLAKSVF
SIFKVGRKLLPKSVF

SEQ ID NO: 263709 - protein, 15 aa, Artificial Sequence
  Description of Artificial Sequence: Synthetic peptide
  Seed: SIGKVCRTLLAKSVF
SIFKVGRKLLQKSVF

SEQ ID NO: 263710 - protein, 15 aa, Artificial Sequence
  Description of Artificial Sequence: Synthetic peptide
  Seed: SIGKVCRTLLAKSVF
SIFKVGRKLLRKSVF

SEQ ID NO: 263711 - protein, 15 aa, Artificial Sequence
  Description of Artificial Sequence: Synthetic peptide
  Seed: SIGKVCRTLLAKSVF
SIFKVGRKLLSKSVF

SEQ ID NO: 263712 - protein, 15 aa, Artificial Sequence
  Description of Artificial Sequence: Synthetic peptide
  Seed: SIGKVCRTLLAKSVF
SIFKVGRKLLTKSVF

SEQ ID NO: 263713 - protein, 15 aa, Artificial Sequence
  Description of Artificial Sequence: Synthetic peptide
  Seed: SIGKVCRTLLAKSVF
SIFKVGRKLLVKSVF

SEQ ID NO: 263714 - protein, 15 aa, Artificial Sequence
  Description of Artificial Sequence: Synthetic peptide
  Seed: SIGKVCRTLLAKSVF
SIFKVGRKLLYKSVF

SEQ ID NO: 263715 - protein, 15 aa, Artificial Sequence
  Description of Artificial Sequence: Synthetic peptide
  Seed: SIGKVCRTLLAKSVF
SIFKVGRNLLAKSVF

SEQ ID NO: 263716 - protein, 15 aa, Artificial Sequence
  Description of Artificial Sequence: Synthetic peptide
  Seed: SIGKVCRTLLAKSVF
SIFKVGRNLLDKSVF

SEQ ID NO: 263717 - protein, 15 aa, Artificial Sequence
  Description of Artificial Sequence: Synthetic peptide
  Seed: SIGKVCRTLLAKSVF
SIFKVGRNLLSKSVF

SEQ ID NO: 263718 - protein, 15 aa, Artificial Sequence
  Description of Artificial Sequence: Synthetic peptide
  Seed: SIGKVCRTLLAKSVF
SIFKVGRRLLAKSVF

SEQ ID NO: 263719 - protein, 15 aa, Artificial Sequence
  Description of Artificial Sequence: Synthetic peptide
  Seed: SIGKVCRTLLAKSVF
SIFKVGRRLLCKSVF

SEQ ID NO: 263720 - protein, 15 aa, Artificial Sequence
  Description of Artificial Sequence: Synthetic peptide
  Seed: SIGKVCRTLLAKSVF
SIFKVGRRLLDKSVF

SEQ ID NO: 263721 - protein, 15 aa, Artificial Sequence
  Description of Artificial Sequence: Synthetic peptide
  Seed: SIGKVCRTLLAKSVF
SIFKVGRRLLEKSVF

SEQ ID NO: 263722 - protein, 15 aa, Artificial Sequence
  Description of Artificial Sequence: Synthetic peptide
  Seed: SIGKVCRTLLAKSVF
SIFKVGRRLLGKSVF

SEQ ID NO: 263723 - protein, 15 aa, Artificial Sequence
  Description of Artificial Sequence: Synthetic peptide
  Seed: SIGKVCRTLLAKSVF
SIFKVGRRLLHKSVF

SEQ ID NO: 263724 - protein, 15 aa, Artificial Sequence
  Description of Artificial Sequence: Synthetic peptide
  Seed: SIGKVCRTLLAKSVF
SIFKVGRRLLIKSVF

SEQ ID NO: 263725 - protein, 15 aa, Artificial Sequence
  Description of Artificial Sequence: Synthetic peptide
  Seed: SIGKVCRTLLAKSVF
SIFKVGRRLLKKSVF

SEQ ID NO: 263726 - protein, 15 aa, Artificial Sequence
  Description of Artificial Sequence: Synthetic peptide
  Seed: SIGKVCRTLLAKSVF
SIFKVGRRLLLKSVF

SEQ ID NO: 263727 - protein, 15 aa, Artificial Sequence
  Description of Artificial Sequence: Synthetic peptide
  Seed: SIGKVCRTLLAKSVF
SIFKVGRRLLMKSVF

SEQ ID NO: 263728 - protein, 15 aa, Artificial Sequence
  Description of Artificial Sequence: Synthetic peptide
  Seed: SIGKVCRTLLAKSVF
SIFKVGRRLLNKSVF

SEQ ID NO: 263729 - protein, 15 aa, Artificial Sequence
  Description of Artificial Sequence: Synthetic peptide
  Seed: SIGKVCRTLLAKSVF
SIFKVGRRLLPKSVF

SEQ ID NO: 263730 - protein, 15 aa, Artificial Sequence
  Description of Artificial Sequence: Synthetic peptide
  Seed: SIGKVCRTLLAKSVF
SIFKVGRRLLQKSVF

SEQ ID NO: 263731 - protein, 15 aa, Artificial Sequence
  Description of Artificial Sequence: Synthetic peptide
  Seed: SIGKVCRTLLAKSVF
SIFKVGRRLLRKSVF

SEQ ID NO: 263732 - protein, 15 aa, Artificial Sequence
  Description of Artificial Sequence: Synthetic peptide
  Seed: SIGKVCRTLLAKSVF
SIFKVGRRLLSKSVF

SEQ ID NO: 263733 - protein, 15 aa, Artificial Sequence
  Description of Artificial Sequence: Synthetic peptide
  Seed: SIGKVCRTLLAKSVF
SIFKVGRRLLTKSVF

SEQ ID NO: 263734 - protein, 15 aa, Artificial Sequence
  Description of Artificial Sequence: Synthetic peptide
  Seed: SIGKVCRTLLAKSVF
SIFKVGRRLLVKSVF

SEQ ID NO: 263735 - protein, 15 aa, Artificial Sequence
  Description of Artificial Sequence: Synthetic peptide
  Seed: SIGKVCRTLLAKSVF
SIFKVGRRLLYKSVF

SEQ ID NO: 263736 - protein, 15 aa, Artificial Sequence
  Description of Artificial Sequence: Synthetic peptide
  Seed: SIGKVCRTLLAKSVF
SIFKVGRSLLAKSVF

SEQ ID NO: 263737 - protein, 15 aa, Artificial Sequence
  Description of Artificial Sequence: Synthetic peptide
  Seed: SIGKVCRTLLAKSVF
SIFKVGRSLLSKSVF

SEQ ID NO: 263738 - protein, 15 aa, Artificial Sequence
  Description of Artificial Sequence: Synthetic peptide
  Seed: SIGKVCRTLLAKSVF
SIFKVGRTLLAKSVF

SEQ ID NO: 263739 - protein, 15 aa, Artificial Sequence
  Description of Artificial Sequence: Synthetic peptide
  Seed: SIGKVCRTLLAKSVF
SIFKVGRTLLDKSVF

SEQ ID NO: 263740 - protein, 15 aa, Artificial Sequence
  Description of Artificial Sequence: Synthetic peptide
  Seed: SIGKVCRTLLAKSVF
SIFKVGRTLLRKSVF

SEQ ID NO: 263741 - protein, 15 aa, Artificial Sequence
  Description of Artificial Sequence: Synthetic peptide
  Seed: SIGKVCRTLLAKSVF
SIFKVGRTLLSKSVF

SEQ ID NO: 263742 - protein, 15 aa, Artificial Sequence
  Description of Artificial Sequence: Synthetic peptide
  Seed: SIGKVCRTLLAKSVF
SIFKVHRALLAKSVF

SEQ ID NO: 263743 - protein, 15 aa, Artificial Sequence
  Description of Artificial Sequence: Synthetic peptide
  Seed: SIGKVCRTLLAKSVF
SIFKVHRALLGKSVF

SEQ ID NO: 263744 - protein, 15 aa, Artificial Sequence
  Description of Artificial Sequence: Synthetic peptide
  Seed: SIGKVCRTLLAKSVF
SIFKVHRALLHKSVF

SEQ ID NO: 263745 - protein, 15 aa, Artificial Sequence
  Description of Artificial Sequence: Synthetic peptide
  Seed: SIGKVCRTLLAKSVF
SIFKVHRALLKKSVF

SEQ ID NO: 263746 - protein, 15 aa, Artificial Sequence
  Description of Artificial Sequence: Synthetic peptide
  Seed: SIGKVCRTLLAKSVF
SIFKVHRALLQKSVF

SEQ ID NO: 263747 - protein, 15 aa, Artificial Sequence
  Description of Artificial Sequence: Synthetic peptide
  Seed: SIGKVCRTLLAKSVF
SIFKVHRALLRKSVF

SEQ ID NO: 263748 - protein, 15 aa, Artificial Sequence
  Description of Artificial Sequence: Synthetic peptide
  Seed: SIGKVCRTLLAKSVF
SIFKVHRALLSKSVF

SEQ ID NO: 263749 - protein, 15 aa, Artificial Sequence
  Description of Artificial Sequence: Synthetic peptide
  Seed: SIGKVCRTLLAKSVF
SIFKVHRALLYKSVF

SEQ ID NO: 263750 - protein, 15 aa, Artificial Sequence
  Description of Artificial Sequence: Synthetic peptide
  Seed: SIGKVCRTLLAKSVF
SIFKVHRCLLRKSVF

SEQ ID NO: 263751 - protein, 15 aa, Artificial Sequence
  Description of Artificial Sequence: Synthetic peptide
  Seed: SIGKVCRTLLAKSVF
SIFKVHRGLLGKSVF

SEQ ID NO: 263752 - protein, 15 aa, Artificial Sequence
  Description of Artificial Sequence: Synthetic peptide
  Seed: SIGKVCRTLLAKSVF
SIFKVHRGLLQKSVF

SEQ ID NO: 263753 - protein, 15 aa, Artificial Sequence
  Description of Artificial Sequence: Synthetic peptide
  Seed: SIGKVCRTLLAKSVF
SIFKVHRHLLAKSVF

SEQ ID NO: 263754 - protein, 15 aa, Artificial Sequence
  Description of Artificial Sequence: Synthetic peptide
  Seed: SIGKVCRTLLAKSVF
SIFKVHRHLLGKSVF

SEQ ID NO: 263755 - protein, 15 aa, Artificial Sequence
  Description of Artificial Sequence: Synthetic peptide
  Seed: SIGKVCRTLLAKSVF
SIFKVHRHLLQKSVF

SEQ ID NO: 263756 - protein, 15 aa, Artificial Sequence
  Description of Artificial Sequence: Synthetic peptide
  Seed: SIGKVCRTLLAKSVF
SIFKVHRHLLRKSVF

SEQ ID NO: 263757 - protein, 15 aa, Artificial Sequence
  Description of Artificial Sequence: Synthetic peptide
  Seed: SIGKVCRTLLAKSVF
SIFKVHRHLLSKSVF

SEQ ID NO: 263758 - protein, 15 aa, Artificial Sequence
  Description of Artificial Sequence: Synthetic peptide
  Seed: SIGKVCRTLLAKSVF
SIFKVHRHLLYKSVF

SEQ ID NO: 263759 - protein, 15 aa, Artificial Sequence
  Description of Artificial Sequence: Synthetic peptide
  Seed: SIGKVCRTLLAKSVF
SIFKVHRILLAKSVF

SEQ ID NO: 263760 - protein, 15 aa, Artificial Sequence
  Description of Artificial Sequence: Synthetic peptide
  Seed: SIGKVCRTLLAKSVF
SIFKVHRILLGKSVF

SEQ ID NO: 263761 - protein, 15 aa, Artificial Sequence
  Description of Artificial Sequence: Synthetic peptide
  Seed: SIGKVCRTLLAKSVF
SIFKVHRILLQKSVF

SEQ ID NO: 263762 - protein, 15 aa, Artificial Sequence
  Description of Artificial Sequence: Synthetic peptide
  Seed: SIGKVCRTLLAKSVF
SIFKVHRILLRKSVF

SEQ ID NO: 263763 - protein, 15 aa, Artificial Sequence
  Description of Artificial Sequence: Synthetic peptide
  Seed: SIGKVCRTLLAKSVF
SIFKVHRILLSKSVF

SEQ ID NO: 263764 - protein, 15 aa, Artificial Sequence
  Description of Artificial Sequence: Synthetic peptide
  Seed: SIGKVCRTLLAKSVF
SIFKVHRKLLAKSVF

SEQ ID NO: 263765 - protein, 15 aa, Artificial Sequence
  Description of Artificial Sequence: Synthetic peptide
  Seed: SIGKVCRTLLAKSVF
SIFKVHRKLLCKSVF

SEQ ID NO: 263766 - protein, 15 aa, Artificial Sequence
  Description of Artificial Sequence: Synthetic peptide
  Seed: SIGKVCRTLLAKSVF
SIFKVHRKLLDKSVF

SEQ ID NO: 263767 - protein, 15 aa, Artificial Sequence
  Description of Artificial Sequence: Synthetic peptide
  Seed: SIGKVCRTLLAKSVF
SIFKVHRKLLEKSVF

SEQ ID NO: 263768 - protein, 15 aa, Artificial Sequence
  Description of Artificial Sequence: Synthetic peptide
  Seed: SIGKVCRTLLAKSVF
SIFKVHRKLLFKSVF

SEQ ID NO: 263769 - protein, 15 aa, Artificial Sequence
  Description of Artificial Sequence: Synthetic peptide
  Seed: SIGKVCRTLLAKSVF
SIFKVHRKLLGKSVF

SEQ ID NO: 263770 - protein, 15 aa, Artificial Sequence
  Description of Artificial Sequence: Synthetic peptide
  Seed: SIGKVCRTLLAKSVF
SIFKVHRKLLHKSVF

SEQ ID NO: 263771 - protein, 15 aa, Artificial Sequence
  Description of Artificial Sequence: Synthetic peptide
  Seed: SIGKVCRTLLAKSVF
SIFKVHRKLLIKSVF

SEQ ID NO: 263772 - protein, 15 aa, Artificial Sequence
  Description of Artificial Sequence: Synthetic peptide
  Seed: SIGKVCRTLLAKSVF
SIFKVHRKLLKKSVF

SEQ ID NO: 263773 - protein, 15 aa, Artificial Sequence
  Description of Artificial Sequence: Synthetic peptide
  Seed: SIGKVCRTLLAKSVF
SIFKVHRKLLLKSVF

SEQ ID NO: 263774 - protein, 15 aa, Artificial Sequence
  Description of Artificial Sequence: Synthetic peptide
  Seed: SIGKVCRTLLAKSVF
SIFKVHRKLLMKSVF

SEQ ID NO: 263775 - protein, 15 aa, Artificial Sequence
  Description of Artificial Sequence: Synthetic peptide
  Seed: SIGKVCRTLLAKSVF
SIFKVHRKLLNKSVF

SEQ ID NO: 263776 - protein, 15 aa, Artificial Sequence
  Description of Artificial Sequence: Synthetic peptide
  Seed: SIGKVCRTLLAKSVF
SIFKVHRKLLPKSVF

SEQ ID NO: 263777 - protein, 15 aa, Artificial Sequence
  Description of Artificial Sequence: Synthetic peptide
  Seed: SIGKVCRTLLAKSVF
SIFKVHRKLLQKSVF

SEQ ID NO: 263778 - protein, 15 aa, Artificial Sequence
  Description of Artificial Sequence: Synthetic peptide
  Seed: SIGKVCRTLLAKSVF
SIFKVHRKLLRKSVF

SEQ ID NO: 263779 - protein, 15 aa, Artificial Sequence
  Description of Artificial Sequence: Synthetic peptide
  Seed: SIGKVCRTLLAKSVF
SIFKVHRKLLSKSVF

SEQ ID NO: 263780 - protein, 15 aa, Artificial Sequence
  Description of Artificial Sequence: Synthetic peptide
  Seed: SIGKVCRTLLAKSVF
SIFKVHRKLLTKSVF

SEQ ID NO: 263781 - protein, 15 aa, Artificial Sequence
  Description of Artificial Sequence: Synthetic peptide
  Seed: SIGKVCRTLLAKSVF
SIFKVHRKLLVKSVF

SEQ ID NO: 263782 - protein, 15 aa, Artificial Sequence
  Description of Artificial Sequence: Synthetic peptide
  Seed: SIGKVCRTLLAKSVF
SIFKVHRKLLWKSVF

SEQ ID NO: 263783 - protein, 15 aa, Artificial Sequence
  Description of Artificial Sequence: Synthetic peptide
  Seed: SIGKVCRTLLAKSVF
SIFKVHRKLLYKSVF

SEQ ID NO: 263784 - protein, 15 aa, Artificial Sequence
  Description of Artificial Sequence: Synthetic peptide
  Seed: SIGKVCRTLLAKSVF
SIFKVHRLLLRKSVF

SEQ ID NO: 263785 - protein, 15 aa, Artificial Sequence
  Description of Artificial Sequence: Synthetic peptide
  Seed: SIGKVCRTLLAKSVF
SIFKVHRMLLGKSVF

SEQ ID NO: 263786 - protein, 15 aa, Artificial Sequence
  Description of Artificial Sequence: Synthetic peptide
  Seed: SIGKVCRTLLAKSVF
SIFKVHRMLLRKSVF

SEQ ID NO: 263787 - protein, 15 aa, Artificial Sequence
  Description of Artificial Sequence: Synthetic peptide
  Seed: SIGKVCRTLLAKSVF
SIFKVHRNLLAKSVF

SEQ ID NO: 263788 - protein, 15 aa, Artificial Sequence
  Description of Artificial Sequence: Synthetic peptide
  Seed: SIGKVCRTLLAKSVF
SIFKVHRNLLGKSVF

SEQ ID NO: 263789 - protein, 15 aa, Artificial Sequence
  Description of Artificial Sequence: Synthetic peptide
  Seed: SIGKVCRTLLAKSVF
SIFKVHRNLLHKSVF

SEQ ID NO: 263790 - protein, 15 aa, Artificial Sequence
  Description of Artificial Sequence: Synthetic peptide
  Seed: SIGKVCRTLLAKSVF
SIFKVHRNLLQKSVF

SEQ ID NO: 263791 - protein, 15 aa, Artificial Sequence
  Description of Artificial Sequence: Synthetic peptide
  Seed: SIGKVCRTLLAKSVF
SIFKVHRNLLRKSVF

SEQ ID NO: 263792 - protein, 15 aa, Artificial Sequence
  Description of Artificial Sequence: Synthetic peptide
  Seed: SIGKVCRTLLAKSVF
SIFKVHRNLLSKSVF

SEQ ID NO: 263793 - protein, 15 aa, Artificial Sequence
  Description of Artificial Sequence: Synthetic peptide
  Seed: SIGKVCRTLLAKSVF
SIFKVHRPLLAKSVF

SEQ ID NO: 263794 - protein, 15 aa, Artificial Sequence
  Description of Artificial Sequence: Synthetic peptide
  Seed: SIGKVCRTLLAKSVF
SIFKVHRPLLGKSVF

SEQ ID NO: 263795 - protein, 15 aa, Artificial Sequence
  Description of Artificial Sequence: Synthetic peptide
  Seed: SIGKVCRTLLAKSVF
SIFKVHRPLLQKSVF

SEQ ID NO: 263796 - protein, 15 aa, Artificial Sequence
  Description of Artificial Sequence: Synthetic peptide
  Seed: SIGKVCRTLLAKSVF
SIFKVHRPLLRKSVF

SEQ ID NO: 263797 - protein, 15 aa, Artificial Sequence
  Description of Artificial Sequence: Synthetic peptide
  Seed: SIGKVCRTLLAKSVF
SIFKVHRPLLSKSVF

SEQ ID NO: 263798 - protein, 15 aa, Artificial Sequence
  Description of Artificial Sequence: Synthetic peptide
  Seed: SIGKVCRTLLAKSVF
SIFKVHRPLLYKSVF

SEQ ID NO: 263799 - protein, 15 aa, Artificial Sequence
  Description of Artificial Sequence: Synthetic peptide
  Seed: SIGKVCRTLLAKSVF
SIFKVHRQLLAKSVF

SEQ ID NO: 263800 - protein, 15 aa, Artificial Sequence
  Description of Artificial Sequence: Synthetic peptide
  Seed: SIGKVCRTLLAKSVF
SIFKVHRQLLGKSVF

SEQ ID NO: 263801 - protein, 15 aa, Artificial Sequence
  Description of Artificial Sequence: Synthetic peptide
  Seed: SIGKVCRTLLAKSVF
SIFKVHRQLLQKSVF

SEQ ID NO: 263802 - protein, 15 aa, Artificial Sequence
  Description of Artificial Sequence: Synthetic peptide
  Seed: SIGKVCRTLLAKSVF
SIFKVHRQLLRKSVF

SEQ ID NO: 263803 - protein, 15 aa, Artificial Sequence
  Description of Artificial Sequence: Synthetic peptide
  Seed: SIGKVCRTLLAKSVF
SIFKVHRQLLSKSVF

SEQ ID NO: 263804 - protein, 15 aa, Artificial Sequence
  Description of Artificial Sequence: Synthetic peptide
  Seed: SIGKVCRTLLAKSVF
SIFKVHRRLLAKSVF

SEQ ID NO: 263805 - protein, 15 aa, Artificial Sequence
  Description of Artificial Sequence: Synthetic peptide
  Seed: SIGKVCRTLLAKSVF
SIFKVHRRLLCKSVF

SEQ ID NO: 263806 - protein, 15 aa, Artificial Sequence
  Description of Artificial Sequence: Synthetic peptide
  Seed: SIGKVCRTLLAKSVF
SIFKVHRRLLDKSVF

SEQ ID NO: 263807 - protein, 15 aa, Artificial Sequence
  Description of Artificial Sequence: Synthetic peptide
  Seed: SIGKVCRTLLAKSVF
SIFKVHRRLLEKSVF

SEQ ID NO: 263808 - protein, 15 aa, Artificial Sequence
  Description of Artificial Sequence: Synthetic peptide
  Seed: SIGKVCRTLLAKSVF
SIFKVHRRLLFKSVF

SEQ ID NO: 263809 - protein, 15 aa, Artificial Sequence
  Description of Artificial Sequence: Synthetic peptide
  Seed: SIGKVCRTLLAKSVF
SIFKVHRRLLGKSVF

SEQ ID NO: 263810 - protein, 15 aa, Artificial Sequence
  Description of Artificial Sequence: Synthetic peptide
  Seed: SIGKVCRTLLAKSVF
SIFKVHRRLLHKSVF

SEQ ID NO: 263811 - protein, 15 aa, Artificial Sequence
  Description of Artificial Sequence: Synthetic peptide
  Seed: SIGKVCRTLLAKSVF
SIFKVHRRLLIKSVF

SEQ ID NO: 263812 - protein, 15 aa, Artificial Sequence
  Description of Artificial Sequence: Synthetic peptide
  Seed: SIGKVCRTLLAKSVF
SIFKVHRRLLKKSVF

SEQ ID NO: 263813 - protein, 15 aa, Artificial Sequence
  Description of Artificial Sequence: Synthetic peptide
  Seed: SIGKVCRTLLAKSVF
SIFKVHRRLLLKSVF

SEQ ID NO: 263814 - protein, 15 aa, Artificial Sequence
  Description of Artificial Sequence: Synthetic peptide
  Seed: SIGKVCRTLLAKSVF
SIFKVHRRLLMKSVF

SEQ ID NO: 263815 - protein, 15 aa, Artificial Sequence
  Description of Artificial Sequence: Synthetic peptide
  Seed: SIGKVCRTLLAKSVF
SIFKVHRRLLNKSVF

SEQ ID NO: 263816 - protein, 15 aa, Artificial Sequence
  Description of Artificial Sequence: Synthetic peptide
  Seed: SIGKVCRTLLAKSVF
SIFKVHRRLLPKSVF

SEQ ID NO: 263817 - protein, 15 aa, Artificial Sequence
  Description of Artificial Sequence: Synthetic peptide
  Seed: SIGKVCRTLLAKSVF
SIFKVHRRLLQKSVF

SEQ ID NO: 263818 - protein, 15 aa, Artificial Sequence
  Description of Artificial Sequence: Synthetic peptide
  Seed: SIGKVCRTLLAKSVF
SIFKVHRRLLRKSVF

SEQ ID NO: 263819 - protein, 15 aa, Artificial Sequence
  Description of Artificial Sequence: Synthetic peptide
  Seed: SIGKVCRTLLAKSVF
SIFKVHRRLLSKSVF

SEQ ID NO: 263820 - protein, 15 aa, Artificial Sequence
  Description of Artificial Sequence: Synthetic peptide
  Seed: SIGKVCRTLLAKSVF
SIFKVHRRLLTKSVF

SEQ ID NO: 263821 - protein, 15 aa, Artificial Sequence
  Description of Artificial Sequence: Synthetic peptide
  Seed: SIGKVCRTLLAKSVF
SIFKVHRRLLVKSVF

SEQ ID NO: 263822 - protein, 15 aa, Artificial Sequence
  Description of Artificial Sequence: Synthetic peptide
  Seed: SIGKVCRTLLAKSVF
SIFKVHRRLLWKSVF

SEQ ID NO: 263823 - protein, 15 aa, Artificial Sequence
  Description of Artificial Sequence: Synthetic peptide
  Seed: SIGKVCRTLLAKSVF
SIFKVHRRLLYKSVF

SEQ ID NO: 263824 - protein, 15 aa, Artificial Sequence
  Description of Artificial Sequence: Synthetic peptide
  Seed: SIGKVCRTLLAKSVF
SIFKVHRSLLAKSVF

SEQ ID NO: 263825 - protein, 15 aa, Artificial Sequence
  Description of Artificial Sequence: Synthetic peptide
  Seed: SIGKVCRTLLAKSVF
SIFKVHRSLLGKSVF

SEQ ID NO: 263826 - protein, 15 aa, Artificial Sequence
  Description of Artificial Sequence: Synthetic peptide
  Seed: SIGKVCRTLLAKSVF
SIFKVHRSLLHKSVF

SEQ ID NO: 263827 - protein, 15 aa, Artificial Sequence
  Description of Artificial Sequence: Synthetic peptide
  Seed: SIGKVCRTLLAKSVF
SIFKVHRSLLKKSVF

SEQ ID NO: 263828 - protein, 15 aa, Artificial Sequence
  Description of Artificial Sequence: Synthetic peptide
  Seed: SIGKVCRTLLAKSVF
SIFKVHRSLLLKSVF

SEQ ID NO: 263829 - protein, 15 aa, Artificial Sequence
  Description of Artificial Sequence: Synthetic peptide
  Seed: SIGKVCRTLLAKSVF
SIFKVHRSLLMKSVF

SEQ ID NO: 263830 - protein, 15 aa, Artificial Sequence
  Description of Artificial Sequence: Synthetic peptide
  Seed: SIGKVCRTLLAKSVF
SIFKVHRSLLQKSVF

SEQ ID NO: 263831 - protein, 15 aa, Artificial Sequence
  Description of Artificial Sequence: Synthetic peptide
  Seed: SIGKVCRTLLAKSVF
SIFKVHRSLLRKSVF

SEQ ID NO: 263832 - protein, 15 aa, Artificial Sequence
  Description of Artificial Sequence: Synthetic peptide
  Seed: SIGKVCRTLLAKSVF
SIFKVHRSLLSKSVF

SEQ ID NO: 263833 - protein, 15 aa, Artificial Sequence
  Description of Artificial Sequence: Synthetic peptide
  Seed: SIGKVCRTLLAKSVF
SIFKVHRSLLVKSVF

SEQ ID NO: 263834 - protein, 15 aa, Artificial Sequence
  Description of Artificial Sequence: Synthetic peptide
  Seed: SIGKVCRTLLAKSVF
SIFKVHRSLLYKSVF

SEQ ID NO: 263835 - protein, 15 aa, Artificial Sequence
  Description of Artificial Sequence: Synthetic peptide
  Seed: SIGKVCRTLLAKSVF
SIFKVHRTLLAKSVF

SEQ ID NO: 263836 - protein, 15 aa, Artificial Sequence
  Description of Artificial Sequence: Synthetic peptide
  Seed: SIGKVCRTLLAKSVF
SIFKVHRTLLGKSVF

SEQ ID NO: 263837 - protein, 15 aa, Artificial Sequence
  Description of Artificial Sequence: Synthetic peptide
  Seed: SIGKVCRTLLAKSVF
SIFKVHRTLLHKSVF

SEQ ID NO: 263838 - protein, 15 aa, Artificial Sequence
  Description of Artificial Sequence: Synthetic peptide
  Seed: SIGKVCRTLLAKSVF
SIFKVHRTLLKKSVF

SEQ ID NO: 263839 - protein, 15 aa, Artificial Sequence
  Description of Artificial Sequence: Synthetic peptide
  Seed: SIGKVCRTLLAKSVF
SIFKVHRTLLMKSVF

SEQ ID NO: 263840 - protein, 15 aa, Artificial Sequence
  Description of Artificial Sequence: Synthetic peptide
  Seed: SIGKVCRTLLAKSVF
SIFKVHRTLLQKSVF

SEQ ID NO: 263841 - protein, 15 aa, Artificial Sequence
  Description of Artificial Sequence: Synthetic peptide
  Seed: SIGKVCRTLLAKSVF
SIFKVHRTLLRKSVF

SEQ ID NO: 263842 - protein, 15 aa, Artificial Sequence
  Description of Artificial Sequence: Synthetic peptide
  Seed: SIGKVCRTLLAKSVF
SIFKVHRTLLSKSVF

SEQ ID NO: 263843 - protein, 15 aa, Artificial Sequence
  Description of Artificial Sequence: Synthetic peptide
  Seed: SIGKVCRTLLAKSVF
SIFKVHRTLLYKSVF

SEQ ID NO: 263844 - protein, 15 aa, Artificial Sequence
  Description of Artificial Sequence: Synthetic peptide
  Seed: SIGKVCRTLLAKSVF
SIFKVHRVLLAKSVF

SEQ ID NO: 263845 - protein, 15 aa, Artificial Sequence
  Description of Artificial Sequence: Synthetic peptide
  Seed: SIGKVCRTLLAKSVF
SIFKVHRVLLGKSVF

SEQ ID NO: 263846 - protein, 15 aa, Artificial Sequence
  Description of Artificial Sequence: Synthetic peptide
  Seed: SIGKVCRTLLAKSVF
SIFKVHRVLLHKSVF

SEQ ID NO: 263847 - protein, 15 aa, Artificial Sequence
  Description of Artificial Sequence: Synthetic peptide
  Seed: SIGKVCRTLLAKSVF
SIFKVHRVLLQKSVF

SEQ ID NO: 263848 - protein, 15 aa, Artificial Sequence
  Description of Artificial Sequence: Synthetic peptide
  Seed: SIGKVCRTLLAKSVF
SIFKVHRVLLRKSVF

SEQ ID NO: 263849 - protein, 15 aa, Artificial Sequence
  Description of Artificial Sequence: Synthetic peptide
  Seed: SIGKVCRTLLAKSVF
SIFKVHRVLLSKSVF

SEQ ID NO: 263850 - protein, 15 aa, Artificial Sequence
  Description of Artificial Sequence: Synthetic peptide
  Seed: SIGKVCRTLLAKSVF
SIFKVIRALLAKSVF

SEQ ID NO: 263851 - protein, 15 aa, Artificial Sequence
  Description of Artificial Sequence: Synthetic peptide
  Seed: SIGKVCRTLLAKSVF
SIFKVIRALLDKSVF

SEQ ID NO: 263852 - protein, 15 aa, Artificial Sequence
  Description of Artificial Sequence: Synthetic peptide
  Seed: SIGKVCRTLLAKSVF
SIFKVIRALLEKSVF

SEQ ID NO: 263853 - protein, 15 aa, Artificial Sequence
  Description of Artificial Sequence: Synthetic peptide
  Seed: SIGKVCRTLLAKSVF
SIFKVIRALLGKSVF

SEQ ID NO: 263854 - protein, 15 aa, Artificial Sequence
  Description of Artificial Sequence: Synthetic peptide
  Seed: SIGKVCRTLLAKSVF
SIFKVIRALLHKSVF

SEQ ID NO: 263855 - protein, 15 aa, Artificial Sequence
  Description of Artificial Sequence: Synthetic peptide
  Seed: SIGKVCRTLLAKSVF
SIFKVIRALLNKSVF

SEQ ID NO: 263856 - protein, 15 aa, Artificial Sequence
  Description of Artificial Sequence: Synthetic peptide
  Seed: SIGKVCRTLLAKSVF
SIFKVIRALLPKSVF

SEQ ID NO: 263857 - protein, 15 aa, Artificial Sequence
  Description of Artificial Sequence: Synthetic peptide
  Seed: SIGKVCRTLLAKSVF
SIFKVIRALLQKSVF

SEQ ID NO: 263858 - protein, 15 aa, Artificial Sequence
  Description of Artificial Sequence: Synthetic peptide
  Seed: SIGKVCRTLLAKSVF
SIFKVIRALLSKSVF

SEQ ID NO: 263859 - protein, 15 aa, Artificial Sequence
  Description of Artificial Sequence: Synthetic peptide
  Seed: SIGKVCRTLLAKSVF
SIFKVIRALLTKSVF

SEQ ID NO: 263860 - protein, 15 aa, Artificial Sequence
  Description of Artificial Sequence: Synthetic peptide
  Seed: SIGKVCRTLLAKSVF
SIFKVIRALLVKSVF

SEQ ID NO: 263861 - protein, 15 aa, Artificial Sequence
  Description of Artificial Sequence: Synthetic peptide
  Seed: SIGKVCRTLLAKSVF
SIFKVIRALLYKSVF

SEQ ID NO: 263862 - protein, 15 aa, Artificial Sequence
  Description of Artificial Sequence: Synthetic peptide
  Seed: SIGKVCRTLLAKSVF
SIFKVIRDLLAKSVF

SEQ ID NO: 263863 - protein, 15 aa, Artificial Sequence
  Description of Artificial Sequence: Synthetic peptide
  Seed: SIGKVCRTLLAKSVF
SIFKVIRDLLDKSVF

SEQ ID NO: 263864 - protein, 15 aa, Artificial Sequence
  Description of Artificial Sequence: Synthetic peptide
  Seed: SIGKVCRTLLAKSVF
SIFKVIRDLLEKSVF

SEQ ID NO: 263865 - protein, 15 aa, Artificial Sequence
  Description of Artificial Sequence: Synthetic peptide
  Seed: SIGKVCRTLLAKSVF
SIFKVIRDLLGKSVF

SEQ ID NO: 263866 - protein, 15 aa, Artificial Sequence
  Description of Artificial Sequence: Synthetic peptide
  Seed: SIGKVCRTLLAKSVF
SIFKVIRDLLSKSVF

SEQ ID NO: 263867 - protein, 15 aa, Artificial Sequence
  Description of Artificial Sequence: Synthetic peptide
  Seed: SIGKVCRTLLAKSVF
SIFKVIRDLLTKSVF

SEQ ID NO: 263868 - protein, 15 aa, Artificial Sequence
  Description of Artificial Sequence: Synthetic peptide
  Seed: SIGKVCRTLLAKSVF
SIFKVIRELLAKSVF

SEQ ID NO: 263869 - protein, 15 aa, Artificial Sequence
  Description of Artificial Sequence: Synthetic peptide
  Seed: SIGKVCRTLLAKSVF
SIFKVIRELLHKSVF

SEQ ID NO: 263870 - protein, 15 aa, Artificial Sequence
  Description of Artificial Sequence: Synthetic peptide
  Seed: SIGKVCRTLLAKSVF
SIFKVIRELLSKSVF

SEQ ID NO: 263871 - protein, 15 aa, Artificial Sequence
  Description of Artificial Sequence: Synthetic peptide
  Seed: SIGKVCRTLLAKSVF
SIFKVIRGLLAKSVF

SEQ ID NO: 263872 - protein, 15 aa, Artificial Sequence
  Description of Artificial Sequence: Synthetic peptide
  Seed: SIGKVCRTLLAKSVF
SIFKVIRGLLDKSVF

SEQ ID NO: 263873 - protein, 15 aa, Artificial Sequence
  Description of Artificial Sequence: Synthetic peptide
  Seed: SIGKVCRTLLAKSVF
SIFKVIRGLLEKSVF

SEQ ID NO: 263874 - protein, 15 aa, Artificial Sequence
  Description of Artificial Sequence: Synthetic peptide
  Seed: SIGKVCRTLLAKSVF
SIFKVIRGLLGKSVF

SEQ ID NO: 263875 - protein, 15 aa, Artificial Sequence
  Description of Artificial Sequence: Synthetic peptide
  Seed: SIGKVCRTLLAKSVF
SIFKVIRGLLHKSVF

SEQ ID NO: 263876 - protein, 15 aa, Artificial Sequence
  Description of Artificial Sequence: Synthetic peptide
  Seed: SIGKVCRTLLAKSVF
SIFKVIRGLLKKSVF

SEQ ID NO: 263877 - protein, 15 aa, Artificial Sequence
  Description of Artificial Sequence: Synthetic peptide
  Seed: SIGKVCRTLLAKSVF
SIFKVIRGLLNKSVF

SEQ ID NO: 263878 - protein, 15 aa, Artificial Sequence
  Description of Artificial Sequence: Synthetic peptide
  Seed: SIGKVCRTLLAKSVF
SIFKVIRGLLQKSVF

SEQ ID NO: 263879 - protein, 15 aa, Artificial Sequence
  Description of Artificial Sequence: Synthetic peptide
  Seed: SIGKVCRTLLAKSVF
SIFKVIRGLLRKSVF

SEQ ID NO: 263880 - protein, 15 aa, Artificial Sequence
  Description of Artificial Sequence: Synthetic peptide
  Seed: SIGKVCRTLLAKSVF
SIFKVIRGLLSKSVF

SEQ ID NO: 263881 - protein, 15 aa, Artificial Sequence
  Description of Artificial Sequence: Synthetic peptide
  Seed: SIGKVCRTLLAKSVF
SIFKVIRGLLTKSVF

SEQ ID NO: 263882 - protein, 15 aa, Artificial Sequence
  Description of Artificial Sequence: Synthetic peptide
  Seed: SIGKVCRTLLAKSVF
SIFKVIRGLLVKSVF

SEQ ID NO: 263883 - protein, 15 aa, Artificial Sequence
  Description of Artificial Sequence: Synthetic peptide
  Seed: SIGKVCRTLLAKSVF
SIFKVIRGLLYKSVF

SEQ ID NO: 263884 - protein, 15 aa, Artificial Sequence
  Description of Artificial Sequence: Synthetic peptide
  Seed: SIGKVCRTLLAKSVF
SIFKVIRHLLAKSVF

SEQ ID NO: 263885 - protein, 15 aa, Artificial Sequence
  Description of Artificial Sequence: Synthetic peptide
  Seed: SIGKVCRTLLAKSVF
SIFKVIRHLLDKSVF

SEQ ID NO: 263886 - protein, 15 aa, Artificial Sequence
  Description of Artificial Sequence: Synthetic peptide
  Seed: SIGKVCRTLLAKSVF
SIFKVIRHLLEKSVF

SEQ ID NO: 263887 - protein, 15 aa, Artificial Sequence
  Description of Artificial Sequence: Synthetic peptide
  Seed: SIGKVCRTLLAKSVF
SIFKVIRHLLGKSVF

SEQ ID NO: 263888 - protein, 15 aa, Artificial Sequence
  Description of Artificial Sequence: Synthetic peptide
  Seed: SIGKVCRTLLAKSVF
SIFKVIRHLLHKSVF

SEQ ID NO: 263889 - protein, 15 aa, Artificial Sequence
  Description of Artificial Sequence: Synthetic peptide
  Seed: SIGKVCRTLLAKSVF
SIFKVIRHLLIKSVF

SEQ ID NO: 263890 - protein, 15 aa, Artificial Sequence
  Description of Artificial Sequence: Synthetic peptide
  Seed: SIGKVCRTLLAKSVF
SIFKVIRHLLKKSVF

SEQ ID NO: 263891 - protein, 15 aa, Artificial Sequence
  Description of Artificial Sequence: Synthetic peptide
  Seed: SIGKVCRTLLAKSVF
SIFKVIRHLLLKSVF

SEQ ID NO: 263892 - protein, 15 aa, Artificial Sequence
  Description of Artificial Sequence: Synthetic peptide
  Seed: SIGKVCRTLLAKSVF
SIFKVIRHLLMKSVF

SEQ ID NO: 263893 - protein, 15 aa, Artificial Sequence
  Description of Artificial Sequence: Synthetic peptide
  Seed: SIGKVCRTLLAKSVF
SIFKVIRHLLNKSVF

SEQ ID NO: 263894 - protein, 15 aa, Artificial Sequence
  Description of Artificial Sequence: Synthetic peptide
  Seed: SIGKVCRTLLAKSVF
SIFKVIRHLLPKSVF

SEQ ID NO: 263895 - protein, 15 aa, Artificial Sequence
  Description of Artificial Sequence: Synthetic peptide
  Seed: SIGKVCRTLLAKSVF
SIFKVIRHLLQKSVF

SEQ ID NO: 263896 - protein, 15 aa, Artificial Sequence
  Description of Artificial Sequence: Synthetic peptide
  Seed: SIGKVCRTLLAKSVF
SIFKVIRHLLRKSVF

SEQ ID NO: 263897 - protein, 15 aa, Artificial Sequence
  Description of Artificial Sequence: Synthetic peptide
  Seed: SIGKVCRTLLAKSVF
SIFKVIRHLLSKSVF

SEQ ID NO: 263898 - protein, 15 aa, Artificial Sequence
  Description of Artificial Sequence: Synthetic peptide
  Seed: SIGKVCRTLLAKSVF
SIFKVIRHLLTKSVF

SEQ ID NO: 263899 - protein, 15 aa, Artificial Sequence
  Description of Artificial Sequence: Synthetic peptide
  Seed: SIGKVCRTLLAKSVF
SIFKVIRHLLVKSVF

SEQ ID NO: 263900 - protein, 15 aa, Artificial Sequence
  Description of Artificial Sequence: Synthetic peptide
  Seed: SIGKVCRTLLAKSVF
SIFKVIRHLLYKSVF

SEQ ID NO: 263901 - protein, 15 aa, Artificial Sequence
  Description of Artificial Sequence: Synthetic peptide
  Seed: SIGKVCRTLLAKSVF
SIFKVIRILLDKSVF

SEQ ID NO: 263902 - protein, 15 aa, Artificial Sequence
  Description of Artificial Sequence: Synthetic peptide
  Seed: SIGKVCRTLLAKSVF
SIFKVIRILLHKSVF

SEQ ID NO: 263903 - protein, 15 aa, Artificial Sequence
  Description of Artificial Sequence: Synthetic peptide
  Seed: SIGKVCRTLLAKSVF
SIFKVIRILLSKSVF

SEQ ID NO: 263904 - protein, 15 aa, Artificial Sequence
  Description of Artificial Sequence: Synthetic peptide
  Seed: SIGKVCRTLLAKSVF
SIFKVIRKLLAKSVF

SEQ ID NO: 263905 - protein, 15 aa, Artificial Sequence
  Description of Artificial Sequence: Synthetic peptide
  Seed: SIGKVCRTLLAKSVF
SIFKVIRKLLCKSVF

SEQ ID NO: 263906 - protein, 15 aa, Artificial Sequence
  Description of Artificial Sequence: Synthetic peptide
  Seed: SIGKVCRTLLAKSVF
SIFKVIRKLLDKSVF

SEQ ID NO: 263907 - protein, 15 aa, Artificial Sequence
  Description of Artificial Sequence: Synthetic peptide
  Seed: SIGKVCRTLLAKSVF
SIFKVIRKLLEKSVF

SEQ ID NO: 263908 - protein, 15 aa, Artificial Sequence
  Description of Artificial Sequence: Synthetic peptide
  Seed: SIGKVCRTLLAKSVF
SIFKVIRKLLFKSVF

SEQ ID NO: 263909 - protein, 15 aa, Artificial Sequence
  Description of Artificial Sequence: Synthetic peptide
  Seed: SIGKVCRTLLAKSVF
SIFKVIRKLLGKSVF

SEQ ID NO: 263910 - protein, 15 aa, Artificial Sequence
  Description of Artificial Sequence: Synthetic peptide
  Seed: SIGKVCRTLLAKSVF
SIFKVIRKLLHKSVF

SEQ ID NO: 263911 - protein, 15 aa, Artificial Sequence
  Description of Artificial Sequence: Synthetic peptide
  Seed: SIGKVCRTLLAKSVF
SIFKVIRKLLIKSVF

SEQ ID NO: 263912 - protein, 15 aa, Artificial Sequence
  Description of Artificial Sequence: Synthetic peptide
  Seed: SIGKVCRTLLAKSVF
SIFKVIRKLLKKSVF

SEQ ID NO: 263913 - protein, 15 aa, Artificial Sequence
  Description of Artificial Sequence: Synthetic peptide
  Seed: SIGKVCRTLLAKSVF
SIFKVIRKLLLKSVF

SEQ ID NO: 263914 - protein, 15 aa, Artificial Sequence
  Description of Artificial Sequence: Synthetic peptide
  Seed: SIGKVCRTLLAKSVF
SIFKVIRKLLMKSVF

SEQ ID NO: 263915 - protein, 15 aa, Artificial Sequence
  Description of Artificial Sequence: Synthetic peptide
  Seed: SIGKVCRTLLAKSVF
SIFKVIRKLLNKSVF

SEQ ID NO: 263916 - protein, 15 aa, Artificial Sequence
  Description of Artificial Sequence: Synthetic peptide
  Seed: SIGKVCRTLLAKSVF
SIFKVIRKLLPKSVF

SEQ ID NO: 263917 - protein, 15 aa, Artificial Sequence
  Description of Artificial Sequence: Synthetic peptide
  Seed: SIGKVCRTLLAKSVF
SIFKVIRKLLQKSVF

SEQ ID NO: 263918 - protein, 15 aa, Artificial Sequence
  Description of Artificial Sequence: Synthetic peptide
  Seed: SIGKVCRTLLAKSVF
SIFKVIRKLLRKSVF

SEQ ID NO: 263919 - protein, 15 aa, Artificial Sequence
  Description of Artificial Sequence: Synthetic peptide
  Seed: SIGKVCRTLLAKSVF
SIFKVIRKLLSKSVF

SEQ ID NO: 263920 - protein, 15 aa, Artificial Sequence
  Description of Artificial Sequence: Synthetic peptide
  Seed: SIGKVCRTLLAKSVF
SIFKVIRKLLTKSVF

SEQ ID NO: 263921 - protein, 15 aa, Artificial Sequence
  Description of Artificial Sequence: Synthetic peptide
  Seed: SIGKVCRTLLAKSVF
SIFKVIRKLLVKSVF

SEQ ID NO: 263922 - protein, 15 aa, Artificial Sequence
  Description of Artificial Sequence: Synthetic peptide
  Seed: SIGKVCRTLLAKSVF
SIFKVIRKLLWKSVF

SEQ ID NO: 263923 - protein, 15 aa, Artificial Sequence
  Description of Artificial Sequence: Synthetic peptide
  Seed: SIGKVCRTLLAKSVF
SIFKVIRKLLYKSVF

SEQ ID NO: 263924 - protein, 15 aa, Artificial Sequence
  Description of Artificial Sequence: Synthetic peptide
  Seed: SIGKVCRTLLAKSVF
SIFKVIRMLLHKSVF

SEQ ID NO: 263925 - protein, 15 aa, Artificial Sequence
  Description of Artificial Sequence: Synthetic peptide
  Seed: SIGKVCRTLLAKSVF
SIFKVIRNLLAKSVF

SEQ ID NO: 263926 - protein, 15 aa, Artificial Sequence
  Description of Artificial Sequence: Synthetic peptide
  Seed: SIGKVCRTLLAKSVF
SIFKVIRNLLDKSVF

SEQ ID NO: 263927 - protein, 15 aa, Artificial Sequence
  Description of Artificial Sequence: Synthetic peptide
  Seed: SIGKVCRTLLAKSVF
SIFKVIRNLLEKSVF

SEQ ID NO: 263928 - protein, 15 aa, Artificial Sequence
  Description of Artificial Sequence: Synthetic peptide
  Seed: SIGKVCRTLLAKSVF
SIFKVIRNLLGKSVF

SEQ ID NO: 263929 - protein, 15 aa, Artificial Sequence
  Description of Artificial Sequence: Synthetic peptide
  Seed: SIGKVCRTLLAKSVF
SIFKVIRNLLHKSVF

SEQ ID NO: 263930 - protein, 15 aa, Artificial Sequence
  Description of Artificial Sequence: Synthetic peptide
  Seed: SIGKVCRTLLAKSVF
SIFKVIRNLLIKSVF

SEQ ID NO: 263931 - protein, 15 aa, Artificial Sequence
  Description of Artificial Sequence: Synthetic peptide
  Seed: SIGKVCRTLLAKSVF
SIFKVIRNLLKKSVF

SEQ ID NO: 263932 - protein, 15 aa, Artificial Sequence
  Description of Artificial Sequence: Synthetic peptide
  Seed: SIGKVCRTLLAKSVF
SIFKVIRNLLLKSVF

SEQ ID NO: 263933 - protein, 15 aa, Artificial Sequence
  Description of Artificial Sequence: Synthetic peptide
  Seed: SIGKVCRTLLAKSVF
SIFKVIRNLLMKSVF

SEQ ID NO: 263934 - protein, 15 aa, Artificial Sequence
  Description of Artificial Sequence: Synthetic peptide
  Seed: SIGKVCRTLLAKSVF
SIFKVIRNLLNKSVF

SEQ ID NO: 263935 - protein, 15 aa, Artificial Sequence
  Description of Artificial Sequence: Synthetic peptide
  Seed: SIGKVCRTLLAKSVF
SIFKVIRNLLPKSVF

SEQ ID NO: 263936 - protein, 15 aa, Artificial Sequence
  Description of Artificial Sequence: Synthetic peptide
  Seed: SIGKVCRTLLAKSVF
SIFKVIRNLLQKSVF

SEQ ID NO: 263937 - protein, 15 aa, Artificial Sequence
  Description of Artificial Sequence: Synthetic peptide
  Seed: SIGKVCRTLLAKSVF
SIFKVIRNLLRKSVF

SEQ ID NO: 263938 - protein, 15 aa, Artificial Sequence
  Description of Artificial Sequence: Synthetic peptide
  Seed: SIGKVCRTLLAKSVF
SIFKVIRNLLSKSVF

SEQ ID NO: 263939 - protein, 15 aa, Artificial Sequence
  Description of Artificial Sequence: Synthetic peptide
  Seed: SIGKVCRTLLAKSVF
SIFKVIRNLLTKSVF

SEQ ID NO: 263940 - protein, 15 aa, Artificial Sequence
  Description of Artificial Sequence: Synthetic peptide
  Seed: SIGKVCRTLLAKSVF
SIFKVIRNLLVKSVF

SEQ ID NO: 263941 - protein, 15 aa, Artificial Sequence
  Description of Artificial Sequence: Synthetic peptide
  Seed: SIGKVCRTLLAKSVF
SIFKVIRNLLYKSVF

SEQ ID NO: 263942 - protein, 15 aa, Artificial Sequence
  Description of Artificial Sequence: Synthetic peptide
  Seed: SIGKVCRTLLAKSVF
SIFKVIRPLLAKSVF

SEQ ID NO: 263943 - protein, 15 aa, Artificial Sequence
  Description of Artificial Sequence: Synthetic peptide
  Seed: SIGKVCRTLLAKSVF
SIFKVIRPLLDKSVF

SEQ ID NO: 263944 - protein, 15 aa, Artificial Sequence
  Description of Artificial Sequence: Synthetic peptide
  Seed: SIGKVCRTLLAKSVF
SIFKVIRPLLEKSVF

SEQ ID NO: 263945 - protein, 15 aa, Artificial Sequence
  Description of Artificial Sequence: Synthetic peptide
  Seed: SIGKVCRTLLAKSVF
SIFKVIRPLLGKSVF

SEQ ID NO: 263946 - protein, 15 aa, Artificial Sequence
  Description of Artificial Sequence: Synthetic peptide
  Seed: SIGKVCRTLLAKSVF
SIFKVIRPLLHKSVF

SEQ ID NO: 263947 - protein, 15 aa, Artificial Sequence
  Description of Artificial Sequence: Synthetic peptide
  Seed: SIGKVCRTLLAKSVF
SIFKVIRPLLIKSVF

SEQ ID NO: 263948 - protein, 15 aa, Artificial Sequence
  Description of Artificial Sequence: Synthetic peptide
  Seed: SIGKVCRTLLAKSVF
SIFKVIRPLLLKSVF

SEQ ID NO: 263949 - protein, 15 aa, Artificial Sequence
  Description of Artificial Sequence: Synthetic peptide
  Seed: SIGKVCRTLLAKSVF
SIFKVIRPLLMKSVF

SEQ ID NO: 263950 - protein, 15 aa, Artificial Sequence
  Description of Artificial Sequence: Synthetic peptide
  Seed: SIGKVCRTLLAKSVF
SIFKVIRPLLNKSVF

SEQ ID NO: 263951 - protein, 15 aa, Artificial Sequence
  Description of Artificial Sequence: Synthetic peptide
  Seed: SIGKVCRTLLAKSVF
SIFKVIRPLLPKSVF

SEQ ID NO: 263952 - protein, 15 aa, Artificial Sequence
  Description of Artificial Sequence: Synthetic peptide
  Seed: SIGKVCRTLLAKSVF
SIFKVIRPLLQKSVF

SEQ ID NO: 263953 - protein, 15 aa, Artificial Sequence
  Description of Artificial Sequence: Synthetic peptide
  Seed: SIGKVCRTLLAKSVF
SIFKVIRPLLSKSVF

SEQ ID NO: 263954 - protein, 15 aa, Artificial Sequence
  Description of Artificial Sequence: Synthetic peptide
  Seed: SIGKVCRTLLAKSVF
SIFKVIRPLLTKSVF

SEQ ID NO: 263955 - protein, 15 aa, Artificial Sequence
  Description of Artificial Sequence: Synthetic peptide
  Seed: SIGKVCRTLLAKSVF
SIFKVIRPLLVKSVF

SEQ ID NO: 263956 - protein, 15 aa, Artificial Sequence
  Description of Artificial Sequence: Synthetic peptide
  Seed: SIGKVCRTLLAKSVF
SIFKVIRPLLYKSVF

SEQ ID NO: 263957 - protein, 15 aa, Artificial Sequence
  Description of Artificial Sequence: Synthetic peptide
  Seed: SIGKVCRTLLAKSVF
SIFKVIRQLLAKSVF

SEQ ID NO: 263958 - protein, 15 aa, Artificial Sequence
  Description of Artificial Sequence: Synthetic peptide
  Seed: SIGKVCRTLLAKSVF
SIFKVIRQLLGKSVF

SEQ ID NO: 263959 - protein, 15 aa, Artificial Sequence
  Description of Artificial Sequence: Synthetic peptide
  Seed: SIGKVCRTLLAKSVF
SIFKVIRQLLHKSVF

SEQ ID NO: 263960 - protein, 15 aa, Artificial Sequence
  Description of Artificial Sequence: Synthetic peptide
  Seed: SIGKVCRTLLAKSVF
SIFKVIRQLLKKSVF

SEQ ID NO: 263961 - protein, 15 aa, Artificial Sequence
  Description of Artificial Sequence: Synthetic peptide
  Seed: SIGKVCRTLLAKSVF
SIFKVIRQLLNKSVF

SEQ ID NO: 263962 - protein, 15 aa, Artificial Sequence
  Description of Artificial Sequence: Synthetic peptide
  Seed: SIGKVCRTLLAKSVF
SIFKVIRQLLPKSVF

SEQ ID NO: 263963 - protein, 15 aa, Artificial Sequence
  Description of Artificial Sequence: Synthetic peptide
  Seed: SIGKVCRTLLAKSVF
SIFKVIRQLLQKSVF

SEQ ID NO: 263964 - protein, 15 aa, Artificial Sequence
  Description of Artificial Sequence: Synthetic peptide
  Seed: SIGKVCRTLLAKSVF
SIFKVIRQLLRKSVF

SEQ ID NO: 263965 - protein, 15 aa, Artificial Sequence
  Description of Artificial Sequence: Synthetic peptide
  Seed: SIGKVCRTLLAKSVF
SIFKVIRQLLSKSVF

SEQ ID NO: 263966 - protein, 15 aa, Artificial Sequence
  Description of Artificial Sequence: Synthetic peptide
  Seed: SIGKVCRTLLAKSVF
SIFKVIRQLLTKSVF

SEQ ID NO: 263967 - protein, 15 aa, Artificial Sequence
  Description of Artificial Sequence: Synthetic peptide
  Seed: SIGKVCRTLLAKSVF
SIFKVIRRLLAKSVF

SEQ ID NO: 263968 - protein, 15 aa, Artificial Sequence
  Description of Artificial Sequence: Synthetic peptide
  Seed: SIGKVCRTLLAKSVF
SIFKVIRRLLCKSVF

SEQ ID NO: 263969 - protein, 15 aa, Artificial Sequence
  Description of Artificial Sequence: Synthetic peptide
  Seed: SIGKVCRTLLAKSVF
SIFKVIRRLLDKSVF

SEQ ID NO: 263970 - protein, 15 aa, Artificial Sequence
  Description of Artificial Sequence: Synthetic peptide
  Seed: SIGKVCRTLLAKSVF
SIFKVIRRLLEKSVF

SEQ ID NO: 263971 - protein, 15 aa, Artificial Sequence
  Description of Artificial Sequence: Synthetic peptide
  Seed: SIGKVCRTLLAKSVF
SIFKVIRRLLFKSVF

SEQ ID NO: 263972 - protein, 15 aa, Artificial Sequence
  Description of Artificial Sequence: Synthetic peptide
  Seed: SIGKVCRTLLAKSVF
SIFKVIRRLLGKSVF

SEQ ID NO: 263973 - protein, 15 aa, Artificial Sequence
  Description of Artificial Sequence: Synthetic peptide
  Seed: SIGKVCRTLLAKSVF
SIFKVIRRLLHKSVF

SEQ ID NO: 263974 - protein, 15 aa, Artificial Sequence
  Description of Artificial Sequence: Synthetic peptide
  Seed: SIGKVCRTLLAKSVF
SIFKVIRRLLIKSVF

SEQ ID NO: 263975 - protein, 15 aa, Artificial Sequence
  Description of Artificial Sequence: Synthetic peptide
  Seed: SIGKVCRTLLAKSVF
SIFKVIRRLLKKSVF

SEQ ID NO: 263976 - protein, 15 aa, Artificial Sequence
  Description of Artificial Sequence: Synthetic peptide
  Seed: SIGKVCRTLLAKSVF
SIFKVIRRLLLKSVF

SEQ ID NO: 263977 - protein, 15 aa, Artificial Sequence
  Description of Artificial Sequence: Synthetic peptide
  Seed: SIGKVCRTLLAKSVF
SIFKVIRRLLMKSVF

SEQ ID NO: 263978 - protein, 15 aa, Artificial Sequence
  Description of Artificial Sequence: Synthetic peptide
  Seed: SIGKVCRTLLAKSVF
SIFKVIRRLLNKSVF

SEQ ID NO: 263979 - protein, 15 aa, Artificial Sequence
  Description of Artificial Sequence: Synthetic peptide
  Seed: SIGKVCRTLLAKSVF
SIFKVIRRLLPKSVF

SEQ ID NO: 263980 - protein, 15 aa, Artificial Sequence
  Description of Artificial Sequence: Synthetic peptide
  Seed: SIGKVCRTLLAKSVF
SIFKVIRRLLQKSVF

SEQ ID NO: 263981 - protein, 15 aa, Artificial Sequence
  Description of Artificial Sequence: Synthetic peptide
  Seed: SIGKVCRTLLAKSVF
SIFKVIRRLLRKSVF

SEQ ID NO: 263982 - protein, 15 aa, Artificial Sequence
  Description of Artificial Sequence: Synthetic peptide
  Seed: SIGKVCRTLLAKSVF
SIFKVIRRLLSKSVF

SEQ ID NO: 263983 - protein, 15 aa, Artificial Sequence
  Description of Artificial Sequence: Synthetic peptide
  Seed: SIGKVCRTLLAKSVF
SIFKVIRRLLTKSVF

SEQ ID NO: 263984 - protein, 15 aa, Artificial Sequence
  Description of Artificial Sequence: Synthetic peptide
  Seed: SIGKVCRTLLAKSVF
SIFKVIRRLLVKSVF

SEQ ID NO: 263985 - protein, 15 aa, Artificial Sequence
  Description of Artificial Sequence: Synthetic peptide
  Seed: SIGKVCRTLLAKSVF
SIFKVIRRLLWKSVF

SEQ ID NO: 263986 - protein, 15 aa, Artificial Sequence
  Description of Artificial Sequence: Synthetic peptide
  Seed: SIGKVCRTLLAKSVF
SIFKVIRRLLYKSVF

SEQ ID NO: 263987 - protein, 15 aa, Artificial Sequence
  Description of Artificial Sequence: Synthetic peptide
  Seed: SIGKVCRTLLAKSVF
SIFKVIRSLLAKSVF

SEQ ID NO: 263988 - protein, 15 aa, Artificial Sequence
  Description of Artificial Sequence: Synthetic peptide
  Seed: SIGKVCRTLLAKSVF
SIFKVIRSLLDKSVF

SEQ ID NO: 263989 - protein, 15 aa, Artificial Sequence
  Description of Artificial Sequence: Synthetic peptide
  Seed: SIGKVCRTLLAKSVF
SIFKVIRSLLEKSVF

SEQ ID NO: 263990 - protein, 15 aa, Artificial Sequence
  Description of Artificial Sequence: Synthetic peptide
  Seed: SIGKVCRTLLAKSVF
SIFKVIRSLLGKSVF

SEQ ID NO: 263991 - protein, 15 aa, Artificial Sequence
  Description of Artificial Sequence: Synthetic peptide
  Seed: SIGKVCRTLLAKSVF
SIFKVIRSLLHKSVF

SEQ ID NO: 263992 - protein, 15 aa, Artificial Sequence
  Description of Artificial Sequence: Synthetic peptide
  Seed: SIGKVCRTLLAKSVF
SIFKVIRSLLKKSVF

SEQ ID NO: 263993 - protein, 15 aa, Artificial Sequence
  Description of Artificial Sequence: Synthetic peptide
  Seed: SIGKVCRTLLAKSVF
SIFKVIRSLLMKSVF

SEQ ID NO: 263994 - protein, 15 aa, Artificial Sequence
  Description of Artificial Sequence: Synthetic peptide
  Seed: SIGKVCRTLLAKSVF
SIFKVIRSLLNKSVF

SEQ ID NO: 263995 - protein, 15 aa, Artificial Sequence
  Description of Artificial Sequence: Synthetic peptide
  Seed: SIGKVCRTLLAKSVF
SIFKVIRSLLPKSVF

SEQ ID NO: 263996 - protein, 15 aa, Artificial Sequence
  Description of Artificial Sequence: Synthetic peptide
  Seed: SIGKVCRTLLAKSVF
SIFKVIRSLLQKSVF

SEQ ID NO: 263997 - protein, 15 aa, Artificial Sequence
  Description of Artificial Sequence: Synthetic peptide
  Seed: SIGKVCRTLLAKSVF
SIFKVIRSLLRKSVF

SEQ ID NO: 263998 - protein, 15 aa, Artificial Sequence
  Description of Artificial Sequence: Synthetic peptide
  Seed: SIGKVCRTLLAKSVF
SIFKVIRSLLSKSVF

SEQ ID NO: 263999 - protein, 15 aa, Artificial Sequence
  Description of Artificial Sequence: Synthetic peptide
  Seed: SIGKVCRTLLAKSVF
SIFKVIRSLLVKSVF

SEQ ID NO: 264000 - protein, 15 aa, Artificial Sequence
  Description of Artificial Sequence: Synthetic peptide
  Seed: SIGKVCRTLLAKSVF
SIFKVIRSLLYKSVF

SEQ ID NO: 264001 - protein, 15 aa, Artificial Sequence
  Description of Artificial Sequence: Synthetic peptide
  Seed: SIGKVCRTLLAKSVF
SIFKVIRTLLAKSVF

SEQ ID NO: 264002 - protein, 15 aa, Artificial Sequence
  Description of Artificial Sequence: Synthetic peptide
  Seed: SIGKVCRTLLAKSVF
SIFKVIRTLLDKSVF

SEQ ID NO: 264003 - protein, 15 aa, Artificial Sequence
  Description of Artificial Sequence: Synthetic peptide
  Seed: SIGKVCRTLLAKSVF
SIFKVIRTLLEKSVF

SEQ ID NO: 264004 - protein, 15 aa, Artificial Sequence
  Description of Artificial Sequence: Synthetic peptide
  Seed: SIGKVCRTLLAKSVF
SIFKVIRTLLGKSVF

SEQ ID NO: 264005 - protein, 15 aa, Artificial Sequence
  Description of Artificial Sequence: Synthetic peptide
  Seed: SIGKVCRTLLAKSVF
SIFKVIRTLLHKSVF

SEQ ID NO: 264006 - protein, 15 aa, Artificial Sequence
  Description of Artificial Sequence: Synthetic peptide
  Seed: SIGKVCRTLLAKSVF
SIFKVIRTLLKKSVF

SEQ ID NO: 264007 - protein, 15 aa, Artificial Sequence
  Description of Artificial Sequence: Synthetic peptide
  Seed: SIGKVCRTLLAKSVF
SIFKVIRTLLLKSVF

SEQ ID NO: 264008 - protein, 15 aa, Artificial Sequence
  Description of Artificial Sequence: Synthetic peptide
  Seed: SIGKVCRTLLAKSVF
SIFKVIRTLLMKSVF

SEQ ID NO: 264009 - protein, 15 aa, Artificial Sequence
  Description of Artificial Sequence: Synthetic peptide
  Seed: SIGKVCRTLLAKSVF
SIFKVIRTLLNKSVF

SEQ ID NO: 264010 - protein, 15 aa, Artificial Sequence
  Description of Artificial Sequence: Synthetic peptide
  Seed: SIGKVCRTLLAKSVF
SIFKVIRTLLPKSVF

SEQ ID NO: 264011 - protein, 15 aa, Artificial Sequence
  Description of Artificial Sequence: Synthetic peptide
  Seed: SIGKVCRTLLAKSVF
SIFKVIRTLLQKSVF

SEQ ID NO: 264012 - protein, 15 aa, Artificial Sequence
  Description of Artificial Sequence: Synthetic peptide
  Seed: SIGKVCRTLLAKSVF
SIFKVIRTLLRKSVF

SEQ ID NO: 264013 - protein, 15 aa, Artificial Sequence
  Description of Artificial Sequence: Synthetic peptide
  Seed: SIGKVCRTLLAKSVF
SIFKVIRTLLSKSVF

SEQ ID NO: 264014 - protein, 15 aa, Artificial Sequence
  Description of Artificial Sequence: Synthetic peptide
  Seed: SIGKVCRTLLAKSVF
SIFKVIRTLLTKSVF

SEQ ID NO: 264015 - protein, 15 aa, Artificial Sequence
  Description of Artificial Sequence: Synthetic peptide
  Seed: SIGKVCRTLLAKSVF
SIFKVIRTLLVKSVF

SEQ ID NO: 264016 - protein, 15 aa, Artificial Sequence
  Description of Artificial Sequence: Synthetic peptide
  Seed: SIGKVCRTLLAKSVF
SIFKVIRTLLYKSVF

SEQ ID NO: 264017 - protein, 15 aa, Artificial Sequence
  Description of Artificial Sequence: Synthetic peptide
  Seed: SIGKVCRTLLAKSVF
SIFKVIRVLLAKSVF

SEQ ID NO: 264018 - protein, 15 aa, Artificial Sequence
  Description of Artificial Sequence: Synthetic peptide
  Seed: SIGKVCRTLLAKSVF
SIFKVIRVLLDKSVF

SEQ ID NO: 264019 - protein, 15 aa, Artificial Sequence
  Description of Artificial Sequence: Synthetic peptide
  Seed: SIGKVCRTLLAKSVF
SIFKVIRVLLEKSVF

SEQ ID NO: 264020 - protein, 15 aa, Artificial Sequence
  Description of Artificial Sequence: Synthetic peptide
  Seed: SIGKVCRTLLAKSVF
SIFKVIRVLLHKSVF

SEQ ID NO: 264021 - protein, 15 aa, Artificial Sequence
  Description of Artificial Sequence: Synthetic peptide
  Seed: SIGKVCRTLLAKSVF
SIFKVIRVLLNKSVF

SEQ ID NO: 264022 - protein, 15 aa, Artificial Sequence
  Description of Artificial Sequence: Synthetic peptide
  Seed: SIGKVCRTLLAKSVF
SIFKVIRVLLSKSVF

SEQ ID NO: 264023 - protein, 15 aa, Artificial Sequence
  Description of Artificial Sequence: Synthetic peptide
  Seed: SIGKVCRTLLAKSVF
SIFKVKRALLAKSVF

SEQ ID NO: 264024 - protein, 15 aa, Artificial Sequence
  Description of Artificial Sequence: Synthetic peptide
  Seed: SIGKVCRTLLAKSVF
SIFKVKRALLGKSVF

SEQ ID NO: 264025 - protein, 15 aa, Artificial Sequence
  Description of Artificial Sequence: Synthetic peptide
  Seed: SIGKVCRTLLAKSVF
SIFKVKRALLHKSVF

SEQ ID NO: 264026 - protein, 15 aa, Artificial Sequence
  Description of Artificial Sequence: Synthetic peptide
  Seed: SIGKVCRTLLAKSVF
SIFKVKRALLKKSVF

SEQ ID NO: 264027 - protein, 15 aa, Artificial Sequence
  Description of Artificial Sequence: Synthetic peptide
  Seed: SIGKVCRTLLAKSVF
SIFKVKRALLMKSVF

SEQ ID NO: 264028 - protein, 15 aa, Artificial Sequence
  Description of Artificial Sequence: Synthetic peptide
  Seed: SIGKVCRTLLAKSVF
SIFKVKRALLNKSVF

SEQ ID NO: 264029 - protein, 15 aa, Artificial Sequence
  Description of Artificial Sequence: Synthetic peptide
  Seed: SIGKVCRTLLAKSVF
SIFKVKRALLQKSVF

SEQ ID NO: 264030 - protein, 15 aa, Artificial Sequence
  Description of Artificial Sequence: Synthetic peptide
  Seed: SIGKVCRTLLAKSVF
SIFKVKRALLRKSVF

SEQ ID NO: 264031 - protein, 15 aa, Artificial Sequence
  Description of Artificial Sequence: Synthetic peptide
  Seed: SIGKVCRTLLAKSVF
SIFKVKRALLSKSVF

SEQ ID NO: 264032 - protein, 15 aa, Artificial Sequence
  Description of Artificial Sequence: Synthetic peptide
  Seed: SIGKVCRTLLAKSVF
SIFKVKRALLTKSVF

SEQ ID NO: 264033 - protein, 15 aa, Artificial Sequence
  Description of Artificial Sequence: Synthetic peptide
  Seed: SIGKVCRTLLAKSVF
SIFKVKRALLVKSVF

SEQ ID NO: 264034 - protein, 15 aa, Artificial Sequence
  Description of Artificial Sequence: Synthetic peptide
  Seed: SIGKVCRTLLAKSVF
SIFKVKRELLAKSVF

SEQ ID NO: 264035 - protein, 15 aa, Artificial Sequence
  Description of Artificial Sequence: Synthetic peptide
  Seed: SIGKVCRTLLAKSVF
SIFKVKRGLLAKSVF

SEQ ID NO: 264036 - protein, 15 aa, Artificial Sequence
  Description of Artificial Sequence: Synthetic peptide
  Seed: SIGKVCRTLLAKSVF
SIFKVKRGLLGKSVF

SEQ ID NO: 264037 - protein, 15 aa, Artificial Sequence
  Description of Artificial Sequence: Synthetic peptide
  Seed: SIGKVCRTLLAKSVF
SIFKVKRGLLHKSVF

SEQ ID NO: 264038 - protein, 15 aa, Artificial Sequence
  Description of Artificial Sequence: Synthetic peptide
  Seed: SIGKVCRTLLAKSVF
SIFKVKRGLLQKSVF

SEQ ID NO: 264039 - protein, 15 aa, Artificial Sequence
  Description of Artificial Sequence: Synthetic peptide
  Seed: SIGKVCRTLLAKSVF
SIFKVKRGLLRKSVF

SEQ ID NO: 264040 - protein, 15 aa, Artificial Sequence
  Description of Artificial Sequence: Synthetic peptide
  Seed: SIGKVCRTLLAKSVF
SIFKVKRGLLSKSVF

SEQ ID NO: 264041 - protein, 15 aa, Artificial Sequence
  Description of Artificial Sequence: Synthetic peptide
  Seed: SIGKVCRTLLAKSVF
SIFKVKRHLLAKSVF

SEQ ID NO: 264042 - protein, 15 aa, Artificial Sequence
  Description of Artificial Sequence: Synthetic peptide
  Seed: SIGKVCRTLLAKSVF
SIFKVKRHLLGKSVF

SEQ ID NO: 264043 - protein, 15 aa, Artificial Sequence
  Description of Artificial Sequence: Synthetic peptide
  Seed: SIGKVCRTLLAKSVF
SIFKVKRHLLHKSVF

SEQ ID NO: 264044 - protein, 15 aa, Artificial Sequence
  Description of Artificial Sequence: Synthetic peptide
  Seed: SIGKVCRTLLAKSVF
SIFKVKRHLLQKSVF

SEQ ID NO: 264045 - protein, 15 aa, Artificial Sequence
  Description of Artificial Sequence: Synthetic peptide
  Seed: SIGKVCRTLLAKSVF
SIFKVKRHLLSKSVF

SEQ ID NO: 264046 - protein, 15 aa, Artificial Sequence
  Description of Artificial Sequence: Synthetic peptide
  Seed: SIGKVCRTLLAKSVF
SIFKVKRILLGKSVF

SEQ ID NO: 264047 - protein, 15 aa, Artificial Sequence
  Description of Artificial Sequence: Synthetic peptide
  Seed: SIGKVCRTLLAKSVF
SIFKVKRILLHKSVF

SEQ ID NO: 264048 - protein, 15 aa, Artificial Sequence
  Description of Artificial Sequence: Synthetic peptide
  Seed: SIGKVCRTLLAKSVF
SIFKVKRILLKKSVF

SEQ ID NO: 264049 - protein, 15 aa, Artificial Sequence
  Description of Artificial Sequence: Synthetic peptide
  Seed: SIGKVCRTLLAKSVF
SIFKVKRILLQKSVF

SEQ ID NO: 264050 - protein, 15 aa, Artificial Sequence
  Description of Artificial Sequence: Synthetic peptide
  Seed: SIGKVCRTLLAKSVF
SIFKVKRILLRKSVF

SEQ ID NO: 264051 - protein, 15 aa, Artificial Sequence
  Description of Artificial Sequence: Synthetic peptide
  Seed: SIGKVCRTLLAKSVF
SIFKVKRILLSKSVF

SEQ ID NO: 264052 - protein, 15 aa, Artificial Sequence
  Description of Artificial Sequence: Synthetic peptide
  Seed: SIGKVCRTLLAKSVF
SIFKVKRKLLAKSVF

SEQ ID NO: 264053 - protein, 15 aa, Artificial Sequence
  Description of Artificial Sequence: Synthetic peptide
  Seed: SIGKVCRTLLAKSVF
SIFKVKRKLLCKSVF

SEQ ID NO: 264054 - protein, 15 aa, Artificial Sequence
  Description of Artificial Sequence: Synthetic peptide
  Seed: SIGKVCRTLLAKSVF
SIFKVKRKLLDKSVF

SEQ ID NO: 264055 - protein, 15 aa, Artificial Sequence
  Description of Artificial Sequence: Synthetic peptide
  Seed: SIGKVCRTLLAKSVF
SIFKVKRKLLEKSVF

SEQ ID NO: 264056 - protein, 15 aa, Artificial Sequence
  Description of Artificial Sequence: Synthetic peptide
  Seed: SIGKVCRTLLAKSVF
SIFKVKRKLLFKSVF

SEQ ID NO: 264057 - protein, 15 aa, Artificial Sequence
  Description of Artificial Sequence: Synthetic peptide
  Seed: SIGKVCRTLLAKSVF
SIFKVKRKLLGKSVF

SEQ ID NO: 264058 - protein, 15 aa, Artificial Sequence
  Description of Artificial Sequence: Synthetic peptide
  Seed: SIGKVCRTLLAKSVF
SIFKVKRKLLHKSVF

SEQ ID NO: 264059 - protein, 15 aa, Artificial Sequence
  Description of Artificial Sequence: Synthetic peptide
  Seed: SIGKVCRTLLAKSVF
SIFKVKRKLLIKSVF

SEQ ID NO: 264060 - protein, 15 aa, Artificial Sequence
  Description of Artificial Sequence: Synthetic peptide
  Seed: SIGKVCRTLLAKSVF
SIFKVKRKLLKKSVF

SEQ ID NO: 264061 - protein, 15 aa, Artificial Sequence
  Description of Artificial Sequence: Synthetic peptide
  Seed: SIGKVCRTLLAKSVF
SIFKVKRKLLLKSVF

SEQ ID NO: 264062 - protein, 15 aa, Artificial Sequence
  Description of Artificial Sequence: Synthetic peptide
  Seed: SIGKVCRTLLAKSVF
SIFKVKRKLLMKSVF

SEQ ID NO: 264063 - protein, 15 aa, Artificial Sequence
  Description of Artificial Sequence: Synthetic peptide
  Seed: SIGKVCRTLLAKSVF
SIFKVKRKLLNKSVF

SEQ ID NO: 264064 - protein, 15 aa, Artificial Sequence
  Description of Artificial Sequence: Synthetic peptide
  Seed: SIGKVCRTLLAKSVF
SIFKVKRKLLPKSVF

SEQ ID NO: 264065 - protein, 15 aa, Artificial Sequence
  Description of Artificial Sequence: Synthetic peptide
  Seed: SIGKVCRTLLAKSVF
SIFKVKRKLLQKSVF

SEQ ID NO: 264066 - protein, 15 aa, Artificial Sequence
  Description of Artificial Sequence: Synthetic peptide
  Seed: SIGKVCRTLLAKSVF
SIFKVKRKLLRKSVF

SEQ ID NO: 264067 - protein, 15 aa, Artificial Sequence
  Description of Artificial Sequence: Synthetic peptide
  Seed: SIGKVCRTLLAKSVF
SIFKVKRKLLSKSVF

SEQ ID NO: 264068 - protein, 15 aa, Artificial Sequence
  Description of Artificial Sequence: Synthetic peptide
  Seed: SIGKVCRTLLAKSVF
SIFKVKRKLLTKSVF

SEQ ID NO: 264069 - protein, 15 aa, Artificial Sequence
  Description of Artificial Sequence: Synthetic peptide
  Seed: SIGKVCRTLLAKSVF
SIFKVKRKLLVKSVF

SEQ ID NO: 264070 - protein, 15 aa, Artificial Sequence
  Description of Artificial Sequence: Synthetic peptide
  Seed: SIGKVCRTLLAKSVF
SIFKVKRKLLWKSVF

SEQ ID NO: 264071 - protein, 15 aa, Artificial Sequence
  Description of Artificial Sequence: Synthetic peptide
  Seed: SIGKVCRTLLAKSVF
SIFKVKRKLLYKSVF

SEQ ID NO: 264072 - protein, 15 aa, Artificial Sequence
  Description of Artificial Sequence: Synthetic peptide
  Seed: SIGKVCRTLLAKSVF
SIFKVKRMLLHKSVF

SEQ ID NO: 264073 - protein, 15 aa, Artificial Sequence
  Description of Artificial Sequence: Synthetic peptide
  Seed: SIGKVCRTLLAKSVF
SIFKVKRMLLKKSVF

SEQ ID NO: 264074 - protein, 15 aa, Artificial Sequence
  Description of Artificial Sequence: Synthetic peptide
  Seed: SIGKVCRTLLAKSVF
SIFKVKRMLLRKSVF

SEQ ID NO: 264075 - protein, 15 aa, Artificial Sequence
  Description of Artificial Sequence: Synthetic peptide
  Seed: SIGKVCRTLLAKSVF
SIFKVKRNLLAKSVF

SEQ ID NO: 264076 - protein, 15 aa, Artificial Sequence
  Description of Artificial Sequence: Synthetic peptide
  Seed: SIGKVCRTLLAKSVF
SIFKVKRNLLGKSVF

SEQ ID NO: 264077 - protein, 15 aa, Artificial Sequence
  Description of Artificial Sequence: Synthetic peptide
  Seed: SIGKVCRTLLAKSVF
SIFKVKRNLLHKSVF

SEQ ID NO: 264078 - protein, 15 aa, Artificial Sequence
  Description of Artificial Sequence: Synthetic peptide
  Seed: SIGKVCRTLLAKSVF
SIFKVKRNLLMKSVF

SEQ ID NO: 264079 - protein, 15 aa, Artificial Sequence
  Description of Artificial Sequence: Synthetic peptide
  Seed: SIGKVCRTLLAKSVF
SIFKVKRNLLQKSVF

SEQ ID NO: 264080 - protein, 15 aa, Artificial Sequence
  Description of Artificial Sequence: Synthetic peptide
  Seed: SIGKVCRTLLAKSVF
SIFKVKRNLLSKSVF

SEQ ID NO: 264081 - protein, 15 aa, Artificial Sequence
  Description of Artificial Sequence: Synthetic peptide
  Seed: SIGKVCRTLLAKSVF
SIFKVKRNLLTKSVF

SEQ ID NO: 264082 - protein, 15 aa, Artificial Sequence
  Description of Artificial Sequence: Synthetic peptide
  Seed: SIGKVCRTLLAKSVF
SIFKVKRNLLYKSVF

SEQ ID NO: 264083 - protein, 15 aa, Artificial Sequence
  Description of Artificial Sequence: Synthetic peptide
  Seed: SIGKVCRTLLAKSVF
SIFKVKRPLLAKSVF

SEQ ID NO: 264084 - protein, 15 aa, Artificial Sequence
  Description of Artificial Sequence: Synthetic peptide
  Seed: SIGKVCRTLLAKSVF
SIFKVKRPLLGKSVF

SEQ ID NO: 264085 - protein, 15 aa, Artificial Sequence
  Description of Artificial Sequence: Synthetic peptide
  Seed: SIGKVCRTLLAKSVF
SIFKVKRPLLHKSVF

SEQ ID NO: 264086 - protein, 15 aa, Artificial Sequence
  Description of Artificial Sequence: Synthetic peptide
  Seed: SIGKVCRTLLAKSVF
SIFKVKRPLLKKSVF

SEQ ID NO: 264087 - protein, 15 aa, Artificial Sequence
  Description of Artificial Sequence: Synthetic peptide
  Seed: SIGKVCRTLLAKSVF
SIFKVKRPLLNKSVF

SEQ ID NO: 264088 - protein, 15 aa, Artificial Sequence
  Description of Artificial Sequence: Synthetic peptide
  Seed: SIGKVCRTLLAKSVF
SIFKVKRPLLQKSVF

SEQ ID NO: 264089 - protein, 15 aa, Artificial Sequence
  Description of Artificial Sequence: Synthetic peptide
  Seed: SIGKVCRTLLAKSVF
SIFKVKRPLLRKSVF

SEQ ID NO: 264090 - protein, 15 aa, Artificial Sequence
  Description of Artificial Sequence: Synthetic peptide
  Seed: SIGKVCRTLLAKSVF
SIFKVKRPLLSKSVF

SEQ ID NO: 264091 - protein, 15 aa, Artificial Sequence
  Description of Artificial Sequence: Synthetic peptide
  Seed: SIGKVCRTLLAKSVF
SIFKVKRPLLTKSVF

SEQ ID NO: 264092 - protein, 15 aa, Artificial Sequence
  Description of Artificial Sequence: Synthetic peptide
  Seed: SIGKVCRTLLAKSVF
SIFKVKRPLLVKSVF

SEQ ID NO: 264093 - protein, 15 aa, Artificial Sequence
  Description of Artificial Sequence: Synthetic peptide
  Seed: SIGKVCRTLLAKSVF
SIFKVKRQLLAKSVF

SEQ ID NO: 264094 - protein, 15 aa, Artificial Sequence
  Description of Artificial Sequence: Synthetic peptide
  Seed: SIGKVCRTLLAKSVF
SIFKVKRQLLGKSVF

SEQ ID NO: 264095 - protein, 15 aa, Artificial Sequence
  Description of Artificial Sequence: Synthetic peptide
  Seed: SIGKVCRTLLAKSVF
SIFKVKRQLLQKSVF

SEQ ID NO: 264096 - protein, 15 aa, Artificial Sequence
  Description of Artificial Sequence: Synthetic peptide
  Seed: SIGKVCRTLLAKSVF
SIFKVKRQLLSKSVF

SEQ ID NO: 264097 - protein, 15 aa, Artificial Sequence
  Description of Artificial Sequence: Synthetic peptide
  Seed: SIGKVCRTLLAKSVF
SIFKVKRRLLAKSVF

SEQ ID NO: 264098 - protein, 15 aa, Artificial Sequence
  Description of Artificial Sequence: Synthetic peptide
  Seed: SIGKVCRTLLAKSVF
SIFKVKRRLLCKSVF

SEQ ID NO: 264099 - protein, 15 aa, Artificial Sequence
  Description of Artificial Sequence: Synthetic peptide
  Seed: SIGKVCRTLLAKSVF
SIFKVKRRLLDKSVF

SEQ ID NO: 264100 - protein, 15 aa, Artificial Sequence
  Description of Artificial Sequence: Synthetic peptide
  Seed: SIGKVCRTLLAKSVF
SIFKVKRRLLEKSVF

SEQ ID NO: 264101 - protein, 15 aa, Artificial Sequence
  Description of Artificial Sequence: Synthetic peptide
  Seed: SIGKVCRTLLAKSVF
SIFKVKRRLLFKSVF

SEQ ID NO: 264102 - protein, 15 aa, Artificial Sequence
  Description of Artificial Sequence: Synthetic peptide
  Seed: SIGKVCRTLLAKSVF
SIFKVKRRLLGKSVF

SEQ ID NO: 264103 - protein, 15 aa, Artificial Sequence
  Description of Artificial Sequence: Synthetic peptide
  Seed: SIGKVCRTLLAKSVF
SIFKVKRRLLHKSVF

SEQ ID NO: 264104 - protein, 15 aa, Artificial Sequence
  Description of Artificial Sequence: Synthetic peptide
  Seed: SIGKVCRTLLAKSVF
SIFKVKRRLLIKSVF

SEQ ID NO: 264105 - protein, 15 aa, Artificial Sequence
  Description of Artificial Sequence: Synthetic peptide
  Seed: SIGKVCRTLLAKSVF
SIFKVKRRLLKKSVF

SEQ ID NO: 264106 - protein, 15 aa, Artificial Sequence
  Description of Artificial Sequence: Synthetic peptide
  Seed: SIGKVCRTLLAKSVF
SIFKVKRRLLLKSVF

SEQ ID NO: 264107 - protein, 15 aa, Artificial Sequence
  Description of Artificial Sequence: Synthetic peptide
  Seed: SIGKVCRTLLAKSVF
SIFKVKRRLLMKSVF

SEQ ID NO: 264108 - protein, 15 aa, Artificial Sequence
  Description of Artificial Sequence: Synthetic peptide
  Seed: SIGKVCRTLLAKSVF
SIFKVKRRLLNKSVF

SEQ ID NO: 264109 - protein, 15 aa, Artificial Sequence
  Description of Artificial Sequence: Synthetic peptide
  Seed: SIGKVCRTLLAKSVF
SIFKVKRRLLPKSVF

SEQ ID NO: 264110 - protein, 15 aa, Artificial Sequence
  Description of Artificial Sequence: Synthetic peptide
  Seed: SIGKVCRTLLAKSVF
SIFKVKRRLLQKSVF

SEQ ID NO: 264111 - protein, 15 aa, Artificial Sequence
  Description of Artificial Sequence: Synthetic peptide
  Seed: SIGKVCRTLLAKSVF
SIFKVKRRLLRKSVF

SEQ ID NO: 264112 - protein, 15 aa, Artificial Sequence
  Description of Artificial Sequence: Synthetic peptide
  Seed: SIGKVCRTLLAKSVF
SIFKVKRRLLSKSVF

SEQ ID NO: 264113 - protein, 15 aa, Artificial Sequence
  Description of Artificial Sequence: Synthetic peptide
  Seed: SIGKVCRTLLAKSVF
SIFKVKRRLLTKSVF

SEQ ID NO: 264114 - protein, 15 aa, Artificial Sequence
  Description of Artificial Sequence: Synthetic peptide
  Seed: SIGKVCRTLLAKSVF
SIFKVKRRLLVKSVF

SEQ ID NO: 264115 - protein, 15 aa, Artificial Sequence
  Description of Artificial Sequence: Synthetic peptide
  Seed: SIGKVCRTLLAKSVF
SIFKVKRRLLWKSVF

SEQ ID NO: 264116 - protein, 15 aa, Artificial Sequence
  Description of Artificial Sequence: Synthetic peptide
  Seed: SIGKVCRTLLAKSVF
SIFKVKRRLLYKSVF

SEQ ID NO: 264117 - protein, 15 aa, Artificial Sequence
  Description of Artificial Sequence: Synthetic peptide
  Seed: SIGKVCRTLLAKSVF
SIFKVKRSLLAKSVF

SEQ ID NO: 264118 - protein, 15 aa, Artificial Sequence
  Description of Artificial Sequence: Synthetic peptide
  Seed: SIGKVCRTLLAKSVF
SIFKVKRSLLCKSVF

SEQ ID NO: 264119 - protein, 15 aa, Artificial Sequence
  Description of Artificial Sequence: Synthetic peptide
  Seed: SIGKVCRTLLAKSVF
SIFKVKRSLLDKSVF

SEQ ID NO: 264120 - protein, 15 aa, Artificial Sequence
  Description of Artificial Sequence: Synthetic peptide
  Seed: SIGKVCRTLLAKSVF
SIFKVKRSLLEKSVF

SEQ ID NO: 264121 - protein, 15 aa, Artificial Sequence
  Description of Artificial Sequence: Synthetic peptide
  Seed: SIGKVCRTLLAKSVF
SIFKVKRSLLGKSVF

SEQ ID NO: 264122 - protein, 15 aa, Artificial Sequence
  Description of Artificial Sequence: Synthetic peptide
  Seed: SIGKVCRTLLAKSVF
SIFKVKRSLLHKSVF

SEQ ID NO: 264123 - protein, 15 aa, Artificial Sequence
  Description of Artificial Sequence: Synthetic peptide
  Seed: SIGKVCRTLLAKSVF
SIFKVKRSLLIKSVF

SEQ ID NO: 264124 - protein, 15 aa, Artificial Sequence
  Description of Artificial Sequence: Synthetic peptide
  Seed: SIGKVCRTLLAKSVF
SIFKVKRSLLKKSVF

SEQ ID NO: 264125 - protein, 15 aa, Artificial Sequence
  Description of Artificial Sequence: Synthetic peptide
  Seed: SIGKVCRTLLAKSVF
SIFKVKRSLLMKSVF

SEQ ID NO: 264126 - protein, 15 aa, Artificial Sequence
  Description of Artificial Sequence: Synthetic peptide
  Seed: SIGKVCRTLLAKSVF
SIFKVKRSLLNKSVF

SEQ ID NO: 264127 - protein, 15 aa, Artificial Sequence
  Description of Artificial Sequence: Synthetic peptide
  Seed: SIGKVCRTLLAKSVF
SIFKVKRSLLQKSVF

SEQ ID NO: 264128 - protein, 15 aa, Artificial Sequence
  Description of Artificial Sequence: Synthetic peptide
  Seed: SIGKVCRTLLAKSVF
SIFKVKRSLLRKSVF

SEQ ID NO: 264129 - protein, 15 aa, Artificial Sequence
  Description of Artificial Sequence: Synthetic peptide
  Seed: SIGKVCRTLLAKSVF
SIFKVKRSLLSKSVF

SEQ ID NO: 264130 - protein, 15 aa, Artificial Sequence
  Description of Artificial Sequence: Synthetic peptide
  Seed: SIGKVCRTLLAKSVF
SIFKVKRSLLTKSVF

SEQ ID NO: 264131 - protein, 15 aa, Artificial Sequence
  Description of Artificial Sequence: Synthetic peptide
  Seed: SIGKVCRTLLAKSVF
SIFKVKRSLLVKSVF

SEQ ID NO: 264132 - protein, 15 aa, Artificial Sequence
  Description of Artificial Sequence: Synthetic peptide
  Seed: SIGKVCRTLLAKSVF
SIFKVKRSLLYKSVF

SEQ ID NO: 264133 - protein, 15 aa, Artificial Sequence
  Description of Artificial Sequence: Synthetic peptide
  Seed: SIGKVCRTLLAKSVF
SIFKVKRTLLAKSVF

SEQ ID NO: 264134 - protein, 15 aa, Artificial Sequence
  Description of Artificial Sequence: Synthetic peptide
  Seed: SIGKVCRTLLAKSVF
SIFKVKRTLLEKSVF

SEQ ID NO: 264135 - protein, 15 aa, Artificial Sequence
  Description of Artificial Sequence: Synthetic peptide
  Seed: SIGKVCRTLLAKSVF
SIFKVKRTLLFKSVF

SEQ ID NO: 264136 - protein, 15 aa, Artificial Sequence
  Description of Artificial Sequence: Synthetic peptide
  Seed: SIGKVCRTLLAKSVF
SIFKVKRTLLGKSVF

SEQ ID NO: 264137 - protein, 15 aa, Artificial Sequence
  Description of Artificial Sequence: Synthetic peptide
  Seed: SIGKVCRTLLAKSVF
SIFKVKRTLLHKSVF

SEQ ID NO: 264138 - protein, 15 aa, Artificial Sequence
  Description of Artificial Sequence: Synthetic peptide
  Seed: SIGKVCRTLLAKSVF
SIFKVKRTLLIKSVF

SEQ ID NO: 264139 - protein, 15 aa, Artificial Sequence
  Description of Artificial Sequence: Synthetic peptide
  Seed: SIGKVCRTLLAKSVF
SIFKVKRTLLKKSVF

SEQ ID NO: 264140 - protein, 15 aa, Artificial Sequence
  Description of Artificial Sequence: Synthetic peptide
  Seed: SIGKVCRTLLAKSVF
SIFKVKRTLLLKSVF

SEQ ID NO: 264141 - protein, 15 aa, Artificial Sequence
  Description of Artificial Sequence: Synthetic peptide
  Seed: SIGKVCRTLLAKSVF
SIFKVKRTLLMKSVF

SEQ ID NO: 264142 - protein, 15 aa, Artificial Sequence
  Description of Artificial Sequence: Synthetic peptide
  Seed: SIGKVCRTLLAKSVF
SIFKVKRTLLNKSVF

SEQ ID NO: 264143 - protein, 15 aa, Artificial Sequence
  Description of Artificial Sequence: Synthetic peptide
  Seed: SIGKVCRTLLAKSVF
SIFKVKRTLLQKSVF

SEQ ID NO: 264144 - protein, 15 aa, Artificial Sequence
  Description of Artificial Sequence: Synthetic peptide
  Seed: SIGKVCRTLLAKSVF
SIFKVKRTLLRKSVF

SEQ ID NO: 264145 - protein, 15 aa, Artificial Sequence
  Description of Artificial Sequence: Synthetic peptide
  Seed: SIGKVCRTLLAKSVF
SIFKVKRTLLSKSVF

SEQ ID NO: 264146 - protein, 15 aa, Artificial Sequence
  Description of Artificial Sequence: Synthetic peptide
  Seed: SIGKVCRTLLAKSVF
SIFKVKRTLLTKSVF

SEQ ID NO: 264147 - protein, 15 aa, Artificial Sequence
  Description of Artificial Sequence: Synthetic peptide
  Seed: SIGKVCRTLLAKSVF
SIFKVKRTLLVKSVF

SEQ ID NO: 264148 - protein, 15 aa, Artificial Sequence
  Description of Artificial Sequence: Synthetic peptide
  Seed: SIGKVCRTLLAKSVF
SIFKVKRTLLYKSVF

SEQ ID NO: 264149 - protein, 15 aa, Artificial Sequence
  Description of Artificial Sequence: Synthetic peptide
  Seed: SIGKVCRTLLAKSVF
SIFKVKRVLLAKSVF

SEQ ID NO: 264150 - protein, 15 aa, Artificial Sequence
  Description of Artificial Sequence: Synthetic peptide
  Seed: SIGKVCRTLLAKSVF
SIFKVKRVLLEKSVF

SEQ ID NO: 264151 - protein, 15 aa, Artificial Sequence
  Description of Artificial Sequence: Synthetic peptide
  Seed: SIGKVCRTLLAKSVF
SIFKVKRVLLGKSVF

SEQ ID NO: 264152 - protein, 15 aa, Artificial Sequence
  Description of Artificial Sequence: Synthetic peptide
  Seed: SIGKVCRTLLAKSVF
SIFKVKRVLLHKSVF

SEQ ID NO: 264153 - protein, 15 aa, Artificial Sequence
  Description of Artificial Sequence: Synthetic peptide
  Seed: SIGKVCRTLLAKSVF
SIFKVKRVLLKKSVF

SEQ ID NO: 264154 - protein, 15 aa, Artificial Sequence
  Description of Artificial Sequence: Synthetic peptide
  Seed: SIGKVCRTLLAKSVF
SIFKVKRVLLMKSVF

SEQ ID NO: 264155 - protein, 15 aa, Artificial Sequence
  Description of Artificial Sequence: Synthetic peptide
  Seed: SIGKVCRTLLAKSVF
SIFKVKRVLLQKSVF

SEQ ID NO: 264156 - protein, 15 aa, Artificial Sequence
  Description of Artificial Sequence: Synthetic peptide
  Seed: SIGKVCRTLLAKSVF
SIFKVKRVLLRKSVF

SEQ ID NO: 264157 - protein, 15 aa, Artificial Sequence
  Description of Artificial Sequence: Synthetic peptide
  Seed: SIGKVCRTLLAKSVF
SIFKVKRVLLSKSVF

SEQ ID NO: 264158 - protein, 15 aa, Artificial Sequence
  Description of Artificial Sequence: Synthetic peptide
  Seed: SIGKVCRTLLAKSVF
SIFKVKRVLLVKSVF

SEQ ID NO: 264159 - protein, 15 aa, Artificial Sequence
  Description of Artificial Sequence: Synthetic peptide
  Seed: SIGKVCRTLLAKSVF
SIFKVKRVLLYKSVF

SEQ ID NO: 264160 - protein, 15 aa, Artificial Sequence
  Description of Artificial Sequence: Synthetic peptide
  Seed: SIGKVCRTLLAKSVF
SIFKVLRALLAKSVF

SEQ ID NO: 264161 - protein, 15 aa, Artificial Sequence
  Description of Artificial Sequence: Synthetic peptide
  Seed: SIGKVCRTLLAKSVF
SIFKVLRALLDKSVF

SEQ ID NO: 264162 - protein, 15 aa, Artificial Sequence
  Description of Artificial Sequence: Synthetic peptide
  Seed: SIGKVCRTLLAKSVF
SIFKVLRALLEKSVF

SEQ ID NO: 264163 - protein, 15 aa, Artificial Sequence
  Description of Artificial Sequence: Synthetic peptide
  Seed: SIGKVCRTLLAKSVF
SIFKVLRALLGKSVF

SEQ ID NO: 264164 - protein, 15 aa, Artificial Sequence
  Description of Artificial Sequence: Synthetic peptide
  Seed: SIGKVCRTLLAKSVF
SIFKVLRALLHKSVF

SEQ ID NO: 264165 - protein, 15 aa, Artificial Sequence
  Description of Artificial Sequence: Synthetic peptide
  Seed: SIGKVCRTLLAKSVF
SIFKVLRALLKKSVF

SEQ ID NO: 264166 - protein, 15 aa, Artificial Sequence
  Description of Artificial Sequence: Synthetic peptide
  Seed: SIGKVCRTLLAKSVF
SIFKVLRALLNKSVF

SEQ ID NO: 264167 - protein, 15 aa, Artificial Sequence
  Description of Artificial Sequence: Synthetic peptide
  Seed: SIGKVCRTLLAKSVF
SIFKVLRALLPKSVF

SEQ ID NO: 264168 - protein, 15 aa, Artificial Sequence
  Description of Artificial Sequence: Synthetic peptide
  Seed: SIGKVCRTLLAKSVF
SIFKVLRALLQKSVF

SEQ ID NO: 264169 - protein, 15 aa, Artificial Sequence
  Description of Artificial Sequence: Synthetic peptide
  Seed: SIGKVCRTLLAKSVF
SIFKVLRALLRKSVF

SEQ ID NO: 264170 - protein, 15 aa, Artificial Sequence
  Description of Artificial Sequence: Synthetic peptide
  Seed: SIGKVCRTLLAKSVF
SIFKVLRALLSKSVF

SEQ ID NO: 264171 - protein, 15 aa, Artificial Sequence
  Description of Artificial Sequence: Synthetic peptide
  Seed: SIGKVCRTLLAKSVF
SIFKVLRALLTKSVF

SEQ ID NO: 264172 - protein, 15 aa, Artificial Sequence
  Description of Artificial Sequence: Synthetic peptide
  Seed: SIGKVCRTLLAKSVF
SIFKVLRALLYKSVF

SEQ ID NO: 264173 - protein, 15 aa, Artificial Sequence
  Description of Artificial Sequence: Synthetic peptide
  Seed: SIGKVCRTLLAKSVF
SIFKVLRDLLAKSVF

SEQ ID NO: 264174 - protein, 15 aa, Artificial Sequence
  Description of Artificial Sequence: Synthetic peptide
  Seed: SIGKVCRTLLAKSVF
SIFKVLRDLLDKSVF

SEQ ID NO: 264175 - protein, 15 aa, Artificial Sequence
  Description of Artificial Sequence: Synthetic peptide
  Seed: SIGKVCRTLLAKSVF
SIFKVLRDLLEKSVF

SEQ ID NO: 264176 - protein, 15 aa, Artificial Sequence
  Description of Artificial Sequence: Synthetic peptide
  Seed: SIGKVCRTLLAKSVF
SIFKVLRDLLGKSVF

SEQ ID NO: 264177 - protein, 15 aa, Artificial Sequence
  Description of Artificial Sequence: Synthetic peptide
  Seed: SIGKVCRTLLAKSVF
SIFKVLRDLLRKSVF

SEQ ID NO: 264178 - protein, 15 aa, Artificial Sequence
  Description of Artificial Sequence: Synthetic peptide
  Seed: SIGKVCRTLLAKSVF
SIFKVLRDLLSKSVF

SEQ ID NO: 264179 - protein, 15 aa, Artificial Sequence
  Description of Artificial Sequence: Synthetic peptide
  Seed: SIGKVCRTLLAKSVF
SIFKVLRELLRKSVF

SEQ ID NO: 264180 - protein, 15 aa, Artificial Sequence
  Description of Artificial Sequence: Synthetic peptide
  Seed: SIGKVCRTLLAKSVF
SIFKVLRELLSKSVF

SEQ ID NO: 264181 - protein, 15 aa, Artificial Sequence
  Description of Artificial Sequence: Synthetic peptide
  Seed: SIGKVCRTLLAKSVF
SIFKVLRGLLAKSVF

SEQ ID NO: 264182 - protein, 15 aa, Artificial Sequence
  Description of Artificial Sequence: Synthetic peptide
  Seed: SIGKVCRTLLAKSVF
SIFKVLRGLLDKSVF

SEQ ID NO: 264183 - protein, 15 aa, Artificial Sequence
  Description of Artificial Sequence: Synthetic peptide
  Seed: SIGKVCRTLLAKSVF
SIFKVLRGLLEKSVF

SEQ ID NO: 264184 - protein, 15 aa, Artificial Sequence
  Description of Artificial Sequence: Synthetic peptide
  Seed: SIGKVCRTLLAKSVF
SIFKVLRGLLGKSVF

SEQ ID NO: 264185 - protein, 15 aa, Artificial Sequence
  Description of Artificial Sequence: Synthetic peptide
  Seed: SIGKVCRTLLAKSVF
SIFKVLRGLLHKSVF

SEQ ID NO: 264186 - protein, 15 aa, Artificial Sequence
  Description of Artificial Sequence: Synthetic peptide
  Seed: SIGKVCRTLLAKSVF
SIFKVLRGLLKKSVF

SEQ ID NO: 264187 - protein, 15 aa, Artificial Sequence
  Description of Artificial Sequence: Synthetic peptide
  Seed: SIGKVCRTLLAKSVF
SIFKVLRGLLNKSVF

SEQ ID NO: 264188 - protein, 15 aa, Artificial Sequence
  Description of Artificial Sequence: Synthetic peptide
  Seed: SIGKVCRTLLAKSVF
SIFKVLRGLLQKSVF

SEQ ID NO: 264189 - protein, 15 aa, Artificial Sequence
  Description of Artificial Sequence: Synthetic peptide
  Seed: SIGKVCRTLLAKSVF
SIFKVLRGLLRKSVF

SEQ ID NO: 264190 - protein, 15 aa, Artificial Sequence
  Description of Artificial Sequence: Synthetic peptide
  Seed: SIGKVCRTLLAKSVF
SIFKVLRGLLSKSVF

SEQ ID NO: 264191 - protein, 15 aa, Artificial Sequence
  Description of Artificial Sequence: Synthetic peptide
  Seed: SIGKVCRTLLAKSVF
SIFKVLRGLLTKSVF

SEQ ID NO: 264192 - protein, 15 aa, Artificial Sequence
  Description of Artificial Sequence: Synthetic peptide
  Seed: SIGKVCRTLLAKSVF
SIFKVLRGLLYKSVF

SEQ ID NO: 264193 - protein, 15 aa, Artificial Sequence
  Description of Artificial Sequence: Synthetic peptide
  Seed: SIGKVCRTLLAKSVF
SIFKVLRHLLAKSVF

SEQ ID NO: 264194 - protein, 15 aa, Artificial Sequence
  Description of Artificial Sequence: Synthetic peptide
  Seed: SIGKVCRTLLAKSVF
SIFKVLRHLLDKSVF

SEQ ID NO: 264195 - protein, 15 aa, Artificial Sequence
  Description of Artificial Sequence: Synthetic peptide
  Seed: SIGKVCRTLLAKSVF
SIFKVLRHLLEKSVF

SEQ ID NO: 264196 - protein, 15 aa, Artificial Sequence
  Description of Artificial Sequence: Synthetic peptide
  Seed: SIGKVCRTLLAKSVF
SIFKVLRHLLGKSVF

SEQ ID NO: 264197 - protein, 15 aa, Artificial Sequence
  Description of Artificial Sequence: Synthetic peptide
  Seed: SIGKVCRTLLAKSVF
SIFKVLRHLLHKSVF

SEQ ID NO: 264198 - protein, 15 aa, Artificial Sequence
  Description of Artificial Sequence: Synthetic peptide
  Seed: SIGKVCRTLLAKSVF
SIFKVLRHLLIKSVF

SEQ ID NO: 264199 - protein, 15 aa, Artificial Sequence
  Description of Artificial Sequence: Synthetic peptide
  Seed: SIGKVCRTLLAKSVF
SIFKVLRHLLKKSVF

SEQ ID NO: 264200 - protein, 15 aa, Artificial Sequence
  Description of Artificial Sequence: Synthetic peptide
  Seed: SIGKVCRTLLAKSVF
SIFKVLRHLLLKSVF

SEQ ID NO: 264201 - protein, 15 aa, Artificial Sequence
  Description of Artificial Sequence: Synthetic peptide
  Seed: SIGKVCRTLLAKSVF
SIFKVLRHLLMKSVF

SEQ ID NO: 264202 - protein, 15 aa, Artificial Sequence
  Description of Artificial Sequence: Synthetic peptide
  Seed: SIGKVCRTLLAKSVF
SIFKVLRHLLNKSVF

SEQ ID NO: 264203 - protein, 15 aa, Artificial Sequence
  Description of Artificial Sequence: Synthetic peptide
  Seed: SIGKVCRTLLAKSVF
SIFKVLRHLLPKSVF

SEQ ID NO: 264204 - protein, 15 aa, Artificial Sequence
  Description of Artificial Sequence: Synthetic peptide
  Seed: SIGKVCRTLLAKSVF
SIFKVLRHLLQKSVF

SEQ ID NO: 264205 - protein, 15 aa, Artificial Sequence
  Description of Artificial Sequence: Synthetic peptide
  Seed: SIGKVCRTLLAKSVF
SIFKVLRHLLRKSVF

SEQ ID NO: 264206 - protein, 15 aa, Artificial Sequence
  Description of Artificial Sequence: Synthetic peptide
  Seed: SIGKVCRTLLAKSVF
SIFKVLRHLLSKSVF

SEQ ID NO: 264207 - protein, 15 aa, Artificial Sequence
  Description of Artificial Sequence: Synthetic peptide
  Seed: SIGKVCRTLLAKSVF
SIFKVLRHLLTKSVF

SEQ ID NO: 264208 - protein, 15 aa, Artificial Sequence
  Description of Artificial Sequence: Synthetic peptide
  Seed: SIGKVCRTLLAKSVF
SIFKVLRHLLVKSVF

SEQ ID NO: 264209 - protein, 15 aa, Artificial Sequence
  Description of Artificial Sequence: Synthetic peptide
  Seed: SIGKVCRTLLAKSVF
SIFKVLRHLLYKSVF

SEQ ID NO: 264210 - protein, 15 aa, Artificial Sequence
  Description of Artificial Sequence: Synthetic peptide
  Seed: SIGKVCRTLLAKSVF
SIFKVLRILLDKSVF

SEQ ID NO: 264211 - protein, 15 aa, Artificial Sequence
  Description of Artificial Sequence: Synthetic peptide
  Seed: SIGKVCRTLLAKSVF
SIFKVLRILLHKSVF

SEQ ID NO: 264212 - protein, 15 aa, Artificial Sequence
  Description of Artificial Sequence: Synthetic peptide
  Seed: SIGKVCRTLLAKSVF
SIFKVLRKLLAKSVF

SEQ ID NO: 264213 - protein, 15 aa, Artificial Sequence
  Description of Artificial Sequence: Synthetic peptide
  Seed: SIGKVCRTLLAKSVF
SIFKVLRKLLCKSVF

SEQ ID NO: 264214 - protein, 15 aa, Artificial Sequence
  Description of Artificial Sequence: Synthetic peptide
  Seed: SIGKVCRTLLAKSVF
SIFKVLRKLLDKSVF

SEQ ID NO: 264215 - protein, 15 aa, Artificial Sequence
  Description of Artificial Sequence: Synthetic peptide
  Seed: SIGKVCRTLLAKSVF
SIFKVLRKLLEKSVF

SEQ ID NO: 264216 - protein, 15 aa, Artificial Sequence
  Description of Artificial Sequence: Synthetic peptide
  Seed: SIGKVCRTLLAKSVF
SIFKVLRKLLFKSVF

SEQ ID NO: 264217 - protein, 15 aa, Artificial Sequence
  Description of Artificial Sequence: Synthetic peptide
  Seed: SIGKVCRTLLAKSVF
SIFKVLRKLLGKSVF

SEQ ID NO: 264218 - protein, 15 aa, Artificial Sequence
  Description of Artificial Sequence: Synthetic peptide
  Seed: SIGKVCRTLLAKSVF
SIFKVLRKLLHKSVF

SEQ ID NO: 264219 - protein, 15 aa, Artificial Sequence
  Description of Artificial Sequence: Synthetic peptide
  Seed: SIGKVCRTLLAKSVF
SIFKVLRKLLIKSVF

SEQ ID NO: 264220 - protein, 15 aa, Artificial Sequence
  Description of Artificial Sequence: Synthetic peptide
  Seed: SIGKVCRTLLAKSVF
SIFKVLRKLLKKSVF

SEQ ID NO: 264221 - protein, 15 aa, Artificial Sequence
  Description of Artificial Sequence: Synthetic peptide
  Seed: SIGKVCRTLLAKSVF
SIFKVLRKLLLKSVF

SEQ ID NO: 264222 - protein, 15 aa, Artificial Sequence
  Description of Artificial Sequence: Synthetic peptide
  Seed: SIGKVCRTLLAKSVF
SIFKVLRKLLMKSVF

SEQ ID NO: 264223 - protein, 15 aa, Artificial Sequence
  Description of Artificial Sequence: Synthetic peptide
  Seed: SIGKVCRTLLAKSVF
SIFKVLRKLLNKSVF

SEQ ID NO: 264224 - protein, 15 aa, Artificial Sequence
  Description of Artificial Sequence: Synthetic peptide
  Seed: SIGKVCRTLLAKSVF
SIFKVLRKLLPKSVF

SEQ ID NO: 264225 - protein, 15 aa, Artificial Sequence
  Description of Artificial Sequence: Synthetic peptide
  Seed: SIGKVCRTLLAKSVF
SIFKVLRKLLQKSVF

SEQ ID NO: 264226 - protein, 15 aa, Artificial Sequence
  Description of Artificial Sequence: Synthetic peptide
  Seed: SIGKVCRTLLAKSVF
SIFKVLRKLLRKSVF

SEQ ID NO: 264227 - protein, 15 aa, Artificial Sequence
  Description of Artificial Sequence: Synthetic peptide
  Seed: SIGKVCRTLLAKSVF
SIFKVLRKLLSKSVF

SEQ ID NO: 264228 - protein, 15 aa, Artificial Sequence
  Description of Artificial Sequence: Synthetic peptide
  Seed: SIGKVCRTLLAKSVF
SIFKVLRKLLTKSVF

SEQ ID NO: 264229 - protein, 15 aa, Artificial Sequence
  Description of Artificial Sequence: Synthetic peptide
  Seed: SIGKVCRTLLAKSVF
SIFKVLRKLLVKSVF

SEQ ID NO: 264230 - protein, 15 aa, Artificial Sequence
  Description of Artificial Sequence: Synthetic peptide
  Seed: SIGKVCRTLLAKSVF
SIFKVLRKLLWKSVF

SEQ ID NO: 264231 - protein, 15 aa, Artificial Sequence
  Description of Artificial Sequence: Synthetic peptide
  Seed: SIGKVCRTLLAKSVF
SIFKVLRKLLYKSVF

SEQ ID NO: 264232 - protein, 15 aa, Artificial Sequence
  Description of Artificial Sequence: Synthetic peptide
  Seed: SIGKVCRTLLAKSVF
SIFKVLRMLLHKSVF

SEQ ID NO: 264233 - protein, 15 aa, Artificial Sequence
  Description of Artificial Sequence: Synthetic peptide
  Seed: SIGKVCRTLLAKSVF
SIFKVLRNLLAKSVF

SEQ ID NO: 264234 - protein, 15 aa, Artificial Sequence
  Description of Artificial Sequence: Synthetic peptide
  Seed: SIGKVCRTLLAKSVF
SIFKVLRNLLDKSVF

SEQ ID NO: 264235 - protein, 15 aa, Artificial Sequence
  Description of Artificial Sequence: Synthetic peptide
  Seed: SIGKVCRTLLAKSVF
SIFKVLRNLLEKSVF

SEQ ID NO: 264236 - protein, 15 aa, Artificial Sequence
  Description of Artificial Sequence: Synthetic peptide
  Seed: SIGKVCRTLLAKSVF
SIFKVLRNLLGKSVF

SEQ ID NO: 264237 - protein, 15 aa, Artificial Sequence
  Description of Artificial Sequence: Synthetic peptide
  Seed: SIGKVCRTLLAKSVF
SIFKVLRNLLHKSVF

SEQ ID NO: 264238 - protein, 15 aa, Artificial Sequence
  Description of Artificial Sequence: Synthetic peptide
  Seed: SIGKVCRTLLAKSVF
SIFKVLRNLLIKSVF

SEQ ID NO: 264239 - protein, 15 aa, Artificial Sequence
  Description of Artificial Sequence: Synthetic peptide
  Seed: SIGKVCRTLLAKSVF
SIFKVLRNLLKKSVF

SEQ ID NO: 264240 - protein, 15 aa, Artificial Sequence
  Description of Artificial Sequence: Synthetic peptide
  Seed: SIGKVCRTLLAKSVF
SIFKVLRNLLLKSVF

SEQ ID NO: 264241 - protein, 15 aa, Artificial Sequence
  Description of Artificial Sequence: Synthetic peptide
  Seed: SIGKVCRTLLAKSVF
SIFKVLRNLLMKSVF

SEQ ID NO: 264242 - protein, 15 aa, Artificial Sequence
  Description of Artificial Sequence: Synthetic peptide
  Seed: SIGKVCRTLLAKSVF
SIFKVLRNLLNKSVF

SEQ ID NO: 264243 - protein, 15 aa, Artificial Sequence
  Description of Artificial Sequence: Synthetic peptide
  Seed: SIGKVCRTLLAKSVF
SIFKVLRNLLPKSVF

SEQ ID NO: 264244 - protein, 15 aa, Artificial Sequence
  Description of Artificial Sequence: Synthetic peptide
  Seed: SIGKVCRTLLAKSVF
SIFKVLRNLLQKSVF

SEQ ID NO: 264245 - protein, 15 aa, Artificial Sequence
  Description of Artificial Sequence: Synthetic peptide
  Seed: SIGKVCRTLLAKSVF
SIFKVLRNLLRKSVF

SEQ ID NO: 264246 - protein, 15 aa, Artificial Sequence
  Description of Artificial Sequence: Synthetic peptide
  Seed: SIGKVCRTLLAKSVF
SIFKVLRNLLSKSVF

SEQ ID NO: 264247 - protein, 15 aa, Artificial Sequence
  Description of Artificial Sequence: Synthetic peptide
  Seed: SIGKVCRTLLAKSVF
SIFKVLRNLLTKSVF

SEQ ID NO: 264248 - protein, 15 aa, Artificial Sequence
  Description of Artificial Sequence: Synthetic peptide
  Seed: SIGKVCRTLLAKSVF
SIFKVLRNLLVKSVF

SEQ ID NO: 264249 - protein, 15 aa, Artificial Sequence
  Description of Artificial Sequence: Synthetic peptide
  Seed: SIGKVCRTLLAKSVF
SIFKVLRNLLYKSVF

SEQ ID NO: 264250 - protein, 15 aa, Artificial Sequence
  Description of Artificial Sequence: Synthetic peptide
  Seed: SIGKVCRTLLAKSVF
SIFKVLRPLLAKSVF

SEQ ID NO: 264251 - protein, 15 aa, Artificial Sequence
  Description of Artificial Sequence: Synthetic peptide
  Seed: SIGKVCRTLLAKSVF
SIFKVLRPLLDKSVF

SEQ ID NO: 264252 - protein, 15 aa, Artificial Sequence
  Description of Artificial Sequence: Synthetic peptide
  Seed: SIGKVCRTLLAKSVF
SIFKVLRPLLEKSVF

SEQ ID NO: 264253 - protein, 15 aa, Artificial Sequence
  Description of Artificial Sequence: Synthetic peptide
  Seed: SIGKVCRTLLAKSVF
SIFKVLRPLLGKSVF

SEQ ID NO: 264254 - protein, 15 aa, Artificial Sequence
  Description of Artificial Sequence: Synthetic peptide
  Seed: SIGKVCRTLLAKSVF
SIFKVLRPLLHKSVF

SEQ ID NO: 264255 - protein, 15 aa, Artificial Sequence
  Description of Artificial Sequence: Synthetic peptide
  Seed: SIGKVCRTLLAKSVF
SIFKVLRPLLIKSVF

SEQ ID NO: 264256 - protein, 15 aa, Artificial Sequence
  Description of Artificial Sequence: Synthetic peptide
  Seed: SIGKVCRTLLAKSVF
SIFKVLRPLLKKSVF

SEQ ID NO: 264257 - protein, 15 aa, Artificial Sequence
  Description of Artificial Sequence: Synthetic peptide
  Seed: SIGKVCRTLLAKSVF
SIFKVLRPLLLKSVF

SEQ ID NO: 264258 - protein, 15 aa, Artificial Sequence
  Description of Artificial Sequence: Synthetic peptide
  Seed: SIGKVCRTLLAKSVF
SIFKVLRPLLMKSVF

SEQ ID NO: 264259 - protein, 15 aa, Artificial Sequence
  Description of Artificial Sequence: Synthetic peptide
  Seed: SIGKVCRTLLAKSVF
SIFKVLRPLLNKSVF

SEQ ID NO: 264260 - protein, 15 aa, Artificial Sequence
  Description of Artificial Sequence: Synthetic peptide
  Seed: SIGKVCRTLLAKSVF
SIFKVLRPLLPKSVF

SEQ ID NO: 264261 - protein, 15 aa, Artificial Sequence
  Description of Artificial Sequence: Synthetic peptide
  Seed: SIGKVCRTLLAKSVF
SIFKVLRPLLQKSVF

SEQ ID NO: 264262 - protein, 15 aa, Artificial Sequence
  Description of Artificial Sequence: Synthetic peptide
  Seed: SIGKVCRTLLAKSVF
SIFKVLRPLLRKSVF

SEQ ID NO: 264263 - protein, 15 aa, Artificial Sequence
  Description of Artificial Sequence: Synthetic peptide
  Seed: SIGKVCRTLLAKSVF
SIFKVLRPLLSKSVF

SEQ ID NO: 264264 - protein, 15 aa, Artificial Sequence
  Description of Artificial Sequence: Synthetic peptide
  Seed: SIGKVCRTLLAKSVF
SIFKVLRPLLTKSVF

SEQ ID NO: 264265 - protein, 15 aa, Artificial Sequence
  Description of Artificial Sequence: Synthetic peptide
  Seed: SIGKVCRTLLAKSVF
SIFKVLRPLLVKSVF

SEQ ID NO: 264266 - protein, 15 aa, Artificial Sequence
  Description of Artificial Sequence: Synthetic peptide
  Seed: SIGKVCRTLLAKSVF
SIFKVLRPLLYKSVF

SEQ ID NO: 264267 - protein, 15 aa, Artificial Sequence
  Description of Artificial Sequence: Synthetic peptide
  Seed: SIGKVCRTLLAKSVF
SIFKVLRQLLAKSVF

SEQ ID NO: 264268 - protein, 15 aa, Artificial Sequence
  Description of Artificial Sequence: Synthetic peptide
  Seed: SIGKVCRTLLAKSVF
SIFKVLRQLLGKSVF

SEQ ID NO: 264269 - protein, 15 aa, Artificial Sequence
  Description of Artificial Sequence: Synthetic peptide
  Seed: SIGKVCRTLLAKSVF
SIFKVLRQLLHKSVF

SEQ ID NO: 264270 - protein, 15 aa, Artificial Sequence
  Description of Artificial Sequence: Synthetic peptide
  Seed: SIGKVCRTLLAKSVF
SIFKVLRQLLKKSVF

SEQ ID NO: 264271 - protein, 15 aa, Artificial Sequence
  Description of Artificial Sequence: Synthetic peptide
  Seed: SIGKVCRTLLAKSVF
SIFKVLRQLLNKSVF

SEQ ID NO: 264272 - protein, 15 aa, Artificial Sequence
  Description of Artificial Sequence: Synthetic peptide
  Seed: SIGKVCRTLLAKSVF
SIFKVLRQLLQKSVF

SEQ ID NO: 264273 - protein, 15 aa, Artificial Sequence
  Description of Artificial Sequence: Synthetic peptide
  Seed: SIGKVCRTLLAKSVF
SIFKVLRQLLRKSVF

SEQ ID NO: 264274 - protein, 15 aa, Artificial Sequence
  Description of Artificial Sequence: Synthetic peptide
  Seed: SIGKVCRTLLAKSVF
SIFKVLRQLLSKSVF

SEQ ID NO: 264275 - protein, 15 aa, Artificial Sequence
  Description of Artificial Sequence: Synthetic peptide
  Seed: SIGKVCRTLLAKSVF
SIFKVLRQLLTKSVF

SEQ ID NO: 264276 - protein, 15 aa, Artificial Sequence
  Description of Artificial Sequence: Synthetic peptide
  Seed: SIGKVCRTLLAKSVF
SIFKVLRRLLAKSVF

SEQ ID NO: 264277 - protein, 15 aa, Artificial Sequence
  Description of Artificial Sequence: Synthetic peptide
  Seed: SIGKVCRTLLAKSVF
SIFKVLRRLLCKSVF

SEQ ID NO: 264278 - protein, 15 aa, Artificial Sequence
  Description of Artificial Sequence: Synthetic peptide
  Seed: SIGKVCRTLLAKSVF
SIFKVLRRLLDKSVF

SEQ ID NO: 264279 - protein, 15 aa, Artificial Sequence
  Description of Artificial Sequence: Synthetic peptide
  Seed: SIGKVCRTLLAKSVF
SIFKVLRRLLEKSVF

SEQ ID NO: 264280 - protein, 15 aa, Artificial Sequence
  Description of Artificial Sequence: Synthetic peptide
  Seed: SIGKVCRTLLAKSVF
SIFKVLRRLLFKSVF

SEQ ID NO: 264281 - protein, 15 aa, Artificial Sequence
  Description of Artificial Sequence: Synthetic peptide
  Seed: SIGKVCRTLLAKSVF
SIFKVLRRLLGKSVF

SEQ ID NO: 264282 - protein, 15 aa, Artificial Sequence
  Description of Artificial Sequence: Synthetic peptide
  Seed: SIGKVCRTLLAKSVF
SIFKVLRRLLHKSVF

SEQ ID NO: 264283 - protein, 15 aa, Artificial Sequence
  Description of Artificial Sequence: Synthetic peptide
  Seed: SIGKVCRTLLAKSVF
SIFKVLRRLLIKSVF

SEQ ID NO: 264284 - protein, 15 aa, Artificial Sequence
  Description of Artificial Sequence: Synthetic peptide
  Seed: SIGKVCRTLLAKSVF
SIFKVLRRLLKKSVF

SEQ ID NO: 264285 - protein, 15 aa, Artificial Sequence
  Description of Artificial Sequence: Synthetic peptide
  Seed: SIGKVCRTLLAKSVF
SIFKVLRRLLLKSVF

SEQ ID NO: 264286 - protein, 15 aa, Artificial Sequence
  Description of Artificial Sequence: Synthetic peptide
  Seed: SIGKVCRTLLAKSVF
SIFKVLRRLLMKSVF

SEQ ID NO: 264287 - protein, 15 aa, Artificial Sequence
  Description of Artificial Sequence: Synthetic peptide
  Seed: SIGKVCRTLLAKSVF
SIFKVLRRLLNKSVF

SEQ ID NO: 264288 - protein, 15 aa, Artificial Sequence
  Description of Artificial Sequence: Synthetic peptide
  Seed: SIGKVCRTLLAKSVF
SIFKVLRRLLPKSVF

SEQ ID NO: 264289 - protein, 15 aa, Artificial Sequence
  Description of Artificial Sequence: Synthetic peptide
  Seed: SIGKVCRTLLAKSVF
SIFKVLRRLLQKSVF

SEQ ID NO: 264290 - protein, 15 aa, Artificial Sequence
  Description of Artificial Sequence: Synthetic peptide
  Seed: SIGKVCRTLLAKSVF
SIFKVLRRLLRKSVF

SEQ ID NO: 264291 - protein, 15 aa, Artificial Sequence
  Description of Artificial Sequence: Synthetic peptide
  Seed: SIGKVCRTLLAKSVF
SIFKVLRRLLSKSVF

SEQ ID NO: 264292 - protein, 15 aa, Artificial Sequence
  Description of Artificial Sequence: Synthetic peptide
  Seed: SIGKVCRTLLAKSVF
SIFKVLRRLLTKSVF

SEQ ID NO: 264293 - protein, 15 aa, Artificial Sequence
  Description of Artificial Sequence: Synthetic peptide
  Seed: SIGKVCRTLLAKSVF
SIFKVLRRLLVKSVF

SEQ ID NO: 264294 - protein, 15 aa, Artificial Sequence
  Description of Artificial Sequence: Synthetic peptide
  Seed: SIGKVCRTLLAKSVF
SIFKVLRRLLWKSVF

SEQ ID NO: 264295 - protein, 15 aa, Artificial Sequence
  Description of Artificial Sequence: Synthetic peptide
  Seed: SIGKVCRTLLAKSVF
SIFKVLRRLLYKSVF

SEQ ID NO: 264296 - protein, 15 aa, Artificial Sequence
  Description of Artificial Sequence: Synthetic peptide
  Seed: SIGKVCRTLLAKSVF
SIFKVLRSLLAKSVF

SEQ ID NO: 264297 - protein, 15 aa, Artificial Sequence
  Description of Artificial Sequence: Synthetic peptide
  Seed: SIGKVCRTLLAKSVF
SIFKVLRSLLDKSVF

SEQ ID NO: 264298 - protein, 15 aa, Artificial Sequence
  Description of Artificial Sequence: Synthetic peptide
  Seed: SIGKVCRTLLAKSVF
SIFKVLRSLLEKSVF

SEQ ID NO: 264299 - protein, 15 aa, Artificial Sequence
  Description of Artificial Sequence: Synthetic peptide
  Seed: SIGKVCRTLLAKSVF
SIFKVLRSLLGKSVF

SEQ ID NO: 264300 - protein, 15 aa, Artificial Sequence
  Description of Artificial Sequence: Synthetic peptide
  Seed: SIGKVCRTLLAKSVF
SIFKVLRSLLHKSVF

SEQ ID NO: 264301 - protein, 15 aa, Artificial Sequence
  Description of Artificial Sequence: Synthetic peptide
  Seed: SIGKVCRTLLAKSVF
SIFKVLRSLLKKSVF

SEQ ID NO: 264302 - protein, 15 aa, Artificial Sequence
  Description of Artificial Sequence: Synthetic peptide
  Seed: SIGKVCRTLLAKSVF
SIFKVLRSLLMKSVF

SEQ ID NO: 264303 - protein, 15 aa, Artificial Sequence
  Description of Artificial Sequence: Synthetic peptide
  Seed: SIGKVCRTLLAKSVF
SIFKVLRSLLNKSVF

SEQ ID NO: 264304 - protein, 15 aa, Artificial Sequence
  Description of Artificial Sequence: Synthetic peptide
  Seed: SIGKVCRTLLAKSVF
SIFKVLRSLLPKSVF

SEQ ID NO: 264305 - protein, 15 aa, Artificial Sequence
  Description of Artificial Sequence: Synthetic peptide
  Seed: SIGKVCRTLLAKSVF
SIFKVLRSLLQKSVF

SEQ ID NO: 264306 - protein, 15 aa, Artificial Sequence
  Description of Artificial Sequence: Synthetic peptide
  Seed: SIGKVCRTLLAKSVF
SIFKVLRSLLRKSVF

SEQ ID NO: 264307 - protein, 15 aa, Artificial Sequence
  Description of Artificial Sequence: Synthetic peptide
  Seed: SIGKVCRTLLAKSVF
SIFKVLRSLLSKSVF

SEQ ID NO: 264308 - protein, 15 aa, Artificial Sequence
  Description of Artificial Sequence: Synthetic peptide
  Seed: SIGKVCRTLLAKSVF
SIFKVLRSLLTKSVF

SEQ ID NO: 264309 - protein, 15 aa, Artificial Sequence
  Description of Artificial Sequence: Synthetic peptide
  Seed: SIGKVCRTLLAKSVF
SIFKVLRSLLVKSVF

SEQ ID NO: 264310 - protein, 15 aa, Artificial Sequence
  Description of Artificial Sequence: Synthetic peptide
  Seed: SIGKVCRTLLAKSVF
SIFKVLRSLLYKSVF

SEQ ID NO: 264311 - protein, 15 aa, Artificial Sequence
  Description of Artificial Sequence: Synthetic peptide
  Seed: SIGKVCRTLLAKSVF
SIFKVLRTLLAKSVF

SEQ ID NO: 264312 - protein, 15 aa, Artificial Sequence
  Description of Artificial Sequence: Synthetic peptide
  Seed: SIGKVCRTLLAKSVF
SIFKVLRTLLDKSVF

SEQ ID NO: 264313 - protein, 15 aa, Artificial Sequence
  Description of Artificial Sequence: Synthetic peptide
  Seed: SIGKVCRTLLAKSVF
SIFKVLRTLLEKSVF

SEQ ID NO: 264314 - protein, 15 aa, Artificial Sequence
  Description of Artificial Sequence: Synthetic peptide
  Seed: SIGKVCRTLLAKSVF
SIFKVLRTLLGKSVF

SEQ ID NO: 264315 - protein, 15 aa, Artificial Sequence
  Description of Artificial Sequence: Synthetic peptide
  Seed: SIGKVCRTLLAKSVF
SIFKVLRTLLHKSVF

SEQ ID NO: 264316 - protein, 15 aa, Artificial Sequence
  Description of Artificial Sequence: Synthetic peptide
  Seed: SIGKVCRTLLAKSVF
SIFKVLRTLLKKSVF

SEQ ID NO: 264317 - protein, 15 aa, Artificial Sequence
  Description of Artificial Sequence: Synthetic peptide
  Seed: SIGKVCRTLLAKSVF
SIFKVLRTLLMKSVF

SEQ ID NO: 264318 - protein, 15 aa, Artificial Sequence
  Description of Artificial Sequence: Synthetic peptide
  Seed: SIGKVCRTLLAKSVF
SIFKVLRTLLNKSVF

SEQ ID NO: 264319 - protein, 15 aa, Artificial Sequence
  Description of Artificial Sequence: Synthetic peptide
  Seed: SIGKVCRTLLAKSVF
SIFKVLRTLLPKSVF

SEQ ID NO: 264320 - protein, 15 aa, Artificial Sequence
  Description of Artificial Sequence: Synthetic peptide
  Seed: SIGKVCRTLLAKSVF
SIFKVLRTLLQKSVF

SEQ ID NO: 264321 - protein, 15 aa, Artificial Sequence
  Description of Artificial Sequence: Synthetic peptide
  Seed: SIGKVCRTLLAKSVF
SIFKVLRTLLRKSVF

SEQ ID NO: 264322 - protein, 15 aa, Artificial Sequence
  Description of Artificial Sequence: Synthetic peptide
  Seed: SIGKVCRTLLAKSVF
SIFKVLRTLLSKSVF

SEQ ID NO: 264323 - protein, 15 aa, Artificial Sequence
  Description of Artificial Sequence: Synthetic peptide
  Seed: SIGKVCRTLLAKSVF
SIFKVLRTLLTKSVF

SEQ ID NO: 264324 - protein, 15 aa, Artificial Sequence
  Description of Artificial Sequence: Synthetic peptide
  Seed: SIGKVCRTLLAKSVF
SIFKVLRTLLVKSVF

SEQ ID NO: 264325 - protein, 15 aa, Artificial Sequence
  Description of Artificial Sequence: Synthetic peptide
  Seed: SIGKVCRTLLAKSVF
SIFKVLRTLLYKSVF

SEQ ID NO: 264326 - protein, 15 aa, Artificial Sequence
  Description of Artificial Sequence: Synthetic peptide
  Seed: SIGKVCRTLLAKSVF
SIFKVLRVLLDKSVF

SEQ ID NO: 264327 - protein, 15 aa, Artificial Sequence
  Description of Artificial Sequence: Synthetic peptide
  Seed: SIGKVCRTLLAKSVF
SIFKVLRVLLEKSVF

SEQ ID NO: 264328 - protein, 15 aa, Artificial Sequence
  Description of Artificial Sequence: Synthetic peptide
  Seed: SIGKVCRTLLAKSVF
SIFKVLRVLLHKSVF

SEQ ID NO: 264329 - protein, 15 aa, Artificial Sequence
  Description of Artificial Sequence: Synthetic peptide
  Seed: SIGKVCRTLLAKSVF
SIFKVLRVLLKKSVF

SEQ ID NO: 264330 - protein, 15 aa, Artificial Sequence
  Description of Artificial Sequence: Synthetic peptide
  Seed: SIGKVCRTLLAKSVF
SIFKVLRVLLNKSVF

SEQ ID NO: 264331 - protein, 15 aa, Artificial Sequence
  Description of Artificial Sequence: Synthetic peptide
  Seed: SIGKVCRTLLAKSVF
SIFKVLRVLLRKSVF

SEQ ID NO: 264332 - protein, 15 aa, Artificial Sequence
  Description of Artificial Sequence: Synthetic peptide
  Seed: SIGKVCRTLLAKSVF
SIFKVLRVLLSKSVF

SEQ ID NO: 264333 - protein, 15 aa, Artificial Sequence
  Description of Artificial Sequence: Synthetic peptide
  Seed: SIGKVCRTLLAKSVF
SIFKVMRALLAKSVF

SEQ ID NO: 264334 - protein, 15 aa, Artificial Sequence
  Description of Artificial Sequence: Synthetic peptide
  Seed: SIGKVCRTLLAKSVF
SIFKVMRALLDKSVF

SEQ ID NO: 264335 - protein, 15 aa, Artificial Sequence
  Description of Artificial Sequence: Synthetic peptide
  Seed: SIGKVCRTLLAKSVF
SIFKVMRALLEKSVF

SEQ ID NO: 264336 - protein, 15 aa, Artificial Sequence
  Description of Artificial Sequence: Synthetic peptide
  Seed: SIGKVCRTLLAKSVF
SIFKVMRALLGKSVF

SEQ ID NO: 264337 - protein, 15 aa, Artificial Sequence
  Description of Artificial Sequence: Synthetic peptide
  Seed: SIGKVCRTLLAKSVF
SIFKVMRALLHKSVF

SEQ ID NO: 264338 - protein, 15 aa, Artificial Sequence
  Description of Artificial Sequence: Synthetic peptide
  Seed: SIGKVCRTLLAKSVF
SIFKVMRALLKKSVF

SEQ ID NO: 264339 - protein, 15 aa, Artificial Sequence
  Description of Artificial Sequence: Synthetic peptide
  Seed: SIGKVCRTLLAKSVF
SIFKVMRALLMKSVF

SEQ ID NO: 264340 - protein, 15 aa, Artificial Sequence
  Description of Artificial Sequence: Synthetic peptide
  Seed: SIGKVCRTLLAKSVF
SIFKVMRALLNKSVF

SEQ ID NO: 264341 - protein, 15 aa, Artificial Sequence
  Description of Artificial Sequence: Synthetic peptide
  Seed: SIGKVCRTLLAKSVF
SIFKVMRALLPKSVF

SEQ ID NO: 264342 - protein, 15 aa, Artificial Sequence
  Description of Artificial Sequence: Synthetic peptide
  Seed: SIGKVCRTLLAKSVF
SIFKVMRALLQKSVF

SEQ ID NO: 264343 - protein, 15 aa, Artificial Sequence
  Description of Artificial Sequence: Synthetic peptide
  Seed: SIGKVCRTLLAKSVF
SIFKVMRALLRKSVF

SEQ ID NO: 264344 - protein, 15 aa, Artificial Sequence
  Description of Artificial Sequence: Synthetic peptide
  Seed: SIGKVCRTLLAKSVF
SIFKVMRALLSKSVF

SEQ ID NO: 264345 - protein, 15 aa, Artificial Sequence
  Description of Artificial Sequence: Synthetic peptide
  Seed: SIGKVCRTLLAKSVF
SIFKVMRALLTKSVF

SEQ ID NO: 264346 - protein, 15 aa, Artificial Sequence
  Description of Artificial Sequence: Synthetic peptide
  Seed: SIGKVCRTLLAKSVF
SIFKVMRALLVKSVF

SEQ ID NO: 264347 - protein, 15 aa, Artificial Sequence
  Description of Artificial Sequence: Synthetic peptide
  Seed: SIGKVCRTLLAKSVF
SIFKVMRALLYKSVF

SEQ ID NO: 264348 - protein, 15 aa, Artificial Sequence
  Description of Artificial Sequence: Synthetic peptide
  Seed: SIGKVCRTLLAKSVF
SIFKVMRDLLAKSVF

SEQ ID NO: 264349 - protein, 15 aa, Artificial Sequence
  Description of Artificial Sequence: Synthetic peptide
  Seed: SIGKVCRTLLAKSVF
SIFKVMRDLLDKSVF

SEQ ID NO: 264350 - protein, 15 aa, Artificial Sequence
  Description of Artificial Sequence: Synthetic peptide
  Seed: SIGKVCRTLLAKSVF
SIFKVMRDLLEKSVF

SEQ ID NO: 264351 - protein, 15 aa, Artificial Sequence
  Description of Artificial Sequence: Synthetic peptide
  Seed: SIGKVCRTLLAKSVF
SIFKVMRDLLGKSVF

SEQ ID NO: 264352 - protein, 15 aa, Artificial Sequence
  Description of Artificial Sequence: Synthetic peptide
  Seed: SIGKVCRTLLAKSVF
SIFKVMRDLLHKSVF

SEQ ID NO: 264353 - protein, 15 aa, Artificial Sequence
  Description of Artificial Sequence: Synthetic peptide
  Seed: SIGKVCRTLLAKSVF
SIFKVMRDLLNKSVF

SEQ ID NO: 264354 - protein, 15 aa, Artificial Sequence
  Description of Artificial Sequence: Synthetic peptide
  Seed: SIGKVCRTLLAKSVF
SIFKVMRDLLRKSVF

SEQ ID NO: 264355 - protein, 15 aa, Artificial Sequence
  Description of Artificial Sequence: Synthetic peptide
  Seed: SIGKVCRTLLAKSVF
SIFKVMRDLLSKSVF

SEQ ID NO: 264356 - protein, 15 aa, Artificial Sequence
  Description of Artificial Sequence: Synthetic peptide
  Seed: SIGKVCRTLLAKSVF
SIFKVMRDLLTKSVF

SEQ ID NO: 264357 - protein, 15 aa, Artificial Sequence
  Description of Artificial Sequence: Synthetic peptide
  Seed: SIGKVCRTLLAKSVF
SIFKVMRDLLVKSVF

SEQ ID NO: 264358 - protein, 15 aa, Artificial Sequence
  Description of Artificial Sequence: Synthetic peptide
  Seed: SIGKVCRTLLAKSVF
SIFKVMRELLAKSVF

SEQ ID NO: 264359 - protein, 15 aa, Artificial Sequence
  Description of Artificial Sequence: Synthetic peptide
  Seed: SIGKVCRTLLAKSVF
SIFKVMRELLGKSVF

SEQ ID NO: 264360 - protein, 15 aa, Artificial Sequence
  Description of Artificial Sequence: Synthetic peptide
  Seed: SIGKVCRTLLAKSVF
SIFKVMRELLHKSVF

SEQ ID NO: 264361 - protein, 15 aa, Artificial Sequence
  Description of Artificial Sequence: Synthetic peptide
  Seed: SIGKVCRTLLAKSVF
SIFKVMRELLKKSVF

SEQ ID NO: 264362 - protein, 15 aa, Artificial Sequence
  Description of Artificial Sequence: Synthetic peptide
  Seed: SIGKVCRTLLAKSVF
SIFKVMRELLRKSVF

SEQ ID NO: 264363 - protein, 15 aa, Artificial Sequence
  Description of Artificial Sequence: Synthetic peptide
  Seed: SIGKVCRTLLAKSVF
SIFKVMRELLSKSVF

SEQ ID NO: 264364 - protein, 15 aa, Artificial Sequence
  Description of Artificial Sequence: Synthetic peptide
  Seed: SIGKVCRTLLAKSVF
SIFKVMRGLLAKSVF

SEQ ID NO: 264365 - protein, 15 aa, Artificial Sequence
  Description of Artificial Sequence: Synthetic peptide
  Seed: SIGKVCRTLLAKSVF
SIFKVMRGLLDKSVF

SEQ ID NO: 264366 - protein, 15 aa, Artificial Sequence
  Description of Artificial Sequence: Synthetic peptide
  Seed: SIGKVCRTLLAKSVF
SIFKVMRGLLEKSVF

SEQ ID NO: 264367 - protein, 15 aa, Artificial Sequence
  Description of Artificial Sequence: Synthetic peptide
  Seed: SIGKVCRTLLAKSVF
SIFKVMRGLLGKSVF

SEQ ID NO: 264368 - protein, 15 aa, Artificial Sequence
  Description of Artificial Sequence: Synthetic peptide
  Seed: SIGKVCRTLLAKSVF
SIFKVMRGLLHKSVF

SEQ ID NO: 264369 - protein, 15 aa, Artificial Sequence
  Description of Artificial Sequence: Synthetic peptide
  Seed: SIGKVCRTLLAKSVF
SIFKVMRGLLIKSVF

SEQ ID NO: 264370 - protein, 15 aa, Artificial Sequence
  Description of Artificial Sequence: Synthetic peptide
  Seed: SIGKVCRTLLAKSVF
SIFKVMRGLLKKSVF

SEQ ID NO: 264371 - protein, 15 aa, Artificial Sequence
  Description of Artificial Sequence: Synthetic peptide
  Seed: SIGKVCRTLLAKSVF
SIFKVMRGLLLKSVF

SEQ ID NO: 264372 - protein, 15 aa, Artificial Sequence
  Description of Artificial Sequence: Synthetic peptide
  Seed: SIGKVCRTLLAKSVF
SIFKVMRGLLMKSVF

SEQ ID NO: 264373 - protein, 15 aa, Artificial Sequence
  Description of Artificial Sequence: Synthetic peptide
  Seed: SIGKVCRTLLAKSVF
SIFKVMRGLLNKSVF

SEQ ID NO: 264374 - protein, 15 aa, Artificial Sequence
  Description of Artificial Sequence: Synthetic peptide
  Seed: SIGKVCRTLLAKSVF
SIFKVMRGLLPKSVF

SEQ ID NO: 264375 - protein, 15 aa, Artificial Sequence
  Description of Artificial Sequence: Synthetic peptide
  Seed: SIGKVCRTLLAKSVF
SIFKVMRGLLQKSVF

SEQ ID NO: 264376 - protein, 15 aa, Artificial Sequence
  Description of Artificial Sequence: Synthetic peptide
  Seed: SIGKVCRTLLAKSVF
SIFKVMRGLLRKSVF

SEQ ID NO: 264377 - protein, 15 aa, Artificial Sequence
  Description of Artificial Sequence: Synthetic peptide
  Seed: SIGKVCRTLLAKSVF
SIFKVMRGLLSKSVF

SEQ ID NO: 264378 - protein, 15 aa, Artificial Sequence
  Description of Artificial Sequence: Synthetic peptide
  Seed: SIGKVCRTLLAKSVF
SIFKVMRGLLTKSVF

SEQ ID NO: 264379 - protein, 15 aa, Artificial Sequence
  Description of Artificial Sequence: Synthetic peptide
  Seed: SIGKVCRTLLAKSVF
SIFKVMRGLLVKSVF

SEQ ID NO: 264380 - protein, 15 aa, Artificial Sequence
  Description of Artificial Sequence: Synthetic peptide
  Seed: SIGKVCRTLLAKSVF
SIFKVMRGLLYKSVF

SEQ ID NO: 264381 - protein, 15 aa, Artificial Sequence
  Description of Artificial Sequence: Synthetic peptide
  Seed: SIGKVCRTLLAKSVF
SIFKVMRHLLAKSVF

SEQ ID NO: 264382 - protein, 15 aa, Artificial Sequence
  Description of Artificial Sequence: Synthetic peptide
  Seed: SIGKVCRTLLAKSVF
SIFKVMRHLLDKSVF

SEQ ID NO: 264383 - protein, 15 aa, Artificial Sequence
  Description of Artificial Sequence: Synthetic peptide
  Seed: SIGKVCRTLLAKSVF
SIFKVMRHLLEKSVF

SEQ ID NO: 264384 - protein, 15 aa, Artificial Sequence
  Description of Artificial Sequence: Synthetic peptide
  Seed: SIGKVCRTLLAKSVF
SIFKVMRHLLFKSVF

SEQ ID NO: 264385 - protein, 15 aa, Artificial Sequence
  Description of Artificial Sequence: Synthetic peptide
  Seed: SIGKVCRTLLAKSVF
SIFKVMRHLLGKSVF

SEQ ID NO: 264386 - protein, 15 aa, Artificial Sequence
  Description of Artificial Sequence: Synthetic peptide
  Seed: SIGKVCRTLLAKSVF
SIFKVMRHLLHKSVF

SEQ ID NO: 264387 - protein, 15 aa, Artificial Sequence
  Description of Artificial Sequence: Synthetic peptide
  Seed: SIGKVCRTLLAKSVF
SIFKVMRHLLIKSVF

SEQ ID NO: 264388 - protein, 15 aa, Artificial Sequence
  Description of Artificial Sequence: Synthetic peptide
  Seed: SIGKVCRTLLAKSVF
SIFKVMRHLLKKSVF

SEQ ID NO: 264389 - protein, 15 aa, Artificial Sequence
  Description of Artificial Sequence: Synthetic peptide
  Seed: SIGKVCRTLLAKSVF
SIFKVMRHLLLKSVF

SEQ ID NO: 264390 - protein, 15 aa, Artificial Sequence
  Description of Artificial Sequence: Synthetic peptide
  Seed: SIGKVCRTLLAKSVF
SIFKVMRHLLMKSVF

SEQ ID NO: 264391 - protein, 15 aa, Artificial Sequence
  Description of Artificial Sequence: Synthetic peptide
  Seed: SIGKVCRTLLAKSVF
SIFKVMRHLLNKSVF

SEQ ID NO: 264392 - protein, 15 aa, Artificial Sequence
  Description of Artificial Sequence: Synthetic peptide
  Seed: SIGKVCRTLLAKSVF
SIFKVMRHLLPKSVF

SEQ ID NO: 264393 - protein, 15 aa, Artificial Sequence
  Description of Artificial Sequence: Synthetic peptide
  Seed: SIGKVCRTLLAKSVF
SIFKVMRHLLQKSVF

SEQ ID NO: 264394 - protein, 15 aa, Artificial Sequence
  Description of Artificial Sequence: Synthetic peptide
  Seed: SIGKVCRTLLAKSVF
SIFKVMRHLLRKSVF

SEQ ID NO: 264395 - protein, 15 aa, Artificial Sequence
  Description of Artificial Sequence: Synthetic peptide
  Seed: SIGKVCRTLLAKSVF
SIFKVMRHLLSKSVF

SEQ ID NO: 264396 - protein, 15 aa, Artificial Sequence
  Description of Artificial Sequence: Synthetic peptide
  Seed: SIGKVCRTLLAKSVF
SIFKVMRHLLTKSVF

SEQ ID NO: 264397 - protein, 15 aa, Artificial Sequence
  Description of Artificial Sequence: Synthetic peptide
  Seed: SIGKVCRTLLAKSVF
SIFKVMRHLLVKSVF

SEQ ID NO: 264398 - protein, 15 aa, Artificial Sequence
  Description of Artificial Sequence: Synthetic peptide
  Seed: SIGKVCRTLLAKSVF
SIFKVMRHLLYKSVF

SEQ ID NO: 264399 - protein, 15 aa, Artificial Sequence
  Description of Artificial Sequence: Synthetic peptide
  Seed: SIGKVCRTLLAKSVF
SIFKVMRILLDKSVF

SEQ ID NO: 264400 - protein, 15 aa, Artificial Sequence
  Description of Artificial Sequence: Synthetic peptide
  Seed: SIGKVCRTLLAKSVF
SIFKVMRILLEKSVF

SEQ ID NO: 264401 - protein, 15 aa, Artificial Sequence
  Description of Artificial Sequence: Synthetic peptide
  Seed: SIGKVCRTLLAKSVF
SIFKVMRILLHKSVF

SEQ ID NO: 264402 - protein, 15 aa, Artificial Sequence
  Description of Artificial Sequence: Synthetic peptide
  Seed: SIGKVCRTLLAKSVF
SIFKVMRILLKKSVF

SEQ ID NO: 264403 - protein, 15 aa, Artificial Sequence
  Description of Artificial Sequence: Synthetic peptide
  Seed: SIGKVCRTLLAKSVF
SIFKVMRILLNKSVF

SEQ ID NO: 264404 - protein, 15 aa, Artificial Sequence
  Description of Artificial Sequence: Synthetic peptide
  Seed: SIGKVCRTLLAKSVF
SIFKVMRILLPKSVF

SEQ ID NO: 264405 - protein, 15 aa, Artificial Sequence
  Description of Artificial Sequence: Synthetic peptide
  Seed: SIGKVCRTLLAKSVF
SIFKVMRILLRKSVF

SEQ ID NO: 264406 - protein, 15 aa, Artificial Sequence
  Description of Artificial Sequence: Synthetic peptide
  Seed: SIGKVCRTLLAKSVF
SIFKVMRILLSKSVF

SEQ ID NO: 264407 - protein, 15 aa, Artificial Sequence
  Description of Artificial Sequence: Synthetic peptide
  Seed: SIGKVCRTLLAKSVF
SIFKVMRKLLAKSVF

SEQ ID NO: 264408 - protein, 15 aa, Artificial Sequence
  Description of Artificial Sequence: Synthetic peptide
  Seed: SIGKVCRTLLAKSVF
SIFKVMRKLLCKSVF

SEQ ID NO: 264409 - protein, 15 aa, Artificial Sequence
  Description of Artificial Sequence: Synthetic peptide
  Seed: SIGKVCRTLLAKSVF
SIFKVMRKLLDKSVF

SEQ ID NO: 264410 - protein, 15 aa, Artificial Sequence
  Description of Artificial Sequence: Synthetic peptide
  Seed: SIGKVCRTLLAKSVF
SIFKVMRKLLEKSVF

SEQ ID NO: 264411 - protein, 15 aa, Artificial Sequence
  Description of Artificial Sequence: Synthetic peptide
  Seed: SIGKVCRTLLAKSVF
SIFKVMRKLLFKSVF

SEQ ID NO: 264412 - protein, 15 aa, Artificial Sequence
  Description of Artificial Sequence: Synthetic peptide
  Seed: SIGKVCRTLLAKSVF
SIFKVMRKLLGKSVF

SEQ ID NO: 264413 - protein, 15 aa, Artificial Sequence
  Description of Artificial Sequence: Synthetic peptide
  Seed: SIGKVCRTLLAKSVF
SIFKVMRKLLHKSVF

SEQ ID NO: 264414 - protein, 15 aa, Artificial Sequence
  Description of Artificial Sequence: Synthetic peptide
  Seed: SIGKVCRTLLAKSVF
SIFKVMRKLLIKSVF

SEQ ID NO: 264415 - protein, 15 aa, Artificial Sequence
  Description of Artificial Sequence: Synthetic peptide
  Seed: SIGKVCRTLLAKSVF
SIFKVMRKLLKKSVF

SEQ ID NO: 264416 - protein, 15 aa, Artificial Sequence
  Description of Artificial Sequence: Synthetic peptide
  Seed: SIGKVCRTLLAKSVF
SIFKVMRKLLLKSVF

SEQ ID NO: 264417 - protein, 15 aa, Artificial Sequence
  Description of Artificial Sequence: Synthetic peptide
  Seed: SIGKVCRTLLAKSVF
SIFKVMRKLLMKSVF

SEQ ID NO: 264418 - protein, 15 aa, Artificial Sequence
  Description of Artificial Sequence: Synthetic peptide
  Seed: SIGKVCRTLLAKSVF
SIFKVMRKLLNKSVF

SEQ ID NO: 264419 - protein, 15 aa, Artificial Sequence
  Description of Artificial Sequence: Synthetic peptide
  Seed: SIGKVCRTLLAKSVF
SIFKVMRKLLPKSVF

SEQ ID NO: 264420 - protein, 15 aa, Artificial Sequence
  Description of Artificial Sequence: Synthetic peptide
  Seed: SIGKVCRTLLAKSVF
SIFKVMRKLLQKSVF

SEQ ID NO: 264421 - protein, 15 aa, Artificial Sequence
  Description of Artificial Sequence: Synthetic peptide
  Seed: SIGKVCRTLLAKSVF
SIFKVMRKLLRKSVF

SEQ ID NO: 264422 - protein, 15 aa, Artificial Sequence
  Description of Artificial Sequence: Synthetic peptide
  Seed: SIGKVCRTLLAKSVF
SIFKVMRKLLSKSVF

SEQ ID NO: 264423 - protein, 15 aa, Artificial Sequence
  Description of Artificial Sequence: Synthetic peptide
  Seed: SIGKVCRTLLAKSVF
SIFKVMRKLLTKSVF

SEQ ID NO: 264424 - protein, 15 aa, Artificial Sequence
  Description of Artificial Sequence: Synthetic peptide
  Seed: SIGKVCRTLLAKSVF
SIFKVMRKLLVKSVF

SEQ ID NO: 264425 - protein, 15 aa, Artificial Sequence
  Description of Artificial Sequence: Synthetic peptide
  Seed: SIGKVCRTLLAKSVF
SIFKVMRKLLWKSVF

SEQ ID NO: 264426 - protein, 15 aa, Artificial Sequence
  Description of Artificial Sequence: Synthetic peptide
  Seed: SIGKVCRTLLAKSVF
SIFKVMRKLLYKSVF

SEQ ID NO: 264427 - protein, 15 aa, Artificial Sequence
  Description of Artificial Sequence: Synthetic peptide
  Seed: SIGKVCRTLLAKSVF
SIFKVMRLLLHKSVF

SEQ ID NO: 264428 - protein, 15 aa, Artificial Sequence
  Description of Artificial Sequence: Synthetic peptide
  Seed: SIGKVCRTLLAKSVF
SIFKVMRMLLHKSVF

SEQ ID NO: 264429 - protein, 15 aa, Artificial Sequence
  Description of Artificial Sequence: Synthetic peptide
  Seed: SIGKVCRTLLAKSVF
SIFKVMRMLLSKSVF

SEQ ID NO: 264430 - protein, 15 aa, Artificial Sequence
  Description of Artificial Sequence: Synthetic peptide
  Seed: SIGKVCRTLLAKSVF
SIFKVMRNLLAKSVF

SEQ ID NO: 264431 - protein, 15 aa, Artificial Sequence
  Description of Artificial Sequence: Synthetic peptide
  Seed: SIGKVCRTLLAKSVF
SIFKVMRNLLCKSVF

SEQ ID NO: 264432 - protein, 15 aa, Artificial Sequence
  Description of Artificial Sequence: Synthetic peptide
  Seed: SIGKVCRTLLAKSVF
SIFKVMRNLLDKSVF

SEQ ID NO: 264433 - protein, 15 aa, Artificial Sequence
  Description of Artificial Sequence: Synthetic peptide
  Seed: SIGKVCRTLLAKSVF
SIFKVMRNLLEKSVF

SEQ ID NO: 264434 - protein, 15 aa, Artificial Sequence
  Description of Artificial Sequence: Synthetic peptide
  Seed: SIGKVCRTLLAKSVF
SIFKVMRNLLGKSVF

SEQ ID NO: 264435 - protein, 15 aa, Artificial Sequence
  Description of Artificial Sequence: Synthetic peptide
  Seed: SIGKVCRTLLAKSVF
SIFKVMRNLLHKSVF

SEQ ID NO: 264436 - protein, 15 aa, Artificial Sequence
  Description of Artificial Sequence: Synthetic peptide
  Seed: SIGKVCRTLLAKSVF
SIFKVMRNLLIKSVF

SEQ ID NO: 264437 - protein, 15 aa, Artificial Sequence
  Description of Artificial Sequence: Synthetic peptide
  Seed: SIGKVCRTLLAKSVF
SIFKVMRNLLKKSVF

SEQ ID NO: 264438 - protein, 15 aa, Artificial Sequence
  Description of Artificial Sequence: Synthetic peptide
  Seed: SIGKVCRTLLAKSVF
SIFKVMRNLLLKSVF

SEQ ID NO: 264439 - protein, 15 aa, Artificial Sequence
  Description of Artificial Sequence: Synthetic peptide
  Seed: SIGKVCRTLLAKSVF
SIFKVMRNLLMKSVF

SEQ ID NO: 264440 - protein, 15 aa, Artificial Sequence
  Description of Artificial Sequence: Synthetic peptide
  Seed: SIGKVCRTLLAKSVF
SIFKVMRNLLNKSVF

SEQ ID NO: 264441 - protein, 15 aa, Artificial Sequence
  Description of Artificial Sequence: Synthetic peptide
  Seed: SIGKVCRTLLAKSVF
SIFKVMRNLLPKSVF

SEQ ID NO: 264442 - protein, 15 aa, Artificial Sequence
  Description of Artificial Sequence: Synthetic peptide
  Seed: SIGKVCRTLLAKSVF
SIFKVMRNLLQKSVF

SEQ ID NO: 264443 - protein, 15 aa, Artificial Sequence
  Description of Artificial Sequence: Synthetic peptide
  Seed: SIGKVCRTLLAKSVF
SIFKVMRNLLRKSVF

SEQ ID NO: 264444 - protein, 15 aa, Artificial Sequence
  Description of Artificial Sequence: Synthetic peptide
  Seed: SIGKVCRTLLAKSVF
SIFKVMRNLLSKSVF

SEQ ID NO: 264445 - protein, 15 aa, Artificial Sequence
  Description of Artificial Sequence: Synthetic peptide
  Seed: SIGKVCRTLLAKSVF
SIFKVMRNLLTKSVF

SEQ ID NO: 264446 - protein, 15 aa, Artificial Sequence
  Description of Artificial Sequence: Synthetic peptide
  Seed: SIGKVCRTLLAKSVF
SIFKVMRNLLVKSVF

SEQ ID NO: 264447 - protein, 15 aa, Artificial Sequence
  Description of Artificial Sequence: Synthetic peptide
  Seed: SIGKVCRTLLAKSVF
SIFKVMRNLLYKSVF

SEQ ID NO: 264448 - protein, 15 aa, Artificial Sequence
  Description of Artificial Sequence: Synthetic peptide
  Seed: SIGKVCRTLLAKSVF
SIFKVMRPLLAKSVF

SEQ ID NO: 264449 - protein, 15 aa, Artificial Sequence
  Description of Artificial Sequence: Synthetic peptide
  Seed: SIGKVCRTLLAKSVF
SIFKVMRPLLCKSVF

SEQ ID NO: 264450 - protein, 15 aa, Artificial Sequence
  Description of Artificial Sequence: Synthetic peptide
  Seed: SIGKVCRTLLAKSVF
SIFKVMRPLLDKSVF

SEQ ID NO: 264451 - protein, 15 aa, Artificial Sequence
  Description of Artificial Sequence: Synthetic peptide
  Seed: SIGKVCRTLLAKSVF
SIFKVMRPLLEKSVF

SEQ ID NO: 264452 - protein, 15 aa, Artificial Sequence
  Description of Artificial Sequence: Synthetic peptide
  Seed: SIGKVCRTLLAKSVF
SIFKVMRPLLFKSVF

SEQ ID NO: 264453 - protein, 15 aa, Artificial Sequence
  Description of Artificial Sequence: Synthetic peptide
  Seed: SIGKVCRTLLAKSVF
SIFKVMRPLLGKSVF

SEQ ID NO: 264454 - protein, 15 aa, Artificial Sequence
  Description of Artificial Sequence: Synthetic peptide
  Seed: SIGKVCRTLLAKSVF
SIFKVMRPLLHKSVF

SEQ ID NO: 264455 - protein, 15 aa, Artificial Sequence
  Description of Artificial Sequence: Synthetic peptide
  Seed: SIGKVCRTLLAKSVF
SIFKVMRPLLIKSVF

SEQ ID NO: 264456 - protein, 15 aa, Artificial Sequence
  Description of Artificial Sequence: Synthetic peptide
  Seed: SIGKVCRTLLAKSVF
SIFKVMRPLLKKSVF

SEQ ID NO: 264457 - protein, 15 aa, Artificial Sequence
  Description of Artificial Sequence: Synthetic peptide
  Seed: SIGKVCRTLLAKSVF
SIFKVMRPLLLKSVF

SEQ ID NO: 264458 - protein, 15 aa, Artificial Sequence
  Description of Artificial Sequence: Synthetic peptide
  Seed: SIGKVCRTLLAKSVF
SIFKVMRPLLMKSVF

SEQ ID NO: 264459 - protein, 15 aa, Artificial Sequence
  Description of Artificial Sequence: Synthetic peptide
  Seed: SIGKVCRTLLAKSVF
SIFKVMRPLLNKSVF

SEQ ID NO: 264460 - protein, 15 aa, Artificial Sequence
  Description of Artificial Sequence: Synthetic peptide
  Seed: SIGKVCRTLLAKSVF
SIFKVMRPLLPKSVF

SEQ ID NO: 264461 - protein, 15 aa, Artificial Sequence
  Description of Artificial Sequence: Synthetic peptide
  Seed: SIGKVCRTLLAKSVF
SIFKVMRPLLQKSVF

SEQ ID NO: 264462 - protein, 15 aa, Artificial Sequence
  Description of Artificial Sequence: Synthetic peptide
  Seed: SIGKVCRTLLAKSVF
SIFKVMRPLLRKSVF

SEQ ID NO: 264463 - protein, 15 aa, Artificial Sequence
  Description of Artificial Sequence: Synthetic peptide
  Seed: SIGKVCRTLLAKSVF
SIFKVMRPLLSKSVF

SEQ ID NO: 264464 - protein, 15 aa, Artificial Sequence
  Description of Artificial Sequence: Synthetic peptide
  Seed: SIGKVCRTLLAKSVF
SIFKVMRPLLTKSVF

SEQ ID NO: 264465 - protein, 15 aa, Artificial Sequence
  Description of Artificial Sequence: Synthetic peptide
  Seed: SIGKVCRTLLAKSVF
SIFKVMRPLLVKSVF

SEQ ID NO: 264466 - protein, 15 aa, Artificial Sequence
  Description of Artificial Sequence: Synthetic peptide
  Seed: SIGKVCRTLLAKSVF
SIFKVMRPLLWKSVF

SEQ ID NO: 264467 - protein, 15 aa, Artificial Sequence
  Description of Artificial Sequence: Synthetic peptide
  Seed: SIGKVCRTLLAKSVF
SIFKVMRPLLYKSVF

SEQ ID NO: 264468 - protein, 15 aa, Artificial Sequence
  Description of Artificial Sequence: Synthetic peptide
  Seed: SIGKVCRTLLAKSVF
SIFKVMRQLLAKSVF

SEQ ID NO: 264469 - protein, 15 aa, Artificial Sequence
  Description of Artificial Sequence: Synthetic peptide
  Seed: SIGKVCRTLLAKSVF
SIFKVMRQLLGKSVF

SEQ ID NO: 264470 - protein, 15 aa, Artificial Sequence
  Description of Artificial Sequence: Synthetic peptide
  Seed: SIGKVCRTLLAKSVF
SIFKVMRQLLHKSVF

SEQ ID NO: 264471 - protein, 15 aa, Artificial Sequence
  Description of Artificial Sequence: Synthetic peptide
  Seed: SIGKVCRTLLAKSVF
SIFKVMRQLLKKSVF

SEQ ID NO: 264472 - protein, 15 aa, Artificial Sequence
  Description of Artificial Sequence: Synthetic peptide
  Seed: SIGKVCRTLLAKSVF
SIFKVMRQLLNKSVF

SEQ ID NO: 264473 - protein, 15 aa, Artificial Sequence
  Description of Artificial Sequence: Synthetic peptide
  Seed: SIGKVCRTLLAKSVF
SIFKVMRQLLPKSVF

SEQ ID NO: 264474 - protein, 15 aa, Artificial Sequence
  Description of Artificial Sequence: Synthetic peptide
  Seed: SIGKVCRTLLAKSVF
SIFKVMRQLLQKSVF

SEQ ID NO: 264475 - protein, 15 aa, Artificial Sequence
  Description of Artificial Sequence: Synthetic peptide
  Seed: SIGKVCRTLLAKSVF
SIFKVMRQLLRKSVF

SEQ ID NO: 264476 - protein, 15 aa, Artificial Sequence
  Description of Artificial Sequence: Synthetic peptide
  Seed: SIGKVCRTLLAKSVF
SIFKVMRQLLSKSVF

SEQ ID NO: 264477 - protein, 15 aa, Artificial Sequence
  Description of Artificial Sequence: Synthetic peptide
  Seed: SIGKVCRTLLAKSVF
SIFKVMRQLLTKSVF

SEQ ID NO: 264478 - protein, 15 aa, Artificial Sequence
  Description of Artificial Sequence: Synthetic peptide
  Seed: SIGKVCRTLLAKSVF
SIFKVMRQLLYKSVF

SEQ ID NO: 264479 - protein, 15 aa, Artificial Sequence
  Description of Artificial Sequence: Synthetic peptide
  Seed: SIGKVCRTLLAKSVF
SIFKVMRRLLAKSVF

SEQ ID NO: 264480 - protein, 15 aa, Artificial Sequence
  Description of Artificial Sequence: Synthetic peptide
  Seed: SIGKVCRTLLAKSVF
SIFKVMRRLLCKSVF

SEQ ID NO: 264481 - protein, 15 aa, Artificial Sequence
  Description of Artificial Sequence: Synthetic peptide
  Seed: SIGKVCRTLLAKSVF
SIFKVMRRLLDKSVF

SEQ ID NO: 264482 - protein, 15 aa, Artificial Sequence
  Description of Artificial Sequence: Synthetic peptide
  Seed: SIGKVCRTLLAKSVF
SIFKVMRRLLEKSVF

SEQ ID NO: 264483 - protein, 15 aa, Artificial Sequence
  Description of Artificial Sequence: Synthetic peptide
  Seed: SIGKVCRTLLAKSVF
SIFKVMRRLLFKSVF

SEQ ID NO: 264484 - protein, 15 aa, Artificial Sequence
  Description of Artificial Sequence: Synthetic peptide
  Seed: SIGKVCRTLLAKSVF
SIFKVMRRLLGKSVF

SEQ ID NO: 264485 - protein, 15 aa, Artificial Sequence
  Description of Artificial Sequence: Synthetic peptide
  Seed: SIGKVCRTLLAKSVF
SIFKVMRRLLHKSVF

SEQ ID NO: 264486 - protein, 15 aa, Artificial Sequence
  Description of Artificial Sequence: Synthetic peptide
  Seed: SIGKVCRTLLAKSVF
SIFKVMRRLLIKSVF

SEQ ID NO: 264487 - protein, 15 aa, Artificial Sequence
  Description of Artificial Sequence: Synthetic peptide
  Seed: SIGKVCRTLLAKSVF
SIFKVMRRLLKKSVF

SEQ ID NO: 264488 - protein, 15 aa, Artificial Sequence
  Description of Artificial Sequence: Synthetic peptide
  Seed: SIGKVCRTLLAKSVF
SIFKVMRRLLLKSVF

SEQ ID NO: 264489 - protein, 15 aa, Artificial Sequence
  Description of Artificial Sequence: Synthetic peptide
  Seed: SIGKVCRTLLAKSVF
SIFKVMRRLLMKSVF

SEQ ID NO: 264490 - protein, 15 aa, Artificial Sequence
  Description of Artificial Sequence: Synthetic peptide
  Seed: SIGKVCRTLLAKSVF
SIFKVMRRLLNKSVF

SEQ ID NO: 264491 - protein, 15 aa, Artificial Sequence
  Description of Artificial Sequence: Synthetic peptide
  Seed: SIGKVCRTLLAKSVF
SIFKVMRRLLPKSVF

SEQ ID NO: 264492 - protein, 15 aa, Artificial Sequence
  Description of Artificial Sequence: Synthetic peptide
  Seed: SIGKVCRTLLAKSVF
SIFKVMRRLLQKSVF

SEQ ID NO: 264493 - protein, 15 aa, Artificial Sequence
  Description of Artificial Sequence: Synthetic peptide
  Seed: SIGKVCRTLLAKSVF
SIFKVMRRLLRKSVF

SEQ ID NO: 264494 - protein, 15 aa, Artificial Sequence
  Description of Artificial Sequence: Synthetic peptide
  Seed: SIGKVCRTLLAKSVF
SIFKVMRRLLSKSVF

SEQ ID NO: 264495 - protein, 15 aa, Artificial Sequence
  Description of Artificial Sequence: Synthetic peptide
  Seed: SIGKVCRTLLAKSVF
SIFKVMRRLLTKSVF

SEQ ID NO: 264496 - protein, 15 aa, Artificial Sequence
  Description of Artificial Sequence: Synthetic peptide
  Seed: SIGKVCRTLLAKSVF
SIFKVMRRLLVKSVF

SEQ ID NO: 264497 - protein, 15 aa, Artificial Sequence
  Description of Artificial Sequence: Synthetic peptide
  Seed: SIGKVCRTLLAKSVF
SIFKVMRRLLWKSVF

SEQ ID NO: 264498 - protein, 15 aa, Artificial Sequence
  Description of Artificial Sequence: Synthetic peptide
  Seed: SIGKVCRTLLAKSVF
SIFKVMRRLLYKSVF

SEQ ID NO: 264499 - protein, 15 aa, Artificial Sequence
  Description of Artificial Sequence: Synthetic peptide
  Seed: SIGKVCRTLLAKSVF
SIFKVMRSLLAKSVF

SEQ ID NO: 264500 - protein, 15 aa, Artificial Sequence
  Description of Artificial Sequence: Synthetic peptide
  Seed: SIGKVCRTLLAKSVF
SIFKVMRSLLDKSVF

SEQ ID NO: 264501 - protein, 15 aa, Artificial Sequence
  Description of Artificial Sequence: Synthetic peptide
  Seed: SIGKVCRTLLAKSVF
SIFKVMRSLLEKSVF

SEQ ID NO: 264502 - protein, 15 aa, Artificial Sequence
  Description of Artificial Sequence: Synthetic peptide
  Seed: SIGKVCRTLLAKSVF
SIFKVMRSLLGKSVF

SEQ ID NO: 264503 - protein, 15 aa, Artificial Sequence
  Description of Artificial Sequence: Synthetic peptide
  Seed: SIGKVCRTLLAKSVF
SIFKVMRSLLHKSVF

SEQ ID NO: 264504 - protein, 15 aa, Artificial Sequence
  Description of Artificial Sequence: Synthetic peptide
  Seed: SIGKVCRTLLAKSVF
SIFKVMRSLLIKSVF

SEQ ID NO: 264505 - protein, 15 aa, Artificial Sequence
  Description of Artificial Sequence: Synthetic peptide
  Seed: SIGKVCRTLLAKSVF
SIFKVMRSLLKKSVF

SEQ ID NO: 264506 - protein, 15 aa, Artificial Sequence
  Description of Artificial Sequence: Synthetic peptide
  Seed: SIGKVCRTLLAKSVF
SIFKVMRSLLLKSVF

SEQ ID NO: 264507 - protein, 15 aa, Artificial Sequence
  Description of Artificial Sequence: Synthetic peptide
  Seed: SIGKVCRTLLAKSVF
SIFKVMRSLLMKSVF

SEQ ID NO: 264508 - protein, 15 aa, Artificial Sequence
  Description of Artificial Sequence: Synthetic peptide
  Seed: SIGKVCRTLLAKSVF
SIFKVMRSLLNKSVF

SEQ ID NO: 264509 - protein, 15 aa, Artificial Sequence
  Description of Artificial Sequence: Synthetic peptide
  Seed: SIGKVCRTLLAKSVF
SIFKVMRSLLPKSVF

SEQ ID NO: 264510 - protein, 15 aa, Artificial Sequence
  Description of Artificial Sequence: Synthetic peptide
  Seed: SIGKVCRTLLAKSVF
SIFKVMRSLLQKSVF

SEQ ID NO: 264511 - protein, 15 aa, Artificial Sequence
  Description of Artificial Sequence: Synthetic peptide
  Seed: SIGKVCRTLLAKSVF
SIFKVMRSLLRKSVF

SEQ ID NO: 264512 - protein, 15 aa, Artificial Sequence
  Description of Artificial Sequence: Synthetic peptide
  Seed: SIGKVCRTLLAKSVF
SIFKVMRSLLSKSVF

SEQ ID NO: 264513 - protein, 15 aa, Artificial Sequence
  Description of Artificial Sequence: Synthetic peptide
  Seed: SIGKVCRTLLAKSVF
SIFKVMRSLLTKSVF

SEQ ID NO: 264514 - protein, 15 aa, Artificial Sequence
  Description of Artificial Sequence: Synthetic peptide
  Seed: SIGKVCRTLLAKSVF
SIFKVMRSLLVKSVF

SEQ ID NO: 264515 - protein, 15 aa, Artificial Sequence
  Description of Artificial Sequence: Synthetic peptide
  Seed: SIGKVCRTLLAKSVF
SIFKVMRSLLYKSVF

SEQ ID NO: 264516 - protein, 15 aa, Artificial Sequence
  Description of Artificial Sequence: Synthetic peptide
  Seed: SIGKVCRTLLAKSVF
SIFKVMRTLLAKSVF

SEQ ID NO: 264517 - protein, 15 aa, Artificial Sequence
  Description of Artificial Sequence: Synthetic peptide
  Seed: SIGKVCRTLLAKSVF
SIFKVMRTLLDKSVF

SEQ ID NO: 264518 - protein, 15 aa, Artificial Sequence
  Description of Artificial Sequence: Synthetic peptide
  Seed: SIGKVCRTLLAKSVF
SIFKVMRTLLEKSVF

SEQ ID NO: 264519 - protein, 15 aa, Artificial Sequence
  Description of Artificial Sequence: Synthetic peptide
  Seed: SIGKVCRTLLAKSVF
SIFKVMRTLLGKSVF

SEQ ID NO: 264520 - protein, 15 aa, Artificial Sequence
  Description of Artificial Sequence: Synthetic peptide
  Seed: SIGKVCRTLLAKSVF
SIFKVMRTLLHKSVF

SEQ ID NO: 264521 - protein, 15 aa, Artificial Sequence
  Description of Artificial Sequence: Synthetic peptide
  Seed: SIGKVCRTLLAKSVF
SIFKVMRTLLIKSVF

SEQ ID NO: 264522 - protein, 15 aa, Artificial Sequence
  Description of Artificial Sequence: Synthetic peptide
  Seed: SIGKVCRTLLAKSVF
SIFKVMRTLLKKSVF

SEQ ID NO: 264523 - protein, 15 aa, Artificial Sequence
  Description of Artificial Sequence: Synthetic peptide
  Seed: SIGKVCRTLLAKSVF
SIFKVMRTLLLKSVF

SEQ ID NO: 264524 - protein, 15 aa, Artificial Sequence
  Description of Artificial Sequence: Synthetic peptide
  Seed: SIGKVCRTLLAKSVF
SIFKVMRTLLMKSVF

SEQ ID NO: 264525 - protein, 15 aa, Artificial Sequence
  Description of Artificial Sequence: Synthetic peptide
  Seed: SIGKVCRTLLAKSVF
SIFKVMRTLLNKSVF

SEQ ID NO: 264526 - protein, 15 aa, Artificial Sequence
  Description of Artificial Sequence: Synthetic peptide
  Seed: SIGKVCRTLLAKSVF
SIFKVMRTLLPKSVF

SEQ ID NO: 264527 - protein, 15 aa, Artificial Sequence
  Description of Artificial Sequence: Synthetic peptide
  Seed: SIGKVCRTLLAKSVF
SIFKVMRTLLQKSVF

SEQ ID NO: 264528 - protein, 15 aa, Artificial Sequence
  Description of Artificial Sequence: Synthetic peptide
  Seed: SIGKVCRTLLAKSVF
SIFKVMRTLLRKSVF

SEQ ID NO: 264529 - protein, 15 aa, Artificial Sequence
  Description of Artificial Sequence: Synthetic peptide
  Seed: SIGKVCRTLLAKSVF
SIFKVMRTLLTKSVF

SEQ ID NO: 264530 - protein, 15 aa, Artificial Sequence
  Description of Artificial Sequence: Synthetic peptide
  Seed: SIGKVCRTLLAKSVF
SIFKVMRTLLVKSVF

SEQ ID NO: 264531 - protein, 15 aa, Artificial Sequence
  Description of Artificial Sequence: Synthetic peptide
  Seed: SIGKVCRTLLAKSVF
SIFKVMRTLLYKSVF

SEQ ID NO: 264532 - protein, 15 aa, Artificial Sequence
  Description of Artificial Sequence: Synthetic peptide
  Seed: SIGKVCRTLLAKSVF
SIFKVMRVLLAKSVF

SEQ ID NO: 264533 - protein, 15 aa, Artificial Sequence
  Description of Artificial Sequence: Synthetic peptide
  Seed: SIGKVCRTLLAKSVF
SIFKVMRVLLDKSVF

SEQ ID NO: 264534 - protein, 15 aa, Artificial Sequence
  Description of Artificial Sequence: Synthetic peptide
  Seed: SIGKVCRTLLAKSVF
SIFKVMRVLLEKSVF

SEQ ID NO: 264535 - protein, 15 aa, Artificial Sequence
  Description of Artificial Sequence: Synthetic peptide
  Seed: SIGKVCRTLLAKSVF
SIFKVMRVLLGKSVF

SEQ ID NO: 264536 - protein, 15 aa, Artificial Sequence
  Description of Artificial Sequence: Synthetic peptide
  Seed: SIGKVCRTLLAKSVF
SIFKVMRVLLHKSVF

SEQ ID NO: 264537 - protein, 15 aa, Artificial Sequence
  Description of Artificial Sequence: Synthetic peptide
  Seed: SIGKVCRTLLAKSVF
SIFKVMRVLLKKSVF

SEQ ID NO: 264538 - protein, 15 aa, Artificial Sequence
  Description of Artificial Sequence: Synthetic peptide
  Seed: SIGKVCRTLLAKSVF
SIFKVMRVLLNKSVF

SEQ ID NO: 264539 - protein, 15 aa, Artificial Sequence
  Description of Artificial Sequence: Synthetic peptide
  Seed: SIGKVCRTLLAKSVF
SIFKVMRVLLPKSVF

SEQ ID NO: 264540 - protein, 15 aa, Artificial Sequence
  Description of Artificial Sequence: Synthetic peptide
  Seed: SIGKVCRTLLAKSVF
SIFKVMRVLLQKSVF

SEQ ID NO: 264541 - protein, 15 aa, Artificial Sequence
  Description of Artificial Sequence: Synthetic peptide
  Seed: SIGKVCRTLLAKSVF
SIFKVMRVLLRKSVF

SEQ ID NO: 264542 - protein, 15 aa, Artificial Sequence
  Description of Artificial Sequence: Synthetic peptide
  Seed: SIGKVCRTLLAKSVF
SIFKVMRVLLSKSVF

SEQ ID NO: 264543 - protein, 15 aa, Artificial Sequence
  Description of Artificial Sequence: Synthetic peptide
  Seed: SIGKVCRTLLAKSVF
SIFKVMRVLLTKSVF

SEQ ID NO: 264544 - protein, 15 aa, Artificial Sequence
  Description of Artificial Sequence: Synthetic peptide
  Seed: SIGKVCRTLLAKSVF
SIFKVNRALLAKSVF

SEQ ID NO: 264545 - protein, 15 aa, Artificial Sequence
  Description of Artificial Sequence: Synthetic peptide
  Seed: SIGKVCRTLLAKSVF
SIFKVNRALLGKSVF

SEQ ID NO: 264546 - protein, 15 aa, Artificial Sequence
  Description of Artificial Sequence: Synthetic peptide
  Seed: SIGKVCRTLLAKSVF
SIFKVNRALLHKSVF

SEQ ID NO: 264547 - protein, 15 aa, Artificial Sequence
  Description of Artificial Sequence: Synthetic peptide
  Seed: SIGKVCRTLLAKSVF
SIFKVNRALLKKSVF

SEQ ID NO: 264548 - protein, 15 aa, Artificial Sequence
  Description of Artificial Sequence: Synthetic peptide
  Seed: SIGKVCRTLLAKSVF
SIFKVNRALLNKSVF

SEQ ID NO: 264549 - protein, 15 aa, Artificial Sequence
  Description of Artificial Sequence: Synthetic peptide
  Seed: SIGKVCRTLLAKSVF
SIFKVNRALLQKSVF

SEQ ID NO: 264550 - protein, 15 aa, Artificial Sequence
  Description of Artificial Sequence: Synthetic peptide
  Seed: SIGKVCRTLLAKSVF
SIFKVNRALLRKSVF

SEQ ID NO: 264551 - protein, 15 aa, Artificial Sequence
  Description of Artificial Sequence: Synthetic peptide
  Seed: SIGKVCRTLLAKSVF
SIFKVNRALLSKSVF

SEQ ID NO: 264552 - protein, 15 aa, Artificial Sequence
  Description of Artificial Sequence: Synthetic peptide
  Seed: SIGKVCRTLLAKSVF
SIFKVNRALLYKSVF

SEQ ID NO: 264553 - protein, 15 aa, Artificial Sequence
  Description of Artificial Sequence: Synthetic peptide
  Seed: SIGKVCRTLLAKSVF
SIFKVNRGLLAKSVF

SEQ ID NO: 264554 - protein, 15 aa, Artificial Sequence
  Description of Artificial Sequence: Synthetic peptide
  Seed: SIGKVCRTLLAKSVF
SIFKVNRGLLSKSVF

SEQ ID NO: 264555 - protein, 15 aa, Artificial Sequence
  Description of Artificial Sequence: Synthetic peptide
  Seed: SIGKVCRTLLAKSVF
SIFKVNRHLLAKSVF

SEQ ID NO: 264556 - protein, 15 aa, Artificial Sequence
  Description of Artificial Sequence: Synthetic peptide
  Seed: SIGKVCRTLLAKSVF
SIFKVNRHLLGKSVF

SEQ ID NO: 264557 - protein, 15 aa, Artificial Sequence
  Description of Artificial Sequence: Synthetic peptide
  Seed: SIGKVCRTLLAKSVF
SIFKVNRHLLQKSVF

SEQ ID NO: 264558 - protein, 15 aa, Artificial Sequence
  Description of Artificial Sequence: Synthetic peptide
  Seed: SIGKVCRTLLAKSVF
SIFKVNRHLLSKSVF

SEQ ID NO: 264559 - protein, 15 aa, Artificial Sequence
  Description of Artificial Sequence: Synthetic peptide
  Seed: SIGKVCRTLLAKSVF
SIFKVNRILLAKSVF

SEQ ID NO: 264560 - protein, 15 aa, Artificial Sequence
  Description of Artificial Sequence: Synthetic peptide
  Seed: SIGKVCRTLLAKSVF
SIFKVNRILLRKSVF

SEQ ID NO: 264561 - protein, 15 aa, Artificial Sequence
  Description of Artificial Sequence: Synthetic peptide
  Seed: SIGKVCRTLLAKSVF
SIFKVNRILLSKSVF

SEQ ID NO: 264562 - protein, 15 aa, Artificial Sequence
  Description of Artificial Sequence: Synthetic peptide
  Seed: SIGKVCRTLLAKSVF
SIFKVNRKLLAKSVF

SEQ ID NO: 264563 - protein, 15 aa, Artificial Sequence
  Description of Artificial Sequence: Synthetic peptide
  Seed: SIGKVCRTLLAKSVF
SIFKVNRKLLCKSVF

SEQ ID NO: 264564 - protein, 15 aa, Artificial Sequence
  Description of Artificial Sequence: Synthetic peptide
  Seed: SIGKVCRTLLAKSVF
SIFKVNRKLLFKSVF

SEQ ID NO: 264565 - protein, 15 aa, Artificial Sequence
  Description of Artificial Sequence: Synthetic peptide
  Seed: SIGKVCRTLLAKSVF
SIFKVNRKLLGKSVF

SEQ ID NO: 264566 - protein, 15 aa, Artificial Sequence
  Description of Artificial Sequence: Synthetic peptide
  Seed: SIGKVCRTLLAKSVF
SIFKVNRKLLHKSVF

SEQ ID NO: 264567 - protein, 15 aa, Artificial Sequence
  Description of Artificial Sequence: Synthetic peptide
  Seed: SIGKVCRTLLAKSVF
SIFKVNRKLLIKSVF

SEQ ID NO: 264568 - protein, 15 aa, Artificial Sequence
  Description of Artificial Sequence: Synthetic peptide
  Seed: SIGKVCRTLLAKSVF
SIFKVNRKLLKKSVF

SEQ ID NO: 264569 - protein, 15 aa, Artificial Sequence
  Description of Artificial Sequence: Synthetic peptide
  Seed: SIGKVCRTLLAKSVF
SIFKVNRKLLLKSVF

SEQ ID NO: 264570 - protein, 15 aa, Artificial Sequence
  Description of Artificial Sequence: Synthetic peptide
  Seed: SIGKVCRTLLAKSVF
SIFKVNRKLLMKSVF

SEQ ID NO: 264571 - protein, 15 aa, Artificial Sequence
  Description of Artificial Sequence: Synthetic peptide
  Seed: SIGKVCRTLLAKSVF
SIFKVNRKLLNKSVF

SEQ ID NO: 264572 - protein, 15 aa, Artificial Sequence
  Description of Artificial Sequence: Synthetic peptide
  Seed: SIGKVCRTLLAKSVF
SIFKVNRKLLPKSVF

SEQ ID NO: 264573 - protein, 15 aa, Artificial Sequence
  Description of Artificial Sequence: Synthetic peptide
  Seed: SIGKVCRTLLAKSVF
SIFKVNRKLLQKSVF

SEQ ID NO: 264574 - protein, 15 aa, Artificial Sequence
  Description of Artificial Sequence: Synthetic peptide
  Seed: SIGKVCRTLLAKSVF
SIFKVNRKLLRKSVF

SEQ ID NO: 264575 - protein, 15 aa, Artificial Sequence
  Description of Artificial Sequence: Synthetic peptide
  Seed: SIGKVCRTLLAKSVF
SIFKVNRKLLSKSVF

SEQ ID NO: 264576 - protein, 15 aa, Artificial Sequence
  Description of Artificial Sequence: Synthetic peptide
  Seed: SIGKVCRTLLAKSVF
SIFKVNRKLLTKSVF

SEQ ID NO: 264577 - protein, 15 aa, Artificial Sequence
  Description of Artificial Sequence: Synthetic peptide
  Seed: SIGKVCRTLLAKSVF
SIFKVNRKLLVKSVF

SEQ ID NO: 264578 - protein, 15 aa, Artificial Sequence
  Description of Artificial Sequence: Synthetic peptide
  Seed: SIGKVCRTLLAKSVF
SIFKVNRKLLWKSVF

SEQ ID NO: 264579 - protein, 15 aa, Artificial Sequence
  Description of Artificial Sequence: Synthetic peptide
  Seed: SIGKVCRTLLAKSVF
SIFKVNRKLLYKSVF

SEQ ID NO: 264580 - protein, 15 aa, Artificial Sequence
  Description of Artificial Sequence: Synthetic peptide
  Seed: SIGKVCRTLLAKSVF
SIFKVNRNLLAKSVF

SEQ ID NO: 264581 - protein, 15 aa, Artificial Sequence
  Description of Artificial Sequence: Synthetic peptide
  Seed: SIGKVCRTLLAKSVF
SIFKVNRNLLDKSVF

SEQ ID NO: 264582 - protein, 15 aa, Artificial Sequence
  Description of Artificial Sequence: Synthetic peptide
  Seed: SIGKVCRTLLAKSVF
SIFKVNRNLLGKSVF

SEQ ID NO: 264583 - protein, 15 aa, Artificial Sequence
  Description of Artificial Sequence: Synthetic peptide
  Seed: SIGKVCRTLLAKSVF
SIFKVNRNLLRKSVF

SEQ ID NO: 264584 - protein, 15 aa, Artificial Sequence
  Description of Artificial Sequence: Synthetic peptide
  Seed: SIGKVCRTLLAKSVF
SIFKVNRNLLSKSVF

SEQ ID NO: 264585 - protein, 15 aa, Artificial Sequence
  Description of Artificial Sequence: Synthetic peptide
  Seed: SIGKVCRTLLAKSVF
SIFKVNRPLLAKSVF

SEQ ID NO: 264586 - protein, 15 aa, Artificial Sequence
  Description of Artificial Sequence: Synthetic peptide
  Seed: SIGKVCRTLLAKSVF
SIFKVNRPLLGKSVF

SEQ ID NO: 264587 - protein, 15 aa, Artificial Sequence
  Description of Artificial Sequence: Synthetic peptide
  Seed: SIGKVCRTLLAKSVF
SIFKVNRPLLSKSVF

SEQ ID NO: 264588 - protein, 15 aa, Artificial Sequence
  Description of Artificial Sequence: Synthetic peptide
  Seed: SIGKVCRTLLAKSVF
SIFKVNRRLLAKSVF

SEQ ID NO: 264589 - protein, 15 aa, Artificial Sequence
  Description of Artificial Sequence: Synthetic peptide
  Seed: SIGKVCRTLLAKSVF
SIFKVNRRLLCKSVF

SEQ ID NO: 264590 - protein, 15 aa, Artificial Sequence
  Description of Artificial Sequence: Synthetic peptide
  Seed: SIGKVCRTLLAKSVF
SIFKVNRRLLDKSVF

SEQ ID NO: 264591 - protein, 15 aa, Artificial Sequence
  Description of Artificial Sequence: Synthetic peptide
  Seed: SIGKVCRTLLAKSVF
SIFKVNRRLLEKSVF

SEQ ID NO: 264592 - protein, 15 aa, Artificial Sequence
  Description of Artificial Sequence: Synthetic peptide
  Seed: SIGKVCRTLLAKSVF
SIFKVNRRLLFKSVF

SEQ ID NO: 264593 - protein, 15 aa, Artificial Sequence
  Description of Artificial Sequence: Synthetic peptide
  Seed: SIGKVCRTLLAKSVF
SIFKVNRRLLGKSVF

SEQ ID NO: 264594 - protein, 15 aa, Artificial Sequence
  Description of Artificial Sequence: Synthetic peptide
  Seed: SIGKVCRTLLAKSVF
SIFKVNRRLLHKSVF

SEQ ID NO: 264595 - protein, 15 aa, Artificial Sequence
  Description of Artificial Sequence: Synthetic peptide
  Seed: SIGKVCRTLLAKSVF
SIFKVNRRLLIKSVF

SEQ ID NO: 264596 - protein, 15 aa, Artificial Sequence
  Description of Artificial Sequence: Synthetic peptide
  Seed: SIGKVCRTLLAKSVF
SIFKVNRRLLKKSVF

SEQ ID NO: 264597 - protein, 15 aa, Artificial Sequence
  Description of Artificial Sequence: Synthetic peptide
  Seed: SIGKVCRTLLAKSVF
SIFKVNRRLLLKSVF

SEQ ID NO: 264598 - protein, 15 aa, Artificial Sequence
  Description of Artificial Sequence: Synthetic peptide
  Seed: SIGKVCRTLLAKSVF
SIFKVNRRLLMKSVF

SEQ ID NO: 264599 - protein, 15 aa, Artificial Sequence
  Description of Artificial Sequence: Synthetic peptide
  Seed: SIGKVCRTLLAKSVF
SIFKVNRRLLNKSVF

SEQ ID NO: 264600 - protein, 15 aa, Artificial Sequence
  Description of Artificial Sequence: Synthetic peptide
  Seed: SIGKVCRTLLAKSVF
SIFKVNRRLLPKSVF

SEQ ID NO: 264601 - protein, 15 aa, Artificial Sequence
  Description of Artificial Sequence: Synthetic peptide
  Seed: SIGKVCRTLLAKSVF
SIFKVNRRLLQKSVF

SEQ ID NO: 264602 - protein, 15 aa, Artificial Sequence
  Description of Artificial Sequence: Synthetic peptide
  Seed: SIGKVCRTLLAKSVF
SIFKVNRRLLRKSVF

SEQ ID NO: 264603 - protein, 15 aa, Artificial Sequence
  Description of Artificial Sequence: Synthetic peptide
  Seed: SIGKVCRTLLAKSVF
SIFKVNRRLLSKSVF

SEQ ID NO: 264604 - protein, 15 aa, Artificial Sequence
  Description of Artificial Sequence: Synthetic peptide
  Seed: SIGKVCRTLLAKSVF
SIFKVNRRLLTKSVF

SEQ ID NO: 264605 - protein, 15 aa, Artificial Sequence
  Description of Artificial Sequence: Synthetic peptide
  Seed: SIGKVCRTLLAKSVF
SIFKVNRRLLVKSVF

SEQ ID NO: 264606 - protein, 15 aa, Artificial Sequence
  Description of Artificial Sequence: Synthetic peptide
  Seed: SIGKVCRTLLAKSVF
SIFKVNRRLLWKSVF

SEQ ID NO: 264607 - protein, 15 aa, Artificial Sequence
  Description of Artificial Sequence: Synthetic peptide
  Seed: SIGKVCRTLLAKSVF
SIFKVNRRLLYKSVF

SEQ ID NO: 264608 - protein, 15 aa, Artificial Sequence
  Description of Artificial Sequence: Synthetic peptide
  Seed: SIGKVCRTLLAKSVF
SIFKVNRSLLAKSVF

SEQ ID NO: 264609 - protein, 15 aa, Artificial Sequence
  Description of Artificial Sequence: Synthetic peptide
  Seed: SIGKVCRTLLAKSVF
SIFKVNRSLLGKSVF

SEQ ID NO: 264610 - protein, 15 aa, Artificial Sequence
  Description of Artificial Sequence: Synthetic peptide
  Seed: SIGKVCRTLLAKSVF
SIFKVNRSLLHKSVF

SEQ ID NO: 264611 - protein, 15 aa, Artificial Sequence
  Description of Artificial Sequence: Synthetic peptide
  Seed: SIGKVCRTLLAKSVF
SIFKVNRSLLRKSVF

SEQ ID NO: 264612 - protein, 15 aa, Artificial Sequence
  Description of Artificial Sequence: Synthetic peptide
  Seed: SIGKVCRTLLAKSVF
SIFKVNRSLLSKSVF

SEQ ID NO: 264613 - protein, 15 aa, Artificial Sequence
  Description of Artificial Sequence: Synthetic peptide
  Seed: SIGKVCRTLLAKSVF
SIFKVNRTLLAKSVF

SEQ ID NO: 264614 - protein, 15 aa, Artificial Sequence
  Description of Artificial Sequence: Synthetic peptide
  Seed: SIGKVCRTLLAKSVF
SIFKVNRTLLGKSVF

SEQ ID NO: 264615 - protein, 15 aa, Artificial Sequence
  Description of Artificial Sequence: Synthetic peptide
  Seed: SIGKVCRTLLAKSVF
SIFKVNRTLLHKSVF

SEQ ID NO: 264616 - protein, 15 aa, Artificial Sequence
  Description of Artificial Sequence: Synthetic peptide
  Seed: SIGKVCRTLLAKSVF
SIFKVNRTLLKKSVF

SEQ ID NO: 264617 - protein, 15 aa, Artificial Sequence
  Description of Artificial Sequence: Synthetic peptide
  Seed: SIGKVCRTLLAKSVF
SIFKVNRTLLRKSVF

SEQ ID NO: 264618 - protein, 15 aa, Artificial Sequence
  Description of Artificial Sequence: Synthetic peptide
  Seed: SIGKVCRTLLAKSVF
SIFKVNRTLLSKSVF

SEQ ID NO: 264619 - protein, 15 aa, Artificial Sequence
  Description of Artificial Sequence: Synthetic peptide
  Seed: SIGKVCRTLLAKSVF
SIFKVNRVLLHKSVF

SEQ ID NO: 264620 - protein, 15 aa, Artificial Sequence
  Description of Artificial Sequence: Synthetic peptide
  Seed: SIGKVCRTLLAKSVF
SIFKVNRVLLRKSVF

SEQ ID NO: 264621 - protein, 15 aa, Artificial Sequence
  Description of Artificial Sequence: Synthetic peptide
  Seed: SIGKVCRTLLAKSVF
SIFKVNRVLLSKSVF

SEQ ID NO: 264622 - protein, 15 aa, Artificial Sequence
  Description of Artificial Sequence: Synthetic peptide
  Seed: SIGKVCRTLLAKSVF
SIFKVPRRLLAKSVF

SEQ ID NO: 264623 - protein, 15 aa, Artificial Sequence
  Description of Artificial Sequence: Synthetic peptide
  Seed: SIGKVCRTLLAKSVF
SIFKVPRRLLSKSVF

SEQ ID NO: 264624 - protein, 15 aa, Artificial Sequence
  Description of Artificial Sequence: Synthetic peptide
  Seed: SIGKVCRTLLAKSVF
SIFKVQRALLAKSVF

SEQ ID NO: 264625 - protein, 15 aa, Artificial Sequence
  Description of Artificial Sequence: Synthetic peptide
  Seed: SIGKVCRTLLAKSVF
SIFKVQRALLDKSVF

SEQ ID NO: 264626 - protein, 15 aa, Artificial Sequence
  Description of Artificial Sequence: Synthetic peptide
  Seed: SIGKVCRTLLAKSVF
SIFKVQRALLGKSVF

SEQ ID NO: 264627 - protein, 15 aa, Artificial Sequence
  Description of Artificial Sequence: Synthetic peptide
  Seed: SIGKVCRTLLAKSVF
SIFKVQRALLHKSVF

SEQ ID NO: 264628 - protein, 15 aa, Artificial Sequence
  Description of Artificial Sequence: Synthetic peptide
  Seed: SIGKVCRTLLAKSVF
SIFKVQRALLKKSVF

SEQ ID NO: 264629 - protein, 15 aa, Artificial Sequence
  Description of Artificial Sequence: Synthetic peptide
  Seed: SIGKVCRTLLAKSVF
SIFKVQRALLMKSVF

SEQ ID NO: 264630 - protein, 15 aa, Artificial Sequence
  Description of Artificial Sequence: Synthetic peptide
  Seed: SIGKVCRTLLAKSVF
SIFKVQRALLNKSVF

SEQ ID NO: 264631 - protein, 15 aa, Artificial Sequence
  Description of Artificial Sequence: Synthetic peptide
  Seed: SIGKVCRTLLAKSVF
SIFKVQRALLQKSVF

SEQ ID NO: 264632 - protein, 15 aa, Artificial Sequence
  Description of Artificial Sequence: Synthetic peptide
  Seed: SIGKVCRTLLAKSVF
SIFKVQRALLRKSVF

SEQ ID NO: 264633 - protein, 15 aa, Artificial Sequence
  Description of Artificial Sequence: Synthetic peptide
  Seed: SIGKVCRTLLAKSVF
SIFKVQRALLSKSVF

SEQ ID NO: 264634 - protein, 15 aa, Artificial Sequence
  Description of Artificial Sequence: Synthetic peptide
  Seed: SIGKVCRTLLAKSVF
SIFKVQRALLTKSVF

SEQ ID NO: 264635 - protein, 15 aa, Artificial Sequence
  Description of Artificial Sequence: Synthetic peptide
  Seed: SIGKVCRTLLAKSVF
SIFKVQRALLVKSVF

SEQ ID NO: 264636 - protein, 15 aa, Artificial Sequence
  Description of Artificial Sequence: Synthetic peptide
  Seed: SIGKVCRTLLAKSVF
SIFKVQRALLYKSVF

SEQ ID NO: 264637 - protein, 15 aa, Artificial Sequence
  Description of Artificial Sequence: Synthetic peptide
  Seed: SIGKVCRTLLAKSVF
SIFKVQRDLLAKSVF

SEQ ID NO: 264638 - protein, 15 aa, Artificial Sequence
  Description of Artificial Sequence: Synthetic peptide
  Seed: SIGKVCRTLLAKSVF
SIFKVQRDLLDKSVF

SEQ ID NO: 264639 - protein, 15 aa, Artificial Sequence
  Description of Artificial Sequence: Synthetic peptide
  Seed: SIGKVCRTLLAKSVF
SIFKVQRDLLSKSVF

SEQ ID NO: 264640 - protein, 15 aa, Artificial Sequence
  Description of Artificial Sequence: Synthetic peptide
  Seed: SIGKVCRTLLAKSVF
SIFKVQRGLLAKSVF

SEQ ID NO: 264641 - protein, 15 aa, Artificial Sequence
  Description of Artificial Sequence: Synthetic peptide
  Seed: SIGKVCRTLLAKSVF
SIFKVQRGLLGKSVF

SEQ ID NO: 264642 - protein, 15 aa, Artificial Sequence
  Description of Artificial Sequence: Synthetic peptide
  Seed: SIGKVCRTLLAKSVF
SIFKVQRGLLQKSVF

SEQ ID NO: 264643 - protein, 15 aa, Artificial Sequence
  Description of Artificial Sequence: Synthetic peptide
  Seed: SIGKVCRTLLAKSVF
SIFKVQRGLLSKSVF

SEQ ID NO: 264644 - protein, 15 aa, Artificial Sequence
  Description of Artificial Sequence: Synthetic peptide
  Seed: SIGKVCRTLLAKSVF
SIFKVQRHLLAKSVF

SEQ ID NO: 264645 - protein, 15 aa, Artificial Sequence
  Description of Artificial Sequence: Synthetic peptide
  Seed: SIGKVCRTLLAKSVF
SIFKVQRHLLGKSVF

SEQ ID NO: 264646 - protein, 15 aa, Artificial Sequence
  Description of Artificial Sequence: Synthetic peptide
  Seed: SIGKVCRTLLAKSVF
SIFKVQRHLLHKSVF

SEQ ID NO: 264647 - protein, 15 aa, Artificial Sequence
  Description of Artificial Sequence: Synthetic peptide
  Seed: SIGKVCRTLLAKSVF
SIFKVQRHLLIKSVF

SEQ ID NO: 264648 - protein, 15 aa, Artificial Sequence
  Description of Artificial Sequence: Synthetic peptide
  Seed: SIGKVCRTLLAKSVF
SIFKVQRHLLLKSVF

SEQ ID NO: 264649 - protein, 15 aa, Artificial Sequence
  Description of Artificial Sequence: Synthetic peptide
  Seed: SIGKVCRTLLAKSVF
SIFKVQRHLLMKSVF

SEQ ID NO: 264650 - protein, 15 aa, Artificial Sequence
  Description of Artificial Sequence: Synthetic peptide
  Seed: SIGKVCRTLLAKSVF
SIFKVQRHLLNKSVF

SEQ ID NO: 264651 - protein, 15 aa, Artificial Sequence
  Description of Artificial Sequence: Synthetic peptide
  Seed: SIGKVCRTLLAKSVF
SIFKVQRHLLQKSVF

SEQ ID NO: 264652 - protein, 15 aa, Artificial Sequence
  Description of Artificial Sequence: Synthetic peptide
  Seed: SIGKVCRTLLAKSVF
SIFKVQRHLLRKSVF

SEQ ID NO: 264653 - protein, 15 aa, Artificial Sequence
  Description of Artificial Sequence: Synthetic peptide
  Seed: SIGKVCRTLLAKSVF
SIFKVQRHLLSKSVF

SEQ ID NO: 264654 - protein, 15 aa, Artificial Sequence
  Description of Artificial Sequence: Synthetic peptide
  Seed: SIGKVCRTLLAKSVF
SIFKVQRHLLTKSVF

SEQ ID NO: 264655 - protein, 15 aa, Artificial Sequence
  Description of Artificial Sequence: Synthetic peptide
  Seed: SIGKVCRTLLAKSVF
SIFKVQRHLLVKSVF

SEQ ID NO: 264656 - protein, 15 aa, Artificial Sequence
  Description of Artificial Sequence: Synthetic peptide
  Seed: SIGKVCRTLLAKSVF
SIFKVQRHLLYKSVF

SEQ ID NO: 264657 - protein, 15 aa, Artificial Sequence
  Description of Artificial Sequence: Synthetic peptide
  Seed: SIGKVCRTLLAKSVF
SIFKVQRILLAKSVF

SEQ ID NO: 264658 - protein, 15 aa, Artificial Sequence
  Description of Artificial Sequence: Synthetic peptide
  Seed: SIGKVCRTLLAKSVF
SIFKVQRILLGKSVF

SEQ ID NO: 264659 - protein, 15 aa, Artificial Sequence
  Description of Artificial Sequence: Synthetic peptide
  Seed: SIGKVCRTLLAKSVF
SIFKVQRILLHKSVF

SEQ ID NO: 264660 - protein, 15 aa, Artificial Sequence
  Description of Artificial Sequence: Synthetic peptide
  Seed: SIGKVCRTLLAKSVF
SIFKVQRILLQKSVF

SEQ ID NO: 264661 - protein, 15 aa, Artificial Sequence
  Description of Artificial Sequence: Synthetic peptide
  Seed: SIGKVCRTLLAKSVF
SIFKVQRILLRKSVF

SEQ ID NO: 264662 - protein, 15 aa, Artificial Sequence
  Description of Artificial Sequence: Synthetic peptide
  Seed: SIGKVCRTLLAKSVF
SIFKVQRILLSKSVF

SEQ ID NO: 264663 - protein, 15 aa, Artificial Sequence
  Description of Artificial Sequence: Synthetic peptide
  Seed: SIGKVCRTLLAKSVF
SIFKVQRKLLAKSVF

SEQ ID NO: 264664 - protein, 15 aa, Artificial Sequence
  Description of Artificial Sequence: Synthetic peptide
  Seed: SIGKVCRTLLAKSVF
SIFKVQRKLLCKSVF

SEQ ID NO: 264665 - protein, 15 aa, Artificial Sequence
  Description of Artificial Sequence: Synthetic peptide
  Seed: SIGKVCRTLLAKSVF
SIFKVQRKLLDKSVF

SEQ ID NO: 264666 - protein, 15 aa, Artificial Sequence
  Description of Artificial Sequence: Synthetic peptide
  Seed: SIGKVCRTLLAKSVF
SIFKVQRKLLEKSVF

SEQ ID NO: 264667 - protein, 15 aa, Artificial Sequence
  Description of Artificial Sequence: Synthetic peptide
  Seed: SIGKVCRTLLAKSVF
SIFKVQRKLLFKSVF

SEQ ID NO: 264668 - protein, 15 aa, Artificial Sequence
  Description of Artificial Sequence: Synthetic peptide
  Seed: SIGKVCRTLLAKSVF
SIFKVQRKLLGKSVF

SEQ ID NO: 264669 - protein, 15 aa, Artificial Sequence
  Description of Artificial Sequence: Synthetic peptide
  Seed: SIGKVCRTLLAKSVF
SIFKVQRKLLHKSVF

SEQ ID NO: 264670 - protein, 15 aa, Artificial Sequence
  Description of Artificial Sequence: Synthetic peptide
  Seed: SIGKVCRTLLAKSVF
SIFKVQRKLLIKSVF

SEQ ID NO: 264671 - protein, 15 aa, Artificial Sequence
  Description of Artificial Sequence: Synthetic peptide
  Seed: SIGKVCRTLLAKSVF
SIFKVQRKLLKKSVF

SEQ ID NO: 264672 - protein, 15 aa, Artificial Sequence
  Description of Artificial Sequence: Synthetic peptide
  Seed: SIGKVCRTLLAKSVF
SIFKVQRKLLLKSVF

SEQ ID NO: 264673 - protein, 15 aa, Artificial Sequence
  Description of Artificial Sequence: Synthetic peptide
  Seed: SIGKVCRTLLAKSVF
SIFKVQRKLLMKSVF

SEQ ID NO: 264674 - protein, 15 aa, Artificial Sequence
  Description of Artificial Sequence: Synthetic peptide
  Seed: SIGKVCRTLLAKSVF
SIFKVQRKLLNKSVF

SEQ ID NO: 264675 - protein, 15 aa, Artificial Sequence
  Description of Artificial Sequence: Synthetic peptide
  Seed: SIGKVCRTLLAKSVF
SIFKVQRKLLPKSVF

SEQ ID NO: 264676 - protein, 15 aa, Artificial Sequence
  Description of Artificial Sequence: Synthetic peptide
  Seed: SIGKVCRTLLAKSVF
SIFKVQRKLLQKSVF

SEQ ID NO: 264677 - protein, 15 aa, Artificial Sequence
  Description of Artificial Sequence: Synthetic peptide
  Seed: SIGKVCRTLLAKSVF
SIFKVQRKLLRKSVF

SEQ ID NO: 264678 - protein, 15 aa, Artificial Sequence
  Description of Artificial Sequence: Synthetic peptide
  Seed: SIGKVCRTLLAKSVF
SIFKVQRKLLSKSVF

SEQ ID NO: 264679 - protein, 15 aa, Artificial Sequence
  Description of Artificial Sequence: Synthetic peptide
  Seed: SIGKVCRTLLAKSVF
SIFKVQRKLLTKSVF

SEQ ID NO: 264680 - protein, 15 aa, Artificial Sequence
  Description of Artificial Sequence: Synthetic peptide
  Seed: SIGKVCRTLLAKSVF
SIFKVQRKLLVKSVF

SEQ ID NO: 264681 - protein, 15 aa, Artificial Sequence
  Description of Artificial Sequence: Synthetic peptide
  Seed: SIGKVCRTLLAKSVF
SIFKVQRKLLWKSVF

SEQ ID NO: 264682 - protein, 15 aa, Artificial Sequence
  Description of Artificial Sequence: Synthetic peptide
  Seed: SIGKVCRTLLAKSVF
SIFKVQRKLLYKSVF

SEQ ID NO: 264683 - protein, 15 aa, Artificial Sequence
  Description of Artificial Sequence: Synthetic peptide
  Seed: SIGKVCRTLLAKSVF
SIFKVQRLLLGKSVF

SEQ ID NO: 264684 - protein, 15 aa, Artificial Sequence
  Description of Artificial Sequence: Synthetic peptide
  Seed: SIGKVCRTLLAKSVF
SIFKVQRMLLAKSVF

SEQ ID NO: 264685 - protein, 15 aa, Artificial Sequence
  Description of Artificial Sequence: Synthetic peptide
  Seed: SIGKVCRTLLAKSVF
SIFKVQRMLLGKSVF

SEQ ID NO: 264686 - protein, 15 aa, Artificial Sequence
  Description of Artificial Sequence: Synthetic peptide
  Seed: SIGKVCRTLLAKSVF
SIFKVQRMLLRKSVF

SEQ ID NO: 264687 - protein, 15 aa, Artificial Sequence
  Description of Artificial Sequence: Synthetic peptide
  Seed: SIGKVCRTLLAKSVF
SIFKVQRMLLSKSVF

SEQ ID NO: 264688 - protein, 15 aa, Artificial Sequence
  Description of Artificial Sequence: Synthetic peptide
  Seed: SIGKVCRTLLAKSVF
SIFKVQRNLLAKSVF

SEQ ID NO: 264689 - protein, 15 aa, Artificial Sequence
  Description of Artificial Sequence: Synthetic peptide
  Seed: SIGKVCRTLLAKSVF
SIFKVQRNLLDKSVF

SEQ ID NO: 264690 - protein, 15 aa, Artificial Sequence
  Description of Artificial Sequence: Synthetic peptide
  Seed: SIGKVCRTLLAKSVF
SIFKVQRNLLEKSVF

SEQ ID NO: 264691 - protein, 15 aa, Artificial Sequence
  Description of Artificial Sequence: Synthetic peptide
  Seed: SIGKVCRTLLAKSVF
SIFKVQRNLLGKSVF

SEQ ID NO: 264692 - protein, 15 aa, Artificial Sequence
  Description of Artificial Sequence: Synthetic peptide
  Seed: SIGKVCRTLLAKSVF
SIFKVQRNLLHKSVF

SEQ ID NO: 264693 - protein, 15 aa, Artificial Sequence
  Description of Artificial Sequence: Synthetic peptide
  Seed: SIGKVCRTLLAKSVF
SIFKVQRNLLKKSVF

SEQ ID NO: 264694 - protein, 15 aa, Artificial Sequence
  Description of Artificial Sequence: Synthetic peptide
  Seed: SIGKVCRTLLAKSVF
SIFKVQRNLLMKSVF

SEQ ID NO: 264695 - protein, 15 aa, Artificial Sequence
  Description of Artificial Sequence: Synthetic peptide
  Seed: SIGKVCRTLLAKSVF
SIFKVQRNLLNKSVF

SEQ ID NO: 264696 - protein, 15 aa, Artificial Sequence
  Description of Artificial Sequence: Synthetic peptide
  Seed: SIGKVCRTLLAKSVF
SIFKVQRNLLQKSVF

SEQ ID NO: 264697 - protein, 15 aa, Artificial Sequence
  Description of Artificial Sequence: Synthetic peptide
  Seed: SIGKVCRTLLAKSVF
SIFKVQRNLLRKSVF

SEQ ID NO: 264698 - protein, 15 aa, Artificial Sequence
  Description of Artificial Sequence: Synthetic peptide
  Seed: SIGKVCRTLLAKSVF
SIFKVQRNLLSKSVF

SEQ ID NO: 264699 - protein, 15 aa, Artificial Sequence
  Description of Artificial Sequence: Synthetic peptide
  Seed: SIGKVCRTLLAKSVF
SIFKVQRNLLTKSVF

SEQ ID NO: 264700 - protein, 15 aa, Artificial Sequence
  Description of Artificial Sequence: Synthetic peptide
  Seed: SIGKVCRTLLAKSVF
SIFKVQRNLLVKSVF

SEQ ID NO: 264701 - protein, 15 aa, Artificial Sequence
  Description of Artificial Sequence: Synthetic peptide
  Seed: SIGKVCRTLLAKSVF
SIFKVQRNLLYKSVF

SEQ ID NO: 264702 - protein, 15 aa, Artificial Sequence
  Description of Artificial Sequence: Synthetic peptide
  Seed: SIGKVCRTLLAKSVF
SIFKVQRPLLAKSVF

SEQ ID NO: 264703 - protein, 15 aa, Artificial Sequence
  Description of Artificial Sequence: Synthetic peptide
  Seed: SIGKVCRTLLAKSVF
SIFKVQRPLLGKSVF

SEQ ID NO: 264704 - protein, 15 aa, Artificial Sequence
  Description of Artificial Sequence: Synthetic peptide
  Seed: SIGKVCRTLLAKSVF
SIFKVQRPLLHKSVF

SEQ ID NO: 264705 - protein, 15 aa, Artificial Sequence
  Description of Artificial Sequence: Synthetic peptide
  Seed: SIGKVCRTLLAKSVF
SIFKVQRPLLQKSVF

SEQ ID NO: 264706 - protein, 15 aa, Artificial Sequence
  Description of Artificial Sequence: Synthetic peptide
  Seed: SIGKVCRTLLAKSVF
SIFKVQRPLLRKSVF

SEQ ID NO: 264707 - protein, 15 aa, Artificial Sequence
  Description of Artificial Sequence: Synthetic peptide
  Seed: SIGKVCRTLLAKSVF
SIFKVQRPLLSKSVF

SEQ ID NO: 264708 - protein, 15 aa, Artificial Sequence
  Description of Artificial Sequence: Synthetic peptide
  Seed: SIGKVCRTLLAKSVF
SIFKVQRPLLVKSVF

SEQ ID NO: 264709 - protein, 15 aa, Artificial Sequence
  Description of Artificial Sequence: Synthetic peptide
  Seed: SIGKVCRTLLAKSVF
SIFKVQRPLLYKSVF

SEQ ID NO: 264710 - protein, 15 aa, Artificial Sequence
  Description of Artificial Sequence: Synthetic peptide
  Seed: SIGKVCRTLLAKSVF
SIFKVQRQLLAKSVF

SEQ ID NO: 264711 - protein, 15 aa, Artificial Sequence
  Description of Artificial Sequence: Synthetic peptide
  Seed: SIGKVCRTLLAKSVF
SIFKVQRQLLGKSVF

SEQ ID NO: 264712 - protein, 15 aa, Artificial Sequence
  Description of Artificial Sequence: Synthetic peptide
  Seed: SIGKVCRTLLAKSVF
SIFKVQRQLLHKSVF

SEQ ID NO: 264713 - protein, 15 aa, Artificial Sequence
  Description of Artificial Sequence: Synthetic peptide
  Seed: SIGKVCRTLLAKSVF
SIFKVQRQLLQKSVF

SEQ ID NO: 264714 - protein, 15 aa, Artificial Sequence
  Description of Artificial Sequence: Synthetic peptide
  Seed: SIGKVCRTLLAKSVF
SIFKVQRQLLRKSVF

SEQ ID NO: 264715 - protein, 15 aa, Artificial Sequence
  Description of Artificial Sequence: Synthetic peptide
  Seed: SIGKVCRTLLAKSVF
SIFKVQRQLLSKSVF

SEQ ID NO: 264716 - protein, 15 aa, Artificial Sequence
  Description of Artificial Sequence: Synthetic peptide
  Seed: SIGKVCRTLLAKSVF
SIFKVQRRLLAKSVF

SEQ ID NO: 264717 - protein, 15 aa, Artificial Sequence
  Description of Artificial Sequence: Synthetic peptide
  Seed: SIGKVCRTLLAKSVF
SIFKVQRRLLCKSVF

SEQ ID NO: 264718 - protein, 15 aa, Artificial Sequence
  Description of Artificial Sequence: Synthetic peptide
  Seed: SIGKVCRTLLAKSVF
SIFKVQRRLLDKSVF

SEQ ID NO: 264719 - protein, 15 aa, Artificial Sequence
  Description of Artificial Sequence: Synthetic peptide
  Seed: SIGKVCRTLLAKSVF
SIFKVQRRLLEKSVF

SEQ ID NO: 264720 - protein, 15 aa, Artificial Sequence
  Description of Artificial Sequence: Synthetic peptide
  Seed: SIGKVCRTLLAKSVF
SIFKVQRRLLFKSVF

SEQ ID NO: 264721 - protein, 15 aa, Artificial Sequence
  Description of Artificial Sequence: Synthetic peptide
  Seed: SIGKVCRTLLAKSVF
SIFKVQRRLLGKSVF

SEQ ID NO: 264722 - protein, 15 aa, Artificial Sequence
  Description of Artificial Sequence: Synthetic peptide
  Seed: SIGKVCRTLLAKSVF
SIFKVQRRLLHKSVF

SEQ ID NO: 264723 - protein, 15 aa, Artificial Sequence
  Description of Artificial Sequence: Synthetic peptide
  Seed: SIGKVCRTLLAKSVF
SIFKVQRRLLIKSVF

SEQ ID NO: 264724 - protein, 15 aa, Artificial Sequence
  Description of Artificial Sequence: Synthetic peptide
  Seed: SIGKVCRTLLAKSVF
SIFKVQRRLLKKSVF

SEQ ID NO: 264725 - protein, 15 aa, Artificial Sequence
  Description of Artificial Sequence: Synthetic peptide
  Seed: SIGKVCRTLLAKSVF
SIFKVQRRLLLKSVF

SEQ ID NO: 264726 - protein, 15 aa, Artificial Sequence
  Description of Artificial Sequence: Synthetic peptide
  Seed: SIGKVCRTLLAKSVF
SIFKVQRRLLMKSVF

SEQ ID NO: 264727 - protein, 15 aa, Artificial Sequence
  Description of Artificial Sequence: Synthetic peptide
  Seed: SIGKVCRTLLAKSVF
SIFKVQRRLLNKSVF

SEQ ID NO: 264728 - protein, 15 aa, Artificial Sequence
  Description of Artificial Sequence: Synthetic peptide
  Seed: SIGKVCRTLLAKSVF
SIFKVQRRLLPKSVF

SEQ ID NO: 264729 - protein, 15 aa, Artificial Sequence
  Description of Artificial Sequence: Synthetic peptide
  Seed: SIGKVCRTLLAKSVF
SIFKVQRRLLQKSVF

SEQ ID NO: 264730 - protein, 15 aa, Artificial Sequence
  Description of Artificial Sequence: Synthetic peptide
  Seed: SIGKVCRTLLAKSVF
SIFKVQRRLLRKSVF

SEQ ID NO: 264731 - protein, 15 aa, Artificial Sequence
  Description of Artificial Sequence: Synthetic peptide
  Seed: SIGKVCRTLLAKSVF
SIFKVQRRLLSKSVF

SEQ ID NO: 264732 - protein, 15 aa, Artificial Sequence
  Description of Artificial Sequence: Synthetic peptide
  Seed: SIGKVCRTLLAKSVF
SIFKVQRRLLTKSVF

SEQ ID NO: 264733 - protein, 15 aa, Artificial Sequence
  Description of Artificial Sequence: Synthetic peptide
  Seed: SIGKVCRTLLAKSVF
SIFKVQRRLLVKSVF

SEQ ID NO: 264734 - protein, 15 aa, Artificial Sequence
  Description of Artificial Sequence: Synthetic peptide
  Seed: SIGKVCRTLLAKSVF
SIFKVQRRLLWKSVF

SEQ ID NO: 264735 - protein, 15 aa, Artificial Sequence
  Description of Artificial Sequence: Synthetic peptide
  Seed: SIGKVCRTLLAKSVF
SIFKVQRRLLYKSVF

SEQ ID NO: 264736 - protein, 15 aa, Artificial Sequence
  Description of Artificial Sequence: Synthetic peptide
  Seed: SIGKVCRTLLAKSVF
SIFKVQRSLLAKSVF

SEQ ID NO: 264737 - protein, 15 aa, Artificial Sequence
  Description of Artificial Sequence: Synthetic peptide
  Seed: SIGKVCRTLLAKSVF
SIFKVQRSLLDKSVF

SEQ ID NO: 264738 - protein, 15 aa, Artificial Sequence
  Description of Artificial Sequence: Synthetic peptide
  Seed: SIGKVCRTLLAKSVF
SIFKVQRSLLEKSVF

SEQ ID NO: 264739 - protein, 15 aa, Artificial Sequence
  Description of Artificial Sequence: Synthetic peptide
  Seed: SIGKVCRTLLAKSVF
SIFKVQRSLLGKSVF

SEQ ID NO: 264740 - protein, 15 aa, Artificial Sequence
  Description of Artificial Sequence: Synthetic peptide
  Seed: SIGKVCRTLLAKSVF
SIFKVQRSLLHKSVF

SEQ ID NO: 264741 - protein, 15 aa, Artificial Sequence
  Description of Artificial Sequence: Synthetic peptide
  Seed: SIGKVCRTLLAKSVF
SIFKVQRSLLKKSVF

SEQ ID NO: 264742 - protein, 15 aa, Artificial Sequence
  Description of Artificial Sequence: Synthetic peptide
  Seed: SIGKVCRTLLAKSVF
SIFKVQRSLLMKSVF

SEQ ID NO: 264743 - protein, 15 aa, Artificial Sequence
  Description of Artificial Sequence: Synthetic peptide
  Seed: SIGKVCRTLLAKSVF
SIFKVQRSLLNKSVF

SEQ ID NO: 264744 - protein, 15 aa, Artificial Sequence
  Description of Artificial Sequence: Synthetic peptide
  Seed: SIGKVCRTLLAKSVF
SIFKVQRSLLQKSVF

SEQ ID NO: 264745 - protein, 15 aa, Artificial Sequence
  Description of Artificial Sequence: Synthetic peptide
  Seed: SIGKVCRTLLAKSVF
SIFKVQRSLLRKSVF

SEQ ID NO: 264746 - protein, 15 aa, Artificial Sequence
  Description of Artificial Sequence: Synthetic peptide
  Seed: SIGKVCRTLLAKSVF
SIFKVQRSLLSKSVF

SEQ ID NO: 264747 - protein, 15 aa, Artificial Sequence
  Description of Artificial Sequence: Synthetic peptide
  Seed: SIGKVCRTLLAKSVF
SIFKVQRSLLTKSVF

SEQ ID NO: 264748 - protein, 15 aa, Artificial Sequence
  Description of Artificial Sequence: Synthetic peptide
  Seed: SIGKVCRTLLAKSVF
SIFKVQRSLLVKSVF

SEQ ID NO: 264749 - protein, 15 aa, Artificial Sequence
  Description of Artificial Sequence: Synthetic peptide
  Seed: SIGKVCRTLLAKSVF
SIFKVQRSLLYKSVF

SEQ ID NO: 264750 - protein, 15 aa, Artificial Sequence
  Description of Artificial Sequence: Synthetic peptide
  Seed: SIGKVCRTLLAKSVF
SIFKVQRTLLAKSVF

SEQ ID NO: 264751 - protein, 15 aa, Artificial Sequence
  Description of Artificial Sequence: Synthetic peptide
  Seed: SIGKVCRTLLAKSVF
SIFKVQRTLLDKSVF

SEQ ID NO: 264752 - protein, 15 aa, Artificial Sequence
  Description of Artificial Sequence: Synthetic peptide
  Seed: SIGKVCRTLLAKSVF
SIFKVQRTLLEKSVF

SEQ ID NO: 264753 - protein, 15 aa, Artificial Sequence
  Description of Artificial Sequence: Synthetic peptide
  Seed: SIGKVCRTLLAKSVF
SIFKVQRTLLGKSVF

SEQ ID NO: 264754 - protein, 15 aa, Artificial Sequence
  Description of Artificial Sequence: Synthetic peptide
  Seed: SIGKVCRTLLAKSVF
SIFKVQRTLLHKSVF

SEQ ID NO: 264755 - protein, 15 aa, Artificial Sequence
  Description of Artificial Sequence: Synthetic peptide
  Seed: SIGKVCRTLLAKSVF
SIFKVQRTLLIKSVF

SEQ ID NO: 264756 - protein, 15 aa, Artificial Sequence
  Description of Artificial Sequence: Synthetic peptide
  Seed: SIGKVCRTLLAKSVF
SIFKVQRTLLKKSVF

SEQ ID NO: 264757 - protein, 15 aa, Artificial Sequence
  Description of Artificial Sequence: Synthetic peptide
  Seed: SIGKVCRTLLAKSVF
SIFKVQRTLLLKSVF

SEQ ID NO: 264758 - protein, 15 aa, Artificial Sequence
  Description of Artificial Sequence: Synthetic peptide
  Seed: SIGKVCRTLLAKSVF
SIFKVQRTLLMKSVF

SEQ ID NO: 264759 - protein, 15 aa, Artificial Sequence
  Description of Artificial Sequence: Synthetic peptide
  Seed: SIGKVCRTLLAKSVF
SIFKVQRTLLNKSVF

SEQ ID NO: 264760 - protein, 15 aa, Artificial Sequence
  Description of Artificial Sequence: Synthetic peptide
  Seed: SIGKVCRTLLAKSVF
SIFKVQRTLLPKSVF

SEQ ID NO: 264761 - protein, 15 aa, Artificial Sequence
  Description of Artificial Sequence: Synthetic peptide
  Seed: SIGKVCRTLLAKSVF
SIFKVQRTLLQKSVF

SEQ ID NO: 264762 - protein, 15 aa, Artificial Sequence
  Description of Artificial Sequence: Synthetic peptide
  Seed: SIGKVCRTLLAKSVF
SIFKVQRTLLRKSVF

SEQ ID NO: 264763 - protein, 15 aa, Artificial Sequence
  Description of Artificial Sequence: Synthetic peptide
  Seed: SIGKVCRTLLAKSVF
SIFKVQRTLLSKSVF

SEQ ID NO: 264764 - protein, 15 aa, Artificial Sequence
  Description of Artificial Sequence: Synthetic peptide
  Seed: SIGKVCRTLLAKSVF
SIFKVQRTLLTKSVF

SEQ ID NO: 264765 - protein, 15 aa, Artificial Sequence
  Description of Artificial Sequence: Synthetic peptide
  Seed: SIGKVCRTLLAKSVF
SIFKVQRTLLVKSVF

SEQ ID NO: 264766 - protein, 15 aa, Artificial Sequence
  Description of Artificial Sequence: Synthetic peptide
  Seed: SIGKVCRTLLAKSVF
SIFKVQRTLLYKSVF

SEQ ID NO: 264767 - protein, 15 aa, Artificial Sequence
  Description of Artificial Sequence: Synthetic peptide
  Seed: SIGKVCRTLLAKSVF
SIFKVQRVLLAKSVF

SEQ ID NO: 264768 - protein, 15 aa, Artificial Sequence
  Description of Artificial Sequence: Synthetic peptide
  Seed: SIGKVCRTLLAKSVF
SIFKVQRVLLDKSVF

SEQ ID NO: 264769 - protein, 15 aa, Artificial Sequence
  Description of Artificial Sequence: Synthetic peptide
  Seed: SIGKVCRTLLAKSVF
SIFKVQRVLLGKSVF

SEQ ID NO: 264770 - protein, 15 aa, Artificial Sequence
  Description of Artificial Sequence: Synthetic peptide
  Seed: SIGKVCRTLLAKSVF
SIFKVQRVLLHKSVF

SEQ ID NO: 264771 - protein, 15 aa, Artificial Sequence
  Description of Artificial Sequence: Synthetic peptide
  Seed: SIGKVCRTLLAKSVF
SIFKVQRVLLKKSVF

SEQ ID NO: 264772 - protein, 15 aa, Artificial Sequence
  Description of Artificial Sequence: Synthetic peptide
  Seed: SIGKVCRTLLAKSVF
SIFKVQRVLLQKSVF

SEQ ID NO: 264773 - protein, 15 aa, Artificial Sequence
  Description of Artificial Sequence: Synthetic peptide
  Seed: SIGKVCRTLLAKSVF
SIFKVQRVLLRKSVF

SEQ ID NO: 264774 - protein, 15 aa, Artificial Sequence
  Description of Artificial Sequence: Synthetic peptide
  Seed: SIGKVCRTLLAKSVF
SIFKVQRVLLSKSVF

SEQ ID NO: 264775 - protein, 15 aa, Artificial Sequence
  Description of Artificial Sequence: Synthetic peptide
  Seed: SIGKVCRTLLAKSVF
SIFKVRRALLAKSVF

SEQ ID NO: 264776 - protein, 15 aa, Artificial Sequence
  Description of Artificial Sequence: Synthetic peptide
  Seed: SIGKVCRTLLAKSVF
SIFKVRRALLDKSVF

SEQ ID NO: 264777 - protein, 15 aa, Artificial Sequence
  Description of Artificial Sequence: Synthetic peptide
  Seed: SIGKVCRTLLAKSVF
SIFKVRRALLGKSVF

SEQ ID NO: 264778 - protein, 15 aa, Artificial Sequence
  Description of Artificial Sequence: Synthetic peptide
  Seed: SIGKVCRTLLAKSVF
SIFKVRRALLHKSVF

SEQ ID NO: 264779 - protein, 15 aa, Artificial Sequence
  Description of Artificial Sequence: Synthetic peptide
  Seed: SIGKVCRTLLAKSVF
SIFKVRRALLKKSVF

SEQ ID NO: 264780 - protein, 15 aa, Artificial Sequence
  Description of Artificial Sequence: Synthetic peptide
  Seed: SIGKVCRTLLAKSVF
SIFKVRRALLMKSVF

SEQ ID NO: 264781 - protein, 15 aa, Artificial Sequence
  Description of Artificial Sequence: Synthetic peptide
  Seed: SIGKVCRTLLAKSVF
SIFKVRRALLNKSVF

SEQ ID NO: 264782 - protein, 15 aa, Artificial Sequence
  Description of Artificial Sequence: Synthetic peptide
  Seed: SIGKVCRTLLAKSVF
SIFKVRRALLQKSVF

SEQ ID NO: 264783 - protein, 15 aa, Artificial Sequence
  Description of Artificial Sequence: Synthetic peptide
  Seed: SIGKVCRTLLAKSVF
SIFKVRRALLRKSVF

SEQ ID NO: 264784 - protein, 15 aa, Artificial Sequence
  Description of Artificial Sequence: Synthetic peptide
  Seed: SIGKVCRTLLAKSVF
SIFKVRRALLSKSVF

SEQ ID NO: 264785 - protein, 15 aa, Artificial Sequence
  Description of Artificial Sequence: Synthetic peptide
  Seed: SIGKVCRTLLAKSVF
SIFKVRRALLTKSVF

SEQ ID NO: 264786 - protein, 15 aa, Artificial Sequence
  Description of Artificial Sequence: Synthetic peptide
  Seed: SIGKVCRTLLAKSVF
SIFKVRRALLYKSVF

SEQ ID NO: 264787 - protein, 15 aa, Artificial Sequence
  Description of Artificial Sequence: Synthetic peptide
  Seed: SIGKVCRTLLAKSVF
SIFKVRRELLAKSVF

SEQ ID NO: 264788 - protein, 15 aa, Artificial Sequence
  Description of Artificial Sequence: Synthetic peptide
  Seed: SIGKVCRTLLAKSVF
SIFKVRRELLSKSVF

SEQ ID NO: 264789 - protein, 15 aa, Artificial Sequence
  Description of Artificial Sequence: Synthetic peptide
  Seed: SIGKVCRTLLAKSVF
SIFKVRRGLLAKSVF

SEQ ID NO: 264790 - protein, 15 aa, Artificial Sequence
  Description of Artificial Sequence: Synthetic peptide
  Seed: SIGKVCRTLLAKSVF
SIFKVRRGLLGKSVF

SEQ ID NO: 264791 - protein, 15 aa, Artificial Sequence
  Description of Artificial Sequence: Synthetic peptide
  Seed: SIGKVCRTLLAKSVF
SIFKVRRGLLHKSVF

SEQ ID NO: 264792 - protein, 15 aa, Artificial Sequence
  Description of Artificial Sequence: Synthetic peptide
  Seed: SIGKVCRTLLAKSVF
SIFKVRRGLLQKSVF

SEQ ID NO: 264793 - protein, 15 aa, Artificial Sequence
  Description of Artificial Sequence: Synthetic peptide
  Seed: SIGKVCRTLLAKSVF
SIFKVRRGLLRKSVF

SEQ ID NO: 264794 - protein, 15 aa, Artificial Sequence
  Description of Artificial Sequence: Synthetic peptide
  Seed: SIGKVCRTLLAKSVF
SIFKVRRGLLSKSVF

SEQ ID NO: 264795 - protein, 15 aa, Artificial Sequence
  Description of Artificial Sequence: Synthetic peptide
  Seed: SIGKVCRTLLAKSVF
SIFKVRRHLLAKSVF

SEQ ID NO: 264796 - protein, 15 aa, Artificial Sequence
  Description of Artificial Sequence: Synthetic peptide
  Seed: SIGKVCRTLLAKSVF
SIFKVRRHLLGKSVF

SEQ ID NO: 264797 - protein, 15 aa, Artificial Sequence
  Description of Artificial Sequence: Synthetic peptide
  Seed: SIGKVCRTLLAKSVF
SIFKVRRHLLQKSVF

SEQ ID NO: 264798 - protein, 15 aa, Artificial Sequence
  Description of Artificial Sequence: Synthetic peptide
  Seed: SIGKVCRTLLAKSVF
SIFKVRRHLLSKSVF

SEQ ID NO: 264799 - protein, 15 aa, Artificial Sequence
  Description of Artificial Sequence: Synthetic peptide
  Seed: SIGKVCRTLLAKSVF
SIFKVRRILLHKSVF

SEQ ID NO: 264800 - protein, 15 aa, Artificial Sequence
  Description of Artificial Sequence: Synthetic peptide
  Seed: SIGKVCRTLLAKSVF
SIFKVRRILLKKSVF

SEQ ID NO: 264801 - protein, 15 aa, Artificial Sequence
  Description of Artificial Sequence: Synthetic peptide
  Seed: SIGKVCRTLLAKSVF
SIFKVRRILLRKSVF

SEQ ID NO: 264802 - protein, 15 aa, Artificial Sequence
  Description of Artificial Sequence: Synthetic peptide
  Seed: SIGKVCRTLLAKSVF
SIFKVRRILLSKSVF

SEQ ID NO: 264803 - protein, 15 aa, Artificial Sequence
  Description of Artificial Sequence: Synthetic peptide
  Seed: SIGKVCRTLLAKSVF
SIFKVRRKLLAKSVF

SEQ ID NO: 264804 - protein, 15 aa, Artificial Sequence
  Description of Artificial Sequence: Synthetic peptide
  Seed: SIGKVCRTLLAKSVF
SIFKVRRKLLCKSVF

SEQ ID NO: 264805 - protein, 15 aa, Artificial Sequence
  Description of Artificial Sequence: Synthetic peptide
  Seed: SIGKVCRTLLAKSVF
SIFKVRRKLLDKSVF

SEQ ID NO: 264806 - protein, 15 aa, Artificial Sequence
  Description of Artificial Sequence: Synthetic peptide
  Seed: SIGKVCRTLLAKSVF
SIFKVRRKLLEKSVF

SEQ ID NO: 264807 - protein, 15 aa, Artificial Sequence
  Description of Artificial Sequence: Synthetic peptide
  Seed: SIGKVCRTLLAKSVF
SIFKVRRKLLFKSVF

SEQ ID NO: 264808 - protein, 15 aa, Artificial Sequence
  Description of Artificial Sequence: Synthetic peptide
  Seed: SIGKVCRTLLAKSVF
SIFKVRRKLLGKSVF

SEQ ID NO: 264809 - protein, 15 aa, Artificial Sequence
  Description of Artificial Sequence: Synthetic peptide
  Seed: SIGKVCRTLLAKSVF
SIFKVRRKLLHKSVF

SEQ ID NO: 264810 - protein, 15 aa, Artificial Sequence
  Description of Artificial Sequence: Synthetic peptide
  Seed: SIGKVCRTLLAKSVF
SIFKVRRKLLIKSVF

SEQ ID NO: 264811 - protein, 15 aa, Artificial Sequence
  Description of Artificial Sequence: Synthetic peptide
  Seed: SIGKVCRTLLAKSVF
SIFKVRRKLLKKSVF

SEQ ID NO: 264812 - protein, 15 aa, Artificial Sequence
  Description of Artificial Sequence: Synthetic peptide
  Seed: SIGKVCRTLLAKSVF
SIFKVRRKLLLKSVF

SEQ ID NO: 264813 - protein, 15 aa, Artificial Sequence
  Description of Artificial Sequence: Synthetic peptide
  Seed: SIGKVCRTLLAKSVF
SIFKVRRKLLMKSVF

SEQ ID NO: 264814 - protein, 15 aa, Artificial Sequence
  Description of Artificial Sequence: Synthetic peptide
  Seed: SIGKVCRTLLAKSVF
SIFKVRRKLLNKSVF

SEQ ID NO: 264815 - protein, 15 aa, Artificial Sequence
  Description of Artificial Sequence: Synthetic peptide
  Seed: SIGKVCRTLLAKSVF
SIFKVRRKLLPKSVF

SEQ ID NO: 264816 - protein, 15 aa, Artificial Sequence
  Description of Artificial Sequence: Synthetic peptide
  Seed: SIGKVCRTLLAKSVF
SIFKVRRKLLQKSVF

SEQ ID NO: 264817 - protein, 15 aa, Artificial Sequence
  Description of Artificial Sequence: Synthetic peptide
  Seed: SIGKVCRTLLAKSVF
SIFKVRRKLLRKSVF

SEQ ID NO: 264818 - protein, 15 aa, Artificial Sequence
  Description of Artificial Sequence: Synthetic peptide
  Seed: SIGKVCRTLLAKSVF
SIFKVRRKLLSKSVF

SEQ ID NO: 264819 - protein, 15 aa, Artificial Sequence
  Description of Artificial Sequence: Synthetic peptide
  Seed: SIGKVCRTLLAKSVF
SIFKVRRKLLTKSVF

SEQ ID NO: 264820 - protein, 15 aa, Artificial Sequence
  Description of Artificial Sequence: Synthetic peptide
  Seed: SIGKVCRTLLAKSVF
SIFKVRRKLLVKSVF

SEQ ID NO: 264821 - protein, 15 aa, Artificial Sequence
  Description of Artificial Sequence: Synthetic peptide
  Seed: SIGKVCRTLLAKSVF
SIFKVRRKLLYKSVF

SEQ ID NO: 264822 - protein, 15 aa, Artificial Sequence
  Description of Artificial Sequence: Synthetic peptide
  Seed: SIGKVCRTLLAKSVF
SIFKVRRMLLRKSVF

SEQ ID NO: 264823 - protein, 15 aa, Artificial Sequence
  Description of Artificial Sequence: Synthetic peptide
  Seed: SIGKVCRTLLAKSVF
SIFKVRRNLLAKSVF

SEQ ID NO: 264824 - protein, 15 aa, Artificial Sequence
  Description of Artificial Sequence: Synthetic peptide
  Seed: SIGKVCRTLLAKSVF
SIFKVRRNLLGKSVF

SEQ ID NO: 264825 - protein, 15 aa, Artificial Sequence
  Description of Artificial Sequence: Synthetic peptide
  Seed: SIGKVCRTLLAKSVF
SIFKVRRNLLHKSVF

SEQ ID NO: 264826 - protein, 15 aa, Artificial Sequence
  Description of Artificial Sequence: Synthetic peptide
  Seed: SIGKVCRTLLAKSVF
SIFKVRRNLLQKSVF

SEQ ID NO: 264827 - protein, 15 aa, Artificial Sequence
  Description of Artificial Sequence: Synthetic peptide
  Seed: SIGKVCRTLLAKSVF
SIFKVRRNLLSKSVF

SEQ ID NO: 264828 - protein, 15 aa, Artificial Sequence
  Description of Artificial Sequence: Synthetic peptide
  Seed: SIGKVCRTLLAKSVF
SIFKVRRNLLYKSVF

SEQ ID NO: 264829 - protein, 15 aa, Artificial Sequence
  Description of Artificial Sequence: Synthetic peptide
  Seed: SIGKVCRTLLAKSVF
SIFKVRRPLLAKSVF

SEQ ID NO: 264830 - protein, 15 aa, Artificial Sequence
  Description of Artificial Sequence: Synthetic peptide
  Seed: SIGKVCRTLLAKSVF
SIFKVRRPLLGKSVF

SEQ ID NO: 264831 - protein, 15 aa, Artificial Sequence
  Description of Artificial Sequence: Synthetic peptide
  Seed: SIGKVCRTLLAKSVF
SIFKVRRPLLHKSVF

SEQ ID NO: 264832 - protein, 15 aa, Artificial Sequence
  Description of Artificial Sequence: Synthetic peptide
  Seed: SIGKVCRTLLAKSVF
SIFKVRRPLLKKSVF

SEQ ID NO: 264833 - protein, 15 aa, Artificial Sequence
  Description of Artificial Sequence: Synthetic peptide
  Seed: SIGKVCRTLLAKSVF
SIFKVRRPLLQKSVF

SEQ ID NO: 264834 - protein, 15 aa, Artificial Sequence
  Description of Artificial Sequence: Synthetic peptide
  Seed: SIGKVCRTLLAKSVF
SIFKVRRPLLRKSVF

SEQ ID NO: 264835 - protein, 15 aa, Artificial Sequence
  Description of Artificial Sequence: Synthetic peptide
  Seed: SIGKVCRTLLAKSVF
SIFKVRRPLLSKSVF

SEQ ID NO: 264836 - protein, 15 aa, Artificial Sequence
  Description of Artificial Sequence: Synthetic peptide
  Seed: SIGKVCRTLLAKSVF
SIFKVRRQLLAKSVF

SEQ ID NO: 264837 - protein, 15 aa, Artificial Sequence
  Description of Artificial Sequence: Synthetic peptide
  Seed: SIGKVCRTLLAKSVF
SIFKVRRQLLGKSVF

SEQ ID NO: 264838 - protein, 15 aa, Artificial Sequence
  Description of Artificial Sequence: Synthetic peptide
  Seed: SIGKVCRTLLAKSVF
SIFKVRRQLLQKSVF

SEQ ID NO: 264839 - protein, 15 aa, Artificial Sequence
  Description of Artificial Sequence: Synthetic peptide
  Seed: SIGKVCRTLLAKSVF
SIFKVRRQLLSKSVF

SEQ ID NO: 264840 - protein, 15 aa, Artificial Sequence
  Description of Artificial Sequence: Synthetic peptide
  Seed: SIGKVCRTLLAKSVF
SIFKVRRRLLAKSVF

SEQ ID NO: 264841 - protein, 15 aa, Artificial Sequence
  Description of Artificial Sequence: Synthetic peptide
  Seed: SIGKVCRTLLAKSVF
SIFKVRRRLLCKSVF

SEQ ID NO: 264842 - protein, 15 aa, Artificial Sequence
  Description of Artificial Sequence: Synthetic peptide
  Seed: SIGKVCRTLLAKSVF
SIFKVRRRLLDKSVF

SEQ ID NO: 264843 - protein, 15 aa, Artificial Sequence
  Description of Artificial Sequence: Synthetic peptide
  Seed: SIGKVCRTLLAKSVF
SIFKVRRRLLEKSVF

SEQ ID NO: 264844 - protein, 15 aa, Artificial Sequence
  Description of Artificial Sequence: Synthetic peptide
  Seed: SIGKVCRTLLAKSVF
SIFKVRRRLLFKSVF

SEQ ID NO: 264845 - protein, 15 aa, Artificial Sequence
  Description of Artificial Sequence: Synthetic peptide
  Seed: SIGKVCRTLLAKSVF
SIFKVRRRLLGKSVF

SEQ ID NO: 264846 - protein, 15 aa, Artificial Sequence
  Description of Artificial Sequence: Synthetic peptide
  Seed: SIGKVCRTLLAKSVF
SIFKVRRRLLHKSVF

SEQ ID NO: 264847 - protein, 15 aa, Artificial Sequence
  Description of Artificial Sequence: Synthetic peptide
  Seed: SIGKVCRTLLAKSVF
SIFKVRRRLLIKSVF

SEQ ID NO: 264848 - protein, 15 aa, Artificial Sequence
  Description of Artificial Sequence: Synthetic peptide
  Seed: SIGKVCRTLLAKSVF
SIFKVRRRLLKKSVF

SEQ ID NO: 264849 - protein, 15 aa, Artificial Sequence
  Description of Artificial Sequence: Synthetic peptide
  Seed: SIGKVCRTLLAKSVF
SIFKVRRRLLLKSVF

SEQ ID NO: 264850 - protein, 15 aa, Artificial Sequence
  Description of Artificial Sequence: Synthetic peptide
  Seed: SIGKVCRTLLAKSVF
SIFKVRRRLLMKSVF

SEQ ID NO: 264851 - protein, 15 aa, Artificial Sequence
  Description of Artificial Sequence: Synthetic peptide
  Seed: SIGKVCRTLLAKSVF
SIFKVRRRLLNKSVF

SEQ ID NO: 264852 - protein, 15 aa, Artificial Sequence
  Description of Artificial Sequence: Synthetic peptide
  Seed: SIGKVCRTLLAKSVF
SIFKVRRRLLPKSVF

SEQ ID NO: 264853 - protein, 15 aa, Artificial Sequence
  Description of Artificial Sequence: Synthetic peptide
  Seed: SIGKVCRTLLAKSVF
SIFKVRRRLLQKSVF

SEQ ID NO: 264854 - protein, 15 aa, Artificial Sequence
  Description of Artificial Sequence: Synthetic peptide
  Seed: SIGKVCRTLLAKSVF
SIFKVRRRLLRKSVF

SEQ ID NO: 264855 - protein, 15 aa, Artificial Sequence
  Description of Artificial Sequence: Synthetic peptide
  Seed: SIGKVCRTLLAKSVF
SIFKVRRRLLSKSVF

SEQ ID NO: 264856 - protein, 15 aa, Artificial Sequence
  Description of Artificial Sequence: Synthetic peptide
  Seed: SIGKVCRTLLAKSVF
SIFKVRRRLLTKSVF

SEQ ID NO: 264857 - protein, 15 aa, Artificial Sequence
  Description of Artificial Sequence: Synthetic peptide
  Seed: SIGKVCRTLLAKSVF
SIFKVRRRLLVKSVF

SEQ ID NO: 264858 - protein, 15 aa, Artificial Sequence
  Description of Artificial Sequence: Synthetic peptide
  Seed: SIGKVCRTLLAKSVF
SIFKVRRRLLWKSVF

SEQ ID NO: 264859 - protein, 15 aa, Artificial Sequence
  Description of Artificial Sequence: Synthetic peptide
  Seed: SIGKVCRTLLAKSVF
SIFKVRRRLLYKSVF

SEQ ID NO: 264860 - protein, 15 aa, Artificial Sequence
  Description of Artificial Sequence: Synthetic peptide
  Seed: SIGKVCRTLLAKSVF
SIFKVRRSLLAKSVF

SEQ ID NO: 264861 - protein, 15 aa, Artificial Sequence
  Description of Artificial Sequence: Synthetic peptide
  Seed: SIGKVCRTLLAKSVF
SIFKVRRSLLCKSVF

SEQ ID NO: 264862 - protein, 15 aa, Artificial Sequence
  Description of Artificial Sequence: Synthetic peptide
  Seed: SIGKVCRTLLAKSVF
SIFKVRRSLLDKSVF

SEQ ID NO: 264863 - protein, 15 aa, Artificial Sequence
  Description of Artificial Sequence: Synthetic peptide
  Seed: SIGKVCRTLLAKSVF
SIFKVRRSLLEKSVF

SEQ ID NO: 264864 - protein, 15 aa, Artificial Sequence
  Description of Artificial Sequence: Synthetic peptide
  Seed: SIGKVCRTLLAKSVF
SIFKVRRSLLGKSVF

SEQ ID NO: 264865 - protein, 15 aa, Artificial Sequence
  Description of Artificial Sequence: Synthetic peptide
  Seed: SIGKVCRTLLAKSVF
SIFKVRRSLLHKSVF

SEQ ID NO: 264866 - protein, 15 aa, Artificial Sequence
  Description of Artificial Sequence: Synthetic peptide
  Seed: SIGKVCRTLLAKSVF
SIFKVRRSLLKKSVF

SEQ ID NO: 264867 - protein, 15 aa, Artificial Sequence
  Description of Artificial Sequence: Synthetic peptide
  Seed: SIGKVCRTLLAKSVF
SIFKVRRSLLMKSVF

SEQ ID NO: 264868 - protein, 15 aa, Artificial Sequence
  Description of Artificial Sequence: Synthetic peptide
  Seed: SIGKVCRTLLAKSVF
SIFKVRRSLLNKSVF

SEQ ID NO: 264869 - protein, 15 aa, Artificial Sequence
  Description of Artificial Sequence: Synthetic peptide
  Seed: SIGKVCRTLLAKSVF
SIFKVRRSLLQKSVF

SEQ ID NO: 264870 - protein, 15 aa, Artificial Sequence
  Description of Artificial Sequence: Synthetic peptide
  Seed: SIGKVCRTLLAKSVF
SIFKVRRSLLRKSVF

SEQ ID NO: 264871 - protein, 15 aa, Artificial Sequence
  Description of Artificial Sequence: Synthetic peptide
  Seed: SIGKVCRTLLAKSVF
SIFKVRRSLLSKSVF

SEQ ID NO: 264872 - protein, 15 aa, Artificial Sequence
  Description of Artificial Sequence: Synthetic peptide
  Seed: SIGKVCRTLLAKSVF
SIFKVRRSLLTKSVF

SEQ ID NO: 264873 - protein, 15 aa, Artificial Sequence
  Description of Artificial Sequence: Synthetic peptide
  Seed: SIGKVCRTLLAKSVF
SIFKVRRSLLVKSVF

SEQ ID NO: 264874 - protein, 15 aa, Artificial Sequence
  Description of Artificial Sequence: Synthetic peptide
  Seed: SIGKVCRTLLAKSVF
SIFKVRRSLLYKSVF

SEQ ID NO: 264875 - protein, 15 aa, Artificial Sequence
  Description of Artificial Sequence: Synthetic peptide
  Seed: SIGKVCRTLLAKSVF
SIFKVRRTLLAKSVF

SEQ ID NO: 264876 - protein, 15 aa, Artificial Sequence
  Description of Artificial Sequence: Synthetic peptide
  Seed: SIGKVCRTLLAKSVF
SIFKVRRTLLDKSVF

SEQ ID NO: 264877 - protein, 15 aa, Artificial Sequence
  Description of Artificial Sequence: Synthetic peptide
  Seed: SIGKVCRTLLAKSVF
SIFKVRRTLLEKSVF

SEQ ID NO: 264878 - protein, 15 aa, Artificial Sequence
  Description of Artificial Sequence: Synthetic peptide
  Seed: SIGKVCRTLLAKSVF
SIFKVRRTLLGKSVF

SEQ ID NO: 264879 - protein, 15 aa, Artificial Sequence
  Description of Artificial Sequence: Synthetic peptide
  Seed: SIGKVCRTLLAKSVF
SIFKVRRTLLHKSVF

SEQ ID NO: 264880 - protein, 15 aa, Artificial Sequence
  Description of Artificial Sequence: Synthetic peptide
  Seed: SIGKVCRTLLAKSVF
SIFKVRRTLLIKSVF

SEQ ID NO: 264881 - protein, 15 aa, Artificial Sequence
  Description of Artificial Sequence: Synthetic peptide
  Seed: SIGKVCRTLLAKSVF
SIFKVRRTLLKKSVF

SEQ ID NO: 264882 - protein, 15 aa, Artificial Sequence
  Description of Artificial Sequence: Synthetic peptide
  Seed: SIGKVCRTLLAKSVF
SIFKVRRTLLLKSVF

SEQ ID NO: 264883 - protein, 15 aa, Artificial Sequence
  Description of Artificial Sequence: Synthetic peptide
  Seed: SIGKVCRTLLAKSVF
SIFKVRRTLLMKSVF

SEQ ID NO: 264884 - protein, 15 aa, Artificial Sequence
  Description of Artificial Sequence: Synthetic peptide
  Seed: SIGKVCRTLLAKSVF
SIFKVRRTLLNKSVF

SEQ ID NO: 264885 - protein, 15 aa, Artificial Sequence
  Description of Artificial Sequence: Synthetic peptide
  Seed: SIGKVCRTLLAKSVF
SIFKVRRTLLQKSVF

SEQ ID NO: 264886 - protein, 15 aa, Artificial Sequence
  Description of Artificial Sequence: Synthetic peptide
  Seed: SIGKVCRTLLAKSVF
SIFKVRRTLLRKSVF

SEQ ID NO: 264887 - protein, 15 aa, Artificial Sequence
  Description of Artificial Sequence: Synthetic peptide
  Seed: SIGKVCRTLLAKSVF
SIFKVRRTLLSKSVF

SEQ ID NO: 264888 - protein, 15 aa, Artificial Sequence
  Description of Artificial Sequence: Synthetic peptide
  Seed: SIGKVCRTLLAKSVF
SIFKVRRTLLTKSVF

SEQ ID NO: 264889 - protein, 15 aa, Artificial Sequence
  Description of Artificial Sequence: Synthetic peptide
  Seed: SIGKVCRTLLAKSVF
SIFKVRRTLLVKSVF

SEQ ID NO: 264890 - protein, 15 aa, Artificial Sequence
  Description of Artificial Sequence: Synthetic peptide
  Seed: SIGKVCRTLLAKSVF
SIFKVRRTLLYKSVF

SEQ ID NO: 264891 - protein, 15 aa, Artificial Sequence
  Description of Artificial Sequence: Synthetic peptide
  Seed: SIGKVCRTLLAKSVF
SIFKVRRVLLAKSVF

SEQ ID NO: 264892 - protein, 15 aa, Artificial Sequence
  Description of Artificial Sequence: Synthetic peptide
  Seed: SIGKVCRTLLAKSVF
SIFKVRRVLLGKSVF

SEQ ID NO: 264893 - protein, 15 aa, Artificial Sequence
  Description of Artificial Sequence: Synthetic peptide
  Seed: SIGKVCRTLLAKSVF
SIFKVRRVLLHKSVF

SEQ ID NO: 264894 - protein, 15 aa, Artificial Sequence
  Description of Artificial Sequence: Synthetic peptide
  Seed: SIGKVCRTLLAKSVF
SIFKVRRVLLKKSVF

SEQ ID NO: 264895 - protein, 15 aa, Artificial Sequence
  Description of Artificial Sequence: Synthetic peptide
  Seed: SIGKVCRTLLAKSVF
SIFKVRRVLLQKSVF

SEQ ID NO: 264896 - protein, 15 aa, Artificial Sequence
  Description of Artificial Sequence: Synthetic peptide
  Seed: SIGKVCRTLLAKSVF
SIFKVRRVLLRKSVF

SEQ ID NO: 264897 - protein, 15 aa, Artificial Sequence
  Description of Artificial Sequence: Synthetic peptide
  Seed: SIGKVCRTLLAKSVF
SIFKVRRVLLSKSVF

SEQ ID NO: 264898 - protein, 15 aa, Artificial Sequence
  Description of Artificial Sequence: Synthetic peptide
  Seed: SIGKVCRTLLAKSVF
SIFKVRRVLLYKSVF

SEQ ID NO: 264899 - protein, 15 aa, Artificial Sequence
  Description of Artificial Sequence: Synthetic peptide
  Seed: SIGKVCRTLLAKSVF
SIFKVSRALLAKSVF

SEQ ID NO: 264900 - protein, 15 aa, Artificial Sequence
  Description of Artificial Sequence: Synthetic peptide
  Seed: SIGKVCRTLLAKSVF
SIFKVSRALLDKSVF

SEQ ID NO: 264901 - protein, 15 aa, Artificial Sequence
  Description of Artificial Sequence: Synthetic peptide
  Seed: SIGKVCRTLLAKSVF
SIFKVSRALLGKSVF

SEQ ID NO: 264902 - protein, 15 aa, Artificial Sequence
  Description of Artificial Sequence: Synthetic peptide
  Seed: SIGKVCRTLLAKSVF
SIFKVSRALLHKSVF

SEQ ID NO: 264903 - protein, 15 aa, Artificial Sequence
  Description of Artificial Sequence: Synthetic peptide
  Seed: SIGKVCRTLLAKSVF
SIFKVSRALLKKSVF

SEQ ID NO: 264904 - protein, 15 aa, Artificial Sequence
  Description of Artificial Sequence: Synthetic peptide
  Seed: SIGKVCRTLLAKSVF
SIFKVSRALLNKSVF

SEQ ID NO: 264905 - protein, 15 aa, Artificial Sequence
  Description of Artificial Sequence: Synthetic peptide
  Seed: SIGKVCRTLLAKSVF
SIFKVSRALLQKSVF

SEQ ID NO: 264906 - protein, 15 aa, Artificial Sequence
  Description of Artificial Sequence: Synthetic peptide
  Seed: SIGKVCRTLLAKSVF
SIFKVSRALLRKSVF

SEQ ID NO: 264907 - protein, 15 aa, Artificial Sequence
  Description of Artificial Sequence: Synthetic peptide
  Seed: SIGKVCRTLLAKSVF
SIFKVSRALLSKSVF

SEQ ID NO: 264908 - protein, 15 aa, Artificial Sequence
  Description of Artificial Sequence: Synthetic peptide
  Seed: SIGKVCRTLLAKSVF
SIFKVSRALLTKSVF

SEQ ID NO: 264909 - protein, 15 aa, Artificial Sequence
  Description of Artificial Sequence: Synthetic peptide
  Seed: SIGKVCRTLLAKSVF
SIFKVSRALLVKSVF

SEQ ID NO: 264910 - protein, 15 aa, Artificial Sequence
  Description of Artificial Sequence: Synthetic peptide
  Seed: SIGKVCRTLLAKSVF
SIFKVSRGLLAKSVF

SEQ ID NO: 264911 - protein, 15 aa, Artificial Sequence
  Description of Artificial Sequence: Synthetic peptide
  Seed: SIGKVCRTLLAKSVF
SIFKVSRGLLGKSVF

SEQ ID NO: 264912 - protein, 15 aa, Artificial Sequence
  Description of Artificial Sequence: Synthetic peptide
  Seed: SIGKVCRTLLAKSVF
SIFKVSRGLLHKSVF

SEQ ID NO: 264913 - protein, 15 aa, Artificial Sequence
  Description of Artificial Sequence: Synthetic peptide
  Seed: SIGKVCRTLLAKSVF
SIFKVSRGLLKKSVF

SEQ ID NO: 264914 - protein, 15 aa, Artificial Sequence
  Description of Artificial Sequence: Synthetic peptide
  Seed: SIGKVCRTLLAKSVF
SIFKVSRGLLNKSVF

SEQ ID NO: 264915 - protein, 15 aa, Artificial Sequence
  Description of Artificial Sequence: Synthetic peptide
  Seed: SIGKVCRTLLAKSVF
SIFKVSRGLLQKSVF

SEQ ID NO: 264916 - protein, 15 aa, Artificial Sequence
  Description of Artificial Sequence: Synthetic peptide
  Seed: SIGKVCRTLLAKSVF
SIFKVSRGLLRKSVF

SEQ ID NO: 264917 - protein, 15 aa, Artificial Sequence
  Description of Artificial Sequence: Synthetic peptide
  Seed: SIGKVCRTLLAKSVF
SIFKVSRGLLSKSVF

SEQ ID NO: 264918 - protein, 15 aa, Artificial Sequence
  Description of Artificial Sequence: Synthetic peptide
  Seed: SIGKVCRTLLAKSVF
SIFKVSRHLLAKSVF

SEQ ID NO: 264919 - protein, 15 aa, Artificial Sequence
  Description of Artificial Sequence: Synthetic peptide
  Seed: SIGKVCRTLLAKSVF
SIFKVSRHLLGKSVF

SEQ ID NO: 264920 - protein, 15 aa, Artificial Sequence
  Description of Artificial Sequence: Synthetic peptide
  Seed: SIGKVCRTLLAKSVF
SIFKVSRHLLHKSVF

SEQ ID NO: 264921 - protein, 15 aa, Artificial Sequence
  Description of Artificial Sequence: Synthetic peptide
  Seed: SIGKVCRTLLAKSVF
SIFKVSRHLLKKSVF

SEQ ID NO: 264922 - protein, 15 aa, Artificial Sequence
  Description of Artificial Sequence: Synthetic peptide
  Seed: SIGKVCRTLLAKSVF
SIFKVSRHLLNKSVF

SEQ ID NO: 264923 - protein, 15 aa, Artificial Sequence
  Description of Artificial Sequence: Synthetic peptide
  Seed: SIGKVCRTLLAKSVF
SIFKVSRHLLQKSVF

SEQ ID NO: 264924 - protein, 15 aa, Artificial Sequence
  Description of Artificial Sequence: Synthetic peptide
  Seed: SIGKVCRTLLAKSVF
SIFKVSRHLLSKSVF

SEQ ID NO: 264925 - protein, 15 aa, Artificial Sequence
  Description of Artificial Sequence: Synthetic peptide
  Seed: SIGKVCRTLLAKSVF
SIFKVSRHLLTKSVF

SEQ ID NO: 264926 - protein, 15 aa, Artificial Sequence
  Description of Artificial Sequence: Synthetic peptide
  Seed: SIGKVCRTLLAKSVF
SIFKVSRHLLVKSVF

SEQ ID NO: 264927 - protein, 15 aa, Artificial Sequence
  Description of Artificial Sequence: Synthetic peptide
  Seed: SIGKVCRTLLAKSVF
SIFKVSRILLAKSVF

SEQ ID NO: 264928 - protein, 15 aa, Artificial Sequence
  Description of Artificial Sequence: Synthetic peptide
  Seed: SIGKVCRTLLAKSVF
SIFKVSRILLGKSVF

SEQ ID NO: 264929 - protein, 15 aa, Artificial Sequence
  Description of Artificial Sequence: Synthetic peptide
  Seed: SIGKVCRTLLAKSVF
SIFKVSRILLQKSVF

SEQ ID NO: 264930 - protein, 15 aa, Artificial Sequence
  Description of Artificial Sequence: Synthetic peptide
  Seed: SIGKVCRTLLAKSVF
SIFKVSRILLSKSVF

SEQ ID NO: 264931 - protein, 15 aa, Artificial Sequence
  Description of Artificial Sequence: Synthetic peptide
  Seed: SIGKVCRTLLAKSVF
SIFKVSRKLLAKSVF

SEQ ID NO: 264932 - protein, 15 aa, Artificial Sequence
  Description of Artificial Sequence: Synthetic peptide
  Seed: SIGKVCRTLLAKSVF
SIFKVSRKLLCKSVF

SEQ ID NO: 264933 - protein, 15 aa, Artificial Sequence
  Description of Artificial Sequence: Synthetic peptide
  Seed: SIGKVCRTLLAKSVF
SIFKVSRKLLDKSVF

SEQ ID NO: 264934 - protein, 15 aa, Artificial Sequence
  Description of Artificial Sequence: Synthetic peptide
  Seed: SIGKVCRTLLAKSVF
SIFKVSRKLLEKSVF

SEQ ID NO: 264935 - protein, 15 aa, Artificial Sequence
  Description of Artificial Sequence: Synthetic peptide
  Seed: SIGKVCRTLLAKSVF
SIFKVSRKLLFKSVF

SEQ ID NO: 264936 - protein, 15 aa, Artificial Sequence
  Description of Artificial Sequence: Synthetic peptide
  Seed: SIGKVCRTLLAKSVF
SIFKVSRKLLGKSVF

SEQ ID NO: 264937 - protein, 15 aa, Artificial Sequence
  Description of Artificial Sequence: Synthetic peptide
  Seed: SIGKVCRTLLAKSVF
SIFKVSRKLLHKSVF

SEQ ID NO: 264938 - protein, 15 aa, Artificial Sequence
  Description of Artificial Sequence: Synthetic peptide
  Seed: SIGKVCRTLLAKSVF
SIFKVSRKLLIKSVF

SEQ ID NO: 264939 - protein, 15 aa, Artificial Sequence
  Description of Artificial Sequence: Synthetic peptide
  Seed: SIGKVCRTLLAKSVF
SIFKVSRKLLKKSVF

SEQ ID NO: 264940 - protein, 15 aa, Artificial Sequence
  Description of Artificial Sequence: Synthetic peptide
  Seed: SIGKVCRTLLAKSVF
SIFKVSRKLLLKSVF

SEQ ID NO: 264941 - protein, 15 aa, Artificial Sequence
  Description of Artificial Sequence: Synthetic peptide
  Seed: SIGKVCRTLLAKSVF
SIFKVSRKLLMKSVF

SEQ ID NO: 264942 - protein, 15 aa, Artificial Sequence
  Description of Artificial Sequence: Synthetic peptide
  Seed: SIGKVCRTLLAKSVF
SIFKVSRKLLNKSVF

SEQ ID NO: 264943 - protein, 15 aa, Artificial Sequence
  Description of Artificial Sequence: Synthetic peptide
  Seed: SIGKVCRTLLAKSVF
SIFKVSRKLLPKSVF

SEQ ID NO: 264944 - protein, 15 aa, Artificial Sequence
  Description of Artificial Sequence: Synthetic peptide
  Seed: SIGKVCRTLLAKSVF
SIFKVSRKLLQKSVF

SEQ ID NO: 264945 - protein, 15 aa, Artificial Sequence
  Description of Artificial Sequence: Synthetic peptide
  Seed: SIGKVCRTLLAKSVF
SIFKVSRKLLRKSVF

SEQ ID NO: 264946 - protein, 15 aa, Artificial Sequence
  Description of Artificial Sequence: Synthetic peptide
  Seed: SIGKVCRTLLAKSVF
SIFKVSRKLLSKSVF

SEQ ID NO: 264947 - protein, 15 aa, Artificial Sequence
  Description of Artificial Sequence: Synthetic peptide
  Seed: SIGKVCRTLLAKSVF
SIFKVSRKLLTKSVF

SEQ ID NO: 264948 - protein, 15 aa, Artificial Sequence
  Description of Artificial Sequence: Synthetic peptide
  Seed: SIGKVCRTLLAKSVF
SIFKVSRKLLVKSVF

SEQ ID NO: 264949 - protein, 15 aa, Artificial Sequence
  Description of Artificial Sequence: Synthetic peptide
  Seed: SIGKVCRTLLAKSVF
SIFKVSRKLLWKSVF

SEQ ID NO: 264950 - protein, 15 aa, Artificial Sequence
  Description of Artificial Sequence: Synthetic peptide
  Seed: SIGKVCRTLLAKSVF
SIFKVSRKLLYKSVF

SEQ ID NO: 264951 - protein, 15 aa, Artificial Sequence
  Description of Artificial Sequence: Synthetic peptide
  Seed: SIGKVCRTLLAKSVF
SIFKVSRNLLAKSVF

SEQ ID NO: 264952 - protein, 15 aa, Artificial Sequence
  Description of Artificial Sequence: Synthetic peptide
  Seed: SIGKVCRTLLAKSVF
SIFKVSRNLLDKSVF

SEQ ID NO: 264953 - protein, 15 aa, Artificial Sequence
  Description of Artificial Sequence: Synthetic peptide
  Seed: SIGKVCRTLLAKSVF
SIFKVSRNLLEKSVF

SEQ ID NO: 264954 - protein, 15 aa, Artificial Sequence
  Description of Artificial Sequence: Synthetic peptide
  Seed: SIGKVCRTLLAKSVF
SIFKVSRNLLGKSVF

SEQ ID NO: 264955 - protein, 15 aa, Artificial Sequence
  Description of Artificial Sequence: Synthetic peptide
  Seed: SIGKVCRTLLAKSVF
SIFKVSRNLLHKSVF

SEQ ID NO: 264956 - protein, 15 aa, Artificial Sequence
  Description of Artificial Sequence: Synthetic peptide
  Seed: SIGKVCRTLLAKSVF
SIFKVSRNLLNKSVF

SEQ ID NO: 264957 - protein, 15 aa, Artificial Sequence
  Description of Artificial Sequence: Synthetic peptide
  Seed: SIGKVCRTLLAKSVF
SIFKVSRNLLQKSVF

SEQ ID NO: 264958 - protein, 15 aa, Artificial Sequence
  Description of Artificial Sequence: Synthetic peptide
  Seed: SIGKVCRTLLAKSVF
SIFKVSRNLLSKSVF

SEQ ID NO: 264959 - protein, 15 aa, Artificial Sequence
  Description of Artificial Sequence: Synthetic peptide
  Seed: SIGKVCRTLLAKSVF
SIFKVSRNLLTKSVF

SEQ ID NO: 264960 - protein, 15 aa, Artificial Sequence
  Description of Artificial Sequence: Synthetic peptide
  Seed: SIGKVCRTLLAKSVF
SIFKVSRPLLAKSVF

SEQ ID NO: 264961 - protein, 15 aa, Artificial Sequence
  Description of Artificial Sequence: Synthetic peptide
  Seed: SIGKVCRTLLAKSVF
SIFKVSRPLLGKSVF

SEQ ID NO: 264962 - protein, 15 aa, Artificial Sequence
  Description of Artificial Sequence: Synthetic peptide
  Seed: SIGKVCRTLLAKSVF
SIFKVSRPLLHKSVF

SEQ ID NO: 264963 - protein, 15 aa, Artificial Sequence
  Description of Artificial Sequence: Synthetic peptide
  Seed: SIGKVCRTLLAKSVF
SIFKVSRPLLKKSVF

SEQ ID NO: 264964 - protein, 15 aa, Artificial Sequence
  Description of Artificial Sequence: Synthetic peptide
  Seed: SIGKVCRTLLAKSVF
SIFKVSRPLLNKSVF

SEQ ID NO: 264965 - protein, 15 aa, Artificial Sequence
  Description of Artificial Sequence: Synthetic peptide
  Seed: SIGKVCRTLLAKSVF
SIFKVSRPLLQKSVF

SEQ ID NO: 264966 - protein, 15 aa, Artificial Sequence
  Description of Artificial Sequence: Synthetic peptide
  Seed: SIGKVCRTLLAKSVF
SIFKVSRPLLRKSVF

SEQ ID NO: 264967 - protein, 15 aa, Artificial Sequence
  Description of Artificial Sequence: Synthetic peptide
  Seed: SIGKVCRTLLAKSVF
SIFKVSRPLLSKSVF

SEQ ID NO: 264968 - protein, 15 aa, Artificial Sequence
  Description of Artificial Sequence: Synthetic peptide
  Seed: SIGKVCRTLLAKSVF
SIFKVSRPLLTKSVF

SEQ ID NO: 264969 - protein, 15 aa, Artificial Sequence
  Description of Artificial Sequence: Synthetic peptide
  Seed: SIGKVCRTLLAKSVF
SIFKVSRPLLVKSVF

SEQ ID NO: 264970 - protein, 15 aa, Artificial Sequence
  Description of Artificial Sequence: Synthetic peptide
  Seed: SIGKVCRTLLAKSVF
SIFKVSRQLLAKSVF

SEQ ID NO: 264971 - protein, 15 aa, Artificial Sequence
  Description of Artificial Sequence: Synthetic peptide
  Seed: SIGKVCRTLLAKSVF
SIFKVSRQLLGKSVF

SEQ ID NO: 264972 - protein, 15 aa, Artificial Sequence
  Description of Artificial Sequence: Synthetic peptide
  Seed: SIGKVCRTLLAKSVF
SIFKVSRQLLQKSVF

SEQ ID NO: 264973 - protein, 15 aa, Artificial Sequence
  Description of Artificial Sequence: Synthetic peptide
  Seed: SIGKVCRTLLAKSVF
SIFKVSRQLLSKSVF

SEQ ID NO: 264974 - protein, 15 aa, Artificial Sequence
  Description of Artificial Sequence: Synthetic peptide
  Seed: SIGKVCRTLLAKSVF
SIFKVSRRLLAKSVF

SEQ ID NO: 264975 - protein, 15 aa, Artificial Sequence
  Description of Artificial Sequence: Synthetic peptide
  Seed: SIGKVCRTLLAKSVF
SIFKVSRRLLCKSVF

SEQ ID NO: 264976 - protein, 15 aa, Artificial Sequence
  Description of Artificial Sequence: Synthetic peptide
  Seed: SIGKVCRTLLAKSVF
SIFKVSRRLLDKSVF

SEQ ID NO: 264977 - protein, 15 aa, Artificial Sequence
  Description of Artificial Sequence: Synthetic peptide
  Seed: SIGKVCRTLLAKSVF
SIFKVSRRLLEKSVF

SEQ ID NO: 264978 - protein, 15 aa, Artificial Sequence
  Description of Artificial Sequence: Synthetic peptide
  Seed: SIGKVCRTLLAKSVF
SIFKVSRRLLFKSVF

SEQ ID NO: 264979 - protein, 15 aa, Artificial Sequence
  Description of Artificial Sequence: Synthetic peptide
  Seed: SIGKVCRTLLAKSVF
SIFKVSRRLLGKSVF

SEQ ID NO: 264980 - protein, 15 aa, Artificial Sequence
  Description of Artificial Sequence: Synthetic peptide
  Seed: SIGKVCRTLLAKSVF
SIFKVSRRLLHKSVF

SEQ ID NO: 264981 - protein, 15 aa, Artificial Sequence
  Description of Artificial Sequence: Synthetic peptide
  Seed: SIGKVCRTLLAKSVF
SIFKVSRRLLIKSVF

SEQ ID NO: 264982 - protein, 15 aa, Artificial Sequence
  Description of Artificial Sequence: Synthetic peptide
  Seed: SIGKVCRTLLAKSVF
SIFKVSRRLLKKSVF

SEQ ID NO: 264983 - protein, 15 aa, Artificial Sequence
  Description of Artificial Sequence: Synthetic peptide
  Seed: SIGKVCRTLLAKSVF
SIFKVSRRLLLKSVF

SEQ ID NO: 264984 - protein, 15 aa, Artificial Sequence
  Description of Artificial Sequence: Synthetic peptide
  Seed: SIGKVCRTLLAKSVF
SIFKVSRRLLMKSVF

SEQ ID NO: 264985 - protein, 15 aa, Artificial Sequence
  Description of Artificial Sequence: Synthetic peptide
  Seed: SIGKVCRTLLAKSVF
SIFKVSRRLLNKSVF

SEQ ID NO: 264986 - protein, 15 aa, Artificial Sequence
  Description of Artificial Sequence: Synthetic peptide
  Seed: SIGKVCRTLLAKSVF
SIFKVSRRLLPKSVF

SEQ ID NO: 264987 - protein, 15 aa, Artificial Sequence
  Description of Artificial Sequence: Synthetic peptide
  Seed: SIGKVCRTLLAKSVF
SIFKVSRRLLQKSVF

SEQ ID NO: 264988 - protein, 15 aa, Artificial Sequence
  Description of Artificial Sequence: Synthetic peptide
  Seed: SIGKVCRTLLAKSVF
SIFKVSRRLLRKSVF

SEQ ID NO: 264989 - protein, 15 aa, Artificial Sequence
  Description of Artificial Sequence: Synthetic peptide
  Seed: SIGKVCRTLLAKSVF
SIFKVSRRLLSKSVF

SEQ ID NO: 264990 - protein, 15 aa, Artificial Sequence
  Description of Artificial Sequence: Synthetic peptide
  Seed: SIGKVCRTLLAKSVF
SIFKVSRRLLTKSVF

SEQ ID NO: 264991 - protein, 15 aa, Artificial Sequence
  Description of Artificial Sequence: Synthetic peptide
  Seed: SIGKVCRTLLAKSVF
SIFKVSRRLLVKSVF

SEQ ID NO: 264992 - protein, 15 aa, Artificial Sequence
  Description of Artificial Sequence: Synthetic peptide
  Seed: SIGKVCRTLLAKSVF
SIFKVSRRLLWKSVF

SEQ ID NO: 264993 - protein, 15 aa, Artificial Sequence
  Description of Artificial Sequence: Synthetic peptide
  Seed: SIGKVCRTLLAKSVF
SIFKVSRRLLYKSVF

SEQ ID NO: 264994 - protein, 15 aa, Artificial Sequence
  Description of Artificial Sequence: Synthetic peptide
  Seed: SIGKVCRTLLAKSVF
SIFKVSRSLLAKSVF

SEQ ID NO: 264995 - protein, 15 aa, Artificial Sequence
  Description of Artificial Sequence: Synthetic peptide
  Seed: SIGKVCRTLLAKSVF
SIFKVSRSLLDKSVF

SEQ ID NO: 264996 - protein, 15 aa, Artificial Sequence
  Description of Artificial Sequence: Synthetic peptide
  Seed: SIGKVCRTLLAKSVF
SIFKVSRSLLEKSVF

SEQ ID NO: 264997 - protein, 15 aa, Artificial Sequence
  Description of Artificial Sequence: Synthetic peptide
  Seed: SIGKVCRTLLAKSVF
SIFKVSRSLLGKSVF

SEQ ID NO: 264998 - protein, 15 aa, Artificial Sequence
  Description of Artificial Sequence: Synthetic peptide
  Seed: SIGKVCRTLLAKSVF
SIFKVSRSLLHKSVF

SEQ ID NO: 264999 - protein, 15 aa, Artificial Sequence
  Description of Artificial Sequence: Synthetic peptide
  Seed: SIGKVCRTLLAKSVF
SIFKVSRSLLKKSVF

SEQ ID NO: 265000 - protein, 15 aa, Artificial Sequence
  Description of Artificial Sequence: Synthetic peptide
  Seed: SIGKVCRTLLAKSVF
SIFKVSRSLLNKSVF

SEQ ID NO: 265001 - protein, 15 aa, Artificial Sequence
  Description of Artificial Sequence: Synthetic peptide
  Seed: SIGKVCRTLLAKSVF
SIFKVSRSLLQKSVF

SEQ ID NO: 265002 - protein, 15 aa, Artificial Sequence
  Description of Artificial Sequence: Synthetic peptide
  Seed: SIGKVCRTLLAKSVF
SIFKVSRSLLRKSVF

SEQ ID NO: 265003 - protein, 15 aa, Artificial Sequence
  Description of Artificial Sequence: Synthetic peptide
  Seed: SIGKVCRTLLAKSVF
SIFKVSRSLLSKSVF

SEQ ID NO: 265004 - protein, 15 aa, Artificial Sequence
  Description of Artificial Sequence: Synthetic peptide
  Seed: SIGKVCRTLLAKSVF
SIFKVSRSLLTKSVF

SEQ ID NO: 265005 - protein, 15 aa, Artificial Sequence
  Description of Artificial Sequence: Synthetic peptide
  Seed: SIGKVCRTLLAKSVF
SIFKVSRSLLVKSVF

SEQ ID NO: 265006 - protein, 15 aa, Artificial Sequence
  Description of Artificial Sequence: Synthetic peptide
  Seed: SIGKVCRTLLAKSVF
SIFKVSRSLLYKSVF

SEQ ID NO: 265007 - protein, 15 aa, Artificial Sequence
  Description of Artificial Sequence: Synthetic peptide
  Seed: SIGKVCRTLLAKSVF
SIFKVSRTLLAKSVF

SEQ ID NO: 265008 - protein, 15 aa, Artificial Sequence
  Description of Artificial Sequence: Synthetic peptide
  Seed: SIGKVCRTLLAKSVF
SIFKVSRTLLDKSVF

SEQ ID NO: 265009 - protein, 15 aa, Artificial Sequence
  Description of Artificial Sequence: Synthetic peptide
  Seed: SIGKVCRTLLAKSVF
SIFKVSRTLLEKSVF

SEQ ID NO: 265010 - protein, 15 aa, Artificial Sequence
  Description of Artificial Sequence: Synthetic peptide
  Seed: SIGKVCRTLLAKSVF
SIFKVSRTLLGKSVF

SEQ ID NO: 265011 - protein, 15 aa, Artificial Sequence
  Description of Artificial Sequence: Synthetic peptide
  Seed: SIGKVCRTLLAKSVF
SIFKVSRTLLHKSVF

SEQ ID NO: 265012 - protein, 15 aa, Artificial Sequence
  Description of Artificial Sequence: Synthetic peptide
  Seed: SIGKVCRTLLAKSVF
SIFKVSRTLLKKSVF

SEQ ID NO: 265013 - protein, 15 aa, Artificial Sequence
  Description of Artificial Sequence: Synthetic peptide
  Seed: SIGKVCRTLLAKSVF
SIFKVSRTLLMKSVF

SEQ ID NO: 265014 - protein, 15 aa, Artificial Sequence
  Description of Artificial Sequence: Synthetic peptide
  Seed: SIGKVCRTLLAKSVF
SIFKVSRTLLNKSVF

SEQ ID NO: 265015 - protein, 15 aa, Artificial Sequence
  Description of Artificial Sequence: Synthetic peptide
  Seed: SIGKVCRTLLAKSVF
SIFKVSRTLLQKSVF

SEQ ID NO: 265016 - protein, 15 aa, Artificial Sequence
  Description of Artificial Sequence: Synthetic peptide
  Seed: SIGKVCRTLLAKSVF
SIFKVSRTLLRKSVF

SEQ ID NO: 265017 - protein, 15 aa, Artificial Sequence
  Description of Artificial Sequence: Synthetic peptide
  Seed: SIGKVCRTLLAKSVF
SIFKVSRTLLSKSVF

SEQ ID NO: 265018 - protein, 15 aa, Artificial Sequence
  Description of Artificial Sequence: Synthetic peptide
  Seed: SIGKVCRTLLAKSVF
SIFKVSRTLLTKSVF

SEQ ID NO: 265019 - protein, 15 aa, Artificial Sequence
  Description of Artificial Sequence: Synthetic peptide
  Seed: SIGKVCRTLLAKSVF
SIFKVSRTLLVKSVF

SEQ ID NO: 265020 - protein, 15 aa, Artificial Sequence
  Description of Artificial Sequence: Synthetic peptide
  Seed: SIGKVCRTLLAKSVF
SIFKVSRTLLYKSVF

SEQ ID NO: 265021 - protein, 15 aa, Artificial Sequence
  Description of Artificial Sequence: Synthetic peptide
  Seed: SIGKVCRTLLAKSVF
SIFKVSRVLLAKSVF

SEQ ID NO: 265022 - protein, 15 aa, Artificial Sequence
  Description of Artificial Sequence: Synthetic peptide
  Seed: SIGKVCRTLLAKSVF
SIFKVSRVLLDKSVF

SEQ ID NO: 265023 - protein, 15 aa, Artificial Sequence
  Description of Artificial Sequence: Synthetic peptide
  Seed: SIGKVCRTLLAKSVF
SIFKVSRVLLGKSVF

SEQ ID NO: 265024 - protein, 15 aa, Artificial Sequence
  Description of Artificial Sequence: Synthetic peptide
  Seed: SIGKVCRTLLAKSVF
SIFKVSRVLLHKSVF

SEQ ID NO: 265025 - protein, 15 aa, Artificial Sequence
  Description of Artificial Sequence: Synthetic peptide
  Seed: SIGKVCRTLLAKSVF
SIFKVSRVLLKKSVF

SEQ ID NO: 265026 - protein, 15 aa, Artificial Sequence
  Description of Artificial Sequence: Synthetic peptide
  Seed: SIGKVCRTLLAKSVF
SIFKVSRVLLNKSVF

SEQ ID NO: 265027 - protein, 15 aa, Artificial Sequence
  Description of Artificial Sequence: Synthetic peptide
  Seed: SIGKVCRTLLAKSVF
SIFKVSRVLLRKSVF

SEQ ID NO: 265028 - protein, 15 aa, Artificial Sequence
  Description of Artificial Sequence: Synthetic peptide
  Seed: SIGKVCRTLLAKSVF
SIFKVSRVLLSKSVF

SEQ ID NO: 265029 - protein, 15 aa, Artificial Sequence
  Description of Artificial Sequence: Synthetic peptide
  Seed: SIGKVCRTLLAKSVF
SIFKVTRALLAKSVF

SEQ ID NO: 265030 - protein, 15 aa, Artificial Sequence
  Description of Artificial Sequence: Synthetic peptide
  Seed: SIGKVCRTLLAKSVF
SIFKVTRALLDKSVF

SEQ ID NO: 265031 - protein, 15 aa, Artificial Sequence
  Description of Artificial Sequence: Synthetic peptide
  Seed: SIGKVCRTLLAKSVF
SIFKVTRALLGKSVF

SEQ ID NO: 265032 - protein, 15 aa, Artificial Sequence
  Description of Artificial Sequence: Synthetic peptide
  Seed: SIGKVCRTLLAKSVF
SIFKVTRALLHKSVF

SEQ ID NO: 265033 - protein, 15 aa, Artificial Sequence
  Description of Artificial Sequence: Synthetic peptide
  Seed: SIGKVCRTLLAKSVF
SIFKVTRALLKKSVF

SEQ ID NO: 265034 - protein, 15 aa, Artificial Sequence
  Description of Artificial Sequence: Synthetic peptide
  Seed: SIGKVCRTLLAKSVF
SIFKVTRALLNKSVF

SEQ ID NO: 265035 - protein, 15 aa, Artificial Sequence
  Description of Artificial Sequence: Synthetic peptide
  Seed: SIGKVCRTLLAKSVF
SIFKVTRALLQKSVF

SEQ ID NO: 265036 - protein, 15 aa, Artificial Sequence
  Description of Artificial Sequence: Synthetic peptide
  Seed: SIGKVCRTLLAKSVF
SIFKVTRALLRKSVF

SEQ ID NO: 265037 - protein, 15 aa, Artificial Sequence
  Description of Artificial Sequence: Synthetic peptide
  Seed: SIGKVCRTLLAKSVF
SIFKVTRALLSKSVF

SEQ ID NO: 265038 - protein, 15 aa, Artificial Sequence
  Description of Artificial Sequence: Synthetic peptide
  Seed: SIGKVCRTLLAKSVF
SIFKVTRALLTKSVF

SEQ ID NO: 265039 - protein, 15 aa, Artificial Sequence
  Description of Artificial Sequence: Synthetic peptide
  Seed: SIGKVCRTLLAKSVF
SIFKVTRALLVKSVF

SEQ ID NO: 265040 - protein, 15 aa, Artificial Sequence
  Description of Artificial Sequence: Synthetic peptide
  Seed: SIGKVCRTLLAKSVF
SIFKVTRALLYKSVF

SEQ ID NO: 265041 - protein, 15 aa, Artificial Sequence
  Description of Artificial Sequence: Synthetic peptide
  Seed: SIGKVCRTLLAKSVF
SIFKVTRGLLAKSVF

SEQ ID NO: 265042 - protein, 15 aa, Artificial Sequence
  Description of Artificial Sequence: Synthetic peptide
  Seed: SIGKVCRTLLAKSVF
SIFKVTRGLLGKSVF

SEQ ID NO: 265043 - protein, 15 aa, Artificial Sequence
  Description of Artificial Sequence: Synthetic peptide
  Seed: SIGKVCRTLLAKSVF
SIFKVTRGLLHKSVF

SEQ ID NO: 265044 - protein, 15 aa, Artificial Sequence
  Description of Artificial Sequence: Synthetic peptide
  Seed: SIGKVCRTLLAKSVF
SIFKVTRGLLKKSVF

SEQ ID NO: 265045 - protein, 15 aa, Artificial Sequence
  Description of Artificial Sequence: Synthetic peptide
  Seed: SIGKVCRTLLAKSVF
SIFKVTRGLLNKSVF

SEQ ID NO: 265046 - protein, 15 aa, Artificial Sequence
  Description of Artificial Sequence: Synthetic peptide
  Seed: SIGKVCRTLLAKSVF
SIFKVTRGLLQKSVF

SEQ ID NO: 265047 - protein, 15 aa, Artificial Sequence
  Description of Artificial Sequence: Synthetic peptide
  Seed: SIGKVCRTLLAKSVF
SIFKVTRGLLRKSVF

SEQ ID NO: 265048 - protein, 15 aa, Artificial Sequence
  Description of Artificial Sequence: Synthetic peptide
  Seed: SIGKVCRTLLAKSVF
SIFKVTRGLLSKSVF

SEQ ID NO: 265049 - protein, 15 aa, Artificial Sequence
  Description of Artificial Sequence: Synthetic peptide
  Seed: SIGKVCRTLLAKSVF
SIFKVTRHLLAKSVF

SEQ ID NO: 265050 - protein, 15 aa, Artificial Sequence
  Description of Artificial Sequence: Synthetic peptide
  Seed: SIGKVCRTLLAKSVF
SIFKVTRHLLGKSVF

SEQ ID NO: 265051 - protein, 15 aa, Artificial Sequence
  Description of Artificial Sequence: Synthetic peptide
  Seed: SIGKVCRTLLAKSVF
SIFKVTRHLLHKSVF

SEQ ID NO: 265052 - protein, 15 aa, Artificial Sequence
  Description of Artificial Sequence: Synthetic peptide
  Seed: SIGKVCRTLLAKSVF
SIFKVTRHLLKKSVF

SEQ ID NO: 265053 - protein, 15 aa, Artificial Sequence
  Description of Artificial Sequence: Synthetic peptide
  Seed: SIGKVCRTLLAKSVF
SIFKVTRHLLNKSVF

SEQ ID NO: 265054 - protein, 15 aa, Artificial Sequence
  Description of Artificial Sequence: Synthetic peptide
  Seed: SIGKVCRTLLAKSVF
SIFKVTRHLLQKSVF

SEQ ID NO: 265055 - protein, 15 aa, Artificial Sequence
  Description of Artificial Sequence: Synthetic peptide
  Seed: SIGKVCRTLLAKSVF
SIFKVTRHLLRKSVF

SEQ ID NO: 265056 - protein, 15 aa, Artificial Sequence
  Description of Artificial Sequence: Synthetic peptide
  Seed: SIGKVCRTLLAKSVF
SIFKVTRHLLSKSVF

SEQ ID NO: 265057 - protein, 15 aa, Artificial Sequence
  Description of Artificial Sequence: Synthetic peptide
  Seed: SIGKVCRTLLAKSVF
SIFKVTRHLLTKSVF

SEQ ID NO: 265058 - protein, 15 aa, Artificial Sequence
  Description of Artificial Sequence: Synthetic peptide
  Seed: SIGKVCRTLLAKSVF
SIFKVTRHLLVKSVF

SEQ ID NO: 265059 - protein, 15 aa, Artificial Sequence
  Description of Artificial Sequence: Synthetic peptide
  Seed: SIGKVCRTLLAKSVF
SIFKVTRILLRKSVF

SEQ ID NO: 265060 - protein, 15 aa, Artificial Sequence
  Description of Artificial Sequence: Synthetic peptide
  Seed: SIGKVCRTLLAKSVF
SIFKVTRILLSKSVF

SEQ ID NO: 265061 - protein, 15 aa, Artificial Sequence
  Description of Artificial Sequence: Synthetic peptide
  Seed: SIGKVCRTLLAKSVF
SIFKVTRKLLAKSVF

SEQ ID NO: 265062 - protein, 15 aa, Artificial Sequence
  Description of Artificial Sequence: Synthetic peptide
  Seed: SIGKVCRTLLAKSVF
SIFKVTRKLLCKSVF

SEQ ID NO: 265063 - protein, 15 aa, Artificial Sequence
  Description of Artificial Sequence: Synthetic peptide
  Seed: SIGKVCRTLLAKSVF
SIFKVTRKLLDKSVF

SEQ ID NO: 265064 - protein, 15 aa, Artificial Sequence
  Description of Artificial Sequence: Synthetic peptide
  Seed: SIGKVCRTLLAKSVF
SIFKVTRKLLEKSVF

SEQ ID NO: 265065 - protein, 15 aa, Artificial Sequence
  Description of Artificial Sequence: Synthetic peptide
  Seed: SIGKVCRTLLAKSVF
SIFKVTRKLLFKSVF

SEQ ID NO: 265066 - protein, 15 aa, Artificial Sequence
  Description of Artificial Sequence: Synthetic peptide
  Seed: SIGKVCRTLLAKSVF
SIFKVTRKLLGKSVF

SEQ ID NO: 265067 - protein, 15 aa, Artificial Sequence
  Description of Artificial Sequence: Synthetic peptide
  Seed: SIGKVCRTLLAKSVF
SIFKVTRKLLHKSVF

SEQ ID NO: 265068 - protein, 15 aa, Artificial Sequence
  Description of Artificial Sequence: Synthetic peptide
  Seed: SIGKVCRTLLAKSVF
SIFKVTRKLLIKSVF

SEQ ID NO: 265069 - protein, 15 aa, Artificial Sequence
  Description of Artificial Sequence: Synthetic peptide
  Seed: SIGKVCRTLLAKSVF
SIFKVTRKLLKKSVF

SEQ ID NO: 265070 - protein, 15 aa, Artificial Sequence
  Description of Artificial Sequence: Synthetic peptide
  Seed: SIGKVCRTLLAKSVF
SIFKVTRKLLLKSVF

SEQ ID NO: 265071 - protein, 15 aa, Artificial Sequence
  Description of Artificial Sequence: Synthetic peptide
  Seed: SIGKVCRTLLAKSVF
SIFKVTRKLLMKSVF

SEQ ID NO: 265072 - protein, 15 aa, Artificial Sequence
  Description of Artificial Sequence: Synthetic peptide
  Seed: SIGKVCRTLLAKSVF
SIFKVTRKLLNKSVF

SEQ ID NO: 265073 - protein, 15 aa, Artificial Sequence
  Description of Artificial Sequence: Synthetic peptide
  Seed: SIGKVCRTLLAKSVF
SIFKVTRKLLPKSVF

SEQ ID NO: 265074 - protein, 15 aa, Artificial Sequence
  Description of Artificial Sequence: Synthetic peptide
  Seed: SIGKVCRTLLAKSVF
SIFKVTRKLLQKSVF

SEQ ID NO: 265075 - protein, 15 aa, Artificial Sequence
  Description of Artificial Sequence: Synthetic peptide
  Seed: SIGKVCRTLLAKSVF
SIFKVTRKLLRKSVF

SEQ ID NO: 265076 - protein, 15 aa, Artificial Sequence
  Description of Artificial Sequence: Synthetic peptide
  Seed: SIGKVCRTLLAKSVF
SIFKVTRKLLSKSVF

SEQ ID NO: 265077 - protein, 15 aa, Artificial Sequence
  Description of Artificial Sequence: Synthetic peptide
  Seed: SIGKVCRTLLAKSVF
SIFKVTRKLLTKSVF

SEQ ID NO: 265078 - protein, 15 aa, Artificial Sequence
  Description of Artificial Sequence: Synthetic peptide
  Seed: SIGKVCRTLLAKSVF
SIFKVTRKLLVKSVF

SEQ ID NO: 265079 - protein, 15 aa, Artificial Sequence
  Description of Artificial Sequence: Synthetic peptide
  Seed: SIGKVCRTLLAKSVF
SIFKVTRKLLWKSVF

SEQ ID NO: 265080 - protein, 15 aa, Artificial Sequence
  Description of Artificial Sequence: Synthetic peptide
  Seed: SIGKVCRTLLAKSVF
SIFKVTRKLLYKSVF

SEQ ID NO: 265081 - protein, 15 aa, Artificial Sequence
  Description of Artificial Sequence: Synthetic peptide
  Seed: SIGKVCRTLLAKSVF
SIFKVTRNLLAKSVF

SEQ ID NO: 265082 - protein, 15 aa, Artificial Sequence
  Description of Artificial Sequence: Synthetic peptide
  Seed: SIGKVCRTLLAKSVF
SIFKVTRNLLDKSVF

SEQ ID NO: 265083 - protein, 15 aa, Artificial Sequence
  Description of Artificial Sequence: Synthetic peptide
  Seed: SIGKVCRTLLAKSVF
SIFKVTRNLLEKSVF

SEQ ID NO: 265084 - protein, 15 aa, Artificial Sequence
  Description of Artificial Sequence: Synthetic peptide
  Seed: SIGKVCRTLLAKSVF
SIFKVTRNLLGKSVF

SEQ ID NO: 265085 - protein, 15 aa, Artificial Sequence
  Description of Artificial Sequence: Synthetic peptide
  Seed: SIGKVCRTLLAKSVF
SIFKVTRNLLHKSVF

SEQ ID NO: 265086 - protein, 15 aa, Artificial Sequence
  Description of Artificial Sequence: Synthetic peptide
  Seed: SIGKVCRTLLAKSVF
SIFKVTRNLLNKSVF

SEQ ID NO: 265087 - protein, 15 aa, Artificial Sequence
  Description of Artificial Sequence: Synthetic peptide
  Seed: SIGKVCRTLLAKSVF
SIFKVTRNLLQKSVF

SEQ ID NO: 265088 - protein, 15 aa, Artificial Sequence
  Description of Artificial Sequence: Synthetic peptide
  Seed: SIGKVCRTLLAKSVF
SIFKVTRNLLRKSVF

SEQ ID NO: 265089 - protein, 15 aa, Artificial Sequence
  Description of Artificial Sequence: Synthetic peptide
  Seed: SIGKVCRTLLAKSVF
SIFKVTRNLLSKSVF

SEQ ID NO: 265090 - protein, 15 aa, Artificial Sequence
  Description of Artificial Sequence: Synthetic peptide
  Seed: SIGKVCRTLLAKSVF
SIFKVTRNLLTKSVF

SEQ ID NO: 265091 - protein, 15 aa, Artificial Sequence
  Description of Artificial Sequence: Synthetic peptide
  Seed: SIGKVCRTLLAKSVF
SIFKVTRPLLAKSVF

SEQ ID NO: 265092 - protein, 15 aa, Artificial Sequence
  Description of Artificial Sequence: Synthetic peptide
  Seed: SIGKVCRTLLAKSVF
SIFKVTRPLLGKSVF

SEQ ID NO: 265093 - protein, 15 aa, Artificial Sequence
  Description of Artificial Sequence: Synthetic peptide
  Seed: SIGKVCRTLLAKSVF
SIFKVTRPLLHKSVF

SEQ ID NO: 265094 - protein, 15 aa, Artificial Sequence
  Description of Artificial Sequence: Synthetic peptide
  Seed: SIGKVCRTLLAKSVF
SIFKVTRPLLKKSVF

SEQ ID NO: 265095 - protein, 15 aa, Artificial Sequence
  Description of Artificial Sequence: Synthetic peptide
  Seed: SIGKVCRTLLAKSVF
SIFKVTRPLLNKSVF

SEQ ID NO: 265096 - protein, 15 aa, Artificial Sequence
  Description of Artificial Sequence: Synthetic peptide
  Seed: SIGKVCRTLLAKSVF
SIFKVTRPLLQKSVF

SEQ ID NO: 265097 - protein, 15 aa, Artificial Sequence
  Description of Artificial Sequence: Synthetic peptide
  Seed: SIGKVCRTLLAKSVF
SIFKVTRPLLRKSVF

SEQ ID NO: 265098 - protein, 15 aa, Artificial Sequence
  Description of Artificial Sequence: Synthetic peptide
  Seed: SIGKVCRTLLAKSVF
SIFKVTRPLLSKSVF

SEQ ID NO: 265099 - protein, 15 aa, Artificial Sequence
  Description of Artificial Sequence: Synthetic peptide
  Seed: SIGKVCRTLLAKSVF
SIFKVTRPLLTKSVF

SEQ ID NO: 265100 - protein, 15 aa, Artificial Sequence
  Description of Artificial Sequence: Synthetic peptide
  Seed: SIGKVCRTLLAKSVF
SIFKVTRPLLVKSVF

SEQ ID NO: 265101 - protein, 15 aa, Artificial Sequence
  Description of Artificial Sequence: Synthetic peptide
  Seed: SIGKVCRTLLAKSVF
SIFKVTRQLLAKSVF

SEQ ID NO: 265102 - protein, 15 aa, Artificial Sequence
  Description of Artificial Sequence: Synthetic peptide
  Seed: SIGKVCRTLLAKSVF
SIFKVTRQLLGKSVF

SEQ ID NO: 265103 - protein, 15 aa, Artificial Sequence
  Description of Artificial Sequence: Synthetic peptide
  Seed: SIGKVCRTLLAKSVF
SIFKVTRQLLQKSVF

SEQ ID NO: 265104 - protein, 15 aa, Artificial Sequence
  Description of Artificial Sequence: Synthetic peptide
  Seed: SIGKVCRTLLAKSVF
SIFKVTRQLLSKSVF

SEQ ID NO: 265105 - protein, 15 aa, Artificial Sequence
  Description of Artificial Sequence: Synthetic peptide
  Seed: SIGKVCRTLLAKSVF
SIFKVTRRLLAKSVF

SEQ ID NO: 265106 - protein, 15 aa, Artificial Sequence
  Description of Artificial Sequence: Synthetic peptide
  Seed: SIGKVCRTLLAKSVF
SIFKVTRRLLCKSVF

SEQ ID NO: 265107 - protein, 15 aa, Artificial Sequence
  Description of Artificial Sequence: Synthetic peptide
  Seed: SIGKVCRTLLAKSVF
SIFKVTRRLLDKSVF

SEQ ID NO: 265108 - protein, 15 aa, Artificial Sequence
  Description of Artificial Sequence: Synthetic peptide
  Seed: SIGKVCRTLLAKSVF
SIFKVTRRLLEKSVF

SEQ ID NO: 265109 - protein, 15 aa, Artificial Sequence
  Description of Artificial Sequence: Synthetic peptide
  Seed: SIGKVCRTLLAKSVF
SIFKVTRRLLFKSVF

SEQ ID NO: 265110 - protein, 15 aa, Artificial Sequence
  Description of Artificial Sequence: Synthetic peptide
  Seed: SIGKVCRTLLAKSVF
SIFKVTRRLLGKSVF

SEQ ID NO: 265111 - protein, 15 aa, Artificial Sequence
  Description of Artificial Sequence: Synthetic peptide
  Seed: SIGKVCRTLLAKSVF
SIFKVTRRLLHKSVF

SEQ ID NO: 265112 - protein, 15 aa, Artificial Sequence
  Description of Artificial Sequence: Synthetic peptide
  Seed: SIGKVCRTLLAKSVF
SIFKVTRRLLIKSVF

SEQ ID NO: 265113 - protein, 15 aa, Artificial Sequence
  Description of Artificial Sequence: Synthetic peptide
  Seed: SIGKVCRTLLAKSVF
SIFKVTRRLLKKSVF

SEQ ID NO: 265114 - protein, 15 aa, Artificial Sequence
  Description of Artificial Sequence: Synthetic peptide
  Seed: SIGKVCRTLLAKSVF
SIFKVTRRLLLKSVF

SEQ ID NO: 265115 - protein, 15 aa, Artificial Sequence
  Description of Artificial Sequence: Synthetic peptide
  Seed: SIGKVCRTLLAKSVF
SIFKVTRRLLMKSVF

SEQ ID NO: 265116 - protein, 15 aa, Artificial Sequence
  Description of Artificial Sequence: Synthetic peptide
  Seed: SIGKVCRTLLAKSVF
SIFKVTRRLLNKSVF

SEQ ID NO: 265117 - protein, 15 aa, Artificial Sequence
  Description of Artificial Sequence: Synthetic peptide
  Seed: SIGKVCRTLLAKSVF
SIFKVTRRLLPKSVF

SEQ ID NO: 265118 - protein, 15 aa, Artificial Sequence
  Description of Artificial Sequence: Synthetic peptide
  Seed: SIGKVCRTLLAKSVF
SIFKVTRRLLQKSVF

SEQ ID NO: 265119 - protein, 15 aa, Artificial Sequence
  Description of Artificial Sequence: Synthetic peptide
  Seed: SIGKVCRTLLAKSVF
SIFKVTRRLLRKSVF

SEQ ID NO: 265120 - protein, 15 aa, Artificial Sequence
  Description of Artificial Sequence: Synthetic peptide
  Seed: SIGKVCRTLLAKSVF
SIFKVTRRLLSKSVF

SEQ ID NO: 265121 - protein, 15 aa, Artificial Sequence
  Description of Artificial Sequence: Synthetic peptide
  Seed: SIGKVCRTLLAKSVF
SIFKVTRRLLTKSVF

SEQ ID NO: 265122 - protein, 15 aa, Artificial Sequence
  Description of Artificial Sequence: Synthetic peptide
  Seed: SIGKVCRTLLAKSVF
SIFKVTRRLLVKSVF

SEQ ID NO: 265123 - protein, 15 aa, Artificial Sequence
  Description of Artificial Sequence: Synthetic peptide
  Seed: SIGKVCRTLLAKSVF
SIFKVTRRLLWKSVF

SEQ ID NO: 265124 - protein, 15 aa, Artificial Sequence
  Description of Artificial Sequence: Synthetic peptide
  Seed: SIGKVCRTLLAKSVF
SIFKVTRRLLYKSVF

SEQ ID NO: 265125 - protein, 15 aa, Artificial Sequence
  Description of Artificial Sequence: Synthetic peptide
  Seed: SIGKVCRTLLAKSVF
SIFKVTRSLLAKSVF

SEQ ID NO: 265126 - protein, 15 aa, Artificial Sequence
  Description of Artificial Sequence: Synthetic peptide
  Seed: SIGKVCRTLLAKSVF
SIFKVTRSLLDKSVF

SEQ ID NO: 265127 - protein, 15 aa, Artificial Sequence
  Description of Artificial Sequence: Synthetic peptide
  Seed: SIGKVCRTLLAKSVF
SIFKVTRSLLEKSVF

SEQ ID NO: 265128 - protein, 15 aa, Artificial Sequence
  Description of Artificial Sequence: Synthetic peptide
  Seed: SIGKVCRTLLAKSVF
SIFKVTRSLLGKSVF

SEQ ID NO: 265129 - protein, 15 aa, Artificial Sequence
  Description of Artificial Sequence: Synthetic peptide
  Seed: SIGKVCRTLLAKSVF
SIFKVTRSLLHKSVF

SEQ ID NO: 265130 - protein, 15 aa, Artificial Sequence
  Description of Artificial Sequence: Synthetic peptide
  Seed: SIGKVCRTLLAKSVF
SIFKVTRSLLKKSVF

SEQ ID NO: 265131 - protein, 15 aa, Artificial Sequence
  Description of Artificial Sequence: Synthetic peptide
  Seed: SIGKVCRTLLAKSVF
SIFKVTRSLLNKSVF

SEQ ID NO: 265132 - protein, 15 aa, Artificial Sequence
  Description of Artificial Sequence: Synthetic peptide
  Seed: SIGKVCRTLLAKSVF
SIFKVTRSLLQKSVF

SEQ ID NO: 265133 - protein, 15 aa, Artificial Sequence
  Description of Artificial Sequence: Synthetic peptide
  Seed: SIGKVCRTLLAKSVF
SIFKVTRSLLRKSVF

SEQ ID NO: 265134 - protein, 15 aa, Artificial Sequence
  Description of Artificial Sequence: Synthetic peptide
  Seed: SIGKVCRTLLAKSVF
SIFKVTRSLLSKSVF

SEQ ID NO: 265135 - protein, 15 aa, Artificial Sequence
  Description of Artificial Sequence: Synthetic peptide
  Seed: SIGKVCRTLLAKSVF
SIFKVTRSLLTKSVF

SEQ ID NO: 265136 - protein, 15 aa, Artificial Sequence
  Description of Artificial Sequence: Synthetic peptide
  Seed: SIGKVCRTLLAKSVF
SIFKVTRSLLVKSVF

SEQ ID NO: 265137 - protein, 15 aa, Artificial Sequence
  Description of Artificial Sequence: Synthetic peptide
  Seed: SIGKVCRTLLAKSVF
SIFKVTRSLLYKSVF

SEQ ID NO: 265138 - protein, 15 aa, Artificial Sequence
  Description of Artificial Sequence: Synthetic peptide
  Seed: SIGKVCRTLLAKSVF
SIFKVTRTLLAKSVF

SEQ ID NO: 265139 - protein, 15 aa, Artificial Sequence
  Description of Artificial Sequence: Synthetic peptide
  Seed: SIGKVCRTLLAKSVF
SIFKVTRTLLDKSVF

SEQ ID NO: 265140 - protein, 15 aa, Artificial Sequence
  Description of Artificial Sequence: Synthetic peptide
  Seed: SIGKVCRTLLAKSVF
SIFKVTRTLLEKSVF

SEQ ID NO: 265141 - protein, 15 aa, Artificial Sequence
  Description of Artificial Sequence: Synthetic peptide
  Seed: SIGKVCRTLLAKSVF
SIFKVTRTLLGKSVF

SEQ ID NO: 265142 - protein, 15 aa, Artificial Sequence
  Description of Artificial Sequence: Synthetic peptide
  Seed: SIGKVCRTLLAKSVF
SIFKVTRTLLHKSVF

SEQ ID NO: 265143 - protein, 15 aa, Artificial Sequence
  Description of Artificial Sequence: Synthetic peptide
  Seed: SIGKVCRTLLAKSVF
SIFKVTRTLLKKSVF

SEQ ID NO: 265144 - protein, 15 aa, Artificial Sequence
  Description of Artificial Sequence: Synthetic peptide
  Seed: SIGKVCRTLLAKSVF
SIFKVTRTLLMKSVF

SEQ ID NO: 265145 - protein, 15 aa, Artificial Sequence
  Description of Artificial Sequence: Synthetic peptide
  Seed: SIGKVCRTLLAKSVF
SIFKVTRTLLNKSVF

SEQ ID NO: 265146 - protein, 15 aa, Artificial Sequence
  Description of Artificial Sequence: Synthetic peptide
  Seed: SIGKVCRTLLAKSVF
SIFKVTRTLLQKSVF

SEQ ID NO: 265147 - protein, 15 aa, Artificial Sequence
  Description of Artificial Sequence: Synthetic peptide
  Seed: SIGKVCRTLLAKSVF
SIFKVTRTLLRKSVF

SEQ ID NO: 265148 - protein, 15 aa, Artificial Sequence
  Description of Artificial Sequence: Synthetic peptide
  Seed: SIGKVCRTLLAKSVF
SIFKVTRTLLSKSVF

SEQ ID NO: 265149 - protein, 15 aa, Artificial Sequence
  Description of Artificial Sequence: Synthetic peptide
  Seed: SIGKVCRTLLAKSVF
SIFKVTRTLLTKSVF

SEQ ID NO: 265150 - protein, 15 aa, Artificial Sequence
  Description of Artificial Sequence: Synthetic peptide
  Seed: SIGKVCRTLLAKSVF
SIFKVTRTLLVKSVF

SEQ ID NO: 265151 - protein, 15 aa, Artificial Sequence
  Description of Artificial Sequence: Synthetic peptide
  Seed: SIGKVCRTLLAKSVF
SIFKVTRTLLYKSVF

SEQ ID NO: 265152 - protein, 15 aa, Artificial Sequence
  Description of Artificial Sequence: Synthetic peptide
  Seed: SIGKVCRTLLAKSVF
SIFKVTRVLLAKSVF

SEQ ID NO: 265153 - protein, 15 aa, Artificial Sequence
  Description of Artificial Sequence: Synthetic peptide
  Seed: SIGKVCRTLLAKSVF
SIFKVTRVLLDKSVF

SEQ ID NO: 265154 - protein, 15 aa, Artificial Sequence
  Description of Artificial Sequence: Synthetic peptide
  Seed: SIGKVCRTLLAKSVF
SIFKVTRVLLGKSVF

SEQ ID NO: 265155 - protein, 15 aa, Artificial Sequence
  Description of Artificial Sequence: Synthetic peptide
  Seed: SIGKVCRTLLAKSVF
SIFKVTRVLLHKSVF

SEQ ID NO: 265156 - protein, 15 aa, Artificial Sequence
  Description of Artificial Sequence: Synthetic peptide
  Seed: SIGKVCRTLLAKSVF
SIFKVTRVLLKKSVF

SEQ ID NO: 265157 - protein, 15 aa, Artificial Sequence
  Description of Artificial Sequence: Synthetic peptide
  Seed: SIGKVCRTLLAKSVF
SIFKVTRVLLRKSVF

SEQ ID NO: 265158 - protein, 15 aa, Artificial Sequence
  Description of Artificial Sequence: Synthetic peptide
  Seed: SIGKVCRTLLAKSVF
SIFKVTRVLLSKSVF

SEQ ID NO: 265159 - protein, 15 aa, Artificial Sequence
  Description of Artificial Sequence: Synthetic peptide
  Seed: SIGKVCRTLLAKSVF
SIFKVVRALLAKSVF

SEQ ID NO: 265160 - protein, 15 aa, Artificial Sequence
  Description of Artificial Sequence: Synthetic peptide
  Seed: SIGKVCRTLLAKSVF
SIFKVVRALLDKSVF

SEQ ID NO: 265161 - protein, 15 aa, Artificial Sequence
  Description of Artificial Sequence: Synthetic peptide
  Seed: SIGKVCRTLLAKSVF
SIFKVVRALLEKSVF

SEQ ID NO: 265162 - protein, 15 aa, Artificial Sequence
  Description of Artificial Sequence: Synthetic peptide
  Seed: SIGKVCRTLLAKSVF
SIFKVVRALLGKSVF

SEQ ID NO: 265163 - protein, 15 aa, Artificial Sequence
  Description of Artificial Sequence: Synthetic peptide
  Seed: SIGKVCRTLLAKSVF
SIFKVVRALLHKSVF

SEQ ID NO: 265164 - protein, 15 aa, Artificial Sequence
  Description of Artificial Sequence: Synthetic peptide
  Seed: SIGKVCRTLLAKSVF
SIFKVVRALLKKSVF

SEQ ID NO: 265165 - protein, 15 aa, Artificial Sequence
  Description of Artificial Sequence: Synthetic peptide
  Seed: SIGKVCRTLLAKSVF
SIFKVVRALLNKSVF

SEQ ID NO: 265166 - protein, 15 aa, Artificial Sequence
  Description of Artificial Sequence: Synthetic peptide
  Seed: SIGKVCRTLLAKSVF
SIFKVVRALLQKSVF

SEQ ID NO: 265167 - protein, 15 aa, Artificial Sequence
  Description of Artificial Sequence: Synthetic peptide
  Seed: SIGKVCRTLLAKSVF
SIFKVVRALLRKSVF

SEQ ID NO: 265168 - protein, 15 aa, Artificial Sequence
  Description of Artificial Sequence: Synthetic peptide
  Seed: SIGKVCRTLLAKSVF
SIFKVVRALLSKSVF

SEQ ID NO: 265169 - protein, 15 aa, Artificial Sequence
  Description of Artificial Sequence: Synthetic peptide
  Seed: SIGKVCRTLLAKSVF
SIFKVVRALLTKSVF

SEQ ID NO: 265170 - protein, 15 aa, Artificial Sequence
  Description of Artificial Sequence: Synthetic peptide
  Seed: SIGKVCRTLLAKSVF
SIFKVVRALLYKSVF

SEQ ID NO: 265171 - protein, 15 aa, Artificial Sequence
  Description of Artificial Sequence: Synthetic peptide
  Seed: SIGKVCRTLLAKSVF
SIFKVVRDLLAKSVF

SEQ ID NO: 265172 - protein, 15 aa, Artificial Sequence
  Description of Artificial Sequence: Synthetic peptide
  Seed: SIGKVCRTLLAKSVF
SIFKVVRDLLDKSVF

SEQ ID NO: 265173 - protein, 15 aa, Artificial Sequence
  Description of Artificial Sequence: Synthetic peptide
  Seed: SIGKVCRTLLAKSVF
SIFKVVRDLLEKSVF

SEQ ID NO: 265174 - protein, 15 aa, Artificial Sequence
  Description of Artificial Sequence: Synthetic peptide
  Seed: SIGKVCRTLLAKSVF
SIFKVVRDLLSKSVF

SEQ ID NO: 265175 - protein, 15 aa, Artificial Sequence
  Description of Artificial Sequence: Synthetic peptide
  Seed: SIGKVCRTLLAKSVF
SIFKVVRELLRKSVF

SEQ ID NO: 265176 - protein, 15 aa, Artificial Sequence
  Description of Artificial Sequence: Synthetic peptide
  Seed: SIGKVCRTLLAKSVF
SIFKVVRGLLAKSVF

SEQ ID NO: 265177 - protein, 15 aa, Artificial Sequence
  Description of Artificial Sequence: Synthetic peptide
  Seed: SIGKVCRTLLAKSVF
SIFKVVRGLLDKSVF

SEQ ID NO: 265178 - protein, 15 aa, Artificial Sequence
  Description of Artificial Sequence: Synthetic peptide
  Seed: SIGKVCRTLLAKSVF
SIFKVVRGLLGKSVF

SEQ ID NO: 265179 - protein, 15 aa, Artificial Sequence
  Description of Artificial Sequence: Synthetic peptide
  Seed: SIGKVCRTLLAKSVF
SIFKVVRGLLHKSVF

SEQ ID NO: 265180 - protein, 15 aa, Artificial Sequence
  Description of Artificial Sequence: Synthetic peptide
  Seed: SIGKVCRTLLAKSVF
SIFKVVRGLLKKSVF

SEQ ID NO: 265181 - protein, 15 aa, Artificial Sequence
  Description of Artificial Sequence: Synthetic peptide
  Seed: SIGKVCRTLLAKSVF
SIFKVVRGLLNKSVF

SEQ ID NO: 265182 - protein, 15 aa, Artificial Sequence
  Description of Artificial Sequence: Synthetic peptide
  Seed: SIGKVCRTLLAKSVF
SIFKVVRGLLQKSVF

SEQ ID NO: 265183 - protein, 15 aa, Artificial Sequence
  Description of Artificial Sequence: Synthetic peptide
  Seed: SIGKVCRTLLAKSVF
SIFKVVRGLLRKSVF

SEQ ID NO: 265184 - protein, 15 aa, Artificial Sequence
  Description of Artificial Sequence: Synthetic peptide
  Seed: SIGKVCRTLLAKSVF
SIFKVVRGLLSKSVF

SEQ ID NO: 265185 - protein, 15 aa, Artificial Sequence
  Description of Artificial Sequence: Synthetic peptide
  Seed: SIGKVCRTLLAKSVF
SIFKVVRGLLTKSVF

SEQ ID NO: 265186 - protein, 15 aa, Artificial Sequence
  Description of Artificial Sequence: Synthetic peptide
  Seed: SIGKVCRTLLAKSVF
SIFKVVRHLLAKSVF

SEQ ID NO: 265187 - protein, 15 aa, Artificial Sequence
  Description of Artificial Sequence: Synthetic peptide
  Seed: SIGKVCRTLLAKSVF
SIFKVVRHLLGKSVF

SEQ ID NO: 265188 - protein, 15 aa, Artificial Sequence
  Description of Artificial Sequence: Synthetic peptide
  Seed: SIGKVCRTLLAKSVF
SIFKVVRHLLHKSVF

SEQ ID NO: 265189 - protein, 15 aa, Artificial Sequence
  Description of Artificial Sequence: Synthetic peptide
  Seed: SIGKVCRTLLAKSVF
SIFKVVRHLLKKSVF

SEQ ID NO: 265190 - protein, 15 aa, Artificial Sequence
  Description of Artificial Sequence: Synthetic peptide
  Seed: SIGKVCRTLLAKSVF
SIFKVVRHLLMKSVF

SEQ ID NO: 265191 - protein, 15 aa, Artificial Sequence
  Description of Artificial Sequence: Synthetic peptide
  Seed: SIGKVCRTLLAKSVF
SIFKVVRHLLNKSVF

SEQ ID NO: 265192 - protein, 15 aa, Artificial Sequence
  Description of Artificial Sequence: Synthetic peptide
  Seed: SIGKVCRTLLAKSVF
SIFKVVRHLLPKSVF

SEQ ID NO: 265193 - protein, 15 aa, Artificial Sequence
  Description of Artificial Sequence: Synthetic peptide
  Seed: SIGKVCRTLLAKSVF
SIFKVVRHLLQKSVF

SEQ ID NO: 265194 - protein, 15 aa, Artificial Sequence
  Description of Artificial Sequence: Synthetic peptide
  Seed: SIGKVCRTLLAKSVF
SIFKVVRHLLRKSVF

SEQ ID NO: 265195 - protein, 15 aa, Artificial Sequence
  Description of Artificial Sequence: Synthetic peptide
  Seed: SIGKVCRTLLAKSVF
SIFKVVRHLLSKSVF

SEQ ID NO: 265196 - protein, 15 aa, Artificial Sequence
  Description of Artificial Sequence: Synthetic peptide
  Seed: SIGKVCRTLLAKSVF
SIFKVVRHLLTKSVF

SEQ ID NO: 265197 - protein, 15 aa, Artificial Sequence
  Description of Artificial Sequence: Synthetic peptide
  Seed: SIGKVCRTLLAKSVF
SIFKVVRHLLVKSVF

SEQ ID NO: 265198 - protein, 15 aa, Artificial Sequence
  Description of Artificial Sequence: Synthetic peptide
  Seed: SIGKVCRTLLAKSVF
SIFKVVRHLLYKSVF

SEQ ID NO: 265199 - protein, 15 aa, Artificial Sequence
  Description of Artificial Sequence: Synthetic peptide
  Seed: SIGKVCRTLLAKSVF
SIFKVVRILLDKSVF

SEQ ID NO: 265200 - protein, 15 aa, Artificial Sequence
  Description of Artificial Sequence: Synthetic peptide
  Seed: SIGKVCRTLLAKSVF
SIFKVVRILLHKSVF

SEQ ID NO: 265201 - protein, 15 aa, Artificial Sequence
  Description of Artificial Sequence: Synthetic peptide
  Seed: SIGKVCRTLLAKSVF
SIFKVVRKLLAKSVF

SEQ ID NO: 265202 - protein, 15 aa, Artificial Sequence
  Description of Artificial Sequence: Synthetic peptide
  Seed: SIGKVCRTLLAKSVF
SIFKVVRKLLCKSVF

SEQ ID NO: 265203 - protein, 15 aa, Artificial Sequence
  Description of Artificial Sequence: Synthetic peptide
  Seed: SIGKVCRTLLAKSVF
SIFKVVRKLLDKSVF

SEQ ID NO: 265204 - protein, 15 aa, Artificial Sequence
  Description of Artificial Sequence: Synthetic peptide
  Seed: SIGKVCRTLLAKSVF
SIFKVVRKLLEKSVF

SEQ ID NO: 265205 - protein, 15 aa, Artificial Sequence
  Description of Artificial Sequence: Synthetic peptide
  Seed: SIGKVCRTLLAKSVF
SIFKVVRKLLFKSVF

SEQ ID NO: 265206 - protein, 15 aa, Artificial Sequence
  Description of Artificial Sequence: Synthetic peptide
  Seed: SIGKVCRTLLAKSVF
SIFKVVRKLLGKSVF

SEQ ID NO: 265207 - protein, 15 aa, Artificial Sequence
  Description of Artificial Sequence: Synthetic peptide
  Seed: SIGKVCRTLLAKSVF
SIFKVVRKLLHKSVF

SEQ ID NO: 265208 - protein, 15 aa, Artificial Sequence
  Description of Artificial Sequence: Synthetic peptide
  Seed: SIGKVCRTLLAKSVF
SIFKVVRKLLIKSVF

SEQ ID NO: 265209 - protein, 15 aa, Artificial Sequence
  Description of Artificial Sequence: Synthetic peptide
  Seed: SIGKVCRTLLAKSVF
SIFKVVRKLLKKSVF

SEQ ID NO: 265210 - protein, 15 aa, Artificial Sequence
  Description of Artificial Sequence: Synthetic peptide
  Seed: SIGKVCRTLLAKSVF
SIFKVVRKLLLKSVF

SEQ ID NO: 265211 - protein, 15 aa, Artificial Sequence
  Description of Artificial Sequence: Synthetic peptide
  Seed: SIGKVCRTLLAKSVF
SIFKVVRKLLMKSVF

SEQ ID NO: 265212 - protein, 15 aa, Artificial Sequence
  Description of Artificial Sequence: Synthetic peptide
  Seed: SIGKVCRTLLAKSVF
SIFKVVRKLLNKSVF

SEQ ID NO: 265213 - protein, 15 aa, Artificial Sequence
  Description of Artificial Sequence: Synthetic peptide
  Seed: SIGKVCRTLLAKSVF
SIFKVVRKLLPKSVF

SEQ ID NO: 265214 - protein, 15 aa, Artificial Sequence
  Description of Artificial Sequence: Synthetic peptide
  Seed: SIGKVCRTLLAKSVF
SIFKVVRKLLQKSVF

SEQ ID NO: 265215 - protein, 15 aa, Artificial Sequence
  Description of Artificial Sequence: Synthetic peptide
  Seed: SIGKVCRTLLAKSVF
SIFKVVRKLLRKSVF

SEQ ID NO: 265216 - protein, 15 aa, Artificial Sequence
  Description of Artificial Sequence: Synthetic peptide
  Seed: SIGKVCRTLLAKSVF
SIFKVVRKLLSKSVF

SEQ ID NO: 265217 - protein, 15 aa, Artificial Sequence
  Description of Artificial Sequence: Synthetic peptide
  Seed: SIGKVCRTLLAKSVF
SIFKVVRKLLTKSVF

SEQ ID NO: 265218 - protein, 15 aa, Artificial Sequence
  Description of Artificial Sequence: Synthetic peptide
  Seed: SIGKVCRTLLAKSVF
SIFKVVRKLLVKSVF

SEQ ID NO: 265219 - protein, 15 aa, Artificial Sequence
  Description of Artificial Sequence: Synthetic peptide
  Seed: SIGKVCRTLLAKSVF
SIFKVVRKLLWKSVF

SEQ ID NO: 265220 - protein, 15 aa, Artificial Sequence
  Description of Artificial Sequence: Synthetic peptide
  Seed: SIGKVCRTLLAKSVF
SIFKVVRKLLYKSVF

SEQ ID NO: 265221 - protein, 15 aa, Artificial Sequence
  Description of Artificial Sequence: Synthetic peptide
  Seed: SIGKVCRTLLAKSVF
SIFKVVRNLLAKSVF

SEQ ID NO: 265222 - protein, 15 aa, Artificial Sequence
  Description of Artificial Sequence: Synthetic peptide
  Seed: SIGKVCRTLLAKSVF
SIFKVVRNLLDKSVF

SEQ ID NO: 265223 - protein, 15 aa, Artificial Sequence
  Description of Artificial Sequence: Synthetic peptide
  Seed: SIGKVCRTLLAKSVF
SIFKVVRNLLEKSVF

SEQ ID NO: 265224 - protein, 15 aa, Artificial Sequence
  Description of Artificial Sequence: Synthetic peptide
  Seed: SIGKVCRTLLAKSVF
SIFKVVRNLLGKSVF

SEQ ID NO: 265225 - protein, 15 aa, Artificial Sequence
  Description of Artificial Sequence: Synthetic peptide
  Seed: SIGKVCRTLLAKSVF
SIFKVVRNLLHKSVF

SEQ ID NO: 265226 - protein, 15 aa, Artificial Sequence
  Description of Artificial Sequence: Synthetic peptide
  Seed: SIGKVCRTLLAKSVF
SIFKVVRNLLKKSVF

SEQ ID NO: 265227 - protein, 15 aa, Artificial Sequence
  Description of Artificial Sequence: Synthetic peptide
  Seed: SIGKVCRTLLAKSVF
SIFKVVRNLLMKSVF

SEQ ID NO: 265228 - protein, 15 aa, Artificial Sequence
  Description of Artificial Sequence: Synthetic peptide
  Seed: SIGKVCRTLLAKSVF
SIFKVVRNLLNKSVF

SEQ ID NO: 265229 - protein, 15 aa, Artificial Sequence
  Description of Artificial Sequence: Synthetic peptide
  Seed: SIGKVCRTLLAKSVF
SIFKVVRNLLPKSVF

SEQ ID NO: 265230 - protein, 15 aa, Artificial Sequence
  Description of Artificial Sequence: Synthetic peptide
  Seed: SIGKVCRTLLAKSVF
SIFKVVRNLLQKSVF

SEQ ID NO: 265231 - protein, 15 aa, Artificial Sequence
  Description of Artificial Sequence: Synthetic peptide
  Seed: SIGKVCRTLLAKSVF
SIFKVVRNLLRKSVF

SEQ ID NO: 265232 - protein, 15 aa, Artificial Sequence
  Description of Artificial Sequence: Synthetic peptide
  Seed: SIGKVCRTLLAKSVF
SIFKVVRNLLSKSVF

SEQ ID NO: 265233 - protein, 15 aa, Artificial Sequence
  Description of Artificial Sequence: Synthetic peptide
  Seed: SIGKVCRTLLAKSVF
SIFKVVRNLLTKSVF

SEQ ID NO: 265234 - protein, 15 aa, Artificial Sequence
  Description of Artificial Sequence: Synthetic peptide
  Seed: SIGKVCRTLLAKSVF
SIFKVVRNLLVKSVF

SEQ ID NO: 265235 - protein, 15 aa, Artificial Sequence
  Description of Artificial Sequence: Synthetic peptide
  Seed: SIGKVCRTLLAKSVF
SIFKVVRNLLYKSVF

SEQ ID NO: 265236 - protein, 15 aa, Artificial Sequence
  Description of Artificial Sequence: Synthetic peptide
  Seed: SIGKVCRTLLAKSVF
SIFKVVRPLLAKSVF

SEQ ID NO: 265237 - protein, 15 aa, Artificial Sequence
  Description of Artificial Sequence: Synthetic peptide
  Seed: SIGKVCRTLLAKSVF
SIFKVVRPLLDKSVF

SEQ ID NO: 265238 - protein, 15 aa, Artificial Sequence
  Description of Artificial Sequence: Synthetic peptide
  Seed: SIGKVCRTLLAKSVF
SIFKVVRPLLEKSVF

SEQ ID NO: 265239 - protein, 15 aa, Artificial Sequence
  Description of Artificial Sequence: Synthetic peptide
  Seed: SIGKVCRTLLAKSVF
SIFKVVRPLLGKSVF

SEQ ID NO: 265240 - protein, 15 aa, Artificial Sequence
  Description of Artificial Sequence: Synthetic peptide
  Seed: SIGKVCRTLLAKSVF
SIFKVVRPLLHKSVF

SEQ ID NO: 265241 - protein, 15 aa, Artificial Sequence
  Description of Artificial Sequence: Synthetic peptide
  Seed: SIGKVCRTLLAKSVF
SIFKVVRPLLIKSVF

SEQ ID NO: 265242 - protein, 15 aa, Artificial Sequence
  Description of Artificial Sequence: Synthetic peptide
  Seed: SIGKVCRTLLAKSVF
SIFKVVRPLLKKSVF

SEQ ID NO: 265243 - protein, 15 aa, Artificial Sequence
  Description of Artificial Sequence: Synthetic peptide
  Seed: SIGKVCRTLLAKSVF
SIFKVVRPLLMKSVF

SEQ ID NO: 265244 - protein, 15 aa, Artificial Sequence
  Description of Artificial Sequence: Synthetic peptide
  Seed: SIGKVCRTLLAKSVF
SIFKVVRPLLNKSVF

SEQ ID NO: 265245 - protein, 15 aa, Artificial Sequence
  Description of Artificial Sequence: Synthetic peptide
  Seed: SIGKVCRTLLAKSVF
SIFKVVRPLLPKSVF

SEQ ID NO: 265246 - protein, 15 aa, Artificial Sequence
  Description of Artificial Sequence: Synthetic peptide
  Seed: SIGKVCRTLLAKSVF
SIFKVVRPLLQKSVF

SEQ ID NO: 265247 - protein, 15 aa, Artificial Sequence
  Description of Artificial Sequence: Synthetic peptide
  Seed: SIGKVCRTLLAKSVF
SIFKVVRPLLRKSVF

SEQ ID NO: 265248 - protein, 15 aa, Artificial Sequence
  Description of Artificial Sequence: Synthetic peptide
  Seed: SIGKVCRTLLAKSVF
SIFKVVRPLLSKSVF

SEQ ID NO: 265249 - protein, 15 aa, Artificial Sequence
  Description of Artificial Sequence: Synthetic peptide
  Seed: SIGKVCRTLLAKSVF
SIFKVVRPLLTKSVF

SEQ ID NO: 265250 - protein, 15 aa, Artificial Sequence
  Description of Artificial Sequence: Synthetic peptide
  Seed: SIGKVCRTLLAKSVF
SIFKVVRPLLVKSVF

SEQ ID NO: 265251 - protein, 15 aa, Artificial Sequence
  Description of Artificial Sequence: Synthetic peptide
  Seed: SIGKVCRTLLAKSVF
SIFKVVRPLLYKSVF

SEQ ID NO: 265252 - protein, 15 aa, Artificial Sequence
  Description of Artificial Sequence: Synthetic peptide
  Seed: SIGKVCRTLLAKSVF
SIFKVVRQLLAKSVF

SEQ ID NO: 265253 - protein, 15 aa, Artificial Sequence
  Description of Artificial Sequence: Synthetic peptide
  Seed: SIGKVCRTLLAKSVF
SIFKVVRQLLGKSVF

SEQ ID NO: 265254 - protein, 15 aa, Artificial Sequence
  Description of Artificial Sequence: Synthetic peptide
  Seed: SIGKVCRTLLAKSVF
SIFKVVRQLLHKSVF

SEQ ID NO: 265255 - protein, 15 aa, Artificial Sequence
  Description of Artificial Sequence: Synthetic peptide
  Seed: SIGKVCRTLLAKSVF
SIFKVVRQLLKKSVF

SEQ ID NO: 265256 - protein, 15 aa, Artificial Sequence
  Description of Artificial Sequence: Synthetic peptide
  Seed: SIGKVCRTLLAKSVF
SIFKVVRQLLNKSVF

SEQ ID NO: 265257 - protein, 15 aa, Artificial Sequence
  Description of Artificial Sequence: Synthetic peptide
  Seed: SIGKVCRTLLAKSVF
SIFKVVRQLLRKSVF

SEQ ID NO: 265258 - protein, 15 aa, Artificial Sequence
  Description of Artificial Sequence: Synthetic peptide
  Seed: SIGKVCRTLLAKSVF
SIFKVVRQLLSKSVF

SEQ ID NO: 265259 - protein, 15 aa, Artificial Sequence
  Description of Artificial Sequence: Synthetic peptide
  Seed: SIGKVCRTLLAKSVF
SIFKVVRRLLAKSVF

SEQ ID NO: 265260 - protein, 15 aa, Artificial Sequence
  Description of Artificial Sequence: Synthetic peptide
  Seed: SIGKVCRTLLAKSVF
SIFKVVRRLLCKSVF

SEQ ID NO: 265261 - protein, 15 aa, Artificial Sequence
  Description of Artificial Sequence: Synthetic peptide
  Seed: SIGKVCRTLLAKSVF
SIFKVVRRLLDKSVF

SEQ ID NO: 265262 - protein, 15 aa, Artificial Sequence
  Description of Artificial Sequence: Synthetic peptide
  Seed: SIGKVCRTLLAKSVF
SIFKVVRRLLEKSVF

SEQ ID NO: 265263 - protein, 15 aa, Artificial Sequence
  Description of Artificial Sequence: Synthetic peptide
  Seed: SIGKVCRTLLAKSVF
SIFKVVRRLLFKSVF

SEQ ID NO: 265264 - protein, 15 aa, Artificial Sequence
  Description of Artificial Sequence: Synthetic peptide
  Seed: SIGKVCRTLLAKSVF
SIFKVVRRLLGKSVF

SEQ ID NO: 265265 - protein, 15 aa, Artificial Sequence
  Description of Artificial Sequence: Synthetic peptide
  Seed: SIGKVCRTLLAKSVF
SIFKVVRRLLHKSVF

SEQ ID NO: 265266 - protein, 15 aa, Artificial Sequence
  Description of Artificial Sequence: Synthetic peptide
  Seed: SIGKVCRTLLAKSVF
SIFKVVRRLLIKSVF

SEQ ID NO: 265267 - protein, 15 aa, Artificial Sequence
  Description of Artificial Sequence: Synthetic peptide
  Seed: SIGKVCRTLLAKSVF
SIFKVVRRLLKKSVF

SEQ ID NO: 265268 - protein, 15 aa, Artificial Sequence
  Description of Artificial Sequence: Synthetic peptide
  Seed: SIGKVCRTLLAKSVF
SIFKVVRRLLLKSVF

SEQ ID NO: 265269 - protein, 15 aa, Artificial Sequence
  Description of Artificial Sequence: Synthetic peptide
  Seed: SIGKVCRTLLAKSVF
SIFKVVRRLLMKSVF

SEQ ID NO: 265270 - protein, 15 aa, Artificial Sequence
  Description of Artificial Sequence: Synthetic peptide
  Seed: SIGKVCRTLLAKSVF
SIFKVVRRLLNKSVF

SEQ ID NO: 265271 - protein, 15 aa, Artificial Sequence
  Description of Artificial Sequence: Synthetic peptide
  Seed: SIGKVCRTLLAKSVF
SIFKVVRRLLPKSVF

SEQ ID NO: 265272 - protein, 15 aa, Artificial Sequence
  Description of Artificial Sequence: Synthetic peptide
  Seed: SIGKVCRTLLAKSVF
SIFKVVRRLLQKSVF

SEQ ID NO: 265273 - protein, 15 aa, Artificial Sequence
  Description of Artificial Sequence: Synthetic peptide
  Seed: SIGKVCRTLLAKSVF
SIFKVVRRLLRKSVF

SEQ ID NO: 265274 - protein, 15 aa, Artificial Sequence
  Description of Artificial Sequence: Synthetic peptide
  Seed: SIGKVCRTLLAKSVF
SIFKVVRRLLSKSVF

SEQ ID NO: 265275 - protein, 15 aa, Artificial Sequence
  Description of Artificial Sequence: Synthetic peptide
  Seed: SIGKVCRTLLAKSVF
SIFKVVRRLLTKSVF

SEQ ID NO: 265276 - protein, 15 aa, Artificial Sequence
  Description of Artificial Sequence: Synthetic peptide
  Seed: SIGKVCRTLLAKSVF
SIFKVVRRLLVKSVF

SEQ ID NO: 265277 - protein, 15 aa, Artificial Sequence
  Description of Artificial Sequence: Synthetic peptide
  Seed: SIGKVCRTLLAKSVF
SIFKVVRRLLWKSVF

SEQ ID NO: 265278 - protein, 15 aa, Artificial Sequence
  Description of Artificial Sequence: Synthetic peptide
  Seed: SIGKVCRTLLAKSVF
SIFKVVRRLLYKSVF

SEQ ID NO: 265279 - protein, 15 aa, Artificial Sequence
  Description of Artificial Sequence: Synthetic peptide
  Seed: SIGKVCRTLLAKSVF
SIFKVVRSLLAKSVF

SEQ ID NO: 265280 - protein, 15 aa, Artificial Sequence
  Description of Artificial Sequence: Synthetic peptide
  Seed: SIGKVCRTLLAKSVF
SIFKVVRSLLDKSVF

SEQ ID NO: 265281 - protein, 15 aa, Artificial Sequence
  Description of Artificial Sequence: Synthetic peptide
  Seed: SIGKVCRTLLAKSVF
SIFKVVRSLLEKSVF

SEQ ID NO: 265282 - protein, 15 aa, Artificial Sequence
  Description of Artificial Sequence: Synthetic peptide
  Seed: SIGKVCRTLLAKSVF
SIFKVVRSLLGKSVF

SEQ ID NO: 265283 - protein, 15 aa, Artificial Sequence
  Description of Artificial Sequence: Synthetic peptide
  Seed: SIGKVCRTLLAKSVF
SIFKVVRSLLHKSVF

SEQ ID NO: 265284 - protein, 15 aa, Artificial Sequence
  Description of Artificial Sequence: Synthetic peptide
  Seed: SIGKVCRTLLAKSVF
SIFKVVRSLLKKSVF

SEQ ID NO: 265285 - protein, 15 aa, Artificial Sequence
  Description of Artificial Sequence: Synthetic peptide
  Seed: SIGKVCRTLLAKSVF
SIFKVVRSLLNKSVF

SEQ ID NO: 265286 - protein, 15 aa, Artificial Sequence
  Description of Artificial Sequence: Synthetic peptide
  Seed: SIGKVCRTLLAKSVF
SIFKVVRSLLPKSVF

SEQ ID NO: 265287 - protein, 15 aa, Artificial Sequence
  Description of Artificial Sequence: Synthetic peptide
  Seed: SIGKVCRTLLAKSVF
SIFKVVRSLLQKSVF

SEQ ID NO: 265288 - protein, 15 aa, Artificial Sequence
  Description of Artificial Sequence: Synthetic peptide
  Seed: SIGKVCRTLLAKSVF
SIFKVVRSLLRKSVF

SEQ ID NO: 265289 - protein, 15 aa, Artificial Sequence
  Description of Artificial Sequence: Synthetic peptide
  Seed: SIGKVCRTLLAKSVF
SIFKVVRSLLSKSVF

SEQ ID NO: 265290 - protein, 15 aa, Artificial Sequence
  Description of Artificial Sequence: Synthetic peptide
  Seed: SIGKVCRTLLAKSVF
SIFKVVRSLLTKSVF

SEQ ID NO: 265291 - protein, 15 aa, Artificial Sequence
  Description of Artificial Sequence: Synthetic peptide
  Seed: SIGKVCRTLLAKSVF
SIFKVVRSLLYKSVF

SEQ ID NO: 265292 - protein, 15 aa, Artificial Sequence
  Description of Artificial Sequence: Synthetic peptide
  Seed: SIGKVCRTLLAKSVF
SIFKVVRTLLAKSVF

SEQ ID NO: 265293 - protein, 15 aa, Artificial Sequence
  Description of Artificial Sequence: Synthetic peptide
  Seed: SIGKVCRTLLAKSVF
SIFKVVRTLLDKSVF

SEQ ID NO: 265294 - protein, 15 aa, Artificial Sequence
  Description of Artificial Sequence: Synthetic peptide
  Seed: SIGKVCRTLLAKSVF
SIFKVVRTLLEKSVF

SEQ ID NO: 265295 - protein, 15 aa, Artificial Sequence
  Description of Artificial Sequence: Synthetic peptide
  Seed: SIGKVCRTLLAKSVF
SIFKVVRTLLGKSVF

SEQ ID NO: 265296 - protein, 15 aa, Artificial Sequence
  Description of Artificial Sequence: Synthetic peptide
  Seed: SIGKVCRTLLAKSVF
SIFKVVRTLLHKSVF

SEQ ID NO: 265297 - protein, 15 aa, Artificial Sequence
  Description of Artificial Sequence: Synthetic peptide
  Seed: SIGKVCRTLLAKSVF
SIFKVVRTLLKKSVF

SEQ ID NO: 265298 - protein, 15 aa, Artificial Sequence
  Description of Artificial Sequence: Synthetic peptide
  Seed: SIGKVCRTLLAKSVF
SIFKVVRTLLMKSVF

SEQ ID NO: 265299 - protein, 15 aa, Artificial Sequence
  Description of Artificial Sequence: Synthetic peptide
  Seed: SIGKVCRTLLAKSVF
SIFKVVRTLLNKSVF

SEQ ID NO: 265300 - protein, 15 aa, Artificial Sequence
  Description of Artificial Sequence: Synthetic peptide
  Seed: SIGKVCRTLLAKSVF
SIFKVVRTLLPKSVF

SEQ ID NO: 265301 - protein, 15 aa, Artificial Sequence
  Description of Artificial Sequence: Synthetic peptide
  Seed: SIGKVCRTLLAKSVF
SIFKVVRTLLQKSVF

SEQ ID NO: 265302 - protein, 15 aa, Artificial Sequence
  Description of Artificial Sequence: Synthetic peptide
  Seed: SIGKVCRTLLAKSVF
SIFKVVRTLLRKSVF

SEQ ID NO: 265303 - protein, 15 aa, Artificial Sequence
  Description of Artificial Sequence: Synthetic peptide
  Seed: SIGKVCRTLLAKSVF
SIFKVVRTLLSKSVF

SEQ ID NO: 265304 - protein, 15 aa, Artificial Sequence
  Description of Artificial Sequence: Synthetic peptide
  Seed: SIGKVCRTLLAKSVF
SIFKVVRTLLTKSVF

SEQ ID NO: 265305 - protein, 15 aa, Artificial Sequence
  Description of Artificial Sequence: Synthetic peptide
  Seed: SIGKVCRTLLAKSVF
SIFKVVRTLLVKSVF

SEQ ID NO: 265306 - protein, 15 aa, Artificial Sequence
  Description of Artificial Sequence: Synthetic peptide
  Seed: SIGKVCRTLLAKSVF
SIFKVVRTLLYKSVF

SEQ ID NO: 265307 - protein, 15 aa, Artificial Sequence
  Description of Artificial Sequence: Synthetic peptide
  Seed: SIGKVCRTLLAKSVF
SIFKVVRVLLDKSVF

SEQ ID NO: 265308 - protein, 15 aa, Artificial Sequence
  Description of Artificial Sequence: Synthetic peptide
  Seed: SIGKVCRTLLAKSVF
SIFKVVRVLLEKSVF

SEQ ID NO: 265309 - protein, 15 aa, Artificial Sequence
  Description of Artificial Sequence: Synthetic peptide
  Seed: SIGKVCRTLLAKSVF
SIFKVVRVLLHKSVF

SEQ ID NO: 265310 - protein, 15 aa, Artificial Sequence
  Description of Artificial Sequence: Synthetic peptide
  Seed: SIGKVCRTLLAKSVF
SIFKVVRVLLKKSVF

SEQ ID NO: 265311 - protein, 15 aa, Artificial Sequence
  Description of Artificial Sequence: Synthetic peptide
  Seed: SIGKVCRTLLAKSVF
SIFKVVRVLLNKSVF

SEQ ID NO: 265312 - protein, 15 aa, Artificial Sequence
  Description of Artificial Sequence: Synthetic peptide
  Seed: SIGKVCRTLLAKSVF
SIFKVVRVLLRKSVF

SEQ ID NO: 265313 - protein, 15 aa, Artificial Sequence
  Description of Artificial Sequence: Synthetic peptide
  Seed: SIGKVCRTLLAKSVF
SIFKVVRVLLSKSVF

SEQ ID NO: 265314 - protein, 15 aa, Artificial Sequence
  Description of Artificial Sequence: Synthetic peptide
  Seed: SIGKVCRTLLAKSVF
SIFKVWRALLAKSVF

SEQ ID NO: 265315 - protein, 15 aa, Artificial Sequence
  Description of Artificial Sequence: Synthetic peptide
  Seed: SIGKVCRTLLAKSVF
SIFKVWRALLGKSVF

SEQ ID NO: 265316 - protein, 15 aa, Artificial Sequence
  Description of Artificial Sequence: Synthetic peptide
  Seed: SIGKVCRTLLAKSVF
SIFKVWRALLHKSVF

SEQ ID NO: 265317 - protein, 15 aa, Artificial Sequence
  Description of Artificial Sequence: Synthetic peptide
  Seed: SIGKVCRTLLAKSVF
SIFKVWRALLKKSVF

SEQ ID NO: 265318 - protein, 15 aa, Artificial Sequence
  Description of Artificial Sequence: Synthetic peptide
  Seed: SIGKVCRTLLAKSVF
SIFKVWRALLQKSVF

SEQ ID NO: 265319 - protein, 15 aa, Artificial Sequence
  Description of Artificial Sequence: Synthetic peptide
  Seed: SIGKVCRTLLAKSVF
SIFKVWRALLRKSVF

SEQ ID NO: 265320 - protein, 15 aa, Artificial Sequence
  Description of Artificial Sequence: Synthetic peptide
  Seed: SIGKVCRTLLAKSVF
SIFKVWRALLSKSVF

SEQ ID NO: 265321 - protein, 15 aa, Artificial Sequence
  Description of Artificial Sequence: Synthetic peptide
  Seed: SIGKVCRTLLAKSVF
SIFKVWRGLLAKSVF

SEQ ID NO: 265322 - protein, 15 aa, Artificial Sequence
  Description of Artificial Sequence: Synthetic peptide
  Seed: SIGKVCRTLLAKSVF
SIFKVWRGLLHKSVF

SEQ ID NO: 265323 - protein, 15 aa, Artificial Sequence
  Description of Artificial Sequence: Synthetic peptide
  Seed: SIGKVCRTLLAKSVF
SIFKVWRGLLKKSVF

SEQ ID NO: 265324 - protein, 15 aa, Artificial Sequence
  Description of Artificial Sequence: Synthetic peptide
  Seed: SIGKVCRTLLAKSVF
SIFKVWRGLLRKSVF

SEQ ID NO: 265325 - protein, 15 aa, Artificial Sequence
  Description of Artificial Sequence: Synthetic peptide
  Seed: SIGKVCRTLLAKSVF
SIFKVWRGLLSKSVF

SEQ ID NO: 265326 - protein, 15 aa, Artificial Sequence
  Description of Artificial Sequence: Synthetic peptide
  Seed: SIGKVCRTLLAKSVF
SIFKVWRHLLAKSVF

SEQ ID NO: 265327 - protein, 15 aa, Artificial Sequence
  Description of Artificial Sequence: Synthetic peptide
  Seed: SIGKVCRTLLAKSVF
SIFKVWRHLLGKSVF

SEQ ID NO: 265328 - protein, 15 aa, Artificial Sequence
  Description of Artificial Sequence: Synthetic peptide
  Seed: SIGKVCRTLLAKSVF
SIFKVWRHLLHKSVF

SEQ ID NO: 265329 - protein, 15 aa, Artificial Sequence
  Description of Artificial Sequence: Synthetic peptide
  Seed: SIGKVCRTLLAKSVF
SIFKVWRHLLKKSVF

SEQ ID NO: 265330 - protein, 15 aa, Artificial Sequence
  Description of Artificial Sequence: Synthetic peptide
  Seed: SIGKVCRTLLAKSVF
SIFKVWRHLLMKSVF

SEQ ID NO: 265331 - protein, 15 aa, Artificial Sequence
  Description of Artificial Sequence: Synthetic peptide
  Seed: SIGKVCRTLLAKSVF
SIFKVWRHLLNKSVF

SEQ ID NO: 265332 - protein, 15 aa, Artificial Sequence
  Description of Artificial Sequence: Synthetic peptide
  Seed: SIGKVCRTLLAKSVF
SIFKVWRHLLPKSVF

SEQ ID NO: 265333 - protein, 15 aa, Artificial Sequence
  Description of Artificial Sequence: Synthetic peptide
  Seed: SIGKVCRTLLAKSVF
SIFKVWRHLLQKSVF

SEQ ID NO: 265334 - protein, 15 aa, Artificial Sequence
  Description of Artificial Sequence: Synthetic peptide
  Seed: SIGKVCRTLLAKSVF
SIFKVWRHLLRKSVF

SEQ ID NO: 265335 - protein, 15 aa, Artificial Sequence
  Description of Artificial Sequence: Synthetic peptide
  Seed: SIGKVCRTLLAKSVF
SIFKVWRHLLSKSVF

SEQ ID NO: 265336 - protein, 15 aa, Artificial Sequence
  Description of Artificial Sequence: Synthetic peptide
  Seed: SIGKVCRTLLAKSVF
SIFKVWRHLLTKSVF

SEQ ID NO: 265337 - protein, 15 aa, Artificial Sequence
  Description of Artificial Sequence: Synthetic peptide
  Seed: SIGKVCRTLLAKSVF
SIFKVWRHLLVKSVF

SEQ ID NO: 265338 - protein, 15 aa, Artificial Sequence
  Description of Artificial Sequence: Synthetic peptide
  Seed: SIGKVCRTLLAKSVF
SIFKVWRHLLYKSVF

SEQ ID NO: 265339 - protein, 15 aa, Artificial Sequence
  Description of Artificial Sequence: Synthetic peptide
  Seed: SIGKVCRTLLAKSVF
SIFKVWRILLHKSVF

SEQ ID NO: 265340 - protein, 15 aa, Artificial Sequence
  Description of Artificial Sequence: Synthetic peptide
  Seed: SIGKVCRTLLAKSVF
SIFKVWRILLRKSVF

SEQ ID NO: 265341 - protein, 15 aa, Artificial Sequence
  Description of Artificial Sequence: Synthetic peptide
  Seed: SIGKVCRTLLAKSVF
SIFKVWRKLLAKSVF

SEQ ID NO: 265342 - protein, 15 aa, Artificial Sequence
  Description of Artificial Sequence: Synthetic peptide
  Seed: SIGKVCRTLLAKSVF
SIFKVWRKLLCKSVF

SEQ ID NO: 265343 - protein, 15 aa, Artificial Sequence
  Description of Artificial Sequence: Synthetic peptide
  Seed: SIGKVCRTLLAKSVF
SIFKVWRKLLDKSVF

SEQ ID NO: 265344 - protein, 15 aa, Artificial Sequence
  Description of Artificial Sequence: Synthetic peptide
  Seed: SIGKVCRTLLAKSVF
SIFKVWRKLLEKSVF

SEQ ID NO: 265345 - protein, 15 aa, Artificial Sequence
  Description of Artificial Sequence: Synthetic peptide
  Seed: SIGKVCRTLLAKSVF
SIFKVWRKLLFKSVF

SEQ ID NO: 265346 - protein, 15 aa, Artificial Sequence
  Description of Artificial Sequence: Synthetic peptide
  Seed: SIGKVCRTLLAKSVF
SIFKVWRKLLGKSVF

SEQ ID NO: 265347 - protein, 15 aa, Artificial Sequence
  Description of Artificial Sequence: Synthetic peptide
  Seed: SIGKVCRTLLAKSVF
SIFKVWRKLLHKSVF

SEQ ID NO: 265348 - protein, 15 aa, Artificial Sequence
  Description of Artificial Sequence: Synthetic peptide
  Seed: SIGKVCRTLLAKSVF
SIFKVWRKLLIKSVF

SEQ ID NO: 265349 - protein, 15 aa, Artificial Sequence
  Description of Artificial Sequence: Synthetic peptide
  Seed: SIGKVCRTLLAKSVF
SIFKVWRKLLKKSVF

SEQ ID NO: 265350 - protein, 15 aa, Artificial Sequence
  Description of Artificial Sequence: Synthetic peptide
  Seed: SIGKVCRTLLAKSVF
SIFKVWRKLLLKSVF

SEQ ID NO: 265351 - protein, 15 aa, Artificial Sequence
  Description of Artificial Sequence: Synthetic peptide
  Seed: SIGKVCRTLLAKSVF
SIFKVWRKLLMKSVF

SEQ ID NO: 265352 - protein, 15 aa, Artificial Sequence
  Description of Artificial Sequence: Synthetic peptide
  Seed: SIGKVCRTLLAKSVF
SIFKVWRKLLNKSVF

SEQ ID NO: 265353 - protein, 15 aa, Artificial Sequence
  Description of Artificial Sequence: Synthetic peptide
  Seed: SIGKVCRTLLAKSVF
SIFKVWRKLLPKSVF

SEQ ID NO: 265354 - protein, 15 aa, Artificial Sequence
  Description of Artificial Sequence: Synthetic peptide
  Seed: SIGKVCRTLLAKSVF
SIFKVWRKLLQKSVF

SEQ ID NO: 265355 - protein, 15 aa, Artificial Sequence
  Description of Artificial Sequence: Synthetic peptide
  Seed: SIGKVCRTLLAKSVF
SIFKVWRKLLRKSVF

SEQ ID NO: 265356 - protein, 15 aa, Artificial Sequence
  Description of Artificial Sequence: Synthetic peptide
  Seed: SIGKVCRTLLAKSVF
SIFKVWRKLLSKSVF

SEQ ID NO: 265357 - protein, 15 aa, Artificial Sequence
  Description of Artificial Sequence: Synthetic peptide
  Seed: SIGKVCRTLLAKSVF
SIFKVWRKLLTKSVF

SEQ ID NO: 265358 - protein, 15 aa, Artificial Sequence
  Description of Artificial Sequence: Synthetic peptide
  Seed: SIGKVCRTLLAKSVF
SIFKVWRKLLVKSVF

SEQ ID NO: 265359 - protein, 15 aa, Artificial Sequence
  Description of Artificial Sequence: Synthetic peptide
  Seed: SIGKVCRTLLAKSVF
SIFKVWRKLLWKSVF

SEQ ID NO: 265360 - protein, 15 aa, Artificial Sequence
  Description of Artificial Sequence: Synthetic peptide
  Seed: SIGKVCRTLLAKSVF
SIFKVWRKLLYKSVF

SEQ ID NO: 265361 - protein, 15 aa, Artificial Sequence
  Description of Artificial Sequence: Synthetic peptide
  Seed: SIGKVCRTLLAKSVF
SIFKVWRLLLRKSVF

SEQ ID NO: 265362 - protein, 15 aa, Artificial Sequence
  Description of Artificial Sequence: Synthetic peptide
  Seed: SIGKVCRTLLAKSVF
SIFKVWRNLLAKSVF

SEQ ID NO: 265363 - protein, 15 aa, Artificial Sequence
  Description of Artificial Sequence: Synthetic peptide
  Seed: SIGKVCRTLLAKSVF
SIFKVWRNLLGKSVF

SEQ ID NO: 265364 - protein, 15 aa, Artificial Sequence
  Description of Artificial Sequence: Synthetic peptide
  Seed: SIGKVCRTLLAKSVF
SIFKVWRNLLHKSVF

SEQ ID NO: 265365 - protein, 15 aa, Artificial Sequence
  Description of Artificial Sequence: Synthetic peptide
  Seed: SIGKVCRTLLAKSVF
SIFKVWRNLLKKSVF

SEQ ID NO: 265366 - protein, 15 aa, Artificial Sequence
  Description of Artificial Sequence: Synthetic peptide
  Seed: SIGKVCRTLLAKSVF
SIFKVWRNLLRKSVF

SEQ ID NO: 265367 - protein, 15 aa, Artificial Sequence
  Description of Artificial Sequence: Synthetic peptide
  Seed: SIGKVCRTLLAKSVF
SIFKVWRNLLSKSVF

SEQ ID NO: 265368 - protein, 15 aa, Artificial Sequence
  Description of Artificial Sequence: Synthetic peptide
  Seed: SIGKVCRTLLAKSVF
SIFKVWRPLLAKSVF

SEQ ID NO: 265369 - protein, 15 aa, Artificial Sequence
  Description of Artificial Sequence: Synthetic peptide
  Seed: SIGKVCRTLLAKSVF
SIFKVWRPLLGKSVF

SEQ ID NO: 265370 - protein, 15 aa, Artificial Sequence
  Description of Artificial Sequence: Synthetic peptide
  Seed: SIGKVCRTLLAKSVF
SIFKVWRPLLHKSVF

SEQ ID NO: 265371 - protein, 15 aa, Artificial Sequence
  Description of Artificial Sequence: Synthetic peptide
  Seed: SIGKVCRTLLAKSVF
SIFKVWRPLLKKSVF

SEQ ID NO: 265372 - protein, 15 aa, Artificial Sequence
  Description of Artificial Sequence: Synthetic peptide
  Seed: SIGKVCRTLLAKSVF
SIFKVWRPLLQKSVF

SEQ ID NO: 265373 - protein, 15 aa, Artificial Sequence
  Description of Artificial Sequence: Synthetic peptide
  Seed: SIGKVCRTLLAKSVF
SIFKVWRPLLRKSVF

SEQ ID NO: 265374 - protein, 15 aa, Artificial Sequence
  Description of Artificial Sequence: Synthetic peptide
  Seed: SIGKVCRTLLAKSVF
SIFKVWRPLLSKSVF

SEQ ID NO: 265375 - protein, 15 aa, Artificial Sequence
  Description of Artificial Sequence: Synthetic peptide
  Seed: SIGKVCRTLLAKSVF
SIFKVWRPLLTKSVF

SEQ ID NO: 265376 - protein, 15 aa, Artificial Sequence
  Description of Artificial Sequence: Synthetic peptide
  Seed: SIGKVCRTLLAKSVF
SIFKVWRQLLAKSVF

SEQ ID NO: 265377 - protein, 15 aa, Artificial Sequence
  Description of Artificial Sequence: Synthetic peptide
  Seed: SIGKVCRTLLAKSVF
SIFKVWRQLLHKSVF

SEQ ID NO: 265378 - protein, 15 aa, Artificial Sequence
  Description of Artificial Sequence: Synthetic peptide
  Seed: SIGKVCRTLLAKSVF
SIFKVWRQLLKKSVF

SEQ ID NO: 265379 - protein, 15 aa, Artificial Sequence
  Description of Artificial Sequence: Synthetic peptide
  Seed: SIGKVCRTLLAKSVF
SIFKVWRQLLRKSVF

SEQ ID NO: 265380 - protein, 15 aa, Artificial Sequence
  Description of Artificial Sequence: Synthetic peptide
  Seed: SIGKVCRTLLAKSVF
SIFKVWRQLLSKSVF

SEQ ID NO: 265381 - protein, 15 aa, Artificial Sequence
  Description of Artificial Sequence: Synthetic peptide
  Seed: SIGKVCRTLLAKSVF
SIFKVWRRLLAKSVF

SEQ ID NO: 265382 - protein, 15 aa, Artificial Sequence
  Description of Artificial Sequence: Synthetic peptide
  Seed: SIGKVCRTLLAKSVF
SIFKVWRRLLCKSVF

SEQ ID NO: 265383 - protein, 15 aa, Artificial Sequence
  Description of Artificial Sequence: Synthetic peptide
  Seed: SIGKVCRTLLAKSVF
SIFKVWRRLLDKSVF

SEQ ID NO: 265384 - protein, 15 aa, Artificial Sequence
  Description of Artificial Sequence: Synthetic peptide
  Seed: SIGKVCRTLLAKSVF
SIFKVWRRLLEKSVF

SEQ ID NO: 265385 - protein, 15 aa, Artificial Sequence
  Description of Artificial Sequence: Synthetic peptide
  Seed: SIGKVCRTLLAKSVF
SIFKVWRRLLFKSVF

SEQ ID NO: 265386 - protein, 15 aa, Artificial Sequence
  Description of Artificial Sequence: Synthetic peptide
  Seed: SIGKVCRTLLAKSVF
SIFKVWRRLLGKSVF

SEQ ID NO: 265387 - protein, 15 aa, Artificial Sequence
  Description of Artificial Sequence: Synthetic peptide
  Seed: SIGKVCRTLLAKSVF
SIFKVWRRLLHKSVF

SEQ ID NO: 265388 - protein, 15 aa, Artificial Sequence
  Description of Artificial Sequence: Synthetic peptide
  Seed: SIGKVCRTLLAKSVF
SIFKVWRRLLIKSVF

SEQ ID NO: 265389 - protein, 15 aa, Artificial Sequence
  Description of Artificial Sequence: Synthetic peptide
  Seed: SIGKVCRTLLAKSVF
SIFKVWRRLLKKSVF

SEQ ID NO: 265390 - protein, 15 aa, Artificial Sequence
  Description of Artificial Sequence: Synthetic peptide
  Seed: SIGKVCRTLLAKSVF
SIFKVWRRLLLKSVF

SEQ ID NO: 265391 - protein, 15 aa, Artificial Sequence
  Description of Artificial Sequence: Synthetic peptide
  Seed: SIGKVCRTLLAKSVF
SIFKVWRRLLMKSVF

SEQ ID NO: 265392 - protein, 15 aa, Artificial Sequence
  Description of Artificial Sequence: Synthetic peptide
  Seed: SIGKVCRTLLAKSVF
SIFKVWRRLLNKSVF

SEQ ID NO: 265393 - protein, 15 aa, Artificial Sequence
  Description of Artificial Sequence: Synthetic peptide
  Seed: SIGKVCRTLLAKSVF
SIFKVWRRLLPKSVF

SEQ ID NO: 265394 - protein, 15 aa, Artificial Sequence
  Description of Artificial Sequence: Synthetic peptide
  Seed: SIGKVCRTLLAKSVF
SIFKVWRRLLQKSVF

SEQ ID NO: 265395 - protein, 15 aa, Artificial Sequence
  Description of Artificial Sequence: Synthetic peptide
  Seed: SIGKVCRTLLAKSVF
SIFKVWRRLLRKSVF

SEQ ID NO: 265396 - protein, 15 aa, Artificial Sequence
  Description of Artificial Sequence: Synthetic peptide
  Seed: SIGKVCRTLLAKSVF
SIFKVWRRLLSKSVF

SEQ ID NO: 265397 - protein, 15 aa, Artificial Sequence
  Description of Artificial Sequence: Synthetic peptide
  Seed: SIGKVCRTLLAKSVF
SIFKVWRRLLTKSVF

SEQ ID NO: 265398 - protein, 15 aa, Artificial Sequence
  Description of Artificial Sequence: Synthetic peptide
  Seed: SIGKVCRTLLAKSVF
SIFKVWRRLLVKSVF

SEQ ID NO: 265399 - protein, 15 aa, Artificial Sequence
  Description of Artificial Sequence: Synthetic peptide
  Seed: SIGKVCRTLLAKSVF
SIFKVWRRLLWKSVF

SEQ ID NO: 265400 - protein, 15 aa, Artificial Sequence
  Description of Artificial Sequence: Synthetic peptide
  Seed: SIGKVCRTLLAKSVF
SIFKVWRRLLYKSVF

SEQ ID NO: 265401 - protein, 15 aa, Artificial Sequence
  Description of Artificial Sequence: Synthetic peptide
  Seed: SIGKVCRTLLAKSVF
SIFKVWRSLLAKSVF

SEQ ID NO: 265402 - protein, 15 aa, Artificial Sequence
  Description of Artificial Sequence: Synthetic peptide
  Seed: SIGKVCRTLLAKSVF
SIFKVWRSLLDKSVF

SEQ ID NO: 265403 - protein, 15 aa, Artificial Sequence
  Description of Artificial Sequence: Synthetic peptide
  Seed: SIGKVCRTLLAKSVF
SIFKVWRSLLGKSVF

SEQ ID NO: 265404 - protein, 15 aa, Artificial Sequence
  Description of Artificial Sequence: Synthetic peptide
  Seed: SIGKVCRTLLAKSVF
SIFKVWRSLLHKSVF

SEQ ID NO: 265405 - protein, 15 aa, Artificial Sequence
  Description of Artificial Sequence: Synthetic peptide
  Seed: SIGKVCRTLLAKSVF
SIFKVWRSLLKKSVF

SEQ ID NO: 265406 - protein, 15 aa, Artificial Sequence
  Description of Artificial Sequence: Synthetic peptide
  Seed: SIGKVCRTLLAKSVF
SIFKVWRSLLQKSVF

SEQ ID NO: 265407 - protein, 15 aa, Artificial Sequence
  Description of Artificial Sequence: Synthetic peptide
  Seed: SIGKVCRTLLAKSVF
SIFKVWRSLLRKSVF

SEQ ID NO: 265408 - protein, 15 aa, Artificial Sequence
  Description of Artificial Sequence: Synthetic peptide
  Seed: SIGKVCRTLLAKSVF
SIFKVWRSLLSKSVF

SEQ ID NO: 265409 - protein, 15 aa, Artificial Sequence
  Description of Artificial Sequence: Synthetic peptide
  Seed: SIGKVCRTLLAKSVF
SIFKVWRTLLAKSVF

SEQ ID NO: 265410 - protein, 15 aa, Artificial Sequence
  Description of Artificial Sequence: Synthetic peptide
  Seed: SIGKVCRTLLAKSVF
SIFKVWRTLLDKSVF

SEQ ID NO: 265411 - protein, 15 aa, Artificial Sequence
  Description of Artificial Sequence: Synthetic peptide
  Seed: SIGKVCRTLLAKSVF
SIFKVWRTLLGKSVF

SEQ ID NO: 265412 - protein, 15 aa, Artificial Sequence
  Description of Artificial Sequence: Synthetic peptide
  Seed: SIGKVCRTLLAKSVF
SIFKVWRTLLHKSVF

SEQ ID NO: 265413 - protein, 15 aa, Artificial Sequence
  Description of Artificial Sequence: Synthetic peptide
  Seed: SIGKVCRTLLAKSVF
SIFKVWRTLLKKSVF

SEQ ID NO: 265414 - protein, 15 aa, Artificial Sequence
  Description of Artificial Sequence: Synthetic peptide
  Seed: SIGKVCRTLLAKSVF
SIFKVWRTLLQKSVF

SEQ ID NO: 265415 - protein, 15 aa, Artificial Sequence
  Description of Artificial Sequence: Synthetic peptide
  Seed: SIGKVCRTLLAKSVF
SIFKVWRTLLRKSVF

SEQ ID NO: 265416 - protein, 15 aa, Artificial Sequence
  Description of Artificial Sequence: Synthetic peptide
  Seed: SIGKVCRTLLAKSVF
SIFKVWRTLLSKSVF

SEQ ID NO: 265417 - protein, 15 aa, Artificial Sequence
  Description of Artificial Sequence: Synthetic peptide
  Seed: SIGKVCRTLLAKSVF
SIFKVWRVLLHKSVF

SEQ ID NO: 265418 - protein, 15 aa, Artificial Sequence
  Description of Artificial Sequence: Synthetic peptide
  Seed: SIGKVCRTLLAKSVF
SIFKVWRVLLKKSVF

SEQ ID NO: 265419 - protein, 15 aa, Artificial Sequence
  Description of Artificial Sequence: Synthetic peptide
  Seed: SIGKVCRTLLAKSVF
SIFKVWRVLLRKSVF

SEQ ID NO: 265420 - protein, 15 aa, Artificial Sequence
  Description of Artificial Sequence: Synthetic peptide
  Seed: SIGKVCRTLLAKSVF
SIFKVYRALLAKSVF

SEQ ID NO: 265421 - protein, 15 aa, Artificial Sequence
  Description of Artificial Sequence: Synthetic peptide
  Seed: SIGKVCRTLLAKSVF
SIFKVYRALLHKSVF

SEQ ID NO: 265422 - protein, 15 aa, Artificial Sequence
  Description of Artificial Sequence: Synthetic peptide
  Seed: SIGKVCRTLLAKSVF
SIFKVYRALLRKSVF

SEQ ID NO: 265423 - protein, 15 aa, Artificial Sequence
  Description of Artificial Sequence: Synthetic peptide
  Seed: SIGKVCRTLLAKSVF
SIFKVYRALLSKSVF

SEQ ID NO: 265424 - protein, 15 aa, Artificial Sequence
  Description of Artificial Sequence: Synthetic peptide
  Seed: SIGKVCRTLLAKSVF
SIFKVYRELLRKSVF

SEQ ID NO: 265425 - protein, 15 aa, Artificial Sequence
  Description of Artificial Sequence: Synthetic peptide
  Seed: SIGKVCRTLLAKSVF
SIFKVYRHLLAKSVF

SEQ ID NO: 265426 - protein, 15 aa, Artificial Sequence
  Description of Artificial Sequence: Synthetic peptide
  Seed: SIGKVCRTLLAKSVF
SIFKVYRHLLGKSVF

SEQ ID NO: 265427 - protein, 15 aa, Artificial Sequence
  Description of Artificial Sequence: Synthetic peptide
  Seed: SIGKVCRTLLAKSVF
SIFKVYRHLLHKSVF

SEQ ID NO: 265428 - protein, 15 aa, Artificial Sequence
  Description of Artificial Sequence: Synthetic peptide
  Seed: SIGKVCRTLLAKSVF
SIFKVYRHLLKKSVF

SEQ ID NO: 265429 - protein, 15 aa, Artificial Sequence
  Description of Artificial Sequence: Synthetic peptide
  Seed: SIGKVCRTLLAKSVF
SIFKVYRHLLQKSVF

SEQ ID NO: 265430 - protein, 15 aa, Artificial Sequence
  Description of Artificial Sequence: Synthetic peptide
  Seed: SIGKVCRTLLAKSVF
SIFKVYRHLLRKSVF

SEQ ID NO: 265431 - protein, 15 aa, Artificial Sequence
  Description of Artificial Sequence: Synthetic peptide
  Seed: SIGKVCRTLLAKSVF
SIFKVYRHLLSKSVF

SEQ ID NO: 265432 - protein, 15 aa, Artificial Sequence
  Description of Artificial Sequence: Synthetic peptide
  Seed: SIGKVCRTLLAKSVF
SIFKVYRHLLTKSVF

SEQ ID NO: 265433 - protein, 15 aa, Artificial Sequence
  Description of Artificial Sequence: Synthetic peptide
  Seed: SIGKVCRTLLAKSVF
SIFKVYRKLLAKSVF

SEQ ID NO: 265434 - protein, 15 aa, Artificial Sequence
  Description of Artificial Sequence: Synthetic peptide
  Seed: SIGKVCRTLLAKSVF
SIFKVYRKLLEKSVF

SEQ ID NO: 265435 - protein, 15 aa, Artificial Sequence
  Description of Artificial Sequence: Synthetic peptide
  Seed: SIGKVCRTLLAKSVF
SIFKVYRKLLFKSVF

SEQ ID NO: 265436 - protein, 15 aa, Artificial Sequence
  Description of Artificial Sequence: Synthetic peptide
  Seed: SIGKVCRTLLAKSVF
SIFKVYRKLLGKSVF

SEQ ID NO: 265437 - protein, 15 aa, Artificial Sequence
  Description of Artificial Sequence: Synthetic peptide
  Seed: SIGKVCRTLLAKSVF
SIFKVYRKLLHKSVF

SEQ ID NO: 265438 - protein, 15 aa, Artificial Sequence
  Description of Artificial Sequence: Synthetic peptide
  Seed: SIGKVCRTLLAKSVF
SIFKVYRKLLIKSVF

SEQ ID NO: 265439 - protein, 15 aa, Artificial Sequence
  Description of Artificial Sequence: Synthetic peptide
  Seed: SIGKVCRTLLAKSVF
SIFKVYRKLLKKSVF

SEQ ID NO: 265440 - protein, 15 aa, Artificial Sequence
  Description of Artificial Sequence: Synthetic peptide
  Seed: SIGKVCRTLLAKSVF
SIFKVYRKLLLKSVF

SEQ ID NO: 265441 - protein, 15 aa, Artificial Sequence
  Description of Artificial Sequence: Synthetic peptide
  Seed: SIGKVCRTLLAKSVF
SIFKVYRKLLMKSVF

SEQ ID NO: 265442 - protein, 15 aa, Artificial Sequence
  Description of Artificial Sequence: Synthetic peptide
  Seed: SIGKVCRTLLAKSVF
SIFKVYRKLLNKSVF

SEQ ID NO: 265443 - protein, 15 aa, Artificial Sequence
  Description of Artificial Sequence: Synthetic peptide
  Seed: SIGKVCRTLLAKSVF
SIFKVYRKLLPKSVF

SEQ ID NO: 265444 - protein, 15 aa, Artificial Sequence
  Description of Artificial Sequence: Synthetic peptide
  Seed: SIGKVCRTLLAKSVF
SIFKVYRKLLQKSVF

SEQ ID NO: 265445 - protein, 15 aa, Artificial Sequence
  Description of Artificial Sequence: Synthetic peptide
  Seed: SIGKVCRTLLAKSVF
SIFKVYRKLLRKSVF

SEQ ID NO: 265446 - protein, 15 aa, Artificial Sequence
  Description of Artificial Sequence: Synthetic peptide
  Seed: SIGKVCRTLLAKSVF
SIFKVYRKLLSKSVF

SEQ ID NO: 265447 - protein, 15 aa, Artificial Sequence
  Description of Artificial Sequence: Synthetic peptide
  Seed: SIGKVCRTLLAKSVF
SIFKVYRKLLTKSVF

SEQ ID NO: 265448 - protein, 15 aa, Artificial Sequence
  Description of Artificial Sequence: Synthetic peptide
  Seed: SIGKVCRTLLAKSVF
SIFKVYRKLLVKSVF

SEQ ID NO: 265449 - protein, 15 aa, Artificial Sequence
  Description of Artificial Sequence: Synthetic peptide
  Seed: SIGKVCRTLLAKSVF
SIFKVYRKLLYKSVF

SEQ ID NO: 265450 - protein, 15 aa, Artificial Sequence
  Description of Artificial Sequence: Synthetic peptide
  Seed: SIGKVCRTLLAKSVF
SIFKVYRNLLHKSVF

SEQ ID NO: 265451 - protein, 15 aa, Artificial Sequence
  Description of Artificial Sequence: Synthetic peptide
  Seed: SIGKVCRTLLAKSVF
SIFKVYRNLLKKSVF

SEQ ID NO: 265452 - protein, 15 aa, Artificial Sequence
  Description of Artificial Sequence: Synthetic peptide
  Seed: SIGKVCRTLLAKSVF
SIFKVYRNLLRKSVF

SEQ ID NO: 265453 - protein, 15 aa, Artificial Sequence
  Description of Artificial Sequence: Synthetic peptide
  Seed: SIGKVCRTLLAKSVF
SIFKVYRPLLAKSVF

SEQ ID NO: 265454 - protein, 15 aa, Artificial Sequence
  Description of Artificial Sequence: Synthetic peptide
  Seed: SIGKVCRTLLAKSVF
SIFKVYRPLLHKSVF

SEQ ID NO: 265455 - protein, 15 aa, Artificial Sequence
  Description of Artificial Sequence: Synthetic peptide
  Seed: SIGKVCRTLLAKSVF
SIFKVYRPLLSKSVF

SEQ ID NO: 265456 - protein, 15 aa, Artificial Sequence
  Description of Artificial Sequence: Synthetic peptide
  Seed: SIGKVCRTLLAKSVF
SIFKVYRQLLRKSVF

SEQ ID NO: 265457 - protein, 15 aa, Artificial Sequence
  Description of Artificial Sequence: Synthetic peptide
  Seed: SIGKVCRTLLAKSVF
SIFKVYRRLLAKSVF

SEQ ID NO: 265458 - protein, 15 aa, Artificial Sequence
  Description of Artificial Sequence: Synthetic peptide
  Seed: SIGKVCRTLLAKSVF
SIFKVYRRLLDKSVF

SEQ ID NO: 265459 - protein, 15 aa, Artificial Sequence
  Description of Artificial Sequence: Synthetic peptide
  Seed: SIGKVCRTLLAKSVF
SIFKVYRRLLEKSVF

SEQ ID NO: 265460 - protein, 15 aa, Artificial Sequence
  Description of Artificial Sequence: Synthetic peptide
  Seed: SIGKVCRTLLAKSVF
SIFKVYRRLLFKSVF

SEQ ID NO: 265461 - protein, 15 aa, Artificial Sequence
  Description of Artificial Sequence: Synthetic peptide
  Seed: SIGKVCRTLLAKSVF
SIFKVYRRLLGKSVF

SEQ ID NO: 265462 - protein, 15 aa, Artificial Sequence
  Description of Artificial Sequence: Synthetic peptide
  Seed: SIGKVCRTLLAKSVF
SIFKVYRRLLHKSVF

SEQ ID NO: 265463 - protein, 15 aa, Artificial Sequence
  Description of Artificial Sequence: Synthetic peptide
  Seed: SIGKVCRTLLAKSVF
SIFKVYRRLLIKSVF

SEQ ID NO: 265464 - protein, 15 aa, Artificial Sequence
  Description of Artificial Sequence: Synthetic peptide
  Seed: SIGKVCRTLLAKSVF
SIFKVYRRLLKKSVF

SEQ ID NO: 265465 - protein, 15 aa, Artificial Sequence
  Description of Artificial Sequence: Synthetic peptide
  Seed: SIGKVCRTLLAKSVF
SIFKVYRRLLLKSVF

SEQ ID NO: 265466 - protein, 15 aa, Artificial Sequence
  Description of Artificial Sequence: Synthetic peptide
  Seed: SIGKVCRTLLAKSVF
SIFKVYRRLLMKSVF

SEQ ID NO: 265467 - protein, 15 aa, Artificial Sequence
  Description of Artificial Sequence: Synthetic peptide
  Seed: SIGKVCRTLLAKSVF
SIFKVYRRLLNKSVF

SEQ ID NO: 265468 - protein, 15 aa, Artificial Sequence
  Description of Artificial Sequence: Synthetic peptide
  Seed: SIGKVCRTLLAKSVF
SIFKVYRRLLPKSVF

SEQ ID NO: 265469 - protein, 15 aa, Artificial Sequence
  Description of Artificial Sequence: Synthetic peptide
  Seed: SIGKVCRTLLAKSVF
SIFKVYRRLLQKSVF

SEQ ID NO: 265470 - protein, 15 aa, Artificial Sequence
  Description of Artificial Sequence: Synthetic peptide
  Seed: SIGKVCRTLLAKSVF
SIFKVYRRLLRKSVF

SEQ ID NO: 265471 - protein, 15 aa, Artificial Sequence
  Description of Artificial Sequence: Synthetic peptide
  Seed: SIGKVCRTLLAKSVF
SIFKVYRRLLSKSVF

SEQ ID NO: 265472 - protein, 15 aa, Artificial Sequence
  Description of Artificial Sequence: Synthetic peptide
  Seed: SIGKVCRTLLAKSVF
SIFKVYRRLLTKSVF

SEQ ID NO: 265473 - protein, 15 aa, Artificial Sequence
  Description of Artificial Sequence: Synthetic peptide
  Seed: SIGKVCRTLLAKSVF
SIFKVYRRLLVKSVF

SEQ ID NO: 265474 - protein, 15 aa, Artificial Sequence
  Description of Artificial Sequence: Synthetic peptide
  Seed: SIGKVCRTLLAKSVF
SIFKVYRRLLWKSVF

SEQ ID NO: 265475 - protein, 15 aa, Artificial Sequence
  Description of Artificial Sequence: Synthetic peptide
  Seed: SIGKVCRTLLAKSVF
SIFKVYRRLLYKSVF

SEQ ID NO: 265476 - protein, 15 aa, Artificial Sequence
  Description of Artificial Sequence: Synthetic peptide
  Seed: SIGKVCRTLLAKSVF
SIFKVYRSLLAKSVF

SEQ ID NO: 265477 - protein, 15 aa, Artificial Sequence
  Description of Artificial Sequence: Synthetic peptide
  Seed: SIGKVCRTLLAKSVF
SIFKVYRSLLDKSVF

SEQ ID NO: 265478 - protein, 15 aa, Artificial Sequence
  Description of Artificial Sequence: Synthetic peptide
  Seed: SIGKVCRTLLAKSVF
SIFKVYRSLLHKSVF

SEQ ID NO: 265479 - protein, 15 aa, Artificial Sequence
  Description of Artificial Sequence: Synthetic peptide
  Seed: SIGKVCRTLLAKSVF
SIFKVYRSLLRKSVF

SEQ ID NO: 265480 - protein, 15 aa, Artificial Sequence
  Description of Artificial Sequence: Synthetic peptide
  Seed: SIGKVCRTLLAKSVF
SIFKVYRSLLSKSVF

SEQ ID NO: 265481 - protein, 15 aa, Artificial Sequence
  Description of Artificial Sequence: Synthetic peptide
  Seed: SIGKVCRTLLAKSVF
SIFKVYRTLLAKSVF

SEQ ID NO: 265482 - protein, 15 aa, Artificial Sequence
  Description of Artificial Sequence: Synthetic peptide
  Seed: SIGKVCRTLLAKSVF
SIFKVYRTLLDKSVF

SEQ ID NO: 265483 - protein, 15 aa, Artificial Sequence
  Description of Artificial Sequence: Synthetic peptide
  Seed: SIGKVCRTLLAKSVF
SIFKVYRTLLHKSVF

SEQ ID NO: 265484 - protein, 15 aa, Artificial Sequence
  Description of Artificial Sequence: Synthetic peptide
  Seed: SIGKVCRTLLAKSVF
SIFKVYRTLLKKSVF

SEQ ID NO: 265485 - protein, 15 aa, Artificial Sequence
  Description of Artificial Sequence: Synthetic peptide
  Seed: SIGKVCRTLLAKSVF
SIFKVYRTLLRKSVF

SEQ ID NO: 265486 - protein, 15 aa, Artificial Sequence
  Description of Artificial Sequence: Synthetic peptide
  Seed: SIGKVCRTLLAKSVF
SIFKVYRTLLSKSVF

SEQ ID NO: 265487 - protein, 15 aa, Artificial Sequence
  Description of Artificial Sequence: Synthetic peptide
  Seed: SIGKVCRTLLAKSVF
SIFKVYRVLLHKSVF

SEQ ID NO: 265488 - protein, 15 aa, Artificial Sequence
  Description of Artificial Sequence: Synthetic peptide
  Seed: SIGKVCRTLLAKSVF
SIGKVARKLLAKSVF

SEQ ID NO: 265489 - protein, 15 aa, Artificial Sequence
  Description of Artificial Sequence: Synthetic peptide
  Seed: SIGKVCRTLLAKSVF
SIGKVARKLLSKSVF

SEQ ID NO: 265490 - protein, 15 aa, Artificial Sequence
  Description of Artificial Sequence: Synthetic peptide
  Seed: SIGKVCRTLLAKSVF
SIGKVARRLLAKSVF

SEQ ID NO: 265491 - protein, 15 aa, Artificial Sequence
  Description of Artificial Sequence: Synthetic peptide
  Seed: SIGKVCRTLLAKSVF
SIGKVARRLLGKSVF

SEQ ID NO: 265492 - protein, 15 aa, Artificial Sequence
  Description of Artificial Sequence: Synthetic peptide
  Seed: SIGKVCRTLLAKSVF
SIGKVARRLLQKSVF

SEQ ID NO: 265493 - protein, 15 aa, Artificial Sequence
  Description of Artificial Sequence: Synthetic peptide
  Seed: SIGKVCRTLLAKSVF
SIGKVARRLLSKSVF

SEQ ID NO: 265494 - protein, 15 aa, Artificial Sequence
  Description of Artificial Sequence: Synthetic peptide
  Seed: SIGKVCRTLLAKSVF
SIGKVCRRLLRKSVF

SEQ ID NO: 265495 - protein, 15 aa, Artificial Sequence
  Description of Artificial Sequence: Synthetic peptide
  Seed: SIGKVCRTLLAKSVF
SIGKVFRKLLAKSVF

SEQ ID NO: 265496 - protein, 15 aa, Artificial Sequence
  Description of Artificial Sequence: Synthetic peptide
  Seed: SIGKVCRTLLAKSVF
SIGKVFRKLLGKSVF

SEQ ID NO: 265497 - protein, 15 aa, Artificial Sequence
  Description of Artificial Sequence: Synthetic peptide
  Seed: SIGKVCRTLLAKSVF
SIGKVFRKLLQKSVF

SEQ ID NO: 265498 - protein, 15 aa, Artificial Sequence
  Description of Artificial Sequence: Synthetic peptide
  Seed: SIGKVCRTLLAKSVF
SIGKVFRKLLSKSVF

SEQ ID NO: 265499 - protein, 15 aa, Artificial Sequence
  Description of Artificial Sequence: Synthetic peptide
  Seed: SIGKVCRTLLAKSVF
SIGKVFRRLLAKSVF

SEQ ID NO: 265500 - protein, 15 aa, Artificial Sequence
  Description of Artificial Sequence: Synthetic peptide
  Seed: SIGKVCRTLLAKSVF
SIGKVFRRLLGKSVF

SEQ ID NO: 265501 - protein, 15 aa, Artificial Sequence
  Description of Artificial Sequence: Synthetic peptide
  Seed: SIGKVCRTLLAKSVF
SIGKVFRRLLIKSVF

SEQ ID NO: 265502 - protein, 15 aa, Artificial Sequence
  Description of Artificial Sequence: Synthetic peptide
  Seed: SIGKVCRTLLAKSVF
SIGKVFRRLLLKSVF

SEQ ID NO: 265503 - protein, 15 aa, Artificial Sequence
  Description of Artificial Sequence: Synthetic peptide
  Seed: SIGKVCRTLLAKSVF
SIGKVFRRLLMKSVF

SEQ ID NO: 265504 - protein, 15 aa, Artificial Sequence
  Description of Artificial Sequence: Synthetic peptide
  Seed: SIGKVCRTLLAKSVF
SIGKVFRRLLQKSVF

SEQ ID NO: 265505 - protein, 15 aa, Artificial Sequence
  Description of Artificial Sequence: Synthetic peptide
  Seed: SIGKVCRTLLAKSVF
SIGKVFRRLLSKSVF

SEQ ID NO: 265506 - protein, 15 aa, Artificial Sequence
  Description of Artificial Sequence: Synthetic peptide
  Seed: SIGKVCRTLLAKSVF
SIGKVFRRLLVKSVF

SEQ ID NO: 265507 - protein, 15 aa, Artificial Sequence
  Description of Artificial Sequence: Synthetic peptide
  Seed: SIGKVCRTLLAKSVF
SIGKVIRKLLAKSVF

SEQ ID NO: 265508 - protein, 15 aa, Artificial Sequence
  Description of Artificial Sequence: Synthetic peptide
  Seed: SIGKVCRTLLAKSVF
SIGKVIRKLLGKSVF

SEQ ID NO: 265509 - protein, 15 aa, Artificial Sequence
  Description of Artificial Sequence: Synthetic peptide
  Seed: SIGKVCRTLLAKSVF
SIGKVIRKLLLKSVF

SEQ ID NO: 265510 - protein, 15 aa, Artificial Sequence
  Description of Artificial Sequence: Synthetic peptide
  Seed: SIGKVCRTLLAKSVF
SIGKVIRKLLMKSVF

SEQ ID NO: 265511 - protein, 15 aa, Artificial Sequence
  Description of Artificial Sequence: Synthetic peptide
  Seed: SIGKVCRTLLAKSVF
SIGKVIRKLLQKSVF

SEQ ID NO: 265512 - protein, 15 aa, Artificial Sequence
  Description of Artificial Sequence: Synthetic peptide
  Seed: SIGKVCRTLLAKSVF
SIGKVIRKLLSKSVF

SEQ ID NO: 265513 - protein, 15 aa, Artificial Sequence
  Description of Artificial Sequence: Synthetic peptide
  Seed: SIGKVCRTLLAKSVF
SIGKVIRKLLYKSVF

SEQ ID NO: 265514 - protein, 15 aa, Artificial Sequence
  Description of Artificial Sequence: Synthetic peptide
  Seed: SIGKVCRTLLAKSVF
SIGKVIRRLLAKSVF

SEQ ID NO: 265515 - protein, 15 aa, Artificial Sequence
  Description of Artificial Sequence: Synthetic peptide
  Seed: SIGKVCRTLLAKSVF
SIGKVIRRLLGKSVF

SEQ ID NO: 265516 - protein, 15 aa, Artificial Sequence
  Description of Artificial Sequence: Synthetic peptide
  Seed: SIGKVCRTLLAKSVF
SIGKVIRRLLLKSVF

SEQ ID NO: 265517 - protein, 15 aa, Artificial Sequence
  Description of Artificial Sequence: Synthetic peptide
  Seed: SIGKVCRTLLAKSVF
SIGKVIRRLLMKSVF

SEQ ID NO: 265518 - protein, 15 aa, Artificial Sequence
  Description of Artificial Sequence: Synthetic peptide
  Seed: SIGKVCRTLLAKSVF
SIGKVIRRLLQKSVF

SEQ ID NO: 265519 - protein, 15 aa, Artificial Sequence
  Description of Artificial Sequence: Synthetic peptide
  Seed: SIGKVCRTLLAKSVF
SIGKVIRRLLSKSVF

SEQ ID NO: 265520 - protein, 15 aa, Artificial Sequence
  Description of Artificial Sequence: Synthetic peptide
  Seed: SIGKVCRTLLAKSVF
SIGKVIRRLLYKSVF

SEQ ID NO: 265521 - protein, 15 aa, Artificial Sequence
  Description of Artificial Sequence: Synthetic peptide
  Seed: SIGKVCRTLLAKSVF
SIGKVLRKLLAKSVF

SEQ ID NO: 265522 - protein, 15 aa, Artificial Sequence
  Description of Artificial Sequence: Synthetic peptide
  Seed: SIGKVCRTLLAKSVF
SIGKVLRKLLGKSVF

SEQ ID NO: 265523 - protein, 15 aa, Artificial Sequence
  Description of Artificial Sequence: Synthetic peptide
  Seed: SIGKVCRTLLAKSVF
SIGKVLRKLLIKSVF

SEQ ID NO: 265524 - protein, 15 aa, Artificial Sequence
  Description of Artificial Sequence: Synthetic peptide
  Seed: SIGKVCRTLLAKSVF
SIGKVLRKLLLKSVF

SEQ ID NO: 265525 - protein, 15 aa, Artificial Sequence
  Description of Artificial Sequence: Synthetic peptide
  Seed: SIGKVCRTLLAKSVF
SIGKVLRKLLMKSVF

SEQ ID NO: 265526 - protein, 15 aa, Artificial Sequence
  Description of Artificial Sequence: Synthetic peptide
  Seed: SIGKVCRTLLAKSVF
SIGKVLRKLLNKSVF

SEQ ID NO: 265527 - protein, 15 aa, Artificial Sequence
  Description of Artificial Sequence: Synthetic peptide
  Seed: SIGKVCRTLLAKSVF
SIGKVLRKLLQKSVF

SEQ ID NO: 265528 - protein, 15 aa, Artificial Sequence
  Description of Artificial Sequence: Synthetic peptide
  Seed: SIGKVCRTLLAKSVF
SIGKVLRKLLSKSVF

SEQ ID NO: 265529 - protein, 15 aa, Artificial Sequence
  Description of Artificial Sequence: Synthetic peptide
  Seed: SIGKVCRTLLAKSVF
SIGKVLRKLLTKSVF

SEQ ID NO: 265530 - protein, 15 aa, Artificial Sequence
  Description of Artificial Sequence: Synthetic peptide
  Seed: SIGKVCRTLLAKSVF
SIGKVLRKLLVKSVF

SEQ ID NO: 265531 - protein, 15 aa, Artificial Sequence
  Description of Artificial Sequence: Synthetic peptide
  Seed: SIGKVCRTLLAKSVF
SIGKVLRKLLYKSVF

SEQ ID NO: 265532 - protein, 15 aa, Artificial Sequence
  Description of Artificial Sequence: Synthetic peptide
  Seed: SIGKVCRTLLAKSVF
SIGKVLRRLLAKSVF

SEQ ID NO: 265533 - protein, 15 aa, Artificial Sequence
  Description of Artificial Sequence: Synthetic peptide
  Seed: SIGKVCRTLLAKSVF
SIGKVLRRLLGKSVF

SEQ ID NO: 265534 - protein, 15 aa, Artificial Sequence
  Description of Artificial Sequence: Synthetic peptide
  Seed: SIGKVCRTLLAKSVF
SIGKVLRRLLIKSVF

SEQ ID NO: 265535 - protein, 15 aa, Artificial Sequence
  Description of Artificial Sequence: Synthetic peptide
  Seed: SIGKVCRTLLAKSVF
SIGKVLRRLLLKSVF

SEQ ID NO: 265536 - protein, 15 aa, Artificial Sequence
  Description of Artificial Sequence: Synthetic peptide
  Seed: SIGKVCRTLLAKSVF
SIGKVLRRLLMKSVF

SEQ ID NO: 265537 - protein, 15 aa, Artificial Sequence
  Description of Artificial Sequence: Synthetic peptide
  Seed: SIGKVCRTLLAKSVF
SIGKVLRRLLQKSVF

SEQ ID NO: 265538 - protein, 15 aa, Artificial Sequence
  Description of Artificial Sequence: Synthetic peptide
  Seed: SIGKVCRTLLAKSVF
SIGKVLRRLLSKSVF

SEQ ID NO: 265539 - protein, 15 aa, Artificial Sequence
  Description of Artificial Sequence: Synthetic peptide
  Seed: SIGKVCRTLLAKSVF
SIGKVLRRLLVKSVF

SEQ ID NO: 265540 - protein, 15 aa, Artificial Sequence
  Description of Artificial Sequence: Synthetic peptide
  Seed: SIGKVCRTLLAKSVF
SIGKVLRRLLYKSVF

SEQ ID NO: 265541 - protein, 15 aa, Artificial Sequence
  Description of Artificial Sequence: Synthetic peptide
  Seed: SIGKVCRTLLAKSVF
SIGKVMRHLLAKSVF

SEQ ID NO: 265542 - protein, 15 aa, Artificial Sequence
  Description of Artificial Sequence: Synthetic peptide
  Seed: SIGKVCRTLLAKSVF
SIGKVMRHLLSKSVF

SEQ ID NO: 265543 - protein, 15 aa, Artificial Sequence
  Description of Artificial Sequence: Synthetic peptide
  Seed: SIGKVCRTLLAKSVF
SIGKVMRKLLAKSVF

SEQ ID NO: 265544 - protein, 15 aa, Artificial Sequence
  Description of Artificial Sequence: Synthetic peptide
  Seed: SIGKVCRTLLAKSVF
SIGKVMRKLLGKSVF

SEQ ID NO: 265545 - protein, 15 aa, Artificial Sequence
  Description of Artificial Sequence: Synthetic peptide
  Seed: SIGKVCRTLLAKSVF
SIGKVMRKLLHKSVF

SEQ ID NO: 265546 - protein, 15 aa, Artificial Sequence
  Description of Artificial Sequence: Synthetic peptide
  Seed: SIGKVCRTLLAKSVF
SIGKVMRKLLIKSVF

SEQ ID NO: 265547 - protein, 15 aa, Artificial Sequence
  Description of Artificial Sequence: Synthetic peptide
  Seed: SIGKVCRTLLAKSVF
SIGKVMRKLLLKSVF

SEQ ID NO: 265548 - protein, 15 aa, Artificial Sequence
  Description of Artificial Sequence: Synthetic peptide
  Seed: SIGKVCRTLLAKSVF
SIGKVMRKLLMKSVF

SEQ ID NO: 265549 - protein, 15 aa, Artificial Sequence
  Description of Artificial Sequence: Synthetic peptide
  Seed: SIGKVCRTLLAKSVF
SIGKVMRKLLNKSVF

SEQ ID NO: 265550 - protein, 15 aa, Artificial Sequence
  Description of Artificial Sequence: Synthetic peptide
  Seed: SIGKVCRTLLAKSVF
SIGKVMRKLLPKSVF

SEQ ID NO: 265551 - protein, 15 aa, Artificial Sequence
  Description of Artificial Sequence: Synthetic peptide
  Seed: SIGKVCRTLLAKSVF
SIGKVMRKLLQKSVF

SEQ ID NO: 265552 - protein, 15 aa, Artificial Sequence
  Description of Artificial Sequence: Synthetic peptide
  Seed: SIGKVCRTLLAKSVF
SIGKVMRKLLSKSVF

SEQ ID NO: 265553 - protein, 15 aa, Artificial Sequence
  Description of Artificial Sequence: Synthetic peptide
  Seed: SIGKVCRTLLAKSVF
SIGKVMRKLLTKSVF

SEQ ID NO: 265554 - protein, 15 aa, Artificial Sequence
  Description of Artificial Sequence: Synthetic peptide
  Seed: SIGKVCRTLLAKSVF
SIGKVMRKLLVKSVF

SEQ ID NO: 265555 - protein, 15 aa, Artificial Sequence
  Description of Artificial Sequence: Synthetic peptide
  Seed: SIGKVCRTLLAKSVF
SIGKVMRKLLYKSVF

SEQ ID NO: 265556 - protein, 15 aa, Artificial Sequence
  Description of Artificial Sequence: Synthetic peptide
  Seed: SIGKVCRTLLAKSVF
SIGKVMRRLLAKSVF

SEQ ID NO: 265557 - protein, 15 aa, Artificial Sequence
  Description of Artificial Sequence: Synthetic peptide
  Seed: SIGKVCRTLLAKSVF
SIGKVMRRLLEKSVF

SEQ ID NO: 265558 - protein, 15 aa, Artificial Sequence
  Description of Artificial Sequence: Synthetic peptide
  Seed: SIGKVCRTLLAKSVF
SIGKVMRRLLFKSVF

SEQ ID NO: 265559 - protein, 15 aa, Artificial Sequence
  Description of Artificial Sequence: Synthetic peptide
  Seed: SIGKVCRTLLAKSVF
SIGKVMRRLLGKSVF

SEQ ID NO: 265560 - protein, 15 aa, Artificial Sequence
  Description of Artificial Sequence: Synthetic peptide
  Seed: SIGKVCRTLLAKSVF
SIGKVMRRLLHKSVF

SEQ ID NO: 265561 - protein, 15 aa, Artificial Sequence
  Description of Artificial Sequence: Synthetic peptide
  Seed: SIGKVCRTLLAKSVF
SIGKVMRRLLIKSVF

SEQ ID NO: 265562 - protein, 15 aa, Artificial Sequence
  Description of Artificial Sequence: Synthetic peptide
  Seed: SIGKVCRTLLAKSVF
SIGKVMRRLLLKSVF

SEQ ID NO: 265563 - protein, 15 aa, Artificial Sequence
  Description of Artificial Sequence: Synthetic peptide
  Seed: SIGKVCRTLLAKSVF
SIGKVMRRLLMKSVF

SEQ ID NO: 265564 - protein, 15 aa, Artificial Sequence
  Description of Artificial Sequence: Synthetic peptide
  Seed: SIGKVCRTLLAKSVF
SIGKVMRRLLNKSVF

SEQ ID NO: 265565 - protein, 15 aa, Artificial Sequence
  Description of Artificial Sequence: Synthetic peptide
  Seed: SIGKVCRTLLAKSVF
SIGKVMRRLLPKSVF

SEQ ID NO: 265566 - protein, 15 aa, Artificial Sequence
  Description of Artificial Sequence: Synthetic peptide
  Seed: SIGKVCRTLLAKSVF
SIGKVMRRLLQKSVF

SEQ ID NO: 265567 - protein, 15 aa, Artificial Sequence
  Description of Artificial Sequence: Synthetic peptide
  Seed: SIGKVCRTLLAKSVF
SIGKVMRRLLSKSVF

SEQ ID NO: 265568 - protein, 15 aa, Artificial Sequence
  Description of Artificial Sequence: Synthetic peptide
  Seed: SIGKVCRTLLAKSVF
SIGKVMRRLLTKSVF

SEQ ID NO: 265569 - protein, 15 aa, Artificial Sequence
  Description of Artificial Sequence: Synthetic peptide
  Seed: SIGKVCRTLLAKSVF
SIGKVMRRLLVKSVF

SEQ ID NO: 265570 - protein, 15 aa, Artificial Sequence
  Description of Artificial Sequence: Synthetic peptide
  Seed: SIGKVCRTLLAKSVF
SIGKVMRRLLYKSVF

SEQ ID NO: 265571 - protein, 15 aa, Artificial Sequence
  Description of Artificial Sequence: Synthetic peptide
  Seed: SIGKVCRTLLAKSVF
SIGKVQRRLLAKSVF

SEQ ID NO: 265572 - protein, 15 aa, Artificial Sequence
  Description of Artificial Sequence: Synthetic peptide
  Seed: SIGKVCRTLLAKSVF
SIGKVQRRLLSKSVF

SEQ ID NO: 265573 - protein, 15 aa, Artificial Sequence
  Description of Artificial Sequence: Synthetic peptide
  Seed: SIGKVCRTLLAKSVF
SIGKVVRKLLAKSVF

SEQ ID NO: 265574 - protein, 15 aa, Artificial Sequence
  Description of Artificial Sequence: Synthetic peptide
  Seed: SIGKVCRTLLAKSVF
SIGKVVRKLLGKSVF

SEQ ID NO: 265575 - protein, 15 aa, Artificial Sequence
  Description of Artificial Sequence: Synthetic peptide
  Seed: SIGKVCRTLLAKSVF
SIGKVVRKLLQKSVF

SEQ ID NO: 265576 - protein, 15 aa, Artificial Sequence
  Description of Artificial Sequence: Synthetic peptide
  Seed: SIGKVCRTLLAKSVF
SIGKVVRKLLSKSVF

SEQ ID NO: 265577 - protein, 15 aa, Artificial Sequence
  Description of Artificial Sequence: Synthetic peptide
  Seed: SIGKVCRTLLAKSVF
SIGKVVRKLLVKSVF

SEQ ID NO: 265578 - protein, 15 aa, Artificial Sequence
  Description of Artificial Sequence: Synthetic peptide
  Seed: SIGKVCRTLLAKSVF
SIGKVVRRLLAKSVF

SEQ ID NO: 265579 - protein, 15 aa, Artificial Sequence
  Description of Artificial Sequence: Synthetic peptide
  Seed: SIGKVCRTLLAKSVF
SIGKVVRRLLGKSVF

SEQ ID NO: 265580 - protein, 15 aa, Artificial Sequence
  Description of Artificial Sequence: Synthetic peptide
  Seed: SIGKVCRTLLAKSVF
SIGKVVRRLLIKSVF

SEQ ID NO: 265581 - protein, 15 aa, Artificial Sequence
  Description of Artificial Sequence: Synthetic peptide
  Seed: SIGKVCRTLLAKSVF
SIGKVVRRLLLKSVF

SEQ ID NO: 265582 - protein, 15 aa, Artificial Sequence
  Description of Artificial Sequence: Synthetic peptide
  Seed: SIGKVCRTLLAKSVF
SIGKVVRRLLMKSVF

SEQ ID NO: 265583 - protein, 15 aa, Artificial Sequence
  Description of Artificial Sequence: Synthetic peptide
  Seed: SIGKVCRTLLAKSVF
SIGKVVRRLLQKSVF

SEQ ID NO: 265584 - protein, 15 aa, Artificial Sequence
  Description of Artificial Sequence: Synthetic peptide
  Seed: SIGKVCRTLLAKSVF
SIGKVVRRLLSKSVF

SEQ ID NO: 265585 - protein, 15 aa, Artificial Sequence
  Description of Artificial Sequence: Synthetic peptide
  Seed: SIGKVCRTLLAKSVF
SIGKVVRRLLVKSVF

SEQ ID NO: 265586 - protein, 15 aa, Artificial Sequence
  Description of Artificial Sequence: Synthetic peptide
  Seed: SIGKVCRTLLAKSVF
SIGKVVRRLLYKSVF

SEQ ID NO: 265587 - protein, 15 aa, Artificial Sequence
  Description of Artificial Sequence: Synthetic peptide
  Seed: SIGKVCRTLLAKSVF
SIGKVWRRLLAKSVF

SEQ ID NO: 265588 - protein, 15 aa, Artificial Sequence
  Description of Artificial Sequence: Synthetic peptide
  Seed: SIGKVCRTLLAKSVF
SIGKVWRRLLSKSVF

SEQ ID NO: 265589 - protein, 15 aa, Artificial Sequence
  Description of Artificial Sequence: Synthetic peptide
  Seed: SIGKVCRTLLAKSVF
SIGKVYRRLLAKSVF

SEQ ID NO: 265590 - protein, 15 aa, Artificial Sequence
  Description of Artificial Sequence: Synthetic peptide
  Seed: SIGKVCRTLLAKSVF
SIGKVYRRLLSKSVF

SEQ ID NO: 265591 - protein, 15 aa, Artificial Sequence
  Description of Artificial Sequence: Synthetic peptide
  Seed: SIGKVCRTLLAKSVF
SIHKVARKLLAKSVF

SEQ ID NO: 265592 - protein, 15 aa, Artificial Sequence
  Description of Artificial Sequence: Synthetic peptide
  Seed: SIGKVCRTLLAKSVF
SIHKVARKLLGKSVF

SEQ ID NO: 265593 - protein, 15 aa, Artificial Sequence
  Description of Artificial Sequence: Synthetic peptide
  Seed: SIGKVCRTLLAKSVF
SIHKVARKLLSKSVF

SEQ ID NO: 265594 - protein, 15 aa, Artificial Sequence
  Description of Artificial Sequence: Synthetic peptide
  Seed: SIGKVCRTLLAKSVF
SIHKVARRLLAKSVF

SEQ ID NO: 265595 - protein, 15 aa, Artificial Sequence
  Description of Artificial Sequence: Synthetic peptide
  Seed: SIGKVCRTLLAKSVF
SIHKVARRLLGKSVF

SEQ ID NO: 265596 - protein, 15 aa, Artificial Sequence
  Description of Artificial Sequence: Synthetic peptide
  Seed: SIGKVCRTLLAKSVF
SIHKVARRLLSKSVF

SEQ ID NO: 265597 - protein, 15 aa, Artificial Sequence
  Description of Artificial Sequence: Synthetic peptide
  Seed: SIGKVCRTLLAKSVF
SIHKVARRLLTKSVF

SEQ ID NO: 265598 - protein, 15 aa, Artificial Sequence
  Description of Artificial Sequence: Synthetic peptide
  Seed: SIGKVCRTLLAKSVF
SIHKVCRKLLAKSVF

SEQ ID NO: 265599 - protein, 15 aa, Artificial Sequence
  Description of Artificial Sequence: Synthetic peptide
  Seed: SIGKVCRTLLAKSVF
SIHKVCRKLLSKSVF

SEQ ID NO: 265600 - protein, 15 aa, Artificial Sequence
  Description of Artificial Sequence: Synthetic peptide
  Seed: SIGKVCRTLLAKSVF
SIHKVCRRLLAKSVF

SEQ ID NO: 265601 - protein, 15 aa, Artificial Sequence
  Description of Artificial Sequence: Synthetic peptide
  Seed: SIGKVCRTLLAKSVF
SIHKVCRRLLGKSVF

SEQ ID NO: 265602 - protein, 15 aa, Artificial Sequence
  Description of Artificial Sequence: Synthetic peptide
  Seed: SIGKVCRTLLAKSVF
SIHKVCRRLLQKSVF

SEQ ID NO: 265603 - protein, 15 aa, Artificial Sequence
  Description of Artificial Sequence: Synthetic peptide
  Seed: SIGKVCRTLLAKSVF
SIHKVCRRLLSKSVF

SEQ ID NO: 265604 - protein, 15 aa, Artificial Sequence
  Description of Artificial Sequence: Synthetic peptide
  Seed: SIGKVCRTLLAKSVF
SIHKVFRKLLAKSVF

SEQ ID NO: 265605 - protein, 15 aa, Artificial Sequence
  Description of Artificial Sequence: Synthetic peptide
  Seed: SIGKVCRTLLAKSVF
SIHKVFRKLLGKSVF

SEQ ID NO: 265606 - protein, 15 aa, Artificial Sequence
  Description of Artificial Sequence: Synthetic peptide
  Seed: SIGKVCRTLLAKSVF
SIHKVFRKLLQKSVF

SEQ ID NO: 265607 - protein, 15 aa, Artificial Sequence
  Description of Artificial Sequence: Synthetic peptide
  Seed: SIGKVCRTLLAKSVF
SIHKVFRKLLSKSVF

SEQ ID NO: 265608 - protein, 15 aa, Artificial Sequence
  Description of Artificial Sequence: Synthetic peptide
  Seed: SIGKVCRTLLAKSVF
SIHKVFRRLLAKSVF

SEQ ID NO: 265609 - protein, 15 aa, Artificial Sequence
  Description of Artificial Sequence: Synthetic peptide
  Seed: SIGKVCRTLLAKSVF
SIHKVFRRLLGKSVF

SEQ ID NO: 265610 - protein, 15 aa, Artificial Sequence
  Description of Artificial Sequence: Synthetic peptide
  Seed: SIGKVCRTLLAKSVF
SIHKVFRRLLQKSVF

SEQ ID NO: 265611 - protein, 15 aa, Artificial Sequence
  Description of Artificial Sequence: Synthetic peptide
  Seed: SIGKVCRTLLAKSVF
SIHKVFRRLLSKSVF

SEQ ID NO: 265612 - protein, 15 aa, Artificial Sequence
  Description of Artificial Sequence: Synthetic peptide
  Seed: SIGKVCRTLLAKSVF
SIHKVIRKLLAKSVF

SEQ ID NO: 265613 - protein, 15 aa, Artificial Sequence
  Description of Artificial Sequence: Synthetic peptide
  Seed: SIGKVCRTLLAKSVF
SIHKVIRKLLCKSVF

SEQ ID NO: 265614 - protein, 15 aa, Artificial Sequence
  Description of Artificial Sequence: Synthetic peptide
  Seed: SIGKVCRTLLAKSVF
SIHKVIRKLLGKSVF

SEQ ID NO: 265615 - protein, 15 aa, Artificial Sequence
  Description of Artificial Sequence: Synthetic peptide
  Seed: SIGKVCRTLLAKSVF
SIHKVIRKLLQKSVF

SEQ ID NO: 265616 - protein, 15 aa, Artificial Sequence
  Description of Artificial Sequence: Synthetic peptide
  Seed: SIGKVCRTLLAKSVF
SIHKVIRKLLSKSVF

SEQ ID NO: 265617 - protein, 15 aa, Artificial Sequence
  Description of Artificial Sequence: Synthetic peptide
  Seed: SIGKVCRTLLAKSVF
SIHKVIRKLLTKSVF

SEQ ID NO: 265618 - protein, 15 aa, Artificial Sequence
  Description of Artificial Sequence: Synthetic peptide
  Seed: SIGKVCRTLLAKSVF
SIHKVIRRLLAKSVF

SEQ ID NO: 265619 - protein, 15 aa, Artificial Sequence
  Description of Artificial Sequence: Synthetic peptide
  Seed: SIGKVCRTLLAKSVF
SIHKVIRRLLCKSVF

SEQ ID NO: 265620 - protein, 15 aa, Artificial Sequence
  Description of Artificial Sequence: Synthetic peptide
  Seed: SIGKVCRTLLAKSVF
SIHKVIRRLLGKSVF

SEQ ID NO: 265621 - protein, 15 aa, Artificial Sequence
  Description of Artificial Sequence: Synthetic peptide
  Seed: SIGKVCRTLLAKSVF
SIHKVIRRLLHKSVF

SEQ ID NO: 265622 - protein, 15 aa, Artificial Sequence
  Description of Artificial Sequence: Synthetic peptide
  Seed: SIGKVCRTLLAKSVF
SIHKVIRRLLNKSVF

SEQ ID NO: 265623 - protein, 15 aa, Artificial Sequence
  Description of Artificial Sequence: Synthetic peptide
  Seed: SIGKVCRTLLAKSVF
SIHKVIRRLLQKSVF

SEQ ID NO: 265624 - protein, 15 aa, Artificial Sequence
  Description of Artificial Sequence: Synthetic peptide
  Seed: SIGKVCRTLLAKSVF
SIHKVIRRLLSKSVF

SEQ ID NO: 265625 - protein, 15 aa, Artificial Sequence
  Description of Artificial Sequence: Synthetic peptide
  Seed: SIGKVCRTLLAKSVF
SIHKVIRRLLTKSVF

SEQ ID NO: 265626 - protein, 15 aa, Artificial Sequence
  Description of Artificial Sequence: Synthetic peptide
  Seed: SIGKVCRTLLAKSVF
SIHKVIRRLLVKSVF

SEQ ID NO: 265627 - protein, 15 aa, Artificial Sequence
  Description of Artificial Sequence: Synthetic peptide
  Seed: SIGKVCRTLLAKSVF
SIHKVLRKLLAKSVF

SEQ ID NO: 265628 - protein, 15 aa, Artificial Sequence
  Description of Artificial Sequence: Synthetic peptide
  Seed: SIGKVCRTLLAKSVF
SIHKVLRKLLCKSVF

SEQ ID NO: 265629 - protein, 15 aa, Artificial Sequence
  Description of Artificial Sequence: Synthetic peptide
  Seed: SIGKVCRTLLAKSVF
SIHKVLRKLLGKSVF

SEQ ID NO: 265630 - protein, 15 aa, Artificial Sequence
  Description of Artificial Sequence: Synthetic peptide
  Seed: SIGKVCRTLLAKSVF
SIHKVLRKLLHKSVF

SEQ ID NO: 265631 - protein, 15 aa, Artificial Sequence
  Description of Artificial Sequence: Synthetic peptide
  Seed: SIGKVCRTLLAKSVF
SIHKVLRKLLLKSVF

SEQ ID NO: 265632 - protein, 15 aa, Artificial Sequence
  Description of Artificial Sequence: Synthetic peptide
  Seed: SIGKVCRTLLAKSVF
SIHKVLRKLLMKSVF

SEQ ID NO: 265633 - protein, 15 aa, Artificial Sequence
  Description of Artificial Sequence: Synthetic peptide
  Seed: SIGKVCRTLLAKSVF
SIHKVLRKLLQKSVF

SEQ ID NO: 265634 - protein, 15 aa, Artificial Sequence
  Description of Artificial Sequence: Synthetic peptide
  Seed: SIGKVCRTLLAKSVF
SIHKVLRKLLSKSVF

SEQ ID NO: 265635 - protein, 15 aa, Artificial Sequence
  Description of Artificial Sequence: Synthetic peptide
  Seed: SIGKVCRTLLAKSVF
SIHKVLRKLLTKSVF

SEQ ID NO: 265636 - protein, 15 aa, Artificial Sequence
  Description of Artificial Sequence: Synthetic peptide
  Seed: SIGKVCRTLLAKSVF
SIHKVLRKLLVKSVF

SEQ ID NO: 265637 - protein, 15 aa, Artificial Sequence
  Description of Artificial Sequence: Synthetic peptide
  Seed: SIGKVCRTLLAKSVF
SIHKVLRRLLAKSVF

SEQ ID NO: 265638 - protein, 15 aa, Artificial Sequence
  Description of Artificial Sequence: Synthetic peptide
  Seed: SIGKVCRTLLAKSVF
SIHKVLRRLLCKSVF

SEQ ID NO: 265639 - protein, 15 aa, Artificial Sequence
  Description of Artificial Sequence: Synthetic peptide
  Seed: SIGKVCRTLLAKSVF
SIHKVLRRLLDKSVF

SEQ ID NO: 265640 - protein, 15 aa, Artificial Sequence
  Description of Artificial Sequence: Synthetic peptide
  Seed: SIGKVCRTLLAKSVF
SIHKVLRRLLEKSVF

SEQ ID NO: 265641 - protein, 15 aa, Artificial Sequence
  Description of Artificial Sequence: Synthetic peptide
  Seed: SIGKVCRTLLAKSVF
SIHKVLRRLLGKSVF

SEQ ID NO: 265642 - protein, 15 aa, Artificial Sequence
  Description of Artificial Sequence: Synthetic peptide
  Seed: SIGKVCRTLLAKSVF
SIHKVLRRLLHKSVF

SEQ ID NO: 265643 - protein, 15 aa, Artificial Sequence
  Description of Artificial Sequence: Synthetic peptide
  Seed: SIGKVCRTLLAKSVF
SIHKVLRRLLIKSVF

SEQ ID NO: 265644 - protein, 15 aa, Artificial Sequence
  Description of Artificial Sequence: Synthetic peptide
  Seed: SIGKVCRTLLAKSVF
SIHKVLRRLLLKSVF

SEQ ID NO: 265645 - protein, 15 aa, Artificial Sequence
  Description of Artificial Sequence: Synthetic peptide
  Seed: SIGKVCRTLLAKSVF
SIHKVLRRLLMKSVF

SEQ ID NO: 265646 - protein, 15 aa, Artificial Sequence
  Description of Artificial Sequence: Synthetic peptide
  Seed: SIGKVCRTLLAKSVF
SIHKVLRRLLNKSVF

SEQ ID NO: 265647 - protein, 15 aa, Artificial Sequence
  Description of Artificial Sequence: Synthetic peptide
  Seed: SIGKVCRTLLAKSVF
SIHKVLRRLLQKSVF

SEQ ID NO: 265648 - protein, 15 aa, Artificial Sequence
  Description of Artificial Sequence: Synthetic peptide
  Seed: SIGKVCRTLLAKSVF
SIHKVLRRLLSKSVF

SEQ ID NO: 265649 - protein, 15 aa, Artificial Sequence
  Description of Artificial Sequence: Synthetic peptide
  Seed: SIGKVCRTLLAKSVF
SIHKVLRRLLTKSVF

SEQ ID NO: 265650 - protein, 15 aa, Artificial Sequence
  Description of Artificial Sequence: Synthetic peptide
  Seed: SIGKVCRTLLAKSVF
SIHKVLRRLLVKSVF

SEQ ID NO: 265651 - protein, 15 aa, Artificial Sequence
  Description of Artificial Sequence: Synthetic peptide
  Seed: SIGKVCRTLLAKSVF
SIHKVMRKLLAKSVF

SEQ ID NO: 265652 - protein, 15 aa, Artificial Sequence
  Description of Artificial Sequence: Synthetic peptide
  Seed: SIGKVCRTLLAKSVF
SIHKVMRKLLCKSVF

SEQ ID NO: 265653 - protein, 15 aa, Artificial Sequence
  Description of Artificial Sequence: Synthetic peptide
  Seed: SIGKVCRTLLAKSVF
SIHKVMRKLLEKSVF

SEQ ID NO: 265654 - protein, 15 aa, Artificial Sequence
  Description of Artificial Sequence: Synthetic peptide
  Seed: SIGKVCRTLLAKSVF
SIHKVMRKLLGKSVF

SEQ ID NO: 265655 - protein, 15 aa, Artificial Sequence
  Description of Artificial Sequence: Synthetic peptide
  Seed: SIGKVCRTLLAKSVF
SIHKVMRKLLHKSVF

SEQ ID NO: 265656 - protein, 15 aa, Artificial Sequence
  Description of Artificial Sequence: Synthetic peptide
  Seed: SIGKVCRTLLAKSVF
SIHKVMRKLLIKSVF

SEQ ID NO: 265657 - protein, 15 aa, Artificial Sequence
  Description of Artificial Sequence: Synthetic peptide
  Seed: SIGKVCRTLLAKSVF
SIHKVMRKLLLKSVF

SEQ ID NO: 265658 - protein, 15 aa, Artificial Sequence
  Description of Artificial Sequence: Synthetic peptide
  Seed: SIGKVCRTLLAKSVF
SIHKVMRKLLMKSVF

SEQ ID NO: 265659 - protein, 15 aa, Artificial Sequence
  Description of Artificial Sequence: Synthetic peptide
  Seed: SIGKVCRTLLAKSVF
SIHKVMRKLLNKSVF

SEQ ID NO: 265660 - protein, 15 aa, Artificial Sequence
  Description of Artificial Sequence: Synthetic peptide
  Seed: SIGKVCRTLLAKSVF
SIHKVMRKLLQKSVF

SEQ ID NO: 265661 - protein, 15 aa, Artificial Sequence
  Description of Artificial Sequence: Synthetic peptide
  Seed: SIGKVCRTLLAKSVF
SIHKVMRKLLSKSVF

SEQ ID NO: 265662 - protein, 15 aa, Artificial Sequence
  Description of Artificial Sequence: Synthetic peptide
  Seed: SIGKVCRTLLAKSVF
SIHKVMRKLLTKSVF

SEQ ID NO: 265663 - protein, 15 aa, Artificial Sequence
  Description of Artificial Sequence: Synthetic peptide
  Seed: SIGKVCRTLLAKSVF
SIHKVMRKLLVKSVF

SEQ ID NO: 265664 - protein, 15 aa, Artificial Sequence
  Description of Artificial Sequence: Synthetic peptide
  Seed: SIGKVCRTLLAKSVF
SIHKVMRKLLYKSVF

SEQ ID NO: 265665 - protein, 15 aa, Artificial Sequence
  Description of Artificial Sequence: Synthetic peptide
  Seed: SIGKVCRTLLAKSVF
SIHKVMRRLLAKSVF

SEQ ID NO: 265666 - protein, 15 aa, Artificial Sequence
  Description of Artificial Sequence: Synthetic peptide
  Seed: SIGKVCRTLLAKSVF
SIHKVMRRLLCKSVF

SEQ ID NO: 265667 - protein, 15 aa, Artificial Sequence
  Description of Artificial Sequence: Synthetic peptide
  Seed: SIGKVCRTLLAKSVF
SIHKVMRRLLDKSVF

SEQ ID NO: 265668 - protein, 15 aa, Artificial Sequence
  Description of Artificial Sequence: Synthetic peptide
  Seed: SIGKVCRTLLAKSVF
SIHKVMRRLLEKSVF

SEQ ID NO: 265669 - protein, 15 aa, Artificial Sequence
  Description of Artificial Sequence: Synthetic peptide
  Seed: SIGKVCRTLLAKSVF
SIHKVMRRLLGKSVF

SEQ ID NO: 265670 - protein, 15 aa, Artificial Sequence
  Description of Artificial Sequence: Synthetic peptide
  Seed: SIGKVCRTLLAKSVF
SIHKVMRRLLHKSVF

SEQ ID NO: 265671 - protein, 15 aa, Artificial Sequence
  Description of Artificial Sequence: Synthetic peptide
  Seed: SIGKVCRTLLAKSVF
SIHKVMRRLLIKSVF

SEQ ID NO: 265672 - protein, 15 aa, Artificial Sequence
  Description of Artificial Sequence: Synthetic peptide
  Seed: SIGKVCRTLLAKSVF
SIHKVMRRLLLKSVF

SEQ ID NO: 265673 - protein, 15 aa, Artificial Sequence
  Description of Artificial Sequence: Synthetic peptide
  Seed: SIGKVCRTLLAKSVF
SIHKVMRRLLMKSVF

SEQ ID NO: 265674 - protein, 15 aa, Artificial Sequence
  Description of Artificial Sequence: Synthetic peptide
  Seed: SIGKVCRTLLAKSVF
SIHKVMRRLLNKSVF

SEQ ID NO: 265675 - protein, 15 aa, Artificial Sequence
  Description of Artificial Sequence: Synthetic peptide
  Seed: SIGKVCRTLLAKSVF
SIHKVMRRLLPKSVF

SEQ ID NO: 265676 - protein, 15 aa, Artificial Sequence
  Description of Artificial Sequence: Synthetic peptide
  Seed: SIGKVCRTLLAKSVF
SIHKVMRRLLQKSVF

SEQ ID NO: 265677 - protein, 15 aa, Artificial Sequence
  Description of Artificial Sequence: Synthetic peptide
  Seed: SIGKVCRTLLAKSVF
SIHKVMRRLLSKSVF

SEQ ID NO: 265678 - protein, 15 aa, Artificial Sequence
  Description of Artificial Sequence: Synthetic peptide
  Seed: SIGKVCRTLLAKSVF
SIHKVMRRLLTKSVF

SEQ ID NO: 265679 - protein, 15 aa, Artificial Sequence
  Description of Artificial Sequence: Synthetic peptide
  Seed: SIGKVCRTLLAKSVF
SIHKVMRRLLVKSVF

SEQ ID NO: 265680 - protein, 15 aa, Artificial Sequence
  Description of Artificial Sequence: Synthetic peptide
  Seed: SIGKVCRTLLAKSVF
SIHKVMRRLLYKSVF

SEQ ID NO: 265681 - protein, 15 aa, Artificial Sequence
  Description of Artificial Sequence: Synthetic peptide
  Seed: SIGKVCRTLLAKSVF
SIHKVMRSLLGKSVF

SEQ ID NO: 265682 - protein, 15 aa, Artificial Sequence
  Description of Artificial Sequence: Synthetic peptide
  Seed: SIGKVCRTLLAKSVF
SIHKVMRTLLAKSVF

SEQ ID NO: 265683 - protein, 15 aa, Artificial Sequence
  Description of Artificial Sequence: Synthetic peptide
  Seed: SIGKVCRTLLAKSVF
SIHKVMRTLLGKSVF

SEQ ID NO: 265684 - protein, 15 aa, Artificial Sequence
  Description of Artificial Sequence: Synthetic peptide
  Seed: SIGKVCRTLLAKSVF
SIHKVMRTLLQKSVF

SEQ ID NO: 265685 - protein, 15 aa, Artificial Sequence
  Description of Artificial Sequence: Synthetic peptide
  Seed: SIGKVCRTLLAKSVF
SIHKVMRTLLSKSVF

SEQ ID NO: 265686 - protein, 15 aa, Artificial Sequence
  Description of Artificial Sequence: Synthetic peptide
  Seed: SIGKVCRTLLAKSVF
SIHKVQRKLLAKSVF

SEQ ID NO: 265687 - protein, 15 aa, Artificial Sequence
  Description of Artificial Sequence: Synthetic peptide
  Seed: SIGKVCRTLLAKSVF
SIHKVQRKLLGKSVF

SEQ ID NO: 265688 - protein, 15 aa, Artificial Sequence
  Description of Artificial Sequence: Synthetic peptide
  Seed: SIGKVCRTLLAKSVF
SIHKVQRRLLAKSVF

SEQ ID NO: 265689 - protein, 15 aa, Artificial Sequence
  Description of Artificial Sequence: Synthetic peptide
  Seed: SIGKVCRTLLAKSVF
SIHKVQRRLLGKSVF

SEQ ID NO: 265690 - protein, 15 aa, Artificial Sequence
  Description of Artificial Sequence: Synthetic peptide
  Seed: SIGKVCRTLLAKSVF
SIHKVQRRLLSKSVF

SEQ ID NO: 265691 - protein, 15 aa, Artificial Sequence
  Description of Artificial Sequence: Synthetic peptide
  Seed: SIGKVCRTLLAKSVF
SIHKVSRRLLSKSVF

SEQ ID NO: 265692 - protein, 15 aa, Artificial Sequence
  Description of Artificial Sequence: Synthetic peptide
  Seed: SIGKVCRTLLAKSVF
SIHKVTRRLLAKSVF

SEQ ID NO: 265693 - protein, 15 aa, Artificial Sequence
  Description of Artificial Sequence: Synthetic peptide
  Seed: SIGKVCRTLLAKSVF
SIHKVTRRLLSKSVF

SEQ ID NO: 265694 - protein, 15 aa, Artificial Sequence
  Description of Artificial Sequence: Synthetic peptide
  Seed: SIGKVCRTLLAKSVF
SIHKVVRKLLAKSVF

SEQ ID NO: 265695 - protein, 15 aa, Artificial Sequence
  Description of Artificial Sequence: Synthetic peptide
  Seed: SIGKVCRTLLAKSVF
SIHKVVRKLLCKSVF

SEQ ID NO: 265696 - protein, 15 aa, Artificial Sequence
  Description of Artificial Sequence: Synthetic peptide
  Seed: SIGKVCRTLLAKSVF
SIHKVVRKLLGKSVF

SEQ ID NO: 265697 - protein, 15 aa, Artificial Sequence
  Description of Artificial Sequence: Synthetic peptide
  Seed: SIGKVCRTLLAKSVF
SIHKVVRKLLQKSVF

SEQ ID NO: 265698 - protein, 15 aa, Artificial Sequence
  Description of Artificial Sequence: Synthetic peptide
  Seed: SIGKVCRTLLAKSVF
SIHKVVRKLLSKSVF

SEQ ID NO: 265699 - protein, 15 aa, Artificial Sequence
  Description of Artificial Sequence: Synthetic peptide
  Seed: SIGKVCRTLLAKSVF
SIHKVVRRLLAKSVF

SEQ ID NO: 265700 - protein, 15 aa, Artificial Sequence
  Description of Artificial Sequence: Synthetic peptide
  Seed: SIGKVCRTLLAKSVF
SIHKVVRRLLGKSVF

SEQ ID NO: 265701 - protein, 15 aa, Artificial Sequence
  Description of Artificial Sequence: Synthetic peptide
  Seed: SIGKVCRTLLAKSVF
SIHKVVRRLLHKSVF

SEQ ID NO: 265702 - protein, 15 aa, Artificial Sequence
  Description of Artificial Sequence: Synthetic peptide
  Seed: SIGKVCRTLLAKSVF
SIHKVVRRLLQKSVF

SEQ ID NO: 265703 - protein, 15 aa, Artificial Sequence
  Description of Artificial Sequence: Synthetic peptide
  Seed: SIGKVCRTLLAKSVF
SIHKVVRRLLSKSVF

SEQ ID NO: 265704 - protein, 15 aa, Artificial Sequence
  Description of Artificial Sequence: Synthetic peptide
  Seed: SIGKVCRTLLAKSVF
SIHKVVRRLLTKSVF

SEQ ID NO: 265705 - protein, 15 aa, Artificial Sequence
  Description of Artificial Sequence: Synthetic peptide
  Seed: SIGKVCRTLLAKSVF
SIHKVWRKLLAKSVF

SEQ ID NO: 265706 - protein, 15 aa, Artificial Sequence
  Description of Artificial Sequence: Synthetic peptide
  Seed: SIGKVCRTLLAKSVF
SIHKVWRKLLGKSVF

SEQ ID NO: 265707 - protein, 15 aa, Artificial Sequence
  Description of Artificial Sequence: Synthetic peptide
  Seed: SIGKVCRTLLAKSVF
SIHKVWRKLLQKSVF

SEQ ID NO: 265708 - protein, 15 aa, Artificial Sequence
  Description of Artificial Sequence: Synthetic peptide
  Seed: SIGKVCRTLLAKSVF
SIHKVWRKLLSKSVF

SEQ ID NO: 265709 - protein, 15 aa, Artificial Sequence
  Description of Artificial Sequence: Synthetic peptide
  Seed: SIGKVCRTLLAKSVF
SIHKVWRRLLAKSVF

SEQ ID NO: 265710 - protein, 15 aa, Artificial Sequence
  Description of Artificial Sequence: Synthetic peptide
  Seed: SIGKVCRTLLAKSVF
SIHKVWRRLLGKSVF

SEQ ID NO: 265711 - protein, 15 aa, Artificial Sequence
  Description of Artificial Sequence: Synthetic peptide
  Seed: SIGKVCRTLLAKSVF
SIHKVYRKLLAKSVF

SEQ ID NO: 265712 - protein, 15 aa, Artificial Sequence
  Description of Artificial Sequence: Synthetic peptide
  Seed: SIGKVCRTLLAKSVF
SIHKVYRKLLGKSVF

SEQ ID NO: 265713 - protein, 15 aa, Artificial Sequence
  Description of Artificial Sequence: Synthetic peptide
  Seed: SIGKVCRTLLAKSVF
SIHKVYRRLLGKSVF

SEQ ID NO: 265714 - protein, 15 aa, Artificial Sequence
  Description of Artificial Sequence: Synthetic peptide
  Seed: SIGKVCRTLLAKSVF
SIIKVARALLAKSVF

SEQ ID NO: 265715 - protein, 15 aa, Artificial Sequence
  Description of Artificial Sequence: Synthetic peptide
  Seed: SIGKVCRTLLAKSVF
SIIKVARALLEKSVF

SEQ ID NO: 265716 - protein, 15 aa, Artificial Sequence
  Description of Artificial Sequence: Synthetic peptide
  Seed: SIGKVCRTLLAKSVF
SIIKVARALLGKSVF

SEQ ID NO: 265717 - protein, 15 aa, Artificial Sequence
  Description of Artificial Sequence: Synthetic peptide
  Seed: SIGKVCRTLLAKSVF
SIIKVARALLHKSVF

SEQ ID NO: 265718 - protein, 15 aa, Artificial Sequence
  Description of Artificial Sequence: Synthetic peptide
  Seed: SIGKVCRTLLAKSVF
SIIKVARALLKKSVF

SEQ ID NO: 265719 - protein, 15 aa, Artificial Sequence
  Description of Artificial Sequence: Synthetic peptide
  Seed: SIGKVCRTLLAKSVF
SIIKVARALLMKSVF

SEQ ID NO: 265720 - protein, 15 aa, Artificial Sequence
  Description of Artificial Sequence: Synthetic peptide
  Seed: SIGKVCRTLLAKSVF
SIIKVARALLNKSVF

SEQ ID NO: 265721 - protein, 15 aa, Artificial Sequence
  Description of Artificial Sequence: Synthetic peptide
  Seed: SIGKVCRTLLAKSVF
SIIKVARALLQKSVF

SEQ ID NO: 265722 - protein, 15 aa, Artificial Sequence
  Description of Artificial Sequence: Synthetic peptide
  Seed: SIGKVCRTLLAKSVF
SIIKVARALLRKSVF

SEQ ID NO: 265723 - protein, 15 aa, Artificial Sequence
  Description of Artificial Sequence: Synthetic peptide
  Seed: SIGKVCRTLLAKSVF
SIIKVARALLSKSVF

SEQ ID NO: 265724 - protein, 15 aa, Artificial Sequence
  Description of Artificial Sequence: Synthetic peptide
  Seed: SIGKVCRTLLAKSVF
SIIKVARALLTKSVF

SEQ ID NO: 265725 - protein, 15 aa, Artificial Sequence
  Description of Artificial Sequence: Synthetic peptide
  Seed: SIGKVCRTLLAKSVF
SIIKVARALLVKSVF

SEQ ID NO: 265726 - protein, 15 aa, Artificial Sequence
  Description of Artificial Sequence: Synthetic peptide
  Seed: SIGKVCRTLLAKSVF
SIIKVARALLYKSVF

SEQ ID NO: 265727 - protein, 15 aa, Artificial Sequence
  Description of Artificial Sequence: Synthetic peptide
  Seed: SIGKVCRTLLAKSVF
SIIKVARCLLRKSVF

SEQ ID NO: 265728 - protein, 15 aa, Artificial Sequence
  Description of Artificial Sequence: Synthetic peptide
  Seed: SIGKVCRTLLAKSVF
SIIKVARDLLAKSVF

SEQ ID NO: 265729 - protein, 15 aa, Artificial Sequence
  Description of Artificial Sequence: Synthetic peptide
  Seed: SIGKVCRTLLAKSVF
SIIKVARDLLGKSVF

SEQ ID NO: 265730 - protein, 15 aa, Artificial Sequence
  Description of Artificial Sequence: Synthetic peptide
  Seed: SIGKVCRTLLAKSVF
SIIKVARDLLSKSVF

SEQ ID NO: 265731 - protein, 15 aa, Artificial Sequence
  Description of Artificial Sequence: Synthetic peptide
  Seed: SIGKVCRTLLAKSVF
SIIKVARELLAKSVF

SEQ ID NO: 265732 - protein, 15 aa, Artificial Sequence
  Description of Artificial Sequence: Synthetic peptide
  Seed: SIGKVCRTLLAKSVF
SIIKVARELLKKSVF

SEQ ID NO: 265733 - protein, 15 aa, Artificial Sequence
  Description of Artificial Sequence: Synthetic peptide
  Seed: SIGKVCRTLLAKSVF
SIIKVARELLRKSVF

SEQ ID NO: 265734 - protein, 15 aa, Artificial Sequence
  Description of Artificial Sequence: Synthetic peptide
  Seed: SIGKVCRTLLAKSVF
SIIKVARELLSKSVF

SEQ ID NO: 265735 - protein, 15 aa, Artificial Sequence
  Description of Artificial Sequence: Synthetic peptide
  Seed: SIGKVCRTLLAKSVF
SIIKVARGLLAKSVF

SEQ ID NO: 265736 - protein, 15 aa, Artificial Sequence
  Description of Artificial Sequence: Synthetic peptide
  Seed: SIGKVCRTLLAKSVF
SIIKVARGLLGKSVF

SEQ ID NO: 265737 - protein, 15 aa, Artificial Sequence
  Description of Artificial Sequence: Synthetic peptide
  Seed: SIGKVCRTLLAKSVF
SIIKVARGLLHKSVF

SEQ ID NO: 265738 - protein, 15 aa, Artificial Sequence
  Description of Artificial Sequence: Synthetic peptide
  Seed: SIGKVCRTLLAKSVF
SIIKVARGLLQKSVF

SEQ ID NO: 265739 - protein, 15 aa, Artificial Sequence
  Description of Artificial Sequence: Synthetic peptide
  Seed: SIGKVCRTLLAKSVF
SIIKVARGLLRKSVF

SEQ ID NO: 265740 - protein, 15 aa, Artificial Sequence
  Description of Artificial Sequence: Synthetic peptide
  Seed: SIGKVCRTLLAKSVF
SIIKVARGLLSKSVF

SEQ ID NO: 265741 - protein, 15 aa, Artificial Sequence
  Description of Artificial Sequence: Synthetic peptide
  Seed: SIGKVCRTLLAKSVF
SIIKVARGLLVKSVF

SEQ ID NO: 265742 - protein, 15 aa, Artificial Sequence
  Description of Artificial Sequence: Synthetic peptide
  Seed: SIGKVCRTLLAKSVF
SIIKVARGLLYKSVF

SEQ ID NO: 265743 - protein, 15 aa, Artificial Sequence
  Description of Artificial Sequence: Synthetic peptide
  Seed: SIGKVCRTLLAKSVF
SIIKVARHLLAKSVF

SEQ ID NO: 265744 - protein, 15 aa, Artificial Sequence
  Description of Artificial Sequence: Synthetic peptide
  Seed: SIGKVCRTLLAKSVF
SIIKVARHLLCKSVF

SEQ ID NO: 265745 - protein, 15 aa, Artificial Sequence
  Description of Artificial Sequence: Synthetic peptide
  Seed: SIGKVCRTLLAKSVF
SIIKVARHLLDKSVF

SEQ ID NO: 265746 - protein, 15 aa, Artificial Sequence
  Description of Artificial Sequence: Synthetic peptide
  Seed: SIGKVCRTLLAKSVF
SIIKVARHLLEKSVF

SEQ ID NO: 265747 - protein, 15 aa, Artificial Sequence
  Description of Artificial Sequence: Synthetic peptide
  Seed: SIGKVCRTLLAKSVF
SIIKVARHLLFKSVF

SEQ ID NO: 265748 - protein, 15 aa, Artificial Sequence
  Description of Artificial Sequence: Synthetic peptide
  Seed: SIGKVCRTLLAKSVF
SIIKVARHLLGKSVF

SEQ ID NO: 265749 - protein, 15 aa, Artificial Sequence
  Description of Artificial Sequence: Synthetic peptide
  Seed: SIGKVCRTLLAKSVF
SIIKVARHLLHKSVF

SEQ ID NO: 265750 - protein, 15 aa, Artificial Sequence
  Description of Artificial Sequence: Synthetic peptide
  Seed: SIGKVCRTLLAKSVF
SIIKVARHLLIKSVF

SEQ ID NO: 265751 - protein, 15 aa, Artificial Sequence
  Description of Artificial Sequence: Synthetic peptide
  Seed: SIGKVCRTLLAKSVF
SIIKVARHLLKKSVF

SEQ ID NO: 265752 - protein, 15 aa, Artificial Sequence
  Description of Artificial Sequence: Synthetic peptide
  Seed: SIGKVCRTLLAKSVF
SIIKVARHLLLKSVF

SEQ ID NO: 265753 - protein, 15 aa, Artificial Sequence
  Description of Artificial Sequence: Synthetic peptide
  Seed: SIGKVCRTLLAKSVF
SIIKVARHLLMKSVF

SEQ ID NO: 265754 - protein, 15 aa, Artificial Sequence
  Description of Artificial Sequence: Synthetic peptide
  Seed: SIGKVCRTLLAKSVF
SIIKVARHLLNKSVF

SEQ ID NO: 265755 - protein, 15 aa, Artificial Sequence
  Description of Artificial Sequence: Synthetic peptide
  Seed: SIGKVCRTLLAKSVF
SIIKVARHLLPKSVF

SEQ ID NO: 265756 - protein, 15 aa, Artificial Sequence
  Description of Artificial Sequence: Synthetic peptide
  Seed: SIGKVCRTLLAKSVF
SIIKVARHLLQKSVF

SEQ ID NO: 265757 - protein, 15 aa, Artificial Sequence
  Description of Artificial Sequence: Synthetic peptide
  Seed: SIGKVCRTLLAKSVF
SIIKVARHLLRKSVF

SEQ ID NO: 265758 - protein, 15 aa, Artificial Sequence
  Description of Artificial Sequence: Synthetic peptide
  Seed: SIGKVCRTLLAKSVF
SIIKVARHLLSKSVF

SEQ ID NO: 265759 - protein, 15 aa, Artificial Sequence
  Description of Artificial Sequence: Synthetic peptide
  Seed: SIGKVCRTLLAKSVF
SIIKVARHLLTKSVF

SEQ ID NO: 265760 - protein, 15 aa, Artificial Sequence
  Description of Artificial Sequence: Synthetic peptide
  Seed: SIGKVCRTLLAKSVF
SIIKVARHLLVKSVF

SEQ ID NO: 265761 - protein, 15 aa, Artificial Sequence
  Description of Artificial Sequence: Synthetic peptide
  Seed: SIGKVCRTLLAKSVF
SIIKVARHLLYKSVF

SEQ ID NO: 265762 - protein, 15 aa, Artificial Sequence
  Description of Artificial Sequence: Synthetic peptide
  Seed: SIGKVCRTLLAKSVF
SIIKVARILLGKSVF

SEQ ID NO: 265763 - protein, 15 aa, Artificial Sequence
  Description of Artificial Sequence: Synthetic peptide
  Seed: SIGKVCRTLLAKSVF
SIIKVARILLHKSVF

SEQ ID NO: 265764 - protein, 15 aa, Artificial Sequence
  Description of Artificial Sequence: Synthetic peptide
  Seed: SIGKVCRTLLAKSVF
SIIKVARILLKKSVF

SEQ ID NO: 265765 - protein, 15 aa, Artificial Sequence
  Description of Artificial Sequence: Synthetic peptide
  Seed: SIGKVCRTLLAKSVF
SIIKVARILLQKSVF

SEQ ID NO: 265766 - protein, 15 aa, Artificial Sequence
  Description of Artificial Sequence: Synthetic peptide
  Seed: SIGKVCRTLLAKSVF
SIIKVARILLRKSVF

SEQ ID NO: 265767 - protein, 15 aa, Artificial Sequence
  Description of Artificial Sequence: Synthetic peptide
  Seed: SIGKVCRTLLAKSVF
SIIKVARILLSKSVF

SEQ ID NO: 265768 - protein, 15 aa, Artificial Sequence
  Description of Artificial Sequence: Synthetic peptide
  Seed: SIGKVCRTLLAKSVF
SIIKVARKLLAKSVF

SEQ ID NO: 265769 - protein, 15 aa, Artificial Sequence
  Description of Artificial Sequence: Synthetic peptide
  Seed: SIGKVCRTLLAKSVF
SIIKVARKLLCKSVF

SEQ ID NO: 265770 - protein, 15 aa, Artificial Sequence
  Description of Artificial Sequence: Synthetic peptide
  Seed: SIGKVCRTLLAKSVF
SIIKVARKLLDKSVF

SEQ ID NO: 265771 - protein, 15 aa, Artificial Sequence
  Description of Artificial Sequence: Synthetic peptide
  Seed: SIGKVCRTLLAKSVF
SIIKVARKLLEKSVF

SEQ ID NO: 265772 - protein, 15 aa, Artificial Sequence
  Description of Artificial Sequence: Synthetic peptide
  Seed: SIGKVCRTLLAKSVF
SIIKVARKLLFKSVF

SEQ ID NO: 265773 - protein, 15 aa, Artificial Sequence
  Description of Artificial Sequence: Synthetic peptide
  Seed: SIGKVCRTLLAKSVF
SIIKVARKLLGKSVF

SEQ ID NO: 265774 - protein, 15 aa, Artificial Sequence
  Description of Artificial Sequence: Synthetic peptide
  Seed: SIGKVCRTLLAKSVF
SIIKVARKLLHKSVF

SEQ ID NO: 265775 - protein, 15 aa, Artificial Sequence
  Description of Artificial Sequence: Synthetic peptide
  Seed: SIGKVCRTLLAKSVF
SIIKVARKLLIKSVF

SEQ ID NO: 265776 - protein, 15 aa, Artificial Sequence
  Description of Artificial Sequence: Synthetic peptide
  Seed: SIGKVCRTLLAKSVF
SIIKVARKLLKKSVF

SEQ ID NO: 265777 - protein, 15 aa, Artificial Sequence
  Description of Artificial Sequence: Synthetic peptide
  Seed: SIGKVCRTLLAKSVF
SIIKVARKLLLKSVF

SEQ ID NO: 265778 - protein, 15 aa, Artificial Sequence
  Description of Artificial Sequence: Synthetic peptide
  Seed: SIGKVCRTLLAKSVF
SIIKVARKLLMKSVF

SEQ ID NO: 265779 - protein, 15 aa, Artificial Sequence
  Description of Artificial Sequence: Synthetic peptide
  Seed: SIGKVCRTLLAKSVF
SIIKVARKLLNKSVF

SEQ ID NO: 265780 - protein, 15 aa, Artificial Sequence
  Description of Artificial Sequence: Synthetic peptide
  Seed: SIGKVCRTLLAKSVF
SIIKVARKLLPKSVF

SEQ ID NO: 265781 - protein, 15 aa, Artificial Sequence
  Description of Artificial Sequence: Synthetic peptide
  Seed: SIGKVCRTLLAKSVF
SIIKVARKLLQKSVF

SEQ ID NO: 265782 - protein, 15 aa, Artificial Sequence
  Description of Artificial Sequence: Synthetic peptide
  Seed: SIGKVCRTLLAKSVF
SIIKVARKLLRKSVF

SEQ ID NO: 265783 - protein, 15 aa, Artificial Sequence
  Description of Artificial Sequence: Synthetic peptide
  Seed: SIGKVCRTLLAKSVF
SIIKVARKLLSKSVF

SEQ ID NO: 265784 - protein, 15 aa, Artificial Sequence
  Description of Artificial Sequence: Synthetic peptide
  Seed: SIGKVCRTLLAKSVF
SIIKVARKLLTKSVF

SEQ ID NO: 265785 - protein, 15 aa, Artificial Sequence
  Description of Artificial Sequence: Synthetic peptide
  Seed: SIGKVCRTLLAKSVF
SIIKVARKLLVKSVF

SEQ ID NO: 265786 - protein, 15 aa, Artificial Sequence
  Description of Artificial Sequence: Synthetic peptide
  Seed: SIGKVCRTLLAKSVF
SIIKVARKLLWKSVF

SEQ ID NO: 265787 - protein, 15 aa, Artificial Sequence
  Description of Artificial Sequence: Synthetic peptide
  Seed: SIGKVCRTLLAKSVF
SIIKVARKLLYKSVF

SEQ ID NO: 265788 - protein, 15 aa, Artificial Sequence
  Description of Artificial Sequence: Synthetic peptide
  Seed: SIGKVCRTLLAKSVF
SIIKVARLLLRKSVF

SEQ ID NO: 265789 - protein, 15 aa, Artificial Sequence
  Description of Artificial Sequence: Synthetic peptide
  Seed: SIGKVCRTLLAKSVF
SIIKVARMLLRKSVF

SEQ ID NO: 265790 - protein, 15 aa, Artificial Sequence
  Description of Artificial Sequence: Synthetic peptide
  Seed: SIGKVCRTLLAKSVF
SIIKVARNLLAKSVF

SEQ ID NO: 265791 - protein, 15 aa, Artificial Sequence
  Description of Artificial Sequence: Synthetic peptide
  Seed: SIGKVCRTLLAKSVF
SIIKVARNLLDKSVF

SEQ ID NO: 265792 - protein, 15 aa, Artificial Sequence
  Description of Artificial Sequence: Synthetic peptide
  Seed: SIGKVCRTLLAKSVF
SIIKVARNLLEKSVF

SEQ ID NO: 265793 - protein, 15 aa, Artificial Sequence
  Description of Artificial Sequence: Synthetic peptide
  Seed: SIGKVCRTLLAKSVF
SIIKVARNLLGKSVF

SEQ ID NO: 265794 - protein, 15 aa, Artificial Sequence
  Description of Artificial Sequence: Synthetic peptide
  Seed: SIGKVCRTLLAKSVF
SIIKVARNLLHKSVF

SEQ ID NO: 265795 - protein, 15 aa, Artificial Sequence
  Description of Artificial Sequence: Synthetic peptide
  Seed: SIGKVCRTLLAKSVF
SIIKVARNLLIKSVF

SEQ ID NO: 265796 - protein, 15 aa, Artificial Sequence
  Description of Artificial Sequence: Synthetic peptide
  Seed: SIGKVCRTLLAKSVF
SIIKVARNLLKKSVF

SEQ ID NO: 265797 - protein, 15 aa, Artificial Sequence
  Description of Artificial Sequence: Synthetic peptide
  Seed: SIGKVCRTLLAKSVF
SIIKVARNLLLKSVF

SEQ ID NO: 265798 - protein, 15 aa, Artificial Sequence
  Description of Artificial Sequence: Synthetic peptide
  Seed: SIGKVCRTLLAKSVF
SIIKVARNLLMKSVF

SEQ ID NO: 265799 - protein, 15 aa, Artificial Sequence
  Description of Artificial Sequence: Synthetic peptide
  Seed: SIGKVCRTLLAKSVF
SIIKVARNLLNKSVF

SEQ ID NO: 265800 - protein, 15 aa, Artificial Sequence
  Description of Artificial Sequence: Synthetic peptide
  Seed: SIGKVCRTLLAKSVF
SIIKVARNLLPKSVF

SEQ ID NO: 265801 - protein, 15 aa, Artificial Sequence
  Description of Artificial Sequence: Synthetic peptide
  Seed: SIGKVCRTLLAKSVF
SIIKVARNLLQKSVF

SEQ ID NO: 265802 - protein, 15 aa, Artificial Sequence
  Description of Artificial Sequence: Synthetic peptide
  Seed: SIGKVCRTLLAKSVF
SIIKVARNLLRKSVF

SEQ ID NO: 265803 - protein, 15 aa, Artificial Sequence
  Description of Artificial Sequence: Synthetic peptide
  Seed: SIGKVCRTLLAKSVF
SIIKVARNLLSKSVF

SEQ ID NO: 265804 - protein, 15 aa, Artificial Sequence
  Description of Artificial Sequence: Synthetic peptide
  Seed: SIGKVCRTLLAKSVF
SIIKVARNLLTKSVF

SEQ ID NO: 265805 - protein, 15 aa, Artificial Sequence
  Description of Artificial Sequence: Synthetic peptide
  Seed: SIGKVCRTLLAKSVF
SIIKVARNLLVKSVF

SEQ ID NO: 265806 - protein, 15 aa, Artificial Sequence
  Description of Artificial Sequence: Synthetic peptide
  Seed: SIGKVCRTLLAKSVF
SIIKVARNLLYKSVF

SEQ ID NO: 265807 - protein, 15 aa, Artificial Sequence
  Description of Artificial Sequence: Synthetic peptide
  Seed: SIGKVCRTLLAKSVF
SIIKVARPLLAKSVF

SEQ ID NO: 265808 - protein, 15 aa, Artificial Sequence
  Description of Artificial Sequence: Synthetic peptide
  Seed: SIGKVCRTLLAKSVF
SIIKVARPLLGKSVF

SEQ ID NO: 265809 - protein, 15 aa, Artificial Sequence
  Description of Artificial Sequence: Synthetic peptide
  Seed: SIGKVCRTLLAKSVF
SIIKVARPLLHKSVF

SEQ ID NO: 265810 - protein, 15 aa, Artificial Sequence
  Description of Artificial Sequence: Synthetic peptide
  Seed: SIGKVCRTLLAKSVF
SIIKVARPLLIKSVF

SEQ ID NO: 265811 - protein, 15 aa, Artificial Sequence
  Description of Artificial Sequence: Synthetic peptide
  Seed: SIGKVCRTLLAKSVF
SIIKVARPLLKKSVF

SEQ ID NO: 265812 - protein, 15 aa, Artificial Sequence
  Description of Artificial Sequence: Synthetic peptide
  Seed: SIGKVCRTLLAKSVF
SIIKVARPLLLKSVF

SEQ ID NO: 265813 - protein, 15 aa, Artificial Sequence
  Description of Artificial Sequence: Synthetic peptide
  Seed: SIGKVCRTLLAKSVF
SIIKVARPLLMKSVF

SEQ ID NO: 265814 - protein, 15 aa, Artificial Sequence
  Description of Artificial Sequence: Synthetic peptide
  Seed: SIGKVCRTLLAKSVF
SIIKVARPLLNKSVF

SEQ ID NO: 265815 - protein, 15 aa, Artificial Sequence
  Description of Artificial Sequence: Synthetic peptide
  Seed: SIGKVCRTLLAKSVF
SIIKVARPLLQKSVF

SEQ ID NO: 265816 - protein, 15 aa, Artificial Sequence
  Description of Artificial Sequence: Synthetic peptide
  Seed: SIGKVCRTLLAKSVF
SIIKVARPLLRKSVF

SEQ ID NO: 265817 - protein, 15 aa, Artificial Sequence
  Description of Artificial Sequence: Synthetic peptide
  Seed: SIGKVCRTLLAKSVF
SIIKVARPLLSKSVF

SEQ ID NO: 265818 - protein, 15 aa, Artificial Sequence
  Description of Artificial Sequence: Synthetic peptide
  Seed: SIGKVCRTLLAKSVF
SIIKVARPLLTKSVF

SEQ ID NO: 265819 - protein, 15 aa, Artificial Sequence
  Description of Artificial Sequence: Synthetic peptide
  Seed: SIGKVCRTLLAKSVF
SIIKVARPLLVKSVF

SEQ ID NO: 265820 - protein, 15 aa, Artificial Sequence
  Description of Artificial Sequence: Synthetic peptide
  Seed: SIGKVCRTLLAKSVF
SIIKVARPLLYKSVF

SEQ ID NO: 265821 - protein, 15 aa, Artificial Sequence
  Description of Artificial Sequence: Synthetic peptide
  Seed: SIGKVCRTLLAKSVF
SIIKVARQLLAKSVF

SEQ ID NO: 265822 - protein, 15 aa, Artificial Sequence
  Description of Artificial Sequence: Synthetic peptide
  Seed: SIGKVCRTLLAKSVF
SIIKVARQLLGKSVF

SEQ ID NO: 265823 - protein, 15 aa, Artificial Sequence
  Description of Artificial Sequence: Synthetic peptide
  Seed: SIGKVCRTLLAKSVF
SIIKVARQLLHKSVF

SEQ ID NO: 265824 - protein, 15 aa, Artificial Sequence
  Description of Artificial Sequence: Synthetic peptide
  Seed: SIGKVCRTLLAKSVF
SIIKVARQLLKKSVF

SEQ ID NO: 265825 - protein, 15 aa, Artificial Sequence
  Description of Artificial Sequence: Synthetic peptide
  Seed: SIGKVCRTLLAKSVF
SIIKVARQLLMKSVF

SEQ ID NO: 265826 - protein, 15 aa, Artificial Sequence
  Description of Artificial Sequence: Synthetic peptide
  Seed: SIGKVCRTLLAKSVF
SIIKVARQLLNKSVF

SEQ ID NO: 265827 - protein, 15 aa, Artificial Sequence
  Description of Artificial Sequence: Synthetic peptide
  Seed: SIGKVCRTLLAKSVF
SIIKVARQLLQKSVF

SEQ ID NO: 265828 - protein, 15 aa, Artificial Sequence
  Description of Artificial Sequence: Synthetic peptide
  Seed: SIGKVCRTLLAKSVF
SIIKVARQLLRKSVF

SEQ ID NO: 265829 - protein, 15 aa, Artificial Sequence
  Description of Artificial Sequence: Synthetic peptide
  Seed: SIGKVCRTLLAKSVF
SIIKVARQLLSKSVF

SEQ ID NO: 265830 - protein, 15 aa, Artificial Sequence
  Description of Artificial Sequence: Synthetic peptide
  Seed: SIGKVCRTLLAKSVF
SIIKVARQLLTKSVF

SEQ ID NO: 265831 - protein, 15 aa, Artificial Sequence
  Description of Artificial Sequence: Synthetic peptide
  Seed: SIGKVCRTLLAKSVF
SIIKVARQLLYKSVF

SEQ ID NO: 265832 - protein, 15 aa, Artificial Sequence
  Description of Artificial Sequence: Synthetic peptide
  Seed: SIGKVCRTLLAKSVF
SIIKVARRLLAKSVF

SEQ ID NO: 265833 - protein, 15 aa, Artificial Sequence
  Description of Artificial Sequence: Synthetic peptide
  Seed: SIGKVCRTLLAKSVF
SIIKVARRLLCKSVF

SEQ ID NO: 265834 - protein, 15 aa, Artificial Sequence
  Description of Artificial Sequence: Synthetic peptide
  Seed: SIGKVCRTLLAKSVF
SIIKVARRLLDKSVF

SEQ ID NO: 265835 - protein, 15 aa, Artificial Sequence
  Description of Artificial Sequence: Synthetic peptide
  Seed: SIGKVCRTLLAKSVF
SIIKVARRLLEKSVF

SEQ ID NO: 265836 - protein, 15 aa, Artificial Sequence
  Description of Artificial Sequence: Synthetic peptide
  Seed: SIGKVCRTLLAKSVF
SIIKVARRLLFKSVF

SEQ ID NO: 265837 - protein, 15 aa, Artificial Sequence
  Description of Artificial Sequence: Synthetic peptide
  Seed: SIGKVCRTLLAKSVF
SIIKVARRLLGKSVF

SEQ ID NO: 265838 - protein, 15 aa, Artificial Sequence
  Description of Artificial Sequence: Synthetic peptide
  Seed: SIGKVCRTLLAKSVF
SIIKVARRLLHKSVF

SEQ ID NO: 265839 - protein, 15 aa, Artificial Sequence
  Description of Artificial Sequence: Synthetic peptide
  Seed: SIGKVCRTLLAKSVF
SIIKVARRLLIKSVF

SEQ ID NO: 265840 - protein, 15 aa, Artificial Sequence
  Description of Artificial Sequence: Synthetic peptide
  Seed: SIGKVCRTLLAKSVF
SIIKVARRLLKKSVF

SEQ ID NO: 265841 - protein, 15 aa, Artificial Sequence
  Description of Artificial Sequence: Synthetic peptide
  Seed: SIGKVCRTLLAKSVF
SIIKVARRLLLKSVF

SEQ ID NO: 265842 - protein, 15 aa, Artificial Sequence
  Description of Artificial Sequence: Synthetic peptide
  Seed: SIGKVCRTLLAKSVF
SIIKVARRLLMKSVF

SEQ ID NO: 265843 - protein, 15 aa, Artificial Sequence
  Description of Artificial Sequence: Synthetic peptide
  Seed: SIGKVCRTLLAKSVF
SIIKVARRLLNKSVF

SEQ ID NO: 265844 - protein, 15 aa, Artificial Sequence
  Description of Artificial Sequence: Synthetic peptide
  Seed: SIGKVCRTLLAKSVF
SIIKVARRLLPKSVF

SEQ ID NO: 265845 - protein, 15 aa, Artificial Sequence
  Description of Artificial Sequence: Synthetic peptide
  Seed: SIGKVCRTLLAKSVF
SIIKVARRLLQKSVF

SEQ ID NO: 265846 - protein, 15 aa, Artificial Sequence
  Description of Artificial Sequence: Synthetic peptide
  Seed: SIGKVCRTLLAKSVF
SIIKVARRLLRKSVF

SEQ ID NO: 265847 - protein, 15 aa, Artificial Sequence
  Description of Artificial Sequence: Synthetic peptide
  Seed: SIGKVCRTLLAKSVF
SIIKVARRLLSKSVF

SEQ ID NO: 265848 - protein, 15 aa, Artificial Sequence
  Description of Artificial Sequence: Synthetic peptide
  Seed: SIGKVCRTLLAKSVF
SIIKVARRLLTKSVF

SEQ ID NO: 265849 - protein, 15 aa, Artificial Sequence
  Description of Artificial Sequence: Synthetic peptide
  Seed: SIGKVCRTLLAKSVF
SIIKVARRLLVKSVF

SEQ ID NO: 265850 - protein, 15 aa, Artificial Sequence
  Description of Artificial Sequence: Synthetic peptide
  Seed: SIGKVCRTLLAKSVF
SIIKVARRLLWKSVF

SEQ ID NO: 265851 - protein, 15 aa, Artificial Sequence
  Description of Artificial Sequence: Synthetic peptide
  Seed: SIGKVCRTLLAKSVF
SIIKVARRLLYKSVF

SEQ ID NO: 265852 - protein, 15 aa, Artificial Sequence
  Description of Artificial Sequence: Synthetic peptide
  Seed: SIGKVCRTLLAKSVF
SIIKVARSLLAKSVF

SEQ ID NO: 265853 - protein, 15 aa, Artificial Sequence
  Description of Artificial Sequence: Synthetic peptide
  Seed: SIGKVCRTLLAKSVF
SIIKVARSLLDKSVF

SEQ ID NO: 265854 - protein, 15 aa, Artificial Sequence
  Description of Artificial Sequence: Synthetic peptide
  Seed: SIGKVCRTLLAKSVF
SIIKVARSLLEKSVF

SEQ ID NO: 265855 - protein, 15 aa, Artificial Sequence
  Description of Artificial Sequence: Synthetic peptide
  Seed: SIGKVCRTLLAKSVF
SIIKVARSLLGKSVF

SEQ ID NO: 265856 - protein, 15 aa, Artificial Sequence
  Description of Artificial Sequence: Synthetic peptide
  Seed: SIGKVCRTLLAKSVF
SIIKVARSLLHKSVF

SEQ ID NO: 265857 - protein, 15 aa, Artificial Sequence
  Description of Artificial Sequence: Synthetic peptide
  Seed: SIGKVCRTLLAKSVF
SIIKVARSLLIKSVF

SEQ ID NO: 265858 - protein, 15 aa, Artificial Sequence
  Description of Artificial Sequence: Synthetic peptide
  Seed: SIGKVCRTLLAKSVF
SIIKVARSLLKKSVF

SEQ ID NO: 265859 - protein, 15 aa, Artificial Sequence
  Description of Artificial Sequence: Synthetic peptide
  Seed: SIGKVCRTLLAKSVF
SIIKVARSLLLKSVF

SEQ ID NO: 265860 - protein, 15 aa, Artificial Sequence
  Description of Artificial Sequence: Synthetic peptide
  Seed: SIGKVCRTLLAKSVF
SIIKVARSLLMKSVF

SEQ ID NO: 265861 - protein, 15 aa, Artificial Sequence
  Description of Artificial Sequence: Synthetic peptide
  Seed: SIGKVCRTLLAKSVF
SIIKVARSLLNKSVF

SEQ ID NO: 265862 - protein, 15 aa, Artificial Sequence
  Description of Artificial Sequence: Synthetic peptide
  Seed: SIGKVCRTLLAKSVF
SIIKVARSLLPKSVF

SEQ ID NO: 265863 - protein, 15 aa, Artificial Sequence
  Description of Artificial Sequence: Synthetic peptide
  Seed: SIGKVCRTLLAKSVF
SIIKVARSLLQKSVF

SEQ ID NO: 265864 - protein, 15 aa, Artificial Sequence
  Description of Artificial Sequence: Synthetic peptide
  Seed: SIGKVCRTLLAKSVF
SIIKVARSLLRKSVF

SEQ ID NO: 265865 - protein, 15 aa, Artificial Sequence
  Description of Artificial Sequence: Synthetic peptide
  Seed: SIGKVCRTLLAKSVF
SIIKVARSLLSKSVF

SEQ ID NO: 265866 - protein, 15 aa, Artificial Sequence
  Description of Artificial Sequence: Synthetic peptide
  Seed: SIGKVCRTLLAKSVF
SIIKVARSLLTKSVF

SEQ ID NO: 265867 - protein, 15 aa, Artificial Sequence
  Description of Artificial Sequence: Synthetic peptide
  Seed: SIGKVCRTLLAKSVF
SIIKVARSLLVKSVF

SEQ ID NO: 265868 - protein, 15 aa, Artificial Sequence
  Description of Artificial Sequence: Synthetic peptide
  Seed: SIGKVCRTLLAKSVF
SIIKVARSLLYKSVF

SEQ ID NO: 265869 - protein, 15 aa, Artificial Sequence
  Description of Artificial Sequence: Synthetic peptide
  Seed: SIGKVCRTLLAKSVF
SIIKVARTLLAKSVF

SEQ ID NO: 265870 - protein, 15 aa, Artificial Sequence
  Description of Artificial Sequence: Synthetic peptide
  Seed: SIGKVCRTLLAKSVF
SIIKVARTLLDKSVF

SEQ ID NO: 265871 - protein, 15 aa, Artificial Sequence
  Description of Artificial Sequence: Synthetic peptide
  Seed: SIGKVCRTLLAKSVF
SIIKVARTLLEKSVF

SEQ ID NO: 265872 - protein, 15 aa, Artificial Sequence
  Description of Artificial Sequence: Synthetic peptide
  Seed: SIGKVCRTLLAKSVF
SIIKVARTLLGKSVF

SEQ ID NO: 265873 - protein, 15 aa, Artificial Sequence
  Description of Artificial Sequence: Synthetic peptide
  Seed: SIGKVCRTLLAKSVF
SIIKVARTLLHKSVF

SEQ ID NO: 265874 - protein, 15 aa, Artificial Sequence
  Description of Artificial Sequence: Synthetic peptide
  Seed: SIGKVCRTLLAKSVF
SIIKVARTLLIKSVF

SEQ ID NO: 265875 - protein, 15 aa, Artificial Sequence
  Description of Artificial Sequence: Synthetic peptide
  Seed: SIGKVCRTLLAKSVF
SIIKVARTLLKKSVF

SEQ ID NO: 265876 - protein, 15 aa, Artificial Sequence
  Description of Artificial Sequence: Synthetic peptide
  Seed: SIGKVCRTLLAKSVF
SIIKVARTLLLKSVF

SEQ ID NO: 265877 - protein, 15 aa, Artificial Sequence
  Description of Artificial Sequence: Synthetic peptide
  Seed: SIGKVCRTLLAKSVF
SIIKVARTLLMKSVF

SEQ ID NO: 265878 - protein, 15 aa, Artificial Sequence
  Description of Artificial Sequence: Synthetic peptide
  Seed: SIGKVCRTLLAKSVF
SIIKVARTLLNKSVF

SEQ ID NO: 265879 - protein, 15 aa, Artificial Sequence
  Description of Artificial Sequence: Synthetic peptide
  Seed: SIGKVCRTLLAKSVF
SIIKVARTLLPKSVF

SEQ ID NO: 265880 - protein, 15 aa, Artificial Sequence
  Description of Artificial Sequence: Synthetic peptide
  Seed: SIGKVCRTLLAKSVF
SIIKVARTLLQKSVF

SEQ ID NO: 265881 - protein, 15 aa, Artificial Sequence
  Description of Artificial Sequence: Synthetic peptide
  Seed: SIGKVCRTLLAKSVF
SIIKVARTLLRKSVF

SEQ ID NO: 265882 - protein, 15 aa, Artificial Sequence
  Description of Artificial Sequence: Synthetic peptide
  Seed: SIGKVCRTLLAKSVF
SIIKVARTLLSKSVF

SEQ ID NO: 265883 - protein, 15 aa, Artificial Sequence
  Description of Artificial Sequence: Synthetic peptide
  Seed: SIGKVCRTLLAKSVF
SIIKVARTLLTKSVF

SEQ ID NO: 265884 - protein, 15 aa, Artificial Sequence
  Description of Artificial Sequence: Synthetic peptide
  Seed: SIGKVCRTLLAKSVF
SIIKVARTLLVKSVF

SEQ ID NO: 265885 - protein, 15 aa, Artificial Sequence
  Description of Artificial Sequence: Synthetic peptide
  Seed: SIGKVCRTLLAKSVF
SIIKVARTLLYKSVF

SEQ ID NO: 265886 - protein, 15 aa, Artificial Sequence
  Description of Artificial Sequence: Synthetic peptide
  Seed: SIGKVCRTLLAKSVF
SIIKVARVLLAKSVF

SEQ ID NO: 265887 - protein, 15 aa, Artificial Sequence
  Description of Artificial Sequence: Synthetic peptide
  Seed: SIGKVCRTLLAKSVF
SIIKVARVLLGKSVF

SEQ ID NO: 265888 - protein, 15 aa, Artificial Sequence
  Description of Artificial Sequence: Synthetic peptide
  Seed: SIGKVCRTLLAKSVF
SIIKVARVLLHKSVF

SEQ ID NO: 265889 - protein, 15 aa, Artificial Sequence
  Description of Artificial Sequence: Synthetic peptide
  Seed: SIGKVCRTLLAKSVF
SIIKVARVLLKKSVF

SEQ ID NO: 265890 - protein, 15 aa, Artificial Sequence
  Description of Artificial Sequence: Synthetic peptide
  Seed: SIGKVCRTLLAKSVF
SIIKVARVLLQKSVF

SEQ ID NO: 265891 - protein, 15 aa, Artificial Sequence
  Description of Artificial Sequence: Synthetic peptide
  Seed: SIGKVCRTLLAKSVF
SIIKVARVLLRKSVF

SEQ ID NO: 265892 - protein, 15 aa, Artificial Sequence
  Description of Artificial Sequence: Synthetic peptide
  Seed: SIGKVCRTLLAKSVF
SIIKVARVLLSKSVF

SEQ ID NO: 265893 - protein, 15 aa, Artificial Sequence
  Description of Artificial Sequence: Synthetic peptide
  Seed: SIGKVCRTLLAKSVF
SIIKVCRALLAKSVF

SEQ ID NO: 265894 - protein, 15 aa, Artificial Sequence
  Description of Artificial Sequence: Synthetic peptide
  Seed: SIGKVCRTLLAKSVF
SIIKVCRALLGKSVF

SEQ ID NO: 265895 - protein, 15 aa, Artificial Sequence
  Description of Artificial Sequence: Synthetic peptide
  Seed: SIGKVCRTLLAKSVF
SIIKVCRALLHKSVF

SEQ ID NO: 265896 - protein, 15 aa, Artificial Sequence
  Description of Artificial Sequence: Synthetic peptide
  Seed: SIGKVCRTLLAKSVF
SIIKVCRALLKKSVF

SEQ ID NO: 265897 - protein, 15 aa, Artificial Sequence
  Description of Artificial Sequence: Synthetic peptide
  Seed: SIGKVCRTLLAKSVF
SIIKVCRALLMKSVF

SEQ ID NO: 265898 - protein, 15 aa, Artificial Sequence
  Description of Artificial Sequence: Synthetic peptide
  Seed: SIGKVCRTLLAKSVF
SIIKVCRALLNKSVF

SEQ ID NO: 265899 - protein, 15 aa, Artificial Sequence
  Description of Artificial Sequence: Synthetic peptide
  Seed: SIGKVCRTLLAKSVF
SIIKVCRALLQKSVF

SEQ ID NO: 265900 - protein, 15 aa, Artificial Sequence
  Description of Artificial Sequence: Synthetic peptide
  Seed: SIGKVCRTLLAKSVF
SIIKVCRALLRKSVF

SEQ ID NO: 265901 - protein, 15 aa, Artificial Sequence
  Description of Artificial Sequence: Synthetic peptide
  Seed: SIGKVCRTLLAKSVF
SIIKVCRALLSKSVF

SEQ ID NO: 265902 - protein, 15 aa, Artificial Sequence
  Description of Artificial Sequence: Synthetic peptide
  Seed: SIGKVCRTLLAKSVF
SIIKVCRALLTKSVF

SEQ ID NO: 265903 - protein, 15 aa, Artificial Sequence
  Description of Artificial Sequence: Synthetic peptide
  Seed: SIGKVCRTLLAKSVF
SIIKVCRALLYKSVF

SEQ ID NO: 265904 - protein, 15 aa, Artificial Sequence
  Description of Artificial Sequence: Synthetic peptide
  Seed: SIGKVCRTLLAKSVF
SIIKVCRDLLAKSVF

SEQ ID NO: 265905 - protein, 15 aa, Artificial Sequence
  Description of Artificial Sequence: Synthetic peptide
  Seed: SIGKVCRTLLAKSVF
SIIKVCRELLRKSVF

SEQ ID NO: 265906 - protein, 15 aa, Artificial Sequence
  Description of Artificial Sequence: Synthetic peptide
  Seed: SIGKVCRTLLAKSVF
SIIKVCRGLLAKSVF

SEQ ID NO: 265907 - protein, 15 aa, Artificial Sequence
  Description of Artificial Sequence: Synthetic peptide
  Seed: SIGKVCRTLLAKSVF
SIIKVCRGLLGKSVF

SEQ ID NO: 265908 - protein, 15 aa, Artificial Sequence
  Description of Artificial Sequence: Synthetic peptide
  Seed: SIGKVCRTLLAKSVF
SIIKVCRGLLHKSVF

SEQ ID NO: 265909 - protein, 15 aa, Artificial Sequence
  Description of Artificial Sequence: Synthetic peptide
  Seed: SIGKVCRTLLAKSVF
SIIKVCRGLLKKSVF

SEQ ID NO: 265910 - protein, 15 aa, Artificial Sequence
  Description of Artificial Sequence: Synthetic peptide
  Seed: SIGKVCRTLLAKSVF
SIIKVCRGLLQKSVF

SEQ ID NO: 265911 - protein, 15 aa, Artificial Sequence
  Description of Artificial Sequence: Synthetic peptide
  Seed: SIGKVCRTLLAKSVF
SIIKVCRGLLRKSVF

SEQ ID NO: 265912 - protein, 15 aa, Artificial Sequence
  Description of Artificial Sequence: Synthetic peptide
  Seed: SIGKVCRTLLAKSVF
SIIKVCRGLLSKSVF

SEQ ID NO: 265913 - protein, 15 aa, Artificial Sequence
  Description of Artificial Sequence: Synthetic peptide
  Seed: SIGKVCRTLLAKSVF
SIIKVCRGLLTKSVF

SEQ ID NO: 265914 - protein, 15 aa, Artificial Sequence
  Description of Artificial Sequence: Synthetic peptide
  Seed: SIGKVCRTLLAKSVF
SIIKVCRGLLYKSVF

SEQ ID NO: 265915 - protein, 15 aa, Artificial Sequence
  Description of Artificial Sequence: Synthetic peptide
  Seed: SIGKVCRTLLAKSVF
SIIKVCRHLLAKSVF

SEQ ID NO: 265916 - protein, 15 aa, Artificial Sequence
  Description of Artificial Sequence: Synthetic peptide
  Seed: SIGKVCRTLLAKSVF
SIIKVCRHLLFKSVF

SEQ ID NO: 265917 - protein, 15 aa, Artificial Sequence
  Description of Artificial Sequence: Synthetic peptide
  Seed: SIGKVCRTLLAKSVF
SIIKVCRHLLGKSVF

SEQ ID NO: 265918 - protein, 15 aa, Artificial Sequence
  Description of Artificial Sequence: Synthetic peptide
  Seed: SIGKVCRTLLAKSVF
SIIKVCRHLLHKSVF

SEQ ID NO: 265919 - protein, 15 aa, Artificial Sequence
  Description of Artificial Sequence: Synthetic peptide
  Seed: SIGKVCRTLLAKSVF
SIIKVCRHLLIKSVF

SEQ ID NO: 265920 - protein, 15 aa, Artificial Sequence
  Description of Artificial Sequence: Synthetic peptide
  Seed: SIGKVCRTLLAKSVF
SIIKVCRHLLKKSVF

SEQ ID NO: 265921 - protein, 15 aa, Artificial Sequence
  Description of Artificial Sequence: Synthetic peptide
  Seed: SIGKVCRTLLAKSVF
SIIKVCRHLLLKSVF

SEQ ID NO: 265922 - protein, 15 aa, Artificial Sequence
  Description of Artificial Sequence: Synthetic peptide
  Seed: SIGKVCRTLLAKSVF
SIIKVCRHLLMKSVF

SEQ ID NO: 265923 - protein, 15 aa, Artificial Sequence
  Description of Artificial Sequence: Synthetic peptide
  Seed: SIGKVCRTLLAKSVF
SIIKVCRHLLNKSVF

SEQ ID NO: 265924 - protein, 15 aa, Artificial Sequence
  Description of Artificial Sequence: Synthetic peptide
  Seed: SIGKVCRTLLAKSVF
SIIKVCRHLLPKSVF

SEQ ID NO: 265925 - protein, 15 aa, Artificial Sequence
  Description of Artificial Sequence: Synthetic peptide
  Seed: SIGKVCRTLLAKSVF
SIIKVCRHLLQKSVF

SEQ ID NO: 265926 - protein, 15 aa, Artificial Sequence
  Description of Artificial Sequence: Synthetic peptide
  Seed: SIGKVCRTLLAKSVF
SIIKVCRHLLRKSVF

SEQ ID NO: 265927 - protein, 15 aa, Artificial Sequence
  Description of Artificial Sequence: Synthetic peptide
  Seed: SIGKVCRTLLAKSVF
SIIKVCRHLLSKSVF

SEQ ID NO: 265928 - protein, 15 aa, Artificial Sequence
  Description of Artificial Sequence: Synthetic peptide
  Seed: SIGKVCRTLLAKSVF
SIIKVCRHLLTKSVF

SEQ ID NO: 265929 - protein, 15 aa, Artificial Sequence
  Description of Artificial Sequence: Synthetic peptide
  Seed: SIGKVCRTLLAKSVF
SIIKVCRHLLVKSVF

SEQ ID NO: 265930 - protein, 15 aa, Artificial Sequence
  Description of Artificial Sequence: Synthetic peptide
  Seed: SIGKVCRTLLAKSVF
SIIKVCRHLLYKSVF

SEQ ID NO: 265931 - protein, 15 aa, Artificial Sequence
  Description of Artificial Sequence: Synthetic peptide
  Seed: SIGKVCRTLLAKSVF
SIIKVCRILLHKSVF

SEQ ID NO: 265932 - protein, 15 aa, Artificial Sequence
  Description of Artificial Sequence: Synthetic peptide
  Seed: SIGKVCRTLLAKSVF
SIIKVCRILLKKSVF

SEQ ID NO: 265933 - protein, 15 aa, Artificial Sequence
  Description of Artificial Sequence: Synthetic peptide
  Seed: SIGKVCRTLLAKSVF
SIIKVCRILLRKSVF

SEQ ID NO: 265934 - protein, 15 aa, Artificial Sequence
  Description of Artificial Sequence: Synthetic peptide
  Seed: SIGKVCRTLLAKSVF
SIIKVCRKLLAKSVF

SEQ ID NO: 265935 - protein, 15 aa, Artificial Sequence
  Description of Artificial Sequence: Synthetic peptide
  Seed: SIGKVCRTLLAKSVF
SIIKVCRKLLCKSVF

SEQ ID NO: 265936 - protein, 15 aa, Artificial Sequence
  Description of Artificial Sequence: Synthetic peptide
  Seed: SIGKVCRTLLAKSVF
SIIKVCRKLLDKSVF

SEQ ID NO: 265937 - protein, 15 aa, Artificial Sequence
  Description of Artificial Sequence: Synthetic peptide
  Seed: SIGKVCRTLLAKSVF
SIIKVCRKLLEKSVF

SEQ ID NO: 265938 - protein, 15 aa, Artificial Sequence
  Description of Artificial Sequence: Synthetic peptide
  Seed: SIGKVCRTLLAKSVF
SIIKVCRKLLFKSVF

SEQ ID NO: 265939 - protein, 15 aa, Artificial Sequence
  Description of Artificial Sequence: Synthetic peptide
  Seed: SIGKVCRTLLAKSVF
SIIKVCRKLLGKSVF

SEQ ID NO: 265940 - protein, 15 aa, Artificial Sequence
  Description of Artificial Sequence: Synthetic peptide
  Seed: SIGKVCRTLLAKSVF
SIIKVCRKLLHKSVF

SEQ ID NO: 265941 - protein, 15 aa, Artificial Sequence
  Description of Artificial Sequence: Synthetic peptide
  Seed: SIGKVCRTLLAKSVF
SIIKVCRKLLIKSVF

SEQ ID NO: 265942 - protein, 15 aa, Artificial Sequence
  Description of Artificial Sequence: Synthetic peptide
  Seed: SIGKVCRTLLAKSVF
SIIKVCRKLLKKSVF

SEQ ID NO: 265943 - protein, 15 aa, Artificial Sequence
  Description of Artificial Sequence: Synthetic peptide
  Seed: SIGKVCRTLLAKSVF
SIIKVCRKLLLKSVF

SEQ ID NO: 265944 - protein, 15 aa, Artificial Sequence
  Description of Artificial Sequence: Synthetic peptide
  Seed: SIGKVCRTLLAKSVF
SIIKVCRKLLMKSVF

SEQ ID NO: 265945 - protein, 15 aa, Artificial Sequence
  Description of Artificial Sequence: Synthetic peptide
  Seed: SIGKVCRTLLAKSVF
SIIKVCRKLLNKSVF

SEQ ID NO: 265946 - protein, 15 aa, Artificial Sequence
  Description of Artificial Sequence: Synthetic peptide
  Seed: SIGKVCRTLLAKSVF
SIIKVCRKLLPKSVF

SEQ ID NO: 265947 - protein, 15 aa, Artificial Sequence
  Description of Artificial Sequence: Synthetic peptide
  Seed: SIGKVCRTLLAKSVF
SIIKVCRKLLQKSVF

SEQ ID NO: 265948 - protein, 15 aa, Artificial Sequence
  Description of Artificial Sequence: Synthetic peptide
  Seed: SIGKVCRTLLAKSVF
SIIKVCRKLLRKSVF

SEQ ID NO: 265949 - protein, 15 aa, Artificial Sequence
  Description of Artificial Sequence: Synthetic peptide
  Seed: SIGKVCRTLLAKSVF
SIIKVCRKLLSKSVF

SEQ ID NO: 265950 - protein, 15 aa, Artificial Sequence
  Description of Artificial Sequence: Synthetic peptide
  Seed: SIGKVCRTLLAKSVF
SIIKVCRKLLTKSVF

SEQ ID NO: 265951 - protein, 15 aa, Artificial Sequence
  Description of Artificial Sequence: Synthetic peptide
  Seed: SIGKVCRTLLAKSVF
SIIKVCRKLLVKSVF

SEQ ID NO: 265952 - protein, 15 aa, Artificial Sequence
  Description of Artificial Sequence: Synthetic peptide
  Seed: SIGKVCRTLLAKSVF
SIIKVCRKLLWKSVF

SEQ ID NO: 265953 - protein, 15 aa, Artificial Sequence
  Description of Artificial Sequence: Synthetic peptide
  Seed: SIGKVCRTLLAKSVF
SIIKVCRKLLYKSVF

SEQ ID NO: 265954 - protein, 15 aa, Artificial Sequence
  Description of Artificial Sequence: Synthetic peptide
  Seed: SIGKVCRTLLAKSVF
SIIKVCRLLLKKSVF

SEQ ID NO: 265955 - protein, 15 aa, Artificial Sequence
  Description of Artificial Sequence: Synthetic peptide
  Seed: SIGKVCRTLLAKSVF
SIIKVCRLLLRKSVF

SEQ ID NO: 265956 - protein, 15 aa, Artificial Sequence
  Description of Artificial Sequence: Synthetic peptide
  Seed: SIGKVCRTLLAKSVF
SIIKVCRMLLKKSVF

SEQ ID NO: 265957 - protein, 15 aa, Artificial Sequence
  Description of Artificial Sequence: Synthetic peptide
  Seed: SIGKVCRTLLAKSVF
SIIKVCRMLLRKSVF

SEQ ID NO: 265958 - protein, 15 aa, Artificial Sequence
  Description of Artificial Sequence: Synthetic peptide
  Seed: SIGKVCRTLLAKSVF
SIIKVCRNLLAKSVF

SEQ ID NO: 265959 - protein, 15 aa, Artificial Sequence
  Description of Artificial Sequence: Synthetic peptide
  Seed: SIGKVCRTLLAKSVF
SIIKVCRNLLGKSVF

SEQ ID NO: 265960 - protein, 15 aa, Artificial Sequence
  Description of Artificial Sequence: Synthetic peptide
  Seed: SIGKVCRTLLAKSVF
SIIKVCRNLLHKSVF

SEQ ID NO: 265961 - protein, 15 aa, Artificial Sequence
  Description of Artificial Sequence: Synthetic peptide
  Seed: SIGKVCRTLLAKSVF
SIIKVCRNLLKKSVF

SEQ ID NO: 265962 - protein, 15 aa, Artificial Sequence
  Description of Artificial Sequence: Synthetic peptide
  Seed: SIGKVCRTLLAKSVF
SIIKVCRNLLMKSVF

SEQ ID NO: 265963 - protein, 15 aa, Artificial Sequence
  Description of Artificial Sequence: Synthetic peptide
  Seed: SIGKVCRTLLAKSVF
SIIKVCRNLLQKSVF

SEQ ID NO: 265964 - protein, 15 aa, Artificial Sequence
  Description of Artificial Sequence: Synthetic peptide
  Seed: SIGKVCRTLLAKSVF
SIIKVCRNLLRKSVF

SEQ ID NO: 265965 - protein, 15 aa, Artificial Sequence
  Description of Artificial Sequence: Synthetic peptide
  Seed: SIGKVCRTLLAKSVF
SIIKVCRNLLSKSVF

SEQ ID NO: 265966 - protein, 15 aa, Artificial Sequence
  Description of Artificial Sequence: Synthetic peptide
  Seed: SIGKVCRTLLAKSVF
SIIKVCRNLLTKSVF

SEQ ID NO: 265967 - protein, 15 aa, Artificial Sequence
  Description of Artificial Sequence: Synthetic peptide
  Seed: SIGKVCRTLLAKSVF
SIIKVCRNLLYKSVF

SEQ ID NO: 265968 - protein, 15 aa, Artificial Sequence
  Description of Artificial Sequence: Synthetic peptide
  Seed: SIGKVCRTLLAKSVF
SIIKVCRPLLAKSVF

SEQ ID NO: 265969 - protein, 15 aa, Artificial Sequence
  Description of Artificial Sequence: Synthetic peptide
  Seed: SIGKVCRTLLAKSVF
SIIKVCRPLLGKSVF

SEQ ID NO: 265970 - protein, 15 aa, Artificial Sequence
  Description of Artificial Sequence: Synthetic peptide
  Seed: SIGKVCRTLLAKSVF
SIIKVCRPLLHKSVF

SEQ ID NO: 265971 - protein, 15 aa, Artificial Sequence
  Description of Artificial Sequence: Synthetic peptide
  Seed: SIGKVCRTLLAKSVF
SIIKVCRPLLIKSVF

SEQ ID NO: 265972 - protein, 15 aa, Artificial Sequence
  Description of Artificial Sequence: Synthetic peptide
  Seed: SIGKVCRTLLAKSVF
SIIKVCRPLLKKSVF

SEQ ID NO: 265973 - protein, 15 aa, Artificial Sequence
  Description of Artificial Sequence: Synthetic peptide
  Seed: SIGKVCRTLLAKSVF
SIIKVCRPLLLKSVF

SEQ ID NO: 265974 - protein, 15 aa, Artificial Sequence
  Description of Artificial Sequence: Synthetic peptide
  Seed: SIGKVCRTLLAKSVF
SIIKVCRPLLMKSVF

SEQ ID NO: 265975 - protein, 15 aa, Artificial Sequence
  Description of Artificial Sequence: Synthetic peptide
  Seed: SIGKVCRTLLAKSVF
SIIKVCRPLLNKSVF

SEQ ID NO: 265976 - protein, 15 aa, Artificial Sequence
  Description of Artificial Sequence: Synthetic peptide
  Seed: SIGKVCRTLLAKSVF
SIIKVCRPLLQKSVF

SEQ ID NO: 265977 - protein, 15 aa, Artificial Sequence
  Description of Artificial Sequence: Synthetic peptide
  Seed: SIGKVCRTLLAKSVF
SIIKVCRPLLRKSVF

SEQ ID NO: 265978 - protein, 15 aa, Artificial Sequence
  Description of Artificial Sequence: Synthetic peptide
  Seed: SIGKVCRTLLAKSVF
SIIKVCRPLLSKSVF

SEQ ID NO: 265979 - protein, 15 aa, Artificial Sequence
  Description of Artificial Sequence: Synthetic peptide
  Seed: SIGKVCRTLLAKSVF
SIIKVCRPLLTKSVF

SEQ ID NO: 265980 - protein, 15 aa, Artificial Sequence
  Description of Artificial Sequence: Synthetic peptide
  Seed: SIGKVCRTLLAKSVF
SIIKVCRPLLVKSVF

SEQ ID NO: 265981 - protein, 15 aa, Artificial Sequence
  Description of Artificial Sequence: Synthetic peptide
  Seed: SIGKVCRTLLAKSVF
SIIKVCRPLLYKSVF

SEQ ID NO: 265982 - protein, 15 aa, Artificial Sequence
  Description of Artificial Sequence: Synthetic peptide
  Seed: SIGKVCRTLLAKSVF
SIIKVCRQLLAKSVF

SEQ ID NO: 265983 - protein, 15 aa, Artificial Sequence
  Description of Artificial Sequence: Synthetic peptide
  Seed: SIGKVCRTLLAKSVF
SIIKVCRQLLGKSVF

SEQ ID NO: 265984 - protein, 15 aa, Artificial Sequence
  Description of Artificial Sequence: Synthetic peptide
  Seed: SIGKVCRTLLAKSVF
SIIKVCRQLLHKSVF

SEQ ID NO: 265985 - protein, 15 aa, Artificial Sequence
  Description of Artificial Sequence: Synthetic peptide
  Seed: SIGKVCRTLLAKSVF
SIIKVCRQLLKKSVF

SEQ ID NO: 265986 - protein, 15 aa, Artificial Sequence
  Description of Artificial Sequence: Synthetic peptide
  Seed: SIGKVCRTLLAKSVF
SIIKVCRQLLQKSVF

SEQ ID NO: 265987 - protein, 15 aa, Artificial Sequence
  Description of Artificial Sequence: Synthetic peptide
  Seed: SIGKVCRTLLAKSVF
SIIKVCRQLLRKSVF

SEQ ID NO: 265988 - protein, 15 aa, Artificial Sequence
  Description of Artificial Sequence: Synthetic peptide
  Seed: SIGKVCRTLLAKSVF
SIIKVCRQLLSKSVF

SEQ ID NO: 265989 - protein, 15 aa, Artificial Sequence
  Description of Artificial Sequence: Synthetic peptide
  Seed: SIGKVCRTLLAKSVF
SIIKVCRRLLAKSVF

SEQ ID NO: 265990 - protein, 15 aa, Artificial Sequence
  Description of Artificial Sequence: Synthetic peptide
  Seed: SIGKVCRTLLAKSVF
SIIKVCRRLLCKSVF

SEQ ID NO: 265991 - protein, 15 aa, Artificial Sequence
  Description of Artificial Sequence: Synthetic peptide
  Seed: SIGKVCRTLLAKSVF
SIIKVCRRLLDKSVF

SEQ ID NO: 265992 - protein, 15 aa, Artificial Sequence
  Description of Artificial Sequence: Synthetic peptide
  Seed: SIGKVCRTLLAKSVF
SIIKVCRRLLEKSVF

SEQ ID NO: 265993 - protein, 15 aa, Artificial Sequence
  Description of Artificial Sequence: Synthetic peptide
  Seed: SIGKVCRTLLAKSVF
SIIKVCRRLLFKSVF

SEQ ID NO: 265994 - protein, 15 aa, Artificial Sequence
  Description of Artificial Sequence: Synthetic peptide
  Seed: SIGKVCRTLLAKSVF
SIIKVCRRLLGKSVF

SEQ ID NO: 265995 - protein, 15 aa, Artificial Sequence
  Description of Artificial Sequence: Synthetic peptide
  Seed: SIGKVCRTLLAKSVF
SIIKVCRRLLHKSVF

SEQ ID NO: 265996 - protein, 15 aa, Artificial Sequence
  Description of Artificial Sequence: Synthetic peptide
  Seed: SIGKVCRTLLAKSVF
SIIKVCRRLLIKSVF

SEQ ID NO: 265997 - protein, 15 aa, Artificial Sequence
  Description of Artificial Sequence: Synthetic peptide
  Seed: SIGKVCRTLLAKSVF
SIIKVCRRLLKKSVF

SEQ ID NO: 265998 - protein, 15 aa, Artificial Sequence
  Description of Artificial Sequence: Synthetic peptide
  Seed: SIGKVCRTLLAKSVF
SIIKVCRRLLLKSVF

SEQ ID NO: 265999 - protein, 15 aa, Artificial Sequence
  Description of Artificial Sequence: Synthetic peptide
  Seed: SIGKVCRTLLAKSVF
SIIKVCRRLLMKSVF

SEQ ID NO: 266000 - protein, 15 aa, Artificial Sequence
  Description of Artificial Sequence: Synthetic peptide
  Seed: SIGKVCRTLLAKSVF
SIIKVCRRLLNKSVF

SEQ ID NO: 266001 - protein, 15 aa, Artificial Sequence
  Description of Artificial Sequence: Synthetic peptide
  Seed: SIGKVCRTLLAKSVF
SIIKVCRRLLPKSVF

SEQ ID NO: 266002 - protein, 15 aa, Artificial Sequence
  Description of Artificial Sequence: Synthetic peptide
  Seed: SIGKVCRTLLAKSVF
SIIKVCRRLLQKSVF

SEQ ID NO: 266003 - protein, 15 aa, Artificial Sequence
  Description of Artificial Sequence: Synthetic peptide
  Seed: SIGKVCRTLLAKSVF
SIIKVCRRLLRKSVF

SEQ ID NO: 266004 - protein, 15 aa, Artificial Sequence
  Description of Artificial Sequence: Synthetic peptide
  Seed: SIGKVCRTLLAKSVF
SIIKVCRRLLSKSVF

SEQ ID NO: 266005 - protein, 15 aa, Artificial Sequence
  Description of Artificial Sequence: Synthetic peptide
  Seed: SIGKVCRTLLAKSVF
SIIKVCRRLLTKSVF

SEQ ID NO: 266006 - protein, 15 aa, Artificial Sequence
  Description of Artificial Sequence: Synthetic peptide
  Seed: SIGKVCRTLLAKSVF
SIIKVCRRLLVKSVF

SEQ ID NO: 266007 - protein, 15 aa, Artificial Sequence
  Description of Artificial Sequence: Synthetic peptide
  Seed: SIGKVCRTLLAKSVF
SIIKVCRRLLWKSVF

SEQ ID NO: 266008 - protein, 15 aa, Artificial Sequence
  Description of Artificial Sequence: Synthetic peptide
  Seed: SIGKVCRTLLAKSVF
SIIKVCRRLLYKSVF

SEQ ID NO: 266009 - protein, 15 aa, Artificial Sequence
  Description of Artificial Sequence: Synthetic peptide
  Seed: SIGKVCRTLLAKSVF
SIIKVCRSLLAKSVF

SEQ ID NO: 266010 - protein, 15 aa, Artificial Sequence
  Description of Artificial Sequence: Synthetic peptide
  Seed: SIGKVCRTLLAKSVF
SIIKVCRSLLGKSVF

SEQ ID NO: 266011 - protein, 15 aa, Artificial Sequence
  Description of Artificial Sequence: Synthetic peptide
  Seed: SIGKVCRTLLAKSVF
SIIKVCRSLLHKSVF

SEQ ID NO: 266012 - protein, 15 aa, Artificial Sequence
  Description of Artificial Sequence: Synthetic peptide
  Seed: SIGKVCRTLLAKSVF
SIIKVCRSLLKKSVF

SEQ ID NO: 266013 - protein, 15 aa, Artificial Sequence
  Description of Artificial Sequence: Synthetic peptide
  Seed: SIGKVCRTLLAKSVF
SIIKVCRSLLMKSVF

SEQ ID NO: 266014 - protein, 15 aa, Artificial Sequence
  Description of Artificial Sequence: Synthetic peptide
  Seed: SIGKVCRTLLAKSVF
SIIKVCRSLLNKSVF

SEQ ID NO: 266015 - protein, 15 aa, Artificial Sequence
  Description of Artificial Sequence: Synthetic peptide
  Seed: SIGKVCRTLLAKSVF
SIIKVCRSLLQKSVF

SEQ ID NO: 266016 - protein, 15 aa, Artificial Sequence
  Description of Artificial Sequence: Synthetic peptide
  Seed: SIGKVCRTLLAKSVF
SIIKVCRSLLRKSVF

SEQ ID NO: 266017 - protein, 15 aa, Artificial Sequence
  Description of Artificial Sequence: Synthetic peptide
  Seed: SIGKVCRTLLAKSVF
SIIKVCRSLLSKSVF

SEQ ID NO: 266018 - protein, 15 aa, Artificial Sequence
  Description of Artificial Sequence: Synthetic peptide
  Seed: SIGKVCRTLLAKSVF
SIIKVCRSLLTKSVF

SEQ ID NO: 266019 - protein, 15 aa, Artificial Sequence
  Description of Artificial Sequence: Synthetic peptide
  Seed: SIGKVCRTLLAKSVF
SIIKVCRSLLYKSVF

SEQ ID NO: 266020 - protein, 15 aa, Artificial Sequence
  Description of Artificial Sequence: Synthetic peptide
  Seed: SIGKVCRTLLAKSVF
SIIKVCRTLLAKSVF

SEQ ID NO: 266021 - protein, 15 aa, Artificial Sequence
  Description of Artificial Sequence: Synthetic peptide
  Seed: SIGKVCRTLLAKSVF
SIIKVCRTLLGKSVF

SEQ ID NO: 266022 - protein, 15 aa, Artificial Sequence
  Description of Artificial Sequence: Synthetic peptide
  Seed: SIGKVCRTLLAKSVF
SIIKVCRTLLHKSVF

SEQ ID NO: 266023 - protein, 15 aa, Artificial Sequence
  Description of Artificial Sequence: Synthetic peptide
  Seed: SIGKVCRTLLAKSVF
SIIKVCRTLLKKSVF

SEQ ID NO: 266024 - protein, 15 aa, Artificial Sequence
  Description of Artificial Sequence: Synthetic peptide
  Seed: SIGKVCRTLLAKSVF
SIIKVCRTLLMKSVF

SEQ ID NO: 266025 - protein, 15 aa, Artificial Sequence
  Description of Artificial Sequence: Synthetic peptide
  Seed: SIGKVCRTLLAKSVF
SIIKVCRTLLNKSVF

SEQ ID NO: 266026 - protein, 15 aa, Artificial Sequence
  Description of Artificial Sequence: Synthetic peptide
  Seed: SIGKVCRTLLAKSVF
SIIKVCRTLLQKSVF

SEQ ID NO: 266027 - protein, 15 aa, Artificial Sequence
  Description of Artificial Sequence: Synthetic peptide
  Seed: SIGKVCRTLLAKSVF
SIIKVCRTLLRKSVF

SEQ ID NO: 266028 - protein, 15 aa, Artificial Sequence
  Description of Artificial Sequence: Synthetic peptide
  Seed: SIGKVCRTLLAKSVF
SIIKVCRTLLSKSVF

SEQ ID NO: 266029 - protein, 15 aa, Artificial Sequence
  Description of Artificial Sequence: Synthetic peptide
  Seed: SIGKVCRTLLAKSVF
SIIKVCRTLLTKSVF

SEQ ID NO: 266030 - protein, 15 aa, Artificial Sequence
  Description of Artificial Sequence: Synthetic peptide
  Seed: SIGKVCRTLLAKSVF
SIIKVCRTLLYKSVF

SEQ ID NO: 266031 - protein, 15 aa, Artificial Sequence
  Description of Artificial Sequence: Synthetic peptide
  Seed: SIGKVCRTLLAKSVF
SIIKVCRVLLHKSVF

SEQ ID NO: 266032 - protein, 15 aa, Artificial Sequence
  Description of Artificial Sequence: Synthetic peptide
  Seed: SIGKVCRTLLAKSVF
SIIKVCRVLLKKSVF

SEQ ID NO: 266033 - protein, 15 aa, Artificial Sequence
  Description of Artificial Sequence: Synthetic peptide
  Seed: SIGKVCRTLLAKSVF
SIIKVCRVLLRKSVF

SEQ ID NO: 266034 - protein, 15 aa, Artificial Sequence
  Description of Artificial Sequence: Synthetic peptide
  Seed: SIGKVCRTLLAKSVF
SIIKVCRVLLSKSVF

SEQ ID NO: 266035 - protein, 15 aa, Artificial Sequence
  Description of Artificial Sequence: Synthetic peptide
  Seed: SIGKVCRTLLAKSVF
SIIKVCRYLLRKSVF

SEQ ID NO: 266036 - protein, 15 aa, Artificial Sequence
  Description of Artificial Sequence: Synthetic peptide
  Seed: SIGKVCRTLLAKSVF
SIIKVDRKLLAKSVF

SEQ ID NO: 266037 - protein, 15 aa, Artificial Sequence
  Description of Artificial Sequence: Synthetic peptide
  Seed: SIGKVCRTLLAKSVF
SIIKVDRKLLGKSVF

SEQ ID NO: 266038 - protein, 15 aa, Artificial Sequence
  Description of Artificial Sequence: Synthetic peptide
  Seed: SIGKVCRTLLAKSVF
SIIKVDRKLLHKSVF

SEQ ID NO: 266039 - protein, 15 aa, Artificial Sequence
  Description of Artificial Sequence: Synthetic peptide
  Seed: SIGKVCRTLLAKSVF
SIIKVDRKLLKKSVF

SEQ ID NO: 266040 - protein, 15 aa, Artificial Sequence
  Description of Artificial Sequence: Synthetic peptide
  Seed: SIGKVCRTLLAKSVF
SIIKVDRKLLQKSVF

SEQ ID NO: 266041 - protein, 15 aa, Artificial Sequence
  Description of Artificial Sequence: Synthetic peptide
  Seed: SIGKVCRTLLAKSVF
SIIKVDRKLLRKSVF

SEQ ID NO: 266042 - protein, 15 aa, Artificial Sequence
  Description of Artificial Sequence: Synthetic peptide
  Seed: SIGKVCRTLLAKSVF
SIIKVDRKLLSKSVF

SEQ ID NO: 266043 - protein, 15 aa, Artificial Sequence
  Description of Artificial Sequence: Synthetic peptide
  Seed: SIGKVCRTLLAKSVF
SIIKVDRKLLTKSVF

SEQ ID NO: 266044 - protein, 15 aa, Artificial Sequence
  Description of Artificial Sequence: Synthetic peptide
  Seed: SIGKVCRTLLAKSVF
SIIKVDRNLLAKSVF

SEQ ID NO: 266045 - protein, 15 aa, Artificial Sequence
  Description of Artificial Sequence: Synthetic peptide
  Seed: SIGKVCRTLLAKSVF
SIIKVDRNLLSKSVF

SEQ ID NO: 266046 - protein, 15 aa, Artificial Sequence
  Description of Artificial Sequence: Synthetic peptide
  Seed: SIGKVCRTLLAKSVF
SIIKVDRRLLAKSVF

SEQ ID NO: 266047 - protein, 15 aa, Artificial Sequence
  Description of Artificial Sequence: Synthetic peptide
  Seed: SIGKVCRTLLAKSVF
SIIKVDRRLLFKSVF

SEQ ID NO: 266048 - protein, 15 aa, Artificial Sequence
  Description of Artificial Sequence: Synthetic peptide
  Seed: SIGKVCRTLLAKSVF
SIIKVDRRLLGKSVF

SEQ ID NO: 266049 - protein, 15 aa, Artificial Sequence
  Description of Artificial Sequence: Synthetic peptide
  Seed: SIGKVCRTLLAKSVF
SIIKVDRRLLHKSVF

SEQ ID NO: 266050 - protein, 15 aa, Artificial Sequence
  Description of Artificial Sequence: Synthetic peptide
  Seed: SIGKVCRTLLAKSVF
SIIKVDRRLLIKSVF

SEQ ID NO: 266051 - protein, 15 aa, Artificial Sequence
  Description of Artificial Sequence: Synthetic peptide
  Seed: SIGKVCRTLLAKSVF
SIIKVDRRLLKKSVF

SEQ ID NO: 266052 - protein, 15 aa, Artificial Sequence
  Description of Artificial Sequence: Synthetic peptide
  Seed: SIGKVCRTLLAKSVF
SIIKVDRRLLLKSVF

SEQ ID NO: 266053 - protein, 15 aa, Artificial Sequence
  Description of Artificial Sequence: Synthetic peptide
  Seed: SIGKVCRTLLAKSVF
SIIKVDRRLLMKSVF

SEQ ID NO: 266054 - protein, 15 aa, Artificial Sequence
  Description of Artificial Sequence: Synthetic peptide
  Seed: SIGKVCRTLLAKSVF
SIIKVDRRLLNKSVF

SEQ ID NO: 266055 - protein, 15 aa, Artificial Sequence
  Description of Artificial Sequence: Synthetic peptide
  Seed: SIGKVCRTLLAKSVF
SIIKVDRRLLPKSVF

SEQ ID NO: 266056 - protein, 15 aa, Artificial Sequence
  Description of Artificial Sequence: Synthetic peptide
  Seed: SIGKVCRTLLAKSVF
SIIKVDRRLLQKSVF

SEQ ID NO: 266057 - protein, 15 aa, Artificial Sequence
  Description of Artificial Sequence: Synthetic peptide
  Seed: SIGKVCRTLLAKSVF
SIIKVDRRLLRKSVF

SEQ ID NO: 266058 - protein, 15 aa, Artificial Sequence
  Description of Artificial Sequence: Synthetic peptide
  Seed: SIGKVCRTLLAKSVF
SIIKVDRRLLSKSVF

SEQ ID NO: 266059 - protein, 15 aa, Artificial Sequence
  Description of Artificial Sequence: Synthetic peptide
  Seed: SIGKVCRTLLAKSVF
SIIKVDRRLLTKSVF

SEQ ID NO: 266060 - protein, 15 aa, Artificial Sequence
  Description of Artificial Sequence: Synthetic peptide
  Seed: SIGKVCRTLLAKSVF
SIIKVDRRLLVKSVF

SEQ ID NO: 266061 - protein, 15 aa, Artificial Sequence
  Description of Artificial Sequence: Synthetic peptide
  Seed: SIGKVCRTLLAKSVF
SIIKVDRRLLYKSVF

SEQ ID NO: 266062 - protein, 15 aa, Artificial Sequence
  Description of Artificial Sequence: Synthetic peptide
  Seed: SIGKVCRTLLAKSVF
SIIKVDRSLLAKSVF

SEQ ID NO: 266063 - protein, 15 aa, Artificial Sequence
  Description of Artificial Sequence: Synthetic peptide
  Seed: SIGKVCRTLLAKSVF
SIIKVDRSLLSKSVF

SEQ ID NO: 266064 - protein, 15 aa, Artificial Sequence
  Description of Artificial Sequence: Synthetic peptide
  Seed: SIGKVCRTLLAKSVF
SIIKVDRTLLAKSVF

SEQ ID NO: 266065 - protein, 15 aa, Artificial Sequence
  Description of Artificial Sequence: Synthetic peptide
  Seed: SIGKVCRTLLAKSVF
SIIKVDRTLLSKSVF

SEQ ID NO: 266066 - protein, 15 aa, Artificial Sequence
  Description of Artificial Sequence: Synthetic peptide
  Seed: SIGKVCRTLLAKSVF
SIIKVERALLAKSVF

SEQ ID NO: 266067 - protein, 15 aa, Artificial Sequence
  Description of Artificial Sequence: Synthetic peptide
  Seed: SIGKVCRTLLAKSVF
SIIKVERALLGKSVF

SEQ ID NO: 266068 - protein, 15 aa, Artificial Sequence
  Description of Artificial Sequence: Synthetic peptide
  Seed: SIGKVCRTLLAKSVF
SIIKVERALLHKSVF

SEQ ID NO: 266069 - protein, 15 aa, Artificial Sequence
  Description of Artificial Sequence: Synthetic peptide
  Seed: SIGKVCRTLLAKSVF
SIIKVERALLKKSVF

SEQ ID NO: 266070 - protein, 15 aa, Artificial Sequence
  Description of Artificial Sequence: Synthetic peptide
  Seed: SIGKVCRTLLAKSVF
SIIKVERALLQKSVF

SEQ ID NO: 266071 - protein, 15 aa, Artificial Sequence
  Description of Artificial Sequence: Synthetic peptide
  Seed: SIGKVCRTLLAKSVF
SIIKVERALLRKSVF

SEQ ID NO: 266072 - protein, 15 aa, Artificial Sequence
  Description of Artificial Sequence: Synthetic peptide
  Seed: SIGKVCRTLLAKSVF
SIIKVERALLSKSVF

SEQ ID NO: 266073 - protein, 15 aa, Artificial Sequence
  Description of Artificial Sequence: Synthetic peptide
  Seed: SIGKVCRTLLAKSVF
SIIKVERGLLAKSVF

SEQ ID NO: 266074 - protein, 15 aa, Artificial Sequence
  Description of Artificial Sequence: Synthetic peptide
  Seed: SIGKVCRTLLAKSVF
SIIKVERHLLAKSVF

SEQ ID NO: 266075 - protein, 15 aa, Artificial Sequence
  Description of Artificial Sequence: Synthetic peptide
  Seed: SIGKVCRTLLAKSVF
SIIKVERHLLGKSVF

SEQ ID NO: 266076 - protein, 15 aa, Artificial Sequence
  Description of Artificial Sequence: Synthetic peptide
  Seed: SIGKVCRTLLAKSVF
SIIKVERHLLHKSVF

SEQ ID NO: 266077 - protein, 15 aa, Artificial Sequence
  Description of Artificial Sequence: Synthetic peptide
  Seed: SIGKVCRTLLAKSVF
SIIKVERHLLQKSVF

SEQ ID NO: 266078 - protein, 15 aa, Artificial Sequence
  Description of Artificial Sequence: Synthetic peptide
  Seed: SIGKVCRTLLAKSVF
SIIKVERHLLRKSVF

SEQ ID NO: 266079 - protein, 15 aa, Artificial Sequence
  Description of Artificial Sequence: Synthetic peptide
  Seed: SIGKVCRTLLAKSVF
SIIKVERHLLSKSVF

SEQ ID NO: 266080 - protein, 15 aa, Artificial Sequence
  Description of Artificial Sequence: Synthetic peptide
  Seed: SIGKVCRTLLAKSVF
SIIKVERILLRKSVF

SEQ ID NO: 266081 - protein, 15 aa, Artificial Sequence
  Description of Artificial Sequence: Synthetic peptide
  Seed: SIGKVCRTLLAKSVF
SIIKVERKLLAKSVF

SEQ ID NO: 266082 - protein, 15 aa, Artificial Sequence
  Description of Artificial Sequence: Synthetic peptide
  Seed: SIGKVCRTLLAKSVF
SIIKVERKLLCKSVF

SEQ ID NO: 266083 - protein, 15 aa, Artificial Sequence
  Description of Artificial Sequence: Synthetic peptide
  Seed: SIGKVCRTLLAKSVF
SIIKVERKLLEKSVF

SEQ ID NO: 266084 - protein, 15 aa, Artificial Sequence
  Description of Artificial Sequence: Synthetic peptide
  Seed: SIGKVCRTLLAKSVF
SIIKVERKLLFKSVF

SEQ ID NO: 266085 - protein, 15 aa, Artificial Sequence
  Description of Artificial Sequence: Synthetic peptide
  Seed: SIGKVCRTLLAKSVF
SIIKVERKLLGKSVF

SEQ ID NO: 266086 - protein, 15 aa, Artificial Sequence
  Description of Artificial Sequence: Synthetic peptide
  Seed: SIGKVCRTLLAKSVF
SIIKVERKLLHKSVF

SEQ ID NO: 266087 - protein, 15 aa, Artificial Sequence
  Description of Artificial Sequence: Synthetic peptide
  Seed: SIGKVCRTLLAKSVF
SIIKVERKLLIKSVF

SEQ ID NO: 266088 - protein, 15 aa, Artificial Sequence
  Description of Artificial Sequence: Synthetic peptide
  Seed: SIGKVCRTLLAKSVF
SIIKVERKLLKKSVF

SEQ ID NO: 266089 - protein, 15 aa, Artificial Sequence
  Description of Artificial Sequence: Synthetic peptide
  Seed: SIGKVCRTLLAKSVF
SIIKVERKLLLKSVF

SEQ ID NO: 266090 - protein, 15 aa, Artificial Sequence
  Description of Artificial Sequence: Synthetic peptide
  Seed: SIGKVCRTLLAKSVF
SIIKVERKLLMKSVF

SEQ ID NO: 266091 - protein, 15 aa, Artificial Sequence
  Description of Artificial Sequence: Synthetic peptide
  Seed: SIGKVCRTLLAKSVF
SIIKVERKLLNKSVF

SEQ ID NO: 266092 - protein, 15 aa, Artificial Sequence
  Description of Artificial Sequence: Synthetic peptide
  Seed: SIGKVCRTLLAKSVF
SIIKVERKLLPKSVF

SEQ ID NO: 266093 - protein, 15 aa, Artificial Sequence
  Description of Artificial Sequence: Synthetic peptide
  Seed: SIGKVCRTLLAKSVF
SIIKVERKLLQKSVF

SEQ ID NO: 266094 - protein, 15 aa, Artificial Sequence
  Description of Artificial Sequence: Synthetic peptide
  Seed: SIGKVCRTLLAKSVF
SIIKVERKLLRKSVF

SEQ ID NO: 266095 - protein, 15 aa, Artificial Sequence
  Description of Artificial Sequence: Synthetic peptide
  Seed: SIGKVCRTLLAKSVF
SIIKVERKLLSKSVF

SEQ ID NO: 266096 - protein, 15 aa, Artificial Sequence
  Description of Artificial Sequence: Synthetic peptide
  Seed: SIGKVCRTLLAKSVF
SIIKVERKLLTKSVF

SEQ ID NO: 266097 - protein, 15 aa, Artificial Sequence
  Description of Artificial Sequence: Synthetic peptide
  Seed: SIGKVCRTLLAKSVF
SIIKVERKLLVKSVF

SEQ ID NO: 266098 - protein, 15 aa, Artificial Sequence
  Description of Artificial Sequence: Synthetic peptide
  Seed: SIGKVCRTLLAKSVF
SIIKVERKLLWKSVF

SEQ ID NO: 266099 - protein, 15 aa, Artificial Sequence
  Description of Artificial Sequence: Synthetic peptide
  Seed: SIGKVCRTLLAKSVF
SIIKVERKLLYKSVF

SEQ ID NO: 266100 - protein, 15 aa, Artificial Sequence
  Description of Artificial Sequence: Synthetic peptide
  Seed: SIGKVCRTLLAKSVF
SIIKVERNLLAKSVF

SEQ ID NO: 266101 - protein, 15 aa, Artificial Sequence
  Description of Artificial Sequence: Synthetic peptide
  Seed: SIGKVCRTLLAKSVF
SIIKVERNLLGKSVF

SEQ ID NO: 266102 - protein, 15 aa, Artificial Sequence
  Description of Artificial Sequence: Synthetic peptide
  Seed: SIGKVCRTLLAKSVF
SIIKVERNLLRKSVF

SEQ ID NO: 266103 - protein, 15 aa, Artificial Sequence
  Description of Artificial Sequence: Synthetic peptide
  Seed: SIGKVCRTLLAKSVF
SIIKVERNLLSKSVF

SEQ ID NO: 266104 - protein, 15 aa, Artificial Sequence
  Description of Artificial Sequence: Synthetic peptide
  Seed: SIGKVCRTLLAKSVF
SIIKVERPLLAKSVF

SEQ ID NO: 266105 - protein, 15 aa, Artificial Sequence
  Description of Artificial Sequence: Synthetic peptide
  Seed: SIGKVCRTLLAKSVF
SIIKVERPLLRKSVF

SEQ ID NO: 266106 - protein, 15 aa, Artificial Sequence
  Description of Artificial Sequence: Synthetic peptide
  Seed: SIGKVCRTLLAKSVF
SIIKVERPLLSKSVF

SEQ ID NO: 266107 - protein, 15 aa, Artificial Sequence
  Description of Artificial Sequence: Synthetic peptide
  Seed: SIGKVCRTLLAKSVF
SIIKVERQLLRKSVF

SEQ ID NO: 266108 - protein, 15 aa, Artificial Sequence
  Description of Artificial Sequence: Synthetic peptide
  Seed: SIGKVCRTLLAKSVF
SIIKVERRLLAKSVF

SEQ ID NO: 266109 - protein, 15 aa, Artificial Sequence
  Description of Artificial Sequence: Synthetic peptide
  Seed: SIGKVCRTLLAKSVF
SIIKVERRLLCKSVF

SEQ ID NO: 266110 - protein, 15 aa, Artificial Sequence
  Description of Artificial Sequence: Synthetic peptide
  Seed: SIGKVCRTLLAKSVF
SIIKVERRLLDKSVF

SEQ ID NO: 266111 - protein, 15 aa, Artificial Sequence
  Description of Artificial Sequence: Synthetic peptide
  Seed: SIGKVCRTLLAKSVF
SIIKVERRLLEKSVF

SEQ ID NO: 266112 - protein, 15 aa, Artificial Sequence
  Description of Artificial Sequence: Synthetic peptide
  Seed: SIGKVCRTLLAKSVF
SIIKVERRLLFKSVF

SEQ ID NO: 266113 - protein, 15 aa, Artificial Sequence
  Description of Artificial Sequence: Synthetic peptide
  Seed: SIGKVCRTLLAKSVF
SIIKVERRLLGKSVF

SEQ ID NO: 266114 - protein, 15 aa, Artificial Sequence
  Description of Artificial Sequence: Synthetic peptide
  Seed: SIGKVCRTLLAKSVF
SIIKVERRLLHKSVF

SEQ ID NO: 266115 - protein, 15 aa, Artificial Sequence
  Description of Artificial Sequence: Synthetic peptide
  Seed: SIGKVCRTLLAKSVF
SIIKVERRLLIKSVF

SEQ ID NO: 266116 - protein, 15 aa, Artificial Sequence
  Description of Artificial Sequence: Synthetic peptide
  Seed: SIGKVCRTLLAKSVF
SIIKVERRLLKKSVF

SEQ ID NO: 266117 - protein, 15 aa, Artificial Sequence
  Description of Artificial Sequence: Synthetic peptide
  Seed: SIGKVCRTLLAKSVF
SIIKVERRLLLKSVF

SEQ ID NO: 266118 - protein, 15 aa, Artificial Sequence
  Description of Artificial Sequence: Synthetic peptide
  Seed: SIGKVCRTLLAKSVF
SIIKVERRLLMKSVF

SEQ ID NO: 266119 - protein, 15 aa, Artificial Sequence
  Description of Artificial Sequence: Synthetic peptide
  Seed: SIGKVCRTLLAKSVF
SIIKVERRLLNKSVF

SEQ ID NO: 266120 - protein, 15 aa, Artificial Sequence
  Description of Artificial Sequence: Synthetic peptide
  Seed: SIGKVCRTLLAKSVF
SIIKVERRLLPKSVF

SEQ ID NO: 266121 - protein, 15 aa, Artificial Sequence
  Description of Artificial Sequence: Synthetic peptide
  Seed: SIGKVCRTLLAKSVF
SIIKVERRLLQKSVF

SEQ ID NO: 266122 - protein, 15 aa, Artificial Sequence
  Description of Artificial Sequence: Synthetic peptide
  Seed: SIGKVCRTLLAKSVF
SIIKVERRLLRKSVF

SEQ ID NO: 266123 - protein, 15 aa, Artificial Sequence
  Description of Artificial Sequence: Synthetic peptide
  Seed: SIGKVCRTLLAKSVF
SIIKVERRLLSKSVF

SEQ ID NO: 266124 - protein, 15 aa, Artificial Sequence
  Description of Artificial Sequence: Synthetic peptide
  Seed: SIGKVCRTLLAKSVF
SIIKVERRLLTKSVF

SEQ ID NO: 266125 - protein, 15 aa, Artificial Sequence
  Description of Artificial Sequence: Synthetic peptide
  Seed: SIGKVCRTLLAKSVF
SIIKVERRLLVKSVF

SEQ ID NO: 266126 - protein, 15 aa, Artificial Sequence
  Description of Artificial Sequence: Synthetic peptide
  Seed: SIGKVCRTLLAKSVF
SIIKVERRLLWKSVF

SEQ ID NO: 266127 - protein, 15 aa, Artificial Sequence
  Description of Artificial Sequence: Synthetic peptide
  Seed: SIGKVCRTLLAKSVF
SIIKVERRLLYKSVF

SEQ ID NO: 266128 - protein, 15 aa, Artificial Sequence
  Description of Artificial Sequence: Synthetic peptide
  Seed: SIGKVCRTLLAKSVF
SIIKVERSLLAKSVF

SEQ ID NO: 266129 - protein, 15 aa, Artificial Sequence
  Description of Artificial Sequence: Synthetic peptide
  Seed: SIGKVCRTLLAKSVF
SIIKVERSLLGKSVF

SEQ ID NO: 266130 - protein, 15 aa, Artificial Sequence
  Description of Artificial Sequence: Synthetic peptide
  Seed: SIGKVCRTLLAKSVF
SIIKVERSLLHKSVF

SEQ ID NO: 266131 - protein, 15 aa, Artificial Sequence
  Description of Artificial Sequence: Synthetic peptide
  Seed: SIGKVCRTLLAKSVF
SIIKVERSLLKKSVF

SEQ ID NO: 266132 - protein, 15 aa, Artificial Sequence
  Description of Artificial Sequence: Synthetic peptide
  Seed: SIGKVCRTLLAKSVF
SIIKVERSLLQKSVF

SEQ ID NO: 266133 - protein, 15 aa, Artificial Sequence
  Description of Artificial Sequence: Synthetic peptide
  Seed: SIGKVCRTLLAKSVF
SIIKVERSLLRKSVF

SEQ ID NO: 266134 - protein, 15 aa, Artificial Sequence
  Description of Artificial Sequence: Synthetic peptide
  Seed: SIGKVCRTLLAKSVF
SIIKVERSLLSKSVF

SEQ ID NO: 266135 - protein, 15 aa, Artificial Sequence
  Description of Artificial Sequence: Synthetic peptide
  Seed: SIGKVCRTLLAKSVF
SIIKVERTLLAKSVF

SEQ ID NO: 266136 - protein, 15 aa, Artificial Sequence
  Description of Artificial Sequence: Synthetic peptide
  Seed: SIGKVCRTLLAKSVF
SIIKVERTLLGKSVF

SEQ ID NO: 266137 - protein, 15 aa, Artificial Sequence
  Description of Artificial Sequence: Synthetic peptide
  Seed: SIGKVCRTLLAKSVF
SIIKVERTLLHKSVF

SEQ ID NO: 266138 - protein, 15 aa, Artificial Sequence
  Description of Artificial Sequence: Synthetic peptide
  Seed: SIGKVCRTLLAKSVF
SIIKVERTLLKKSVF

SEQ ID NO: 266139 - protein, 15 aa, Artificial Sequence
  Description of Artificial Sequence: Synthetic peptide
  Seed: SIGKVCRTLLAKSVF
SIIKVERTLLRKSVF

SEQ ID NO: 266140 - protein, 15 aa, Artificial Sequence
  Description of Artificial Sequence: Synthetic peptide
  Seed: SIGKVCRTLLAKSVF
SIIKVERTLLSKSVF

SEQ ID NO: 266141 - protein, 15 aa, Artificial Sequence
  Description of Artificial Sequence: Synthetic peptide
  Seed: SIGKVCRTLLAKSVF
SIIKVERVLLKKSVF

SEQ ID NO: 266142 - protein, 15 aa, Artificial Sequence
  Description of Artificial Sequence: Synthetic peptide
  Seed: SIGKVCRTLLAKSVF
SIIKVERVLLRKSVF

SEQ ID NO: 266143 - protein, 15 aa, Artificial Sequence
  Description of Artificial Sequence: Synthetic peptide
  Seed: SIGKVCRTLLAKSVF
SIIKVFRALLAKSVF

SEQ ID NO: 266144 - protein, 15 aa, Artificial Sequence
  Description of Artificial Sequence: Synthetic peptide
  Seed: SIGKVCRTLLAKSVF
SIIKVFRALLGKSVF

SEQ ID NO: 266145 - protein, 15 aa, Artificial Sequence
  Description of Artificial Sequence: Synthetic peptide
  Seed: SIGKVCRTLLAKSVF
SIIKVFRALLHKSVF

SEQ ID NO: 266146 - protein, 15 aa, Artificial Sequence
  Description of Artificial Sequence: Synthetic peptide
  Seed: SIGKVCRTLLAKSVF
SIIKVFRALLKKSVF

SEQ ID NO: 266147 - protein, 15 aa, Artificial Sequence
  Description of Artificial Sequence: Synthetic peptide
  Seed: SIGKVCRTLLAKSVF
SIIKVFRALLNKSVF

SEQ ID NO: 266148 - protein, 15 aa, Artificial Sequence
  Description of Artificial Sequence: Synthetic peptide
  Seed: SIGKVCRTLLAKSVF
SIIKVFRALLPKSVF

SEQ ID NO: 266149 - protein, 15 aa, Artificial Sequence
  Description of Artificial Sequence: Synthetic peptide
  Seed: SIGKVCRTLLAKSVF
SIIKVFRALLQKSVF

SEQ ID NO: 266150 - protein, 15 aa, Artificial Sequence
  Description of Artificial Sequence: Synthetic peptide
  Seed: SIGKVCRTLLAKSVF
SIIKVFRALLRKSVF

SEQ ID NO: 266151 - protein, 15 aa, Artificial Sequence
  Description of Artificial Sequence: Synthetic peptide
  Seed: SIGKVCRTLLAKSVF
SIIKVFRALLSKSVF

SEQ ID NO: 266152 - protein, 15 aa, Artificial Sequence
  Description of Artificial Sequence: Synthetic peptide
  Seed: SIGKVCRTLLAKSVF
SIIKVFRALLTKSVF

SEQ ID NO: 266153 - protein, 15 aa, Artificial Sequence
  Description of Artificial Sequence: Synthetic peptide
  Seed: SIGKVCRTLLAKSVF
SIIKVFRELLKKSVF

SEQ ID NO: 266154 - protein, 15 aa, Artificial Sequence
  Description of Artificial Sequence: Synthetic peptide
  Seed: SIGKVCRTLLAKSVF
SIIKVFRELLRKSVF

SEQ ID NO: 266155 - protein, 15 aa, Artificial Sequence
  Description of Artificial Sequence: Synthetic peptide
  Seed: SIGKVCRTLLAKSVF
SIIKVFRGLLAKSVF

SEQ ID NO: 266156 - protein, 15 aa, Artificial Sequence
  Description of Artificial Sequence: Synthetic peptide
  Seed: SIGKVCRTLLAKSVF
SIIKVFRGLLGKSVF

SEQ ID NO: 266157 - protein, 15 aa, Artificial Sequence
  Description of Artificial Sequence: Synthetic peptide
  Seed: SIGKVCRTLLAKSVF
SIIKVFRGLLHKSVF

SEQ ID NO: 266158 - protein, 15 aa, Artificial Sequence
  Description of Artificial Sequence: Synthetic peptide
  Seed: SIGKVCRTLLAKSVF
SIIKVFRGLLNKSVF

SEQ ID NO: 266159 - protein, 15 aa, Artificial Sequence
  Description of Artificial Sequence: Synthetic peptide
  Seed: SIGKVCRTLLAKSVF
SIIKVFRGLLQKSVF

SEQ ID NO: 266160 - protein, 15 aa, Artificial Sequence
  Description of Artificial Sequence: Synthetic peptide
  Seed: SIGKVCRTLLAKSVF
SIIKVFRGLLRKSVF

SEQ ID NO: 266161 - protein, 15 aa, Artificial Sequence
  Description of Artificial Sequence: Synthetic peptide
  Seed: SIGKVCRTLLAKSVF
SIIKVFRGLLSKSVF

SEQ ID NO: 266162 - protein, 15 aa, Artificial Sequence
  Description of Artificial Sequence: Synthetic peptide
  Seed: SIGKVCRTLLAKSVF
SIIKVFRGLLTKSVF

SEQ ID NO: 266163 - protein, 15 aa, Artificial Sequence
  Description of Artificial Sequence: Synthetic peptide
  Seed: SIGKVCRTLLAKSVF
SIIKVFRHLLAKSVF

SEQ ID NO: 266164 - protein, 15 aa, Artificial Sequence
  Description of Artificial Sequence: Synthetic peptide
  Seed: SIGKVCRTLLAKSVF
SIIKVFRHLLEKSVF

SEQ ID NO: 266165 - protein, 15 aa, Artificial Sequence
  Description of Artificial Sequence: Synthetic peptide
  Seed: SIGKVCRTLLAKSVF
SIIKVFRHLLGKSVF

SEQ ID NO: 266166 - protein, 15 aa, Artificial Sequence
  Description of Artificial Sequence: Synthetic peptide
  Seed: SIGKVCRTLLAKSVF
SIIKVFRHLLHKSVF

SEQ ID NO: 266167 - protein, 15 aa, Artificial Sequence
  Description of Artificial Sequence: Synthetic peptide
  Seed: SIGKVCRTLLAKSVF
SIIKVFRHLLIKSVF

SEQ ID NO: 266168 - protein, 15 aa, Artificial Sequence
  Description of Artificial Sequence: Synthetic peptide
  Seed: SIGKVCRTLLAKSVF
SIIKVFRHLLKKSVF

SEQ ID NO: 266169 - protein, 15 aa, Artificial Sequence
  Description of Artificial Sequence: Synthetic peptide
  Seed: SIGKVCRTLLAKSVF
SIIKVFRHLLMKSVF

SEQ ID NO: 266170 - protein, 15 aa, Artificial Sequence
  Description of Artificial Sequence: Synthetic peptide
  Seed: SIGKVCRTLLAKSVF
SIIKVFRHLLNKSVF

SEQ ID NO: 266171 - protein, 15 aa, Artificial Sequence
  Description of Artificial Sequence: Synthetic peptide
  Seed: SIGKVCRTLLAKSVF
SIIKVFRHLLPKSVF

SEQ ID NO: 266172 - protein, 15 aa, Artificial Sequence
  Description of Artificial Sequence: Synthetic peptide
  Seed: SIGKVCRTLLAKSVF
SIIKVFRHLLQKSVF

SEQ ID NO: 266173 - protein, 15 aa, Artificial Sequence
  Description of Artificial Sequence: Synthetic peptide
  Seed: SIGKVCRTLLAKSVF
SIIKVFRHLLRKSVF

SEQ ID NO: 266174 - protein, 15 aa, Artificial Sequence
  Description of Artificial Sequence: Synthetic peptide
  Seed: SIGKVCRTLLAKSVF
SIIKVFRHLLSKSVF

SEQ ID NO: 266175 - protein, 15 aa, Artificial Sequence
  Description of Artificial Sequence: Synthetic peptide
  Seed: SIGKVCRTLLAKSVF
SIIKVFRHLLTKSVF

SEQ ID NO: 266176 - protein, 15 aa, Artificial Sequence
  Description of Artificial Sequence: Synthetic peptide
  Seed: SIGKVCRTLLAKSVF
SIIKVFRHLLVKSVF

SEQ ID NO: 266177 - protein, 15 aa, Artificial Sequence
  Description of Artificial Sequence: Synthetic peptide
  Seed: SIGKVCRTLLAKSVF
SIIKVFRHLLYKSVF

SEQ ID NO: 266178 - protein, 15 aa, Artificial Sequence
  Description of Artificial Sequence: Synthetic peptide
  Seed: SIGKVCRTLLAKSVF
SIIKVFRILLHKSVF

SEQ ID NO: 266179 - protein, 15 aa, Artificial Sequence
  Description of Artificial Sequence: Synthetic peptide
  Seed: SIGKVCRTLLAKSVF
SIIKVFRKLLAKSVF

SEQ ID NO: 266180 - protein, 15 aa, Artificial Sequence
  Description of Artificial Sequence: Synthetic peptide
  Seed: SIGKVCRTLLAKSVF
SIIKVFRKLLCKSVF

SEQ ID NO: 266181 - protein, 15 aa, Artificial Sequence
  Description of Artificial Sequence: Synthetic peptide
  Seed: SIGKVCRTLLAKSVF
SIIKVFRKLLDKSVF

SEQ ID NO: 266182 - protein, 15 aa, Artificial Sequence
  Description of Artificial Sequence: Synthetic peptide
  Seed: SIGKVCRTLLAKSVF
SIIKVFRKLLEKSVF

SEQ ID NO: 266183 - protein, 15 aa, Artificial Sequence
  Description of Artificial Sequence: Synthetic peptide
  Seed: SIGKVCRTLLAKSVF
SIIKVFRKLLFKSVF

SEQ ID NO: 266184 - protein, 15 aa, Artificial Sequence
  Description of Artificial Sequence: Synthetic peptide
  Seed: SIGKVCRTLLAKSVF
SIIKVFRKLLGKSVF

SEQ ID NO: 266185 - protein, 15 aa, Artificial Sequence
  Description of Artificial Sequence: Synthetic peptide
  Seed: SIGKVCRTLLAKSVF
SIIKVFRKLLHKSVF

SEQ ID NO: 266186 - protein, 15 aa, Artificial Sequence
  Description of Artificial Sequence: Synthetic peptide
  Seed: SIGKVCRTLLAKSVF
SIIKVFRKLLIKSVF

SEQ ID NO: 266187 - protein, 15 aa, Artificial Sequence
  Description of Artificial Sequence: Synthetic peptide
  Seed: SIGKVCRTLLAKSVF
SIIKVFRKLLKKSVF

SEQ ID NO: 266188 - protein, 15 aa, Artificial Sequence
  Description of Artificial Sequence: Synthetic peptide
  Seed: SIGKVCRTLLAKSVF
SIIKVFRKLLLKSVF

SEQ ID NO: 266189 - protein, 15 aa, Artificial Sequence
  Description of Artificial Sequence: Synthetic peptide
  Seed: SIGKVCRTLLAKSVF
SIIKVFRKLLMKSVF

SEQ ID NO: 266190 - protein, 15 aa, Artificial Sequence
  Description of Artificial Sequence: Synthetic peptide
  Seed: SIGKVCRTLLAKSVF
SIIKVFRKLLNKSVF

SEQ ID NO: 266191 - protein, 15 aa, Artificial Sequence
  Description of Artificial Sequence: Synthetic peptide
  Seed: SIGKVCRTLLAKSVF
SIIKVFRKLLPKSVF

SEQ ID NO: 266192 - protein, 15 aa, Artificial Sequence
  Description of Artificial Sequence: Synthetic peptide
  Seed: SIGKVCRTLLAKSVF
SIIKVFRKLLQKSVF

SEQ ID NO: 266193 - protein, 15 aa, Artificial Sequence
  Description of Artificial Sequence: Synthetic peptide
  Seed: SIGKVCRTLLAKSVF
SIIKVFRKLLRKSVF

SEQ ID NO: 266194 - protein, 15 aa, Artificial Sequence
  Description of Artificial Sequence: Synthetic peptide
  Seed: SIGKVCRTLLAKSVF
SIIKVFRKLLSKSVF

SEQ ID NO: 266195 - protein, 15 aa, Artificial Sequence
  Description of Artificial Sequence: Synthetic peptide
  Seed: SIGKVCRTLLAKSVF
SIIKVFRKLLTKSVF

SEQ ID NO: 266196 - protein, 15 aa, Artificial Sequence
  Description of Artificial Sequence: Synthetic peptide
  Seed: SIGKVCRTLLAKSVF
SIIKVFRKLLVKSVF

SEQ ID NO: 266197 - protein, 15 aa, Artificial Sequence
  Description of Artificial Sequence: Synthetic peptide
  Seed: SIGKVCRTLLAKSVF
SIIKVFRKLLWKSVF

SEQ ID NO: 266198 - protein, 15 aa, Artificial Sequence
  Description of Artificial Sequence: Synthetic peptide
  Seed: SIGKVCRTLLAKSVF
SIIKVFRKLLYKSVF

SEQ ID NO: 266199 - protein, 15 aa, Artificial Sequence
  Description of Artificial Sequence: Synthetic peptide
  Seed: SIGKVCRTLLAKSVF
SIIKVFRLLLHKSVF

SEQ ID NO: 266200 - protein, 15 aa, Artificial Sequence
  Description of Artificial Sequence: Synthetic peptide
  Seed: SIGKVCRTLLAKSVF
SIIKVFRNLLAKSVF

SEQ ID NO: 266201 - protein, 15 aa, Artificial Sequence
  Description of Artificial Sequence: Synthetic peptide
  Seed: SIGKVCRTLLAKSVF
SIIKVFRNLLDKSVF

SEQ ID NO: 266202 - protein, 15 aa, Artificial Sequence
  Description of Artificial Sequence: Synthetic peptide
  Seed: SIGKVCRTLLAKSVF
SIIKVFRNLLEKSVF

SEQ ID NO: 266203 - protein, 15 aa, Artificial Sequence
  Description of Artificial Sequence: Synthetic peptide
  Seed: SIGKVCRTLLAKSVF
SIIKVFRNLLGKSVF

SEQ ID NO: 266204 - protein, 15 aa, Artificial Sequence
  Description of Artificial Sequence: Synthetic peptide
  Seed: SIGKVCRTLLAKSVF
SIIKVFRNLLHKSVF

SEQ ID NO: 266205 - protein, 15 aa, Artificial Sequence
  Description of Artificial Sequence: Synthetic peptide
  Seed: SIGKVCRTLLAKSVF
SIIKVFRNLLKKSVF

SEQ ID NO: 266206 - protein, 15 aa, Artificial Sequence
  Description of Artificial Sequence: Synthetic peptide
  Seed: SIGKVCRTLLAKSVF
SIIKVFRNLLNKSVF

SEQ ID NO: 266207 - protein, 15 aa, Artificial Sequence
  Description of Artificial Sequence: Synthetic peptide
  Seed: SIGKVCRTLLAKSVF
SIIKVFRNLLQKSVF

SEQ ID NO: 266208 - protein, 15 aa, Artificial Sequence
  Description of Artificial Sequence: Synthetic peptide
  Seed: SIGKVCRTLLAKSVF
SIIKVFRNLLRKSVF

SEQ ID NO: 266209 - protein, 15 aa, Artificial Sequence
  Description of Artificial Sequence: Synthetic peptide
  Seed: SIGKVCRTLLAKSVF
SIIKVFRNLLSKSVF

SEQ ID NO: 266210 - protein, 15 aa, Artificial Sequence
  Description of Artificial Sequence: Synthetic peptide
  Seed: SIGKVCRTLLAKSVF
SIIKVFRNLLTKSVF

SEQ ID NO: 266211 - protein, 15 aa, Artificial Sequence
  Description of Artificial Sequence: Synthetic peptide
  Seed: SIGKVCRTLLAKSVF
SIIKVFRPLLAKSVF

SEQ ID NO: 266212 - protein, 15 aa, Artificial Sequence
  Description of Artificial Sequence: Synthetic peptide
  Seed: SIGKVCRTLLAKSVF
SIIKVFRPLLGKSVF

SEQ ID NO: 266213 - protein, 15 aa, Artificial Sequence
  Description of Artificial Sequence: Synthetic peptide
  Seed: SIGKVCRTLLAKSVF
SIIKVFRPLLHKSVF

SEQ ID NO: 266214 - protein, 15 aa, Artificial Sequence
  Description of Artificial Sequence: Synthetic peptide
  Seed: SIGKVCRTLLAKSVF
SIIKVFRPLLIKSVF

SEQ ID NO: 266215 - protein, 15 aa, Artificial Sequence
  Description of Artificial Sequence: Synthetic peptide
  Seed: SIGKVCRTLLAKSVF
SIIKVFRPLLLKSVF

SEQ ID NO: 266216 - protein, 15 aa, Artificial Sequence
  Description of Artificial Sequence: Synthetic peptide
  Seed: SIGKVCRTLLAKSVF
SIIKVFRPLLMKSVF

SEQ ID NO: 266217 - protein, 15 aa, Artificial Sequence
  Description of Artificial Sequence: Synthetic peptide
  Seed: SIGKVCRTLLAKSVF
SIIKVFRPLLNKSVF

SEQ ID NO: 266218 - protein, 15 aa, Artificial Sequence
  Description of Artificial Sequence: Synthetic peptide
  Seed: SIGKVCRTLLAKSVF
SIIKVFRPLLPKSVF

SEQ ID NO: 266219 - protein, 15 aa, Artificial Sequence
  Description of Artificial Sequence: Synthetic peptide
  Seed: SIGKVCRTLLAKSVF
SIIKVFRPLLQKSVF

SEQ ID NO: 266220 - protein, 15 aa, Artificial Sequence
  Description of Artificial Sequence: Synthetic peptide
  Seed: SIGKVCRTLLAKSVF
SIIKVFRPLLRKSVF

SEQ ID NO: 266221 - protein, 15 aa, Artificial Sequence
  Description of Artificial Sequence: Synthetic peptide
  Seed: SIGKVCRTLLAKSVF
SIIKVFRPLLSKSVF

SEQ ID NO: 266222 - protein, 15 aa, Artificial Sequence
  Description of Artificial Sequence: Synthetic peptide
  Seed: SIGKVCRTLLAKSVF
SIIKVFRPLLTKSVF

SEQ ID NO: 266223 - protein, 15 aa, Artificial Sequence
  Description of Artificial Sequence: Synthetic peptide
  Seed: SIGKVCRTLLAKSVF
SIIKVFRPLLVKSVF

SEQ ID NO: 266224 - protein, 15 aa, Artificial Sequence
  Description of Artificial Sequence: Synthetic peptide
  Seed: SIGKVCRTLLAKSVF
SIIKVFRPLLYKSVF

SEQ ID NO: 266225 - protein, 15 aa, Artificial Sequence
  Description of Artificial Sequence: Synthetic peptide
  Seed: SIGKVCRTLLAKSVF
SIIKVFRQLLAKSVF

SEQ ID NO: 266226 - protein, 15 aa, Artificial Sequence
  Description of Artificial Sequence: Synthetic peptide
  Seed: SIGKVCRTLLAKSVF
SIIKVFRQLLHKSVF

SEQ ID NO: 266227 - protein, 15 aa, Artificial Sequence
  Description of Artificial Sequence: Synthetic peptide
  Seed: SIGKVCRTLLAKSVF
SIIKVFRQLLKKSVF

SEQ ID NO: 266228 - protein, 15 aa, Artificial Sequence
  Description of Artificial Sequence: Synthetic peptide
  Seed: SIGKVCRTLLAKSVF
SIIKVFRQLLRKSVF

SEQ ID NO: 266229 - protein, 15 aa, Artificial Sequence
  Description of Artificial Sequence: Synthetic peptide
  Seed: SIGKVCRTLLAKSVF
SIIKVFRQLLSKSVF

SEQ ID NO: 266230 - protein, 15 aa, Artificial Sequence
  Description of Artificial Sequence: Synthetic peptide
  Seed: SIGKVCRTLLAKSVF
SIIKVFRRLLAKSVF

SEQ ID NO: 266231 - protein, 15 aa, Artificial Sequence
  Description of Artificial Sequence: Synthetic peptide
  Seed: SIGKVCRTLLAKSVF
SIIKVFRRLLCKSVF

SEQ ID NO: 266232 - protein, 15 aa, Artificial Sequence
  Description of Artificial Sequence: Synthetic peptide
  Seed: SIGKVCRTLLAKSVF
SIIKVFRRLLDKSVF

SEQ ID NO: 266233 - protein, 15 aa, Artificial Sequence
  Description of Artificial Sequence: Synthetic peptide
  Seed: SIGKVCRTLLAKSVF
SIIKVFRRLLEKSVF

SEQ ID NO: 266234 - protein, 15 aa, Artificial Sequence
  Description of Artificial Sequence: Synthetic peptide
  Seed: SIGKVCRTLLAKSVF
SIIKVFRRLLFKSVF

SEQ ID NO: 266235 - protein, 15 aa, Artificial Sequence
  Description of Artificial Sequence: Synthetic peptide
  Seed: SIGKVCRTLLAKSVF
SIIKVFRRLLGKSVF

SEQ ID NO: 266236 - protein, 15 aa, Artificial Sequence
  Description of Artificial Sequence: Synthetic peptide
  Seed: SIGKVCRTLLAKSVF
SIIKVFRRLLHKSVF

SEQ ID NO: 266237 - protein, 15 aa, Artificial Sequence
  Description of Artificial Sequence: Synthetic peptide
  Seed: SIGKVCRTLLAKSVF
SIIKVFRRLLIKSVF

SEQ ID NO: 266238 - protein, 15 aa, Artificial Sequence
  Description of Artificial Sequence: Synthetic peptide
  Seed: SIGKVCRTLLAKSVF
SIIKVFRRLLKKSVF

SEQ ID NO: 266239 - protein, 15 aa, Artificial Sequence
  Description of Artificial Sequence: Synthetic peptide
  Seed: SIGKVCRTLLAKSVF
SIIKVFRRLLLKSVF

SEQ ID NO: 266240 - protein, 15 aa, Artificial Sequence
  Description of Artificial Sequence: Synthetic peptide
  Seed: SIGKVCRTLLAKSVF
SIIKVFRRLLMKSVF

SEQ ID NO: 266241 - protein, 15 aa, Artificial Sequence
  Description of Artificial Sequence: Synthetic peptide
  Seed: SIGKVCRTLLAKSVF
SIIKVFRRLLNKSVF

SEQ ID NO: 266242 - protein, 15 aa, Artificial Sequence
  Description of Artificial Sequence: Synthetic peptide
  Seed: SIGKVCRTLLAKSVF
SIIKVFRRLLPKSVF

SEQ ID NO: 266243 - protein, 15 aa, Artificial Sequence
  Description of Artificial Sequence: Synthetic peptide
  Seed: SIGKVCRTLLAKSVF
SIIKVFRRLLQKSVF

SEQ ID NO: 266244 - protein, 15 aa, Artificial Sequence
  Description of Artificial Sequence: Synthetic peptide
  Seed: SIGKVCRTLLAKSVF
SIIKVFRRLLRKSVF

SEQ ID NO: 266245 - protein, 15 aa, Artificial Sequence
  Description of Artificial Sequence: Synthetic peptide
  Seed: SIGKVCRTLLAKSVF
SIIKVFRRLLSKSVF

SEQ ID NO: 266246 - protein, 15 aa, Artificial Sequence
  Description of Artificial Sequence: Synthetic peptide
  Seed: SIGKVCRTLLAKSVF
SIIKVFRRLLTKSVF

SEQ ID NO: 266247 - protein, 15 aa, Artificial Sequence
  Description of Artificial Sequence: Synthetic peptide
  Seed: SIGKVCRTLLAKSVF
SIIKVFRRLLVKSVF

SEQ ID NO: 266248 - protein, 15 aa, Artificial Sequence
  Description of Artificial Sequence: Synthetic peptide
  Seed: SIGKVCRTLLAKSVF
SIIKVFRRLLWKSVF

SEQ ID NO: 266249 - protein, 15 aa, Artificial Sequence
  Description of Artificial Sequence: Synthetic peptide
  Seed: SIGKVCRTLLAKSVF
SIIKVFRRLLYKSVF

SEQ ID NO: 266250 - protein, 15 aa, Artificial Sequence
  Description of Artificial Sequence: Synthetic peptide
  Seed: SIGKVCRTLLAKSVF
SIIKVFRSLLAKSVF

SEQ ID NO: 266251 - protein, 15 aa, Artificial Sequence
  Description of Artificial Sequence: Synthetic peptide
  Seed: SIGKVCRTLLAKSVF
SIIKVFRSLLDKSVF

SEQ ID NO: 266252 - protein, 15 aa, Artificial Sequence
  Description of Artificial Sequence: Synthetic peptide
  Seed: SIGKVCRTLLAKSVF
SIIKVFRSLLEKSVF

SEQ ID NO: 266253 - protein, 15 aa, Artificial Sequence
  Description of Artificial Sequence: Synthetic peptide
  Seed: SIGKVCRTLLAKSVF
SIIKVFRSLLGKSVF

SEQ ID NO: 266254 - protein, 15 aa, Artificial Sequence
  Description of Artificial Sequence: Synthetic peptide
  Seed: SIGKVCRTLLAKSVF
SIIKVFRSLLHKSVF

SEQ ID NO: 266255 - protein, 15 aa, Artificial Sequence
  Description of Artificial Sequence: Synthetic peptide
  Seed: SIGKVCRTLLAKSVF
SIIKVFRSLLKKSVF

SEQ ID NO: 266256 - protein, 15 aa, Artificial Sequence
  Description of Artificial Sequence: Synthetic peptide
  Seed: SIGKVCRTLLAKSVF
SIIKVFRSLLNKSVF

SEQ ID NO: 266257 - protein, 15 aa, Artificial Sequence
  Description of Artificial Sequence: Synthetic peptide
  Seed: SIGKVCRTLLAKSVF
SIIKVFRSLLPKSVF

SEQ ID NO: 266258 - protein, 15 aa, Artificial Sequence
  Description of Artificial Sequence: Synthetic peptide
  Seed: SIGKVCRTLLAKSVF
SIIKVFRSLLQKSVF

SEQ ID NO: 266259 - protein, 15 aa, Artificial Sequence
  Description of Artificial Sequence: Synthetic peptide
  Seed: SIGKVCRTLLAKSVF
SIIKVFRSLLRKSVF

SEQ ID NO: 266260 - protein, 15 aa, Artificial Sequence
  Description of Artificial Sequence: Synthetic peptide
  Seed: SIGKVCRTLLAKSVF
SIIKVFRSLLSKSVF

SEQ ID NO: 266261 - protein, 15 aa, Artificial Sequence
  Description of Artificial Sequence: Synthetic peptide
  Seed: SIGKVCRTLLAKSVF
SIIKVFRSLLTKSVF

SEQ ID NO: 266262 - protein, 15 aa, Artificial Sequence
  Description of Artificial Sequence: Synthetic peptide
  Seed: SIGKVCRTLLAKSVF
SIIKVFRTLLAKSVF

SEQ ID NO: 266263 - protein, 15 aa, Artificial Sequence
  Description of Artificial Sequence: Synthetic peptide
  Seed: SIGKVCRTLLAKSVF
SIIKVFRTLLDKSVF

SEQ ID NO: 266264 - protein, 15 aa, Artificial Sequence
  Description of Artificial Sequence: Synthetic peptide
  Seed: SIGKVCRTLLAKSVF
SIIKVFRTLLEKSVF

SEQ ID NO: 266265 - protein, 15 aa, Artificial Sequence
  Description of Artificial Sequence: Synthetic peptide
  Seed: SIGKVCRTLLAKSVF
SIIKVFRTLLGKSVF

SEQ ID NO: 266266 - protein, 15 aa, Artificial Sequence
  Description of Artificial Sequence: Synthetic peptide
  Seed: SIGKVCRTLLAKSVF
SIIKVFRTLLHKSVF

SEQ ID NO: 266267 - protein, 15 aa, Artificial Sequence
  Description of Artificial Sequence: Synthetic peptide
  Seed: SIGKVCRTLLAKSVF
SIIKVFRTLLKKSVF

SEQ ID NO: 266268 - protein, 15 aa, Artificial Sequence
  Description of Artificial Sequence: Synthetic peptide
  Seed: SIGKVCRTLLAKSVF
SIIKVFRTLLMKSVF

SEQ ID NO: 266269 - protein, 15 aa, Artificial Sequence
  Description of Artificial Sequence: Synthetic peptide
  Seed: SIGKVCRTLLAKSVF
SIIKVFRTLLNKSVF

SEQ ID NO: 266270 - protein, 15 aa, Artificial Sequence
  Description of Artificial Sequence: Synthetic peptide
  Seed: SIGKVCRTLLAKSVF
SIIKVFRTLLQKSVF

SEQ ID NO: 266271 - protein, 15 aa, Artificial Sequence
  Description of Artificial Sequence: Synthetic peptide
  Seed: SIGKVCRTLLAKSVF
SIIKVFRTLLRKSVF

SEQ ID NO: 266272 - protein, 15 aa, Artificial Sequence
  Description of Artificial Sequence: Synthetic peptide
  Seed: SIGKVCRTLLAKSVF
SIIKVFRTLLSKSVF

SEQ ID NO: 266273 - protein, 15 aa, Artificial Sequence
  Description of Artificial Sequence: Synthetic peptide
  Seed: SIGKVCRTLLAKSVF
SIIKVFRTLLTKSVF

SEQ ID NO: 266274 - protein, 15 aa, Artificial Sequence
  Description of Artificial Sequence: Synthetic peptide
  Seed: SIGKVCRTLLAKSVF
SIIKVFRVLLHKSVF

SEQ ID NO: 266275 - protein, 15 aa, Artificial Sequence
  Description of Artificial Sequence: Synthetic peptide
  Seed: SIGKVCRTLLAKSVF
SIIKVGRALLGKSVF

SEQ ID NO: 266276 - protein, 15 aa, Artificial Sequence
  Description of Artificial Sequence: Synthetic peptide
  Seed: SIGKVCRTLLAKSVF
SIIKVGRALLQKSVF

SEQ ID NO: 266277 - protein, 15 aa, Artificial Sequence
  Description of Artificial Sequence: Synthetic peptide
  Seed: SIGKVCRTLLAKSVF
SIIKVGRHLLAKSVF

SEQ ID NO: 266278 - protein, 15 aa, Artificial Sequence
  Description of Artificial Sequence: Synthetic peptide
  Seed: SIGKVCRTLLAKSVF
SIIKVGRHLLGKSVF

SEQ ID NO: 266279 - protein, 15 aa, Artificial Sequence
  Description of Artificial Sequence: Synthetic peptide
  Seed: SIGKVCRTLLAKSVF
SIIKVGRHLLQKSVF

SEQ ID NO: 266280 - protein, 15 aa, Artificial Sequence
  Description of Artificial Sequence: Synthetic peptide
  Seed: SIGKVCRTLLAKSVF
SIIKVGRHLLSKSVF

SEQ ID NO: 266281 - protein, 15 aa, Artificial Sequence
  Description of Artificial Sequence: Synthetic peptide
  Seed: SIGKVCRTLLAKSVF
SIIKVGRILLQKSVF

SEQ ID NO: 266282 - protein, 15 aa, Artificial Sequence
  Description of Artificial Sequence: Synthetic peptide
  Seed: SIGKVCRTLLAKSVF
SIIKVGRKLLAKSVF

SEQ ID NO: 266283 - protein, 15 aa, Artificial Sequence
  Description of Artificial Sequence: Synthetic peptide
  Seed: SIGKVCRTLLAKSVF
SIIKVGRKLLCKSVF

SEQ ID NO: 266284 - protein, 15 aa, Artificial Sequence
  Description of Artificial Sequence: Synthetic peptide
  Seed: SIGKVCRTLLAKSVF
SIIKVGRKLLDKSVF

SEQ ID NO: 266285 - protein, 15 aa, Artificial Sequence
  Description of Artificial Sequence: Synthetic peptide
  Seed: SIGKVCRTLLAKSVF
SIIKVGRKLLEKSVF

SEQ ID NO: 266286 - protein, 15 aa, Artificial Sequence
  Description of Artificial Sequence: Synthetic peptide
  Seed: SIGKVCRTLLAKSVF
SIIKVGRKLLFKSVF

SEQ ID NO: 266287 - protein, 15 aa, Artificial Sequence
  Description of Artificial Sequence: Synthetic peptide
  Seed: SIGKVCRTLLAKSVF
SIIKVGRKLLGKSVF

SEQ ID NO: 266288 - protein, 15 aa, Artificial Sequence
  Description of Artificial Sequence: Synthetic peptide
  Seed: SIGKVCRTLLAKSVF
SIIKVGRKLLHKSVF

SEQ ID NO: 266289 - protein, 15 aa, Artificial Sequence
  Description of Artificial Sequence: Synthetic peptide
  Seed: SIGKVCRTLLAKSVF
SIIKVGRKLLIKSVF

SEQ ID NO: 266290 - protein, 15 aa, Artificial Sequence
  Description of Artificial Sequence: Synthetic peptide
  Seed: SIGKVCRTLLAKSVF
SIIKVGRKLLKKSVF

SEQ ID NO: 266291 - protein, 15 aa, Artificial Sequence
  Description of Artificial Sequence: Synthetic peptide
  Seed: SIGKVCRTLLAKSVF
SIIKVGRKLLLKSVF

SEQ ID NO: 266292 - protein, 15 aa, Artificial Sequence
  Description of Artificial Sequence: Synthetic peptide
  Seed: SIGKVCRTLLAKSVF
SIIKVGRKLLMKSVF

SEQ ID NO: 266293 - protein, 15 aa, Artificial Sequence
  Description of Artificial Sequence: Synthetic peptide
  Seed: SIGKVCRTLLAKSVF
SIIKVGRKLLNKSVF

SEQ ID NO: 266294 - protein, 15 aa, Artificial Sequence
  Description of Artificial Sequence: Synthetic peptide
  Seed: SIGKVCRTLLAKSVF
SIIKVGRKLLPKSVF

SEQ ID NO: 266295 - protein, 15 aa, Artificial Sequence
  Description of Artificial Sequence: Synthetic peptide
  Seed: SIGKVCRTLLAKSVF
SIIKVGRKLLQKSVF

SEQ ID NO: 266296 - protein, 15 aa, Artificial Sequence
  Description of Artificial Sequence: Synthetic peptide
  Seed: SIGKVCRTLLAKSVF
SIIKVGRKLLRKSVF

SEQ ID NO: 266297 - protein, 15 aa, Artificial Sequence
  Description of Artificial Sequence: Synthetic peptide
  Seed: SIGKVCRTLLAKSVF
SIIKVGRKLLSKSVF

SEQ ID NO: 266298 - protein, 15 aa, Artificial Sequence
  Description of Artificial Sequence: Synthetic peptide
  Seed: SIGKVCRTLLAKSVF
SIIKVGRKLLTKSVF

SEQ ID NO: 266299 - protein, 15 aa, Artificial Sequence
  Description of Artificial Sequence: Synthetic peptide
  Seed: SIGKVCRTLLAKSVF
SIIKVGRKLLVKSVF

SEQ ID NO: 266300 - protein, 15 aa, Artificial Sequence
  Description of Artificial Sequence: Synthetic peptide
  Seed: SIGKVCRTLLAKSVF
SIIKVGRKLLYKSVF

SEQ ID NO: 266301 - protein, 15 aa, Artificial Sequence
  Description of Artificial Sequence: Synthetic peptide
  Seed: SIGKVCRTLLAKSVF
SIIKVGRNLLAKSVF

SEQ ID NO: 266302 - protein, 15 aa, Artificial Sequence
  Description of Artificial Sequence: Synthetic peptide
  Seed: SIGKVCRTLLAKSVF
SIIKVGRNLLGKSVF

SEQ ID NO: 266303 - protein, 15 aa, Artificial Sequence
  Description of Artificial Sequence: Synthetic peptide
  Seed: SIGKVCRTLLAKSVF
SIIKVGRNLLQKSVF

SEQ ID NO: 266304 - protein, 15 aa, Artificial Sequence
  Description of Artificial Sequence: Synthetic peptide
  Seed: SIGKVCRTLLAKSVF
SIIKVGRNLLSKSVF

SEQ ID NO: 266305 - protein, 15 aa, Artificial Sequence
  Description of Artificial Sequence: Synthetic peptide
  Seed: SIGKVCRTLLAKSVF
SIIKVGRPLLGKSVF

SEQ ID NO: 266306 - protein, 15 aa, Artificial Sequence
  Description of Artificial Sequence: Synthetic peptide
  Seed: SIGKVCRTLLAKSVF
SIIKVGRPLLQKSVF

SEQ ID NO: 266307 - protein, 15 aa, Artificial Sequence
  Description of Artificial Sequence: Synthetic peptide
  Seed: SIGKVCRTLLAKSVF
SIIKVGRQLLQKSVF

SEQ ID NO: 266308 - protein, 15 aa, Artificial Sequence
  Description of Artificial Sequence: Synthetic peptide
  Seed: SIGKVCRTLLAKSVF
SIIKVGRQLLSKSVF

SEQ ID NO: 266309 - protein, 15 aa, Artificial Sequence
  Description of Artificial Sequence: Synthetic peptide
  Seed: SIGKVCRTLLAKSVF
SIIKVGRRLLAKSVF

SEQ ID NO: 266310 - protein, 15 aa, Artificial Sequence
  Description of Artificial Sequence: Synthetic peptide
  Seed: SIGKVCRTLLAKSVF
SIIKVGRRLLCKSVF

SEQ ID NO: 266311 - protein, 15 aa, Artificial Sequence
  Description of Artificial Sequence: Synthetic peptide
  Seed: SIGKVCRTLLAKSVF
SIIKVGRRLLDKSVF

SEQ ID NO: 266312 - protein, 15 aa, Artificial Sequence
  Description of Artificial Sequence: Synthetic peptide
  Seed: SIGKVCRTLLAKSVF
SIIKVGRRLLEKSVF

SEQ ID NO: 266313 - protein, 15 aa, Artificial Sequence
  Description of Artificial Sequence: Synthetic peptide
  Seed: SIGKVCRTLLAKSVF
SIIKVGRRLLFKSVF

SEQ ID NO: 266314 - protein, 15 aa, Artificial Sequence
  Description of Artificial Sequence: Synthetic peptide
  Seed: SIGKVCRTLLAKSVF
SIIKVGRRLLGKSVF

SEQ ID NO: 266315 - protein, 15 aa, Artificial Sequence
  Description of Artificial Sequence: Synthetic peptide
  Seed: SIGKVCRTLLAKSVF
SIIKVGRRLLHKSVF

SEQ ID NO: 266316 - protein, 15 aa, Artificial Sequence
  Description of Artificial Sequence: Synthetic peptide
  Seed: SIGKVCRTLLAKSVF
SIIKVGRRLLIKSVF

SEQ ID NO: 266317 - protein, 15 aa, Artificial Sequence
  Description of Artificial Sequence: Synthetic peptide
  Seed: SIGKVCRTLLAKSVF
SIIKVGRRLLKKSVF

SEQ ID NO: 266318 - protein, 15 aa, Artificial Sequence
  Description of Artificial Sequence: Synthetic peptide
  Seed: SIGKVCRTLLAKSVF
SIIKVGRRLLLKSVF

SEQ ID NO: 266319 - protein, 15 aa, Artificial Sequence
  Description of Artificial Sequence: Synthetic peptide
  Seed: SIGKVCRTLLAKSVF
SIIKVGRRLLMKSVF

SEQ ID NO: 266320 - protein, 15 aa, Artificial Sequence
  Description of Artificial Sequence: Synthetic peptide
  Seed: SIGKVCRTLLAKSVF
SIIKVGRRLLNKSVF

SEQ ID NO: 266321 - protein, 15 aa, Artificial Sequence
  Description of Artificial Sequence: Synthetic peptide
  Seed: SIGKVCRTLLAKSVF
SIIKVGRRLLPKSVF

SEQ ID NO: 266322 - protein, 15 aa, Artificial Sequence
  Description of Artificial Sequence: Synthetic peptide
  Seed: SIGKVCRTLLAKSVF
SIIKVGRRLLQKSVF

SEQ ID NO: 266323 - protein, 15 aa, Artificial Sequence
  Description of Artificial Sequence: Synthetic peptide
  Seed: SIGKVCRTLLAKSVF
SIIKVGRRLLRKSVF

SEQ ID NO: 266324 - protein, 15 aa, Artificial Sequence
  Description of Artificial Sequence: Synthetic peptide
  Seed: SIGKVCRTLLAKSVF
SIIKVGRRLLSKSVF

SEQ ID NO: 266325 - protein, 15 aa, Artificial Sequence
  Description of Artificial Sequence: Synthetic peptide
  Seed: SIGKVCRTLLAKSVF
SIIKVGRRLLTKSVF

SEQ ID NO: 266326 - protein, 15 aa, Artificial Sequence
  Description of Artificial Sequence: Synthetic peptide
  Seed: SIGKVCRTLLAKSVF
SIIKVGRRLLVKSVF

SEQ ID NO: 266327 - protein, 15 aa, Artificial Sequence
  Description of Artificial Sequence: Synthetic peptide
  Seed: SIGKVCRTLLAKSVF
SIIKVGRRLLYKSVF

SEQ ID NO: 266328 - protein, 15 aa, Artificial Sequence
  Description of Artificial Sequence: Synthetic peptide
  Seed: SIGKVCRTLLAKSVF
SIIKVGRSLLAKSVF

SEQ ID NO: 266329 - protein, 15 aa, Artificial Sequence
  Description of Artificial Sequence: Synthetic peptide
  Seed: SIGKVCRTLLAKSVF
SIIKVGRSLLGKSVF

SEQ ID NO: 266330 - protein, 15 aa, Artificial Sequence
  Description of Artificial Sequence: Synthetic peptide
  Seed: SIGKVCRTLLAKSVF
SIIKVGRSLLQKSVF

SEQ ID NO: 266331 - protein, 15 aa, Artificial Sequence
  Description of Artificial Sequence: Synthetic peptide
  Seed: SIGKVCRTLLAKSVF
SIIKVGRSLLSKSVF

SEQ ID NO: 266332 - protein, 15 aa, Artificial Sequence
  Description of Artificial Sequence: Synthetic peptide
  Seed: SIGKVCRTLLAKSVF
SIIKVGRTLLAKSVF

SEQ ID NO: 266333 - protein, 15 aa, Artificial Sequence
  Description of Artificial Sequence: Synthetic peptide
  Seed: SIGKVCRTLLAKSVF
SIIKVGRTLLGKSVF

SEQ ID NO: 266334 - protein, 15 aa, Artificial Sequence
  Description of Artificial Sequence: Synthetic peptide
  Seed: SIGKVCRTLLAKSVF
SIIKVGRTLLHKSVF

SEQ ID NO: 266335 - protein, 15 aa, Artificial Sequence
  Description of Artificial Sequence: Synthetic peptide
  Seed: SIGKVCRTLLAKSVF
SIIKVGRTLLQKSVF

SEQ ID NO: 266336 - protein, 15 aa, Artificial Sequence
  Description of Artificial Sequence: Synthetic peptide
  Seed: SIGKVCRTLLAKSVF
SIIKVGRTLLRKSVF

SEQ ID NO: 266337 - protein, 15 aa, Artificial Sequence
  Description of Artificial Sequence: Synthetic peptide
  Seed: SIGKVCRTLLAKSVF
SIIKVGRTLLSKSVF

SEQ ID NO: 266338 - protein, 15 aa, Artificial Sequence
  Description of Artificial Sequence: Synthetic peptide
  Seed: SIGKVCRTLLAKSVF
SIIKVGRVLLAKSVF

SEQ ID NO: 266339 - protein, 15 aa, Artificial Sequence
  Description of Artificial Sequence: Synthetic peptide
  Seed: SIGKVCRTLLAKSVF
SIIKVGRVLLSKSVF

SEQ ID NO: 266340 - protein, 15 aa, Artificial Sequence
  Description of Artificial Sequence: Synthetic peptide
  Seed: SIGKVCRTLLAKSVF
SIIKVHRALLAKSVF

SEQ ID NO: 266341 - protein, 15 aa, Artificial Sequence
  Description of Artificial Sequence: Synthetic peptide
  Seed: SIGKVCRTLLAKSVF
SIIKVHRALLCKSVF

SEQ ID NO: 266342 - protein, 15 aa, Artificial Sequence
  Description of Artificial Sequence: Synthetic peptide
  Seed: SIGKVCRTLLAKSVF
SIIKVHRALLEKSVF

SEQ ID NO: 266343 - protein, 15 aa, Artificial Sequence
  Description of Artificial Sequence: Synthetic peptide
  Seed: SIGKVCRTLLAKSVF
SIIKVHRALLGKSVF

SEQ ID NO: 266344 - protein, 15 aa, Artificial Sequence
  Description of Artificial Sequence: Synthetic peptide
  Seed: SIGKVCRTLLAKSVF
SIIKVHRALLHKSVF

SEQ ID NO: 266345 - protein, 15 aa, Artificial Sequence
  Description of Artificial Sequence: Synthetic peptide
  Seed: SIGKVCRTLLAKSVF
SIIKVHRALLMKSVF

SEQ ID NO: 266346 - protein, 15 aa, Artificial Sequence
  Description of Artificial Sequence: Synthetic peptide
  Seed: SIGKVCRTLLAKSVF
SIIKVHRALLQKSVF

SEQ ID NO: 266347 - protein, 15 aa, Artificial Sequence
  Description of Artificial Sequence: Synthetic peptide
  Seed: SIGKVCRTLLAKSVF
SIIKVHRALLRKSVF

SEQ ID NO: 266348 - protein, 15 aa, Artificial Sequence
  Description of Artificial Sequence: Synthetic peptide
  Seed: SIGKVCRTLLAKSVF
SIIKVHRALLSKSVF

SEQ ID NO: 266349 - protein, 15 aa, Artificial Sequence
  Description of Artificial Sequence: Synthetic peptide
  Seed: SIGKVCRTLLAKSVF
SIIKVHRALLVKSVF

SEQ ID NO: 266350 - protein, 15 aa, Artificial Sequence
  Description of Artificial Sequence: Synthetic peptide
  Seed: SIGKVCRTLLAKSVF
SIIKVHRALLYKSVF

SEQ ID NO: 266351 - protein, 15 aa, Artificial Sequence
  Description of Artificial Sequence: Synthetic peptide
  Seed: SIGKVCRTLLAKSVF
SIIKVHRCLLRKSVF

SEQ ID NO: 266352 - protein, 15 aa, Artificial Sequence
  Description of Artificial Sequence: Synthetic peptide
  Seed: SIGKVCRTLLAKSVF
SIIKVHRELLRKSVF

SEQ ID NO: 266353 - protein, 15 aa, Artificial Sequence
  Description of Artificial Sequence: Synthetic peptide
  Seed: SIGKVCRTLLAKSVF
SIIKVHRGLLAKSVF

SEQ ID NO: 266354 - protein, 15 aa, Artificial Sequence
  Description of Artificial Sequence: Synthetic peptide
  Seed: SIGKVCRTLLAKSVF
SIIKVHRGLLGKSVF

SEQ ID NO: 266355 - protein, 15 aa, Artificial Sequence
  Description of Artificial Sequence: Synthetic peptide
  Seed: SIGKVCRTLLAKSVF
SIIKVHRGLLQKSVF

SEQ ID NO: 266356 - protein, 15 aa, Artificial Sequence
  Description of Artificial Sequence: Synthetic peptide
  Seed: SIGKVCRTLLAKSVF
SIIKVHRGLLSKSVF

SEQ ID NO: 266357 - protein, 15 aa, Artificial Sequence
  Description of Artificial Sequence: Synthetic peptide
  Seed: SIGKVCRTLLAKSVF
SIIKVHRHLLAKSVF

SEQ ID NO: 266358 - protein, 15 aa, Artificial Sequence
  Description of Artificial Sequence: Synthetic peptide
  Seed: SIGKVCRTLLAKSVF
SIIKVHRHLLGKSVF

SEQ ID NO: 266359 - protein, 15 aa, Artificial Sequence
  Description of Artificial Sequence: Synthetic peptide
  Seed: SIGKVCRTLLAKSVF
SIIKVHRHLLHKSVF

SEQ ID NO: 266360 - protein, 15 aa, Artificial Sequence
  Description of Artificial Sequence: Synthetic peptide
  Seed: SIGKVCRTLLAKSVF
SIIKVHRHLLMKSVF

SEQ ID NO: 266361 - protein, 15 aa, Artificial Sequence
  Description of Artificial Sequence: Synthetic peptide
  Seed: SIGKVCRTLLAKSVF
SIIKVHRHLLQKSVF

SEQ ID NO: 266362 - protein, 15 aa, Artificial Sequence
  Description of Artificial Sequence: Synthetic peptide
  Seed: SIGKVCRTLLAKSVF
SIIKVHRHLLRKSVF

SEQ ID NO: 266363 - protein, 15 aa, Artificial Sequence
  Description of Artificial Sequence: Synthetic peptide
  Seed: SIGKVCRTLLAKSVF
SIIKVHRHLLSKSVF

SEQ ID NO: 266364 - protein, 15 aa, Artificial Sequence
  Description of Artificial Sequence: Synthetic peptide
  Seed: SIGKVCRTLLAKSVF
SIIKVHRHLLVKSVF

SEQ ID NO: 266365 - protein, 15 aa, Artificial Sequence
  Description of Artificial Sequence: Synthetic peptide
  Seed: SIGKVCRTLLAKSVF
SIIKVHRHLLYKSVF

SEQ ID NO: 266366 - protein, 15 aa, Artificial Sequence
  Description of Artificial Sequence: Synthetic peptide
  Seed: SIGKVCRTLLAKSVF
SIIKVHRILLAKSVF

SEQ ID NO: 266367 - protein, 15 aa, Artificial Sequence
  Description of Artificial Sequence: Synthetic peptide
  Seed: SIGKVCRTLLAKSVF
SIIKVHRILLGKSVF

SEQ ID NO: 266368 - protein, 15 aa, Artificial Sequence
  Description of Artificial Sequence: Synthetic peptide
  Seed: SIGKVCRTLLAKSVF
SIIKVHRILLQKSVF

SEQ ID NO: 266369 - protein, 15 aa, Artificial Sequence
  Description of Artificial Sequence: Synthetic peptide
  Seed: SIGKVCRTLLAKSVF
SIIKVHRILLRKSVF

SEQ ID NO: 266370 - protein, 15 aa, Artificial Sequence
  Description of Artificial Sequence: Synthetic peptide
  Seed: SIGKVCRTLLAKSVF
SIIKVHRILLSKSVF

SEQ ID NO: 266371 - protein, 15 aa, Artificial Sequence
  Description of Artificial Sequence: Synthetic peptide
  Seed: SIGKVCRTLLAKSVF
SIIKVHRILLYKSVF

SEQ ID NO: 266372 - protein, 15 aa, Artificial Sequence
  Description of Artificial Sequence: Synthetic peptide
  Seed: SIGKVCRTLLAKSVF
SIIKVHRKLLAKSVF

SEQ ID NO: 266373 - protein, 15 aa, Artificial Sequence
  Description of Artificial Sequence: Synthetic peptide
  Seed: SIGKVCRTLLAKSVF
SIIKVHRKLLCKSVF

SEQ ID NO: 266374 - protein, 15 aa, Artificial Sequence
  Description of Artificial Sequence: Synthetic peptide
  Seed: SIGKVCRTLLAKSVF
SIIKVHRKLLDKSVF

SEQ ID NO: 266375 - protein, 15 aa, Artificial Sequence
  Description of Artificial Sequence: Synthetic peptide
  Seed: SIGKVCRTLLAKSVF
SIIKVHRKLLEKSVF

SEQ ID NO: 266376 - protein, 15 aa, Artificial Sequence
  Description of Artificial Sequence: Synthetic peptide
  Seed: SIGKVCRTLLAKSVF
SIIKVHRKLLFKSVF

SEQ ID NO: 266377 - protein, 15 aa, Artificial Sequence
  Description of Artificial Sequence: Synthetic peptide
  Seed: SIGKVCRTLLAKSVF
SIIKVHRKLLGKSVF

SEQ ID NO: 266378 - protein, 15 aa, Artificial Sequence
  Description of Artificial Sequence: Synthetic peptide
  Seed: SIGKVCRTLLAKSVF
SIIKVHRKLLHKSVF

SEQ ID NO: 266379 - protein, 15 aa, Artificial Sequence
  Description of Artificial Sequence: Synthetic peptide
  Seed: SIGKVCRTLLAKSVF
SIIKVHRKLLIKSVF

SEQ ID NO: 266380 - protein, 15 aa, Artificial Sequence
  Description of Artificial Sequence: Synthetic peptide
  Seed: SIGKVCRTLLAKSVF
SIIKVHRKLLKKSVF

SEQ ID NO: 266381 - protein, 15 aa, Artificial Sequence
  Description of Artificial Sequence: Synthetic peptide
  Seed: SIGKVCRTLLAKSVF
SIIKVHRKLLLKSVF

SEQ ID NO: 266382 - protein, 15 aa, Artificial Sequence
  Description of Artificial Sequence: Synthetic peptide
  Seed: SIGKVCRTLLAKSVF
SIIKVHRKLLMKSVF

SEQ ID NO: 266383 - protein, 15 aa, Artificial Sequence
  Description of Artificial Sequence: Synthetic peptide
  Seed: SIGKVCRTLLAKSVF
SIIKVHRKLLNKSVF

SEQ ID NO: 266384 - protein, 15 aa, Artificial Sequence
  Description of Artificial Sequence: Synthetic peptide
  Seed: SIGKVCRTLLAKSVF
SIIKVHRKLLPKSVF

SEQ ID NO: 266385 - protein, 15 aa, Artificial Sequence
  Description of Artificial Sequence: Synthetic peptide
  Seed: SIGKVCRTLLAKSVF
SIIKVHRKLLQKSVF

SEQ ID NO: 266386 - protein, 15 aa, Artificial Sequence
  Description of Artificial Sequence: Synthetic peptide
  Seed: SIGKVCRTLLAKSVF
SIIKVHRKLLRKSVF

SEQ ID NO: 266387 - protein, 15 aa, Artificial Sequence
  Description of Artificial Sequence: Synthetic peptide
  Seed: SIGKVCRTLLAKSVF
SIIKVHRKLLSKSVF

SEQ ID NO: 266388 - protein, 15 aa, Artificial Sequence
  Description of Artificial Sequence: Synthetic peptide
  Seed: SIGKVCRTLLAKSVF
SIIKVHRKLLTKSVF

SEQ ID NO: 266389 - protein, 15 aa, Artificial Sequence
  Description of Artificial Sequence: Synthetic peptide
  Seed: SIGKVCRTLLAKSVF
SIIKVHRKLLVKSVF

SEQ ID NO: 266390 - protein, 15 aa, Artificial Sequence
  Description of Artificial Sequence: Synthetic peptide
  Seed: SIGKVCRTLLAKSVF
SIIKVHRKLLWKSVF

SEQ ID NO: 266391 - protein, 15 aa, Artificial Sequence
  Description of Artificial Sequence: Synthetic peptide
  Seed: SIGKVCRTLLAKSVF
SIIKVHRKLLYKSVF

SEQ ID NO: 266392 - protein, 15 aa, Artificial Sequence
  Description of Artificial Sequence: Synthetic peptide
  Seed: SIGKVCRTLLAKSVF
SIIKVHRLLLRKSVF

SEQ ID NO: 266393 - protein, 15 aa, Artificial Sequence
  Description of Artificial Sequence: Synthetic peptide
  Seed: SIGKVCRTLLAKSVF
SIIKVHRMLLRKSVF

SEQ ID NO: 266394 - protein, 15 aa, Artificial Sequence
  Description of Artificial Sequence: Synthetic peptide
  Seed: SIGKVCRTLLAKSVF
SIIKVHRNLLAKSVF

SEQ ID NO: 266395 - protein, 15 aa, Artificial Sequence
  Description of Artificial Sequence: Synthetic peptide
  Seed: SIGKVCRTLLAKSVF
SIIKVHRNLLGKSVF

SEQ ID NO: 266396 - protein, 15 aa, Artificial Sequence
  Description of Artificial Sequence: Synthetic peptide
  Seed: SIGKVCRTLLAKSVF
SIIKVHRNLLHKSVF

SEQ ID NO: 266397 - protein, 15 aa, Artificial Sequence
  Description of Artificial Sequence: Synthetic peptide
  Seed: SIGKVCRTLLAKSVF
SIIKVHRNLLIKSVF

SEQ ID NO: 266398 - protein, 15 aa, Artificial Sequence
  Description of Artificial Sequence: Synthetic peptide
  Seed: SIGKVCRTLLAKSVF
SIIKVHRNLLLKSVF

SEQ ID NO: 266399 - protein, 15 aa, Artificial Sequence
  Description of Artificial Sequence: Synthetic peptide
  Seed: SIGKVCRTLLAKSVF
SIIKVHRNLLMKSVF

SEQ ID NO: 266400 - protein, 15 aa, Artificial Sequence
  Description of Artificial Sequence: Synthetic peptide
  Seed: SIGKVCRTLLAKSVF
SIIKVHRNLLQKSVF

SEQ ID NO: 266401 - protein, 15 aa, Artificial Sequence
  Description of Artificial Sequence: Synthetic peptide
  Seed: SIGKVCRTLLAKSVF
SIIKVHRNLLRKSVF

SEQ ID NO: 266402 - protein, 15 aa, Artificial Sequence
  Description of Artificial Sequence: Synthetic peptide
  Seed: SIGKVCRTLLAKSVF
SIIKVHRNLLSKSVF

SEQ ID NO: 266403 - protein, 15 aa, Artificial Sequence
  Description of Artificial Sequence: Synthetic peptide
  Seed: SIGKVCRTLLAKSVF
SIIKVHRNLLVKSVF

SEQ ID NO: 266404 - protein, 15 aa, Artificial Sequence
  Description of Artificial Sequence: Synthetic peptide
  Seed: SIGKVCRTLLAKSVF
SIIKVHRNLLYKSVF

SEQ ID NO: 266405 - protein, 15 aa, Artificial Sequence
  Description of Artificial Sequence: Synthetic peptide
  Seed: SIGKVCRTLLAKSVF
SIIKVHRPLLAKSVF

SEQ ID NO: 266406 - protein, 15 aa, Artificial Sequence
  Description of Artificial Sequence: Synthetic peptide
  Seed: SIGKVCRTLLAKSVF
SIIKVHRPLLGKSVF

SEQ ID NO: 266407 - protein, 15 aa, Artificial Sequence
  Description of Artificial Sequence: Synthetic peptide
  Seed: SIGKVCRTLLAKSVF
SIIKVHRPLLQKSVF

SEQ ID NO: 266408 - protein, 15 aa, Artificial Sequence
  Description of Artificial Sequence: Synthetic peptide
  Seed: SIGKVCRTLLAKSVF
SIIKVHRPLLRKSVF

SEQ ID NO: 266409 - protein, 15 aa, Artificial Sequence
  Description of Artificial Sequence: Synthetic peptide
  Seed: SIGKVCRTLLAKSVF
SIIKVHRPLLSKSVF

SEQ ID NO: 266410 - protein, 15 aa, Artificial Sequence
  Description of Artificial Sequence: Synthetic peptide
  Seed: SIGKVCRTLLAKSVF
SIIKVHRPLLYKSVF

SEQ ID NO: 266411 - protein, 15 aa, Artificial Sequence
  Description of Artificial Sequence: Synthetic peptide
  Seed: SIGKVCRTLLAKSVF
SIIKVHRQLLAKSVF

SEQ ID NO: 266412 - protein, 15 aa, Artificial Sequence
  Description of Artificial Sequence: Synthetic peptide
  Seed: SIGKVCRTLLAKSVF
SIIKVHRQLLGKSVF

SEQ ID NO: 266413 - protein, 15 aa, Artificial Sequence
  Description of Artificial Sequence: Synthetic peptide
  Seed: SIGKVCRTLLAKSVF
SIIKVHRQLLHKSVF

SEQ ID NO: 266414 - protein, 15 aa, Artificial Sequence
  Description of Artificial Sequence: Synthetic peptide
  Seed: SIGKVCRTLLAKSVF
SIIKVHRQLLMKSVF

SEQ ID NO: 266415 - protein, 15 aa, Artificial Sequence
  Description of Artificial Sequence: Synthetic peptide
  Seed: SIGKVCRTLLAKSVF
SIIKVHRQLLQKSVF

SEQ ID NO: 266416 - protein, 15 aa, Artificial Sequence
  Description of Artificial Sequence: Synthetic peptide
  Seed: SIGKVCRTLLAKSVF
SIIKVHRQLLRKSVF

SEQ ID NO: 266417 - protein, 15 aa, Artificial Sequence
  Description of Artificial Sequence: Synthetic peptide
  Seed: SIGKVCRTLLAKSVF
SIIKVHRQLLSKSVF

SEQ ID NO: 266418 - protein, 15 aa, Artificial Sequence
  Description of Artificial Sequence: Synthetic peptide
  Seed: SIGKVCRTLLAKSVF
SIIKVHRQLLVKSVF

SEQ ID NO: 266419 - protein, 15 aa, Artificial Sequence
  Description of Artificial Sequence: Synthetic peptide
  Seed: SIGKVCRTLLAKSVF
SIIKVHRQLLYKSVF

SEQ ID NO: 266420 - protein, 15 aa, Artificial Sequence
  Description of Artificial Sequence: Synthetic peptide
  Seed: SIGKVCRTLLAKSVF
SIIKVHRRLLAKSVF

SEQ ID NO: 266421 - protein, 15 aa, Artificial Sequence
  Description of Artificial Sequence: Synthetic peptide
  Seed: SIGKVCRTLLAKSVF
SIIKVHRRLLCKSVF

SEQ ID NO: 266422 - protein, 15 aa, Artificial Sequence
  Description of Artificial Sequence: Synthetic peptide
  Seed: SIGKVCRTLLAKSVF
SIIKVHRRLLDKSVF

SEQ ID NO: 266423 - protein, 15 aa, Artificial Sequence
  Description of Artificial Sequence: Synthetic peptide
  Seed: SIGKVCRTLLAKSVF
SIIKVHRRLLEKSVF

SEQ ID NO: 266424 - protein, 15 aa, Artificial Sequence
  Description of Artificial Sequence: Synthetic peptide
  Seed: SIGKVCRTLLAKSVF
SIIKVHRRLLFKSVF

SEQ ID NO: 266425 - protein, 15 aa, Artificial Sequence
  Description of Artificial Sequence: Synthetic peptide
  Seed: SIGKVCRTLLAKSVF
SIIKVHRRLLGKSVF

SEQ ID NO: 266426 - protein, 15 aa, Artificial Sequence
  Description of Artificial Sequence: Synthetic peptide
  Seed: SIGKVCRTLLAKSVF
SIIKVHRRLLHKSVF

SEQ ID NO: 266427 - protein, 15 aa, Artificial Sequence
  Description of Artificial Sequence: Synthetic peptide
  Seed: SIGKVCRTLLAKSVF
SIIKVHRRLLIKSVF

SEQ ID NO: 266428 - protein, 15 aa, Artificial Sequence
  Description of Artificial Sequence: Synthetic peptide
  Seed: SIGKVCRTLLAKSVF
SIIKVHRRLLKKSVF

SEQ ID NO: 266429 - protein, 15 aa, Artificial Sequence
  Description of Artificial Sequence: Synthetic peptide
  Seed: SIGKVCRTLLAKSVF
SIIKVHRRLLLKSVF

SEQ ID NO: 266430 - protein, 15 aa, Artificial Sequence
  Description of Artificial Sequence: Synthetic peptide
  Seed: SIGKVCRTLLAKSVF
SIIKVHRRLLMKSVF

SEQ ID NO: 266431 - protein, 15 aa, Artificial Sequence
  Description of Artificial Sequence: Synthetic peptide
  Seed: SIGKVCRTLLAKSVF
SIIKVHRRLLNKSVF

SEQ ID NO: 266432 - protein, 15 aa, Artificial Sequence
  Description of Artificial Sequence: Synthetic peptide
  Seed: SIGKVCRTLLAKSVF
SIIKVHRRLLPKSVF

SEQ ID NO: 266433 - protein, 15 aa, Artificial Sequence
  Description of Artificial Sequence: Synthetic peptide
  Seed: SIGKVCRTLLAKSVF
SIIKVHRRLLQKSVF

SEQ ID NO: 266434 - protein, 15 aa, Artificial Sequence
  Description of Artificial Sequence: Synthetic peptide
  Seed: SIGKVCRTLLAKSVF
SIIKVHRRLLRKSVF

SEQ ID NO: 266435 - protein, 15 aa, Artificial Sequence
  Description of Artificial Sequence: Synthetic peptide
  Seed: SIGKVCRTLLAKSVF
SIIKVHRRLLSKSVF

SEQ ID NO: 266436 - protein, 15 aa, Artificial Sequence
  Description of Artificial Sequence: Synthetic peptide
  Seed: SIGKVCRTLLAKSVF
SIIKVHRRLLTKSVF

SEQ ID NO: 266437 - protein, 15 aa, Artificial Sequence
  Description of Artificial Sequence: Synthetic peptide
  Seed: SIGKVCRTLLAKSVF
SIIKVHRRLLVKSVF

SEQ ID NO: 266438 - protein, 15 aa, Artificial Sequence
  Description of Artificial Sequence: Synthetic peptide
  Seed: SIGKVCRTLLAKSVF
SIIKVHRRLLWKSVF

SEQ ID NO: 266439 - protein, 15 aa, Artificial Sequence
  Description of Artificial Sequence: Synthetic peptide
  Seed: SIGKVCRTLLAKSVF
SIIKVHRRLLYKSVF

SEQ ID NO: 266440 - protein, 15 aa, Artificial Sequence
  Description of Artificial Sequence: Synthetic peptide
  Seed: SIGKVCRTLLAKSVF
SIIKVHRSLLAKSVF

SEQ ID NO: 266441 - protein, 15 aa, Artificial Sequence
  Description of Artificial Sequence: Synthetic peptide
  Seed: SIGKVCRTLLAKSVF
SIIKVHRSLLFKSVF

SEQ ID NO: 266442 - protein, 15 aa, Artificial Sequence
  Description of Artificial Sequence: Synthetic peptide
  Seed: SIGKVCRTLLAKSVF
SIIKVHRSLLGKSVF

SEQ ID NO: 266443 - protein, 15 aa, Artificial Sequence
  Description of Artificial Sequence: Synthetic peptide
  Seed: SIGKVCRTLLAKSVF
SIIKVHRSLLHKSVF

SEQ ID NO: 266444 - protein, 15 aa, Artificial Sequence
  Description of Artificial Sequence: Synthetic peptide
  Seed: SIGKVCRTLLAKSVF
SIIKVHRSLLIKSVF

SEQ ID NO: 266445 - protein, 15 aa, Artificial Sequence
  Description of Artificial Sequence: Synthetic peptide
  Seed: SIGKVCRTLLAKSVF
SIIKVHRSLLKKSVF

SEQ ID NO: 266446 - protein, 15 aa, Artificial Sequence
  Description of Artificial Sequence: Synthetic peptide
  Seed: SIGKVCRTLLAKSVF
SIIKVHRSLLLKSVF

SEQ ID NO: 266447 - protein, 15 aa, Artificial Sequence
  Description of Artificial Sequence: Synthetic peptide
  Seed: SIGKVCRTLLAKSVF
SIIKVHRSLLMKSVF

SEQ ID NO: 266448 - protein, 15 aa, Artificial Sequence
  Description of Artificial Sequence: Synthetic peptide
  Seed: SIGKVCRTLLAKSVF
SIIKVHRSLLNKSVF

SEQ ID NO: 266449 - protein, 15 aa, Artificial Sequence
  Description of Artificial Sequence: Synthetic peptide
  Seed: SIGKVCRTLLAKSVF
SIIKVHRSLLQKSVF

SEQ ID NO: 266450 - protein, 15 aa, Artificial Sequence
  Description of Artificial Sequence: Synthetic peptide
  Seed: SIGKVCRTLLAKSVF
SIIKVHRSLLRKSVF

SEQ ID NO: 266451 - protein, 15 aa, Artificial Sequence
  Description of Artificial Sequence: Synthetic peptide
  Seed: SIGKVCRTLLAKSVF
SIIKVHRSLLSKSVF

SEQ ID NO: 266452 - protein, 15 aa, Artificial Sequence
  Description of Artificial Sequence: Synthetic peptide
  Seed: SIGKVCRTLLAKSVF
SIIKVHRSLLTKSVF

SEQ ID NO: 266453 - protein, 15 aa, Artificial Sequence
  Description of Artificial Sequence: Synthetic peptide
  Seed: SIGKVCRTLLAKSVF
SIIKVHRSLLVKSVF

SEQ ID NO: 266454 - protein, 15 aa, Artificial Sequence
  Description of Artificial Sequence: Synthetic peptide
  Seed: SIGKVCRTLLAKSVF
SIIKVHRSLLYKSVF

SEQ ID NO: 266455 - protein, 15 aa, Artificial Sequence
  Description of Artificial Sequence: Synthetic peptide
  Seed: SIGKVCRTLLAKSVF
SIIKVHRTLLAKSVF

SEQ ID NO: 266456 - protein, 15 aa, Artificial Sequence
  Description of Artificial Sequence: Synthetic peptide
  Seed: SIGKVCRTLLAKSVF
SIIKVHRTLLFKSVF

SEQ ID NO: 266457 - protein, 15 aa, Artificial Sequence
  Description of Artificial Sequence: Synthetic peptide
  Seed: SIGKVCRTLLAKSVF
SIIKVHRTLLGKSVF

SEQ ID NO: 266458 - protein, 15 aa, Artificial Sequence
  Description of Artificial Sequence: Synthetic peptide
  Seed: SIGKVCRTLLAKSVF
SIIKVHRTLLHKSVF

SEQ ID NO: 266459 - protein, 15 aa, Artificial Sequence
  Description of Artificial Sequence: Synthetic peptide
  Seed: SIGKVCRTLLAKSVF
SIIKVHRTLLIKSVF

SEQ ID NO: 266460 - protein, 15 aa, Artificial Sequence
  Description of Artificial Sequence: Synthetic peptide
  Seed: SIGKVCRTLLAKSVF
SIIKVHRTLLKKSVF

SEQ ID NO: 266461 - protein, 15 aa, Artificial Sequence
  Description of Artificial Sequence: Synthetic peptide
  Seed: SIGKVCRTLLAKSVF
SIIKVHRTLLLKSVF

SEQ ID NO: 266462 - protein, 15 aa, Artificial Sequence
  Description of Artificial Sequence: Synthetic peptide
  Seed: SIGKVCRTLLAKSVF
SIIKVHRTLLMKSVF

SEQ ID NO: 266463 - protein, 15 aa, Artificial Sequence
  Description of Artificial Sequence: Synthetic peptide
  Seed: SIGKVCRTLLAKSVF
SIIKVHRTLLNKSVF

SEQ ID NO: 266464 - protein, 15 aa, Artificial Sequence
  Description of Artificial Sequence: Synthetic peptide
  Seed: SIGKVCRTLLAKSVF
SIIKVHRTLLQKSVF

SEQ ID NO: 266465 - protein, 15 aa, Artificial Sequence
  Description of Artificial Sequence: Synthetic peptide
  Seed: SIGKVCRTLLAKSVF
SIIKVHRTLLRKSVF

SEQ ID NO: 266466 - protein, 15 aa, Artificial Sequence
  Description of Artificial Sequence: Synthetic peptide
  Seed: SIGKVCRTLLAKSVF
SIIKVHRTLLSKSVF

SEQ ID NO: 266467 - protein, 15 aa, Artificial Sequence
  Description of Artificial Sequence: Synthetic peptide
  Seed: SIGKVCRTLLAKSVF
SIIKVHRTLLTKSVF

SEQ ID NO: 266468 - protein, 15 aa, Artificial Sequence
  Description of Artificial Sequence: Synthetic peptide
  Seed: SIGKVCRTLLAKSVF
SIIKVHRTLLVKSVF

SEQ ID NO: 266469 - protein, 15 aa, Artificial Sequence
  Description of Artificial Sequence: Synthetic peptide
  Seed: SIGKVCRTLLAKSVF
SIIKVHRTLLYKSVF

SEQ ID NO: 266470 - protein, 15 aa, Artificial Sequence
  Description of Artificial Sequence: Synthetic peptide
  Seed: SIGKVCRTLLAKSVF
SIIKVHRVLLAKSVF

SEQ ID NO: 266471 - protein, 15 aa, Artificial Sequence
  Description of Artificial Sequence: Synthetic peptide
  Seed: SIGKVCRTLLAKSVF
SIIKVHRVLLGKSVF

SEQ ID NO: 266472 - protein, 15 aa, Artificial Sequence
  Description of Artificial Sequence: Synthetic peptide
  Seed: SIGKVCRTLLAKSVF
SIIKVHRVLLHKSVF

SEQ ID NO: 266473 - protein, 15 aa, Artificial Sequence
  Description of Artificial Sequence: Synthetic peptide
  Seed: SIGKVCRTLLAKSVF
SIIKVHRVLLKKSVF

SEQ ID NO: 266474 - protein, 15 aa, Artificial Sequence
  Description of Artificial Sequence: Synthetic peptide
  Seed: SIGKVCRTLLAKSVF
SIIKVHRVLLQKSVF

SEQ ID NO: 266475 - protein, 15 aa, Artificial Sequence
  Description of Artificial Sequence: Synthetic peptide
  Seed: SIGKVCRTLLAKSVF
SIIKVHRVLLRKSVF

SEQ ID NO: 266476 - protein, 15 aa, Artificial Sequence
  Description of Artificial Sequence: Synthetic peptide
  Seed: SIGKVCRTLLAKSVF
SIIKVHRVLLSKSVF

SEQ ID NO: 266477 - protein, 15 aa, Artificial Sequence
  Description of Artificial Sequence: Synthetic peptide
  Seed: SIGKVCRTLLAKSVF
SIIKVHRVLLYKSVF

SEQ ID NO: 266478 - protein, 15 aa, Artificial Sequence
  Description of Artificial Sequence: Synthetic peptide
  Seed: SIGKVCRTLLAKSVF
SIIKVIRALLAKSVF

SEQ ID NO: 266479 - protein, 15 aa, Artificial Sequence
  Description of Artificial Sequence: Synthetic peptide
  Seed: SIGKVCRTLLAKSVF
SIIKVIRALLDKSVF

SEQ ID NO: 266480 - protein, 15 aa, Artificial Sequence
  Description of Artificial Sequence: Synthetic peptide
  Seed: SIGKVCRTLLAKSVF
SIIKVIRALLEKSVF

SEQ ID NO: 266481 - protein, 15 aa, Artificial Sequence
  Description of Artificial Sequence: Synthetic peptide
  Seed: SIGKVCRTLLAKSVF
SIIKVIRALLGKSVF

SEQ ID NO: 266482 - protein, 15 aa, Artificial Sequence
  Description of Artificial Sequence: Synthetic peptide
  Seed: SIGKVCRTLLAKSVF
SIIKVIRALLHKSVF

SEQ ID NO: 266483 - protein, 15 aa, Artificial Sequence
  Description of Artificial Sequence: Synthetic peptide
  Seed: SIGKVCRTLLAKSVF
SIIKVIRALLNKSVF

SEQ ID NO: 266484 - protein, 15 aa, Artificial Sequence
  Description of Artificial Sequence: Synthetic peptide
  Seed: SIGKVCRTLLAKSVF
SIIKVIRALLPKSVF

SEQ ID NO: 266485 - protein, 15 aa, Artificial Sequence
  Description of Artificial Sequence: Synthetic peptide
  Seed: SIGKVCRTLLAKSVF
SIIKVIRALLQKSVF

SEQ ID NO: 266486 - protein, 15 aa, Artificial Sequence
  Description of Artificial Sequence: Synthetic peptide
  Seed: SIGKVCRTLLAKSVF
SIIKVIRALLSKSVF

SEQ ID NO: 266487 - protein, 15 aa, Artificial Sequence
  Description of Artificial Sequence: Synthetic peptide
  Seed: SIGKVCRTLLAKSVF
SIIKVIRALLTKSVF

SEQ ID NO: 266488 - protein, 15 aa, Artificial Sequence
  Description of Artificial Sequence: Synthetic peptide
  Seed: SIGKVCRTLLAKSVF
SIIKVIRALLVKSVF

SEQ ID NO: 266489 - protein, 15 aa, Artificial Sequence
  Description of Artificial Sequence: Synthetic peptide
  Seed: SIGKVCRTLLAKSVF
SIIKVIRALLYKSVF

SEQ ID NO: 266490 - protein, 15 aa, Artificial Sequence
  Description of Artificial Sequence: Synthetic peptide
  Seed: SIGKVCRTLLAKSVF
SIIKVIRDLLAKSVF

SEQ ID NO: 266491 - protein, 15 aa, Artificial Sequence
  Description of Artificial Sequence: Synthetic peptide
  Seed: SIGKVCRTLLAKSVF
SIIKVIRDLLGKSVF

SEQ ID NO: 266492 - protein, 15 aa, Artificial Sequence
  Description of Artificial Sequence: Synthetic peptide
  Seed: SIGKVCRTLLAKSVF
SIIKVIRDLLSKSVF

SEQ ID NO: 266493 - protein, 15 aa, Artificial Sequence
  Description of Artificial Sequence: Synthetic peptide
  Seed: SIGKVCRTLLAKSVF
SIIKVIRDLLTKSVF

SEQ ID NO: 266494 - protein, 15 aa, Artificial Sequence
  Description of Artificial Sequence: Synthetic peptide
  Seed: SIGKVCRTLLAKSVF
SIIKVIRELLAKSVF

SEQ ID NO: 266495 - protein, 15 aa, Artificial Sequence
  Description of Artificial Sequence: Synthetic peptide
  Seed: SIGKVCRTLLAKSVF
SIIKVIRELLHKSVF

SEQ ID NO: 266496 - protein, 15 aa, Artificial Sequence
  Description of Artificial Sequence: Synthetic peptide
  Seed: SIGKVCRTLLAKSVF
SIIKVIRELLSKSVF

SEQ ID NO: 266497 - protein, 15 aa, Artificial Sequence
  Description of Artificial Sequence: Synthetic peptide
  Seed: SIGKVCRTLLAKSVF
SIIKVIRGLLAKSVF

SEQ ID NO: 266498 - protein, 15 aa, Artificial Sequence
  Description of Artificial Sequence: Synthetic peptide
  Seed: SIGKVCRTLLAKSVF
SIIKVIRGLLEKSVF

SEQ ID NO: 266499 - protein, 15 aa, Artificial Sequence
  Description of Artificial Sequence: Synthetic peptide
  Seed: SIGKVCRTLLAKSVF
SIIKVIRGLLGKSVF

SEQ ID NO: 266500 - protein, 15 aa, Artificial Sequence
  Description of Artificial Sequence: Synthetic peptide
  Seed: SIGKVCRTLLAKSVF
SIIKVIRGLLHKSVF

SEQ ID NO: 266501 - protein, 15 aa, Artificial Sequence
  Description of Artificial Sequence: Synthetic peptide
  Seed: SIGKVCRTLLAKSVF
SIIKVIRGLLIKSVF

SEQ ID NO: 266502 - protein, 15 aa, Artificial Sequence
  Description of Artificial Sequence: Synthetic peptide
  Seed: SIGKVCRTLLAKSVF
SIIKVIRGLLMKSVF

SEQ ID NO: 266503 - protein, 15 aa, Artificial Sequence
  Description of Artificial Sequence: Synthetic peptide
  Seed: SIGKVCRTLLAKSVF
SIIKVIRGLLNKSVF

SEQ ID NO: 266504 - protein, 15 aa, Artificial Sequence
  Description of Artificial Sequence: Synthetic peptide
  Seed: SIGKVCRTLLAKSVF
SIIKVIRGLLQKSVF

SEQ ID NO: 266505 - protein, 15 aa, Artificial Sequence
  Description of Artificial Sequence: Synthetic peptide
  Seed: SIGKVCRTLLAKSVF
SIIKVIRGLLSKSVF

SEQ ID NO: 266506 - protein, 15 aa, Artificial Sequence
  Description of Artificial Sequence: Synthetic peptide
  Seed: SIGKVCRTLLAKSVF
SIIKVIRGLLTKSVF

SEQ ID NO: 266507 - protein, 15 aa, Artificial Sequence
  Description of Artificial Sequence: Synthetic peptide
  Seed: SIGKVCRTLLAKSVF
SIIKVIRGLLVKSVF

SEQ ID NO: 266508 - protein, 15 aa, Artificial Sequence
  Description of Artificial Sequence: Synthetic peptide
  Seed: SIGKVCRTLLAKSVF
SIIKVIRGLLYKSVF

SEQ ID NO: 266509 - protein, 15 aa, Artificial Sequence
  Description of Artificial Sequence: Synthetic peptide
  Seed: SIGKVCRTLLAKSVF
SIIKVIRHLLAKSVF

SEQ ID NO: 266510 - protein, 15 aa, Artificial Sequence
  Description of Artificial Sequence: Synthetic peptide
  Seed: SIGKVCRTLLAKSVF
SIIKVIRHLLDKSVF

SEQ ID NO: 266511 - protein, 15 aa, Artificial Sequence
  Description of Artificial Sequence: Synthetic peptide
  Seed: SIGKVCRTLLAKSVF
SIIKVIRHLLEKSVF

SEQ ID NO: 266512 - protein, 15 aa, Artificial Sequence
  Description of Artificial Sequence: Synthetic peptide
  Seed: SIGKVCRTLLAKSVF
SIIKVIRHLLGKSVF

SEQ ID NO: 266513 - protein, 15 aa, Artificial Sequence
  Description of Artificial Sequence: Synthetic peptide
  Seed: SIGKVCRTLLAKSVF
SIIKVIRHLLHKSVF

SEQ ID NO: 266514 - protein, 15 aa, Artificial Sequence
  Description of Artificial Sequence: Synthetic peptide
  Seed: SIGKVCRTLLAKSVF
SIIKVIRHLLIKSVF

SEQ ID NO: 266515 - protein, 15 aa, Artificial Sequence
  Description of Artificial Sequence: Synthetic peptide
  Seed: SIGKVCRTLLAKSVF
SIIKVIRHLLKKSVF

SEQ ID NO: 266516 - protein, 15 aa, Artificial Sequence
  Description of Artificial Sequence: Synthetic peptide
  Seed: SIGKVCRTLLAKSVF
SIIKVIRHLLLKSVF

SEQ ID NO: 266517 - protein, 15 aa, Artificial Sequence
  Description of Artificial Sequence: Synthetic peptide
  Seed: SIGKVCRTLLAKSVF
SIIKVIRHLLMKSVF

SEQ ID NO: 266518 - protein, 15 aa, Artificial Sequence
  Description of Artificial Sequence: Synthetic peptide
  Seed: SIGKVCRTLLAKSVF
SIIKVIRHLLNKSVF

SEQ ID NO: 266519 - protein, 15 aa, Artificial Sequence
  Description of Artificial Sequence: Synthetic peptide
  Seed: SIGKVCRTLLAKSVF
SIIKVIRHLLPKSVF

SEQ ID NO: 266520 - protein, 15 aa, Artificial Sequence
  Description of Artificial Sequence: Synthetic peptide
  Seed: SIGKVCRTLLAKSVF
SIIKVIRHLLQKSVF

SEQ ID NO: 266521 - protein, 15 aa, Artificial Sequence
  Description of Artificial Sequence: Synthetic peptide
  Seed: SIGKVCRTLLAKSVF
SIIKVIRHLLRKSVF

SEQ ID NO: 266522 - protein, 15 aa, Artificial Sequence
  Description of Artificial Sequence: Synthetic peptide
  Seed: SIGKVCRTLLAKSVF
SIIKVIRHLLSKSVF

SEQ ID NO: 266523 - protein, 15 aa, Artificial Sequence
  Description of Artificial Sequence: Synthetic peptide
  Seed: SIGKVCRTLLAKSVF
SIIKVIRHLLTKSVF

SEQ ID NO: 266524 - protein, 15 aa, Artificial Sequence
  Description of Artificial Sequence: Synthetic peptide
  Seed: SIGKVCRTLLAKSVF
SIIKVIRHLLVKSVF

SEQ ID NO: 266525 - protein, 15 aa, Artificial Sequence
  Description of Artificial Sequence: Synthetic peptide
  Seed: SIGKVCRTLLAKSVF
SIIKVIRHLLYKSVF

SEQ ID NO: 266526 - protein, 15 aa, Artificial Sequence
  Description of Artificial Sequence: Synthetic peptide
  Seed: SIGKVCRTLLAKSVF
SIIKVIRILLHKSVF

SEQ ID NO: 266527 - protein, 15 aa, Artificial Sequence
  Description of Artificial Sequence: Synthetic peptide
  Seed: SIGKVCRTLLAKSVF
SIIKVIRILLSKSVF

SEQ ID NO: 266528 - protein, 15 aa, Artificial Sequence
  Description of Artificial Sequence: Synthetic peptide
  Seed: SIGKVCRTLLAKSVF
SIIKVIRKLLAKSVF

SEQ ID NO: 266529 - protein, 15 aa, Artificial Sequence
  Description of Artificial Sequence: Synthetic peptide
  Seed: SIGKVCRTLLAKSVF
SIIKVIRKLLCKSVF

SEQ ID NO: 266530 - protein, 15 aa, Artificial Sequence
  Description of Artificial Sequence: Synthetic peptide
  Seed: SIGKVCRTLLAKSVF
SIIKVIRKLLDKSVF

SEQ ID NO: 266531 - protein, 15 aa, Artificial Sequence
  Description of Artificial Sequence: Synthetic peptide
  Seed: SIGKVCRTLLAKSVF
SIIKVIRKLLEKSVF

SEQ ID NO: 266532 - protein, 15 aa, Artificial Sequence
  Description of Artificial Sequence: Synthetic peptide
  Seed: SIGKVCRTLLAKSVF
SIIKVIRKLLFKSVF

SEQ ID NO: 266533 - protein, 15 aa, Artificial Sequence
  Description of Artificial Sequence: Synthetic peptide
  Seed: SIGKVCRTLLAKSVF
SIIKVIRKLLGKSVF

SEQ ID NO: 266534 - protein, 15 aa, Artificial Sequence
  Description of Artificial Sequence: Synthetic peptide
  Seed: SIGKVCRTLLAKSVF
SIIKVIRKLLHKSVF

SEQ ID NO: 266535 - protein, 15 aa, Artificial Sequence
  Description of Artificial Sequence: Synthetic peptide
  Seed: SIGKVCRTLLAKSVF
SIIKVIRKLLIKSVF

SEQ ID NO: 266536 - protein, 15 aa, Artificial Sequence
  Description of Artificial Sequence: Synthetic peptide
  Seed: SIGKVCRTLLAKSVF
SIIKVIRKLLKKSVF

SEQ ID NO: 266537 - protein, 15 aa, Artificial Sequence
  Description of Artificial Sequence: Synthetic peptide
  Seed: SIGKVCRTLLAKSVF
SIIKVIRKLLLKSVF

SEQ ID NO: 266538 - protein, 15 aa, Artificial Sequence
  Description of Artificial Sequence: Synthetic peptide
  Seed: SIGKVCRTLLAKSVF
SIIKVIRKLLMKSVF

SEQ ID NO: 266539 - protein, 15 aa, Artificial Sequence
  Description of Artificial Sequence: Synthetic peptide
  Seed: SIGKVCRTLLAKSVF
SIIKVIRKLLNKSVF

SEQ ID NO: 266540 - protein, 15 aa, Artificial Sequence
  Description of Artificial Sequence: Synthetic peptide
  Seed: SIGKVCRTLLAKSVF
SIIKVIRKLLPKSVF

SEQ ID NO: 266541 - protein, 15 aa, Artificial Sequence
  Description of Artificial Sequence: Synthetic peptide
  Seed: SIGKVCRTLLAKSVF
SIIKVIRKLLQKSVF

SEQ ID NO: 266542 - protein, 15 aa, Artificial Sequence
  Description of Artificial Sequence: Synthetic peptide
  Seed: SIGKVCRTLLAKSVF
SIIKVIRKLLRKSVF

SEQ ID NO: 266543 - protein, 15 aa, Artificial Sequence
  Description of Artificial Sequence: Synthetic peptide
  Seed: SIGKVCRTLLAKSVF
SIIKVIRKLLSKSVF

SEQ ID NO: 266544 - protein, 15 aa, Artificial Sequence
  Description of Artificial Sequence: Synthetic peptide
  Seed: SIGKVCRTLLAKSVF
SIIKVIRKLLTKSVF

SEQ ID NO: 266545 - protein, 15 aa, Artificial Sequence
  Description of Artificial Sequence: Synthetic peptide
  Seed: SIGKVCRTLLAKSVF
SIIKVIRKLLVKSVF

SEQ ID NO: 266546 - protein, 15 aa, Artificial Sequence
  Description of Artificial Sequence: Synthetic peptide
  Seed: SIGKVCRTLLAKSVF
SIIKVIRKLLWKSVF

SEQ ID NO: 266547 - protein, 15 aa, Artificial Sequence
  Description of Artificial Sequence: Synthetic peptide
  Seed: SIGKVCRTLLAKSVF
SIIKVIRKLLYKSVF

SEQ ID NO: 266548 - protein, 15 aa, Artificial Sequence
  Description of Artificial Sequence: Synthetic peptide
  Seed: SIGKVCRTLLAKSVF
SIIKVIRLLLSKSVF

SEQ ID NO: 266549 - protein, 15 aa, Artificial Sequence
  Description of Artificial Sequence: Synthetic peptide
  Seed: SIGKVCRTLLAKSVF
SIIKVIRNLLAKSVF

SEQ ID NO: 266550 - protein, 15 aa, Artificial Sequence
  Description of Artificial Sequence: Synthetic peptide
  Seed: SIGKVCRTLLAKSVF
SIIKVIRNLLDKSVF

SEQ ID NO: 266551 - protein, 15 aa, Artificial Sequence
  Description of Artificial Sequence: Synthetic peptide
  Seed: SIGKVCRTLLAKSVF
SIIKVIRNLLEKSVF

SEQ ID NO: 266552 - protein, 15 aa, Artificial Sequence
  Description of Artificial Sequence: Synthetic peptide
  Seed: SIGKVCRTLLAKSVF
SIIKVIRNLLGKSVF

SEQ ID NO: 266553 - protein, 15 aa, Artificial Sequence
  Description of Artificial Sequence: Synthetic peptide
  Seed: SIGKVCRTLLAKSVF
SIIKVIRNLLHKSVF

SEQ ID NO: 266554 - protein, 15 aa, Artificial Sequence
  Description of Artificial Sequence: Synthetic peptide
  Seed: SIGKVCRTLLAKSVF
SIIKVIRNLLIKSVF

SEQ ID NO: 266555 - protein, 15 aa, Artificial Sequence
  Description of Artificial Sequence: Synthetic peptide
  Seed: SIGKVCRTLLAKSVF
SIIKVIRNLLKKSVF

SEQ ID NO: 266556 - protein, 15 aa, Artificial Sequence
  Description of Artificial Sequence: Synthetic peptide
  Seed: SIGKVCRTLLAKSVF
SIIKVIRNLLMKSVF

SEQ ID NO: 266557 - protein, 15 aa, Artificial Sequence
  Description of Artificial Sequence: Synthetic peptide
  Seed: SIGKVCRTLLAKSVF
SIIKVIRNLLNKSVF

SEQ ID NO: 266558 - protein, 15 aa, Artificial Sequence
  Description of Artificial Sequence: Synthetic peptide
  Seed: SIGKVCRTLLAKSVF
SIIKVIRNLLPKSVF

SEQ ID NO: 266559 - protein, 15 aa, Artificial Sequence
  Description of Artificial Sequence: Synthetic peptide
  Seed: SIGKVCRTLLAKSVF
SIIKVIRNLLQKSVF

SEQ ID NO: 266560 - protein, 15 aa, Artificial Sequence
  Description of Artificial Sequence: Synthetic peptide
  Seed: SIGKVCRTLLAKSVF
SIIKVIRNLLRKSVF

SEQ ID NO: 266561 - protein, 15 aa, Artificial Sequence
  Description of Artificial Sequence: Synthetic peptide
  Seed: SIGKVCRTLLAKSVF
SIIKVIRNLLSKSVF

SEQ ID NO: 266562 - protein, 15 aa, Artificial Sequence
  Description of Artificial Sequence: Synthetic peptide
  Seed: SIGKVCRTLLAKSVF
SIIKVIRNLLTKSVF

SEQ ID NO: 266563 - protein, 15 aa, Artificial Sequence
  Description of Artificial Sequence: Synthetic peptide
  Seed: SIGKVCRTLLAKSVF
SIIKVIRNLLVKSVF

SEQ ID NO: 266564 - protein, 15 aa, Artificial Sequence
  Description of Artificial Sequence: Synthetic peptide
  Seed: SIGKVCRTLLAKSVF
SIIKVIRNLLYKSVF

SEQ ID NO: 266565 - protein, 15 aa, Artificial Sequence
  Description of Artificial Sequence: Synthetic peptide
  Seed: SIGKVCRTLLAKSVF
SIIKVIRPLLAKSVF

SEQ ID NO: 266566 - protein, 15 aa, Artificial Sequence
  Description of Artificial Sequence: Synthetic peptide
  Seed: SIGKVCRTLLAKSVF
SIIKVIRPLLCKSVF

SEQ ID NO: 266567 - protein, 15 aa, Artificial Sequence
  Description of Artificial Sequence: Synthetic peptide
  Seed: SIGKVCRTLLAKSVF
SIIKVIRPLLDKSVF

SEQ ID NO: 266568 - protein, 15 aa, Artificial Sequence
  Description of Artificial Sequence: Synthetic peptide
  Seed: SIGKVCRTLLAKSVF
SIIKVIRPLLEKSVF

SEQ ID NO: 266569 - protein, 15 aa, Artificial Sequence
  Description of Artificial Sequence: Synthetic peptide
  Seed: SIGKVCRTLLAKSVF
SIIKVIRPLLFKSVF

SEQ ID NO: 266570 - protein, 15 aa, Artificial Sequence
  Description of Artificial Sequence: Synthetic peptide
  Seed: SIGKVCRTLLAKSVF
SIIKVIRPLLGKSVF

SEQ ID NO: 266571 - protein, 15 aa, Artificial Sequence
  Description of Artificial Sequence: Synthetic peptide
  Seed: SIGKVCRTLLAKSVF
SIIKVIRPLLHKSVF

SEQ ID NO: 266572 - protein, 15 aa, Artificial Sequence
  Description of Artificial Sequence: Synthetic peptide
  Seed: SIGKVCRTLLAKSVF
SIIKVIRPLLIKSVF

SEQ ID NO: 266573 - protein, 15 aa, Artificial Sequence
  Description of Artificial Sequence: Synthetic peptide
  Seed: SIGKVCRTLLAKSVF
SIIKVIRPLLLKSVF

SEQ ID NO: 266574 - protein, 15 aa, Artificial Sequence
  Description of Artificial Sequence: Synthetic peptide
  Seed: SIGKVCRTLLAKSVF
SIIKVIRPLLMKSVF

SEQ ID NO: 266575 - protein, 15 aa, Artificial Sequence
  Description of Artificial Sequence: Synthetic peptide
  Seed: SIGKVCRTLLAKSVF
SIIKVIRPLLNKSVF

SEQ ID NO: 266576 - protein, 15 aa, Artificial Sequence
  Description of Artificial Sequence: Synthetic peptide
  Seed: SIGKVCRTLLAKSVF
SIIKVIRPLLPKSVF

SEQ ID NO: 266577 - protein, 15 aa, Artificial Sequence
  Description of Artificial Sequence: Synthetic peptide
  Seed: SIGKVCRTLLAKSVF
SIIKVIRPLLQKSVF

SEQ ID NO: 266578 - protein, 15 aa, Artificial Sequence
  Description of Artificial Sequence: Synthetic peptide
  Seed: SIGKVCRTLLAKSVF
SIIKVIRPLLSKSVF

SEQ ID NO: 266579 - protein, 15 aa, Artificial Sequence
  Description of Artificial Sequence: Synthetic peptide
  Seed: SIGKVCRTLLAKSVF
SIIKVIRPLLTKSVF

SEQ ID NO: 266580 - protein, 15 aa, Artificial Sequence
  Description of Artificial Sequence: Synthetic peptide
  Seed: SIGKVCRTLLAKSVF
SIIKVIRPLLVKSVF

SEQ ID NO: 266581 - protein, 15 aa, Artificial Sequence
  Description of Artificial Sequence: Synthetic peptide
  Seed: SIGKVCRTLLAKSVF
SIIKVIRPLLYKSVF

SEQ ID NO: 266582 - protein, 15 aa, Artificial Sequence
  Description of Artificial Sequence: Synthetic peptide
  Seed: SIGKVCRTLLAKSVF
SIIKVIRQLLAKSVF

SEQ ID NO: 266583 - protein, 15 aa, Artificial Sequence
  Description of Artificial Sequence: Synthetic peptide
  Seed: SIGKVCRTLLAKSVF
SIIKVIRQLLGKSVF

SEQ ID NO: 266584 - protein, 15 aa, Artificial Sequence
  Description of Artificial Sequence: Synthetic peptide
  Seed: SIGKVCRTLLAKSVF
SIIKVIRQLLHKSVF

SEQ ID NO: 266585 - protein, 15 aa, Artificial Sequence
  Description of Artificial Sequence: Synthetic peptide
  Seed: SIGKVCRTLLAKSVF
SIIKVIRQLLNKSVF

SEQ ID NO: 266586 - protein, 15 aa, Artificial Sequence
  Description of Artificial Sequence: Synthetic peptide
  Seed: SIGKVCRTLLAKSVF
SIIKVIRQLLPKSVF

SEQ ID NO: 266587 - protein, 15 aa, Artificial Sequence
  Description of Artificial Sequence: Synthetic peptide
  Seed: SIGKVCRTLLAKSVF
SIIKVIRQLLQKSVF

SEQ ID NO: 266588 - protein, 15 aa, Artificial Sequence
  Description of Artificial Sequence: Synthetic peptide
  Seed: SIGKVCRTLLAKSVF
SIIKVIRQLLSKSVF

SEQ ID NO: 266589 - protein, 15 aa, Artificial Sequence
  Description of Artificial Sequence: Synthetic peptide
  Seed: SIGKVCRTLLAKSVF
SIIKVIRQLLTKSVF

SEQ ID NO: 266590 - protein, 15 aa, Artificial Sequence
  Description of Artificial Sequence: Synthetic peptide
  Seed: SIGKVCRTLLAKSVF
SIIKVIRRLLAKSVF

SEQ ID NO: 266591 - protein, 15 aa, Artificial Sequence
  Description of Artificial Sequence: Synthetic peptide
  Seed: SIGKVCRTLLAKSVF
SIIKVIRRLLCKSVF

SEQ ID NO: 266592 - protein, 15 aa, Artificial Sequence
  Description of Artificial Sequence: Synthetic peptide
  Seed: SIGKVCRTLLAKSVF
SIIKVIRRLLDKSVF

SEQ ID NO: 266593 - protein, 15 aa, Artificial Sequence
  Description of Artificial Sequence: Synthetic peptide
  Seed: SIGKVCRTLLAKSVF
SIIKVIRRLLEKSVF

SEQ ID NO: 266594 - protein, 15 aa, Artificial Sequence
  Description of Artificial Sequence: Synthetic peptide
  Seed: SIGKVCRTLLAKSVF
SIIKVIRRLLFKSVF

SEQ ID NO: 266595 - protein, 15 aa, Artificial Sequence
  Description of Artificial Sequence: Synthetic peptide
  Seed: SIGKVCRTLLAKSVF
SIIKVIRRLLGKSVF

SEQ ID NO: 266596 - protein, 15 aa, Artificial Sequence
  Description of Artificial Sequence: Synthetic peptide
  Seed: SIGKVCRTLLAKSVF
SIIKVIRRLLHKSVF

SEQ ID NO: 266597 - protein, 15 aa, Artificial Sequence
  Description of Artificial Sequence: Synthetic peptide
  Seed: SIGKVCRTLLAKSVF
SIIKVIRRLLIKSVF

SEQ ID NO: 266598 - protein, 15 aa, Artificial Sequence
  Description of Artificial Sequence: Synthetic peptide
  Seed: SIGKVCRTLLAKSVF
SIIKVIRRLLKKSVF

SEQ ID NO: 266599 - protein, 15 aa, Artificial Sequence
  Description of Artificial Sequence: Synthetic peptide
  Seed: SIGKVCRTLLAKSVF
SIIKVIRRLLLKSVF

SEQ ID NO: 266600 - protein, 15 aa, Artificial Sequence
  Description of Artificial Sequence: Synthetic peptide
  Seed: SIGKVCRTLLAKSVF
SIIKVIRRLLMKSVF

SEQ ID NO: 266601 - protein, 15 aa, Artificial Sequence
  Description of Artificial Sequence: Synthetic peptide
  Seed: SIGKVCRTLLAKSVF
SIIKVIRRLLNKSVF

SEQ ID NO: 266602 - protein, 15 aa, Artificial Sequence
  Description of Artificial Sequence: Synthetic peptide
  Seed: SIGKVCRTLLAKSVF
SIIKVIRRLLPKSVF

SEQ ID NO: 266603 - protein, 15 aa, Artificial Sequence
  Description of Artificial Sequence: Synthetic peptide
  Seed: SIGKVCRTLLAKSVF
SIIKVIRRLLQKSVF

SEQ ID NO: 266604 - protein, 15 aa, Artificial Sequence
  Description of Artificial Sequence: Synthetic peptide
  Seed: SIGKVCRTLLAKSVF
SIIKVIRRLLRKSVF

SEQ ID NO: 266605 - protein, 15 aa, Artificial Sequence
  Description of Artificial Sequence: Synthetic peptide
  Seed: SIGKVCRTLLAKSVF
SIIKVIRRLLSKSVF

SEQ ID NO: 266606 - protein, 15 aa, Artificial Sequence
  Description of Artificial Sequence: Synthetic peptide
  Seed: SIGKVCRTLLAKSVF
SIIKVIRRLLTKSVF

SEQ ID NO: 266607 - protein, 15 aa, Artificial Sequence
  Description of Artificial Sequence: Synthetic peptide
  Seed: SIGKVCRTLLAKSVF
SIIKVIRRLLVKSVF

SEQ ID NO: 266608 - protein, 15 aa, Artificial Sequence
  Description of Artificial Sequence: Synthetic peptide
  Seed: SIGKVCRTLLAKSVF
SIIKVIRRLLWKSVF

SEQ ID NO: 266609 - protein, 15 aa, Artificial Sequence
  Description of Artificial Sequence: Synthetic peptide
  Seed: SIGKVCRTLLAKSVF
SIIKVIRRLLYKSVF

SEQ ID NO: 266610 - protein, 15 aa, Artificial Sequence
  Description of Artificial Sequence: Synthetic peptide
  Seed: SIGKVCRTLLAKSVF
SIIKVIRSLLAKSVF

SEQ ID NO: 266611 - protein, 15 aa, Artificial Sequence
  Description of Artificial Sequence: Synthetic peptide
  Seed: SIGKVCRTLLAKSVF
SIIKVIRSLLDKSVF

SEQ ID NO: 266612 - protein, 15 aa, Artificial Sequence
  Description of Artificial Sequence: Synthetic peptide
  Seed: SIGKVCRTLLAKSVF
SIIKVIRSLLEKSVF

SEQ ID NO: 266613 - protein, 15 aa, Artificial Sequence
  Description of Artificial Sequence: Synthetic peptide
  Seed: SIGKVCRTLLAKSVF
SIIKVIRSLLGKSVF

SEQ ID NO: 266614 - protein, 15 aa, Artificial Sequence
  Description of Artificial Sequence: Synthetic peptide
  Seed: SIGKVCRTLLAKSVF
SIIKVIRSLLHKSVF

SEQ ID NO: 266615 - protein, 15 aa, Artificial Sequence
  Description of Artificial Sequence: Synthetic peptide
  Seed: SIGKVCRTLLAKSVF
SIIKVIRSLLIKSVF

SEQ ID NO: 266616 - protein, 15 aa, Artificial Sequence
  Description of Artificial Sequence: Synthetic peptide
  Seed: SIGKVCRTLLAKSVF
SIIKVIRSLLMKSVF

SEQ ID NO: 266617 - protein, 15 aa, Artificial Sequence
  Description of Artificial Sequence: Synthetic peptide
  Seed: SIGKVCRTLLAKSVF
SIIKVIRSLLNKSVF

SEQ ID NO: 266618 - protein, 15 aa, Artificial Sequence
  Description of Artificial Sequence: Synthetic peptide
  Seed: SIGKVCRTLLAKSVF
SIIKVIRSLLPKSVF

SEQ ID NO: 266619 - protein, 15 aa, Artificial Sequence
  Description of Artificial Sequence: Synthetic peptide
  Seed: SIGKVCRTLLAKSVF
SIIKVIRSLLQKSVF

SEQ ID NO: 266620 - protein, 15 aa, Artificial Sequence
  Description of Artificial Sequence: Synthetic peptide
  Seed: SIGKVCRTLLAKSVF
SIIKVIRSLLRKSVF

SEQ ID NO: 266621 - protein, 15 aa, Artificial Sequence
  Description of Artificial Sequence: Synthetic peptide
  Seed: SIGKVCRTLLAKSVF
SIIKVIRSLLSKSVF

SEQ ID NO: 266622 - protein, 15 aa, Artificial Sequence
  Description of Artificial Sequence: Synthetic peptide
  Seed: SIGKVCRTLLAKSVF
SIIKVIRSLLTKSVF

SEQ ID NO: 266623 - protein, 15 aa, Artificial Sequence
  Description of Artificial Sequence: Synthetic peptide
  Seed: SIGKVCRTLLAKSVF
SIIKVIRSLLVKSVF

SEQ ID NO: 266624 - protein, 15 aa, Artificial Sequence
  Description of Artificial Sequence: Synthetic peptide
  Seed: SIGKVCRTLLAKSVF
SIIKVIRSLLYKSVF

SEQ ID NO: 266625 - protein, 15 aa, Artificial Sequence
  Description of Artificial Sequence: Synthetic peptide
  Seed: SIGKVCRTLLAKSVF
SIIKVIRTLLAKSVF

SEQ ID NO: 266626 - protein, 15 aa, Artificial Sequence
  Description of Artificial Sequence: Synthetic peptide
  Seed: SIGKVCRTLLAKSVF
SIIKVIRTLLDKSVF

SEQ ID NO: 266627 - protein, 15 aa, Artificial Sequence
  Description of Artificial Sequence: Synthetic peptide
  Seed: SIGKVCRTLLAKSVF
SIIKVIRTLLEKSVF

SEQ ID NO: 266628 - protein, 15 aa, Artificial Sequence
  Description of Artificial Sequence: Synthetic peptide
  Seed: SIGKVCRTLLAKSVF
SIIKVIRTLLGKSVF

SEQ ID NO: 266629 - protein, 15 aa, Artificial Sequence
  Description of Artificial Sequence: Synthetic peptide
  Seed: SIGKVCRTLLAKSVF
SIIKVIRTLLHKSVF

SEQ ID NO: 266630 - protein, 15 aa, Artificial Sequence
  Description of Artificial Sequence: Synthetic peptide
  Seed: SIGKVCRTLLAKSVF
SIIKVIRTLLKKSVF

SEQ ID NO: 266631 - protein, 15 aa, Artificial Sequence
  Description of Artificial Sequence: Synthetic peptide
  Seed: SIGKVCRTLLAKSVF
SIIKVIRTLLMKSVF

SEQ ID NO: 266632 - protein, 15 aa, Artificial Sequence
  Description of Artificial Sequence: Synthetic peptide
  Seed: SIGKVCRTLLAKSVF
SIIKVIRTLLNKSVF

SEQ ID NO: 266633 - protein, 15 aa, Artificial Sequence
  Description of Artificial Sequence: Synthetic peptide
  Seed: SIGKVCRTLLAKSVF
SIIKVIRTLLPKSVF

SEQ ID NO: 266634 - protein, 15 aa, Artificial Sequence
  Description of Artificial Sequence: Synthetic peptide
  Seed: SIGKVCRTLLAKSVF
SIIKVIRTLLQKSVF

SEQ ID NO: 266635 - protein, 15 aa, Artificial Sequence
  Description of Artificial Sequence: Synthetic peptide
  Seed: SIGKVCRTLLAKSVF
SIIKVIRTLLRKSVF

SEQ ID NO: 266636 - protein, 15 aa, Artificial Sequence
  Description of Artificial Sequence: Synthetic peptide
  Seed: SIGKVCRTLLAKSVF
SIIKVIRTLLSKSVF

SEQ ID NO: 266637 - protein, 15 aa, Artificial Sequence
  Description of Artificial Sequence: Synthetic peptide
  Seed: SIGKVCRTLLAKSVF
SIIKVIRTLLTKSVF

SEQ ID NO: 266638 - protein, 15 aa, Artificial Sequence
  Description of Artificial Sequence: Synthetic peptide
  Seed: SIGKVCRTLLAKSVF
SIIKVIRTLLVKSVF

SEQ ID NO: 266639 - protein, 15 aa, Artificial Sequence
  Description of Artificial Sequence: Synthetic peptide
  Seed: SIGKVCRTLLAKSVF
SIIKVIRTLLYKSVF

SEQ ID NO: 266640 - protein, 15 aa, Artificial Sequence
  Description of Artificial Sequence: Synthetic peptide
  Seed: SIGKVCRTLLAKSVF
SIIKVIRVLLHKSVF

SEQ ID NO: 266641 - protein, 15 aa, Artificial Sequence
  Description of Artificial Sequence: Synthetic peptide
  Seed: SIGKVCRTLLAKSVF
SIIKVIRVLLNKSVF

SEQ ID NO: 266642 - protein, 15 aa, Artificial Sequence
  Description of Artificial Sequence: Synthetic peptide
  Seed: SIGKVCRTLLAKSVF
SIIKVIRVLLPKSVF

SEQ ID NO: 266643 - protein, 15 aa, Artificial Sequence
  Description of Artificial Sequence: Synthetic peptide
  Seed: SIGKVCRTLLAKSVF
SIIKVIRVLLSKSVF

SEQ ID NO: 266644 - protein, 15 aa, Artificial Sequence
  Description of Artificial Sequence: Synthetic peptide
  Seed: SIGKVCRTLLAKSVF
SIIKVKRALLAKSVF

SEQ ID NO: 266645 - protein, 15 aa, Artificial Sequence
  Description of Artificial Sequence: Synthetic peptide
  Seed: SIGKVCRTLLAKSVF
SIIKVKRALLCKSVF

SEQ ID NO: 266646 - protein, 15 aa, Artificial Sequence
  Description of Artificial Sequence: Synthetic peptide
  Seed: SIGKVCRTLLAKSVF
SIIKVKRALLDKSVF

SEQ ID NO: 266647 - protein, 15 aa, Artificial Sequence
  Description of Artificial Sequence: Synthetic peptide
  Seed: SIGKVCRTLLAKSVF
SIIKVKRALLEKSVF

SEQ ID NO: 266648 - protein, 15 aa, Artificial Sequence
  Description of Artificial Sequence: Synthetic peptide
  Seed: SIGKVCRTLLAKSVF
SIIKVKRALLGKSVF

SEQ ID NO: 266649 - protein, 15 aa, Artificial Sequence
  Description of Artificial Sequence: Synthetic peptide
  Seed: SIGKVCRTLLAKSVF
SIIKVKRALLHKSVF

SEQ ID NO: 266650 - protein, 15 aa, Artificial Sequence
  Description of Artificial Sequence: Synthetic peptide
  Seed: SIGKVCRTLLAKSVF
SIIKVKRALLKKSVF

SEQ ID NO: 266651 - protein, 15 aa, Artificial Sequence
  Description of Artificial Sequence: Synthetic peptide
  Seed: SIGKVCRTLLAKSVF
SIIKVKRALLNKSVF

SEQ ID NO: 266652 - protein, 15 aa, Artificial Sequence
  Description of Artificial Sequence: Synthetic peptide
  Seed: SIGKVCRTLLAKSVF
SIIKVKRALLQKSVF

SEQ ID NO: 266653 - protein, 15 aa, Artificial Sequence
  Description of Artificial Sequence: Synthetic peptide
  Seed: SIGKVCRTLLAKSVF
SIIKVKRALLRKSVF

SEQ ID NO: 266654 - protein, 15 aa, Artificial Sequence
  Description of Artificial Sequence: Synthetic peptide
  Seed: SIGKVCRTLLAKSVF
SIIKVKRALLSKSVF

SEQ ID NO: 266655 - protein, 15 aa, Artificial Sequence
  Description of Artificial Sequence: Synthetic peptide
  Seed: SIGKVCRTLLAKSVF
SIIKVKRALLYKSVF

SEQ ID NO: 266656 - protein, 15 aa, Artificial Sequence
  Description of Artificial Sequence: Synthetic peptide
  Seed: SIGKVCRTLLAKSVF
SIIKVKRCLLRKSVF

SEQ ID NO: 266657 - protein, 15 aa, Artificial Sequence
  Description of Artificial Sequence: Synthetic peptide
  Seed: SIGKVCRTLLAKSVF
SIIKVKRELLAKSVF

SEQ ID NO: 266658 - protein, 15 aa, Artificial Sequence
  Description of Artificial Sequence: Synthetic peptide
  Seed: SIGKVCRTLLAKSVF
SIIKVKRELLHKSVF

SEQ ID NO: 266659 - protein, 15 aa, Artificial Sequence
  Description of Artificial Sequence: Synthetic peptide
  Seed: SIGKVCRTLLAKSVF
SIIKVKRELLQKSVF

SEQ ID NO: 266660 - protein, 15 aa, Artificial Sequence
  Description of Artificial Sequence: Synthetic peptide
  Seed: SIGKVCRTLLAKSVF
SIIKVKRELLSKSVF

SEQ ID NO: 266661 - protein, 15 aa, Artificial Sequence
  Description of Artificial Sequence: Synthetic peptide
  Seed: SIGKVCRTLLAKSVF
SIIKVKRGLLAKSVF

SEQ ID NO: 266662 - protein, 15 aa, Artificial Sequence
  Description of Artificial Sequence: Synthetic peptide
  Seed: SIGKVCRTLLAKSVF
SIIKVKRGLLCKSVF

SEQ ID NO: 266663 - protein, 15 aa, Artificial Sequence
  Description of Artificial Sequence: Synthetic peptide
  Seed: SIGKVCRTLLAKSVF
SIIKVKRGLLGKSVF

SEQ ID NO: 266664 - protein, 15 aa, Artificial Sequence
  Description of Artificial Sequence: Synthetic peptide
  Seed: SIGKVCRTLLAKSVF
SIIKVKRGLLQKSVF

SEQ ID NO: 266665 - protein, 15 aa, Artificial Sequence
  Description of Artificial Sequence: Synthetic peptide
  Seed: SIGKVCRTLLAKSVF
SIIKVKRGLLSKSVF

SEQ ID NO: 266666 - protein, 15 aa, Artificial Sequence
  Description of Artificial Sequence: Synthetic peptide
  Seed: SIGKVCRTLLAKSVF
SIIKVKRHLLAKSVF

SEQ ID NO: 266667 - protein, 15 aa, Artificial Sequence
  Description of Artificial Sequence: Synthetic peptide
  Seed: SIGKVCRTLLAKSVF
SIIKVKRHLLCKSVF

SEQ ID NO: 266668 - protein, 15 aa, Artificial Sequence
  Description of Artificial Sequence: Synthetic peptide
  Seed: SIGKVCRTLLAKSVF
SIIKVKRHLLDKSVF

SEQ ID NO: 266669 - protein, 15 aa, Artificial Sequence
  Description of Artificial Sequence: Synthetic peptide
  Seed: SIGKVCRTLLAKSVF
SIIKVKRHLLEKSVF

SEQ ID NO: 266670 - protein, 15 aa, Artificial Sequence
  Description of Artificial Sequence: Synthetic peptide
  Seed: SIGKVCRTLLAKSVF
SIIKVKRHLLGKSVF

SEQ ID NO: 266671 - protein, 15 aa, Artificial Sequence
  Description of Artificial Sequence: Synthetic peptide
  Seed: SIGKVCRTLLAKSVF
SIIKVKRHLLHKSVF

SEQ ID NO: 266672 - protein, 15 aa, Artificial Sequence
  Description of Artificial Sequence: Synthetic peptide
  Seed: SIGKVCRTLLAKSVF
SIIKVKRHLLQKSVF

SEQ ID NO: 266673 - protein, 15 aa, Artificial Sequence
  Description of Artificial Sequence: Synthetic peptide
  Seed: SIGKVCRTLLAKSVF
SIIKVKRHLLSKSVF

SEQ ID NO: 266674 - protein, 15 aa, Artificial Sequence
  Description of Artificial Sequence: Synthetic peptide
  Seed: SIGKVCRTLLAKSVF
SIIKVKRILLAKSVF

SEQ ID NO: 266675 - protein, 15 aa, Artificial Sequence
  Description of Artificial Sequence: Synthetic peptide
  Seed: SIGKVCRTLLAKSVF
SIIKVKRILLDKSVF

SEQ ID NO: 266676 - protein, 15 aa, Artificial Sequence
  Description of Artificial Sequence: Synthetic peptide
  Seed: SIGKVCRTLLAKSVF
SIIKVKRILLGKSVF

SEQ ID NO: 266677 - protein, 15 aa, Artificial Sequence
  Description of Artificial Sequence: Synthetic peptide
  Seed: SIGKVCRTLLAKSVF
SIIKVKRILLHKSVF

SEQ ID NO: 266678 - protein, 15 aa, Artificial Sequence
  Description of Artificial Sequence: Synthetic peptide
  Seed: SIGKVCRTLLAKSVF
SIIKVKRILLQKSVF

SEQ ID NO: 266679 - protein, 15 aa, Artificial Sequence
  Description of Artificial Sequence: Synthetic peptide
  Seed: SIGKVCRTLLAKSVF
SIIKVKRILLRKSVF

SEQ ID NO: 266680 - protein, 15 aa, Artificial Sequence
  Description of Artificial Sequence: Synthetic peptide
  Seed: SIGKVCRTLLAKSVF
SIIKVKRILLSKSVF

SEQ ID NO: 266681 - protein, 15 aa, Artificial Sequence
  Description of Artificial Sequence: Synthetic peptide
  Seed: SIGKVCRTLLAKSVF
SIIKVKRILLYKSVF

SEQ ID NO: 266682 - protein, 15 aa, Artificial Sequence
  Description of Artificial Sequence: Synthetic peptide
  Seed: SIGKVCRTLLAKSVF
SIIKVKRKLLAKSVF

SEQ ID NO: 266683 - protein, 15 aa, Artificial Sequence
  Description of Artificial Sequence: Synthetic peptide
  Seed: SIGKVCRTLLAKSVF
SIIKVKRKLLCKSVF

SEQ ID NO: 266684 - protein, 15 aa, Artificial Sequence
  Description of Artificial Sequence: Synthetic peptide
  Seed: SIGKVCRTLLAKSVF
SIIKVKRKLLDKSVF

SEQ ID NO: 266685 - protein, 15 aa, Artificial Sequence
  Description of Artificial Sequence: Synthetic peptide
  Seed: SIGKVCRTLLAKSVF
SIIKVKRKLLEKSVF

SEQ ID NO: 266686 - protein, 15 aa, Artificial Sequence
  Description of Artificial Sequence: Synthetic peptide
  Seed: SIGKVCRTLLAKSVF
SIIKVKRKLLFKSVF

SEQ ID NO: 266687 - protein, 15 aa, Artificial Sequence
  Description of Artificial Sequence: Synthetic peptide
  Seed: SIGKVCRTLLAKSVF
SIIKVKRKLLGKSVF

SEQ ID NO: 266688 - protein, 15 aa, Artificial Sequence
  Description of Artificial Sequence: Synthetic peptide
  Seed: SIGKVCRTLLAKSVF
SIIKVKRKLLHKSVF

SEQ ID NO: 266689 - protein, 15 aa, Artificial Sequence
  Description of Artificial Sequence: Synthetic peptide
  Seed: SIGKVCRTLLAKSVF
SIIKVKRKLLIKSVF

SEQ ID NO: 266690 - protein, 15 aa, Artificial Sequence
  Description of Artificial Sequence: Synthetic peptide
  Seed: SIGKVCRTLLAKSVF
SIIKVKRKLLKKSVF

SEQ ID NO: 266691 - protein, 15 aa, Artificial Sequence
  Description of Artificial Sequence: Synthetic peptide
  Seed: SIGKVCRTLLAKSVF
SIIKVKRKLLLKSVF

SEQ ID NO: 266692 - protein, 15 aa, Artificial Sequence
  Description of Artificial Sequence: Synthetic peptide
  Seed: SIGKVCRTLLAKSVF
SIIKVKRKLLMKSVF

SEQ ID NO: 266693 - protein, 15 aa, Artificial Sequence
  Description of Artificial Sequence: Synthetic peptide
  Seed: SIGKVCRTLLAKSVF
SIIKVKRKLLNKSVF

SEQ ID NO: 266694 - protein, 15 aa, Artificial Sequence
  Description of Artificial Sequence: Synthetic peptide
  Seed: SIGKVCRTLLAKSVF
SIIKVKRKLLPKSVF

SEQ ID NO: 266695 - protein, 15 aa, Artificial Sequence
  Description of Artificial Sequence: Synthetic peptide
  Seed: SIGKVCRTLLAKSVF
SIIKVKRKLLQKSVF

SEQ ID NO: 266696 - protein, 15 aa, Artificial Sequence
  Description of Artificial Sequence: Synthetic peptide
  Seed: SIGKVCRTLLAKSVF
SIIKVKRKLLRKSVF

SEQ ID NO: 266697 - protein, 15 aa, Artificial Sequence
  Description of Artificial Sequence: Synthetic peptide
  Seed: SIGKVCRTLLAKSVF
SIIKVKRKLLSKSVF

SEQ ID NO: 266698 - protein, 15 aa, Artificial Sequence
  Description of Artificial Sequence: Synthetic peptide
  Seed: SIGKVCRTLLAKSVF
SIIKVKRKLLTKSVF

SEQ ID NO: 266699 - protein, 15 aa, Artificial Sequence
  Description of Artificial Sequence: Synthetic peptide
  Seed: SIGKVCRTLLAKSVF
SIIKVKRKLLVKSVF

SEQ ID NO: 266700 - protein, 15 aa, Artificial Sequence
  Description of Artificial Sequence: Synthetic peptide
  Seed: SIGKVCRTLLAKSVF
SIIKVKRKLLWKSVF

SEQ ID NO: 266701 - protein, 15 aa, Artificial Sequence
  Description of Artificial Sequence: Synthetic peptide
  Seed: SIGKVCRTLLAKSVF
SIIKVKRKLLYKSVF

SEQ ID NO: 266702 - protein, 15 aa, Artificial Sequence
  Description of Artificial Sequence: Synthetic peptide
  Seed: SIGKVCRTLLAKSVF
SIIKVKRMLLRKSVF

SEQ ID NO: 266703 - protein, 15 aa, Artificial Sequence
  Description of Artificial Sequence: Synthetic peptide
  Seed: SIGKVCRTLLAKSVF
SIIKVKRNLLAKSVF

SEQ ID NO: 266704 - protein, 15 aa, Artificial Sequence
  Description of Artificial Sequence: Synthetic peptide
  Seed: SIGKVCRTLLAKSVF
SIIKVKRNLLCKSVF

SEQ ID NO: 266705 - protein, 15 aa, Artificial Sequence
  Description of Artificial Sequence: Synthetic peptide
  Seed: SIGKVCRTLLAKSVF
SIIKVKRNLLDKSVF

SEQ ID NO: 266706 - protein, 15 aa, Artificial Sequence
  Description of Artificial Sequence: Synthetic peptide
  Seed: SIGKVCRTLLAKSVF
SIIKVKRNLLEKSVF

SEQ ID NO: 266707 - protein, 15 aa, Artificial Sequence
  Description of Artificial Sequence: Synthetic peptide
  Seed: SIGKVCRTLLAKSVF
SIIKVKRNLLGKSVF

SEQ ID NO: 266708 - protein, 15 aa, Artificial Sequence
  Description of Artificial Sequence: Synthetic peptide
  Seed: SIGKVCRTLLAKSVF
SIIKVKRNLLHKSVF

SEQ ID NO: 266709 - protein, 15 aa, Artificial Sequence
  Description of Artificial Sequence: Synthetic peptide
  Seed: SIGKVCRTLLAKSVF
SIIKVKRNLLLKSVF

SEQ ID NO: 266710 - protein, 15 aa, Artificial Sequence
  Description of Artificial Sequence: Synthetic peptide
  Seed: SIGKVCRTLLAKSVF
SIIKVKRNLLMKSVF

SEQ ID NO: 266711 - protein, 15 aa, Artificial Sequence
  Description of Artificial Sequence: Synthetic peptide
  Seed: SIGKVCRTLLAKSVF
SIIKVKRNLLNKSVF

SEQ ID NO: 266712 - protein, 15 aa, Artificial Sequence
  Description of Artificial Sequence: Synthetic peptide
  Seed: SIGKVCRTLLAKSVF
SIIKVKRNLLQKSVF

SEQ ID NO: 266713 - protein, 15 aa, Artificial Sequence
  Description of Artificial Sequence: Synthetic peptide
  Seed: SIGKVCRTLLAKSVF
SIIKVKRNLLSKSVF

SEQ ID NO: 266714 - protein, 15 aa, Artificial Sequence
  Description of Artificial Sequence: Synthetic peptide
  Seed: SIGKVCRTLLAKSVF
SIIKVKRNLLTKSVF

SEQ ID NO: 266715 - protein, 15 aa, Artificial Sequence
  Description of Artificial Sequence: Synthetic peptide
  Seed: SIGKVCRTLLAKSVF
SIIKVKRNLLVKSVF

SEQ ID NO: 266716 - protein, 15 aa, Artificial Sequence
  Description of Artificial Sequence: Synthetic peptide
  Seed: SIGKVCRTLLAKSVF
SIIKVKRNLLYKSVF

SEQ ID NO: 266717 - protein, 15 aa, Artificial Sequence
  Description of Artificial Sequence: Synthetic peptide
  Seed: SIGKVCRTLLAKSVF
SIIKVKRPLLAKSVF

SEQ ID NO: 266718 - protein, 15 aa, Artificial Sequence
  Description of Artificial Sequence: Synthetic peptide
  Seed: SIGKVCRTLLAKSVF
SIIKVKRPLLCKSVF

SEQ ID NO: 266719 - protein, 15 aa, Artificial Sequence
  Description of Artificial Sequence: Synthetic peptide
  Seed: SIGKVCRTLLAKSVF
SIIKVKRPLLGKSVF

SEQ ID NO: 266720 - protein, 15 aa, Artificial Sequence
  Description of Artificial Sequence: Synthetic peptide
  Seed: SIGKVCRTLLAKSVF
SIIKVKRPLLQKSVF

SEQ ID NO: 266721 - protein, 15 aa, Artificial Sequence
  Description of Artificial Sequence: Synthetic peptide
  Seed: SIGKVCRTLLAKSVF
SIIKVKRPLLSKSVF

SEQ ID NO: 266722 - protein, 15 aa, Artificial Sequence
  Description of Artificial Sequence: Synthetic peptide
  Seed: SIGKVCRTLLAKSVF
SIIKVKRQLLAKSVF

SEQ ID NO: 266723 - protein, 15 aa, Artificial Sequence
  Description of Artificial Sequence: Synthetic peptide
  Seed: SIGKVCRTLLAKSVF
SIIKVKRQLLCKSVF

SEQ ID NO: 266724 - protein, 15 aa, Artificial Sequence
  Description of Artificial Sequence: Synthetic peptide
  Seed: SIGKVCRTLLAKSVF
SIIKVKRQLLDKSVF

SEQ ID NO: 266725 - protein, 15 aa, Artificial Sequence
  Description of Artificial Sequence: Synthetic peptide
  Seed: SIGKVCRTLLAKSVF
SIIKVKRQLLEKSVF

SEQ ID NO: 266726 - protein, 15 aa, Artificial Sequence
  Description of Artificial Sequence: Synthetic peptide
  Seed: SIGKVCRTLLAKSVF
SIIKVKRQLLGKSVF

SEQ ID NO: 266727 - protein, 15 aa, Artificial Sequence
  Description of Artificial Sequence: Synthetic peptide
  Seed: SIGKVCRTLLAKSVF
SIIKVKRQLLHKSVF

SEQ ID NO: 266728 - protein, 15 aa, Artificial Sequence
  Description of Artificial Sequence: Synthetic peptide
  Seed: SIGKVCRTLLAKSVF
SIIKVKRQLLQKSVF

SEQ ID NO: 266729 - protein, 15 aa, Artificial Sequence
  Description of Artificial Sequence: Synthetic peptide
  Seed: SIGKVCRTLLAKSVF
SIIKVKRQLLSKSVF

SEQ ID NO: 266730 - protein, 15 aa, Artificial Sequence
  Description of Artificial Sequence: Synthetic peptide
  Seed: SIGKVCRTLLAKSVF
SIIKVKRRLLAKSVF

SEQ ID NO: 266731 - protein, 15 aa, Artificial Sequence
  Description of Artificial Sequence: Synthetic peptide
  Seed: SIGKVCRTLLAKSVF
SIIKVKRRLLCKSVF

SEQ ID NO: 266732 - protein, 15 aa, Artificial Sequence
  Description of Artificial Sequence: Synthetic peptide
  Seed: SIGKVCRTLLAKSVF
SIIKVKRRLLDKSVF

SEQ ID NO: 266733 - protein, 15 aa, Artificial Sequence
  Description of Artificial Sequence: Synthetic peptide
  Seed: SIGKVCRTLLAKSVF
SIIKVKRRLLEKSVF

SEQ ID NO: 266734 - protein, 15 aa, Artificial Sequence
  Description of Artificial Sequence: Synthetic peptide
  Seed: SIGKVCRTLLAKSVF
SIIKVKRRLLFKSVF

SEQ ID NO: 266735 - protein, 15 aa, Artificial Sequence
  Description of Artificial Sequence: Synthetic peptide
  Seed: SIGKVCRTLLAKSVF
SIIKVKRRLLGKSVF

SEQ ID NO: 266736 - protein, 15 aa, Artificial Sequence
  Description of Artificial Sequence: Synthetic peptide
  Seed: SIGKVCRTLLAKSVF
SIIKVKRRLLHKSVF

SEQ ID NO: 266737 - protein, 15 aa, Artificial Sequence
  Description of Artificial Sequence: Synthetic peptide
  Seed: SIGKVCRTLLAKSVF
SIIKVKRRLLIKSVF

SEQ ID NO: 266738 - protein, 15 aa, Artificial Sequence
  Description of Artificial Sequence: Synthetic peptide
  Seed: SIGKVCRTLLAKSVF
SIIKVKRRLLKKSVF

SEQ ID NO: 266739 - protein, 15 aa, Artificial Sequence
  Description of Artificial Sequence: Synthetic peptide
  Seed: SIGKVCRTLLAKSVF
SIIKVKRRLLLKSVF

SEQ ID NO: 266740 - protein, 15 aa, Artificial Sequence
  Description of Artificial Sequence: Synthetic peptide
  Seed: SIGKVCRTLLAKSVF
SIIKVKRRLLMKSVF

SEQ ID NO: 266741 - protein, 15 aa, Artificial Sequence
  Description of Artificial Sequence: Synthetic peptide
  Seed: SIGKVCRTLLAKSVF
SIIKVKRRLLNKSVF

SEQ ID NO: 266742 - protein, 15 aa, Artificial Sequence
  Description of Artificial Sequence: Synthetic peptide
  Seed: SIGKVCRTLLAKSVF
SIIKVKRRLLPKSVF

SEQ ID NO: 266743 - protein, 15 aa, Artificial Sequence
  Description of Artificial Sequence: Synthetic peptide
  Seed: SIGKVCRTLLAKSVF
SIIKVKRRLLQKSVF

SEQ ID NO: 266744 - protein, 15 aa, Artificial Sequence
  Description of Artificial Sequence: Synthetic peptide
  Seed: SIGKVCRTLLAKSVF
SIIKVKRRLLRKSVF

SEQ ID NO: 266745 - protein, 15 aa, Artificial Sequence
  Description of Artificial Sequence: Synthetic peptide
  Seed: SIGKVCRTLLAKSVF
SIIKVKRRLLSKSVF

SEQ ID NO: 266746 - protein, 15 aa, Artificial Sequence
  Description of Artificial Sequence: Synthetic peptide
  Seed: SIGKVCRTLLAKSVF
SIIKVKRRLLTKSVF

SEQ ID NO: 266747 - protein, 15 aa, Artificial Sequence
  Description of Artificial Sequence: Synthetic peptide
  Seed: SIGKVCRTLLAKSVF
SIIKVKRRLLVKSVF

SEQ ID NO: 266748 - protein, 15 aa, Artificial Sequence
  Description of Artificial Sequence: Synthetic peptide
  Seed: SIGKVCRTLLAKSVF
SIIKVKRRLLWKSVF

SEQ ID NO: 266749 - protein, 15 aa, Artificial Sequence
  Description of Artificial Sequence: Synthetic peptide
  Seed: SIGKVCRTLLAKSVF
SIIKVKRRLLYKSVF

SEQ ID NO: 266750 - protein, 15 aa, Artificial Sequence
  Description of Artificial Sequence: Synthetic peptide
  Seed: SIGKVCRTLLAKSVF
SIIKVKRSLLAKSVF

SEQ ID NO: 266751 - protein, 15 aa, Artificial Sequence
  Description of Artificial Sequence: Synthetic peptide
  Seed: SIGKVCRTLLAKSVF
SIIKVKRSLLCKSVF

SEQ ID NO: 266752 - protein, 15 aa, Artificial Sequence
  Description of Artificial Sequence: Synthetic peptide
  Seed: SIGKVCRTLLAKSVF
SIIKVKRSLLDKSVF

SEQ ID NO: 266753 - protein, 15 aa, Artificial Sequence
  Description of Artificial Sequence: Synthetic peptide
  Seed: SIGKVCRTLLAKSVF
SIIKVKRSLLEKSVF

SEQ ID NO: 266754 - protein, 15 aa, Artificial Sequence
  Description of Artificial Sequence: Synthetic peptide
  Seed: SIGKVCRTLLAKSVF
SIIKVKRSLLGKSVF

SEQ ID NO: 266755 - protein, 15 aa, Artificial Sequence
  Description of Artificial Sequence: Synthetic peptide
  Seed: SIGKVCRTLLAKSVF
SIIKVKRSLLHKSVF

SEQ ID NO: 266756 - protein, 15 aa, Artificial Sequence
  Description of Artificial Sequence: Synthetic peptide
  Seed: SIGKVCRTLLAKSVF
SIIKVKRSLLIKSVF

SEQ ID NO: 266757 - protein, 15 aa, Artificial Sequence
  Description of Artificial Sequence: Synthetic peptide
  Seed: SIGKVCRTLLAKSVF
SIIKVKRSLLKKSVF

SEQ ID NO: 266758 - protein, 15 aa, Artificial Sequence
  Description of Artificial Sequence: Synthetic peptide
  Seed: SIGKVCRTLLAKSVF
SIIKVKRSLLLKSVF

SEQ ID NO: 266759 - protein, 15 aa, Artificial Sequence
  Description of Artificial Sequence: Synthetic peptide
  Seed: SIGKVCRTLLAKSVF
SIIKVKRSLLMKSVF

SEQ ID NO: 266760 - protein, 15 aa, Artificial Sequence
  Description of Artificial Sequence: Synthetic peptide
  Seed: SIGKVCRTLLAKSVF
SIIKVKRSLLNKSVF

SEQ ID NO: 266761 - protein, 15 aa, Artificial Sequence
  Description of Artificial Sequence: Synthetic peptide
  Seed: SIGKVCRTLLAKSVF
SIIKVKRSLLQKSVF

SEQ ID NO: 266762 - protein, 15 aa, Artificial Sequence
  Description of Artificial Sequence: Synthetic peptide
  Seed: SIGKVCRTLLAKSVF
SIIKVKRSLLRKSVF

SEQ ID NO: 266763 - protein, 15 aa, Artificial Sequence
  Description of Artificial Sequence: Synthetic peptide
  Seed: SIGKVCRTLLAKSVF
SIIKVKRSLLSKSVF

SEQ ID NO: 266764 - protein, 15 aa, Artificial Sequence
  Description of Artificial Sequence: Synthetic peptide
  Seed: SIGKVCRTLLAKSVF
SIIKVKRSLLTKSVF

SEQ ID NO: 266765 - protein, 15 aa, Artificial Sequence
  Description of Artificial Sequence: Synthetic peptide
  Seed: SIGKVCRTLLAKSVF
SIIKVKRSLLVKSVF

SEQ ID NO: 266766 - protein, 15 aa, Artificial Sequence
  Description of Artificial Sequence: Synthetic peptide
  Seed: SIGKVCRTLLAKSVF
SIIKVKRSLLYKSVF

SEQ ID NO: 266767 - protein, 15 aa, Artificial Sequence
  Description of Artificial Sequence: Synthetic peptide
  Seed: SIGKVCRTLLAKSVF
SIIKVKRTLLAKSVF

SEQ ID NO: 266768 - protein, 15 aa, Artificial Sequence
  Description of Artificial Sequence: Synthetic peptide
  Seed: SIGKVCRTLLAKSVF
SIIKVKRTLLCKSVF

SEQ ID NO: 266769 - protein, 15 aa, Artificial Sequence
  Description of Artificial Sequence: Synthetic peptide
  Seed: SIGKVCRTLLAKSVF
SIIKVKRTLLDKSVF

SEQ ID NO: 266770 - protein, 15 aa, Artificial Sequence
  Description of Artificial Sequence: Synthetic peptide
  Seed: SIGKVCRTLLAKSVF
SIIKVKRTLLEKSVF

SEQ ID NO: 266771 - protein, 15 aa, Artificial Sequence
  Description of Artificial Sequence: Synthetic peptide
  Seed: SIGKVCRTLLAKSVF
SIIKVKRTLLFKSVF

SEQ ID NO: 266772 - protein, 15 aa, Artificial Sequence
  Description of Artificial Sequence: Synthetic peptide
  Seed: SIGKVCRTLLAKSVF
SIIKVKRTLLGKSVF

SEQ ID NO: 266773 - protein, 15 aa, Artificial Sequence
  Description of Artificial Sequence: Synthetic peptide
  Seed: SIGKVCRTLLAKSVF
SIIKVKRTLLHKSVF

SEQ ID NO: 266774 - protein, 15 aa, Artificial Sequence
  Description of Artificial Sequence: Synthetic peptide
  Seed: SIGKVCRTLLAKSVF
SIIKVKRTLLIKSVF

SEQ ID NO: 266775 - protein, 15 aa, Artificial Sequence
  Description of Artificial Sequence: Synthetic peptide
  Seed: SIGKVCRTLLAKSVF
SIIKVKRTLLKKSVF

SEQ ID NO: 266776 - protein, 15 aa, Artificial Sequence
  Description of Artificial Sequence: Synthetic peptide
  Seed: SIGKVCRTLLAKSVF
SIIKVKRTLLLKSVF

SEQ ID NO: 266777 - protein, 15 aa, Artificial Sequence
  Description of Artificial Sequence: Synthetic peptide
  Seed: SIGKVCRTLLAKSVF
SIIKVKRTLLMKSVF

SEQ ID NO: 266778 - protein, 15 aa, Artificial Sequence
  Description of Artificial Sequence: Synthetic peptide
  Seed: SIGKVCRTLLAKSVF
SIIKVKRTLLNKSVF

SEQ ID NO: 266779 - protein, 15 aa, Artificial Sequence
  Description of Artificial Sequence: Synthetic peptide
  Seed: SIGKVCRTLLAKSVF
SIIKVKRTLLPKSVF

SEQ ID NO: 266780 - protein, 15 aa, Artificial Sequence
  Description of Artificial Sequence: Synthetic peptide
  Seed: SIGKVCRTLLAKSVF
SIIKVKRTLLQKSVF

SEQ ID NO: 266781 - protein, 15 aa, Artificial Sequence
  Description of Artificial Sequence: Synthetic peptide
  Seed: SIGKVCRTLLAKSVF
SIIKVKRTLLRKSVF

SEQ ID NO: 266782 - protein, 15 aa, Artificial Sequence
  Description of Artificial Sequence: Synthetic peptide
  Seed: SIGKVCRTLLAKSVF
SIIKVKRTLLSKSVF

SEQ ID NO: 266783 - protein, 15 aa, Artificial Sequence
  Description of Artificial Sequence: Synthetic peptide
  Seed: SIGKVCRTLLAKSVF
SIIKVKRTLLTKSVF

SEQ ID NO: 266784 - protein, 15 aa, Artificial Sequence
  Description of Artificial Sequence: Synthetic peptide
  Seed: SIGKVCRTLLAKSVF
SIIKVKRTLLVKSVF

SEQ ID NO: 266785 - protein, 15 aa, Artificial Sequence
  Description of Artificial Sequence: Synthetic peptide
  Seed: SIGKVCRTLLAKSVF
SIIKVKRTLLYKSVF

SEQ ID NO: 266786 - protein, 15 aa, Artificial Sequence
  Description of Artificial Sequence: Synthetic peptide
  Seed: SIGKVCRTLLAKSVF
SIIKVKRVLLAKSVF

SEQ ID NO: 266787 - protein, 15 aa, Artificial Sequence
  Description of Artificial Sequence: Synthetic peptide
  Seed: SIGKVCRTLLAKSVF
SIIKVKRVLLDKSVF

SEQ ID NO: 266788 - protein, 15 aa, Artificial Sequence
  Description of Artificial Sequence: Synthetic peptide
  Seed: SIGKVCRTLLAKSVF
SIIKVKRVLLEKSVF

SEQ ID NO: 266789 - protein, 15 aa, Artificial Sequence
  Description of Artificial Sequence: Synthetic peptide
  Seed: SIGKVCRTLLAKSVF
SIIKVKRVLLGKSVF

SEQ ID NO: 266790 - protein, 15 aa, Artificial Sequence
  Description of Artificial Sequence: Synthetic peptide
  Seed: SIGKVCRTLLAKSVF
SIIKVKRVLLHKSVF

SEQ ID NO: 266791 - protein, 15 aa, Artificial Sequence
  Description of Artificial Sequence: Synthetic peptide
  Seed: SIGKVCRTLLAKSVF
SIIKVKRVLLKKSVF

SEQ ID NO: 266792 - protein, 15 aa, Artificial Sequence
  Description of Artificial Sequence: Synthetic peptide
  Seed: SIGKVCRTLLAKSVF
SIIKVKRVLLMKSVF

SEQ ID NO: 266793 - protein, 15 aa, Artificial Sequence
  Description of Artificial Sequence: Synthetic peptide
  Seed: SIGKVCRTLLAKSVF
SIIKVKRVLLNKSVF

SEQ ID NO: 266794 - protein, 15 aa, Artificial Sequence
  Description of Artificial Sequence: Synthetic peptide
  Seed: SIGKVCRTLLAKSVF
SIIKVKRVLLQKSVF

SEQ ID NO: 266795 - protein, 15 aa, Artificial Sequence
  Description of Artificial Sequence: Synthetic peptide
  Seed: SIGKVCRTLLAKSVF
SIIKVKRVLLRKSVF

SEQ ID NO: 266796 - protein, 15 aa, Artificial Sequence
  Description of Artificial Sequence: Synthetic peptide
  Seed: SIGKVCRTLLAKSVF
SIIKVKRVLLSKSVF

SEQ ID NO: 266797 - protein, 15 aa, Artificial Sequence
  Description of Artificial Sequence: Synthetic peptide
  Seed: SIGKVCRTLLAKSVF
SIIKVKRVLLVKSVF

SEQ ID NO: 266798 - protein, 15 aa, Artificial Sequence
  Description of Artificial Sequence: Synthetic peptide
  Seed: SIGKVCRTLLAKSVF
SIIKVKRVLLYKSVF

SEQ ID NO: 266799 - protein, 15 aa, Artificial Sequence
  Description of Artificial Sequence: Synthetic peptide
  Seed: SIGKVCRTLLAKSVF
SIIKVLRALLAKSVF

SEQ ID NO: 266800 - protein, 15 aa, Artificial Sequence
  Description of Artificial Sequence: Synthetic peptide
  Seed: SIGKVCRTLLAKSVF
SIIKVLRALLDKSVF

SEQ ID NO: 266801 - protein, 15 aa, Artificial Sequence
  Description of Artificial Sequence: Synthetic peptide
  Seed: SIGKVCRTLLAKSVF
SIIKVLRALLEKSVF

SEQ ID NO: 266802 - protein, 15 aa, Artificial Sequence
  Description of Artificial Sequence: Synthetic peptide
  Seed: SIGKVCRTLLAKSVF
SIIKVLRALLGKSVF

SEQ ID NO: 266803 - protein, 15 aa, Artificial Sequence
  Description of Artificial Sequence: Synthetic peptide
  Seed: SIGKVCRTLLAKSVF
SIIKVLRALLHKSVF

SEQ ID NO: 266804 - protein, 15 aa, Artificial Sequence
  Description of Artificial Sequence: Synthetic peptide
  Seed: SIGKVCRTLLAKSVF
SIIKVLRALLKKSVF

SEQ ID NO: 266805 - protein, 15 aa, Artificial Sequence
  Description of Artificial Sequence: Synthetic peptide
  Seed: SIGKVCRTLLAKSVF
SIIKVLRALLNKSVF

SEQ ID NO: 266806 - protein, 15 aa, Artificial Sequence
  Description of Artificial Sequence: Synthetic peptide
  Seed: SIGKVCRTLLAKSVF
SIIKVLRALLPKSVF

SEQ ID NO: 266807 - protein, 15 aa, Artificial Sequence
  Description of Artificial Sequence: Synthetic peptide
  Seed: SIGKVCRTLLAKSVF
SIIKVLRALLQKSVF

SEQ ID NO: 266808 - protein, 15 aa, Artificial Sequence
  Description of Artificial Sequence: Synthetic peptide
  Seed: SIGKVCRTLLAKSVF
SIIKVLRALLRKSVF

SEQ ID NO: 266809 - protein, 15 aa, Artificial Sequence
  Description of Artificial Sequence: Synthetic peptide
  Seed: SIGKVCRTLLAKSVF
SIIKVLRALLSKSVF

SEQ ID NO: 266810 - protein, 15 aa, Artificial Sequence
  Description of Artificial Sequence: Synthetic peptide
  Seed: SIGKVCRTLLAKSVF
SIIKVLRALLTKSVF

SEQ ID NO: 266811 - protein, 15 aa, Artificial Sequence
  Description of Artificial Sequence: Synthetic peptide
  Seed: SIGKVCRTLLAKSVF
SIIKVLRALLVKSVF

SEQ ID NO: 266812 - protein, 15 aa, Artificial Sequence
  Description of Artificial Sequence: Synthetic peptide
  Seed: SIGKVCRTLLAKSVF
SIIKVLRALLYKSVF

SEQ ID NO: 266813 - protein, 15 aa, Artificial Sequence
  Description of Artificial Sequence: Synthetic peptide
  Seed: SIGKVCRTLLAKSVF
SIIKVLRDLLAKSVF

SEQ ID NO: 266814 - protein, 15 aa, Artificial Sequence
  Description of Artificial Sequence: Synthetic peptide
  Seed: SIGKVCRTLLAKSVF
SIIKVLRDLLGKSVF

SEQ ID NO: 266815 - protein, 15 aa, Artificial Sequence
  Description of Artificial Sequence: Synthetic peptide
  Seed: SIGKVCRTLLAKSVF
SIIKVLRDLLRKSVF

SEQ ID NO: 266816 - protein, 15 aa, Artificial Sequence
  Description of Artificial Sequence: Synthetic peptide
  Seed: SIGKVCRTLLAKSVF
SIIKVLRDLLSKSVF

SEQ ID NO: 266817 - protein, 15 aa, Artificial Sequence
  Description of Artificial Sequence: Synthetic peptide
  Seed: SIGKVCRTLLAKSVF
SIIKVLRELLAKSVF

SEQ ID NO: 266818 - protein, 15 aa, Artificial Sequence
  Description of Artificial Sequence: Synthetic peptide
  Seed: SIGKVCRTLLAKSVF
SIIKVLRELLHKSVF

SEQ ID NO: 266819 - protein, 15 aa, Artificial Sequence
  Description of Artificial Sequence: Synthetic peptide
  Seed: SIGKVCRTLLAKSVF
SIIKVLRELLKKSVF

SEQ ID NO: 266820 - protein, 15 aa, Artificial Sequence
  Description of Artificial Sequence: Synthetic peptide
  Seed: SIGKVCRTLLAKSVF
SIIKVLRELLRKSVF

SEQ ID NO: 266821 - protein, 15 aa, Artificial Sequence
  Description of Artificial Sequence: Synthetic peptide
  Seed: SIGKVCRTLLAKSVF
SIIKVLRELLSKSVF

SEQ ID NO: 266822 - protein, 15 aa, Artificial Sequence
  Description of Artificial Sequence: Synthetic peptide
  Seed: SIGKVCRTLLAKSVF
SIIKVLRGLLAKSVF

SEQ ID NO: 266823 - protein, 15 aa, Artificial Sequence
  Description of Artificial Sequence: Synthetic peptide
  Seed: SIGKVCRTLLAKSVF
SIIKVLRGLLEKSVF

SEQ ID NO: 266824 - protein, 15 aa, Artificial Sequence
  Description of Artificial Sequence: Synthetic peptide
  Seed: SIGKVCRTLLAKSVF
SIIKVLRGLLGKSVF

SEQ ID NO: 266825 - protein, 15 aa, Artificial Sequence
  Description of Artificial Sequence: Synthetic peptide
  Seed: SIGKVCRTLLAKSVF
SIIKVLRGLLHKSVF

SEQ ID NO: 266826 - protein, 15 aa, Artificial Sequence
  Description of Artificial Sequence: Synthetic peptide
  Seed: SIGKVCRTLLAKSVF
SIIKVLRGLLMKSVF

SEQ ID NO: 266827 - protein, 15 aa, Artificial Sequence
  Description of Artificial Sequence: Synthetic peptide
  Seed: SIGKVCRTLLAKSVF
SIIKVLRGLLNKSVF

SEQ ID NO: 266828 - protein, 15 aa, Artificial Sequence
  Description of Artificial Sequence: Synthetic peptide
  Seed: SIGKVCRTLLAKSVF
SIIKVLRGLLPKSVF

SEQ ID NO: 266829 - protein, 15 aa, Artificial Sequence
  Description of Artificial Sequence: Synthetic peptide
  Seed: SIGKVCRTLLAKSVF
SIIKVLRGLLQKSVF

SEQ ID NO: 266830 - protein, 15 aa, Artificial Sequence
  Description of Artificial Sequence: Synthetic peptide
  Seed: SIGKVCRTLLAKSVF
SIIKVLRGLLRKSVF

SEQ ID NO: 266831 - protein, 15 aa, Artificial Sequence
  Description of Artificial Sequence: Synthetic peptide
  Seed: SIGKVCRTLLAKSVF
SIIKVLRGLLSKSVF

SEQ ID NO: 266832 - protein, 15 aa, Artificial Sequence
  Description of Artificial Sequence: Synthetic peptide
  Seed: SIGKVCRTLLAKSVF
SIIKVLRGLLTKSVF

SEQ ID NO: 266833 - protein, 15 aa, Artificial Sequence
  Description of Artificial Sequence: Synthetic peptide
  Seed: SIGKVCRTLLAKSVF
SIIKVLRGLLVKSVF

SEQ ID NO: 266834 - protein, 15 aa, Artificial Sequence
  Description of Artificial Sequence: Synthetic peptide
  Seed: SIGKVCRTLLAKSVF
SIIKVLRGLLYKSVF

SEQ ID NO: 266835 - protein, 15 aa, Artificial Sequence
  Description of Artificial Sequence: Synthetic peptide
  Seed: SIGKVCRTLLAKSVF
SIIKVLRHLLAKSVF

SEQ ID NO: 266836 - protein, 15 aa, Artificial Sequence
  Description of Artificial Sequence: Synthetic peptide
  Seed: SIGKVCRTLLAKSVF
SIIKVLRHLLDKSVF

SEQ ID NO: 266837 - protein, 15 aa, Artificial Sequence
  Description of Artificial Sequence: Synthetic peptide
  Seed: SIGKVCRTLLAKSVF
SIIKVLRHLLEKSVF

SEQ ID NO: 266838 - protein, 15 aa, Artificial Sequence
  Description of Artificial Sequence: Synthetic peptide
  Seed: SIGKVCRTLLAKSVF
SIIKVLRHLLGKSVF

SEQ ID NO: 266839 - protein, 15 aa, Artificial Sequence
  Description of Artificial Sequence: Synthetic peptide
  Seed: SIGKVCRTLLAKSVF
SIIKVLRHLLHKSVF

SEQ ID NO: 266840 - protein, 15 aa, Artificial Sequence
  Description of Artificial Sequence: Synthetic peptide
  Seed: SIGKVCRTLLAKSVF
SIIKVLRHLLIKSVF

SEQ ID NO: 266841 - protein, 15 aa, Artificial Sequence
  Description of Artificial Sequence: Synthetic peptide
  Seed: SIGKVCRTLLAKSVF
SIIKVLRHLLKKSVF

SEQ ID NO: 266842 - protein, 15 aa, Artificial Sequence
  Description of Artificial Sequence: Synthetic peptide
  Seed: SIGKVCRTLLAKSVF
SIIKVLRHLLLKSVF

SEQ ID NO: 266843 - protein, 15 aa, Artificial Sequence
  Description of Artificial Sequence: Synthetic peptide
  Seed: SIGKVCRTLLAKSVF
SIIKVLRHLLMKSVF

SEQ ID NO: 266844 - protein, 15 aa, Artificial Sequence
  Description of Artificial Sequence: Synthetic peptide
  Seed: SIGKVCRTLLAKSVF
SIIKVLRHLLNKSVF

SEQ ID NO: 266845 - protein, 15 aa, Artificial Sequence
  Description of Artificial Sequence: Synthetic peptide
  Seed: SIGKVCRTLLAKSVF
SIIKVLRHLLPKSVF

SEQ ID NO: 266846 - protein, 15 aa, Artificial Sequence
  Description of Artificial Sequence: Synthetic peptide
  Seed: SIGKVCRTLLAKSVF
SIIKVLRHLLQKSVF

SEQ ID NO: 266847 - protein, 15 aa, Artificial Sequence
  Description of Artificial Sequence: Synthetic peptide
  Seed: SIGKVCRTLLAKSVF
SIIKVLRHLLRKSVF

SEQ ID NO: 266848 - protein, 15 aa, Artificial Sequence
  Description of Artificial Sequence: Synthetic peptide
  Seed: SIGKVCRTLLAKSVF
SIIKVLRHLLSKSVF

SEQ ID NO: 266849 - protein, 15 aa, Artificial Sequence
  Description of Artificial Sequence: Synthetic peptide
  Seed: SIGKVCRTLLAKSVF
SIIKVLRHLLTKSVF

SEQ ID NO: 266850 - protein, 15 aa, Artificial Sequence
  Description of Artificial Sequence: Synthetic peptide
  Seed: SIGKVCRTLLAKSVF
SIIKVLRHLLVKSVF

SEQ ID NO: 266851 - protein, 15 aa, Artificial Sequence
  Description of Artificial Sequence: Synthetic peptide
  Seed: SIGKVCRTLLAKSVF
SIIKVLRHLLYKSVF

SEQ ID NO: 266852 - protein, 15 aa, Artificial Sequence
  Description of Artificial Sequence: Synthetic peptide
  Seed: SIGKVCRTLLAKSVF
SIIKVLRILLHKSVF

SEQ ID NO: 266853 - protein, 15 aa, Artificial Sequence
  Description of Artificial Sequence: Synthetic peptide
  Seed: SIGKVCRTLLAKSVF
SIIKVLRILLNKSVF

SEQ ID NO: 266854 - protein, 15 aa, Artificial Sequence
  Description of Artificial Sequence: Synthetic peptide
  Seed: SIGKVCRTLLAKSVF
SIIKVLRILLPKSVF

SEQ ID NO: 266855 - protein, 15 aa, Artificial Sequence
  Description of Artificial Sequence: Synthetic peptide
  Seed: SIGKVCRTLLAKSVF
SIIKVLRILLSKSVF

SEQ ID NO: 266856 - protein, 15 aa, Artificial Sequence
  Description of Artificial Sequence: Synthetic peptide
  Seed: SIGKVCRTLLAKSVF
SIIKVLRKLLAKSVF

SEQ ID NO: 266857 - protein, 15 aa, Artificial Sequence
  Description of Artificial Sequence: Synthetic peptide
  Seed: SIGKVCRTLLAKSVF
SIIKVLRKLLCKSVF

SEQ ID NO: 266858 - protein, 15 aa, Artificial Sequence
  Description of Artificial Sequence: Synthetic peptide
  Seed: SIGKVCRTLLAKSVF
SIIKVLRKLLDKSVF

SEQ ID NO: 266859 - protein, 15 aa, Artificial Sequence
  Description of Artificial Sequence: Synthetic peptide
  Seed: SIGKVCRTLLAKSVF
SIIKVLRKLLEKSVF

SEQ ID NO: 266860 - protein, 15 aa, Artificial Sequence
  Description of Artificial Sequence: Synthetic peptide
  Seed: SIGKVCRTLLAKSVF
SIIKVLRKLLFKSVF

SEQ ID NO: 266861 - protein, 15 aa, Artificial Sequence
  Description of Artificial Sequence: Synthetic peptide
  Seed: SIGKVCRTLLAKSVF
SIIKVLRKLLGKSVF

SEQ ID NO: 266862 - protein, 15 aa, Artificial Sequence
  Description of Artificial Sequence: Synthetic peptide
  Seed: SIGKVCRTLLAKSVF
SIIKVLRKLLHKSVF

SEQ ID NO: 266863 - protein, 15 aa, Artificial Sequence
  Description of Artificial Sequence: Synthetic peptide
  Seed: SIGKVCRTLLAKSVF
SIIKVLRKLLIKSVF

SEQ ID NO: 266864 - protein, 15 aa, Artificial Sequence
  Description of Artificial Sequence: Synthetic peptide
  Seed: SIGKVCRTLLAKSVF
SIIKVLRKLLKKSVF

SEQ ID NO: 266865 - protein, 15 aa, Artificial Sequence
  Description of Artificial Sequence: Synthetic peptide
  Seed: SIGKVCRTLLAKSVF
SIIKVLRKLLLKSVF

SEQ ID NO: 266866 - protein, 15 aa, Artificial Sequence
  Description of Artificial Sequence: Synthetic peptide
  Seed: SIGKVCRTLLAKSVF
SIIKVLRKLLMKSVF

SEQ ID NO: 266867 - protein, 15 aa, Artificial Sequence
  Description of Artificial Sequence: Synthetic peptide
  Seed: SIGKVCRTLLAKSVF
SIIKVLRKLLNKSVF

SEQ ID NO: 266868 - protein, 15 aa, Artificial Sequence
  Description of Artificial Sequence: Synthetic peptide
  Seed: SIGKVCRTLLAKSVF
SIIKVLRKLLPKSVF

SEQ ID NO: 266869 - protein, 15 aa, Artificial Sequence
  Description of Artificial Sequence: Synthetic peptide
  Seed: SIGKVCRTLLAKSVF
SIIKVLRKLLQKSVF

SEQ ID NO: 266870 - protein, 15 aa, Artificial Sequence
  Description of Artificial Sequence: Synthetic peptide
  Seed: SIGKVCRTLLAKSVF
SIIKVLRKLLRKSVF

SEQ ID NO: 266871 - protein, 15 aa, Artificial Sequence
  Description of Artificial Sequence: Synthetic peptide
  Seed: SIGKVCRTLLAKSVF
SIIKVLRKLLSKSVF

SEQ ID NO: 266872 - protein, 15 aa, Artificial Sequence
  Description of Artificial Sequence: Synthetic peptide
  Seed: SIGKVCRTLLAKSVF
SIIKVLRKLLTKSVF

SEQ ID NO: 266873 - protein, 15 aa, Artificial Sequence
  Description of Artificial Sequence: Synthetic peptide
  Seed: SIGKVCRTLLAKSVF
SIIKVLRKLLVKSVF

SEQ ID NO: 266874 - protein, 15 aa, Artificial Sequence
  Description of Artificial Sequence: Synthetic peptide
  Seed: SIGKVCRTLLAKSVF
SIIKVLRKLLWKSVF

SEQ ID NO: 266875 - protein, 15 aa, Artificial Sequence
  Description of Artificial Sequence: Synthetic peptide
  Seed: SIGKVCRTLLAKSVF
SIIKVLRKLLYKSVF

SEQ ID NO: 266876 - protein, 15 aa, Artificial Sequence
  Description of Artificial Sequence: Synthetic peptide
  Seed: SIGKVCRTLLAKSVF
SIIKVLRLLLHKSVF

SEQ ID NO: 266877 - protein, 15 aa, Artificial Sequence
  Description of Artificial Sequence: Synthetic peptide
  Seed: SIGKVCRTLLAKSVF
SIIKVLRMLLSKSVF

SEQ ID NO: 266878 - protein, 15 aa, Artificial Sequence
  Description of Artificial Sequence: Synthetic peptide
  Seed: SIGKVCRTLLAKSVF
SIIKVLRNLLAKSVF

SEQ ID NO: 266879 - protein, 15 aa, Artificial Sequence
  Description of Artificial Sequence: Synthetic peptide
  Seed: SIGKVCRTLLAKSVF
SIIKVLRNLLDKSVF

SEQ ID NO: 266880 - protein, 15 aa, Artificial Sequence
  Description of Artificial Sequence: Synthetic peptide
  Seed: SIGKVCRTLLAKSVF
SIIKVLRNLLEKSVF

SEQ ID NO: 266881 - protein, 15 aa, Artificial Sequence
  Description of Artificial Sequence: Synthetic peptide
  Seed: SIGKVCRTLLAKSVF
SIIKVLRNLLGKSVF

SEQ ID NO: 266882 - protein, 15 aa, Artificial Sequence
  Description of Artificial Sequence: Synthetic peptide
  Seed: SIGKVCRTLLAKSVF
SIIKVLRNLLHKSVF

SEQ ID NO: 266883 - protein, 15 aa, Artificial Sequence
  Description of Artificial Sequence: Synthetic peptide
  Seed: SIGKVCRTLLAKSVF
SIIKVLRNLLIKSVF

SEQ ID NO: 266884 - protein, 15 aa, Artificial Sequence
  Description of Artificial Sequence: Synthetic peptide
  Seed: SIGKVCRTLLAKSVF
SIIKVLRNLLKKSVF

SEQ ID NO: 266885 - protein, 15 aa, Artificial Sequence
  Description of Artificial Sequence: Synthetic peptide
  Seed: SIGKVCRTLLAKSVF
SIIKVLRNLLMKSVF

SEQ ID NO: 266886 - protein, 15 aa, Artificial Sequence
  Description of Artificial Sequence: Synthetic peptide
  Seed: SIGKVCRTLLAKSVF
SIIKVLRNLLNKSVF

SEQ ID NO: 266887 - protein, 15 aa, Artificial Sequence
  Description of Artificial Sequence: Synthetic peptide
  Seed: SIGKVCRTLLAKSVF
SIIKVLRNLLPKSVF

SEQ ID NO: 266888 - protein, 15 aa, Artificial Sequence
  Description of Artificial Sequence: Synthetic peptide
  Seed: SIGKVCRTLLAKSVF
SIIKVLRNLLQKSVF

SEQ ID NO: 266889 - protein, 15 aa, Artificial Sequence
  Description of Artificial Sequence: Synthetic peptide
  Seed: SIGKVCRTLLAKSVF
SIIKVLRNLLRKSVF

SEQ ID NO: 266890 - protein, 15 aa, Artificial Sequence
  Description of Artificial Sequence: Synthetic peptide
  Seed: SIGKVCRTLLAKSVF
SIIKVLRNLLSKSVF

SEQ ID NO: 266891 - protein, 15 aa, Artificial Sequence
  Description of Artificial Sequence: Synthetic peptide
  Seed: SIGKVCRTLLAKSVF
SIIKVLRNLLTKSVF

SEQ ID NO: 266892 - protein, 15 aa, Artificial Sequence
  Description of Artificial Sequence: Synthetic peptide
  Seed: SIGKVCRTLLAKSVF
SIIKVLRNLLVKSVF

SEQ ID NO: 266893 - protein, 15 aa, Artificial Sequence
  Description of Artificial Sequence: Synthetic peptide
  Seed: SIGKVCRTLLAKSVF
SIIKVLRNLLYKSVF

SEQ ID NO: 266894 - protein, 15 aa, Artificial Sequence
  Description of Artificial Sequence: Synthetic peptide
  Seed: SIGKVCRTLLAKSVF
SIIKVLRPLLAKSVF

SEQ ID NO: 266895 - protein, 15 aa, Artificial Sequence
  Description of Artificial Sequence: Synthetic peptide
  Seed: SIGKVCRTLLAKSVF
SIIKVLRPLLCKSVF

SEQ ID NO: 266896 - protein, 15 aa, Artificial Sequence
  Description of Artificial Sequence: Synthetic peptide
  Seed: SIGKVCRTLLAKSVF
SIIKVLRPLLDKSVF

SEQ ID NO: 266897 - protein, 15 aa, Artificial Sequence
  Description of Artificial Sequence: Synthetic peptide
  Seed: SIGKVCRTLLAKSVF
SIIKVLRPLLEKSVF

SEQ ID NO: 266898 - protein, 15 aa, Artificial Sequence
  Description of Artificial Sequence: Synthetic peptide
  Seed: SIGKVCRTLLAKSVF
SIIKVLRPLLFKSVF

SEQ ID NO: 266899 - protein, 15 aa, Artificial Sequence
  Description of Artificial Sequence: Synthetic peptide
  Seed: SIGKVCRTLLAKSVF
SIIKVLRPLLGKSVF

SEQ ID NO: 266900 - protein, 15 aa, Artificial Sequence
  Description of Artificial Sequence: Synthetic peptide
  Seed: SIGKVCRTLLAKSVF
SIIKVLRPLLHKSVF

SEQ ID NO: 266901 - protein, 15 aa, Artificial Sequence
  Description of Artificial Sequence: Synthetic peptide
  Seed: SIGKVCRTLLAKSVF
SIIKVLRPLLIKSVF

SEQ ID NO: 266902 - protein, 15 aa, Artificial Sequence
  Description of Artificial Sequence: Synthetic peptide
  Seed: SIGKVCRTLLAKSVF
SIIKVLRPLLKKSVF

SEQ ID NO: 266903 - protein, 15 aa, Artificial Sequence
  Description of Artificial Sequence: Synthetic peptide
  Seed: SIGKVCRTLLAKSVF
SIIKVLRPLLLKSVF

SEQ ID NO: 266904 - protein, 15 aa, Artificial Sequence
  Description of Artificial Sequence: Synthetic peptide
  Seed: SIGKVCRTLLAKSVF
SIIKVLRPLLMKSVF

SEQ ID NO: 266905 - protein, 15 aa, Artificial Sequence
  Description of Artificial Sequence: Synthetic peptide
  Seed: SIGKVCRTLLAKSVF
SIIKVLRPLLNKSVF

SEQ ID NO: 266906 - protein, 15 aa, Artificial Sequence
  Description of Artificial Sequence: Synthetic peptide
  Seed: SIGKVCRTLLAKSVF
SIIKVLRPLLPKSVF

SEQ ID NO: 266907 - protein, 15 aa, Artificial Sequence
  Description of Artificial Sequence: Synthetic peptide
  Seed: SIGKVCRTLLAKSVF
SIIKVLRPLLQKSVF

SEQ ID NO: 266908 - protein, 15 aa, Artificial Sequence
  Description of Artificial Sequence: Synthetic peptide
  Seed: SIGKVCRTLLAKSVF
SIIKVLRPLLRKSVF

SEQ ID NO: 266909 - protein, 15 aa, Artificial Sequence
  Description of Artificial Sequence: Synthetic peptide
  Seed: SIGKVCRTLLAKSVF
SIIKVLRPLLSKSVF

SEQ ID NO: 266910 - protein, 15 aa, Artificial Sequence
  Description of Artificial Sequence: Synthetic peptide
  Seed: SIGKVCRTLLAKSVF
SIIKVLRPLLTKSVF

SEQ ID NO: 266911 - protein, 15 aa, Artificial Sequence
  Description of Artificial Sequence: Synthetic peptide
  Seed: SIGKVCRTLLAKSVF
SIIKVLRPLLVKSVF

SEQ ID NO: 266912 - protein, 15 aa, Artificial Sequence
  Description of Artificial Sequence: Synthetic peptide
  Seed: SIGKVCRTLLAKSVF
SIIKVLRPLLYKSVF

SEQ ID NO: 266913 - protein, 15 aa, Artificial Sequence
  Description of Artificial Sequence: Synthetic peptide
  Seed: SIGKVCRTLLAKSVF
SIIKVLRQLLAKSVF

SEQ ID NO: 266914 - protein, 15 aa, Artificial Sequence
  Description of Artificial Sequence: Synthetic peptide
  Seed: SIGKVCRTLLAKSVF
SIIKVLRQLLGKSVF

SEQ ID NO: 266915 - protein, 15 aa, Artificial Sequence
  Description of Artificial Sequence: Synthetic peptide
  Seed: SIGKVCRTLLAKSVF
SIIKVLRQLLHKSVF

SEQ ID NO: 266916 - protein, 15 aa, Artificial Sequence
  Description of Artificial Sequence: Synthetic peptide
  Seed: SIGKVCRTLLAKSVF
SIIKVLRQLLKKSVF

SEQ ID NO: 266917 - protein, 15 aa, Artificial Sequence
  Description of Artificial Sequence: Synthetic peptide
  Seed: SIGKVCRTLLAKSVF
SIIKVLRQLLNKSVF

SEQ ID NO: 266918 - protein, 15 aa, Artificial Sequence
  Description of Artificial Sequence: Synthetic peptide
  Seed: SIGKVCRTLLAKSVF
SIIKVLRQLLPKSVF

SEQ ID NO: 266919 - protein, 15 aa, Artificial Sequence
  Description of Artificial Sequence: Synthetic peptide
  Seed: SIGKVCRTLLAKSVF
SIIKVLRQLLQKSVF

SEQ ID NO: 266920 - protein, 15 aa, Artificial Sequence
  Description of Artificial Sequence: Synthetic peptide
  Seed: SIGKVCRTLLAKSVF
SIIKVLRQLLRKSVF

SEQ ID NO: 266921 - protein, 15 aa, Artificial Sequence
  Description of Artificial Sequence: Synthetic peptide
  Seed: SIGKVCRTLLAKSVF
SIIKVLRQLLSKSVF

SEQ ID NO: 266922 - protein, 15 aa, Artificial Sequence
  Description of Artificial Sequence: Synthetic peptide
  Seed: SIGKVCRTLLAKSVF
SIIKVLRQLLTKSVF

SEQ ID NO: 266923 - protein, 15 aa, Artificial Sequence
  Description of Artificial Sequence: Synthetic peptide
  Seed: SIGKVCRTLLAKSVF
SIIKVLRRLLAKSVF

SEQ ID NO: 266924 - protein, 15 aa, Artificial Sequence
  Description of Artificial Sequence: Synthetic peptide
  Seed: SIGKVCRTLLAKSVF
SIIKVLRRLLCKSVF

SEQ ID NO: 266925 - protein, 15 aa, Artificial Sequence
  Description of Artificial Sequence: Synthetic peptide
  Seed: SIGKVCRTLLAKSVF
SIIKVLRRLLDKSVF

SEQ ID NO: 266926 - protein, 15 aa, Artificial Sequence
  Description of Artificial Sequence: Synthetic peptide
  Seed: SIGKVCRTLLAKSVF
SIIKVLRRLLEKSVF

SEQ ID NO: 266927 - protein, 15 aa, Artificial Sequence
  Description of Artificial Sequence: Synthetic peptide
  Seed: SIGKVCRTLLAKSVF
SIIKVLRRLLFKSVF

SEQ ID NO: 266928 - protein, 15 aa, Artificial Sequence
  Description of Artificial Sequence: Synthetic peptide
  Seed: SIGKVCRTLLAKSVF
SIIKVLRRLLGKSVF

SEQ ID NO: 266929 - protein, 15 aa, Artificial Sequence
  Description of Artificial Sequence: Synthetic peptide
  Seed: SIGKVCRTLLAKSVF
SIIKVLRRLLHKSVF

SEQ ID NO: 266930 - protein, 15 aa, Artificial Sequence
  Description of Artificial Sequence: Synthetic peptide
  Seed: SIGKVCRTLLAKSVF
SIIKVLRRLLIKSVF

SEQ ID NO: 266931 - protein, 15 aa, Artificial Sequence
  Description of Artificial Sequence: Synthetic peptide
  Seed: SIGKVCRTLLAKSVF
SIIKVLRRLLKKSVF

SEQ ID NO: 266932 - protein, 15 aa, Artificial Sequence
  Description of Artificial Sequence: Synthetic peptide
  Seed: SIGKVCRTLLAKSVF
SIIKVLRRLLLKSVF

SEQ ID NO: 266933 - protein, 15 aa, Artificial Sequence
  Description of Artificial Sequence: Synthetic peptide
  Seed: SIGKVCRTLLAKSVF
SIIKVLRRLLMKSVF

SEQ ID NO: 266934 - protein, 15 aa, Artificial Sequence
  Description of Artificial Sequence: Synthetic peptide
  Seed: SIGKVCRTLLAKSVF
SIIKVLRRLLNKSVF

SEQ ID NO: 266935 - protein, 15 aa, Artificial Sequence
  Description of Artificial Sequence: Synthetic peptide
  Seed: SIGKVCRTLLAKSVF
SIIKVLRRLLPKSVF

SEQ ID NO: 266936 - protein, 15 aa, Artificial Sequence
  Description of Artificial Sequence: Synthetic peptide
  Seed: SIGKVCRTLLAKSVF
SIIKVLRRLLQKSVF

SEQ ID NO: 266937 - protein, 15 aa, Artificial Sequence
  Description of Artificial Sequence: Synthetic peptide
  Seed: SIGKVCRTLLAKSVF
SIIKVLRRLLRKSVF

SEQ ID NO: 266938 - protein, 15 aa, Artificial Sequence
  Description of Artificial Sequence: Synthetic peptide
  Seed: SIGKVCRTLLAKSVF
SIIKVLRRLLSKSVF

SEQ ID NO: 266939 - protein, 15 aa, Artificial Sequence
  Description of Artificial Sequence: Synthetic peptide
  Seed: SIGKVCRTLLAKSVF
SIIKVLRRLLTKSVF

SEQ ID NO: 266940 - protein, 15 aa, Artificial Sequence
  Description of Artificial Sequence: Synthetic peptide
  Seed: SIGKVCRTLLAKSVF
SIIKVLRRLLVKSVF

SEQ ID NO: 266941 - protein, 15 aa, Artificial Sequence
  Description of Artificial Sequence: Synthetic peptide
  Seed: SIGKVCRTLLAKSVF
SIIKVLRRLLWKSVF

SEQ ID NO: 266942 - protein, 15 aa, Artificial Sequence
  Description of Artificial Sequence: Synthetic peptide
  Seed: SIGKVCRTLLAKSVF
SIIKVLRRLLYKSVF

SEQ ID NO: 266943 - protein, 15 aa, Artificial Sequence
  Description of Artificial Sequence: Synthetic peptide
  Seed: SIGKVCRTLLAKSVF
SIIKVLRSLLAKSVF

SEQ ID NO: 266944 - protein, 15 aa, Artificial Sequence
  Description of Artificial Sequence: Synthetic peptide
  Seed: SIGKVCRTLLAKSVF
SIIKVLRSLLDKSVF

SEQ ID NO: 266945 - protein, 15 aa, Artificial Sequence
  Description of Artificial Sequence: Synthetic peptide
  Seed: SIGKVCRTLLAKSVF
SIIKVLRSLLEKSVF

SEQ ID NO: 266946 - protein, 15 aa, Artificial Sequence
  Description of Artificial Sequence: Synthetic peptide
  Seed: SIGKVCRTLLAKSVF
SIIKVLRSLLGKSVF

SEQ ID NO: 266947 - protein, 15 aa, Artificial Sequence
  Description of Artificial Sequence: Synthetic peptide
  Seed: SIGKVCRTLLAKSVF
SIIKVLRSLLHKSVF

SEQ ID NO: 266948 - protein, 15 aa, Artificial Sequence
  Description of Artificial Sequence: Synthetic peptide
  Seed: SIGKVCRTLLAKSVF
SIIKVLRSLLKKSVF

SEQ ID NO: 266949 - protein, 15 aa, Artificial Sequence
  Description of Artificial Sequence: Synthetic peptide
  Seed: SIGKVCRTLLAKSVF
SIIKVLRSLLMKSVF

SEQ ID NO: 266950 - protein, 15 aa, Artificial Sequence
  Description of Artificial Sequence: Synthetic peptide
  Seed: SIGKVCRTLLAKSVF
SIIKVLRSLLNKSVF

SEQ ID NO: 266951 - protein, 15 aa, Artificial Sequence
  Description of Artificial Sequence: Synthetic peptide
  Seed: SIGKVCRTLLAKSVF
SIIKVLRSLLPKSVF

SEQ ID NO: 266952 - protein, 15 aa, Artificial Sequence
  Description of Artificial Sequence: Synthetic peptide
  Seed: SIGKVCRTLLAKSVF
SIIKVLRSLLQKSVF

SEQ ID NO: 266953 - protein, 15 aa, Artificial Sequence
  Description of Artificial Sequence: Synthetic peptide
  Seed: SIGKVCRTLLAKSVF
SIIKVLRSLLRKSVF

SEQ ID NO: 266954 - protein, 15 aa, Artificial Sequence
  Description of Artificial Sequence: Synthetic peptide
  Seed: SIGKVCRTLLAKSVF
SIIKVLRSLLSKSVF

SEQ ID NO: 266955 - protein, 15 aa, Artificial Sequence
  Description of Artificial Sequence: Synthetic peptide
  Seed: SIGKVCRTLLAKSVF
SIIKVLRSLLTKSVF

SEQ ID NO: 266956 - protein, 15 aa, Artificial Sequence
  Description of Artificial Sequence: Synthetic peptide
  Seed: SIGKVCRTLLAKSVF
SIIKVLRSLLVKSVF

SEQ ID NO: 266957 - protein, 15 aa, Artificial Sequence
  Description of Artificial Sequence: Synthetic peptide
  Seed: SIGKVCRTLLAKSVF
SIIKVLRSLLYKSVF

SEQ ID NO: 266958 - protein, 15 aa, Artificial Sequence
  Description of Artificial Sequence: Synthetic peptide
  Seed: SIGKVCRTLLAKSVF
SIIKVLRTLLAKSVF

SEQ ID NO: 266959 - protein, 15 aa, Artificial Sequence
  Description of Artificial Sequence: Synthetic peptide
  Seed: SIGKVCRTLLAKSVF
SIIKVLRTLLDKSVF

SEQ ID NO: 266960 - protein, 15 aa, Artificial Sequence
  Description of Artificial Sequence: Synthetic peptide
  Seed: SIGKVCRTLLAKSVF
SIIKVLRTLLEKSVF

SEQ ID NO: 266961 - protein, 15 aa, Artificial Sequence
  Description of Artificial Sequence: Synthetic peptide
  Seed: SIGKVCRTLLAKSVF
SIIKVLRTLLGKSVF

SEQ ID NO: 266962 - protein, 15 aa, Artificial Sequence
  Description of Artificial Sequence: Synthetic peptide
  Seed: SIGKVCRTLLAKSVF
SIIKVLRTLLHKSVF

SEQ ID NO: 266963 - protein, 15 aa, Artificial Sequence
  Description of Artificial Sequence: Synthetic peptide
  Seed: SIGKVCRTLLAKSVF
SIIKVLRTLLKKSVF

SEQ ID NO: 266964 - protein, 15 aa, Artificial Sequence
  Description of Artificial Sequence: Synthetic peptide
  Seed: SIGKVCRTLLAKSVF
SIIKVLRTLLMKSVF

SEQ ID NO: 266965 - protein, 15 aa, Artificial Sequence
  Description of Artificial Sequence: Synthetic peptide
  Seed: SIGKVCRTLLAKSVF
SIIKVLRTLLNKSVF

SEQ ID NO: 266966 - protein, 15 aa, Artificial Sequence
  Description of Artificial Sequence: Synthetic peptide
  Seed: SIGKVCRTLLAKSVF
SIIKVLRTLLPKSVF

SEQ ID NO: 266967 - protein, 15 aa, Artificial Sequence
  Description of Artificial Sequence: Synthetic peptide
  Seed: SIGKVCRTLLAKSVF
SIIKVLRTLLQKSVF

SEQ ID NO: 266968 - protein, 15 aa, Artificial Sequence
  Description of Artificial Sequence: Synthetic peptide
  Seed: SIGKVCRTLLAKSVF
SIIKVLRTLLRKSVF

SEQ ID NO: 266969 - protein, 15 aa, Artificial Sequence
  Description of Artificial Sequence: Synthetic peptide
  Seed: SIGKVCRTLLAKSVF
SIIKVLRTLLSKSVF

SEQ ID NO: 266970 - protein, 15 aa, Artificial Sequence
  Description of Artificial Sequence: Synthetic peptide
  Seed: SIGKVCRTLLAKSVF
SIIKVLRTLLTKSVF

SEQ ID NO: 266971 - protein, 15 aa, Artificial Sequence
  Description of Artificial Sequence: Synthetic peptide
  Seed: SIGKVCRTLLAKSVF
SIIKVLRTLLVKSVF

SEQ ID NO: 266972 - protein, 15 aa, Artificial Sequence
  Description of Artificial Sequence: Synthetic peptide
  Seed: SIGKVCRTLLAKSVF
SIIKVLRTLLYKSVF

SEQ ID NO: 266973 - protein, 15 aa, Artificial Sequence
  Description of Artificial Sequence: Synthetic peptide
  Seed: SIGKVCRTLLAKSVF
SIIKVLRVLLHKSVF

SEQ ID NO: 266974 - protein, 15 aa, Artificial Sequence
  Description of Artificial Sequence: Synthetic peptide
  Seed: SIGKVCRTLLAKSVF
SIIKVLRVLLNKSVF

SEQ ID NO: 266975 - protein, 15 aa, Artificial Sequence
  Description of Artificial Sequence: Synthetic peptide
  Seed: SIGKVCRTLLAKSVF
SIIKVLRVLLPKSVF

SEQ ID NO: 266976 - protein, 15 aa, Artificial Sequence
  Description of Artificial Sequence: Synthetic peptide
  Seed: SIGKVCRTLLAKSVF
SIIKVLRVLLSKSVF

SEQ ID NO: 266977 - protein, 15 aa, Artificial Sequence
  Description of Artificial Sequence: Synthetic peptide
  Seed: SIGKVCRTLLAKSVF
SIIKVMRALLAKSVF

SEQ ID NO: 266978 - protein, 15 aa, Artificial Sequence
  Description of Artificial Sequence: Synthetic peptide
  Seed: SIGKVCRTLLAKSVF
SIIKVMRALLDKSVF

SEQ ID NO: 266979 - protein, 15 aa, Artificial Sequence
  Description of Artificial Sequence: Synthetic peptide
  Seed: SIGKVCRTLLAKSVF
SIIKVMRALLEKSVF

SEQ ID NO: 266980 - protein, 15 aa, Artificial Sequence
  Description of Artificial Sequence: Synthetic peptide
  Seed: SIGKVCRTLLAKSVF
SIIKVMRALLGKSVF

SEQ ID NO: 266981 - protein, 15 aa, Artificial Sequence
  Description of Artificial Sequence: Synthetic peptide
  Seed: SIGKVCRTLLAKSVF
SIIKVMRALLHKSVF

SEQ ID NO: 266982 - protein, 15 aa, Artificial Sequence
  Description of Artificial Sequence: Synthetic peptide
  Seed: SIGKVCRTLLAKSVF
SIIKVMRALLKKSVF

SEQ ID NO: 266983 - protein, 15 aa, Artificial Sequence
  Description of Artificial Sequence: Synthetic peptide
  Seed: SIGKVCRTLLAKSVF
SIIKVMRALLMKSVF

SEQ ID NO: 266984 - protein, 15 aa, Artificial Sequence
  Description of Artificial Sequence: Synthetic peptide
  Seed: SIGKVCRTLLAKSVF
SIIKVMRALLNKSVF

SEQ ID NO: 266985 - protein, 15 aa, Artificial Sequence
  Description of Artificial Sequence: Synthetic peptide
  Seed: SIGKVCRTLLAKSVF
SIIKVMRALLPKSVF

SEQ ID NO: 266986 - protein, 15 aa, Artificial Sequence
  Description of Artificial Sequence: Synthetic peptide
  Seed: SIGKVCRTLLAKSVF
SIIKVMRALLQKSVF

SEQ ID NO: 266987 - protein, 15 aa, Artificial Sequence
  Description of Artificial Sequence: Synthetic peptide
  Seed: SIGKVCRTLLAKSVF
SIIKVMRALLRKSVF

SEQ ID NO: 266988 - protein, 15 aa, Artificial Sequence
  Description of Artificial Sequence: Synthetic peptide
  Seed: SIGKVCRTLLAKSVF
SIIKVMRALLSKSVF

SEQ ID NO: 266989 - protein, 15 aa, Artificial Sequence
  Description of Artificial Sequence: Synthetic peptide
  Seed: SIGKVCRTLLAKSVF
SIIKVMRALLTKSVF

SEQ ID NO: 266990 - protein, 15 aa, Artificial Sequence
  Description of Artificial Sequence: Synthetic peptide
  Seed: SIGKVCRTLLAKSVF
SIIKVMRALLVKSVF

SEQ ID NO: 266991 - protein, 15 aa, Artificial Sequence
  Description of Artificial Sequence: Synthetic peptide
  Seed: SIGKVCRTLLAKSVF
SIIKVMRALLYKSVF

SEQ ID NO: 266992 - protein, 15 aa, Artificial Sequence
  Description of Artificial Sequence: Synthetic peptide
  Seed: SIGKVCRTLLAKSVF
SIIKVMRDLLAKSVF

SEQ ID NO: 266993 - protein, 15 aa, Artificial Sequence
  Description of Artificial Sequence: Synthetic peptide
  Seed: SIGKVCRTLLAKSVF
SIIKVMRDLLGKSVF

SEQ ID NO: 266994 - protein, 15 aa, Artificial Sequence
  Description of Artificial Sequence: Synthetic peptide
  Seed: SIGKVCRTLLAKSVF
SIIKVMRDLLHKSVF

SEQ ID NO: 266995 - protein, 15 aa, Artificial Sequence
  Description of Artificial Sequence: Synthetic peptide
  Seed: SIGKVCRTLLAKSVF
SIIKVMRDLLKKSVF

SEQ ID NO: 266996 - protein, 15 aa, Artificial Sequence
  Description of Artificial Sequence: Synthetic peptide
  Seed: SIGKVCRTLLAKSVF
SIIKVMRDLLQKSVF

SEQ ID NO: 266997 - protein, 15 aa, Artificial Sequence
  Description of Artificial Sequence: Synthetic peptide
  Seed: SIGKVCRTLLAKSVF
SIIKVMRDLLRKSVF

SEQ ID NO: 266998 - protein, 15 aa, Artificial Sequence
  Description of Artificial Sequence: Synthetic peptide
  Seed: SIGKVCRTLLAKSVF
SIIKVMRDLLSKSVF

SEQ ID NO: 266999 - protein, 15 aa, Artificial Sequence
  Description of Artificial Sequence: Synthetic peptide
  Seed: SIGKVCRTLLAKSVF
SIIKVMRDLLTKSVF

SEQ ID NO: 267000 - protein, 15 aa, Artificial Sequence
  Description of Artificial Sequence: Synthetic peptide
  Seed: SIGKVCRTLLAKSVF
SIIKVMRELLAKSVF

SEQ ID NO: 267001 - protein, 15 aa, Artificial Sequence
  Description of Artificial Sequence: Synthetic peptide
  Seed: SIGKVCRTLLAKSVF
SIIKVMRELLGKSVF

SEQ ID NO: 267002 - protein, 15 aa, Artificial Sequence
  Description of Artificial Sequence: Synthetic peptide
  Seed: SIGKVCRTLLAKSVF
SIIKVMRELLHKSVF

SEQ ID NO: 267003 - protein, 15 aa, Artificial Sequence
  Description of Artificial Sequence: Synthetic peptide
  Seed: SIGKVCRTLLAKSVF
SIIKVMRELLKKSVF

SEQ ID NO: 267004 - protein, 15 aa, Artificial Sequence
  Description of Artificial Sequence: Synthetic peptide
  Seed: SIGKVCRTLLAKSVF
SIIKVMRELLQKSVF

SEQ ID NO: 267005 - protein, 15 aa, Artificial Sequence
  Description of Artificial Sequence: Synthetic peptide
  Seed: SIGKVCRTLLAKSVF
SIIKVMRELLRKSVF

SEQ ID NO: 267006 - protein, 15 aa, Artificial Sequence
  Description of Artificial Sequence: Synthetic peptide
  Seed: SIGKVCRTLLAKSVF
SIIKVMRELLSKSVF

SEQ ID NO: 267007 - protein, 15 aa, Artificial Sequence
  Description of Artificial Sequence: Synthetic peptide
  Seed: SIGKVCRTLLAKSVF
SIIKVMRGLLAKSVF

SEQ ID NO: 267008 - protein, 15 aa, Artificial Sequence
  Description of Artificial Sequence: Synthetic peptide
  Seed: SIGKVCRTLLAKSVF
SIIKVMRGLLDKSVF

SEQ ID NO: 267009 - protein, 15 aa, Artificial Sequence
  Description of Artificial Sequence: Synthetic peptide
  Seed: SIGKVCRTLLAKSVF
SIIKVMRGLLEKSVF

SEQ ID NO: 267010 - protein, 15 aa, Artificial Sequence
  Description of Artificial Sequence: Synthetic peptide
  Seed: SIGKVCRTLLAKSVF
SIIKVMRGLLGKSVF

SEQ ID NO: 267011 - protein, 15 aa, Artificial Sequence
  Description of Artificial Sequence: Synthetic peptide
  Seed: SIGKVCRTLLAKSVF
SIIKVMRGLLHKSVF

SEQ ID NO: 267012 - protein, 15 aa, Artificial Sequence
  Description of Artificial Sequence: Synthetic peptide
  Seed: SIGKVCRTLLAKSVF
SIIKVMRGLLIKSVF

SEQ ID NO: 267013 - protein, 15 aa, Artificial Sequence
  Description of Artificial Sequence: Synthetic peptide
  Seed: SIGKVCRTLLAKSVF
SIIKVMRGLLKKSVF

SEQ ID NO: 267014 - protein, 15 aa, Artificial Sequence
  Description of Artificial Sequence: Synthetic peptide
  Seed: SIGKVCRTLLAKSVF
SIIKVMRGLLLKSVF

SEQ ID NO: 267015 - protein, 15 aa, Artificial Sequence
  Description of Artificial Sequence: Synthetic peptide
  Seed: SIGKVCRTLLAKSVF
SIIKVMRGLLMKSVF

SEQ ID NO: 267016 - protein, 15 aa, Artificial Sequence
  Description of Artificial Sequence: Synthetic peptide
  Seed: SIGKVCRTLLAKSVF
SIIKVMRGLLNKSVF

SEQ ID NO: 267017 - protein, 15 aa, Artificial Sequence
  Description of Artificial Sequence: Synthetic peptide
  Seed: SIGKVCRTLLAKSVF
SIIKVMRGLLPKSVF

SEQ ID NO: 267018 - protein, 15 aa, Artificial Sequence
  Description of Artificial Sequence: Synthetic peptide
  Seed: SIGKVCRTLLAKSVF
SIIKVMRGLLQKSVF

SEQ ID NO: 267019 - protein, 15 aa, Artificial Sequence
  Description of Artificial Sequence: Synthetic peptide
  Seed: SIGKVCRTLLAKSVF
SIIKVMRGLLRKSVF

SEQ ID NO: 267020 - protein, 15 aa, Artificial Sequence
  Description of Artificial Sequence: Synthetic peptide
  Seed: SIGKVCRTLLAKSVF
SIIKVMRGLLSKSVF

SEQ ID NO: 267021 - protein, 15 aa, Artificial Sequence
  Description of Artificial Sequence: Synthetic peptide
  Seed: SIGKVCRTLLAKSVF
SIIKVMRGLLTKSVF

SEQ ID NO: 267022 - protein, 15 aa, Artificial Sequence
  Description of Artificial Sequence: Synthetic peptide
  Seed: SIGKVCRTLLAKSVF
SIIKVMRGLLVKSVF

SEQ ID NO: 267023 - protein, 15 aa, Artificial Sequence
  Description of Artificial Sequence: Synthetic peptide
  Seed: SIGKVCRTLLAKSVF
SIIKVMRGLLYKSVF

SEQ ID NO: 267024 - protein, 15 aa, Artificial Sequence
  Description of Artificial Sequence: Synthetic peptide
  Seed: SIGKVCRTLLAKSVF
SIIKVMRHLLAKSVF

SEQ ID NO: 267025 - protein, 15 aa, Artificial Sequence
  Description of Artificial Sequence: Synthetic peptide
  Seed: SIGKVCRTLLAKSVF
SIIKVMRHLLCKSVF

SEQ ID NO: 267026 - protein, 15 aa, Artificial Sequence
  Description of Artificial Sequence: Synthetic peptide
  Seed: SIGKVCRTLLAKSVF
SIIKVMRHLLDKSVF

SEQ ID NO: 267027 - protein, 15 aa, Artificial Sequence
  Description of Artificial Sequence: Synthetic peptide
  Seed: SIGKVCRTLLAKSVF
SIIKVMRHLLEKSVF

SEQ ID NO: 267028 - protein, 15 aa, Artificial Sequence
  Description of Artificial Sequence: Synthetic peptide
  Seed: SIGKVCRTLLAKSVF
SIIKVMRHLLFKSVF

SEQ ID NO: 267029 - protein, 15 aa, Artificial Sequence
  Description of Artificial Sequence: Synthetic peptide
  Seed: SIGKVCRTLLAKSVF
SIIKVMRHLLGKSVF

SEQ ID NO: 267030 - protein, 15 aa, Artificial Sequence
  Description of Artificial Sequence: Synthetic peptide
  Seed: SIGKVCRTLLAKSVF
SIIKVMRHLLHKSVF

SEQ ID NO: 267031 - protein, 15 aa, Artificial Sequence
  Description of Artificial Sequence: Synthetic peptide
  Seed: SIGKVCRTLLAKSVF
SIIKVMRHLLIKSVF

SEQ ID NO: 267032 - protein, 15 aa, Artificial Sequence
  Description of Artificial Sequence: Synthetic peptide
  Seed: SIGKVCRTLLAKSVF
SIIKVMRHLLKKSVF

SEQ ID NO: 267033 - protein, 15 aa, Artificial Sequence
  Description of Artificial Sequence: Synthetic peptide
  Seed: SIGKVCRTLLAKSVF
SIIKVMRHLLLKSVF

SEQ ID NO: 267034 - protein, 15 aa, Artificial Sequence
  Description of Artificial Sequence: Synthetic peptide
  Seed: SIGKVCRTLLAKSVF
SIIKVMRHLLMKSVF

SEQ ID NO: 267035 - protein, 15 aa, Artificial Sequence
  Description of Artificial Sequence: Synthetic peptide
  Seed: SIGKVCRTLLAKSVF
SIIKVMRHLLNKSVF

SEQ ID NO: 267036 - protein, 15 aa, Artificial Sequence
  Description of Artificial Sequence: Synthetic peptide
  Seed: SIGKVCRTLLAKSVF
SIIKVMRHLLPKSVF

SEQ ID NO: 267037 - protein, 15 aa, Artificial Sequence
  Description of Artificial Sequence: Synthetic peptide
  Seed: SIGKVCRTLLAKSVF
SIIKVMRHLLQKSVF

SEQ ID NO: 267038 - protein, 15 aa, Artificial Sequence
  Description of Artificial Sequence: Synthetic peptide
  Seed: SIGKVCRTLLAKSVF
SIIKVMRHLLRKSVF

SEQ ID NO: 267039 - protein, 15 aa, Artificial Sequence
  Description of Artificial Sequence: Synthetic peptide
  Seed: SIGKVCRTLLAKSVF
SIIKVMRHLLSKSVF

SEQ ID NO: 267040 - protein, 15 aa, Artificial Sequence
  Description of Artificial Sequence: Synthetic peptide
  Seed: SIGKVCRTLLAKSVF
SIIKVMRHLLTKSVF

SEQ ID NO: 267041 - protein, 15 aa, Artificial Sequence
  Description of Artificial Sequence: Synthetic peptide
  Seed: SIGKVCRTLLAKSVF
SIIKVMRHLLVKSVF

SEQ ID NO: 267042 - protein, 15 aa, Artificial Sequence
  Description of Artificial Sequence: Synthetic peptide
  Seed: SIGKVCRTLLAKSVF
SIIKVMRHLLWKSVF

SEQ ID NO: 267043 - protein, 15 aa, Artificial Sequence
  Description of Artificial Sequence: Synthetic peptide
  Seed: SIGKVCRTLLAKSVF
SIIKVMRHLLYKSVF

SEQ ID NO: 267044 - protein, 15 aa, Artificial Sequence
  Description of Artificial Sequence: Synthetic peptide
  Seed: SIGKVCRTLLAKSVF
SIIKVMRILLAKSVF

SEQ ID NO: 267045 - protein, 15 aa, Artificial Sequence
  Description of Artificial Sequence: Synthetic peptide
  Seed: SIGKVCRTLLAKSVF
SIIKVMRILLGKSVF

SEQ ID NO: 267046 - protein, 15 aa, Artificial Sequence
  Description of Artificial Sequence: Synthetic peptide
  Seed: SIGKVCRTLLAKSVF
SIIKVMRILLHKSVF

SEQ ID NO: 267047 - protein, 15 aa, Artificial Sequence
  Description of Artificial Sequence: Synthetic peptide
  Seed: SIGKVCRTLLAKSVF
SIIKVMRILLNKSVF

SEQ ID NO: 267048 - protein, 15 aa, Artificial Sequence
  Description of Artificial Sequence: Synthetic peptide
  Seed: SIGKVCRTLLAKSVF
SIIKVMRILLPKSVF

SEQ ID NO: 267049 - protein, 15 aa, Artificial Sequence
  Description of Artificial Sequence: Synthetic peptide
  Seed: SIGKVCRTLLAKSVF
SIIKVMRILLQKSVF

SEQ ID NO: 267050 - protein, 15 aa, Artificial Sequence
  Description of Artificial Sequence: Synthetic peptide
  Seed: SIGKVCRTLLAKSVF
SIIKVMRILLRKSVF

SEQ ID NO: 267051 - protein, 15 aa, Artificial Sequence
  Description of Artificial Sequence: Synthetic peptide
  Seed: SIGKVCRTLLAKSVF
SIIKVMRILLSKSVF

SEQ ID NO: 267052 - protein, 15 aa, Artificial Sequence
  Description of Artificial Sequence: Synthetic peptide
  Seed: SIGKVCRTLLAKSVF
SIIKVMRILLTKSVF

SEQ ID NO: 267053 - protein, 15 aa, Artificial Sequence
  Description of Artificial Sequence: Synthetic peptide
  Seed: SIGKVCRTLLAKSVF
SIIKVMRKLLAKSVF

SEQ ID NO: 267054 - protein, 15 aa, Artificial Sequence
  Description of Artificial Sequence: Synthetic peptide
  Seed: SIGKVCRTLLAKSVF
SIIKVMRKLLCKSVF

SEQ ID NO: 267055 - protein, 15 aa, Artificial Sequence
  Description of Artificial Sequence: Synthetic peptide
  Seed: SIGKVCRTLLAKSVF
SIIKVMRKLLDKSVF

SEQ ID NO: 267056 - protein, 15 aa, Artificial Sequence
  Description of Artificial Sequence: Synthetic peptide
  Seed: SIGKVCRTLLAKSVF
SIIKVMRKLLEKSVF

SEQ ID NO: 267057 - protein, 15 aa, Artificial Sequence
  Description of Artificial Sequence: Synthetic peptide
  Seed: SIGKVCRTLLAKSVF
SIIKVMRKLLFKSVF

SEQ ID NO: 267058 - protein, 15 aa, Artificial Sequence
  Description of Artificial Sequence: Synthetic peptide
  Seed: SIGKVCRTLLAKSVF
SIIKVMRKLLGKSVF

SEQ ID NO: 267059 - protein, 15 aa, Artificial Sequence
  Description of Artificial Sequence: Synthetic peptide
  Seed: SIGKVCRTLLAKSVF
SIIKVMRKLLHKSVF

SEQ ID NO: 267060 - protein, 15 aa, Artificial Sequence
  Description of Artificial Sequence: Synthetic peptide
  Seed: SIGKVCRTLLAKSVF
SIIKVMRKLLIKSVF

SEQ ID NO: 267061 - protein, 15 aa, Artificial Sequence
  Description of Artificial Sequence: Synthetic peptide
  Seed: SIGKVCRTLLAKSVF
SIIKVMRKLLKKSVF

SEQ ID NO: 267062 - protein, 15 aa, Artificial Sequence
  Description of Artificial Sequence: Synthetic peptide
  Seed: SIGKVCRTLLAKSVF
SIIKVMRKLLLKSVF

SEQ ID NO: 267063 - protein, 15 aa, Artificial Sequence
  Description of Artificial Sequence: Synthetic peptide
  Seed: SIGKVCRTLLAKSVF
SIIKVMRKLLMKSVF

SEQ ID NO: 267064 - protein, 15 aa, Artificial Sequence
  Description of Artificial Sequence: Synthetic peptide
  Seed: SIGKVCRTLLAKSVF
SIIKVMRKLLNKSVF

SEQ ID NO: 267065 - protein, 15 aa, Artificial Sequence
  Description of Artificial Sequence: Synthetic peptide
  Seed: SIGKVCRTLLAKSVF
SIIKVMRKLLPKSVF

SEQ ID NO: 267066 - protein, 15 aa, Artificial Sequence
  Description of Artificial Sequence: Synthetic peptide
  Seed: SIGKVCRTLLAKSVF
SIIKVMRKLLQKSVF

SEQ ID NO: 267067 - protein, 15 aa, Artificial Sequence
  Description of Artificial Sequence: Synthetic peptide
  Seed: SIGKVCRTLLAKSVF
SIIKVMRKLLRKSVF

SEQ ID NO: 267068 - protein, 15 aa, Artificial Sequence
  Description of Artificial Sequence: Synthetic peptide
  Seed: SIGKVCRTLLAKSVF
SIIKVMRKLLSKSVF

SEQ ID NO: 267069 - protein, 15 aa, Artificial Sequence
  Description of Artificial Sequence: Synthetic peptide
  Seed: SIGKVCRTLLAKSVF
SIIKVMRKLLTKSVF

SEQ ID NO: 267070 - protein, 15 aa, Artificial Sequence
  Description of Artificial Sequence: Synthetic peptide
  Seed: SIGKVCRTLLAKSVF
SIIKVMRKLLVKSVF

SEQ ID NO: 267071 - protein, 15 aa, Artificial Sequence
  Description of Artificial Sequence: Synthetic peptide
  Seed: SIGKVCRTLLAKSVF
SIIKVMRKLLWKSVF

SEQ ID NO: 267072 - protein, 15 aa, Artificial Sequence
  Description of Artificial Sequence: Synthetic peptide
  Seed: SIGKVCRTLLAKSVF
SIIKVMRKLLYKSVF

SEQ ID NO: 267073 - protein, 15 aa, Artificial Sequence
  Description of Artificial Sequence: Synthetic peptide
  Seed: SIGKVCRTLLAKSVF
SIIKVMRLLLHKSVF

SEQ ID NO: 267074 - protein, 15 aa, Artificial Sequence
  Description of Artificial Sequence: Synthetic peptide
  Seed: SIGKVCRTLLAKSVF
SIIKVMRLLLNKSVF

SEQ ID NO: 267075 - protein, 15 aa, Artificial Sequence
  Description of Artificial Sequence: Synthetic peptide
  Seed: SIGKVCRTLLAKSVF
SIIKVMRLLLPKSVF

SEQ ID NO: 267076 - protein, 15 aa, Artificial Sequence
  Description of Artificial Sequence: Synthetic peptide
  Seed: SIGKVCRTLLAKSVF
SIIKVMRMLLHKSVF

SEQ ID NO: 267077 - protein, 15 aa, Artificial Sequence
  Description of Artificial Sequence: Synthetic peptide
  Seed: SIGKVCRTLLAKSVF
SIIKVMRMLLNKSVF

SEQ ID NO: 267078 - protein, 15 aa, Artificial Sequence
  Description of Artificial Sequence: Synthetic peptide
  Seed: SIGKVCRTLLAKSVF
SIIKVMRMLLPKSVF

SEQ ID NO: 267079 - protein, 15 aa, Artificial Sequence
  Description of Artificial Sequence: Synthetic peptide
  Seed: SIGKVCRTLLAKSVF
SIIKVMRMLLQKSVF

SEQ ID NO: 267080 - protein, 15 aa, Artificial Sequence
  Description of Artificial Sequence: Synthetic peptide
  Seed: SIGKVCRTLLAKSVF
SIIKVMRMLLSKSVF

SEQ ID NO: 267081 - protein, 15 aa, Artificial Sequence
  Description of Artificial Sequence: Synthetic peptide
  Seed: SIGKVCRTLLAKSVF
SIIKVMRNLLAKSVF

SEQ ID NO: 267082 - protein, 15 aa, Artificial Sequence
  Description of Artificial Sequence: Synthetic peptide
  Seed: SIGKVCRTLLAKSVF
SIIKVMRNLLCKSVF

SEQ ID NO: 267083 - protein, 15 aa, Artificial Sequence
  Description of Artificial Sequence: Synthetic peptide
  Seed: SIGKVCRTLLAKSVF
SIIKVMRNLLDKSVF

SEQ ID NO: 267084 - protein, 15 aa, Artificial Sequence
  Description of Artificial Sequence: Synthetic peptide
  Seed: SIGKVCRTLLAKSVF
SIIKVMRNLLEKSVF

SEQ ID NO: 267085 - protein, 15 aa, Artificial Sequence
  Description of Artificial Sequence: Synthetic peptide
  Seed: SIGKVCRTLLAKSVF
SIIKVMRNLLGKSVF

SEQ ID NO: 267086 - protein, 15 aa, Artificial Sequence
  Description of Artificial Sequence: Synthetic peptide
  Seed: SIGKVCRTLLAKSVF
SIIKVMRNLLHKSVF

SEQ ID NO: 267087 - protein, 15 aa, Artificial Sequence
  Description of Artificial Sequence: Synthetic peptide
  Seed: SIGKVCRTLLAKSVF
SIIKVMRNLLIKSVF

SEQ ID NO: 267088 - protein, 15 aa, Artificial Sequence
  Description of Artificial Sequence: Synthetic peptide
  Seed: SIGKVCRTLLAKSVF
SIIKVMRNLLKKSVF

SEQ ID NO: 267089 - protein, 15 aa, Artificial Sequence
  Description of Artificial Sequence: Synthetic peptide
  Seed: SIGKVCRTLLAKSVF
SIIKVMRNLLLKSVF

SEQ ID NO: 267090 - protein, 15 aa, Artificial Sequence
  Description of Artificial Sequence: Synthetic peptide
  Seed: SIGKVCRTLLAKSVF
SIIKVMRNLLMKSVF

SEQ ID NO: 267091 - protein, 15 aa, Artificial Sequence
  Description of Artificial Sequence: Synthetic peptide
  Seed: SIGKVCRTLLAKSVF
SIIKVMRNLLNKSVF

SEQ ID NO: 267092 - protein, 15 aa, Artificial Sequence
  Description of Artificial Sequence: Synthetic peptide
  Seed: SIGKVCRTLLAKSVF
SIIKVMRNLLPKSVF

SEQ ID NO: 267093 - protein, 15 aa, Artificial Sequence
  Description of Artificial Sequence: Synthetic peptide
  Seed: SIGKVCRTLLAKSVF
SIIKVMRNLLQKSVF

SEQ ID NO: 267094 - protein, 15 aa, Artificial Sequence
  Description of Artificial Sequence: Synthetic peptide
  Seed: SIGKVCRTLLAKSVF
SIIKVMRNLLRKSVF

SEQ ID NO: 267095 - protein, 15 aa, Artificial Sequence
  Description of Artificial Sequence: Synthetic peptide
  Seed: SIGKVCRTLLAKSVF
SIIKVMRNLLSKSVF

SEQ ID NO: 267096 - protein, 15 aa, Artificial Sequence
  Description of Artificial Sequence: Synthetic peptide
  Seed: SIGKVCRTLLAKSVF
SIIKVMRNLLTKSVF

SEQ ID NO: 267097 - protein, 15 aa, Artificial Sequence
  Description of Artificial Sequence: Synthetic peptide
  Seed: SIGKVCRTLLAKSVF
SIIKVMRNLLVKSVF

SEQ ID NO: 267098 - protein, 15 aa, Artificial Sequence
  Description of Artificial Sequence: Synthetic peptide
  Seed: SIGKVCRTLLAKSVF
SIIKVMRNLLYKSVF

SEQ ID NO: 267099 - protein, 15 aa, Artificial Sequence
  Description of Artificial Sequence: Synthetic peptide
  Seed: SIGKVCRTLLAKSVF
SIIKVMRPLLAKSVF

SEQ ID NO: 267100 - protein, 15 aa, Artificial Sequence
  Description of Artificial Sequence: Synthetic peptide
  Seed: SIGKVCRTLLAKSVF
SIIKVMRPLLCKSVF

SEQ ID NO: 267101 - protein, 15 aa, Artificial Sequence
  Description of Artificial Sequence: Synthetic peptide
  Seed: SIGKVCRTLLAKSVF
SIIKVMRPLLDKSVF

SEQ ID NO: 267102 - protein, 15 aa, Artificial Sequence
  Description of Artificial Sequence: Synthetic peptide
  Seed: SIGKVCRTLLAKSVF
SIIKVMRPLLEKSVF

SEQ ID NO: 267103 - protein, 15 aa, Artificial Sequence
  Description of Artificial Sequence: Synthetic peptide
  Seed: SIGKVCRTLLAKSVF
SIIKVMRPLLFKSVF

SEQ ID NO: 267104 - protein, 15 aa, Artificial Sequence
  Description of Artificial Sequence: Synthetic peptide
  Seed: SIGKVCRTLLAKSVF
SIIKVMRPLLGKSVF

SEQ ID NO: 267105 - protein, 15 aa, Artificial Sequence
  Description of Artificial Sequence: Synthetic peptide
  Seed: SIGKVCRTLLAKSVF
SIIKVMRPLLHKSVF

SEQ ID NO: 267106 - protein, 15 aa, Artificial Sequence
  Description of Artificial Sequence: Synthetic peptide
  Seed: SIGKVCRTLLAKSVF
SIIKVMRPLLIKSVF

SEQ ID NO: 267107 - protein, 15 aa, Artificial Sequence
  Description of Artificial Sequence: Synthetic peptide
  Seed: SIGKVCRTLLAKSVF
SIIKVMRPLLKKSVF

SEQ ID NO: 267108 - protein, 15 aa, Artificial Sequence
  Description of Artificial Sequence: Synthetic peptide
  Seed: SIGKVCRTLLAKSVF
SIIKVMRPLLLKSVF

SEQ ID NO: 267109 - protein, 15 aa, Artificial Sequence
  Description of Artificial Sequence: Synthetic peptide
  Seed: SIGKVCRTLLAKSVF
SIIKVMRPLLMKSVF

SEQ ID NO: 267110 - protein, 15 aa, Artificial Sequence
  Description of Artificial Sequence: Synthetic peptide
  Seed: SIGKVCRTLLAKSVF
SIIKVMRPLLNKSVF

SEQ ID NO: 267111 - protein, 15 aa, Artificial Sequence
  Description of Artificial Sequence: Synthetic peptide
  Seed: SIGKVCRTLLAKSVF
SIIKVMRPLLPKSVF

SEQ ID NO: 267112 - protein, 15 aa, Artificial Sequence
  Description of Artificial Sequence: Synthetic peptide
  Seed: SIGKVCRTLLAKSVF
SIIKVMRPLLQKSVF

SEQ ID NO: 267113 - protein, 15 aa, Artificial Sequence
  Description of Artificial Sequence: Synthetic peptide
  Seed: SIGKVCRTLLAKSVF
SIIKVMRPLLRKSVF

SEQ ID NO: 267114 - protein, 15 aa, Artificial Sequence
  Description of Artificial Sequence: Synthetic peptide
  Seed: SIGKVCRTLLAKSVF
SIIKVMRPLLSKSVF

SEQ ID NO: 267115 - protein, 15 aa, Artificial Sequence
  Description of Artificial Sequence: Synthetic peptide
  Seed: SIGKVCRTLLAKSVF
SIIKVMRPLLTKSVF

SEQ ID NO: 267116 - protein, 15 aa, Artificial Sequence
  Description of Artificial Sequence: Synthetic peptide
  Seed: SIGKVCRTLLAKSVF
SIIKVMRPLLVKSVF

SEQ ID NO: 267117 - protein, 15 aa, Artificial Sequence
  Description of Artificial Sequence: Synthetic peptide
  Seed: SIGKVCRTLLAKSVF
SIIKVMRPLLWKSVF

SEQ ID NO: 267118 - protein, 15 aa, Artificial Sequence
  Description of Artificial Sequence: Synthetic peptide
  Seed: SIGKVCRTLLAKSVF
SIIKVMRPLLYKSVF

SEQ ID NO: 267119 - protein, 15 aa, Artificial Sequence
  Description of Artificial Sequence: Synthetic peptide
  Seed: SIGKVCRTLLAKSVF
SIIKVMRQLLAKSVF

SEQ ID NO: 267120 - protein, 15 aa, Artificial Sequence
  Description of Artificial Sequence: Synthetic peptide
  Seed: SIGKVCRTLLAKSVF
SIIKVMRQLLGKSVF

SEQ ID NO: 267121 - protein, 15 aa, Artificial Sequence
  Description of Artificial Sequence: Synthetic peptide
  Seed: SIGKVCRTLLAKSVF
SIIKVMRQLLHKSVF

SEQ ID NO: 267122 - protein, 15 aa, Artificial Sequence
  Description of Artificial Sequence: Synthetic peptide
  Seed: SIGKVCRTLLAKSVF
SIIKVMRQLLKKSVF

SEQ ID NO: 267123 - protein, 15 aa, Artificial Sequence
  Description of Artificial Sequence: Synthetic peptide
  Seed: SIGKVCRTLLAKSVF
SIIKVMRQLLMKSVF

SEQ ID NO: 267124 - protein, 15 aa, Artificial Sequence
  Description of Artificial Sequence: Synthetic peptide
  Seed: SIGKVCRTLLAKSVF
SIIKVMRQLLNKSVF

SEQ ID NO: 267125 - protein, 15 aa, Artificial Sequence
  Description of Artificial Sequence: Synthetic peptide
  Seed: SIGKVCRTLLAKSVF
SIIKVMRQLLPKSVF

SEQ ID NO: 267126 - protein, 15 aa, Artificial Sequence
  Description of Artificial Sequence: Synthetic peptide
  Seed: SIGKVCRTLLAKSVF
SIIKVMRQLLQKSVF

SEQ ID NO: 267127 - protein, 15 aa, Artificial Sequence
  Description of Artificial Sequence: Synthetic peptide
  Seed: SIGKVCRTLLAKSVF
SIIKVMRQLLRKSVF

SEQ ID NO: 267128 - protein, 15 aa, Artificial Sequence
  Description of Artificial Sequence: Synthetic peptide
  Seed: SIGKVCRTLLAKSVF
SIIKVMRQLLSKSVF

SEQ ID NO: 267129 - protein, 15 aa, Artificial Sequence
  Description of Artificial Sequence: Synthetic peptide
  Seed: SIGKVCRTLLAKSVF
SIIKVMRQLLTKSVF

SEQ ID NO: 267130 - protein, 15 aa, Artificial Sequence
  Description of Artificial Sequence: Synthetic peptide
  Seed: SIGKVCRTLLAKSVF
SIIKVMRQLLVKSVF

SEQ ID NO: 267131 - protein, 15 aa, Artificial Sequence
  Description of Artificial Sequence: Synthetic peptide
  Seed: SIGKVCRTLLAKSVF
SIIKVMRQLLYKSVF

SEQ ID NO: 267132 - protein, 15 aa, Artificial Sequence
  Description of Artificial Sequence: Synthetic peptide
  Seed: SIGKVCRTLLAKSVF
SIIKVMRRLLAKSVF

SEQ ID NO: 267133 - protein, 15 aa, Artificial Sequence
  Description of Artificial Sequence: Synthetic peptide
  Seed: SIGKVCRTLLAKSVF
SIIKVMRRLLCKSVF

SEQ ID NO: 267134 - protein, 15 aa, Artificial Sequence
  Description of Artificial Sequence: Synthetic peptide
  Seed: SIGKVCRTLLAKSVF
SIIKVMRRLLDKSVF

SEQ ID NO: 267135 - protein, 15 aa, Artificial Sequence
  Description of Artificial Sequence: Synthetic peptide
  Seed: SIGKVCRTLLAKSVF
SIIKVMRRLLEKSVF

SEQ ID NO: 267136 - protein, 15 aa, Artificial Sequence
  Description of Artificial Sequence: Synthetic peptide
  Seed: SIGKVCRTLLAKSVF
SIIKVMRRLLFKSVF

SEQ ID NO: 267137 - protein, 15 aa, Artificial Sequence
  Description of Artificial Sequence: Synthetic peptide
  Seed: SIGKVCRTLLAKSVF
SIIKVMRRLLGKSVF

SEQ ID NO: 267138 - protein, 15 aa, Artificial Sequence
  Description of Artificial Sequence: Synthetic peptide
  Seed: SIGKVCRTLLAKSVF
SIIKVMRRLLHKSVF

SEQ ID NO: 267139 - protein, 15 aa, Artificial Sequence
  Description of Artificial Sequence: Synthetic peptide
  Seed: SIGKVCRTLLAKSVF
SIIKVMRRLLIKSVF

SEQ ID NO: 267140 - protein, 15 aa, Artificial Sequence
  Description of Artificial Sequence: Synthetic peptide
  Seed: SIGKVCRTLLAKSVF
SIIKVMRRLLKKSVF

SEQ ID NO: 267141 - protein, 15 aa, Artificial Sequence
  Description of Artificial Sequence: Synthetic peptide
  Seed: SIGKVCRTLLAKSVF
SIIKVMRRLLLKSVF

SEQ ID NO: 267142 - protein, 15 aa, Artificial Sequence
  Description of Artificial Sequence: Synthetic peptide
  Seed: SIGKVCRTLLAKSVF
SIIKVMRRLLMKSVF

SEQ ID NO: 267143 - protein, 15 aa, Artificial Sequence
  Description of Artificial Sequence: Synthetic peptide
  Seed: SIGKVCRTLLAKSVF
SIIKVMRRLLNKSVF

SEQ ID NO: 267144 - protein, 15 aa, Artificial Sequence
  Description of Artificial Sequence: Synthetic peptide
  Seed: SIGKVCRTLLAKSVF
SIIKVMRRLLPKSVF

SEQ ID NO: 267145 - protein, 15 aa, Artificial Sequence
  Description of Artificial Sequence: Synthetic peptide
  Seed: SIGKVCRTLLAKSVF
SIIKVMRRLLQKSVF

SEQ ID NO: 267146 - protein, 15 aa, Artificial Sequence
  Description of Artificial Sequence: Synthetic peptide
  Seed: SIGKVCRTLLAKSVF
SIIKVMRRLLRKSVF

SEQ ID NO: 267147 - protein, 15 aa, Artificial Sequence
  Description of Artificial Sequence: Synthetic peptide
  Seed: SIGKVCRTLLAKSVF
SIIKVMRRLLSKSVF

SEQ ID NO: 267148 - protein, 15 aa, Artificial Sequence
  Description of Artificial Sequence: Synthetic peptide
  Seed: SIGKVCRTLLAKSVF
SIIKVMRRLLTKSVF

SEQ ID NO: 267149 - protein, 15 aa, Artificial Sequence
  Description of Artificial Sequence: Synthetic peptide
  Seed: SIGKVCRTLLAKSVF
SIIKVMRRLLVKSVF

SEQ ID NO: 267150 - protein, 15 aa, Artificial Sequence
  Description of Artificial Sequence: Synthetic peptide
  Seed: SIGKVCRTLLAKSVF
SIIKVMRRLLWKSVF

SEQ ID NO: 267151 - protein, 15 aa, Artificial Sequence
  Description of Artificial Sequence: Synthetic peptide
  Seed: SIGKVCRTLLAKSVF
SIIKVMRRLLYKSVF

SEQ ID NO: 267152 - protein, 15 aa, Artificial Sequence
  Description of Artificial Sequence: Synthetic peptide
  Seed: SIGKVCRTLLAKSVF
SIIKVMRSLLAKSVF

SEQ ID NO: 267153 - protein, 15 aa, Artificial Sequence
  Description of Artificial Sequence: Synthetic peptide
  Seed: SIGKVCRTLLAKSVF
SIIKVMRSLLDKSVF

SEQ ID NO: 267154 - protein, 15 aa, Artificial Sequence
  Description of Artificial Sequence: Synthetic peptide
  Seed: SIGKVCRTLLAKSVF
SIIKVMRSLLEKSVF

SEQ ID NO: 267155 - protein, 15 aa, Artificial Sequence
  Description of Artificial Sequence: Synthetic peptide
  Seed: SIGKVCRTLLAKSVF
SIIKVMRSLLGKSVF

SEQ ID NO: 267156 - protein, 15 aa, Artificial Sequence
  Description of Artificial Sequence: Synthetic peptide
  Seed: SIGKVCRTLLAKSVF
SIIKVMRSLLHKSVF

SEQ ID NO: 267157 - protein, 15 aa, Artificial Sequence
  Description of Artificial Sequence: Synthetic peptide
  Seed: SIGKVCRTLLAKSVF
SIIKVMRSLLIKSVF

SEQ ID NO: 267158 - protein, 15 aa, Artificial Sequence
  Description of Artificial Sequence: Synthetic peptide
  Seed: SIGKVCRTLLAKSVF
SIIKVMRSLLKKSVF

SEQ ID NO: 267159 - protein, 15 aa, Artificial Sequence
  Description of Artificial Sequence: Synthetic peptide
  Seed: SIGKVCRTLLAKSVF
SIIKVMRSLLLKSVF

SEQ ID NO: 267160 - protein, 15 aa, Artificial Sequence
  Description of Artificial Sequence: Synthetic peptide
  Seed: SIGKVCRTLLAKSVF
SIIKVMRSLLMKSVF

SEQ ID NO: 267161 - protein, 15 aa, Artificial Sequence
  Description of Artificial Sequence: Synthetic peptide
  Seed: SIGKVCRTLLAKSVF
SIIKVMRSLLNKSVF

SEQ ID NO: 267162 - protein, 15 aa, Artificial Sequence
  Description of Artificial Sequence: Synthetic peptide
  Seed: SIGKVCRTLLAKSVF
SIIKVMRSLLPKSVF

SEQ ID NO: 267163 - protein, 15 aa, Artificial Sequence
  Description of Artificial Sequence: Synthetic peptide
  Seed: SIGKVCRTLLAKSVF
SIIKVMRSLLQKSVF

SEQ ID NO: 267164 - protein, 15 aa, Artificial Sequence
  Description of Artificial Sequence: Synthetic peptide
  Seed: SIGKVCRTLLAKSVF
SIIKVMRSLLRKSVF

SEQ ID NO: 267165 - protein, 15 aa, Artificial Sequence
  Description of Artificial Sequence: Synthetic peptide
  Seed: SIGKVCRTLLAKSVF
SIIKVMRSLLSKSVF

SEQ ID NO: 267166 - protein, 15 aa, Artificial Sequence
  Description of Artificial Sequence: Synthetic peptide
  Seed: SIGKVCRTLLAKSVF
SIIKVMRSLLTKSVF

SEQ ID NO: 267167 - protein, 15 aa, Artificial Sequence
  Description of Artificial Sequence: Synthetic peptide
  Seed: SIGKVCRTLLAKSVF
SIIKVMRSLLVKSVF

SEQ ID NO: 267168 - protein, 15 aa, Artificial Sequence
  Description of Artificial Sequence: Synthetic peptide
  Seed: SIGKVCRTLLAKSVF
SIIKVMRSLLYKSVF

SEQ ID NO: 267169 - protein, 15 aa, Artificial Sequence
  Description of Artificial Sequence: Synthetic peptide
  Seed: SIGKVCRTLLAKSVF
SIIKVMRTLLAKSVF

SEQ ID NO: 267170 - protein, 15 aa, Artificial Sequence
  Description of Artificial Sequence: Synthetic peptide
  Seed: SIGKVCRTLLAKSVF
SIIKVMRTLLCKSVF

SEQ ID NO: 267171 - protein, 15 aa, Artificial Sequence
  Description of Artificial Sequence: Synthetic peptide
  Seed: SIGKVCRTLLAKSVF
SIIKVMRTLLDKSVF

SEQ ID NO: 267172 - protein, 15 aa, Artificial Sequence
  Description of Artificial Sequence: Synthetic peptide
  Seed: SIGKVCRTLLAKSVF
SIIKVMRTLLEKSVF

SEQ ID NO: 267173 - protein, 15 aa, Artificial Sequence
  Description of Artificial Sequence: Synthetic peptide
  Seed: SIGKVCRTLLAKSVF
SIIKVMRTLLGKSVF

SEQ ID NO: 267174 - protein, 15 aa, Artificial Sequence
  Description of Artificial Sequence: Synthetic peptide
  Seed: SIGKVCRTLLAKSVF
SIIKVMRTLLHKSVF

SEQ ID NO: 267175 - protein, 15 aa, Artificial Sequence
  Description of Artificial Sequence: Synthetic peptide
  Seed: SIGKVCRTLLAKSVF
SIIKVMRTLLIKSVF

SEQ ID NO: 267176 - protein, 15 aa, Artificial Sequence
  Description of Artificial Sequence: Synthetic peptide
  Seed: SIGKVCRTLLAKSVF
SIIKVMRTLLKKSVF

SEQ ID NO: 267177 - protein, 15 aa, Artificial Sequence
  Description of Artificial Sequence: Synthetic peptide
  Seed: SIGKVCRTLLAKSVF
SIIKVMRTLLLKSVF

SEQ ID NO: 267178 - protein, 15 aa, Artificial Sequence
  Description of Artificial Sequence: Synthetic peptide
  Seed: SIGKVCRTLLAKSVF
SIIKVMRTLLMKSVF

SEQ ID NO: 267179 - protein, 15 aa, Artificial Sequence
  Description of Artificial Sequence: Synthetic peptide
  Seed: SIGKVCRTLLAKSVF
SIIKVMRTLLNKSVF

SEQ ID NO: 267180 - protein, 15 aa, Artificial Sequence
  Description of Artificial Sequence: Synthetic peptide
  Seed: SIGKVCRTLLAKSVF
SIIKVMRTLLPKSVF

SEQ ID NO: 267181 - protein, 15 aa, Artificial Sequence
  Description of Artificial Sequence: Synthetic peptide
  Seed: SIGKVCRTLLAKSVF
SIIKVMRTLLQKSVF

SEQ ID NO: 267182 - protein, 15 aa, Artificial Sequence
  Description of Artificial Sequence: Synthetic peptide
  Seed: SIGKVCRTLLAKSVF
SIIKVMRTLLRKSVF

SEQ ID NO: 267183 - protein, 15 aa, Artificial Sequence
  Description of Artificial Sequence: Synthetic peptide
  Seed: SIGKVCRTLLAKSVF
SIIKVMRTLLSKSVF

SEQ ID NO: 267184 - protein, 15 aa, Artificial Sequence
  Description of Artificial Sequence: Synthetic peptide
  Seed: SIGKVCRTLLAKSVF
SIIKVMRTLLTKSVF

SEQ ID NO: 267185 - protein, 15 aa, Artificial Sequence
  Description of Artificial Sequence: Synthetic peptide
  Seed: SIGKVCRTLLAKSVF
SIIKVMRTLLVKSVF

SEQ ID NO: 267186 - protein, 15 aa, Artificial Sequence
  Description of Artificial Sequence: Synthetic peptide
  Seed: SIGKVCRTLLAKSVF
SIIKVMRTLLYKSVF

SEQ ID NO: 267187 - protein, 15 aa, Artificial Sequence
  Description of Artificial Sequence: Synthetic peptide
  Seed: SIGKVCRTLLAKSVF
SIIKVMRVLLAKSVF

SEQ ID NO: 267188 - protein, 15 aa, Artificial Sequence
  Description of Artificial Sequence: Synthetic peptide
  Seed: SIGKVCRTLLAKSVF
SIIKVMRVLLDKSVF

SEQ ID NO: 267189 - protein, 15 aa, Artificial Sequence
  Description of Artificial Sequence: Synthetic peptide
  Seed: SIGKVCRTLLAKSVF
SIIKVMRVLLEKSVF

SEQ ID NO: 267190 - protein, 15 aa, Artificial Sequence
  Description of Artificial Sequence: Synthetic peptide
  Seed: SIGKVCRTLLAKSVF
SIIKVMRVLLGKSVF

SEQ ID NO: 267191 - protein, 15 aa, Artificial Sequence
  Description of Artificial Sequence: Synthetic peptide
  Seed: SIGKVCRTLLAKSVF
SIIKVMRVLLHKSVF

SEQ ID NO: 267192 - protein, 15 aa, Artificial Sequence
  Description of Artificial Sequence: Synthetic peptide
  Seed: SIGKVCRTLLAKSVF
SIIKVMRVLLKKSVF

SEQ ID NO: 267193 - protein, 15 aa, Artificial Sequence
  Description of Artificial Sequence: Synthetic peptide
  Seed: SIGKVCRTLLAKSVF
SIIKVMRVLLNKSVF

SEQ ID NO: 267194 - protein, 15 aa, Artificial Sequence
  Description of Artificial Sequence: Synthetic peptide
  Seed: SIGKVCRTLLAKSVF
SIIKVMRVLLPKSVF

SEQ ID NO: 267195 - protein, 15 aa, Artificial Sequence
  Description of Artificial Sequence: Synthetic peptide
  Seed: SIGKVCRTLLAKSVF
SIIKVMRVLLQKSVF

SEQ ID NO: 267196 - protein, 15 aa, Artificial Sequence
  Description of Artificial Sequence: Synthetic peptide
  Seed: SIGKVCRTLLAKSVF
SIIKVMRVLLRKSVF

SEQ ID NO: 267197 - protein, 15 aa, Artificial Sequence
  Description of Artificial Sequence: Synthetic peptide
  Seed: SIGKVCRTLLAKSVF
SIIKVMRVLLSKSVF

SEQ ID NO: 267198 - protein, 15 aa, Artificial Sequence
  Description of Artificial Sequence: Synthetic peptide
  Seed: SIGKVCRTLLAKSVF
SIIKVMRVLLTKSVF

SEQ ID NO: 267199 - protein, 15 aa, Artificial Sequence
  Description of Artificial Sequence: Synthetic peptide
  Seed: SIGKVCRTLLAKSVF
SIIKVMRYLLAKSVF

SEQ ID NO: 267200 - protein, 15 aa, Artificial Sequence
  Description of Artificial Sequence: Synthetic peptide
  Seed: SIGKVCRTLLAKSVF
SIIKVMRYLLHKSVF

SEQ ID NO: 267201 - protein, 15 aa, Artificial Sequence
  Description of Artificial Sequence: Synthetic peptide
  Seed: SIGKVCRTLLAKSVF
SIIKVMRYLLQKSVF

SEQ ID NO: 267202 - protein, 15 aa, Artificial Sequence
  Description of Artificial Sequence: Synthetic peptide
  Seed: SIGKVCRTLLAKSVF
SIIKVMRYLLSKSVF

SEQ ID NO: 267203 - protein, 15 aa, Artificial Sequence
  Description of Artificial Sequence: Synthetic peptide
  Seed: SIGKVCRTLLAKSVF
SIIKVNRALLAKSVF

SEQ ID NO: 267204 - protein, 15 aa, Artificial Sequence
  Description of Artificial Sequence: Synthetic peptide
  Seed: SIGKVCRTLLAKSVF
SIIKVNRALLGKSVF

SEQ ID NO: 267205 - protein, 15 aa, Artificial Sequence
  Description of Artificial Sequence: Synthetic peptide
  Seed: SIGKVCRTLLAKSVF
SIIKVNRALLHKSVF

SEQ ID NO: 267206 - protein, 15 aa, Artificial Sequence
  Description of Artificial Sequence: Synthetic peptide
  Seed: SIGKVCRTLLAKSVF
SIIKVNRALLIKSVF

SEQ ID NO: 267207 - protein, 15 aa, Artificial Sequence
  Description of Artificial Sequence: Synthetic peptide
  Seed: SIGKVCRTLLAKSVF
SIIKVNRALLLKSVF

SEQ ID NO: 267208 - protein, 15 aa, Artificial Sequence
  Description of Artificial Sequence: Synthetic peptide
  Seed: SIGKVCRTLLAKSVF
SIIKVNRALLMKSVF

SEQ ID NO: 267209 - protein, 15 aa, Artificial Sequence
  Description of Artificial Sequence: Synthetic peptide
  Seed: SIGKVCRTLLAKSVF
SIIKVNRALLNKSVF

SEQ ID NO: 267210 - protein, 15 aa, Artificial Sequence
  Description of Artificial Sequence: Synthetic peptide
  Seed: SIGKVCRTLLAKSVF
SIIKVNRALLQKSVF

SEQ ID NO: 267211 - protein, 15 aa, Artificial Sequence
  Description of Artificial Sequence: Synthetic peptide
  Seed: SIGKVCRTLLAKSVF
SIIKVNRALLRKSVF

SEQ ID NO: 267212 - protein, 15 aa, Artificial Sequence
  Description of Artificial Sequence: Synthetic peptide
  Seed: SIGKVCRTLLAKSVF
SIIKVNRALLSKSVF

SEQ ID NO: 267213 - protein, 15 aa, Artificial Sequence
  Description of Artificial Sequence: Synthetic peptide
  Seed: SIGKVCRTLLAKSVF
SIIKVNRALLVKSVF

SEQ ID NO: 267214 - protein, 15 aa, Artificial Sequence
  Description of Artificial Sequence: Synthetic peptide
  Seed: SIGKVCRTLLAKSVF
SIIKVNRALLYKSVF

SEQ ID NO: 267215 - protein, 15 aa, Artificial Sequence
  Description of Artificial Sequence: Synthetic peptide
  Seed: SIGKVCRTLLAKSVF
SIIKVNRCLLRKSVF

SEQ ID NO: 267216 - protein, 15 aa, Artificial Sequence
  Description of Artificial Sequence: Synthetic peptide
  Seed: SIGKVCRTLLAKSVF
SIIKVNRGLLAKSVF

SEQ ID NO: 267217 - protein, 15 aa, Artificial Sequence
  Description of Artificial Sequence: Synthetic peptide
  Seed: SIGKVCRTLLAKSVF
SIIKVNRGLLGKSVF

SEQ ID NO: 267218 - protein, 15 aa, Artificial Sequence
  Description of Artificial Sequence: Synthetic peptide
  Seed: SIGKVCRTLLAKSVF
SIIKVNRGLLQKSVF

SEQ ID NO: 267219 - protein, 15 aa, Artificial Sequence
  Description of Artificial Sequence: Synthetic peptide
  Seed: SIGKVCRTLLAKSVF
SIIKVNRGLLSKSVF

SEQ ID NO: 267220 - protein, 15 aa, Artificial Sequence
  Description of Artificial Sequence: Synthetic peptide
  Seed: SIGKVCRTLLAKSVF
SIIKVNRHLLAKSVF

SEQ ID NO: 267221 - protein, 15 aa, Artificial Sequence
  Description of Artificial Sequence: Synthetic peptide
  Seed: SIGKVCRTLLAKSVF
SIIKVNRHLLGKSVF

SEQ ID NO: 267222 - protein, 15 aa, Artificial Sequence
  Description of Artificial Sequence: Synthetic peptide
  Seed: SIGKVCRTLLAKSVF
SIIKVNRHLLHKSVF

SEQ ID NO: 267223 - protein, 15 aa, Artificial Sequence
  Description of Artificial Sequence: Synthetic peptide
  Seed: SIGKVCRTLLAKSVF
SIIKVNRHLLLKSVF

SEQ ID NO: 267224 - protein, 15 aa, Artificial Sequence
  Description of Artificial Sequence: Synthetic peptide
  Seed: SIGKVCRTLLAKSVF
SIIKVNRHLLMKSVF

SEQ ID NO: 267225 - protein, 15 aa, Artificial Sequence
  Description of Artificial Sequence: Synthetic peptide
  Seed: SIGKVCRTLLAKSVF
SIIKVNRHLLNKSVF

SEQ ID NO: 267226 - protein, 15 aa, Artificial Sequence
  Description of Artificial Sequence: Synthetic peptide
  Seed: SIGKVCRTLLAKSVF
SIIKVNRHLLQKSVF

SEQ ID NO: 267227 - protein, 15 aa, Artificial Sequence
  Description of Artificial Sequence: Synthetic peptide
  Seed: SIGKVCRTLLAKSVF
SIIKVNRHLLSKSVF

SEQ ID NO: 267228 - protein, 15 aa, Artificial Sequence
  Description of Artificial Sequence: Synthetic peptide
  Seed: SIGKVCRTLLAKSVF
SIIKVNRHLLTKSVF

SEQ ID NO: 267229 - protein, 15 aa, Artificial Sequence
  Description of Artificial Sequence: Synthetic peptide
  Seed: SIGKVCRTLLAKSVF
SIIKVNRHLLVKSVF

SEQ ID NO: 267230 - protein, 15 aa, Artificial Sequence
  Description of Artificial Sequence: Synthetic peptide
  Seed: SIGKVCRTLLAKSVF
SIIKVNRHLLYKSVF

SEQ ID NO: 267231 - protein, 15 aa, Artificial Sequence
  Description of Artificial Sequence: Synthetic peptide
  Seed: SIGKVCRTLLAKSVF
SIIKVNRILLAKSVF

SEQ ID NO: 267232 - protein, 15 aa, Artificial Sequence
  Description of Artificial Sequence: Synthetic peptide
  Seed: SIGKVCRTLLAKSVF
SIIKVNRILLGKSVF

SEQ ID NO: 267233 - protein, 15 aa, Artificial Sequence
  Description of Artificial Sequence: Synthetic peptide
  Seed: SIGKVCRTLLAKSVF
SIIKVNRILLQKSVF

SEQ ID NO: 267234 - protein, 15 aa, Artificial Sequence
  Description of Artificial Sequence: Synthetic peptide
  Seed: SIGKVCRTLLAKSVF
SIIKVNRILLRKSVF

SEQ ID NO: 267235 - protein, 15 aa, Artificial Sequence
  Description of Artificial Sequence: Synthetic peptide
  Seed: SIGKVCRTLLAKSVF
SIIKVNRILLSKSVF

SEQ ID NO: 267236 - protein, 15 aa, Artificial Sequence
  Description of Artificial Sequence: Synthetic peptide
  Seed: SIGKVCRTLLAKSVF
SIIKVNRKLLAKSVF

SEQ ID NO: 267237 - protein, 15 aa, Artificial Sequence
  Description of Artificial Sequence: Synthetic peptide
  Seed: SIGKVCRTLLAKSVF
SIIKVNRKLLCKSVF

SEQ ID NO: 267238 - protein, 15 aa, Artificial Sequence
  Description of Artificial Sequence: Synthetic peptide
  Seed: SIGKVCRTLLAKSVF
SIIKVNRKLLDKSVF

SEQ ID NO: 267239 - protein, 15 aa, Artificial Sequence
  Description of Artificial Sequence: Synthetic peptide
  Seed: SIGKVCRTLLAKSVF
SIIKVNRKLLEKSVF

SEQ ID NO: 267240 - protein, 15 aa, Artificial Sequence
  Description of Artificial Sequence: Synthetic peptide
  Seed: SIGKVCRTLLAKSVF
SIIKVNRKLLFKSVF

SEQ ID NO: 267241 - protein, 15 aa, Artificial Sequence
  Description of Artificial Sequence: Synthetic peptide
  Seed: SIGKVCRTLLAKSVF
SIIKVNRKLLGKSVF

SEQ ID NO: 267242 - protein, 15 aa, Artificial Sequence
  Description of Artificial Sequence: Synthetic peptide
  Seed: SIGKVCRTLLAKSVF
SIIKVNRKLLHKSVF

SEQ ID NO: 267243 - protein, 15 aa, Artificial Sequence
  Description of Artificial Sequence: Synthetic peptide
  Seed: SIGKVCRTLLAKSVF
SIIKVNRKLLIKSVF

SEQ ID NO: 267244 - protein, 15 aa, Artificial Sequence
  Description of Artificial Sequence: Synthetic peptide
  Seed: SIGKVCRTLLAKSVF
SIIKVNRKLLKKSVF

SEQ ID NO: 267245 - protein, 15 aa, Artificial Sequence
  Description of Artificial Sequence: Synthetic peptide
  Seed: SIGKVCRTLLAKSVF
SIIKVNRKLLLKSVF

SEQ ID NO: 267246 - protein, 15 aa, Artificial Sequence
  Description of Artificial Sequence: Synthetic peptide
  Seed: SIGKVCRTLLAKSVF
SIIKVNRKLLMKSVF

SEQ ID NO: 267247 - protein, 15 aa, Artificial Sequence
  Description of Artificial Sequence: Synthetic peptide
  Seed: SIGKVCRTLLAKSVF
SIIKVNRKLLNKSVF

SEQ ID NO: 267248 - protein, 15 aa, Artificial Sequence
  Description of Artificial Sequence: Synthetic peptide
  Seed: SIGKVCRTLLAKSVF
SIIKVNRKLLPKSVF

SEQ ID NO: 267249 - protein, 15 aa, Artificial Sequence
  Description of Artificial Sequence: Synthetic peptide
  Seed: SIGKVCRTLLAKSVF
SIIKVNRKLLQKSVF

SEQ ID NO: 267250 - protein, 15 aa, Artificial Sequence
  Description of Artificial Sequence: Synthetic peptide
  Seed: SIGKVCRTLLAKSVF
SIIKVNRKLLRKSVF

SEQ ID NO: 267251 - protein, 15 aa, Artificial Sequence
  Description of Artificial Sequence: Synthetic peptide
  Seed: SIGKVCRTLLAKSVF
SIIKVNRKLLSKSVF

SEQ ID NO: 267252 - protein, 15 aa, Artificial Sequence
  Description of Artificial Sequence: Synthetic peptide
  Seed: SIGKVCRTLLAKSVF
SIIKVNRKLLTKSVF

SEQ ID NO: 267253 - protein, 15 aa, Artificial Sequence
  Description of Artificial Sequence: Synthetic peptide
  Seed: SIGKVCRTLLAKSVF
SIIKVNRKLLVKSVF

SEQ ID NO: 267254 - protein, 15 aa, Artificial Sequence
  Description of Artificial Sequence: Synthetic peptide
  Seed: SIGKVCRTLLAKSVF
SIIKVNRKLLWKSVF

SEQ ID NO: 267255 - protein, 15 aa, Artificial Sequence
  Description of Artificial Sequence: Synthetic peptide
  Seed: SIGKVCRTLLAKSVF
SIIKVNRKLLYKSVF

SEQ ID NO: 267256 - protein, 15 aa, Artificial Sequence
  Description of Artificial Sequence: Synthetic peptide
  Seed: SIGKVCRTLLAKSVF
SIIKVNRLLLGKSVF

SEQ ID NO: 267257 - protein, 15 aa, Artificial Sequence
  Description of Artificial Sequence: Synthetic peptide
  Seed: SIGKVCRTLLAKSVF
SIIKVNRMLLGKSVF

SEQ ID NO: 267258 - protein, 15 aa, Artificial Sequence
  Description of Artificial Sequence: Synthetic peptide
  Seed: SIGKVCRTLLAKSVF
SIIKVNRMLLQKSVF

SEQ ID NO: 267259 - protein, 15 aa, Artificial Sequence
  Description of Artificial Sequence: Synthetic peptide
  Seed: SIGKVCRTLLAKSVF
SIIKVNRNLLAKSVF

SEQ ID NO: 267260 - protein, 15 aa, Artificial Sequence
  Description of Artificial Sequence: Synthetic peptide
  Seed: SIGKVCRTLLAKSVF
SIIKVNRNLLGKSVF

SEQ ID NO: 267261 - protein, 15 aa, Artificial Sequence
  Description of Artificial Sequence: Synthetic peptide
  Seed: SIGKVCRTLLAKSVF
SIIKVNRNLLHKSVF

SEQ ID NO: 267262 - protein, 15 aa, Artificial Sequence
  Description of Artificial Sequence: Synthetic peptide
  Seed: SIGKVCRTLLAKSVF
SIIKVNRNLLMKSVF

SEQ ID NO: 267263 - protein, 15 aa, Artificial Sequence
  Description of Artificial Sequence: Synthetic peptide
  Seed: SIGKVCRTLLAKSVF
SIIKVNRNLLQKSVF

SEQ ID NO: 267264 - protein, 15 aa, Artificial Sequence
  Description of Artificial Sequence: Synthetic peptide
  Seed: SIGKVCRTLLAKSVF
SIIKVNRNLLSKSVF

SEQ ID NO: 267265 - protein, 15 aa, Artificial Sequence
  Description of Artificial Sequence: Synthetic peptide
  Seed: SIGKVCRTLLAKSVF
SIIKVNRNLLYKSVF

SEQ ID NO: 267266 - protein, 15 aa, Artificial Sequence
  Description of Artificial Sequence: Synthetic peptide
  Seed: SIGKVCRTLLAKSVF
SIIKVNRPLLAKSVF

SEQ ID NO: 267267 - protein, 15 aa, Artificial Sequence
  Description of Artificial Sequence: Synthetic peptide
  Seed: SIGKVCRTLLAKSVF
SIIKVNRPLLGKSVF

SEQ ID NO: 267268 - protein, 15 aa, Artificial Sequence
  Description of Artificial Sequence: Synthetic peptide
  Seed: SIGKVCRTLLAKSVF
SIIKVNRPLLQKSVF

SEQ ID NO: 267269 - protein, 15 aa, Artificial Sequence
  Description of Artificial Sequence: Synthetic peptide
  Seed: SIGKVCRTLLAKSVF
SIIKVNRPLLSKSVF

SEQ ID NO: 267270 - protein, 15 aa, Artificial Sequence
  Description of Artificial Sequence: Synthetic peptide
  Seed: SIGKVCRTLLAKSVF
SIIKVNRPLLYKSVF

SEQ ID NO: 267271 - protein, 15 aa, Artificial Sequence
  Description of Artificial Sequence: Synthetic peptide
  Seed: SIGKVCRTLLAKSVF
SIIKVNRQLLAKSVF

SEQ ID NO: 267272 - protein, 15 aa, Artificial Sequence
  Description of Artificial Sequence: Synthetic peptide
  Seed: SIGKVCRTLLAKSVF
SIIKVNRQLLGKSVF

SEQ ID NO: 267273 - protein, 15 aa, Artificial Sequence
  Description of Artificial Sequence: Synthetic peptide
  Seed: SIGKVCRTLLAKSVF
SIIKVNRQLLHKSVF

SEQ ID NO: 267274 - protein, 15 aa, Artificial Sequence
  Description of Artificial Sequence: Synthetic peptide
  Seed: SIGKVCRTLLAKSVF
SIIKVNRQLLQKSVF

SEQ ID NO: 267275 - protein, 15 aa, Artificial Sequence
  Description of Artificial Sequence: Synthetic peptide
  Seed: SIGKVCRTLLAKSVF
SIIKVNRQLLSKSVF

SEQ ID NO: 267276 - protein, 15 aa, Artificial Sequence
  Description of Artificial Sequence: Synthetic peptide
  Seed: SIGKVCRTLLAKSVF
SIIKVNRRLLAKSVF

SEQ ID NO: 267277 - protein, 15 aa, Artificial Sequence
  Description of Artificial Sequence: Synthetic peptide
  Seed: SIGKVCRTLLAKSVF
SIIKVNRRLLCKSVF

SEQ ID NO: 267278 - protein, 15 aa, Artificial Sequence
  Description of Artificial Sequence: Synthetic peptide
  Seed: SIGKVCRTLLAKSVF
SIIKVNRRLLDKSVF

SEQ ID NO: 267279 - protein, 15 aa, Artificial Sequence
  Description of Artificial Sequence: Synthetic peptide
  Seed: SIGKVCRTLLAKSVF
SIIKVNRRLLEKSVF

SEQ ID NO: 267280 - protein, 15 aa, Artificial Sequence
  Description of Artificial Sequence: Synthetic peptide
  Seed: SIGKVCRTLLAKSVF
SIIKVNRRLLFKSVF

SEQ ID NO: 267281 - protein, 15 aa, Artificial Sequence
  Description of Artificial Sequence: Synthetic peptide
  Seed: SIGKVCRTLLAKSVF
SIIKVNRRLLGKSVF

SEQ ID NO: 267282 - protein, 15 aa, Artificial Sequence
  Description of Artificial Sequence: Synthetic peptide
  Seed: SIGKVCRTLLAKSVF
SIIKVNRRLLHKSVF

SEQ ID NO: 267283 - protein, 15 aa, Artificial Sequence
  Description of Artificial Sequence: Synthetic peptide
  Seed: SIGKVCRTLLAKSVF
SIIKVNRRLLIKSVF

SEQ ID NO: 267284 - protein, 15 aa, Artificial Sequence
  Description of Artificial Sequence: Synthetic peptide
  Seed: SIGKVCRTLLAKSVF
SIIKVNRRLLKKSVF

SEQ ID NO: 267285 - protein, 15 aa, Artificial Sequence
  Description of Artificial Sequence: Synthetic peptide
  Seed: SIGKVCRTLLAKSVF
SIIKVNRRLLLKSVF

SEQ ID NO: 267286 - protein, 15 aa, Artificial Sequence
  Description of Artificial Sequence: Synthetic peptide
  Seed: SIGKVCRTLLAKSVF
SIIKVNRRLLMKSVF

SEQ ID NO: 267287 - protein, 15 aa, Artificial Sequence
  Description of Artificial Sequence: Synthetic peptide
  Seed: SIGKVCRTLLAKSVF
SIIKVNRRLLNKSVF

SEQ ID NO: 267288 - protein, 15 aa, Artificial Sequence
  Description of Artificial Sequence: Synthetic peptide
  Seed: SIGKVCRTLLAKSVF
SIIKVNRRLLPKSVF

SEQ ID NO: 267289 - protein, 15 aa, Artificial Sequence
  Description of Artificial Sequence: Synthetic peptide
  Seed: SIGKVCRTLLAKSVF
SIIKVNRRLLQKSVF

SEQ ID NO: 267290 - protein, 15 aa, Artificial Sequence
  Description of Artificial Sequence: Synthetic peptide
  Seed: SIGKVCRTLLAKSVF
SIIKVNRRLLRKSVF

SEQ ID NO: 267291 - protein, 15 aa, Artificial Sequence
  Description of Artificial Sequence: Synthetic peptide
  Seed: SIGKVCRTLLAKSVF
SIIKVNRRLLSKSVF

SEQ ID NO: 267292 - protein, 15 aa, Artificial Sequence
  Description of Artificial Sequence: Synthetic peptide
  Seed: SIGKVCRTLLAKSVF
SIIKVNRRLLTKSVF

SEQ ID NO: 267293 - protein, 15 aa, Artificial Sequence
  Description of Artificial Sequence: Synthetic peptide
  Seed: SIGKVCRTLLAKSVF
SIIKVNRRLLVKSVF

SEQ ID NO: 267294 - protein, 15 aa, Artificial Sequence
  Description of Artificial Sequence: Synthetic peptide
  Seed: SIGKVCRTLLAKSVF
SIIKVNRRLLWKSVF

SEQ ID NO: 267295 - protein, 15 aa, Artificial Sequence
  Description of Artificial Sequence: Synthetic peptide
  Seed: SIGKVCRTLLAKSVF
SIIKVNRRLLYKSVF

SEQ ID NO: 267296 - protein, 15 aa, Artificial Sequence
  Description of Artificial Sequence: Synthetic peptide
  Seed: SIGKVCRTLLAKSVF
SIIKVNRSLLAKSVF

SEQ ID NO: 267297 - protein, 15 aa, Artificial Sequence
  Description of Artificial Sequence: Synthetic peptide
  Seed: SIGKVCRTLLAKSVF
SIIKVNRSLLGKSVF

SEQ ID NO: 267298 - protein, 15 aa, Artificial Sequence
  Description of Artificial Sequence: Synthetic peptide
  Seed: SIGKVCRTLLAKSVF
SIIKVNRSLLHKSVF

SEQ ID NO: 267299 - protein, 15 aa, Artificial Sequence
  Description of Artificial Sequence: Synthetic peptide
  Seed: SIGKVCRTLLAKSVF
SIIKVNRSLLIKSVF

SEQ ID NO: 267300 - protein, 15 aa, Artificial Sequence
  Description of Artificial Sequence: Synthetic peptide
  Seed: SIGKVCRTLLAKSVF
SIIKVNRSLLLKSVF

SEQ ID NO: 267301 - protein, 15 aa, Artificial Sequence
  Description of Artificial Sequence: Synthetic peptide
  Seed: SIGKVCRTLLAKSVF
SIIKVNRSLLMKSVF

SEQ ID NO: 267302 - protein, 15 aa, Artificial Sequence
  Description of Artificial Sequence: Synthetic peptide
  Seed: SIGKVCRTLLAKSVF
SIIKVNRSLLQKSVF

SEQ ID NO: 267303 - protein, 15 aa, Artificial Sequence
  Description of Artificial Sequence: Synthetic peptide
  Seed: SIGKVCRTLLAKSVF
SIIKVNRSLLRKSVF

SEQ ID NO: 267304 - protein, 15 aa, Artificial Sequence
  Description of Artificial Sequence: Synthetic peptide
  Seed: SIGKVCRTLLAKSVF
SIIKVNRSLLSKSVF

SEQ ID NO: 267305 - protein, 15 aa, Artificial Sequence
  Description of Artificial Sequence: Synthetic peptide
  Seed: SIGKVCRTLLAKSVF
SIIKVNRSLLTKSVF

SEQ ID NO: 267306 - protein, 15 aa, Artificial Sequence
  Description of Artificial Sequence: Synthetic peptide
  Seed: SIGKVCRTLLAKSVF
SIIKVNRSLLVKSVF

SEQ ID NO: 267307 - protein, 15 aa, Artificial Sequence
  Description of Artificial Sequence: Synthetic peptide
  Seed: SIGKVCRTLLAKSVF
SIIKVNRSLLYKSVF

SEQ ID NO: 267308 - protein, 15 aa, Artificial Sequence
  Description of Artificial Sequence: Synthetic peptide
  Seed: SIGKVCRTLLAKSVF
SIIKVNRTLLAKSVF

SEQ ID NO: 267309 - protein, 15 aa, Artificial Sequence
  Description of Artificial Sequence: Synthetic peptide
  Seed: SIGKVCRTLLAKSVF
SIIKVNRTLLGKSVF

SEQ ID NO: 267310 - protein, 15 aa, Artificial Sequence
  Description of Artificial Sequence: Synthetic peptide
  Seed: SIGKVCRTLLAKSVF
SIIKVNRTLLHKSVF

SEQ ID NO: 267311 - protein, 15 aa, Artificial Sequence
  Description of Artificial Sequence: Synthetic peptide
  Seed: SIGKVCRTLLAKSVF
SIIKVNRTLLKKSVF

SEQ ID NO: 267312 - protein, 15 aa, Artificial Sequence
  Description of Artificial Sequence: Synthetic peptide
  Seed: SIGKVCRTLLAKSVF
SIIKVNRTLLMKSVF

SEQ ID NO: 267313 - protein, 15 aa, Artificial Sequence
  Description of Artificial Sequence: Synthetic peptide
  Seed: SIGKVCRTLLAKSVF
SIIKVNRTLLQKSVF

SEQ ID NO: 267314 - protein, 15 aa, Artificial Sequence
  Description of Artificial Sequence: Synthetic peptide
  Seed: SIGKVCRTLLAKSVF
SIIKVNRTLLRKSVF

SEQ ID NO: 267315 - protein, 15 aa, Artificial Sequence
  Description of Artificial Sequence: Synthetic peptide
  Seed: SIGKVCRTLLAKSVF
SIIKVNRTLLSKSVF

SEQ ID NO: 267316 - protein, 15 aa, Artificial Sequence
  Description of Artificial Sequence: Synthetic peptide
  Seed: SIGKVCRTLLAKSVF
SIIKVNRTLLTKSVF

SEQ ID NO: 267317 - protein, 15 aa, Artificial Sequence
  Description of Artificial Sequence: Synthetic peptide
  Seed: SIGKVCRTLLAKSVF
SIIKVNRTLLVKSVF

SEQ ID NO: 267318 - protein, 15 aa, Artificial Sequence
  Description of Artificial Sequence: Synthetic peptide
  Seed: SIGKVCRTLLAKSVF
SIIKVNRTLLYKSVF

SEQ ID NO: 267319 - protein, 15 aa, Artificial Sequence
  Description of Artificial Sequence: Synthetic peptide
  Seed: SIGKVCRTLLAKSVF
SIIKVNRVLLAKSVF

SEQ ID NO: 267320 - protein, 15 aa, Artificial Sequence
  Description of Artificial Sequence: Synthetic peptide
  Seed: SIGKVCRTLLAKSVF
SIIKVNRVLLGKSVF

SEQ ID NO: 267321 - protein, 15 aa, Artificial Sequence
  Description of Artificial Sequence: Synthetic peptide
  Seed: SIGKVCRTLLAKSVF
SIIKVNRVLLHKSVF

SEQ ID NO: 267322 - protein, 15 aa, Artificial Sequence
  Description of Artificial Sequence: Synthetic peptide
  Seed: SIGKVCRTLLAKSVF
SIIKVNRVLLKKSVF

SEQ ID NO: 267323 - protein, 15 aa, Artificial Sequence
  Description of Artificial Sequence: Synthetic peptide
  Seed: SIGKVCRTLLAKSVF
SIIKVNRVLLQKSVF

SEQ ID NO: 267324 - protein, 15 aa, Artificial Sequence
  Description of Artificial Sequence: Synthetic peptide
  Seed: SIGKVCRTLLAKSVF
SIIKVNRVLLRKSVF

SEQ ID NO: 267325 - protein, 15 aa, Artificial Sequence
  Description of Artificial Sequence: Synthetic peptide
  Seed: SIGKVCRTLLAKSVF
SIIKVNRVLLSKSVF

SEQ ID NO: 267326 - protein, 15 aa, Artificial Sequence
  Description of Artificial Sequence: Synthetic peptide
  Seed: SIGKVCRTLLAKSVF
SIIKVPRKLLGKSVF

SEQ ID NO: 267327 - protein, 15 aa, Artificial Sequence
  Description of Artificial Sequence: Synthetic peptide
  Seed: SIGKVCRTLLAKSVF
SIIKVPRKLLQKSVF

SEQ ID NO: 267328 - protein, 15 aa, Artificial Sequence
  Description of Artificial Sequence: Synthetic peptide
  Seed: SIGKVCRTLLAKSVF
SIIKVQRALLAKSVF

SEQ ID NO: 267329 - protein, 15 aa, Artificial Sequence
  Description of Artificial Sequence: Synthetic peptide
  Seed: SIGKVCRTLLAKSVF
SIIKVQRALLEKSVF

SEQ ID NO: 267330 - protein, 15 aa, Artificial Sequence
  Description of Artificial Sequence: Synthetic peptide
  Seed: SIGKVCRTLLAKSVF
SIIKVQRALLGKSVF

SEQ ID NO: 267331 - protein, 15 aa, Artificial Sequence
  Description of Artificial Sequence: Synthetic peptide
  Seed: SIGKVCRTLLAKSVF
SIIKVQRALLHKSVF

SEQ ID NO: 267332 - protein, 15 aa, Artificial Sequence
  Description of Artificial Sequence: Synthetic peptide
  Seed: SIGKVCRTLLAKSVF
SIIKVQRALLIKSVF

SEQ ID NO: 267333 - protein, 15 aa, Artificial Sequence
  Description of Artificial Sequence: Synthetic peptide
  Seed: SIGKVCRTLLAKSVF
SIIKVQRALLKKSVF

SEQ ID NO: 267334 - protein, 15 aa, Artificial Sequence
  Description of Artificial Sequence: Synthetic peptide
  Seed: SIGKVCRTLLAKSVF
SIIKVQRALLLKSVF

SEQ ID NO: 267335 - protein, 15 aa, Artificial Sequence
  Description of Artificial Sequence: Synthetic peptide
  Seed: SIGKVCRTLLAKSVF
SIIKVQRALLMKSVF

SEQ ID NO: 267336 - protein, 15 aa, Artificial Sequence
  Description of Artificial Sequence: Synthetic peptide
  Seed: SIGKVCRTLLAKSVF
SIIKVQRALLNKSVF

SEQ ID NO: 267337 - protein, 15 aa, Artificial Sequence
  Description of Artificial Sequence: Synthetic peptide
  Seed: SIGKVCRTLLAKSVF
SIIKVQRALLQKSVF

SEQ ID NO: 267338 - protein, 15 aa, Artificial Sequence
  Description of Artificial Sequence: Synthetic peptide
  Seed: SIGKVCRTLLAKSVF
SIIKVQRALLRKSVF

SEQ ID NO: 267339 - protein, 15 aa, Artificial Sequence
  Description of Artificial Sequence: Synthetic peptide
  Seed: SIGKVCRTLLAKSVF
SIIKVQRALLSKSVF

SEQ ID NO: 267340 - protein, 15 aa, Artificial Sequence
  Description of Artificial Sequence: Synthetic peptide
  Seed: SIGKVCRTLLAKSVF
SIIKVQRALLTKSVF

SEQ ID NO: 267341 - protein, 15 aa, Artificial Sequence
  Description of Artificial Sequence: Synthetic peptide
  Seed: SIGKVCRTLLAKSVF
SIIKVQRALLVKSVF

SEQ ID NO: 267342 - protein, 15 aa, Artificial Sequence
  Description of Artificial Sequence: Synthetic peptide
  Seed: SIGKVCRTLLAKSVF
SIIKVQRALLYKSVF

SEQ ID NO: 267343 - protein, 15 aa, Artificial Sequence
  Description of Artificial Sequence: Synthetic peptide
  Seed: SIGKVCRTLLAKSVF
SIIKVQRDLLAKSVF

SEQ ID NO: 267344 - protein, 15 aa, Artificial Sequence
  Description of Artificial Sequence: Synthetic peptide
  Seed: SIGKVCRTLLAKSVF
SIIKVQRDLLSKSVF

SEQ ID NO: 267345 - protein, 15 aa, Artificial Sequence
  Description of Artificial Sequence: Synthetic peptide
  Seed: SIGKVCRTLLAKSVF
SIIKVQRELLRKSVF

SEQ ID NO: 267346 - protein, 15 aa, Artificial Sequence
  Description of Artificial Sequence: Synthetic peptide
  Seed: SIGKVCRTLLAKSVF
SIIKVQRGLLAKSVF

SEQ ID NO: 267347 - protein, 15 aa, Artificial Sequence
  Description of Artificial Sequence: Synthetic peptide
  Seed: SIGKVCRTLLAKSVF
SIIKVQRGLLGKSVF

SEQ ID NO: 267348 - protein, 15 aa, Artificial Sequence
  Description of Artificial Sequence: Synthetic peptide
  Seed: SIGKVCRTLLAKSVF
SIIKVQRGLLHKSVF

SEQ ID NO: 267349 - protein, 15 aa, Artificial Sequence
  Description of Artificial Sequence: Synthetic peptide
  Seed: SIGKVCRTLLAKSVF
SIIKVQRGLLLKSVF

SEQ ID NO: 267350 - protein, 15 aa, Artificial Sequence
  Description of Artificial Sequence: Synthetic peptide
  Seed: SIGKVCRTLLAKSVF
SIIKVQRGLLQKSVF

SEQ ID NO: 267351 - protein, 15 aa, Artificial Sequence
  Description of Artificial Sequence: Synthetic peptide
  Seed: SIGKVCRTLLAKSVF
SIIKVQRGLLSKSVF

SEQ ID NO: 267352 - protein, 15 aa, Artificial Sequence
  Description of Artificial Sequence: Synthetic peptide
  Seed: SIGKVCRTLLAKSVF
SIIKVQRGLLVKSVF

SEQ ID NO: 267353 - protein, 15 aa, Artificial Sequence
  Description of Artificial Sequence: Synthetic peptide
  Seed: SIGKVCRTLLAKSVF
SIIKVQRGLLYKSVF

SEQ ID NO: 267354 - protein, 15 aa, Artificial Sequence
  Description of Artificial Sequence: Synthetic peptide
  Seed: SIGKVCRTLLAKSVF
SIIKVQRHLLAKSVF

SEQ ID NO: 267355 - protein, 15 aa, Artificial Sequence
  Description of Artificial Sequence: Synthetic peptide
  Seed: SIGKVCRTLLAKSVF
SIIKVQRHLLEKSVF

SEQ ID NO: 267356 - protein, 15 aa, Artificial Sequence
  Description of Artificial Sequence: Synthetic peptide
  Seed: SIGKVCRTLLAKSVF
SIIKVQRHLLFKSVF

SEQ ID NO: 267357 - protein, 15 aa, Artificial Sequence
  Description of Artificial Sequence: Synthetic peptide
  Seed: SIGKVCRTLLAKSVF
SIIKVQRHLLGKSVF

SEQ ID NO: 267358 - protein, 15 aa, Artificial Sequence
  Description of Artificial Sequence: Synthetic peptide
  Seed: SIGKVCRTLLAKSVF
SIIKVQRHLLHKSVF

SEQ ID NO: 267359 - protein, 15 aa, Artificial Sequence
  Description of Artificial Sequence: Synthetic peptide
  Seed: SIGKVCRTLLAKSVF
SIIKVQRHLLIKSVF

SEQ ID NO: 267360 - protein, 15 aa, Artificial Sequence
  Description of Artificial Sequence: Synthetic peptide
  Seed: SIGKVCRTLLAKSVF
SIIKVQRHLLKKSVF

SEQ ID NO: 267361 - protein, 15 aa, Artificial Sequence
  Description of Artificial Sequence: Synthetic peptide
  Seed: SIGKVCRTLLAKSVF
SIIKVQRHLLLKSVF

SEQ ID NO: 267362 - protein, 15 aa, Artificial Sequence
  Description of Artificial Sequence: Synthetic peptide
  Seed: SIGKVCRTLLAKSVF
SIIKVQRHLLMKSVF

SEQ ID NO: 267363 - protein, 15 aa, Artificial Sequence
  Description of Artificial Sequence: Synthetic peptide
  Seed: SIGKVCRTLLAKSVF
SIIKVQRHLLNKSVF

SEQ ID NO: 267364 - protein, 15 aa, Artificial Sequence
  Description of Artificial Sequence: Synthetic peptide
  Seed: SIGKVCRTLLAKSVF
SIIKVQRHLLPKSVF

SEQ ID NO: 267365 - protein, 15 aa, Artificial Sequence
  Description of Artificial Sequence: Synthetic peptide
  Seed: SIGKVCRTLLAKSVF
SIIKVQRHLLQKSVF

SEQ ID NO: 267366 - protein, 15 aa, Artificial Sequence
  Description of Artificial Sequence: Synthetic peptide
  Seed: SIGKVCRTLLAKSVF
SIIKVQRHLLRKSVF

SEQ ID NO: 267367 - protein, 15 aa, Artificial Sequence
  Description of Artificial Sequence: Synthetic peptide
  Seed: SIGKVCRTLLAKSVF
SIIKVQRHLLSKSVF

SEQ ID NO: 267368 - protein, 15 aa, Artificial Sequence
  Description of Artificial Sequence: Synthetic peptide
  Seed: SIGKVCRTLLAKSVF
SIIKVQRHLLTKSVF

SEQ ID NO: 267369 - protein, 15 aa, Artificial Sequence
  Description of Artificial Sequence: Synthetic peptide
  Seed: SIGKVCRTLLAKSVF
SIIKVQRHLLVKSVF

SEQ ID NO: 267370 - protein, 15 aa, Artificial Sequence
  Description of Artificial Sequence: Synthetic peptide
  Seed: SIGKVCRTLLAKSVF
SIIKVQRHLLYKSVF

SEQ ID NO: 267371 - protein, 15 aa, Artificial Sequence
  Description of Artificial Sequence: Synthetic peptide
  Seed: SIGKVCRTLLAKSVF
SIIKVQRILLAKSVF

SEQ ID NO: 267372 - protein, 15 aa, Artificial Sequence
  Description of Artificial Sequence: Synthetic peptide
  Seed: SIGKVCRTLLAKSVF
SIIKVQRILLGKSVF

SEQ ID NO: 267373 - protein, 15 aa, Artificial Sequence
  Description of Artificial Sequence: Synthetic peptide
  Seed: SIGKVCRTLLAKSVF
SIIKVQRILLHKSVF

SEQ ID NO: 267374 - protein, 15 aa, Artificial Sequence
  Description of Artificial Sequence: Synthetic peptide
  Seed: SIGKVCRTLLAKSVF
SIIKVQRILLKKSVF

SEQ ID NO: 267375 - protein, 15 aa, Artificial Sequence
  Description of Artificial Sequence: Synthetic peptide
  Seed: SIGKVCRTLLAKSVF
SIIKVQRILLNKSVF

SEQ ID NO: 267376 - protein, 15 aa, Artificial Sequence
  Description of Artificial Sequence: Synthetic peptide
  Seed: SIGKVCRTLLAKSVF
SIIKVQRILLQKSVF

SEQ ID NO: 267377 - protein, 15 aa, Artificial Sequence
  Description of Artificial Sequence: Synthetic peptide
  Seed: SIGKVCRTLLAKSVF
SIIKVQRILLRKSVF

SEQ ID NO: 267378 - protein, 15 aa, Artificial Sequence
  Description of Artificial Sequence: Synthetic peptide
  Seed: SIGKVCRTLLAKSVF
SIIKVQRILLSKSVF

SEQ ID NO: 267379 - protein, 15 aa, Artificial Sequence
  Description of Artificial Sequence: Synthetic peptide
  Seed: SIGKVCRTLLAKSVF
SIIKVQRKLLAKSVF

SEQ ID NO: 267380 - protein, 15 aa, Artificial Sequence
  Description of Artificial Sequence: Synthetic peptide
  Seed: SIGKVCRTLLAKSVF
SIIKVQRKLLCKSVF

SEQ ID NO: 267381 - protein, 15 aa, Artificial Sequence
  Description of Artificial Sequence: Synthetic peptide
  Seed: SIGKVCRTLLAKSVF
SIIKVQRKLLDKSVF

SEQ ID NO: 267382 - protein, 15 aa, Artificial Sequence
  Description of Artificial Sequence: Synthetic peptide
  Seed: SIGKVCRTLLAKSVF
SIIKVQRKLLEKSVF

SEQ ID NO: 267383 - protein, 15 aa, Artificial Sequence
  Description of Artificial Sequence: Synthetic peptide
  Seed: SIGKVCRTLLAKSVF
SIIKVQRKLLFKSVF

SEQ ID NO: 267384 - protein, 15 aa, Artificial Sequence
  Description of Artificial Sequence: Synthetic peptide
  Seed: SIGKVCRTLLAKSVF
SIIKVQRKLLGKSVF

SEQ ID NO: 267385 - protein, 15 aa, Artificial Sequence
  Description of Artificial Sequence: Synthetic peptide
  Seed: SIGKVCRTLLAKSVF
SIIKVQRKLLHKSVF

SEQ ID NO: 267386 - protein, 15 aa, Artificial Sequence
  Description of Artificial Sequence: Synthetic peptide
  Seed: SIGKVCRTLLAKSVF
SIIKVQRKLLIKSVF

SEQ ID NO: 267387 - protein, 15 aa, Artificial Sequence
  Description of Artificial Sequence: Synthetic peptide
  Seed: SIGKVCRTLLAKSVF
SIIKVQRKLLKKSVF

SEQ ID NO: 267388 - protein, 15 aa, Artificial Sequence
  Description of Artificial Sequence: Synthetic peptide
  Seed: SIGKVCRTLLAKSVF
SIIKVQRKLLLKSVF

SEQ ID NO: 267389 - protein, 15 aa, Artificial Sequence
  Description of Artificial Sequence: Synthetic peptide
  Seed: SIGKVCRTLLAKSVF
SIIKVQRKLLMKSVF

SEQ ID NO: 267390 - protein, 15 aa, Artificial Sequence
  Description of Artificial Sequence: Synthetic peptide
  Seed: SIGKVCRTLLAKSVF
SIIKVQRKLLNKSVF

SEQ ID NO: 267391 - protein, 15 aa, Artificial Sequence
  Description of Artificial Sequence: Synthetic peptide
  Seed: SIGKVCRTLLAKSVF
SIIKVQRKLLPKSVF

SEQ ID NO: 267392 - protein, 15 aa, Artificial Sequence
  Description of Artificial Sequence: Synthetic peptide
  Seed: SIGKVCRTLLAKSVF
SIIKVQRKLLQKSVF

SEQ ID NO: 267393 - protein, 15 aa, Artificial Sequence
  Description of Artificial Sequence: Synthetic peptide
  Seed: SIGKVCRTLLAKSVF
SIIKVQRKLLRKSVF

SEQ ID NO: 267394 - protein, 15 aa, Artificial Sequence
  Description of Artificial Sequence: Synthetic peptide
  Seed: SIGKVCRTLLAKSVF
SIIKVQRKLLSKSVF

SEQ ID NO: 267395 - protein, 15 aa, Artificial Sequence
  Description of Artificial Sequence: Synthetic peptide
  Seed: SIGKVCRTLLAKSVF
SIIKVQRKLLTKSVF

SEQ ID NO: 267396 - protein, 15 aa, Artificial Sequence
  Description of Artificial Sequence: Synthetic peptide
  Seed: SIGKVCRTLLAKSVF
SIIKVQRKLLVKSVF

SEQ ID NO: 267397 - protein, 15 aa, Artificial Sequence
  Description of Artificial Sequence: Synthetic peptide
  Seed: SIGKVCRTLLAKSVF
SIIKVQRKLLWKSVF

SEQ ID NO: 267398 - protein, 15 aa, Artificial Sequence
  Description of Artificial Sequence: Synthetic peptide
  Seed: SIGKVCRTLLAKSVF
SIIKVQRKLLYKSVF

SEQ ID NO: 267399 - protein, 15 aa, Artificial Sequence
  Description of Artificial Sequence: Synthetic peptide
  Seed: SIGKVCRTLLAKSVF
SIIKVQRLLLAKSVF

SEQ ID NO: 267400 - protein, 15 aa, Artificial Sequence
  Description of Artificial Sequence: Synthetic peptide
  Seed: SIGKVCRTLLAKSVF
SIIKVQRLLLGKSVF

SEQ ID NO: 267401 - protein, 15 aa, Artificial Sequence
  Description of Artificial Sequence: Synthetic peptide
  Seed: SIGKVCRTLLAKSVF
SIIKVQRLLLQKSVF

SEQ ID NO: 267402 - protein, 15 aa, Artificial Sequence
  Description of Artificial Sequence: Synthetic peptide
  Seed: SIGKVCRTLLAKSVF
SIIKVQRLLLSKSVF

SEQ ID NO: 267403 - protein, 15 aa, Artificial Sequence
  Description of Artificial Sequence: Synthetic peptide
  Seed: SIGKVCRTLLAKSVF
SIIKVQRMLLAKSVF

SEQ ID NO: 267404 - protein, 15 aa, Artificial Sequence
  Description of Artificial Sequence: Synthetic peptide
  Seed: SIGKVCRTLLAKSVF
SIIKVQRMLLGKSVF

SEQ ID NO: 267405 - protein, 15 aa, Artificial Sequence
  Description of Artificial Sequence: Synthetic peptide
  Seed: SIGKVCRTLLAKSVF
SIIKVQRMLLQKSVF

SEQ ID NO: 267406 - protein, 15 aa, Artificial Sequence
  Description of Artificial Sequence: Synthetic peptide
  Seed: SIGKVCRTLLAKSVF
SIIKVQRMLLSKSVF

SEQ ID NO: 267407 - protein, 15 aa, Artificial Sequence
  Description of Artificial Sequence: Synthetic peptide
  Seed: SIGKVCRTLLAKSVF
SIIKVQRNLLAKSVF

SEQ ID NO: 267408 - protein, 15 aa, Artificial Sequence
  Description of Artificial Sequence: Synthetic peptide
  Seed: SIGKVCRTLLAKSVF
SIIKVQRNLLGKSVF

SEQ ID NO: 267409 - protein, 15 aa, Artificial Sequence
  Description of Artificial Sequence: Synthetic peptide
  Seed: SIGKVCRTLLAKSVF
SIIKVQRNLLHKSVF

SEQ ID NO: 267410 - protein, 15 aa, Artificial Sequence
  Description of Artificial Sequence: Synthetic peptide
  Seed: SIGKVCRTLLAKSVF
SIIKVQRNLLIKSVF

SEQ ID NO: 267411 - protein, 15 aa, Artificial Sequence
  Description of Artificial Sequence: Synthetic peptide
  Seed: SIGKVCRTLLAKSVF
SIIKVQRNLLKKSVF

SEQ ID NO: 267412 - protein, 15 aa, Artificial Sequence
  Description of Artificial Sequence: Synthetic peptide
  Seed: SIGKVCRTLLAKSVF
SIIKVQRNLLLKSVF

SEQ ID NO: 267413 - protein, 15 aa, Artificial Sequence
  Description of Artificial Sequence: Synthetic peptide
  Seed: SIGKVCRTLLAKSVF
SIIKVQRNLLMKSVF

SEQ ID NO: 267414 - protein, 15 aa, Artificial Sequence
  Description of Artificial Sequence: Synthetic peptide
  Seed: SIGKVCRTLLAKSVF
SIIKVQRNLLNKSVF

SEQ ID NO: 267415 - protein, 15 aa, Artificial Sequence
  Description of Artificial Sequence: Synthetic peptide
  Seed: SIGKVCRTLLAKSVF
SIIKVQRNLLQKSVF

SEQ ID NO: 267416 - protein, 15 aa, Artificial Sequence
  Description of Artificial Sequence: Synthetic peptide
  Seed: SIGKVCRTLLAKSVF
SIIKVQRNLLRKSVF

SEQ ID NO: 267417 - protein, 15 aa, Artificial Sequence
  Description of Artificial Sequence: Synthetic peptide
  Seed: SIGKVCRTLLAKSVF
SIIKVQRNLLSKSVF

SEQ ID NO: 267418 - protein, 15 aa, Artificial Sequence
  Description of Artificial Sequence: Synthetic peptide
  Seed: SIGKVCRTLLAKSVF
SIIKVQRNLLTKSVF

SEQ ID NO: 267419 - protein, 15 aa, Artificial Sequence
  Description of Artificial Sequence: Synthetic peptide
  Seed: SIGKVCRTLLAKSVF
SIIKVQRNLLVKSVF

SEQ ID NO: 267420 - protein, 15 aa, Artificial Sequence
  Description of Artificial Sequence: Synthetic peptide
  Seed: SIGKVCRTLLAKSVF
SIIKVQRNLLYKSVF

SEQ ID NO: 267421 - protein, 15 aa, Artificial Sequence
  Description of Artificial Sequence: Synthetic peptide
  Seed: SIGKVCRTLLAKSVF
SIIKVQRPLLAKSVF

SEQ ID NO: 267422 - protein, 15 aa, Artificial Sequence
  Description of Artificial Sequence: Synthetic peptide
  Seed: SIGKVCRTLLAKSVF
SIIKVQRPLLGKSVF

SEQ ID NO: 267423 - protein, 15 aa, Artificial Sequence
  Description of Artificial Sequence: Synthetic peptide
  Seed: SIGKVCRTLLAKSVF
SIIKVQRPLLHKSVF

SEQ ID NO: 267424 - protein, 15 aa, Artificial Sequence
  Description of Artificial Sequence: Synthetic peptide
  Seed: SIGKVCRTLLAKSVF
SIIKVQRPLLIKSVF

SEQ ID NO: 267425 - protein, 15 aa, Artificial Sequence
  Description of Artificial Sequence: Synthetic peptide
  Seed: SIGKVCRTLLAKSVF
SIIKVQRPLLMKSVF

SEQ ID NO: 267426 - protein, 15 aa, Artificial Sequence
  Description of Artificial Sequence: Synthetic peptide
  Seed: SIGKVCRTLLAKSVF
SIIKVQRPLLNKSVF

SEQ ID NO: 267427 - protein, 15 aa, Artificial Sequence
  Description of Artificial Sequence: Synthetic peptide
  Seed: SIGKVCRTLLAKSVF
SIIKVQRPLLQKSVF

SEQ ID NO: 267428 - protein, 15 aa, Artificial Sequence
  Description of Artificial Sequence: Synthetic peptide
  Seed: SIGKVCRTLLAKSVF
SIIKVQRPLLRKSVF

SEQ ID NO: 267429 - protein, 15 aa, Artificial Sequence
  Description of Artificial Sequence: Synthetic peptide
  Seed: SIGKVCRTLLAKSVF
SIIKVQRPLLSKSVF

SEQ ID NO: 267430 - protein, 15 aa, Artificial Sequence
  Description of Artificial Sequence: Synthetic peptide
  Seed: SIGKVCRTLLAKSVF
SIIKVQRPLLTKSVF

SEQ ID NO: 267431 - protein, 15 aa, Artificial Sequence
  Description of Artificial Sequence: Synthetic peptide
  Seed: SIGKVCRTLLAKSVF
SIIKVQRPLLVKSVF

SEQ ID NO: 267432 - protein, 15 aa, Artificial Sequence
  Description of Artificial Sequence: Synthetic peptide
  Seed: SIGKVCRTLLAKSVF
SIIKVQRPLLYKSVF

SEQ ID NO: 267433 - protein, 15 aa, Artificial Sequence
  Description of Artificial Sequence: Synthetic peptide
  Seed: SIGKVCRTLLAKSVF
SIIKVQRQLLAKSVF

SEQ ID NO: 267434 - protein, 15 aa, Artificial Sequence
  Description of Artificial Sequence: Synthetic peptide
  Seed: SIGKVCRTLLAKSVF
SIIKVQRQLLGKSVF

SEQ ID NO: 267435 - protein, 15 aa, Artificial Sequence
  Description of Artificial Sequence: Synthetic peptide
  Seed: SIGKVCRTLLAKSVF
SIIKVQRQLLHKSVF

SEQ ID NO: 267436 - protein, 15 aa, Artificial Sequence
  Description of Artificial Sequence: Synthetic peptide
  Seed: SIGKVCRTLLAKSVF
SIIKVQRQLLKKSVF

SEQ ID NO: 267437 - protein, 15 aa, Artificial Sequence
  Description of Artificial Sequence: Synthetic peptide
  Seed: SIGKVCRTLLAKSVF
SIIKVQRQLLQKSVF

SEQ ID NO: 267438 - protein, 15 aa, Artificial Sequence
  Description of Artificial Sequence: Synthetic peptide
  Seed: SIGKVCRTLLAKSVF
SIIKVQRQLLRKSVF

SEQ ID NO: 267439 - protein, 15 aa, Artificial Sequence
  Description of Artificial Sequence: Synthetic peptide
  Seed: SIGKVCRTLLAKSVF
SIIKVQRQLLSKSVF

SEQ ID NO: 267440 - protein, 15 aa, Artificial Sequence
  Description of Artificial Sequence: Synthetic peptide
  Seed: SIGKVCRTLLAKSVF
SIIKVQRQLLTKSVF

SEQ ID NO: 267441 - protein, 15 aa, Artificial Sequence
  Description of Artificial Sequence: Synthetic peptide
  Seed: SIGKVCRTLLAKSVF
SIIKVQRQLLYKSVF

SEQ ID NO: 267442 - protein, 15 aa, Artificial Sequence
  Description of Artificial Sequence: Synthetic peptide
  Seed: SIGKVCRTLLAKSVF
SIIKVQRRLLAKSVF

SEQ ID NO: 267443 - protein, 15 aa, Artificial Sequence
  Description of Artificial Sequence: Synthetic peptide
  Seed: SIGKVCRTLLAKSVF
SIIKVQRRLLCKSVF

SEQ ID NO: 267444 - protein, 15 aa, Artificial Sequence
  Description of Artificial Sequence: Synthetic peptide
  Seed: SIGKVCRTLLAKSVF
SIIKVQRRLLDKSVF

SEQ ID NO: 267445 - protein, 15 aa, Artificial Sequence
  Description of Artificial Sequence: Synthetic peptide
  Seed: SIGKVCRTLLAKSVF
SIIKVQRRLLEKSVF

SEQ ID NO: 267446 - protein, 15 aa, Artificial Sequence
  Description of Artificial Sequence: Synthetic peptide
  Seed: SIGKVCRTLLAKSVF
SIIKVQRRLLFKSVF

SEQ ID NO: 267447 - protein, 15 aa, Artificial Sequence
  Description of Artificial Sequence: Synthetic peptide
  Seed: SIGKVCRTLLAKSVF
SIIKVQRRLLGKSVF

SEQ ID NO: 267448 - protein, 15 aa, Artificial Sequence
  Description of Artificial Sequence: Synthetic peptide
  Seed: SIGKVCRTLLAKSVF
SIIKVQRRLLHKSVF

SEQ ID NO: 267449 - protein, 15 aa, Artificial Sequence
  Description of Artificial Sequence: Synthetic peptide
  Seed: SIGKVCRTLLAKSVF
SIIKVQRRLLIKSVF

SEQ ID NO: 267450 - protein, 15 aa, Artificial Sequence
  Description of Artificial Sequence: Synthetic peptide
  Seed: SIGKVCRTLLAKSVF
SIIKVQRRLLKKSVF

SEQ ID NO: 267451 - protein, 15 aa, Artificial Sequence
  Description of Artificial Sequence: Synthetic peptide
  Seed: SIGKVCRTLLAKSVF
SIIKVQRRLLLKSVF

SEQ ID NO: 267452 - protein, 15 aa, Artificial Sequence
  Description of Artificial Sequence: Synthetic peptide
  Seed: SIGKVCRTLLAKSVF
SIIKVQRRLLMKSVF

SEQ ID NO: 267453 - protein, 15 aa, Artificial Sequence
  Description of Artificial Sequence: Synthetic peptide
  Seed: SIGKVCRTLLAKSVF
SIIKVQRRLLNKSVF

SEQ ID NO: 267454 - protein, 15 aa, Artificial Sequence
  Description of Artificial Sequence: Synthetic peptide
  Seed: SIGKVCRTLLAKSVF
SIIKVQRRLLPKSVF

SEQ ID NO: 267455 - protein, 15 aa, Artificial Sequence
  Description of Artificial Sequence: Synthetic peptide
  Seed: SIGKVCRTLLAKSVF
SIIKVQRRLLQKSVF

SEQ ID NO: 267456 - protein, 15 aa, Artificial Sequence
  Description of Artificial Sequence: Synthetic peptide
  Seed: SIGKVCRTLLAKSVF
SIIKVQRRLLRKSVF

SEQ ID NO: 267457 - protein, 15 aa, Artificial Sequence
  Description of Artificial Sequence: Synthetic peptide
  Seed: SIGKVCRTLLAKSVF
SIIKVQRRLLSKSVF

SEQ ID NO: 267458 - protein, 15 aa, Artificial Sequence
  Description of Artificial Sequence: Synthetic peptide
  Seed: SIGKVCRTLLAKSVF
SIIKVQRRLLTKSVF

SEQ ID NO: 267459 - protein, 15 aa, Artificial Sequence
  Description of Artificial Sequence: Synthetic peptide
  Seed: SIGKVCRTLLAKSVF
SIIKVQRRLLVKSVF

SEQ ID NO: 267460 - protein, 15 aa, Artificial Sequence
  Description of Artificial Sequence: Synthetic peptide
  Seed: SIGKVCRTLLAKSVF
SIIKVQRRLLWKSVF

SEQ ID NO: 267461 - protein, 15 aa, Artificial Sequence
  Description of Artificial Sequence: Synthetic peptide
  Seed: SIGKVCRTLLAKSVF
SIIKVQRRLLYKSVF

SEQ ID NO: 267462 - protein, 15 aa, Artificial Sequence
  Description of Artificial Sequence: Synthetic peptide
  Seed: SIGKVCRTLLAKSVF
SIIKVQRSLLAKSVF

SEQ ID NO: 267463 - protein, 15 aa, Artificial Sequence
  Description of Artificial Sequence: Synthetic peptide
  Seed: SIGKVCRTLLAKSVF
SIIKVQRSLLDKSVF

SEQ ID NO: 267464 - protein, 15 aa, Artificial Sequence
  Description of Artificial Sequence: Synthetic peptide
  Seed: SIGKVCRTLLAKSVF
SIIKVQRSLLFKSVF

SEQ ID NO: 267465 - protein, 15 aa, Artificial Sequence
  Description of Artificial Sequence: Synthetic peptide
  Seed: SIGKVCRTLLAKSVF
SIIKVQRSLLGKSVF

SEQ ID NO: 267466 - protein, 15 aa, Artificial Sequence
  Description of Artificial Sequence: Synthetic peptide
  Seed: SIGKVCRTLLAKSVF
SIIKVQRSLLHKSVF

SEQ ID NO: 267467 - protein, 15 aa, Artificial Sequence
  Description of Artificial Sequence: Synthetic peptide
  Seed: SIGKVCRTLLAKSVF
SIIKVQRSLLIKSVF

SEQ ID NO: 267468 - protein, 15 aa, Artificial Sequence
  Description of Artificial Sequence: Synthetic peptide
  Seed: SIGKVCRTLLAKSVF
SIIKVQRSLLKKSVF

SEQ ID NO: 267469 - protein, 15 aa, Artificial Sequence
  Description of Artificial Sequence: Synthetic peptide
  Seed: SIGKVCRTLLAKSVF
SIIKVQRSLLLKSVF

SEQ ID NO: 267470 - protein, 15 aa, Artificial Sequence
  Description of Artificial Sequence: Synthetic peptide
  Seed: SIGKVCRTLLAKSVF
SIIKVQRSLLMKSVF

SEQ ID NO: 267471 - protein, 15 aa, Artificial Sequence
  Description of Artificial Sequence: Synthetic peptide
  Seed: SIGKVCRTLLAKSVF
SIIKVQRSLLNKSVF

SEQ ID NO: 267472 - protein, 15 aa, Artificial Sequence
  Description of Artificial Sequence: Synthetic peptide
  Seed: SIGKVCRTLLAKSVF
SIIKVQRSLLPKSVF

SEQ ID NO: 267473 - protein, 15 aa, Artificial Sequence
  Description of Artificial Sequence: Synthetic peptide
  Seed: SIGKVCRTLLAKSVF
SIIKVQRSLLQKSVF

SEQ ID NO: 267474 - protein, 15 aa, Artificial Sequence
  Description of Artificial Sequence: Synthetic peptide
  Seed: SIGKVCRTLLAKSVF
SIIKVQRSLLRKSVF

SEQ ID NO: 267475 - protein, 15 aa, Artificial Sequence
  Description of Artificial Sequence: Synthetic peptide
  Seed: SIGKVCRTLLAKSVF
SIIKVQRSLLSKSVF

SEQ ID NO: 267476 - protein, 15 aa, Artificial Sequence
  Description of Artificial Sequence: Synthetic peptide
  Seed: SIGKVCRTLLAKSVF
SIIKVQRSLLTKSVF

SEQ ID NO: 267477 - protein, 15 aa, Artificial Sequence
  Description of Artificial Sequence: Synthetic peptide
  Seed: SIGKVCRTLLAKSVF
SIIKVQRSLLVKSVF

SEQ ID NO: 267478 - protein, 15 aa, Artificial Sequence
  Description of Artificial Sequence: Synthetic peptide
  Seed: SIGKVCRTLLAKSVF
SIIKVQRSLLYKSVF

SEQ ID NO: 267479 - protein, 15 aa, Artificial Sequence
  Description of Artificial Sequence: Synthetic peptide
  Seed: SIGKVCRTLLAKSVF
SIIKVQRTLLAKSVF

SEQ ID NO: 267480 - protein, 15 aa, Artificial Sequence
  Description of Artificial Sequence: Synthetic peptide
  Seed: SIGKVCRTLLAKSVF
SIIKVQRTLLGKSVF

SEQ ID NO: 267481 - protein, 15 aa, Artificial Sequence
  Description of Artificial Sequence: Synthetic peptide
  Seed: SIGKVCRTLLAKSVF
SIIKVQRTLLHKSVF

SEQ ID NO: 267482 - protein, 15 aa, Artificial Sequence
  Description of Artificial Sequence: Synthetic peptide
  Seed: SIGKVCRTLLAKSVF
SIIKVQRTLLIKSVF

SEQ ID NO: 267483 - protein, 15 aa, Artificial Sequence
  Description of Artificial Sequence: Synthetic peptide
  Seed: SIGKVCRTLLAKSVF
SIIKVQRTLLKKSVF

SEQ ID NO: 267484 - protein, 15 aa, Artificial Sequence
  Description of Artificial Sequence: Synthetic peptide
  Seed: SIGKVCRTLLAKSVF
SIIKVQRTLLLKSVF

SEQ ID NO: 267485 - protein, 15 aa, Artificial Sequence
  Description of Artificial Sequence: Synthetic peptide
  Seed: SIGKVCRTLLAKSVF
SIIKVQRTLLMKSVF

SEQ ID NO: 267486 - protein, 15 aa, Artificial Sequence
  Description of Artificial Sequence: Synthetic peptide
  Seed: SIGKVCRTLLAKSVF
SIIKVQRTLLNKSVF

SEQ ID NO: 267487 - protein, 15 aa, Artificial Sequence
  Description of Artificial Sequence: Synthetic peptide
  Seed: SIGKVCRTLLAKSVF
SIIKVQRTLLPKSVF

SEQ ID NO: 267488 - protein, 15 aa, Artificial Sequence
  Description of Artificial Sequence: Synthetic peptide
  Seed: SIGKVCRTLLAKSVF
SIIKVQRTLLQKSVF

SEQ ID NO: 267489 - protein, 15 aa, Artificial Sequence
  Description of Artificial Sequence: Synthetic peptide
  Seed: SIGKVCRTLLAKSVF
SIIKVQRTLLRKSVF

SEQ ID NO: 267490 - protein, 15 aa, Artificial Sequence
  Description of Artificial Sequence: Synthetic peptide
  Seed: SIGKVCRTLLAKSVF
SIIKVQRTLLSKSVF

SEQ ID NO: 267491 - protein, 15 aa, Artificial Sequence
  Description of Artificial Sequence: Synthetic peptide
  Seed: SIGKVCRTLLAKSVF
SIIKVQRTLLTKSVF

SEQ ID NO: 267492 - protein, 15 aa, Artificial Sequence
  Description of Artificial Sequence: Synthetic peptide
  Seed: SIGKVCRTLLAKSVF
SIIKVQRTLLVKSVF

SEQ ID NO: 267493 - protein, 15 aa, Artificial Sequence
  Description of Artificial Sequence: Synthetic peptide
  Seed: SIGKVCRTLLAKSVF
SIIKVQRTLLYKSVF

SEQ ID NO: 267494 - protein, 15 aa, Artificial Sequence
  Description of Artificial Sequence: Synthetic peptide
  Seed: SIGKVCRTLLAKSVF
SIIKVQRVLLAKSVF

SEQ ID NO: 267495 - protein, 15 aa, Artificial Sequence
  Description of Artificial Sequence: Synthetic peptide
  Seed: SIGKVCRTLLAKSVF
SIIKVQRVLLGKSVF

SEQ ID NO: 267496 - protein, 15 aa, Artificial Sequence
  Description of Artificial Sequence: Synthetic peptide
  Seed: SIGKVCRTLLAKSVF
SIIKVQRVLLHKSVF

SEQ ID NO: 267497 - protein, 15 aa, Artificial Sequence
  Description of Artificial Sequence: Synthetic peptide
  Seed: SIGKVCRTLLAKSVF
SIIKVQRVLLKKSVF

SEQ ID NO: 267498 - protein, 15 aa, Artificial Sequence
  Description of Artificial Sequence: Synthetic peptide
  Seed: SIGKVCRTLLAKSVF
SIIKVQRVLLNKSVF

SEQ ID NO: 267499 - protein, 15 aa, Artificial Sequence
  Description of Artificial Sequence: Synthetic peptide
  Seed: SIGKVCRTLLAKSVF
SIIKVQRVLLQKSVF

SEQ ID NO: 267500 - protein, 15 aa, Artificial Sequence
  Description of Artificial Sequence: Synthetic peptide
  Seed: SIGKVCRTLLAKSVF
SIIKVQRVLLRKSVF

SEQ ID NO: 267501 - protein, 15 aa, Artificial Sequence
  Description of Artificial Sequence: Synthetic peptide
  Seed: SIGKVCRTLLAKSVF
SIIKVQRVLLSKSVF

SEQ ID NO: 267502 - protein, 15 aa, Artificial Sequence
  Description of Artificial Sequence: Synthetic peptide
  Seed: SIGKVCRTLLAKSVF
SIIKVRRALLAKSVF

SEQ ID NO: 267503 - protein, 15 aa, Artificial Sequence
  Description of Artificial Sequence: Synthetic peptide
  Seed: SIGKVCRTLLAKSVF
SIIKVRRALLDKSVF

SEQ ID NO: 267504 - protein, 15 aa, Artificial Sequence
  Description of Artificial Sequence: Synthetic peptide
  Seed: SIGKVCRTLLAKSVF
SIIKVRRALLEKSVF

SEQ ID NO: 267505 - protein, 15 aa, Artificial Sequence
  Description of Artificial Sequence: Synthetic peptide
  Seed: SIGKVCRTLLAKSVF
SIIKVRRALLGKSVF

SEQ ID NO: 267506 - protein, 15 aa, Artificial Sequence
  Description of Artificial Sequence: Synthetic peptide
  Seed: SIGKVCRTLLAKSVF
SIIKVRRALLHKSVF

SEQ ID NO: 267507 - protein, 15 aa, Artificial Sequence
  Description of Artificial Sequence: Synthetic peptide
  Seed: SIGKVCRTLLAKSVF
SIIKVRRALLKKSVF

SEQ ID NO: 267508 - protein, 15 aa, Artificial Sequence
  Description of Artificial Sequence: Synthetic peptide
  Seed: SIGKVCRTLLAKSVF
SIIKVRRALLNKSVF

SEQ ID NO: 267509 - protein, 15 aa, Artificial Sequence
  Description of Artificial Sequence: Synthetic peptide
  Seed: SIGKVCRTLLAKSVF
SIIKVRRALLPKSVF

SEQ ID NO: 267510 - protein, 15 aa, Artificial Sequence
  Description of Artificial Sequence: Synthetic peptide
  Seed: SIGKVCRTLLAKSVF
SIIKVRRALLQKSVF

SEQ ID NO: 267511 - protein, 15 aa, Artificial Sequence
  Description of Artificial Sequence: Synthetic peptide
  Seed: SIGKVCRTLLAKSVF
SIIKVRRALLRKSVF

SEQ ID NO: 267512 - protein, 15 aa, Artificial Sequence
  Description of Artificial Sequence: Synthetic peptide
  Seed: SIGKVCRTLLAKSVF
SIIKVRRALLSKSVF

SEQ ID NO: 267513 - protein, 15 aa, Artificial Sequence
  Description of Artificial Sequence: Synthetic peptide
  Seed: SIGKVCRTLLAKSVF
SIIKVRRALLTKSVF

SEQ ID NO: 267514 - protein, 15 aa, Artificial Sequence
  Description of Artificial Sequence: Synthetic peptide
  Seed: SIGKVCRTLLAKSVF
SIIKVRRALLVKSVF

SEQ ID NO: 267515 - protein, 15 aa, Artificial Sequence
  Description of Artificial Sequence: Synthetic peptide
  Seed: SIGKVCRTLLAKSVF
SIIKVRRALLYKSVF

SEQ ID NO: 267516 - protein, 15 aa, Artificial Sequence
  Description of Artificial Sequence: Synthetic peptide
  Seed: SIGKVCRTLLAKSVF
SIIKVRRCLLQKSVF

SEQ ID NO: 267517 - protein, 15 aa, Artificial Sequence
  Description of Artificial Sequence: Synthetic peptide
  Seed: SIGKVCRTLLAKSVF
SIIKVRRELLAKSVF

SEQ ID NO: 267518 - protein, 15 aa, Artificial Sequence
  Description of Artificial Sequence: Synthetic peptide
  Seed: SIGKVCRTLLAKSVF
SIIKVRRELLQKSVF
